United States Patent Application Publication US 2013/0129668 A1 - sequence listing, part 11

SEQ ID NO: 171462 - DNA, 122 bp, Homo sapiens
aacttcaggtccctgcaactcagcccccaccacaaacacagccctggaaacatacagtggcgcaaggtcctcttgaaatgttaatggttaatgttcccaaaccagagaatgctttgaaaatg

SEQ ID NO: 171463 - DNA, 122 bp, Homo sapiens
aacatcacttatcttattactccagattacagacagctgccacagacaataaaataaaatcgcaattaagttgattgcagtacttgaaagaaaacttattaaaaataaagatttttaataaa

SEQ ID NO: 171464 - DNA, 122 bp, Homo sapiens
ctcaagcaatcctcctgccttggcctccccaagtgctggggttacaggcgtgagccactgcgccggcccaggataagtcttttggtaacaaatcgtgcatgttttcagacaatgaaacctca

SEQ ID NO: 171465 - DNA, 122 bp, Homo sapiens
ccacggttgcacctgccgaagcggttgtagtacatgcagtactccttcctcttctccctgcgctgccgcgcctgccggatgatggccaggctgcgctgcactgcccggctgcagacggggag

SEQ ID NO: 171466 - DNA, 122 bp, Homo sapiens
cccggctccaacctctgagcccgccggccctggctctaacgtctgtgctcaccgggctcacgggtggacactggctgccagtgaaggccctccccaaggtcaggttttacaacttgtccggg

SEQ ID NO: 171467 - DNA, 122 bp, Homo sapiens
ctgccacgggccctgcaggaaaacgtctgtttccaaggcggacggagcatctggaagctccgagcagccacgcgcttatgctcaggcctcagccaagtgtcaccggggccctgggggcacca

SEQ ID NO: 171468 - DNA, 122 bp, Homo sapiens
ctgccccttctctccacccggtggcacagagcactcccccaggctgtgctcccgagagcccgtggctcctcaagaagttctgtactcactgcaagaggccagagaggactgttcctggagat

SEQ ID NO: 171469 - DNA, 122 bp, Homo sapiens
acagggaggcactgggctagagggcggtgaggatcacagctgcagggaagaggcacttcccggtgacaaaacttccaggagtctctcccaacaggcctctgggacgcctcctgctctcccgc

SEQ ID NO: 171470 - DNA, 122 bp, Homo sapiens
ggtgcaggtgtgggtaccgttttgggtgggagccgggcgctgtgggtgcaggttccacctcggagctgggtgctgtgggcacaggtgcgggtgccatcttgggtgggagccaggcactgtgg

SEQ ID NO: 171471 - DNA, 122 bp, Homo sapiens
cgccgggccccccagccccggctcgtggcgcccccgccgggcccgcccgctactgcgggacgcccgcctgccagctgcccgcccgctgccgtcgctactcccgcctcctcccgccatcgtgt

SEQ ID NO: 171472 - DNA, 122 bp, Homo sapiens
atttgtctttggaaaagtcactcatgattctttgggctttggtttcctcatcttttataccggcttaataatgaccaccgtagagttgtcatggaagttaaatgaactcatgtaccataagt

SEQ ID NO: 171473 - DNA, 122 bp, Homo sapiens
ctgtggtcaggtgggcgagcagaggtcagtggccccaggtccctggaacgcctcttctcacggccactccacgggtgcctggccctgcggccacgcggagctatccttggctccagcctcaa

SEQ ID NO: 171474 - DNA, 122 bp, Homo sapiens
caagctcctgggactgtgcaaataaatagatggtaagctcacagtttcgtgagccaagagcgaggatctgaagtcatcactaggcatctcttcgaggatctctacaggcctggagcagtctg

SEQ ID NO: 171475 - DNA, 122 bp, Homo sapiens
cagaaagggaactccctgaccccttgcgcttcccaagtgaggcaatgcctcgccctgcttcggctcgcacacggtgcgtgcacccactgacctgagcccactgtctggcactccctagtgag

SEQ ID NO: 171476 - DNA, 122 bp, Homo sapiens
agaaaaccaaagaaatctcaaatttgattaaatttggggaataagagaaatgaaaaggcccgtaagtgctaaaattgaaatatacgtttagtaaaactcctggtaaagtaaatgaaggtttt

SEQ ID NO: 171477 - DNA, 122 bp, Homo sapiens
tctctcccctacacactcatttactcctcacaacaaacctagaagatatataagggaatgcgttattatctcacttcacagacaaggggtctgaggccaaggcagcccagtgacgtggacac

SEQ ID NO: 171478 - DNA, 122 bp, Homo sapiens
gtggggaacgcgaggctttgcattgtcccctcgtggtcggaggagtgccctacaggctggcggctaggttgcgacttggacaaatcggcggaggcgagcgtcacccgactccgcgggccctg

SEQ ID NO: 171479 - DNA, 122 bp, Homo sapiens
tcaaatccctgttacagacacgctttgtgccagataactctttactctgcctctcccacccgggcaccatcccctgacccatgtgtggccacccagcctgcccttctagcctcctcacctca

SEQ ID NO: 171480 - DNA, 122 bp, Homo sapiens
atgggtaagtggcaggcatttgtttttccggattctctcgttgccttgcgaatttgtttccgtccgaggcagccatgcctcattgcatagccgaaggtccgccggcgtttctagatctttaa

SEQ ID NO: 171481 - DNA, 122 bp, Homo sapiens
ccccgcgcggcagcagcccctcgcggcggcctccggaacccccgagaccggcccccgggccgcaaccccttacccgccctcctcggtggcctcgctccggcttaaagcggtcatcccggcgc

SEQ ID NO: 171482 - DNA, 122 bp, Homo sapiens
agggtgaggtgagagggctgagctggcccagccgcctgggggatttcatcaaaagggaaccgggactttgggcaggggcaggaaaccaccatcctgcaagagttccggcttctcctccaggc

SEQ ID NO: 171483 - DNA, 122 bp, Homo sapiens
aactcactatagacccgaaacggcactcacggggcgacagacctgctagctgactgcccgcgtctactgccttcccacggtgttccagcagaacggcacaactaacccacagccaaacacac

SEQ ID NO: 171484 - DNA, 122 bp, Homo sapiens
atgatttttttttttttttgagatggaattcgctgtttcgcccaggctggagtgaagtggcgcgatgtgggctcactgcaacctccgcccccagggttcaagggattctcctgcctcagcca

SEQ ID NO: 171485 - DNA, 122 bp, Homo sapiens
gcgtcgagccgtcgggggccgagctcagcagctcttgcaggtactttatgtagcggatggcggcgcgcagcgtctccaccttgctgagtcgcttctcagccagggcgccggggaggtggccg

SEQ ID NO: 171486 - DNA, 122 bp, Homo sapiens
ctgctgctacagcctgtcttcctccccatgatactcttattgatcagtagtcactgaccacgcagagaaggacaggttatttcatttattgctgaatgatatgatcagtgagtttaagaagt

SEQ ID NO: 171487 - DNA, 122 bp, Homo sapiens
caagaggaaattgaccaagtagtggcaagaccactctatgggcagacaatggcttctaagcggaagctctctggaatctgttcaaatgaaaaaaataagggattgatttttaaataggcaca

SEQ ID NO: 171488 - DNA, 122 bp, Homo sapiens
aatgtctctatattaaattataaaccacaaggtaccatggagacagtatcaagttatcttcgattaacaccattcaacatttgattcctacactaattcctcttgctttgtgttcctcctca

SEQ ID NO: 171489 - DNA, 122 bp, Homo sapiens
tctgtccccaaggctggccctgcgcacagacgcagcacggcacagcccactgggcttgaacgcgggtcacgccacggctgggatcctccacgtgcatgagctcccgcatctgtaaagtgggg

SEQ ID NO: 171490 - DNA, 122 bp, Homo sapiens
agcctcactctgaccacagctgccgtctgccgtccccagcttccatcggctcctccctcgcgtccctccacctggcgagctctccgcctggcgcaccccctctgcctgctgtgctccctctg

SEQ ID NO: 171491 - DNA, 122 bp, Homo sapiens
ttgctcattccttcctcaccatctgcggatctccccggctccgtgtcccctgccatgccccgcgccccactcaccggccaaagcgcccacggcacagagcagggccagcccggccagcgcgc

SEQ ID NO: 171492 - DNA, 122 bp, Homo sapiens
cgaatgcagcaacctcatttagccacagcccacaaaataaaagagggcacaagagatgcccgacacgaaggagaaagacaaggaagccccagtgttctcatctggcctcgggtgagcggtgc

SEQ ID NO: 171493 - DNA, 122 bp, Homo sapiens
cagctctaacccaccaggcattgaggctctggtcctacacactgggcatagagatgaacacgcctgaagagccggcttctcctaggagacgcatctcttagcatctctaacctgctgagatt

SEQ ID NO: 171494 - DNA, 122 bp, Homo sapiens
ctggtgttttctgtctgcagaccggaccttatgctgatgcaacgtttgtacctgagactacggaagacaaacacacatttacatagatagtggtgagctgttgaaggtttctgaggaaaaaa

SEQ ID NO: 171495 - DNA, 122 bp, Homo sapiens
tatatgctgttactttcctcctaccagcatgttaacacctggaaagtagatggctacgttcggttcactgctttttgagatggctaaaagcaacatgataaaggatcctcagtttccctgtt

SEQ ID NO: 171496 - DNA, 122 bp, Homo sapiens
ctggacagcacatgcgcagtatgctgctagcgccgccccaggcgcccggagctcaggaagcgcaggtggcgctgccagaagggccatgctatttctggggcaaacctgaaagacctcagaca

SEQ ID NO: 171497 - DNA, 122 bp, Homo sapiens
ccgtgccccgccctccccgcgccgccttccacctccggccgcgcgggggcgctccccggccggctctgtcgcttccgccgccgccccgcccacccgggctcacccctcgtcccgattggctg

SEQ ID NO: 171498 - DNA, 122 bp, Homo sapiens
tgcctgcccggatccagtgctaatttacacagaagacctggcccaaagccttgcgcatcccgggtgaacagtgagcatcggcgagaccccctgtgggcctgctgtgcggtgagagctcagca

SEQ ID NO: 171499 - DNA, 122 bp, Homo sapiens
taattcaggatcccatccccacccgaggcaggacacccagtgcacgccccaactccgggacgcgggctctgaccctggaacttccgagattcccgcgacgccccctgtctctgggtccagaa

SEQ ID NO: 171500 - DNA, 122 bp, Homo sapiens
aagcactttcgtgggatggagggacgattggggagcgcccgaggctgctgtgttggcgcccgcccccgagggctgggagtcaagaggtgggagtggagaggggaggagagggcagagctcct

SEQ ID NO: 171501 - DNA, 122 bp, Homo sapiens
ccaagagcgagaaaacctccagggcttcatacagcccggtcctcacctctgccagccacacgcagcagtggagcggagccctcgagtcccctaacgatctggcctccatgaccacctgggag

SEQ ID NO: 171502 - DNA, 122 bp, Homo sapiens
ccacacgggggcttcgccttctctgggatccgcggtgggcctgcgttggagggctgagaacggctcgccctttccgagctagcactctgcccactttctcttcacgccccgtcctggtgagg

SEQ ID NO: 171503 - DNA, 122 bp, Homo sapiens
tgtctagctccaggctcagacgtggtgtctgctcttcctggctggggtccgggagtcccccggggagtgggcactgccggccgtcgtagagcagctttggccagggacggttggtcactgct

SEQ ID NO: 171504 - DNA, 122 bp, Homo sapiens
agggttcccggaagcgctagccagccggagtaaaacccgaaagatggagcctcaggttcgcgctctgcgttgcgggtgctggaaccgagattcaaaaagagcttccggaggtagtttctacg

SEQ ID NO: 171505 - DNA, 122 bp, Homo sapiens
gacatttcgccggtgtctccggagggggctgaatttcactttgtaactttctgcggaacccgagcccgggtggcagctcgggtggtggtatcgtatgcaaatacgcatgctgacgttacaga

SEQ ID NO: 171506 - DNA, 122 bp, Homo sapiens
tgaggcaggctgtgtaacccacgcacagcagggaggaaggccactccacctcccagggaacgtagtgaattgcctgtaaaattagcagtattgaaaaaccaaaaactcgttcactaagagag

SEQ ID NO: 171507 - DNA, 122 bp, Homo sapiens
cctgctttcgtccctttctggacggtggagaagctgcctggagattgcgagcgctctggccgatggggggctagcgttgagcgtgtgtgcgcgcatgcgggctgcagatcctcccttttcca

SEQ ID NO: 171508 - DNA, 122 bp, Homo sapiens
cctgcgcacgcgcacgcgcggggttggggcggggcccaagcccctgagttctgcggcgcccgcggctacgcgtaccgtaaatgtcagaatagcagggaaaagagaattagaggcccgtcccc

SEQ ID NO: 171509 - DNA, 122 bp, Homo sapiens
ttaggtttcctgcttgccggcaagagccgcagagccaggatctgaggaaaggaaggccatcgggacacccagtcatggctgccctggaggcttcctttgcatcttaaaatggagatgcccca

SEQ ID NO: 171510 - DNA, 122 bp, Homo sapiens
atggggaccgagaccagcacggacggtagcaacagagaggggagcgcccaagtggcgcaacgttgtggctgaagccaagcctgtcgcctccccctgagtaccgctggcggcccaggaccgtg

SEQ ID NO: 171511 - DNA, 122 bp, Homo sapiens
tgccgcggacactgtgcccggctttagtaggtgcctcggacactgtgcccggctttagtacgtgcctcggacactgtgcccggctttagtaggtgcctcggacactgtgcccggctttagta

SEQ ID NO: 171512 - DNA, 122 bp, Homo sapiens
gcatgctggcctcggctatctctgccaatactttattacacaagccagagtcaccttcatcggaagacttgagaacttggcttctctatcccacgaatgttatgcagtcatcttcccagcat

SEQ ID NO: 171513 - DNA, 122 bp, Homo sapiens
agtcactccccagcagcactctggggaataagtgttggagccacagcacgtaccctatggcgcaagaccgctgattagaacagaggggaaaggggatgaggaaagaagtttcttcagcgccc

SEQ ID NO: 171514 - DNA, 122 bp, Homo sapiens
gagagataccctgatgaccttgattagaactggatggtcactaaggttctatcagcagtacgtttgcaaaccatctcttagggtgggtattaatctaatctgttatatagcaagagtcatgg

SEQ ID NO: 171515 - DNA, 122 bp, Homo sapiens
gtgcccagtcaatggctgttccaaattagggtctacccatctctatgcagggctaaagtccgcgggcggccccgcaccgctaccaaaagtacagtcctgtgcgcccagacgcgacgcaaaca

SEQ ID NO: 171516 - DNA, 122 bp, Homo sapiens
ctgattgctttacacatcactgagctgtttagaaggcccttcacattttgggtgaatgaacggatttgagcaatcacacttcaaagttgctttttccatctaggcccttgaactgacattcc

SEQ ID NO: 171517 - DNA, 122 bp, Homo sapiens
aacacaacctgtagctccagcttctgtgtgctgggatgggtgatcgggccttctgggtgacgcaggtgtgtgtgacagcacaacctgtagttccagcgtctctgtgctgagatgggtgatcg

SEQ ID NO: 171518 - DNA, 122 bp, Homo sapiens
ttttctatccgtgtgccaagctaataagctgagcgcaacagactgcatcgcgcaggccaccgcggctccgccctcgcactgcgctcttcctcctcccgcgcctaccgcgtccctcctcccac

SEQ ID NO: 171519 - DNA, 122 bp, Homo sapiens
cctcctgctctggagtatctgttgctgctttctaaaaccgtgagcttacccaggaggagtcgtggggggagggggtgtcttggttagtttctgcgggaagattcgcgttttgaaccgtgtcg

SEQ ID NO: 171520 - DNA, 122 bp, Homo sapiens
tggaatgaatcaatgtgtgaatgaaggaagtcacattggcagcagtggcggggagggtaccgtttggggacaattcagatcattctgaggagacatgctgaggcctgctctaagacagcagc

SEQ ID NO: 171521 - DNA, 122 bp, Homo sapiens
gggctgagatgacaggggtgagaacgtgccgacaagtgtcctctgccggggtctgggccgcggctcgccgccgaagagagagaccgaggcctggaccgcgggtcggcggggaggttgggccc

SEQ ID NO: 171522 - DNA, 122 bp, Homo sapiens
ctgtggctggagaggttggggtggctggggtcgcagggggcacagaccgccgggggttgacggtgaaggtgtgtccactgcggcggggggcccccacccctggccctgccttcaccccatag

SEQ ID NO: 171523 - DNA, 122 bp, Homo sapiens
ttaacggctaggggatgggggtatgcggaacagaacacagtggtctagctaaccgatttccgctagacgtccagctatctttcaaaatattttgtttctgcacggcaacttcagccgctaaa

SEQ ID NO: 171524 - DNA, 122 bp, Homo sapiens
cccaacgttgtgcatacggtctggggtggccagtgcattagggcagcgctgcgtctttcccggttgactgggagagacattccaaactccagtgcgcttccaacgtgctgcaaccctgcctg

SEQ ID NO: 171525 - DNA, 122 bp, Homo sapiens
gagggcgggtgcagctgatgcacctggctcactgcatgcacgtgtgcgcgggggtaggcgcgcgccgcggcggcccgtgctccgccagcgctcggacacggcccatccctccgagccccagc

SEQ ID NO: 171526 - DNA, 122 bp, Homo sapiens
tgcctgaggtcctgtgaatcctgcctgcaaatgtgcctggggcccctgcggggcccacctcgcacccgcggcccacgtcgcacccgcggcccacctcgcacccactgctcagatacatctca

SEQ ID NO: 171527 - DNA, 122 bp, Homo sapiens
atttatggctagaagaactcgtatgtacactttagtttccagaactgtttggtaacctttcgtaccttattaaagattcttaaatctccgtgattgtggtaggaatttcttcttcacccacc

SEQ ID NO: 171528 - DNA, 122 bp, Homo sapiens
ggaggctcagccgccttcctcccgagctcgcgcggtcctcaagtcttgatggtgacgggccgaagcccagcgcgccacccgcccctcgggccccgcttccaggcccctgtcctttgcttcct

SEQ ID NO: 171529 - DNA, 122 bp, Homo sapiens
aggctcacgaatgttccagctgggaagggcgtgtccaccgtgccttccatactgttctcccggaaggccactgcatgagcgggtggctacctccagggctacttggagaccattgcgctggg

SEQ ID NO: 171530 - DNA, 122 bp, Homo sapiens
gattcctgcttgctctagtacaggcgtgctctcactttaagaaagcctgatgccgctgggcgaggtggctcacgcctgtaatcccagtactttaggagacccaggcgggcagattgcctgag

SEQ ID NO: 171531 - DNA, 122 bp, Homo sapiens
tatttatttatgacaaatattccacatccgtgattctctctagtcaaaacttctttgagacgatgctgtcggccttggccaatcggagaatcgaatcatctgactcacccatcctatcgccc

SEQ ID NO: 171532 - DNA, 122 bp, Homo sapiens
tcagcgaaaggtaaccaggtcaccctcctttcaagggtgcaaagggatgctccaagctctcgcgtccccatgagcctgcggatgtggggactgcgggtgggcagagagaccccccataatcc

SEQ ID NO: 171533 - DNA, 122 bp, Homo sapiens
gtgcgcgggcgcgggcgcgggcgcgcagccgagcgtggccggcggcttctggcgagcttgcggtgtctttccggccgtctctgctggaccctgatcttggccttggccttggcggaggagac

SEQ ID NO: 171534 - DNA, 122 bp, Homo sapiens
ggggctcacctgctgaactctgagggtctcacgctccaaagtggcggccgctgttcgtggcgcctggcaaccgcctttgtgacccaggacggcagggcagcccgagccgcggcggggatggg

SEQ ID NO: 171535 - DNA, 122 bp, Homo sapiens
ggcgccagggcaggcgggcggctggcagctgtggcgccgacatggctgcgctggtggagccgctggggctggagcggggtaagcgtgcgccagggggccctgcccacccgggccgcggccta

SEQ ID NO: 171536 - DNA, 122 bp, Homo sapiens
agccggacacaagccctcccaccctgacaactctctgcccaccttgacctgcccaagtcgcgcggggacccgccctccccaccgcattcccatgcgtcccctggggggtcggggtggagggg

SEQ ID NO: 171537 - DNA, 122 bp, Homo sapiens
cagcgaacactccggggactcgggagtgttgtcccaggtgtacgctgtgttttctggagacgtttctccagccacctgcacgatgacagctaagaccatccaggccgtggcccttccaggac

SEQ ID NO: 171538 - DNA, 122 bp, Homo sapiens
tggaatttggagtggggtttccagggcgagagaccctgtccagtgacatctgaggtcgtgcgaatatgcgaccttttgtgtgaccatggtcgcgttttatattctcgtggctgtttgattct

SEQ ID NO: 171539 - DNA, 122 bp, Homo sapiens
gtcaggggcctgacgtggtggctcacacctggaatcccagcactttgggaggccaaggcgcgtgaatcaggagttcagggccaacctggccaagatggtgaaaccctgtctctactaaaaat

SEQ ID NO: 171540 - DNA, 122 bp, Homo sapiens
tgtccctggcgtggatccgcaggtggcgcttgaggctggagcggcgctggaagctctggccgcagtgggagcacaggacatcggtcagtggcggcgcttcggccttactctcaggagcgcag

SEQ ID NO: 171541 - DNA, 122 bp, Homo sapiens
ccgcccgtattaaagatggtcgacctttttcccctccttttcctgcccccagactagaggcgggatgtagtctcttaggctaagagtgattggtcacaaggagactcggaagtgtctgatca

SEQ ID NO: 171542 - DNA, 122 bp, Homo sapiens
caccctaccccggcctcctctgtgaatcgttgcttccgaaccgccctcactttttgcatccgcagagcctccaagctcatggcctccttaggagcgaacccaaggaggacaccgcagggacc

SEQ ID NO: 171543 - DNA, 122 bp, Homo sapiens
aacacggactggcggggcaggcggcagagccttgcggcgctggacacattgaacactcagcgcccagcacaggggagggaggccctggagtccctgatcgcagcagacctggaccatcaagg

SEQ ID NO: 171544 - DNA, 122 bp, Homo sapiens
tttgcttttttaacagaaaaggtacaaaaaagaaaaaatgggagagatgttgccgaactccgtcccgcctgtgggctgtgggccgttagcaaagctgctagcatgaaatcgtcgagcaccgc

SEQ ID NO: 171545 - DNA, 122 bp, Homo sapiens
ggctcccttttctaacaggctccgctttggatgtctgagtttgggctgcacacttcctagcgtggagcggataggggcccctgtctttggccgtgctctgcaagggctatgcgcgtgggacg

SEQ ID NO: 171546 - DNA, 122 bp, Homo sapiens
gggtggctgcagctgaggaaggaaggcccctgggaagaagcctggggaagaagggggttccgccattaaggatcaattgcaaacacctctgagctctgggcaggtgggcggcagcagcccag

SEQ ID NO: 171547 - DNA, 122 bp, Homo sapiens
cctcctcattgtggggccggggccggcggctgccctagtgcggggcccgaggctggagtgcgcggcggacgccaagcctggtgcgaggggccgaggcggcctggggagccccgggaaacttt

SEQ ID NO: 171548 - DNA, 122 bp, Homo sapiens
gtattactttgaatattcttgggttgtgttggaatccttttgaggattgcttagaagcctcgttagtgtgggtccttcagcctggggctaatctggccccattgctgacacactaccctgct

SEQ ID NO: 171549 - DNA, 122 bp, Homo sapiens
tccaggacgcgcagggcgggctcccttctgtttgcaggggaattcccctaggacagtacgcgcctctcgccaggttttcaggactgacgggcggggcggtcgaggagggggaagagccgggt

SEQ ID NO: 171550 - DNA, 122 bp, Homo sapiens
gaagtgaaggcagctccaggcaccttgcccaactccttggagataaagttaacgtttgttcgcttgtctgaataaacaaagctagtctgatactcatctgatagtctcagttaagtcagtac

SEQ ID NO: 171551 - DNA, 122 bp, Homo sapiens
tctttgtcagtatgctgtatgtatgctgtatgtcagtgcagttgaatgactccttctgtgcgtcagaaatccaaagcagcagcagcagcaattagggaagatcgtcactttcactcaaggtt

SEQ ID NO: 171552 - DNA, 122 bp, Homo sapiens
ctcaaaattcagctccctcactaggcacattaaaagcgctcaatagccacatatgtgtagcggctaggatattggatgtgtggagaatatctcaattattgcagaaagttctgttggatggc

SEQ ID NO: 171553 - DNA, 122 bp, Homo sapiens
gaggggcagagccggcacttgactccgtgggatcccacgagacagacaccctttcctcaccgcccgagtgagcgccgcccctcacagagacctctttgcaccctgggccacgcggggcaggc

SEQ ID NO: 171554 - DNA, 122 bp, Homo sapiens
agggcgggcaggatcctgggagtgcagggcctgtgccagaaggctggagcgcagcctgtgcggtgacgctaactgcgcctctctggcttcctgggagaaaggtgggcggcaggccccgacac

SEQ ID NO: 171555 - DNA, 122 bp, Homo sapiens
tgctggagttgcggggcctgcctggggtagggcggggcaggacagcttggagatagggcccggaattgcgggcgtcactctgctcctgcgacctagccaggcgtgagggagtgacagcagcg

SEQ ID NO: 171556 - DNA, 122 bp, Homo sapiens
ggttccaaagagtaaaaacagagcccagattccagaagaattaggttacctttatgccagcggcagctgttccagatcaggaagggttgctatcttgcaataattgtgccccagcctgcctg

SEQ ID NO: 171557 - DNA, 122 bp, Homo sapiens
caaacgtctctcccaagctccatcttcatatcgccatttccctacttggactttcccactcggaagtcctcaaattgctttaaatgtagtctggcctcaagttaggttttcccactcagttc

SEQ ID NO: 171558 - DNA, 122 bp, Homo sapiens
catgatccacccgcctcggcctcccaaagtgctgggattacaggcgtgagccaccacgcccggcctaatatattggacatgcctggcactgaataaatcagtcacctggtaaacattgattc

SEQ ID NO: 171559 - DNA, 122 bp, Homo sapiens
agcggcacccacagagggcgcgcgggcagggcgcgaggcggcaggcccctctcttcctcccgaccctcgcaggctgagcacatcaaaaggcaggcttccttatgggtgctttcgttgaaatt

SEQ ID NO: 171560 - DNA, 122 bp, Homo sapiens
aattaaataatcaatgacatactgctttataaactgtaaagtgaatagtattttaatacacggtaaaaagcactacagcggtcacaaatgaaaacacagagctaatgcaggacaggcaatta

SEQ ID NO: 171561 - DNA, 122 bp, Homo sapiens
ggtggcggctgctgggaagacacggggaatggaacgggcctttgcttccgcagcacaaagcgtcacgaggtggggaggaggaaaggccggcgactatctacaccgccgcctgcagcttttac

SEQ ID NO: 171562 - DNA, 122 bp, Homo sapiens
tcttatctttttgcagtataatttttattgacccatgatctgttaacttctttcctcattcgatgtaaaaagatgatgacataaatgtctttcagagactttatatattttcaaatgcagaa

SEQ ID NO: 171563 - DNA, 122 bp, Homo sapiens
aggtcgggagtttgacaccagcctaatcaacatggagctgtgtttactgagtggggctttcgcaggctggagctaagaatttccagtatgcgtaacagccacagcccaaatatctgccagtg

SEQ ID NO: 171564 - DNA, 122 bp, Homo sapiens
ggggggcgaggagaggtcgcttcctgctgccgctgcctaggctggagctgctgcctcctacgccggcgctgggcctggccgcgcagctgtgccgggacaggcccgtggacaccgccccgccg

SEQ ID NO: 171565 - DNA, 122 bp, Homo sapiens
ccaagcccagccctgggccagggcctctgcgcgtgcgcgaccccgccccaccccaggccgcgcctgcgcacaaggggagggctccgctactctggccctcagggttgtgtagtttccggggc

SEQ ID NO: 171566 - DNA, 122 bp, Homo sapiens
ggtgcctatcaatggatgaatggatacagaacacgtggtatcttacgcaatggaatactccgcagccataaacaagaatgaaatcatgtcgtttgcaacaacatggatggaattgaaggctg

SEQ ID NO: 171567 - DNA, 122 bp, Homo sapiens
aatgcttcaggttacaactcaaagaggcacatccttttcccgcttagtgatggcctccatcggattgtattatgttgttatgtttcttccttctctgtcactagaatctatgttccaaatca

SEQ ID NO: 171568 - DNA, 122 bp, Homo sapiens
gacagcgtggtcttggccgcaagcatgcattagtttagctgcgacaggctaacttctgggcggctgatccttgttcagctttcctgttactggaacacatttatggctatctcgtggagatg

SEQ ID NO: 171569 - DNA, 122 bp, Homo sapiens
gagcgtggcggccagggcagtgcggccgcggagcctaggccaggggcctggcgctcagggcgtggggcgcgcggggagggagaggggtcggcccagcacagcgtccgggagcgctagggccg

SEQ ID NO: 171570 - DNA, 122 bp, Homo sapiens
ccagcccggccagagcacagtgcgttgcgggaggagagtggagacgcagcagggatcagtcgggggcttgcatgtctttgcaaagaatctgattattgtaaacatagtgagaaggcattgaa

SEQ ID NO: 171571 - DNA, 122 bp, Homo sapiens
gaccagccacgtcaccatggtggtggccgagctggagaagacgttgagcggctgccccgccgtggactccgtggtcagcctgctggacggcgtggtggagaagctcagcgtcctcaagagga

SEQ ID NO: 171572 - DNA, 122 bp, Homo sapiens
attatgtccttaatgaaaagcctggacgggctccaggcttggcctttcaggatttcagtgcgacttgcacattgccatagaaatcctaacttaccatgaagatgcaccgtggcgaagaaaca

SEQ ID NO: 171573 - DNA, 122 bp, Homo sapiens
gtggtcagtgcccggcacttagggctcatgccagcagaggcctgcctaggagcaagaccccgccccgactttgggggtcgtaaggccccgcccctgggcccgccccttctgcccccactggg

SEQ ID NO: 171574 - DNA, 122 bp, Homo sapiens
ctgagttccagacctcttgttttggtggctcttctatgccatctctatcacaataccttgcgcactgtgtgtgctgaaataggtctaatgcttaaggggagataatagacagtaaacaggta

SEQ ID NO: 171575 - DNA, 122 bp, Homo sapiens
tcctgctgcagactaaaggtctggccaatgtcttgccccaccccgccagccgcgatacggcgcagttcctatattcatgttatttattgtgtactgactccatctgccccgtcaaataaaaa

SEQ ID NO: 171576 - DNA, 122 bp, Homo sapiens
gccgttttggggtagtgtccgggcacttagactgctgcaagccgtctttggccaggcagccgccaacagccccgcttccggccacagctgtcgcctcggccgccatggcgcgggctcgaccg

SEQ ID NO: 171577 - DNA, 122 bp, Homo sapiens
ggggagtaaaaggaaacttgcagaaaacacatcattaggaccctattgccaaacagccaccgtgcagtccatcccagggtccgcccctctcccagcccgcttgcaatggtcccccaatccca

SEQ ID NO: 171578 - DNA, 122 bp, Homo sapiens
gaagattggtctggatgtgggtccggtcttacagtcgcgggccaggatgagggcaggttgcgacagcgcgcacccggataccttcagcggcgttaagcccggcgggggcggggaaaccgagc

SEQ ID NO: 171579 - DNA, 122 bp, Homo sapiens
atccttatccagagcaaattccgaagttactatgaacaaaaaaaattccagcagagccgacgggctgctgtgctcatccaaaagtactaccgaagttataagaaatgtggcaaaagacggca

SEQ ID NO: 171580 - DNA, 122 bp, Homo sapiens
agattctcctggcctttcctgggtcccgcgttcagactacctttgggttccccagcctctcggtggctgctggctggtgcgccaaggtttgaggtatactgaaaaaagtcattcctttcccc

SEQ ID NO: 171581 - DNA, 122 bp, Homo sapiens
cgcgggcacgaggttgggggtagcgtctacctggagctcttgagtgcttgaggggagacccgccccgtcccgctctgtacatgcccatctgggattggcccccagctgcggtgccagaggct

SEQ ID NO: 171582 - DNA, 122 bp, Homo sapiens
cattccctaaacggggagggcctcgtccgcgcgtcccagcgccctccccggaagccccgccgctcccacacccaggatggggccacatgggcactaaaaggcgggcaggagcgcccagtctc

SEQ ID NO: 171583 - DNA, 122 bp, Homo sapiens
tggatgcagcactgggcgcgcgcgcagtccacagtcaccacgggctggcagcgcagctctcgctcccgctggttcatgggacggcagcgcacgacaaccttcaccgcctcggaggccatggc

SEQ ID NO: 171584 - DNA, 122 bp, Homo sapiens
ctcattggtgatttctaacgtggcatcgtggctgcattcaacccccataaacgcatgctccgtggtggcctccatagctcttcagacccaatgtgtgagtcccgggctccagatcgtgtctc

SEQ ID NO: 171585 - DNA, 122 bp, Homo sapiens
gacgtccctggcggggtgtgtctcttccagctggattttcaacacagggaattggtaacacgtccctggcggggtgtgtcgcttccagctggattttcaacacagggaattggttagacgtc

SEQ ID NO: 171586 - DNA, 122 bp, Homo sapiens
gagaatttggcacctttcccaagttgaacagactgatacgtgtcaccacgggcacactcccgtcccgccccgggcagccaggaagggcctgggactgctctttcctcatggacacacgtcat

SEQ ID NO: 171587 - DNA, 122 bp, Homo sapiens
accctgggctgctaagcacagtggctgccctccagctcttcagggatgttgtcggccccccgcccctcccccaaccagccaaagcaaaccttcgccaactcaagtttcccttgcttgcctcc

SEQ ID NO: 171588 - DNA, 122 bp, Homo sapiens
ttcaggcccgtcctccacaccgccgaagatgcgcgccagggcgctcttgcccacgccgggcgcccccagcagcagcaccttgtaaacgctctcgtctgagtcgctgccccctgagctgagcg

SEQ ID NO: 171589 - DNA, 122 bp, Homo sapiens
agccctttaagcagagactcacaagtgacaaatatcagcacaccacttaactgaggaagccggagtgttcccaggtccgcaagttggagctctttagttggagtgctgggtttagactagag

SEQ ID NO: 171590 - DNA, 122 bp, Homo sapiens
aaggatgcagggcgccctgactgcggggtgaggggcaggcctgcccgcggtgtgggcattcgctgaagggggacgcccaggtgtctgcctgagttacgggttggggggtcgggcatgtgggg

SEQ ID NO: 171591 - DNA, 122 bp, Homo sapiens
gcgaggagcctgggacgactcctttggtctcttctggggttcgcaaaaacctgggggtcccgggtgtgaagaagggtgtctgcgctctcagcggtcaggctccaggcgctgcgacaggacgc

SEQ ID NO: 171592 - DNA, 122 bp, Homo sapiens
ctcaaaaaaaaaaaaaattactcagtgttaagtcaagtttagcctaacactgcctccttacgtaattgagttcagcctaaaggtttttctgtacatcatgaacttatgaaaataagcagagg

SEQ ID NO: 171593 - DNA, 122 bp, Homo sapiens
tgacactcccctgcaaacctttcctgtgttgatccccctgaagagatggagggccagaggcggcggctcggctgctctcttgctgctttaacatgactgcagtgattagaagtcacagctta

SEQ ID NO: 171594 - DNA, 122 bp, Homo sapiens
attcttcaaggcctgcttcacatctttattcctcagactgtagatcaatggattaagtaccggactcacaaaggtgtaaaagacagctattattttagattcctcaacagtcttatctgttg

SEQ ID NO: 171595 - DNA, 122 bp, Homo sapiens
tagggagctattagcccccttgccctggctgtaatggagaccgctgtgtctgcctcctttcgcactttggagccaaaagaggaagggaccgcctcccacgtccacagggacctgacttccac

SEQ ID NO: 171596 - DNA, 122 bp, Homo sapiens
ttccccaaggattcctcgcctaaaattgcattccctgtctctctccatcacaggctctctcgctctgtctctgccactgtctctgcatgtctgtcactctgatcattgctgtctctcgctct

SEQ ID NO: 171597 - DNA, 122 bp, Homo sapiens
gtttggctaattaggaaaatggtttgaaccagttacatcaccagcccagtgaaaagccgccgggatgccggctgacgtgaccttggtatcagtcttctatttcacttatcccttgtgttgct

SEQ ID NO: 171598 - DNA, 122 bp, Homo sapiens
gaggctgcagcccgcggtttgcggggcagggcttctgccggcttcatggagcgagaggcccgtgtcttcagccgcggtttgggtggctgcagccacgcccggggaaggcagggctccttcct

SEQ ID NO: 171599 - DNA, 122 bp, Homo sapiens
gaaacagcaataattctaaagttcatagtaactgctttattgcatgtttactatgtgtcacgtatcaacttctttcatctgcccaatgacaccaccaagtacttgtattatcctttttttta

SEQ ID NO: 171600 - DNA, 122 bp, Homo sapiens
aggtggagcggcggaaagccagagggtctacggccgtgccaccctgaacacccccgacctcgtctcatctcagaagctaagcagggtcgggcctggttagtacttgcataggaaagcaggag

SEQ ID NO: 171601 - DNA, 122 bp, Homo sapiens
ctgccccaccttgtggagtcccaaagatgaatgagttggggctagggacacctccgaccccgccacacacacctttggagagaagggagtgaagttgggaaagacaaaaggttgagaagttt

SEQ ID NO: 171602 - DNA, 122 bp, Homo sapiens
ggactacttccagaacctttgaagttgttatgcaaatagggcattcataattctattagccggaactcttatctatcacttgaatgagtctcttagaaaagttgtgttggtaaggaattagc

SEQ ID NO: 171603 - DNA, 122 bp, Homo sapiens
catctggcccgggctgcgcgtcgggctctggcgggggcgtgtcaggaggcgtgtccggggcgtgtcggaggcggggccaaggcgggggtaagcctcgcccctcggccgtgcgagaggccgag

SEQ ID NO: 171604 - DNA, 122 bp, Homo sapiens
ctgcccacgactggcaaacaatgaccttacagaccgtgaagaggctgttggctctgccctcgccggtgcctccgaagacggcgacccgcagcggcccctcaggggagtcccccctgctagac

SEQ ID NO: 171605 - DNA, 122 bp, Homo sapiens
aattgctccttcatttcactgagacgctcgctccatctctgctgggtgccggggctttttcgttgtgtttaaacaattgctccattcaccgggttcctaaactgtggcgccttcttattact

SEQ ID NO: 171606 - DNA, 122 bp, Homo sapiens
gggggaggggggcattccaggcgggcacagaagtgggctggtcaaaggcaggtttcaggacggcgactggccaggccggctggaaaggagggtaatatgaccagcttgtctcctgcctgtgg

SEQ ID NO: 171607 - DNA, 122 bp, Homo sapiens
gcacgttaaagctgttctcttttgcactctgaaccggtcttttaccaccacacgtgattccgccacaccccacatcggtcatgtgagaaacgtgggttcactgagctgcgtgtgcacacact

SEQ ID NO: 171608 - DNA, 122 bp, Homo sapiens
ccctgcaccctggcctctgcctgacgaggatggtggggagaggaggggggacatcccccacgctgctgtctccactgtggcctctgagcttccaggactgcagcgggtgggtgggtggcctg

SEQ ID NO: 171609 - DNA, 122 bp, Homo sapiens
gcacttacctggggagaagccctctggtctccggggacgagagcagcttgttgctgaacgcggccagcacggtcgcgcgtccggtgttcaccgagtatcaggccagtgcgtttgggaatgtc

SEQ ID NO: 171610 - DNA, 122 bp, Homo sapiens
gaaggggctgtcattcctggtgggcagtgctggttctccccctaaaggaactttgcagagcgcttggtgactgctagcttttagcgtgttcttgtttgttggcgttacctgcctctcccgga

SEQ ID NO: 171611 - DNA, 122 bp, Homo sapiens
agatgctcggctctgtcagccatcagggcatgcaaattaaaacccctcgagatcctcctgcgcgcccaccggaaaggatgaagtgaagcggatggaacataccaagtgccggtgagatcctg

SEQ ID NO: 171612 - DNA, 122 bp, Homo sapiens
aacacacaaaaacagagaaaaacaagacagtaatggctcaactcacatagcaccaacgggcgaagcgttcttctgagcgctttccgagtcatcggtcctcagagcagcccctgaggcccgca

SEQ ID NO: 171613 - DNA, 122 bp, Homo sapiens
cctcgcaggcgtgtactgttaccgtgtcaaccggcgcctgttcccggtgcctgtggatcccggtaccccctgccgcctgtgcaggacaccgcgagaccagcagggccctgggaccctggcgc

SEQ ID NO: 171614 - DNA, 122 bp, Homo sapiens
cacggccattttgctggaacagactccaggctgcacagaggcgccaacactgtccccagccggaggccaccgctgctgccctcacagctgccatctcacggtctccccctgccccacttcag

SEQ ID NO: 171615 - DNA, 122 bp, Homo sapiens
tggtcgagaagaatgaagaggatttctgtgtttgctgagcagccattgtggagggttacccgcctccactttcccgttgcccatttcactgccaccagctcctcttcctctgctcgaaccta

SEQ ID NO: 171616 - DNA, 122 bp, Homo sapiens
cacacagcagaggcaggcgggaccctcacccaagctggctccctgcaccccccaccacggcgtccaggcacgtcctgagcccccacgcccgtctggccagccccctcagccccttgacttca

SEQ ID NO: 171617 - DNA, 122 bp, Homo sapiens
ggtgctagggacacccacatgtccttcagcatgtcatagtgttggaggtggttgtgtggacgtaggtccaggcccatcccgcctgccgcatatactcggtaatctaagaagaaaggccatac

SEQ ID NO: 171618 - DNA, 122 bp, Homo sapiens
aaagtgtctctagcccaagcaggcctggggacccattcaggactctggtttctgagtggtcggagaagctcctcaggagttttaatcacagtaataacttatcagatatattttttaaagat

SEQ ID NO: 171619 - DNA, 122 bp, Homo sapiens
gtctcacacacagaaatggaagcgctgagaggttcagccacaggcccggagtcacacagccgaaaatgacggagcccagtcccagcttgtctgacgccaaagtggagggcttttacacagct

SEQ ID NO: 171620 - DNA, 122 bp, Homo sapiens
ccggaggaatgggaatagacctgggagaaaagacgcctgggacgtgtcgcggggctcccgcgaagtttcccgctacccaagcgccagaatgcccctaggggtgagagtgccatccgcctccc

SEQ ID NO: 171621 - DNA, 122 bp, Homo sapiens
cctctgttggagggacgccctcctcccgccccctcgagccgccgcgctcctcggcggatccgtccccatcatcacgagctgggagctccctcccagaagcctgggtctgcacggcgggcatg

SEQ ID NO: 171622 - DNA, 122 bp, Homo sapiens
cccccacgagggtacttacggcctcgccagttaccctgtctgggactcagaagggttacacgtgaaggtgagcgcatgtgcatgtctatggtacacacaggtcgctatggctctgcaccctc

SEQ ID NO: 171623 - DNA, 122 bp, Homo sapiens
cctggcattaagtaagtactcacccgcccgccctcccccgcccgccataaaaagaaaaaccgaaaagacaaaaaacagtggccatgggaactcctagacagaccccgtcacttgggatacta

SEQ ID NO: 171624 - DNA, 122 bp, Homo sapiens
gctgtcacctactgagggctcgtgccatgtggcccgggtgcggctctgagggtctctcaccgagtctctccttcagaagcacatcaaggagcaccacgaggaggtccgggagcggccctgcc

SEQ ID NO: 171625 - DNA, 122 bp, Homo sapiens
taactaccacttctacgtggtttgaaaacacctcatgattccaaaagaaatcaccatacccgttatgcagtccctcccataggttttaaaacaaggaggaagtggcctggcacgggtctctg

SEQ ID NO: 171626 - DNA, 122 bp, Homo sapiens
ttagatgtgctcactttaatcccctgtggactttctctgtaggtctctgcctgggaaattcgtatgcaccgatgtacaagcacgtgcattgcagcattcgctcgctcctcagtgttatgtgc

SEQ ID NO: 171627 - DNA, 122 bp, Homo sapiens
aggctgatgggggtgaggggtctcaccacagagaacacactgggagtaggatccgaacctcgagaccagctttgagtgtctagggaagtcctcgtgggggggtatttactttacagcgaacc

SEQ ID NO: 171628 - DNA, 122 bp, Homo sapiens
ccctgtctctgcgccgattctggtgtcggagctcagcccgcagtggttgcagctctcactcgccgccggctctgatcgcccgcggtcggtttcaagatagggaagcccacattccagccaca

SEQ ID NO: 171629 - DNA, 122 bp, Homo sapiens
tgtgtccagtggcaccgcctggcagctccacggggcctggcttaagaatgagcaaagccccggacccccccgccgagccccaccagcccgtgcatgggggccccacagagggttcatgcaga

SEQ ID NO: 171630 - DNA, 122 bp, Homo sapiens
gctgcgcgcgcggctggaggacgcgctgctgcggatgcgcgaggagtacgggatacaggccgaggagcggcaggtccgtgcgcggggatggcgcgctgaccccatacccgctgccgtcgccc

SEQ ID NO: 171631 - DNA, 122 bp, Homo sapiens
ggaagggaaccgaggctaaggttgttggccgcgcgacggtgctgggccgggggcggagaccgtggttccctaagtggcgcagaactcccgggacgcaggatcctcacgcgggacgagcccgt

SEQ ID NO: 171632 - DNA, 122 bp, Homo sapiens
ttttccagctcaggccaacttcgccccgcacttcttcgacaacggggtcggcagcaccaacggaaacatggctctgttcagcctcccagaggacacccctgtaggtgagtagccctggcacc

SEQ ID NO: 171633 - DNA, 122 bp, Homo sapiens
taataaaggaggtgacatatcatagagattaagaacactttcgaaccagcctgggccgggcgcggtggttcacacctgcaatcccagcattttgggaggcggaggcgggccgatcactagag

SEQ ID NO: 171634 - DNA, 122 bp, Homo sapiens
gggacctcagactggtagttgtttgcatactttttttttaaccttacatcttgttcaatacgtggggcaaccaatatgttgggcaaccaggagatataatattactcttatatctgctgggg

SEQ ID NO: 171635 - DNA, 122 bp, Homo sapiens
gagactcagtcctgcaaccacatgtaactgaattctgacaactggaaagaatctggaagccgaatcattcccaaaactctagaaagaaactcagccctggtgacactgatttcaaccttgtg

SEQ ID NO: 171636 - DNA, 122 bp, Homo sapiens
gtgcatttttaaattaacaaaatgcagggcttgtaaatgaatgtggtcatgaggttggaacggaatcccgattcaacacacctggggctcagctctcaaagggcattgtaggggttggccaa

SEQ ID NO: 171637 - DNA, 122 bp, Homo sapiens
tggagggcattgaatgctacctctgtgtagtttcttggctagtgttttggcctgtaagttcgtaaaactggtagaaaacctaggttctcaagttaggacaaccctccttctgcaagaaaaat

SEQ ID NO: 171638 - DNA, 122 bp, Homo sapiens
tcccttcccgggaggtgggtggttgacgggcccgccggggagccagggagcgccgggaagcgccgggaagccaagctgcagtgttcctcagcaacaagtctcgctgagatccgacccagagt

SEQ ID NO: 171639 - DNA, 122 bp, Homo sapiens
gacccatgagtcccgtcgggtcatgggcatcagcctcgccatcctggcctccagatacaacgatttgtcagattccctgaggtcaaagggaagcttcaagggttgccatccccgcctccctg

SEQ ID NO: 171640 - DNA, 122 bp, Homo sapiens
cacgtgatacatgattgacatgcgaccaacgtttgagacatgtgactgacgcgaatgacacgattggcacgtgattggcacgtgaccaacacgtcactgacatgattggcacgtgtttaaca

SEQ ID NO: 171641 - DNA, 122 bp, Homo sapiens
ggcagaattaggggagtctccaggaggcgtggtgattggccgccgccgggcggaagggggcgtggggagggaaaggccgagcagcgcggtgacgtctcgctggcgggggcggggccgggccg

SEQ ID NO: 171642 - DNA, 122 bp, Homo sapiens
gccaggcccggctctgaccacccgctggcctcttgggaccagctgagacaggttggctgccgggcccccacccccctcccacggggctcccgctgccaaaccggttcccctggctggctccc

SEQ ID NO: 171643 - DNA, 122 bp, Homo sapiens
gtcccgggagcctagtgaggactagacttctttctagtaagagacctgaacgtgccctcccgctgggctgcggacactgggagccgggccggcgggtggcaggacaggcagtaaggtgctca

SEQ ID NO: 171644 - DNA, 122 bp, Homo sapiens
aagggttgaaggcaccaagcccagggccaaggagggaaccaacacacgcaggggagaccacgccctcggcagagccccccaaaaagtgtaggaagaagaggtgatgagaagaaaggccactc

SEQ ID NO: 171645 - DNA, 122 bp, Homo sapiens
gcgacccacgtgcgtaaacggcctcgctattggccggcgccgccagaggcctgccccccccggagcccgaacccacgtgcagctactgcgccttcattgatctgcttcgcggtccaggtggc

SEQ ID NO: 171646 - DNA, 122 bp, Homo sapiens
cacacgggggcaccgcgccttcccccagccgtgctcggctcccgccgcttctttatttcacgtggtggaatcctccgcgtctcctacagccgccgaaccaatgggcagaccggggagagcgg

SEQ ID NO: 171647 - DNA, 122 bp, Homo sapiens
ttatttcagtcacaaaagccgggaactgctggtgcttcccgtcactcgggtagtcccagccgcgggcacacaggctcaagccactcctcacatcagtcaatgttgtaaaccatagtaatagt

SEQ ID NO: 171648 - DNA, 122 bp, Homo sapiens
ataattatgatcacttcgtaaataaaaataaaattctaagcccccctccaactggatgaacgaactgttggccaaagggacatcagagaaactctggaaactgagttcctggccatgacagg

SEQ ID NO: 171649 - DNA, 122 bp, Homo sapiens
tgctgtttgggagtcttggccttctcttattcaggcatgaagcaggagctgcagaacctgcgcgatgagatcaaacagctggggagggagatccgcctgcagctgaagggtgagctcctggg

SEQ ID NO: 171650 - DNA, 122 bp, Homo sapiens
cccgacgctgtgctcagctcctgtctcctgcgcttgggtaagcgcttcttagcccggccccgccagggttacgcggaggattgaatggcactcttcccacactgtgcctggcgcgtccaggc

SEQ ID NO: 171651 - DNA, 122 bp, Homo sapiens
atcttttccctttgggtatagatgatgtcttctttttgatttttatcccagactacttcacggatccaagacttcccaacaagattcacatgcagctaattaaagacaagaaagcggcttaa

SEQ ID NO: 171652 - DNA, 122 bp, Homo sapiens
ggaagggggcgagaccagcgacatagggacggggccatgcggtgggcgggtggaacacggcgccggtagtgagtggccgagtccgcgctgagagcaaaggggaggagcgggccgggggtgag

SEQ ID NO: 171653 - DNA, 122 bp, Homo sapiens
gtgccctcctctgagaataatttaggacttattttcttccattgttaagcattgcttggtcgaagcagacacaaattgagttgcaatgcctgcattaatgctcatttacagctagaattagg

SEQ ID NO: 171654 - DNA, 122 bp, Homo sapiens
gactggctgggttattttaatgaagtgttcacccctccgccgaagcttctgatgttgctccgcagtgaccacagccttgggcatgcccaaggattaccctgggatggttgtcatggctttga

SEQ ID NO: 171655 - DNA, 122 bp, Homo sapiens
cacgcaggcctcccgaagagaagcttccttacgctcgtgctaaatcagccaggagccatacgaggtcggccctgtaagccacacccacctgcacctgtgcctgccatgttagccccagtgac

SEQ ID NO: 171656 - DNA, 122 bp, Homo sapiens
ctttggccctctcggcctcccgtagcttgcgcttctcctgcatgcgcacagtgtgcatggcgtggcccatgtacaccagagagggcgtggagacgaagatgatctgcagcacccagtagcga

SEQ ID NO: 171657 - DNA, 122 bp, Homo sapiens
cataggagagaaggaatcccggctcgagtgtggcgttcgtgcgtgggaggagcggtggtccgtggggtccccagtctcttctttttccccagggggaccggtttgccccttaattttacaaa

SEQ ID NO: 171658 - DNA, 122 bp, Homo sapiens
aagaaaaaaggagtagggaccacaatcagttgctgaatcctagtgatctgctgttcaagtcgcctcaacctgttcccttttcttcattccccagctctgaccctcactaatatgacaggcaa

SEQ ID NO: 171659 - DNA, 122 bp, Homo sapiens
agagacgctcctcactttccagactgggcagccaggcagaggggctcctcacgtcccagacgatgggtggaggttgtagccagccgagatcacgccactgcgctccagcctgggcaccattg

SEQ ID NO: 171660 - DNA, 122 bp, Homo sapiens
gctccaccctgggggcggggccgtcgccttccttccggactcgggatcgatctggaactccgggaatttccctggcccgggggctccgggctttccagccccaaccatgcataaaaggggtt

SEQ ID NO: 171661 - DNA, 122 bp, Homo sapiens
tctcatcctctctccactgccctcgctcctccatctcctcgccgccccacctcctccacccgccccgatcaccgttcaccccaacagccccagcggcgcctcgagctccagatgcaccatcc

SEQ ID NO: 171662 - DNA, 122 bp, Homo sapiens
aggaaccgctgtgttcagggaccacgtctcatcagctgtgaacacttggcaggacactgccgccgcctttgatcctgagcgccccggaggccttgccaacatcacccctacgtatggatgag

SEQ ID NO: 171663 - DNA, 122 bp, Homo sapiens
ccacagggagtgtgtagaagtcaaaggccccagtgacttctgtgcagtcagccacacctacgacagccaaagtgccagctgtgagcgccccgacagcctgagccccatctggcctgccctac

SEQ ID NO: 171664 - DNA, 122 bp, Homo sapiens
gaaatatccctgcaccattgattagcccatcctctcccagctgaactgtgtcatgttcatcgtttattaagtctccacatgcatgagtctgttggagaggagaactctctcctatgatccat

SEQ ID NO: 171665 - DNA, 122 bp, Homo sapiens
gagagtgtccccgcgtggtgcctgggcgggggaatgggcgtggtgagccgccgtggcgtgcgtgcgagtgtgcacgctggggctgtggccgggcggctcgtgggtcctgtctcgtgggaccc

SEQ ID NO: 171666 - DNA, 122 bp, Homo sapiens
agggactggacttaagaaattttgtaaaagagtcaacaggatgtgggggtgagcagcaggcggggcacacatgactgaggtctgcagtctgaagatgcctgtaacctagataggagatgatt

SEQ ID NO: 171667 - DNA, 122 bp, Homo sapiens
ctttaatgacaaatccgatttcagtgatctttgcatacaccctttaaacacaccagttgccgcctgcgagatatcatcagactcatgctaagagccactccctaccccagctttccccagac

SEQ ID NO: 171668 - DNA, 122 bp, Homo sapiens
ttattactatctttttccacctacttttgctttgtacttgaagtatgtttctccccagtgcgtcctcttttatagtcatagctggagaagaataaacataacagaaaaaacagcaaaatgga

SEQ ID NO: 171669 - DNA, 122 bp, Homo sapiens
tatccccacctttgagcaacagacagagcctgagttgcagctgggccacgggggcagggacggggtgcaggaggaaaggtgtgctggaggggctcaggtgggaggcagctgggctgaccatg

SEQ ID NO: 171670 - DNA, 122 bp, Homo sapiens
ggccaggactttgctctagaaggagaaggggagggcaccgcctggggctttggctctcctcggatcctccagccgtctccctgagcgcccacctcagcaggagcctggtagaagccaacact

SEQ ID NO: 171671 - DNA, 122 bp, Homo sapiens
ccccgcctccccaggcctttcgggcctcgaatctcggcccactggtattcgggggtggcacggatcctattttgcgcccagatcggtgcccctgtttcgctcccagagctgggcggagtctt

SEQ ID NO: 171672 - DNA, 122 bp, Homo sapiens
cctgctgctctgatcttgcttctcctggccccactcgggccccctaatcccccctccacacgagtgaccacctccctgccacccctggagagaccctaccctgtggaccaacacatgaaact

SEQ ID NO: 171673 - DNA, 122 bp, Homo sapiens
gcaatttgctaagagattgcaaagacagaaatcttgcccttttgtatagccaagtatatacgacccattacatacacgttttcaagttgaacaataactagtcctcaagtaagaggacctga

SEQ ID NO: 171674 - DNA, 122 bp, Homo sapiens
ctgttcaggcactcagggcaggggagaggagagactaccgtcctggagataacggttccacggaggcccaaggcgaaacggaaggatcctcatgtacaaaactgagcggaatggagctgtga

SEQ ID NO: 171675 - DNA, 122 bp, Homo sapiens
gttaaaggggcccacgtgggagaaccacgctcgcgagcagaaccaggtgggcatgatcaccgtggggccatttgaggtgaaaacctagaagcaattaacgttgacagagttagcggaaaaga

SEQ ID NO: 171676 - DNA, 122 bp, Homo sapiens
ggacccgccggggcgcagcacccctgtagaaccgcacgggagccgctcgcaggtggaacacgtgcttgctgcggtgctaactttgtgtccaggcacagaatcgagcccgttcccaacccgtg

SEQ ID NO: 171677 - DNA, 122 bp, Homo sapiens
ggaggagaacgaaggccttcttagttcgcccgccctctccacggctttacattcacctcccgcttaggctgtccttccatgacttgttcctcaactattagcgtctgatgcgcatacttctg

SEQ ID NO: 171678 - DNA, 122 bp, Homo sapiens
ggagacgcgagaggtgtagtcgatgtgcctgcgaagcccaggctcctctggagatccttccgtccgtccctacaggagaaggctggcccgggctgctccactccccggagctgcagactgag

SEQ ID NO: 171679 - DNA, 122 bp, Homo sapiens
tggacgtcgcaggcttttccggcgtcccctcggaacttgcacccctccaccgtaaattcccgggcttgctcttaaattttaattttgagcgttcctcaggtcggtgcctccgcttgcttcct

SEQ ID NO: 171680 - DNA, 122 bp, Homo sapiens
tcaaacaggctgacgtccagcagctgcgctgcccggcccacctcagcccgcgcccgctcccgctctgcccgtgcctcctccaggctgcgctccatcgcccgcagctggtgctccaactccgc

SEQ ID NO: 171681 - DNA, 122 bp, Homo sapiens
gacctcgttttctaaaggctggactaaatggctgcagaactccctttggcaaaaggcatgcgctcactgcttgcttgtcagaaacactgaagccatttgccccagtgtggtcaagcagccat

SEQ ID NO: 171682 - DNA, 122 bp, Homo sapiens
caaagtgcccgcagaccccctcaattctcacttgtattcaggtttgtggacacatgcctccgggctcactgcagccacccgtgtggaggaagaggaggaagagggctcgccacgccccagag

SEQ ID NO: 171683 - DNA, 122 bp, Homo sapiens
tcagtggccgtgctgggagtagtcagcccagccgcggggagacaagcactaaagactgagcgtcctgtaataggtgtttaagtcatgattgcgctaagcgccgtggggaccaggcccagcct

SEQ ID NO: 171684 - DNA, 122 bp, Homo sapiens
gtggttttcaaaccgagagggtaggacgcggcacaagaagcaactggtatgcacttaaggcgtgaataagcttttgactttgaggcccacattctgcacctgcgcgggctgaggggggccgc

SEQ ID NO: 171685 - DNA, 122 bp, Homo sapiens
gccaagcccagagtaggaaaacacagattaaaagggcatacccactgcccaccaggaggtcgcaaatgaatggagaagcacaatccaagcacttagtcaaactgcaataaacagccttgcca

SEQ ID NO: 171686 - DNA, 122 bp, Homo sapiens
tttttggccatcatgaataatgctgctataaatattcatgtatgagtttttgtgtagacacgtttatctttctgttgagtgtgtagtacccaggagcagaatttctgggtcatatgggaaca

SEQ ID NO: 171687 - DNA, 122 bp, Homo sapiens
gcgctgaggcgggaggattgcttgaacccaggagtttgattctgcagtgacctgtgatctcgccactgcattccagcctaggtgacagagcaagactctgtcttaaaaaaaaaaagaagaag

SEQ ID NO: 171688 - DNA, 122 bp, Homo sapiens
ccttcgtctgcctctccggcttcgtcctctaccctccctctccgcagttaccctcccacacgcccctttccgccacgcggctttggcacgcactgttccctcggtctagcattctcttcccc

SEQ ID NO: 171689 - DNA, 122 bp, Homo sapiens
attatgctcagtgaaagaagctagacacaaaagaatacatattgtttgagtccatttatacgaaatgttctggaacagcaatctacagagaaaaaagtagattagttataaactagggctga

SEQ ID NO: 171690 - DNA, 122 bp, Homo sapiens
tcattaaagccatttgcattttcaagttccattattcctgatccttcagaacatgctgcccggctggtgcctctgccatgtggcagacgcaagctcaaggtcaacctccggctgttagccaa

SEQ ID NO: 171691 - DNA, 122 bp, Homo sapiens
catttgctgtcaagaagcaagccctggccagcctggcccttttccagtgttctgtgtgaccgtggccaagttgcttctcttctctgggtctcgtctttgtaagacccttttcagctctagca

SEQ ID NO: 171692 - DNA, 122 bp, Homo sapiens
ttccggtcaccagggaggctgactccggactctggttcactgtccaaagactctcctggccgtcccctctggggcctgcagctgcttccccaaccccccggcgctgagcacggctgctgggg

SEQ ID NO: 171693 - DNA, 122 bp, Homo sapiens
tttgttgggtttcctcttggtgccaggtctcagcccctgcaaaagaaagctggctttggccgcgcgcagtggctcgcgcctgtaatcccagcatttgggaggccaaggcaggtggatcacga

SEQ ID NO: 171694 - DNA, 122 bp, Homo sapiens
aggccagcccaaatcaagctcaggcacggcctggtctgagttcactggccagtatgtacccgaggagccatccatgtccacgtcgagaaggctgccttcaggtggctctcgggtaacatact

SEQ ID NO: 171695 - DNA, 122 bp, Homo sapiens
ggggatctgaactcaggtgccctggctctaggctggtgcactgccatattcatcacgcaacggcctcacagtaacatgttggcacagtgatcctcagcttgctatgtctaactactttaaga

SEQ ID NO: 171696 - DNA, 122 bp, Homo sapiens
ggcgaggcctgagtcacatgccaccaatcaaaacacagggactgagatttggggcaggaacgctccacaggggagtccaagtgttaaaagacgtcccattagagagcaaatgtctggtaata

SEQ ID NO: 171697 - DNA, 122 bp, Homo sapiens
aatagaaaccacccctttctctattgccctaatgttcccttgtacaggataaagtgtcagcgactggataggattgggtaaaggagcaagaggaacactgtgactggacatcagaaagggca

SEQ ID NO: 171698 - DNA, 122 bp, Homo sapiens
tgcgacgagtgtggggccagccgtggaggctccaggtgttctctctgccccagcagagcccggcaggagccccaacaggaagccagcgcggcatggctgccaccgacttcgtgcaggagatg

SEQ ID NO: 171699 - DNA, 122 bp, Homo sapiens
gttttctgtgtctgagccccagagttcaatctctgctgaccagacccccactgaccagaccgctgagcggtggtgctcagagtcccctaccaatggctcttctcagtccacagacctctccc

SEQ ID NO: 171700 - DNA, 122 bp, Homo sapiens
atcccgtcctttgtgaaataagccgttttctgcccccactgcaggagcctaggctgtgggcgactcgctagcactgccctgggcctccaagctgcctgctcgctgagctcagcgctgacact

SEQ ID NO: 171701 - DNA, 122 bp, Homo sapiens
gcatcgtagtctatgttgggtatccttcatctaaccagacatggccatgaacttctgtaacggtgtcccctttggtcacgtgaaaactgtgaagcatcaaacactgccaattcaaaggccag

SEQ ID NO: 171702 - DNA, 122 bp, Homo sapiens
ggcctcaagaagccaaggggaaagaggccagcaagtccacagatgaggaagattgcccaacgctccagaagcctgcatggaccgtcactggaggcatgatttctgctggggaattagaagtt

SEQ ID NO: 171703 - DNA, 122 bp, Homo sapiens
gggcaacgcggccggatcctggagttcccctccgtgctgtggaattgggtcaggcgtgtacggtcctgaccctaggacacagctgcatgtcctcacctcggtgttcaaagctgcaccggcca

SEQ ID NO: 171704 - DNA, 122 bp, Homo sapiens
ttggagggggaggggaacgggcagccaggcctggaccctggggagtgactcacccggagccgaagaccatctcagctttccctagcccagaaagggtgggactggctttatttctgcctgcc

SEQ ID NO: 171705 - DNA, 122 bp, Homo sapiens
ctgctcaagtgtccccttttgctgctttgacacctccacggagctgcccggtgccatccgcggctcgtgcaaacactctgctccaagattatgagcgagtgacagcacagcctttcaaggtg

SEQ ID NO: 171706 - DNA, 122 bp, Homo sapiens
gagtgagccttctcaggaaaacactttctagaattttgtccgagtgtctgttgggaaacgcgcttacatcccgcagaaggcggtaaggacacagcgcacaactctgcattatacctgcgagt

SEQ ID NO: 171707 - DNA, 122 bp, Homo sapiens
ctgctctttattgggaagacaagcacagtttcttccttttgggaccattcctccctcctccggcttttcaggtctaataatgtatccattctctatcacaaaagccaagctagaatcctctt

SEQ ID NO: 171708 - DNA, 122 bp, Homo sapiens
tgacgcaatcggagctcggtcggtcctttgattggctagtcctggccactttggattggccgcgcgggctggtggggaccccccccctccagctatctctgtaataagagcggggtctccgc

SEQ ID NO: 171709 - DNA, 122 bp, Homo sapiens
accgggttcatcccactagggagtgccagacagtgggcgccggccagtgtgtgtgcgcaccgtgcgcgagccgaagcagggcgagcattgcctcacctgggaagcgcaaggggtcagggagt

SEQ ID NO: 171710 - DNA, 122 bp, Homo sapiens
tttcacactgtgtcacatagacacacaaatgctcaaattgtatcacacaagataaacccacgttgtgtcacacgtatcacactagaatgcattcagcgtcacacattgttgaattcatacag

SEQ ID NO: 171711 - DNA, 122 bp, Homo sapiens
gcaaataaattttaaaaaatgaagaaagcagcagctgccaatgaacccccagagaagagtcggagaactatattcatttggcagtgtttactagaactggaggaaggcacaggctgagaaga

SEQ ID NO: 171712 - DNA, 122 bp, Homo sapiens
cacctttgcctgccccggtgaccagcacccggcggcccgcgaggaacagctccatgtcggcgcagtctccgccctccgcactggggctgcggaacttgaagctctggccacgatgggcgggg

SEQ ID NO: 171713 - DNA, 122 bp, Homo sapiens
atgggttttgcataggtatgttcagcttgtgataattaccagcagaggggagagcatgcacgcaattcttcaggatgagattggtgacatgtagagaaaagggggaaatgactgtagtttaa

SEQ ID NO: 171714 - DNA, 122 bp, Homo sapiens
ttcaaaacaggtgaatccctaggccagcccggccccttcccacacacccctaccccgagacgggtgcagaatcagcagcggggatcatccagagactctcgcagtccacggcaggtgtcgga

SEQ ID NO: 171715 - DNA, 122 bp, Homo sapiens
gggctggttggagggccttactgggaagtctcacccagtgaagagaaatggactggagtccggcttaaagaagcagtctggtcacaatctgacaaagcagctgtgctgagctgagcttgtcc

SEQ ID NO: 171716 - DNA, 122 bp, Homo sapiens
gacctgccagggatgtgggagcggaggacccgctccaccggggagggatgccacggttcccggcagattctggaggcttctccatgtttccctgacacccccaaaacagggagttgaagtcc

SEQ ID NO: 171717 - DNA, 122 bp, Homo sapiens
gcagctgcaggacaatcccagccaacaacaggtggagcagaagcaccatcgcaccaattccgcagggtcctgagaaatggtaacccactcactgccgtttcagctcctgcactcgcggtcac

SEQ ID NO: 171718 - DNA, 122 bp, Homo sapiens
gatggacggagcttacagtacggcatcaaaaggcagacggattggggtgagccccgccagcgctaggccacctcctctccctggccgttcgggactggggactgcgctgtcctggcttcctt

SEQ ID NO: 171719 - DNA, 122 bp, Homo sapiens
gagtggtattagcaaaaagcactaataaggaatgcaggagaaccatcagtgtaatattatcgttaccgagaaaactggaaatcacctaaatgttcatcaacagggaactgattaaatcaata

SEQ ID NO: 171720 - DNA, 122 bp, Homo sapiens
tatttacatacctgggaactcatgcatgacctcgggcaaggtaacaagggaatgctcattcggtaaatgaggcagaataaaaaactacttgttagtctagaaattaaggccatatatagata

SEQ ID NO: 171721 - DNA, 122 bp, Homo sapiens
ccgggccccgccatggccggggtcagctacgcggcgccctggtgggtgagcctcctgcaccggctgccccacttcgacctgagctgggaggccactagcagccagttccggcccgaggacac

SEQ ID NO: 171722 - DNA, 122 bp, Homo sapiens
gggaacttagtcaagtgcagatcctgacttagtcaagtgcagagtctgggatggctctcacgtgagtccagccagaccacactgagttgtgagactctagaccagtgctgtcaaagcaaaat

SEQ ID NO: 171723 - DNA, 122 bp, Homo sapiens
tccagccccccagctgtccttcactgctgcaggggggcaggcacccactcaccattgaagcggacagctcgaatgtactgcagaagcatccgcccatcagtgggttccatcgccgggcacag

SEQ ID NO: 171724 - DNA, 122 bp, Homo sapiens
agagatcccgcgtgccaggggccacgtgaaggagatctacaagctggtggctctgggcaccggcagcagctgctgtgctggctggctggagttctcgggccagcagctccacgactgccatg

SEQ ID NO: 171725 - DNA, 122 bp, Homo sapiens
aatgcttttcattttctagtttggcaaaaattccagtctctttacatttgctaccttttccgtctttgcaacacaggcagtgtgagctaaattaggtttgttaaaatgaagttttgaagttt

SEQ ID NO: 171726 - DNA, 122 bp, Homo sapiens
ggccctcccgacccgaggcctccggcgccgccctcctgagcgcgggcctctactcgcaggcgggattccggcccgcaccatccgccctcgcctgtgaccgaaccctgcgggtgacgcaggct

SEQ ID NO: 171727 - DNA, 122 bp, Homo sapiens
tctttagcatcagtaaatatgctctagtctagttttctaaggaaagcacgtttctccctgcggcttgcagagtccagttaacaagagattgagctcaggagtccgagaccagcctgggcaac

SEQ ID NO: 171728 - DNA, 122 bp, Homo sapiens
tgggaccagtttggagagtgctaaggaatgctggtctgcagcgaccctacttgtgctctgcgtcctctgccaactgcagcatgggtgaacatctgtacatctgtccccataatgaaaatggc

SEQ ID NO: 171729 - DNA, 122 bp, Homo sapiens
ggcgcgggcctgttctgtgagggagaaaacaagcgtcctatttaccacgagaatgaatatcgggctctgtgtgaaaatcccacttgctctgagatgtgtgaagccagcagggccagggacgc

SEQ ID NO: 171730 - DNA, 122 bp, Homo sapiens
ggtgcccacgatgatgccgactaggcccagcaccaggcccagggcacagagcacagtctccgttgtctcaggcatctggattggctcttgggcctctgggggaagaatgaagagatagggtc

SEQ ID NO: 171731 - DNA, 122 bp, Homo sapiens
ccggaactccggacttctgcaaggccagacgtgaggcgacactgaattgctcccgagacgcgggaagggcgaaggcaatcgaagcgaagagctttaactcatcttctccaggatttggggca

SEQ ID NO: 171732 - DNA, 122 bp, Homo sapiens
tccgcagtaaaaaagtttttgcaggtcgataggactatgagaatcgcaagagggcgctcgcgggctggtccctgacggccgagtctctgagattctcagaataacgcgggagattctccaag

SEQ ID NO: 171733 - DNA, 122 bp, Homo sapiens
tggcagcggggagggggcgcaggtcacgtgccggcgggcgggtgggcgcgtacagtagggcgccctgctactgtactggggagtcagtgccctgttaccgggtctcgtctgtctcgtctctc

SEQ ID NO: 171734 - DNA, 122 bp, Homo sapiens
gtaggcgctttgatgcgggctggagaaggtcctgcccggtgggattgcgccctggggcaccgcgcacgggtcggggaagcccggggcagggccgtatgcaaatagcgcgcgaggaggccgcg

SEQ ID NO: 171735 - DNA, 122 bp, Homo sapiens
aaactccctcaaagatttttttttccttttaataaattgttctgccatgtgtctgttgcacgaatgggtgcaagttcaaatgggaccccataactggtgattgtgagcagctaaggggcatc

SEQ ID NO: 171736 - DNA, 122 bp, Homo sapiens
gctgcggcggacccggagagaggccagggcgtgggtccggggctggaccgcattacccagcgaggcaggacagttcttcaccctggccccgcggctccggtctcctctgcgcctcctaccct

SEQ ID NO: 171737 - DNA, 122 bp, Homo sapiens
accaaggtcctgctaatacagaattatgatcctataacagcactggtcattcagttaatccgacacaatggaaccctaaaaatacggaagcttgcagaaactttttgaatcaagtatcttct

SEQ ID NO: 171738 - DNA, 122 bp, Homo sapiens
gaggttgcatagggaatagatcaccttccttctcagaattcttttttgtaatgaggagaacgcagggatgcaagctagccccctactccagggtgtggttgagaaagggctcccaggcacct

SEQ ID NO: 171739 - DNA, 122 bp, Homo sapiens
ggctagcgcggggctggagcagggctgacgcgggcggggcacctgggccaccaggctcggcgcggctccgacactgccgcagtccctccgtgcgcgccgcaagccccgcccggccctctgcg

SEQ ID NO: 171740 - DNA, 122 bp, Homo sapiens
aaaaaaaactaactcttggctttactgccaaaaatcctcctagcccagagtctcacaaatcgttatttatgtataaatatataaaaagtgtcatttaaatttcacaacctaaatagttcctt

SEQ ID NO: 171741 - DNA, 122 bp, Homo sapiens
ttcaagcaattctcctgcctcagcctcccaagtagctaggattacaggtgcacacgatcacgcccggctaatgtttttattttgagtagtgatggggttacaccttgttggtcaggctggtc

SEQ ID NO: 171742 - DNA, 122 bp, Homo sapiens
ggagctcctctcggagcctctctgcgtctccgcctctctggggcttttccagctctcgcgcggatcgcccaggcctggcaaaccccctcccaagccaagtaacaatgaaaagcccgtgcgac

SEQ ID NO: 171743 - DNA, 122 bp, Homo sapiens
tgaatctccagtccagaaaatgtcctcttttctctctgtcacatctttgaagcgaatccacgcacatcttctccccaacttcttaaagcttgtgtttgttttctcgtaactcattttgattc

SEQ ID NO: 171744 - DNA, 122 bp, Homo sapiens
agagaaaatagttcagtgaatcctcatgtactgatcaaccagcttcaataatgatcaactcgtgtccattcttgtttcatctataccataatcactcccccagcaacagctttcacgtgatt

SEQ ID NO: 171745 - DNA, 122 bp, Homo sapiens
acagggcatcggcagacctgtggcagaactggagggtccaggaggcatactgggcacagccggctccctgcccctcagcccacctggggctccagggacctcaagaagcagggtagggtgat

SEQ ID NO: 171746 - DNA, 122 bp, Homo sapiens
ctcacccggcggcgggttcccccggagccgcctcctccgccgggcctcggcccgtcccgccggtcgcggcctcatgtgccccgcgtcgccatcgccttcaccctcgcctctcctccacctcc

SEQ ID NO: 171747 - DNA, 122 bp, Homo sapiens
gaggagtccagggctaacatgtggactcggaagaagaagccgtcgggggtgaggtacaggcggttcatcttgtacagcccgtcccgatccaccagcagggtcaccagccggatgcccgcgcc

SEQ ID NO: 171748 - DNA, 122 bp, Homo sapiens
cctgtagtttggggaaaatgtgatcactgatcttgaaggagagaatgtttcagaagcatccggctaaggcaggattgtagagatagtcttgattttatactttggatttaattctgatgagt

SEQ ID NO: 171749 - DNA, 122 bp, Homo sapiens
tctatttgctcttgggcgtcagagcggcaccctactctgtgtaagcctttggatcccgctcgcacttcctcccgtcatcagccaaaggccccggaagtgatgtttgcgcgccgtgcgttacg

SEQ ID NO: 171750 - DNA, 122 bp, Homo sapiens
ggttcccgaaggcactcttgggagtgtatggatgacgtgtcaggtcaccaaatggattgtcgaagggaccggagggaagaggggagagctggaatttctgagggtttcggttgcagttttca

SEQ ID NO: 171751 - DNA, 122 bp, Homo sapiens
gaagaggcatgcacaggaatggaaagaatggaggaaagaggaagaacaaagacagacaaccgagttgtggaggtgaggggtaaaaaccaccacagaatcactacccgtttgtcttgaccgtg

SEQ ID NO: 171752 - DNA, 122 bp, Homo sapiens
ctcgtactcgcgcgtgcacgccgcaggggcgccgcaggccgccccttcgctctgggaccccggcccccaggttccccagtccctcggcccctggaggaccccgccgtgctgccccctagctc

SEQ ID NO: 171753 - DNA, 122 bp, Homo sapiens
aagctggtctcaaaagtcccagaatgtcactttggctgcattctattgttcagcaagccacggggccagctcaaatgtaaagaaaggaaaaataagctccatctcttgatgtgaggagcagt

SEQ ID NO: 171754 - DNA, 122 bp, Homo sapiens
tgaggagcagcacgaggacaagccccacacttctgcggttgctgttggcctcagctctgccgcctcagggcacagccttctccgcagttgctctcctggccccgcagggtcgtgtgtgcctg

SEQ ID NO: 171755 - DNA, 122 bp, Homo sapiens
gaaagaccccaatgagcgggactcctggagggcagtggccagggacgtctgggataccgtcggtgttggggatgagaagatcgaagacgtcatggccactgggaaaggcagcactgatgtag

SEQ ID NO: 171756 - DNA, 122 bp, Homo sapiens
ccccgcggctttctagcttgtttcctgacccgtgggtcttcctgtcactccacgggagaccgcagaaggtgcagcacagtggcccaggaagaccactcctgctggctctgcaaagtcaggag

SEQ ID NO: 171757 - DNA, 122 bp, Homo sapiens
acatagtcctagagctcaacagtaactctcagccacaacctccattgctcccagccactccgcacttttgccacagcatgagatgccctgtcagggtctatttaatagtaggctagacagtg

SEQ ID NO: 171758 - DNA, 122 bp, Homo sapiens
ctttcggggagtgcagcctgtgaagggacagccagggtgagacgcagtttccaaggccaccggcgcatgcccttccagggaatcagggccagaactggctaatacgcccggtcaaatgtgaa

SEQ ID NO: 171759 - DNA, 122 bp, Homo sapiens
gagagtggagggtggtggggacgcggggtcctggagagggcacggcaggcaggcagcccccgaaacggccgcccaccccctcacgcctgcaggtcttgggttccgtcatgtttcctcatcag

SEQ ID NO: 171760 - DNA, 122 bp, Homo sapiens
agagtatcagtaacgtccatgcagagcacatgggctgtgttcttcccagtacaaagtagacgcacgcacacacgctcacacacacacagaggcaggcaggcaggcaggctgaacacgctggc

SEQ ID NO: 171761 - DNA, 122 bp, Homo sapiens
gggcgaggcgtgagaacgagcatttctaagttcccaggtgatgcccctagtgttggtcggcgtccacactctgaggacagtgacctctctgctctgtccctcatgtcttactactactgtct

SEQ ID NO: 171762 - DNA, 122 bp, Homo sapiens
aatcaccacctctgagtcccatttcttcactcaaatagtcacaataaaaatacttctgggcggatcacgaggtcaggagatcgagaccatcctggctaacatggtgaaacctcatctctact

SEQ ID NO: 171763 - DNA, 122 bp, Homo sapiens
gtggatggagcaggaggggtcagagtattgggaccgggagacacggagcgccagggacaccgcacagattttccgagtgaatctgcggacgctgcgcggctactacaatcagagcgaggccg

SEQ ID NO: 171764 - DNA, 122 bp, Homo sapiens
acggcagtgagaccccggctgccgctatcggggtgcctttggggtagctgccgagcctgccgggccttgcctggatggggggcagccctgtgcctcactccaggccccgctgacctagttcc

SEQ ID NO: 171765 - DNA, 122 bp, Homo sapiens
ggccttgccggatggttccataactgtagagtctaattgctatccattacagaaattaatcgttcagttgaaagaagtactgatgacttttcaaaacaaatgaaccaccgtagctgacagag

SEQ ID NO: 171766 - DNA, 122 bp, Homo sapiens
taggtggaaaatggccactgatttttttttgtgcctgtgcggggcctcagagttcccctccggagaatgggtctaattccaaggacccaggatatgacagtcaactattgtccaggcaactc

SEQ ID NO: 171767 - DNA, 122 bp, Homo sapiens
cctctcctttctcccgatcaatgcatatttgcaaaaggattaagccacagatttaagcgccgggagcccatttctgccttgcaaaggagaccggactgaaaaacctaaagccagctctgatt

SEQ ID NO: 171768 - DNA, 122 bp, Homo sapiens
aatcatcaaggccattttcaaatcccattggtctagccgtcacatggtgagaaccgaatgcgcggataattacggagctgatatttccccccctccccttctttttcctccctcccctccaa

SEQ ID NO: 171769 - DNA, 122 bp, Homo sapiens
ccttctgccttcataccagagcccggagaggcccctgtcaaaataagagctcccccatctcgcttgcctcctcgcccaacccggctcccccagcctcccagtggtctgactcggtaaggcgc

SEQ ID NO: 171770 - DNA, 122 bp, Homo sapiens
cctgcatagggcacttcccacccccaacgggagctgagcaagtctggatcgaggaatccgcgtctggagggaagcctcaagggcacttttggattgacaggtggtgtaggggcacggggaca

SEQ ID NO: 171771 - DNA, 122 bp, Homo sapiens
ggcagcatcggcagcatcgagaaaggtgacgagttctgcaaataacagctgcggagcaatcgttatgtttggacaacgtgggaagggccattgttcacaaattgttctcttcaacaacacct

SEQ ID NO: 171772 - DNA, 122 bp, Homo sapiens
gaggccagcctgggcaacatagtgagaccccatctgtataaaatgaaaattgtggtgggtcgagaaagttattttgacctatgtttaaaaccagattctcagcttgggcaacatggtgagac

SEQ ID NO: 171773 - DNA, 122 bp, Homo sapiens
ggcctccctcagagaaccagcccctgcggagtccctgaacgtagctgcggtctggggtgccgaccctcggcactgggagaaaccctcaccagtagcatcaccccccagtgagccaagatcgc

SEQ ID NO: 171774 - DNA, 122 bp, Homo sapiens
cgacagcgatgtcgaacacggtggggttaaccatggctgatcgtacagagctcctggcgtcggtggctgcatttgcaaagccgagaccctgcttttaacaaaacaataataggccaggtgcg

SEQ ID NO: 171775 - DNA, 122 bp, Homo sapiens
tgctgcacagaccacgctatgcacgtatcatcaggtctgcaagctgaacagatgctctcacgtgtcatctcttagaggtaggatcagtcctggctgctatactcaagcaggaaaggtaagag

SEQ ID NO: 171776 - DNA, 122 bp, Homo sapiens
tggcctgcgggcgatgaagctggagagggcctgcaatggcctgggcacagcctggccttccgcctcgcagtggacactcccactttgcctaaggttttgtcaaaaccagtttatggaggcag

SEQ ID NO: 171777 - DNA, 122 bp, Homo sapiens
gctggctacccggggaggggctgagggctgcggcaccgacaccccgggggtgtgtctgtgcgggagccaggatgtggttggtggctgccgcccgccttcaagaggtcggccctccaaacctc

SEQ ID NO: 171778 - DNA, 122 bp, Homo sapiens
ttgattgcatcatgcatcaagtcagttcctgtgatgaaggagaccaaaatttagctatgacgctggggtgaggcagttagctgagctttgcccttggtcacagacggaacctccagtaccga

SEQ ID NO: 171779 - DNA, 122 bp, Homo sapiens
tcgtctccgctgatgttctgtagtcgttaggcttgtaattcgtaatgacggtggagactacgtgagaccagcccacctaatgtatatctgtacaagggagatctagaggtctggcccaaagg

SEQ ID NO: 171780 - DNA, 122 bp, Homo sapiens
gcaaatgtcattatctgttatttaccacaacagaggacgagaggctgcacaaaattaccgcgcttggcaacggccgctgagtggatttgccaacgatgcttcttcctgctgccagaggctac

SEQ ID NO: 171781 - DNA, 122 bp, Homo sapiens
gggggcacgtgacttcaaccaacccagtaaccaagttttgttttcttccccagcacaggccgctgcctcagcatccaccccgcagcccacgtgtggcaagccggggaaggggtggagtgaac

SEQ ID NO: 171782 - DNA, 122 bp, Homo sapiens
gaaaggcggattttgtctgcttttgacttttcttttttaatatgtaaaactccacatcagcggaaacccccccctacttctggcctggagcttcagggttttggtgctgggacgagtttgtt

SEQ ID NO: 171783 - DNA, 122 bp, Homo sapiens
tgagtacaaatgagggggagcctgcagctggggcctggccagctcctccaggcctcacagcgatatgcacagagcctcgcagaatctgtctatggtgtcttttgttccctttctctccctct

SEQ ID NO: 171784 - DNA, 122 bp, Homo sapiens
agctgcaggcagcaggaaccagtgtggccaagtcggagggcagcacaagccggtcctcctcgtggacagcaggtgtggagcaggccaggcccacaggagggcgggcaggagggcaggcaccg

SEQ ID NO: 171785 - DNA, 122 bp, Homo sapiens
tccaaataagtggcctcaggcatactgtctatttcccttttgaatcttggtattcttgtgcgtaaaccagggagtaatgattctacctcataagaatgttctgagcatccaataagactgta

SEQ ID NO: 171786 - DNA, 122 bp, Homo sapiens
taagcccgtcagaaaagtacagtatttgggtgagagtgatccgattttccaggtgccgtccgtcacccctttctttgattaggaaagggaactccctgaccccttgcacttcccgagtgagg

SEQ ID NO: 171787 - DNA, 122 bp, Homo sapiens
tgcctcactcttccccacaagatgtgggccttcagtgttttgtctgcctagaatatcacccggatacctttctctacctacccatcacttcccagcccacttctagtaccatggcctctgtg

SEQ ID NO: 171788 - DNA, 122 bp, Homo sapiens
ccaggttcctggtgagtggtggcctccagcaggcagggacgtgtaactgtcccttgggcccggctcaaaccctgccttccctcggcagctcctagaccgcagtgagcagccctcaccgcccg

SEQ ID NO: 171789 - DNA, 122 bp, Homo sapiens
ggaagccgaggcggccggggagattcacccacatgcctgttgactcgggcccagtacctgcgtctccttccttctctttctggccctcatttcccctgcttctcactttagttcactgctgt

SEQ ID NO: 171790 - DNA, 122 bp, Homo sapiens
cggccctgaaacgaggactcgagcctgtgcgccccgggcgagagcggctcgcagactcgccgggaccccacgggcggccctcaccccacacccctcggcgcctctcccggttccggagccgg

SEQ ID NO: 171791 - DNA, 122 bp, Homo sapiens
tatacaaacacactcgcccccatggcaacggccactcagctctcagaagcactggtatgccgctctactccagccaacagtactatttccatcgcaaattcctgggtgaatagagggcttgg

SEQ ID NO: 171792 - DNA, 122 bp, Homo sapiens
ggaggaccaggctaactccgtcacggacgctaccaactcgcgttcggaggagggggggcgcgtgtcatcactaccttgcgctcccgggagaacctaccactcacctggagggggcggcggag

SEQ ID NO: 171793 - DNA, 122 bp, Homo sapiens
ttattctcctctgtgactggcacatttctgccattgggtttcagttcatgctgcaggatccgcccgaaggcgttgtgttccacgcagaaggtgtggtccagtacaggcgtgatgtcgttctc

SEQ ID NO: 171794 - DNA, 122 bp, Homo sapiens
ttctgtgcctccgtccagttttcttggcatcactgtcctttctctgtccacaaatctaaccggaccacgcgacagcgacggagccgccctgagcctatgctgggtccagggctgccccattc

SEQ ID NO: 171795 - DNA, 122 bp, Homo sapiens
tggggacggtgggtcggggacttggcctggggctacaataagtcgccggccaaatgcgggcgcccgaggcggctccagtggaggggagcaccaggtccccgggctgccggctggctcttcgc

SEQ ID NO: 171796 - DNA, 122 bp, Homo sapiens
ctccgagtggtcggtctgagtctcagtctgcagtcttctgatgtaccctttccgagtggtcggtgtgagtctcagtctgcagtcttctgatgtaccctttccgagtggtcggtgtgagtctc

SEQ ID NO: 171797 - DNA, 122 bp, Homo sapiens
aaggacggtcccggccgaggcgttgccggccgcctccagaatctgcgggtggccacggggcgtgtcctccgggatgctcaggacctcggctgcctcctcgcccaggccgccgcggctccggg

SEQ ID NO: 171798 - DNA, 122 bp, Homo sapiens
ggtctcatcctgggttgtcgctttctccctctgcatacaggctcaagaatgggacatggacgcccggcggccaatgccttttcagttcccaccctttccagatagggcacctgtcttccccg

SEQ ID NO: 171799 - DNA, 122 bp, Homo sapiens
caagccctacgagggacagagggccgcgttgctccctcttgggagcagcagtgctaaaatcgaagcaggcagctgcgggaccgctatagccggccctgcgctcgggcccttcccgggcagga

SEQ ID NO: 171800 - DNA, 122 bp, Homo sapiens
atccctggcaaccaccgatctttttactgtgtccacagttctgccttttccagaataccacggaggagaaatcccacagtacaccgcctttgcagactgtcctctttcactgtgcaatatat

SEQ ID NO: 171801 - DNA, 122 bp, Homo sapiens
tttttatcagagcagaggaaaggctttatcctaagcatatacacatcgcccctgggccctcgccaggataaagcattcgatgaccatacaatactctgtcacctcctgcatttagtgcacag

SEQ ID NO: 171802 - DNA, 122 bp, Homo sapiens
aggcgcgtgcgcagtgctctctgctgcaggctttcctgcagccgctgcagccagcccacccggcccagccgctggccgctctcccgcaggaacaggctgttgccatggctgctcatggtcta

SEQ ID NO: 171803 - DNA, 122 bp, Homo sapiens
cgtcagcagttcctggccctcctagggagcagcatggtaagcctctggtctcaagggttccggccactcaagtctgatttctgagagtgcaggctgctggcaaacacccctgctctagggag

SEQ ID NO: 171804 - DNA, 122 bp, Homo sapiens
aatttaagtgccgttcgagttgtggaaaggattagctgctgagcgtcaggcagcaggctccgcgtacggtcctgggcaaggccagcaacgcagcaggggcaggaagctccgggccgggaaca

SEQ ID NO: 171805 - DNA, 122 bp, Homo sapiens
gtttggacttgctctctttaaggtcccagggtcccatcccagctctgccaccagcaggtacgtggccttgggtacatgactgcacctctgggattcagggtcctcatgtgtaaaggagggag

SEQ ID NO: 171806 - DNA, 122 bp, Homo sapiens
tgcgagtgccgaggaggaaccccggacaccaccatttcacatgaagaggcaggcgacatgcgagtgctggagaggaaccccggacaccaccatttcacatggaagaggcaggcgacatgcga

SEQ ID NO: 171807 - DNA, 122 bp, Homo sapiens
tcaatttaccccagaacatctctatttaattattccctgaggaggggaagttgggtatggcggttggaggtggacaggctcctaacaagcacttgccagcagggggcactcccagttttcgc

SEQ ID NO: 171808 - DNA, 122 bp, Homo sapiens
cgagaccatcttggtcaaaatggtgaaaccccttttctactaaaaatacaattagttgggcgtggtggcacgcgcctgtagtcccagctactcaggagactgaggcaggagaatcgcttgaa

SEQ ID NO: 171809 - DNA, 122 bp, Homo sapiens
cccgacctccccaggtgagccagcgggagggcggttgcgacgctgggtggtgctgagctccgatgggctcctactccgggagcaactgcatgaaaggagaggcggggaagagccaccagctg

SEQ ID NO: 171810 - DNA, 122 bp, Homo sapiens
gcctttcagagcagcaggaccctgcggtgacatcgaaatgaaacagaaatagaacttctgcggtgggtgagtgatgtgctgggcctgaaggtggactggccagggaccccacagtggactcg

SEQ ID NO: 171811 - DNA, 122 bp, Homo sapiens
cccatgccgcagccaccgcgacggagcccgcaggcgggaacctgcctccgcgcgttagcgcgcacgcgcgcctcatgtgtcgtccccatcagcgccggcttccgtctataggccagatgcac

SEQ ID NO: 171812 - DNA, 122 bp, Homo sapiens
tgccctgtccatgaagtggatggcacgggcagcatggcttagtgggtaagggcaccaactcgggggtcaggcagccctggtttcaatcccagcttcctagctgtgcgacccaggtaagttac

SEQ ID NO: 171813 - DNA, 122 bp, Homo sapiens
gccggcacactgttcgcctccccattgcaagcctcctccctcaccggtattgcttggggtcgctgggagacttgacgatctcagggtccccagcattactgagagaccccctccgtccctct

SEQ ID NO: 171814 - DNA, 122 bp, Homo sapiens
gtccccgctgccccgcttcaagcctagcgcatggctcctccccgtgccttgaagatgccacggggctgagccaccttgcacaaaaagatttggaacccacaccttcttagaatcaaggcctg

SEQ ID NO: 171815 - DNA, 122 bp, Homo sapiens
cgggaccggggttttcttcggtgcctgcggcattttctttgcacctgggcggcaggctcccggggctcccgggtgccagatgaagtgaggcggaggcgtcgcgggagagccgggtccggagg

SEQ ID NO: 171816 - DNA, 122 bp, Homo sapiens
gccggggaggggcgtgtgcctgggcgggtggatccgggcgcccgtcggtgcgcgcgcgcgcgcctgtgtgtttgcggctgaaacccgacacctcccgctggctgaggtcagggagccgggag

SEQ ID NO: 171817 - DNA, 122 bp, Homo sapiens
ctccttgaatagggtggacatctgaggctttgcgactcgaagctaggcacttgggcccgacgcgcggtttgaacggtgcttgagaagccgcgaagaagcgcctcgcgctcagcggcttcttc

SEQ ID NO: 171818 - DNA, 122 bp, Homo sapiens
ccagtccgtggccgtgaacctcagtcgcaggaccgtcggctcctaggaggctgctgtccgcgggtccccagaatgcaacctcagcatccagcgccttctgtgcagagcccccctgctgtcct

SEQ ID NO: 171819 - DNA, 122 bp, Homo sapiens
tcaaccaggtggagatcaaggtgtgtgcggccgtccctgccggctggggtgggctggggtcgcctgatgcaggcgggatcagctgacacccagctttgctcttggtctcccgcagcccgaga

SEQ ID NO: 171820 - DNA, 122 bp, Homo sapiens
atctcaggtgatccgcccaccttggcgtcccaaagtgctgggattacaggtgtgagccaccgcgcccggccgtttttattattattatattgttacattagggtcttgggctgtagtcctgg

SEQ ID NO: 171821 - DNA, 122 bp, Homo sapiens
gctccgaccccggcggggggcggcggcgcgcgcccgcactcacgcgcactggcgcgcacgcgtcagcccgggcgcgcccccgcaggtctcccgccggcactcccactcccactcccactcct

SEQ ID NO: 171822 - DNA, 122 bp, Homo sapiens
ctgactaatacactctctcttctatagcttcaaactctccatctcccggatcctcatcctcggtccctgagcaaactcaagccacctaaaatcctctgtgctcgaggcagggccacacacac

SEQ ID NO: 171823 - DNA, 122 bp, Homo sapiens
ctgcagacctctctcccctgcacagtggtggttgtgaaagacagggagacccagagatctcggggatttgggtttgtcacctttgagaacattgacgacgctaaggatgccatgatggccat

SEQ ID NO: 171824 - DNA, 122 bp, Homo sapiens
tgaaccccacagcttctctgggaccttccagcgacccctacgcctggggggttggagggacgtacctcgggatggaactgctgctccgtgcgggagtggcaatactggcagccgtcgccgcc

SEQ ID NO: 171825 - DNA, 122 bp, Homo sapiens
caaagggatgtgaacggtttcccaagataggacccaagggactctaggacccagaggctgcgcgcgacgcccgcagggcgaactgcatccttttgagctcccgctccatggcctgagccgtc

SEQ ID NO: 171826 - DNA, 122 bp, Homo sapiens
cagcctgcatgagtgagtgtaatgtctgaaatgtggaaccaaccacatggcccttctccacgctggtcagtgagggggctttgtcagtgaaaacagacttattgtggctaatgtaggtcgca

SEQ ID NO: 171827 - DNA, 122 bp, Homo sapiens
cgcgtcggtgacagtgtgagcccgggtggggagcgcaaggttcgcgaaaaatgaacgcagcgccggagtccctcacccatcctggccggaccgggagcccccggccaaccccgtgggcccgc

SEQ ID NO: 171828 - DNA, 122 bp, Homo sapiens
accatctgaaggaagcctgcttccaacgggcccagcctccagccaccgctcctggggcagcgccattgctcctggctctcaggctgccagtctcccacaccgacgctctactgcccgcatct

SEQ ID NO: 171829 - DNA, 122 bp, Homo sapiens
gttcactgcagcagaagcctgggaaacacctccatgtctgtgagcatgggccccttgagtcggttatggcacctcctgtaacccaggaggaggcagctctgtggggatggctatgggaccag

SEQ ID NO: 171830 - DNA, 122 bp, Homo sapiens
gacttactgagtattgtgcagcactgtctggacaaaggcgggatttgtctccatagaagccgtcaccagagatgtcagcagagaccaataccatattgcagaagcatctgagactgagaccc

SEQ ID NO: 171831 - DNA, 122 bp, Homo sapiens
gcaattctcaaaaaatcccttcgtgaaatttctgaccgagtgattgcagacaggacagaccgagagagtcgagatctgaaaccagctctgcgcaccaagtcgacgtgaaaagaggcccccgg

SEQ ID NO: 171832 - DNA, 122 bp, Homo sapiens
gccagcaacaaagaaagtggcttgaaagagcaagaagtgagtagtgacacccaaggtgggcgagtggaatataaaagcattctccagggttcttagtaaaattaaggaagcggaatgtgaaa

SEQ ID NO: 171833 - DNA, 122 bp, Homo sapiens
gccaatatggcaaaaccccatcgctactaaaaataccaaaattagacgcatgtggtggcacgcgcctgtaatcccagctacttgtgtggctgaggcaggagaatctcttaaactcaggaggt

SEQ ID NO: 171834 - DNA, 122 bp, Homo sapiens
ctgtagtgaaaatgaagctgctggaggatcataaagcaagtagtgacacggcctgactcacgtttttaaaggatcactgtggctgcttgtgaagaataactaatagaggcaagggcagatgc

SEQ ID NO: 171835 - DNA, 122 bp, Homo sapiens
gcaggaggcgcgtgctcagtgtgctgggtaccaggcgactccgggacagggggtctcggccgtcggcgtcatggtttcgcgcgtgcagctcccgcctgagatccagctggctcagcgcctgg

SEQ ID NO: 171836 - DNA, 122 bp, Homo sapiens
gtgggctcaggacctccgccagcagtgaaaccgtcccggttcccggagacccagcttggacggctgtgcctaccccatgccccgccggggctcagaaccgcacaggtctataggggcggaaa

SEQ ID NO: 171837 - DNA, 122 bp, Homo sapiens
gagtacttatctattttatgtcctgtaacattcagtacttgatgcaaatgtagcagatctcgattcaaacaggagcaaaactggttataactcaagagaaaggggataggctcatcttgatg

SEQ ID NO: 171838 - DNA, 122 bp, Homo sapiens
tgggcagagtagggaggggctggtacagcagggtgatgcctgaggggacgcagtgtcacccgcccatctagtcaccctagatgctggccccaaagtaaccatggggcaaggcacgccaacag

SEQ ID NO: 171839 - DNA, 122 bp, Homo sapiens
caaactccaactatattcttggcttccctccctcctctggtggaaggaatgcaaaactgtcgacagttctggctattgctacctgtttgcactgtctgtcccaaaggtctcctcgacttgca

SEQ ID NO: 171840 - DNA, 122 bp, Homo sapiens
ttttaaatacaagagatggcacaagatttcgggatagtgcccatgtgggcgaccccgacccggtccccgccctgcttgtgccaaggatcctcaggcacccggggcttcctgtttatacagca

SEQ ID NO: 171841 - DNA, 122 bp, Homo sapiens
gacatgttcacttatgaccatttggtctctaaaaatgaactcccatctggaatccaagaccgtggctggcctgaactctggacccacatcacacttccaagaaggaagctagagtggcccct

SEQ ID NO: 171842 - DNA, 122 bp, Homo sapiens
tccgtcagccgaggcgtggccagggctgctgcctcctggaggctgcaggggtccactccccgccttgtccagcttccgaggctgctgccctgctcggctcctgggtcctcctccactttcag

SEQ ID NO: 171843 - DNA, 122 bp, Homo sapiens
accgggtgccggcaggcgccagtcgcaggtgtgctgctgaggcgtgagaatggcgtcccgcggccggcgtccggagcatggcggacccccagagctggtaagtcccggggcccgcggacacc

SEQ ID NO: 171844 - DNA, 122 bp, Homo sapiens
ggaccccccgtcgcccgcccgcccgcccgcgtcttccgggctcgagtgtttaggggagctcgggtgcaatcggagagttagctctttgaggccggctgcccttaaatcctctcacttcacac

SEQ ID NO: 171845 - DNA, 122 bp, Homo sapiens
aggtcacgcgccagttaatctgaacctggggtctggcgccagccccgctcacggtggctgcgaggatggccatgcagcccggtcacgtggggcccgcctgtggagaacggagaggggcacga

SEQ ID NO: 171846 - DNA, 122 bp, Homo sapiens
gctcagaaaagggaaggcagaggcgcctccccggctgggcctgcggagggatgacccacacgcccctcccctcgcttccttggcctggtttcacgcgactagagaaagttaaagacccgtgt

SEQ ID NO: 171847 - DNA, 122 bp, Homo sapiens
cctgactggaagcccgagtgggatgcggctgacgcggaagcggctctgctcgtttcttatcgccctgtactgcctattctccctctacgctgcctaccacgtcttcttcgggcgccgccgcc

SEQ ID NO: 171848 - DNA, 122 bp, Homo sapiens
ctgccaggccagcttcctctgataatgacttactttccaaaaagtttaaaactagatttgcggttaaaggaaaatcctgtgcctcctgaacacagattcacatgttctttctttatgaggtg

SEQ ID NO: 171849 - DNA, 122 bp, Homo sapiens
tgttgctgttgagtcccagctcttcctggaagtccccgtgggcatgactcaaaatggtcccgagctgttctctttctgggctcagcagtgagcacacagcctttgtcccctcatgcactggg

SEQ ID NO: 171850 - DNA, 122 bp, Homo sapiens
ccctgatatcttctgcaaatgttttcaagacatgaagataataccctttgcaaacaccagcgtgccgtggacaaggctgggctttgcttcagccagtggccaggaaagccaagtccatccta

SEQ ID NO: 171851 - DNA, 122 bp, Homo sapiens
tgctaagcccctcattgcccggggccggcagggccggccggctgctccgagtgcggagcccgccaatcccacgcccacctggaactccaggtggcccgcaagcgctgcacgcagccccggtt

SEQ ID NO: 171852 - DNA, 122 bp, Homo sapiens
cacctgcagggggtcctcaaacaatggaaactgcacagctctgtattcatcacagacctccggccaggcctgacacccacccctgtctccaaccttgccgagtcctcccctttcaaccttaa

SEQ ID NO: 171853 - DNA, 122 bp, Homo sapiens
cggacccaaacgctcgcgcctccacactttcaggaataaatcctactcttccgcccaaaacggatcgaccaggctcgatctcccaaccagacccgcgtggcccctgcggctgcaacgggtag

SEQ ID NO: 171854 - DNA, 122 bp, Homo sapiens
taggggtgactgatggaaaggaggagtgaagctccgccctttctgctgctaggctgcgcccgaggcaatttaaacccaccctggctggcctatactcagatcttcgcggagcggatcagcgg

SEQ ID NO: 171855 - DNA, 122 bp, Homo sapiens
ggcctcagtctccatatctgtatggtgggtgagctcagggagtgaggagcttggatgatgcggtttctaagtgtcctttagctctggattccagtgcacgtgcatgtgcagactcgtctgtg

SEQ ID NO: 171856 - DNA, 122 bp, Homo sapiens
tttccaatctgtatgactttcattaaattttatttccctgtttgacaagataggtcttcccgtgcaatgttgagtaggaggggtgaggtggagttccttgccttgttcctgatcttagaggg

SEQ ID NO: 171857 - DNA, 122 bp, Homo sapiens
ccgaagccatcttggtaaaggaagcgcctgggagcacgcggcctgccccggcccgcctcgcgactcaaacactctgcagggaccctcctaagatcaaattggttccccccgctgtcctaagc

SEQ ID NO: 171858 - DNA, 122 bp, Homo sapiens
ttgtgaactcattttatcagttgcacttgccacatttcagaactcaatagtcacatgtggcgagtggctaccatactggacaacactgccccagaccaaaataccaaatcatttaacttttc

SEQ ID NO: 171859 - DNA, 122 bp, Homo sapiens
ggtggggtcgcccggccgcatccccagcctctgcccctgtcccgggtggggtcgcccggccgcatccccagcctctgccctccgacaactcaggcacctgctggtcagctatgaagccttag

SEQ ID NO: 171860 - DNA, 122 bp, Homo sapiens
gcggtagaggagggagatcctgcaccagctccccttcctgtctcccctcagtgtgagcaccgggaactcttcatccgccacatccagggcctcagtctcgaggtccagagcgagctggccgc

SEQ ID NO: 171861 - DNA, 122 bp, Homo sapiens
ggtagattgcaaataacctgctttctttctgttcccgagctgcgttcggacccgtctgatcgtaaatcccatgtaaggtacctgccgtcggaagatttgaacgttctacttggacacctaaa

SEQ ID NO: 171862 - DNA, 122 bp, Homo sapiens
ctgaggcggcgatcaaggacaacccctggcccagaggagggcccttcacaaaaggtggaccgggccccccagcccaccctggtggtgatgctggaagacatcgccagtcctagaccccccgc

SEQ ID NO: 171863 - DNA, 122 bp, Homo sapiens
acatctggactgtgcagagagagccaagatgcgctatgcagatgttttcaaagctgatgccgggtgtcagcagagaatagacatctgggtggatggccggggctcatgctaaagggcagggt

SEQ ID NO: 171864 - DNA, 122 bp, Homo sapiens
aaggtcagagacagacctgaacagctctcttcctaagaggcacaggcaatcactgggcctcgcccgccccaggttgcctgttctcttcaccaccaataaactagagggaccacgatctcaca

SEQ ID NO: 171865 - DNA, 122 bp, Homo sapiens
ggcctcggtcccaggaagtggctcccacagcgcagcggcgggctgaagggctccttaagccggccagagtgggcgctgaggccgaggaggtgccaagagcgagcgagggctgccagcacgct

SEQ ID NO: 171866 - DNA, 122 bp, Homo sapiens
gccccgccccgccggcggacccgccccgcgcccgcggccgccgccgccaaccagagggcgcgggggcggagcaaacggcacgccaggcccaaccaatccagttctaccgcgcgccgaggtga

SEQ ID NO: 171867 - DNA, 122 bp, Homo sapiens
atctctaggggccacctgtactgggcacgtgtcaggatttccttcctctttgaggctgaacgatgctgccttgtgtgtaggggctgcgtcttgttatttgcccgtcggtggacatgtggact

SEQ ID NO: 171868 - DNA, 122 bp, Homo sapiens
cgcctgctgcgcccctagtaacagcgtcagagagtccggggttcccctgattgcgggccacgctgacacagggcttcccactccctgaccttaggttttcctgcctgggaaatgggggttat

SEQ ID NO: 171869 - DNA, 122 bp, Homo sapiens
aaaggggaaggggtgctgggcctggcgggcaaactaaggctgcggaccgttgggcggttccgcggggcgttgtccggagagctgcgaggccggggttcccagggttcacgccacactctagg

SEQ ID NO: 171870 - DNA, 122 bp, Homo sapiens
cagcaaggtgccaggtgcccagtaaatgaagtttacatgaagccaatggagttttgaaatcgaaaatgtttctcaaactgcaaagaagtgggcacaggtgagggctaatggtggggtgaggg

SEQ ID NO: 171871 - DNA, 122 bp, Homo sapiens
aactcttccactccatagccggtcttggcgctgatcagccgcacgtccctgaccactgtgcgggaccagttcggcggattcggattctccccgtcctgtggctcgtccttgacggggcgctg

SEQ ID NO: 171872 - DNA, 122 bp, Homo sapiens
cgtggatgaatacgtttctcgctcgtcctgtagctggacccggcgtcgctggctgggctgcgtcttctcggggaggctgtggactgaatggagccagcctctctctggtacccgaacccaag

SEQ ID NO: 171873 - DNA, 122 bp, Homo sapiens
ttgacccaatccccagtctggcttgacgagccttcgacttgaatactaataataattggccgaattaggattttgtcaaaataccttttttaagcatgagtggaggttttgttctggttatt

SEQ ID NO: 171874 - DNA, 122 bp, Homo sapiens
acctttgacctgcagtagagcctacgtcagaggctggcgcaaacagaagtgcagcggtggcggcggctggttgcgggccggcggcgggctggcggagatggaggtaactcaggtcgggccca

SEQ ID NO: 171875 - DNA, 122 bp, Homo sapiens
ctgtagtctaaagtctagttcctaaaacctaaggtctgctagcatccacctgataagtgtcgattcttagctgataattcccaggcacagagcaaaggcaagatgagagtaatcattccttc

SEQ ID NO: 171876 - DNA, 122 bp, Homo sapiens
aggcccattcattcctgttgcgtttcccatatgtgctgaagatagcaccgcagctggtcccgcgtggcacccctgctgctgcccgttcccttgctgcggcacaggtgcgctgacgccctccc

SEQ ID NO: 171877 - DNA, 122 bp, Homo sapiens
ttttaaatacaaggacatgtcgacttctagttttgtaacatcttgcccaagagcggtggtcgttaatgtgtggagttgggatgacatccaagtcagttggttgcacgacctttattctgtct

SEQ ID NO: 171878 - DNA, 122 bp, Homo sapiens
tgggccagccctctgggattagtcaggaatctgcctctagatcggagagtccacatagtgcgtttgagacggctgtggcggcagcagctggtgcctgtcagtaatcacgcataatgctgccg

SEQ ID NO: 171879 - DNA, 122 bp, Homo sapiens
gcccccccctccccttttcttttcctttggccgcgaggttttgcttccggttgctagcgccggtcagagagaaagtcggcatgttctcgcaggctgccgggcgtcccggggttgcctcttgc

SEQ ID NO: 171880 - DNA, 122 bp, Homo sapiens
tgagaagtgaggagaccctctgcctggcaaccaccccgtctgagaagtgaggagcccctccgcccagcagctgccccgtctgagaagtgaggagcctctccgccccgcagccaccccatctg

SEQ ID NO: 171881 - DNA, 122 bp, Homo sapiens
gtgctctggctttaaactcttccctcccagaggctgttgagcagagggctgtgaggctggcgtcagaagcaaaggcttcctcctcatttccttaaaagtaagaaagcagttctttggcaccc

SEQ ID NO: 171882 - DNA, 122 bp, Homo sapiens
aatcagtaccggttggttgtctgatcgttggatgtgtagatgaataaacgaacggtttgtcgttttacttagactaggctaccgaaaaacatgcaaaagtctaagttacttccgaagggaag

SEQ ID NO: 171883 - DNA, 122 bp, Homo sapiens
ttgtacctctgggttcaaagctcttcccccattttctcttctgaagacaggccctctgtccgcacagttccagtctccagtgaatcctaatgacgactgtcaggagactgcttatgtagagc

SEQ ID NO: 171884 - DNA, 122 bp, Homo sapiens
agcagctgcaggcagcgcttcagctctcgccgcctcgccatcgttggggcgagtcgtcgccgggtcactcccttattatgaccttcgaatctgacagcagggccagcggtggcctccttcag

SEQ ID NO: 171885 - DNA, 122 bp, Homo sapiens
ctttcattcatgggtgtccatgaaggtacgcaacttctatttattttcagaaccactgggcgacatgagatcctcagtggcagaatatttctatatgacctttgcaaagcaaagggtcactc

SEQ ID NO: 171886 - DNA, 122 bp, Homo sapiens
aagagcaataatgctacatatttctaaaagccactctcatacttagagacttaccagacacgtttagaatggattctctagggaggggagagaatgagaacggaggcaagagaagagacgag

SEQ ID NO: 171887 - DNA, 122 bp, Homo sapiens
acggaaaatggcctccccttcctacagctactgcaacgacagacaatccgccccggaaggcgaggcgctaactcaacagtacttccggggcaagtgagcgcccacaaggccaagtgcctgcg

SEQ ID NO: 171888 - DNA, 122 bp, Homo sapiens
gattataaacatgcgccaccacgcccggctaatttttgtattttggtagagacggggtttcgccatgttggccagggtggtctctatctactgacctcctgatccgcccgcctcggcctccc

SEQ ID NO: 171889 - DNA, 122 bp, Homo sapiens
ttatttccacatccttcagggacaccagtccctacgaagaccttgggcgattttgaagtgcgggcacctcgattccccgaatctgtagtgtggctggtatcggtgttcccctggtttaacta

SEQ ID NO: 171890 - DNA, 122 bp, Homo sapiens
aagaacctgagtaacagtaggaagtctctttgtatctggaagctttaccttcgccatcctcggtctatgagatcctgataatcctgtactgtcatggaatgtgcccacatgcctgaaaaaat

SEQ ID NO: 171891 - DNA, 122 bp, Homo sapiens
gagactatggtcaatttgacttcaatgagtggattccttcttatggggttttctgatgagcgtaagcttcagattttacatgcattggtatttctggtgacatacctgctggccttgacagg

SEQ ID NO: 171892 - DNA, 122 bp, Homo sapiens
aaagaaatttccatgagtctaccctggatccttcttgctgcaggaaaagagcacttctcacggatggggtctccaagacattaggacttaatctcattttagaaaagagagggtcagagcca

SEQ ID NO: 171893 - DNA, 122 bp, Homo sapiens
gtctcccatggaccagcgctgtaagtcccatgccctcctgtgctatggtggtgtgagtcccgtgtcctcccattctctgggggtgtgagtcccctgtcttcccgttctctgggagtgtgagt

SEQ ID NO: 171894 - DNA, 122 bp, Homo sapiens
gaggagctggagcagaacaaccgggtgacagagaatgagttcgtgcgctcgctgaaggtccggccgtgtccacgcagtcccggggctcaggacgatggagggcgggggtacggtccttgcgg

SEQ ID NO: 171895 - DNA, 122 bp, Homo sapiens
agcgccgaggcgggctgggcgggctggcgggcgggcgagcgcggggcgggggcgtcgcggcggcgggggtgacaagtcctccggccctgtggccactgacctgggtccccacgcaggcgccc

SEQ ID NO: 171896 - DNA, 122 bp, Homo sapiens
cgacctcatgccgtaaattttactctgtggaaaaaacatctttttggagatttcatgcaacgtgctatctaatacattgagatgcagttgacatttatcgtccctcagtgccgcctggcact

SEQ ID NO: 171897 - DNA, 122 bp, Homo sapiens
ctcctcgcgccggcaagctgaggaagagacggtcccctgcgatttagatacaaacgcgcgcgtgcagggaaggccatcccagggcagacactgccacctccgccgcttccgacgcccgcgct

SEQ ID NO: 171898 - DNA, 122 bp, Homo sapiens
gtctggggctcagatctcgctccaaggcctcctaccttcgggggtcacagggtctcgccccgttctcaatggctttgggtgtagcataggaaggtcctgggtcttccgtggtctcggatccc

SEQ ID NO: 171899 - DNA, 122 bp, Homo sapiens
tctgctacgtactcaccctgtaatgtcgcgggaaatgcataaaagtgaaaagaactcctacgccaaagttccaggtgtggaaaagttattctgagcaaggagctagtcaacagaaaggatgt

SEQ ID NO: 171900 - DNA, 122 bp, Homo sapiens
ttttcaaagtgattccgaggcagtgcgggaggacacacgtgctgtgcagtggagtggggtcgcccgtggcccccatcagagtccccgtcccccaggacaagtgcagaacctctgtgggcccc

SEQ ID NO: 171901 - DNA, 122 bp, Homo sapiens
ccttggcaagctctcggtcagagccggcttgctgtgtgcacatttggctcatctccccggcggatggcagttgcgcagtcatcccgctgatcttcagagtgttggaaggcttcggggctgag

SEQ ID NO: 171902 - DNA, 122 bp, Homo sapiens
aacccacggcgcatcaggtagacatgatcatctgcatttcttttccacgctgcaaatcaccgcgatcccagattagtccagccggccgggtgcctccctcccgtccgcctgggcagttgagg

SEQ ID NO: 171903 - DNA, 122 bp, Homo sapiens
tttaaaccgacagggaagcaattctcggacttacgtggggagaagtgcctgttgcaggggcgaaggggctatgggtattttaaggtccgtagcgatccccagatcactggtacggagaagtg

SEQ ID NO: 171904 - DNA, 122 bp, Homo sapiens
aaaatcataactatagttacatactaaggacttctgtagcggcctctaaatcttcgatctcgacttcttgagcggctccgtcgcctctctttgcttctacttcgctttctttcacggctttt

SEQ ID NO: 171905 - DNA, 122 bp, Homo sapiens
cagccccgtgcagacctgagtgcggggaaggagaatggtgtgaaggggaagccgtcaagacggcagcttaggaatgttctcagggactctctgcgtgtggtcaggaggctggtggtgcaacg

SEQ ID NO: 171906 - DNA, 122 bp, Homo sapiens
gatggggaggcaccggcagggacccgccaggcaggcagctgtcctgtccccgcaggtgcacgttcatcgggaaccaggacacttacgagacccacctggagacttgccgcttcgagggcctg

SEQ ID NO: 171907 - DNA, 122 bp, Homo sapiens
gtaggggaaatgccagatgcttataaaaccatcagatctcgtgagactcaccctctatcacgagaatagcatggggaaacccccctcatgagccagttacctctacctgatcctgcccttga

SEQ ID NO: 171908 - DNA, 122 bp, Homo sapiens
tggtgactaatgtctggcaacaaagcctccattgggtgtcatgtgtcctgggaccctgagcgtgggcactctaggagcacctcagtattgcgtgttagtactatggccgagagaatagttga

SEQ ID NO: 171909 - DNA, 122 bp, Homo sapiens
tacctaatctaatacccaaaatttgggtatgtgaaggtactagtggaagcagatgggagccggacttaggaagttaacctgcagctgtcccaccggccctcttaggacgaatctgacaagac

SEQ ID NO: 171910 - DNA, 122 bp, Homo sapiens
cagcggccacagggaatttctggggaggaaatgcgaagccggcatgagatgtgcagaatgcggtatctctggaaatttctgcagcatatgcccacgccggtgtgcagggacggccccataac

SEQ ID NO: 171911 - DNA, 122 bp, Homo sapiens
accccagcctcatcaccccgggactccccagcatgcactatccccgcatcagccccaccgcgggcaaccagaacggactcctcaacaagacccctccgacagcagcgctgagcgcacctccc

SEQ ID NO: 171912 - DNA, 122 bp, Homo sapiens
tttctcactcgctcttgatttcctgcagaagttactgctagccaggaggcccgggggctccggctgagtgacctggaagacctggaggaagaggaggaggaggaggaggaagctgaagacga

SEQ ID NO: 171913 - DNA, 122 bp, Homo sapiens
ctcgcgccagcgccagtccacgccacatcgcccggccaattggcgcccgtacgcgcttgacgacacaatctcgccaagcttcgcctggtggtgccacctccctggcctgtgacaacggcaga

SEQ ID NO: 171914 - DNA, 122 bp, Homo sapiens
gagttgacgcctcccggggtcgcgcgcttggctgtgaacagggtcttgaggttcagagtccgctttccaggcgcgtcttgatcttctccccttcccaggggcacctgccccttctgttctct

SEQ ID NO: 171915 - DNA, 122 bp, Homo sapiens
actccgtctcaaaaaaagatgttcctagcagggtggcatttgtgtagaattacactacctcggcactattgtaatattgactagatgattctttgctttggggtctgcctcagaattgtgtc

SEQ ID NO: 171916 - DNA, 122 bp, Homo sapiens
cccagtgttggacaaggaagggatatctggttggagaatcagaaaaggcaagggagattacgtttcagatgggccttaaagaataggcccagtagagtggctcacacctgtaatcctagcac

SEQ ID NO: 171917 - DNA, 122 bp, Homo sapiens
agaatttaaacatcagctggcccagtcgtggatgcagttaaacttgtcagtgcaatgtaacgtgtgaaacataataaaggtgtgaggcttttgtggtgcaatcttgttgaacagacatctaa

SEQ ID NO: 171918 - DNA, 122 bp, Homo sapiens
ggtgaatgaaagggattttaaaacattaatttccagcttaggtcttcctaagactgcctgcgtgtcccttaccaccactccagcctgagtgtcacatggatcctgaatgcggacttgtgtgc

SEQ ID NO: 171919 - DNA, 122 bp, Homo sapiens
ctgcatctcaaggagaaacagtgtcactggctaatctgatggcttctctgggcaccagcacgtgggcaccatcaccctttctctgcagggggtttgtttagtgtatttggtagaacatcccc

SEQ ID NO: 171920 - DNA, 122 bp, Homo sapiens
cttcacacactgctccaccagggcacttcaatcctaactgacttaaggactggtttgctgcgtaatgacatagaatttcaaactctgtactcaatctacagcctcttcagatgaaagactaa

SEQ ID NO: 171921 - DNA, 122 bp, Homo sapiens
agatgggaattgaggcataacacgtagacggctgcccactgtggaggagctgaaccttggcggtggggccgcagggtctctctgctccctgtgggaccgcccttttctcactgttgtgagca

SEQ ID NO: 171922 - DNA, 122 bp, Homo sapiens
cgccttcggaccggaaggagttgttggcgcttccggtggcctgcgaccccgtaattgcctcggtgatgtcgtgggttcaagcagcctccttgatccagggccctggagacaaaggggacgtg

SEQ ID NO: 171923 - DNA, 122 bp, Homo sapiens
gtctcggcttctggccttcctctccccctcccctcccctccctcgcgctgtcattcaccccgctcctctccgcgcacagccaatggagagacccagtcgaaaccgcgaagctctcttgcacc

SEQ ID NO: 171924 - DNA, 122 bp, Homo sapiens
ggcagaggagcatcacgactgtactgcacttcccagttctggcagtggcagtggcagcagcggccacatcaggaggggaagaagagaaaagaggagagaagggggttgaggtctgggggcca

SEQ ID NO: 171925 - DNA, 122 bp, Homo sapiens
ctcgggtccccggcatggcagacggggctggctcagaggtctgctctgtggacttggaatcgcacccatcctgtgagcatcttctccccctcacataggcaatttattttattttacttatt

SEQ ID NO: 171926 - DNA, 122 bp, Homo sapiens
cctctgccataaatcagcacccactggggcagagtacaggtcagctgagcacaagaaagacggatagagtgtgctgccaggcgggcccggcctggcaaggaagcatcagtggggacgtaatc

SEQ ID NO: 171927 - DNA, 122 bp, Homo sapiens
agcggttcctggagagaggcggagctgggtgccgagcgtctcagggtgggcggggcgacacggtcccctttttactgtcccgggaactggtcgcctggggcaagtctggatacttagcagca

SEQ ID NO: 171928 - DNA, 122 bp, Homo sapiens
taggaatttcaaagtctcaaagtgaacgacggaaactgaaatctacaaattagaaaaaggcgcagaattttgaatattcttgtcgcccaatcaggacaaggctgggacccggctgcgcggcc

SEQ ID NO: 171929 - DNA, 122 bp, Homo sapiens
gcagggggattacagacaagggctatagggataggatataaagccatgagtgtgtctaaccgttctttattatggtagttgatgaactctatgcccttttacagttcagtttttacctatcc

SEQ ID NO: 171930 - DNA, 122 bp, Homo sapiens
ctttcggcctactctcctggaggggcagggctcggaacataaagctctggcatcaaggcacgcctaaggctatcagggctaagagtggagatagatctcaggcccaaaatcctaggggaaga

SEQ ID NO: 171931 - DNA, 122 bp, Homo sapiens
atcactttccacaaatgaggctagctagctataatctaagatggtggctccactgctagccgaagttttgaaggctctgttttagcccatcccaacactaattaattacaataatcagtgac

SEQ ID NO: 171932 - DNA, 122 bp, Homo sapiens
ctctaacccagatggcgccttgcacatgcagctccatccagcattccccgcacgccaggccgttcttcccagccacgcaggttcgcgcttccaacagtcattcctgcctcgtctctgccaga

SEQ ID NO: 171933 - DNA, 122 bp, Homo sapiens
agccaggagaagccaggccctccgaggagtgctgttagacaggtctcagacaaagagctgcgggtaaggtcatcaaaccccagagctggcgcctcccaggctcccgcctctgcttggcagga

SEQ ID NO: 171934 - DNA, 122 bp, Homo sapiens
aggcgaagcggcgggggacccacctggggccgtttgcagagagtgcgtcctccatctaggcggacttcccaaccctgcaaagcccaggccatttccactggccaacccctttcccgcatatg

SEQ ID NO: 171935 - DNA, 122 bp, Homo sapiens
tgtatatgttgtatattctatacagttgagtcttcagacagggtcaggttctcaagtcagcgtgcaaggtggaaagcccctatagtcaaatgcactgtcgaaaatcccttaggaagtttctc

SEQ ID NO: 171936 - DNA, 122 bp, Homo sapiens
gagtgagtccagcgtggcagccgccactgcctgcccgagggcactgctgggccccccttccgacggcacacagtgggcacctcagatggcaggcctcacagcctcaccatgcacctgtgtga

SEQ ID NO: 171937 - DNA, 122 bp, Homo sapiens
ctcacccatcaccaaggggaagtctatagtccctgaccacagctctttggtttcagctcccgcggtctctcagctggtcaactctgaggaagctgggctggggggtccctgagcactctctg

SEQ ID NO: 171938 - DNA, 122 bp, Homo sapiens
agcaaggctccgtcctcgcctgcttcattattccagaaagagcttggctcctggtggcatcgctatttttataccctggtccaaaggagccatgaagtggaaaaagtgattttttaaaaaat

SEQ ID NO: 171939 - DNA, 122 bp, Homo sapiens
actccggccggctttttgtccgcactctacaagttcgcaaggcgcgggaaccccgcctctcgctgcttattggcccgaaagggctatgccgcccctcactgcccattggctgagagaaactg

SEQ ID NO: 171940 - DNA, 122 bp, Homo sapiens
gcccatccaaccttcggtgctcagacggacctataaccccgacgactatttcaggaagttcgaaccccacctgtactccctcgactccaacagcgacgatgtggactctctgacagacgagg

SEQ ID NO: 171941 - DNA, 122 bp, Homo sapiens
tgcggaatctctgaggaggctgttggctctccccccatgatagctgccggccaggtcgctcggagggtctccctacccaggagacaacctcacactgccccctgctcctgctcctgttagac

SEQ ID NO: 171942 - DNA, 122 bp, Homo sapiens
aagagcggcctggccccgggcagccacacagcagggttctgtgtttcaggatgaagactccgggaaggctgacagcgacgtggctgacgacgtgcctgtggcccaggagaccgtgcaggtca

SEQ ID NO: 171943 - DNA, 122 bp, Homo sapiens
gcaacagtggcgcagactcacccatgagcccactgaggaagacgccgtagagggacagcccggtggtggccgcgttccacacggtacccacgacggcgtacaacaggatggtccccaggttg

SEQ ID NO: 171944 - DNA, 122 bp, Homo sapiens
tttgtctatgcatctgttatggctgtctcaatctgctactggtatttgtatacctattaacgtctctgttggaagctccttgcaagctaagtccatgtctgattaatcaggatttacagtat

SEQ ID NO: 171945 - DNA, 122 bp, Homo sapiens
accgcccgctcagctgggtccaggacactcccgttgctcccagcgccacccccgctgcgccggctccgctgcgttttcccaaggttccagggcagtgtgtccccagggctgggcgagccact

SEQ ID NO: 171946 - DNA, 122 bp, Homo sapiens
cagcaggggaaggcggcccctgagtctccacctggctgctggcagccccacagggaggttcggcgaaactgaggcttgccaaagaagcctttgtccagagtcacgcagctggcgcggtggag

SEQ ID NO: 171947 - DNA, 122 bp, Homo sapiens
cgttgtaaagaaatcaaatgtttggcccagtagccattctcctctctgcttgctccatcacgctgaaaatcaactggtagcttcagctgtagcagacggagccctgagctctcctgacttgt

SEQ ID NO: 171948 - DNA, 122 bp, Homo sapiens
ttcctgaaagccggctccggataggttgcttagaggaagtaggcggttctaaaccgccggcggctaggcctatttccggtaggaatcagtggacttggcggcagaggcagtgcggatccggc

SEQ ID NO: 171949 - DNA, 122 bp, Homo sapiens
gattgggtggaggagtctccttgaggctagaggccggcagttcatggaggctcgggggcacgtgggtggtggttaccacagtgaagttgtgatttggttggggcgtgagatctgagtgccct

SEQ ID NO: 171950 - DNA, 122 bp, Homo sapiens
gatctataaaaacacaccgataaatgtagctaatgctactgttgaaatagaggagtggtgcgtcatgaaatgagggtatgtaccaggagggttggtctaatcagggagttcaggaaagaact

SEQ ID NO: 171951 - DNA, 122 bp, Homo sapiens
accagagggaaaacagagtaagagctacccgtagtaatgatttaattgaaggactggttacgattcctcattatgagcgtggtgttgaaaaacatggattctagagccagagtgtctgaatt

SEQ ID NO: 171952 - DNA, 122 bp, Homo sapiens
gaagtgtagacatgatgtctacacagccaccctgtgtcctgcaagagcccaggctcagagcgtgtgcaccgtgagggccgcctgtgccggagcaggccgcttctccgtagcaaccacatccc

SEQ ID NO: 171953 - DNA, 122 bp, Homo sapiens
ctttcccgcgtggggcaaggaatcccccgagctgccaagtttggggcttaattttcacgccgagtgtataggcagtccccgtctcgggccctttgtaatcgaggagagaatttgtctttgaa

SEQ ID NO: 171954 - DNA, 122 bp, Homo sapiens
ttttctccggaggcccctgggactttgttgcaattgggttcagcccgggcatgggctgaacgtggacgcgcgggaaccgcgcctcggtttccccatctgtgaaacctggaggctgtattagg

SEQ ID NO: 171955 - DNA, 122 bp, Homo sapiens
agtatgcaaagcaagcgtcccctcccgccgctcctgcgagctctactaccgaatgccttacgcagcccttgtgtttggggaaagagggggacctatacagaatgaaaaaacacagagggctt

SEQ ID NO: 171956 - DNA, 122 bp, Homo sapiens
tatcctttcactatcttctgtctctgagtccccagagacccagattcttttcaaacacagcgctatccagcttcttgtcatgttagaaaaactctgtaaataaattcacatcctcagataga

SEQ ID NO: 171957 - DNA, 122 bp, Homo sapiens
aagggctgagcaattaaggtgattgtggaggtcataatcactgtagcttgctgtgaagttcgtgtgaatatttgaatatcaatgcatgtaatatatgcagaattaattttcagaagccaggc

SEQ ID NO: 171958 - DNA, 122 bp, Homo sapiens
gaactcaaccctaaccgcgccgcgcgccccgctccctgggcctcagtgcgggtgatggcacggactggccactctaattctagcagctgcgaattcctgggacagggtggggtgacctccac

SEQ ID NO: 171959 - DNA, 122 bp, Homo sapiens
tcaagtgctttaaaatgaaggctgagtcaaccgttggcttgcgtaaacaccaattttccacggtgaaaaaggtttccttcagaaagatcaatttaaacaaaatactttaagagaaagaaaca

SEQ ID NO: 171960 - DNA, 122 bp, Homo sapiens
cccagggcagcagagcattccctggccttccctgctggtgccagctccttaccacagagacgccgcgtggaactcactactggcgatcgcggacgccccaggaaggcgagtggcacgaggtg

SEQ ID NO: 171961 - DNA, 122 bp, Homo sapiens
cgaggaaaggacgctccaggcagacccctggcaagcgaaagcatggatgtagtccaggttcggggcttggaggggcatggagacagaaagagaagcgctcaaacgcaggccaacgctgggca

SEQ ID NO: 171962 - DNA, 122 bp, Homo sapiens
cccaacctgaacttcgtttttataaacgtcccgcgatgagctaacctgttggagggcaggcgggccggaggcgggaggctcacagagggagagagggctagaggaagagggcgggagcgagc

SEQ ID NO: 171963 - DNA, 122 bp, Homo sapiens
ggccggttgcctgattttgccgcctgggggtctggcctcaggatccacgctactgcggggcgggcctggtctggagtgtccagtcacttgctgccagtgcaccacgtctagactgcagctgc

SEQ ID NO: 171964 - DNA, 122 bp, Homo sapiens
cggcttcctgtgccccggccagggtggatcgcaccagataatgactgatagccgtggaaacggggagacaagatagaggggaggccggctgcagcggcagacccccggagccagggagggga

SEQ ID NO: 171965 - DNA, 122 bp, Homo sapiens
ttacccgggcattgcacttctctccaggacagtttccctggctgtaaataggactaaggacgaggtccagctccgctgtttatctgtgtgccttaggaacagccatttaattacctcatctc

SEQ ID NO: 171966 - DNA, 122 bp, Homo sapiens
taattgttataggaacgaaaacatagtttatccttatttgagccagatgtaatggtaagccgtagtatcagaacatttaaacatagatgggaacattttcctgtttctaccatccttaagga

SEQ ID NO: 171967 - DNA, 122 bp, Homo sapiens
gcactgccccatccgtcctcctgggtgacagctgctggcctttccaggtgcacattccaccgcccccgcccgcctactgggctcaaggcaagagctgcagcccagcaaagcctctgatctct

SEQ ID NO: 171968 - DNA, 122 bp, Homo sapiens
gctgcaagtccttcttcccggtagctgcagagtcttacatggcatgccgccgctgaggcccgagccggtcactaggtctttttaaccggggctgtccctcggcctccctcgtgctcctcgcc

SEQ ID NO: 171969 - DNA, 122 bp, Homo sapiens
agaggataatgagcttaacatacctgtgagaagtttcaggtggaggtatctggtggccttcggcacagcaagtggtaggcacagggagttggctatatgctgtagagaaaatataggtgggc

SEQ ID NO: 171970 - DNA, 122 bp, Homo sapiens
accctggtgagaaaacacccgcggtgggaggagagcgcacgccggtgttgcacacgctcccgtgtcactttccctggtggtctaaagacatggtattcactcaccaacatcccactgcattg

SEQ ID NO: 171971 - DNA, 122 bp, Homo sapiens
accctctgctctgcatcagggcagcgtgggtttcccacagaggaggcacgacacgggagccgaggccctcccccacaccacccctgtgtccttcagcacctcctacagactccctccccttg

SEQ ID NO: 171972 - DNA, 122 bp, Homo sapiens
ctcattttgaagtaggctggggaagttaaactgcctctgggagtcctgggcacaccctttcgtggcaggaatatcactaatagctacctgggctctctgagcacctgctaatgaagccagat

SEQ ID NO: 171973 - DNA, 122 bp, Homo sapiens
tgagtggcagcccctggagcctaacaggagtccaggctctccaaggctgtggcagaagaccgtgaccttgagtggaagctggagggttgaaggccattagggagtaagagaggacaagagag

SEQ ID NO: 171974 - DNA, 122 bp, Homo sapiens
atggagcggcgggcgccgtgggtggagcaggaggggctggagtattgggaccaggagacacggaacgccaagggccacgcgcagatttaccgagtgaacctgcggaccctgctccgctatta

SEQ ID NO: 171975 - DNA, 122 bp, Homo sapiens
ggcagtcgtagatgaagactatggtggtcacgaggcccgtggtctgcagagaggttttggcgggctccgagccatcgatggaggagcgccgcttgccctgcgcgtcctccaccacgatggtg

SEQ ID NO: 171976 - DNA, 122 bp, Homo sapiens
ggagaagaggaaccccttgcggagtggcaccccagcggcccgggccccgacgcccagagacgattctcagggagggcttctggttttgctttggggaatgtttttcccagttgcttttaaat

SEQ ID NO: 171977 - DNA, 122 bp, Homo sapiens
ggcgctggcgcttgacaggactcagcctctctcccctcctgcgccagtgagccatgaatccggctgcggcacttcatgaaatactcatgggccgactgcaccaggcttgcgggcggcggggg

SEQ ID NO: 171978 - DNA, 122 bp, Homo sapiens
gaagcagaagtggggctgagggtcccgtgggaagtgccctgtggagcacaggctcctgcccggctcctcgcttgcctccgccctctgctcactggctagctctctgttctcttcattccagg

SEQ ID NO: 171979 - DNA, 122 bp, Homo sapiens
gcattggcacgagttactataaactccctctgaatctcaagacttctgggacgccgattccgctcctggcctggggcaaggcgtgggagcttggaagccagcgctgcgctccccgtgggaag

SEQ ID NO: 171980 - DNA, 122 bp, Homo sapiens
tgtgcaggaggagagggcgaggctctgcagaaacatcagacccggccatccctgtagccgcgcccctggcccagcctcaggctctgcagctgggacacagcccccgaaaacggagatttccg

SEQ ID NO: 171981 - DNA, 122 bp, Homo sapiens
cataggtgctgagataacctcttgaaaaagatacaattctctccatactctgttctctagcggagaaccatgacaccactctaaatccagcctcaggtcgtcttaggctctctttcctgggt

SEQ ID NO: 171982 - DNA, 122 bp, Homo sapiens
tttaaatcctttgcagtgagtactgcttttagaagattccttgactccatcagctgaatgcgtgctcatctgctgatccctcccttggtttccgccctgttttggggaatgttaggctggac

SEQ ID NO: 171983 - DNA, 122 bp, Homo sapiens
ggcatctggggcaacctggggagggcccagttcaggcctgctcaggacgagagcccctcccggcagagtcaggaagcgcaggcctgggctgccagtgaggtgtgggcccaggcaggggcgag

SEQ ID NO: 171984 - DNA, 122 bp, Homo sapiens
tgtctggcccgggccagggtggctccccggggagacgtcggcaggcctgggggtgtgggtcggccctgagcagctgttctgggagagccagtccacggagccaaagctggagggctgctgcc

SEQ ID NO: 171985 - DNA, 122 bp, Homo sapiens
catatattcctgcccagccactgactgcccagccccaaaacactacctggaatcagccaccggacctttgtcccaggtttcctggctcagcccggctgggtggagcctccctctggccctct

SEQ ID NO: 171986 - DNA, 122 bp, Homo sapiens
cagtcacactcacgcacgccagccccccgtgagccacggccctcagtgagtttcctgcatcgggcagcattggctcatcgacagtgacacagtcacacacgttcacgcccaggcgctgtgcc

SEQ ID NO: 171987 - DNA, 122 bp, Homo sapiens
cagcagcggggtggcctgcctgttcagtggtcccggggtccccgggacctctgttggctgcggcccactgcgggctgcaaccgcgggccggggccgcggggatgtgcaaagggcagcgtcgg

SEQ ID NO: 171988 - DNA, 122 bp, Homo sapiens
tatttgatcttagttctgacctagagcctccaccttctccatccaaatcaccacagtggtcgaaaagggcctgtgcttgggaaatccttcctttgttggcgaatcttggacccaaaccctgc

SEQ ID NO: 171989 - DNA, 122 bp, Homo sapiens
agttcttccgggaccagggccggcaggtcagagtggaggagagggaagatgggtccgaggcgggggacagaaggggcagagttgtcatcttggagactaaagaatatttgttccctgactct

SEQ ID NO: 171990 - DNA, 122 bp, Homo sapiens
acccaatggcattccagaaagatccatggaccccaaccctcggcattcccagggtgcccacgcgcccagtggcattccagaaagatccatggatccctgaccctcagtgttcccagggtgcc

SEQ ID NO: 171991 - DNA, 122 bp, Homo sapiens
gagctctttctttgtacctggagctaagaatgtacagtagtgaacatgatagccccagcccgaaaggagcttatgatctactggagaaaacacagaaggaaatagattttaggacaaggcag

SEQ ID NO: 171992 - DNA, 122 bp, Homo sapiens
gtggacactgaaaagaaggtcattatcaatttggggacttgagaaatgattcctgaagctcgaggggctccctagcagcctctacatccaccatccggtcatggttcatgtggggtgatgca

SEQ ID NO: 171993 - DNA, 122 bp, Homo sapiens
attagtaaagcccttctcctgggagagggacttaccatcaggcctgagaaagaagtcaggcgtgcttggaatgcaattgcaaaagaggttacaagagcctgtgagaatgccgaaatcaagtg

SEQ ID NO: 171994 - DNA, 122 bp, Homo sapiens
tgcttcagcaagaggccacatgctttacctcacaggtgacagagggatcatggatgaagacggctacttctggtggtctggtagagttgatgatgttgccaatgcattgggtcagagattgt

SEQ ID NO: 171995 - DNA, 122 bp, Homo sapiens
cgcagcgtcctgggaacccagcccttctcagccggtaaccactgctgctgggacccggtgcgcgatagacaggcacataccccaggggcctgcaacaaatgaccgtcccgctccgggctctg

SEQ ID NO: 171996 - DNA, 122 bp, Homo sapiens
ccccttgaggatgggaatagaaagggctgtcaggtcagcttgaaaggagagaggggaatccgataaccttttagttagcgaatgctatacagcagtccagctaataagggaggtttctattt

SEQ ID NO: 171997 - DNA, 122 bp, Homo sapiens
ggcgccgtcacctgcagcgcgactgagcgcgggaggacgctctagccaccctagagacatcgaaactcttcccaggccttgcagcacccgtagcggattcggaagggctggggcctgagaag

SEQ ID NO: 171998 - DNA, 122 bp, Homo sapiens
ggtttctaaacacgtgaagggcacagggcttgaaagacaaggaggggcgcccaggaagggcggaaaagaggggctttggggctccccaggacaccaagtcagtttctgaaaacggcgttccc

SEQ ID NO: 171999 - DNA, 122 bp, Homo sapiens
ctctctcccccaggggattttcatctcaacaacagagtgtcctcacccaggcctgccttccggccagtatgggcttgtacatcaggcaccttcctgcatgtgtggcctccggcctgccctcc

SEQ ID NO: 172000 - DNA, 122 bp, Homo sapiens
tggctaacatccttcatgcgttcagtgaccatcagagcagtctccctcgtgtaaattcggcgcgtaccaggctggggacagtgctcactctattcgagaggtctgggcaagcctcccagcag

SEQ ID NO: 172001 - DNA, 122 bp, Homo sapiens
tacagtccagcttcggctcggcatcagagggagacggtggaaagagagggagagggagaccgtggggagagggagagggagagggcaataaaatttatgtatatataaattattattgttgc

SEQ ID NO: 172002 - DNA, 122 bp, Homo sapiens
atttttaggtagaggtagggtcttcctatgttgcccaggatggtcttcaaatcttggtctcgagcaatgctaccaccttggcctcccaatgctctgggattacagacatgaaccacagtgcc

SEQ ID NO: 172003 - DNA, 122 bp, Homo sapiens
gaggaaattggttgaggaacggagtgggacgcccatgccgcttcgccagcacttgccaggcgttccgtggggcagcatctcctctgaagggccgccgacagtaccacgccaatggaacggcg

SEQ ID NO: 172004 - DNA, 122 bp, Homo sapiens
ctgcgcttccccacaagcccccgcggcctcgccccgccccctttagcctgggcttgagcgcgcgcagaagtcagcttcgtgacttccttctcaggatggaaccagcttggtggcttgagggt

SEQ ID NO: 172005 - DNA, 122 bp, Homo sapiens
ggggcgaggcgccggagtccctgccctgagtacagggaggctctctgcgtcgctgagaaacgtcggatctccaacccgacatgtctcctgtggcccaggcggcccgccctggactcgggcaa

SEQ ID NO: 172006 - DNA, 122 bp, Homo sapiens
cagtgactgtgggtgggaccgggtggcctcacagggccaggcccctcaggacctgcaggacgaggacgtggccaccttcttggccttggcccaggacgccctggacatgacctttggcctca

SEQ ID NO: 172007 - DNA, 122 bp, Homo sapiens
acacttccctactttggaactgtgctatgggcaagatgggagcaggcgctgaatccgtggcgcatggggaaagcggcggtcggagtggggcttcctggcctgtcacctcctcctgagctgct

SEQ ID NO: 172008 - DNA, 122 bp, Homo sapiens
ggagtccagtcagaaacatgtttgtctacgaggtagtatatctggtatttctgaggaattcggttattatataggattatagaatattcaactttgagtagggtctgtggactccatcaatt

SEQ ID NO: 172009 - DNA, 122 bp, Homo sapiens
acacaaactgcctgttcttagccgcctcgggaagccgggattgtcagcaatgtccccactcggagaagatccattctctggctcttggcatcccaggcacacggcttcctcaggcgggctcc

SEQ ID NO: 172010 - DNA, 122 bp, Homo sapiens
ggcaaggcagccttcccggggtgcggcggcagctccggctcccgggccgcgactgctgtgcgctcgtctcgccgctccgtcacccgctgcccgtccgcccgctgacagctctgctgcgctcg

SEQ ID NO: 172011 - DNA, 122 bp, Homo sapiens
tttaagcttctttgctgttctaaagccctgattctttgatttattaaccctcactttgaacgcctccttactgacatctttatcctcttcatagggaccattatgttggatttttctctcct

SEQ ID NO: 172012 - DNA, 122 bp, Homo sapiens
ttaggagagcggcgccagcggcccgcgggggcttcagagggcgagcagagctgggccccccggtgggtgcccctgggagaagcgcatgttccagctgcctcccaccctgggcgcgcgtctca

SEQ ID NO: 172013 - DNA, 122 bp, Homo sapiens
cgccatggacgcagccatcttggaccgggaacaaggcggcacttcgtcccgcccactccgcgtttagaccaattgcaaggcagcgaacctgaccgtgacgagccaatcagatcctgaggaaa

SEQ ID NO: 172014 - DNA, 122 bp, Homo sapiens
cttcagctgtgaaggtaggtgtgcaattaccattagtccaatcaggaataaagagaatgacgatctacaaggttaagtgacctttccaaggtcaaagaagtggtggcactcgaaggccgggc

SEQ ID NO: 172015 - DNA, 122 bp, Homo sapiens
gacaagaccaaacagctggccaatttttctgcccagtttcctcctgaagagtggcccctgcgagacgaggacacgccagctacgatccctcgggaagtagagatggaaatcattaggcgcat

SEQ ID NO: 172016 - DNA, 122 bp, Homo sapiens
ttgatacaagatttcatttaaagctgtttaaccagagagggtcgccatgggaaagtaaaccgctgacagaatatattaggttcacattaatttacagtggtagcataatgcttatgaaaaat

SEQ ID NO: 172017 - DNA, 122 bp, Homo sapiens
catctctggtgacagtggttgctggcaaggtttctgctgtttccatgttcctggctctgacgatggaattagctctaaggagatttaggtgtgggggtcccagagctagggctttcagtccc

SEQ ID NO: 172018 - DNA, 122 bp, Homo sapiens
cgagcaacagcaagtccgagttgtacgggcaacggcagcaccttgggctttttcagcctccgacgacgacgtctcgccgcaagcccacgccgtgcgcctccgccgccacggcgaggaaaaag

SEQ ID NO: 172019 - DNA, 122 bp, Homo sapiens
actgcttaacgaagtaatcggagcgcagccaatgccggtgggcgcccgccgggccatctccgccgtcactggctcggtgtccactttatggagcgcggagtctattaagaccttggcgagtg

SEQ ID NO: 172020 - DNA, 122 bp, Homo sapiens
tagctaacctgtgtactctctgtgatgggacctgagttcattcatggcatgtccaggccacggggtttagtgcagtgcctcctgcacagcagtagggcagcaaatgttcctcgtgacccatt

SEQ ID NO: 172021 - DNA, 122 bp, Homo sapiens
ttgccctgcatggtccctgtgcgcgtcccggccgcggggccatcgcccgcctcgtccgcccgcccgaccacttgttaaggctccgcccggcgctccccgcgcccacgccccatcccgcgcgc

SEQ ID NO: 172022 - DNA, 122 bp, Homo sapiens
tcagacaacttccagaatttatctgggtctcagtttgtccttctgcaaaataggagcagtcgtctgtgcctcacatgcgggagtggttgttgaggactcatgcatgagtggggaatatgctc

SEQ ID NO: 172023 - DNA, 122 bp, Homo sapiens
caactcggataattcttacatgcaagcagatgcaatgatatccacggaggcaaaacgtggcgtgcatttgtttacctgtactctgtgctgttggaagcggattgccagtgaggccggacaca

SEQ ID NO: 172024 - DNA, 122 bp, Homo sapiens
ggctggcctggcggtgccgaggtgcctggaggcaggactgtttcaggaccccgatggggacgtagaggatgcgggaagcccatgagtgcctcctgtgcgcgagcgctttggtgagcgccgtg

SEQ ID NO: 172025 - DNA, 122 bp, Homo sapiens
agagaccacttaggaagctgttgcagtaactctggcatgaaatgttggtgatcaaaaccacggtggtggcagtgggaaaggaggcaagtggaggagtccagaaatatacacaaagttgaggt

SEQ ID NO: 172026 - DNA, 122 bp, Homo sapiens
cagactgaaactgcatggccttgggggaagctagggctgccaaacccattcagcagctcccgccgggtgtgccgtgtcccacggtatgcgtgggtgcgaggggtgagcgccgcgccggggtg

SEQ ID NO: 172027 - DNA, 122 bp, Homo sapiens
tgttgctgtgtctgacctgtcccatctcgagtgagtgcaggcaccagccgccctgctgtgcgatggcatctgatcagcactggtacccgctccacgccctgagctgctgggataggctgcag

SEQ ID NO: 172028 - DNA, 122 bp, Homo sapiens
caggcagctgaagagtgggatggaggcgggactaaaccaggctgggctggaggaaaagggcggggcctgcaagcctgtctcttggcagcaggctctggcagccaaaccgtccaagctagcgc

SEQ ID NO: 172029 - DNA, 122 bp, Homo sapiens
tacaatctaccctaacagtatatttgcatcacttcttaaactttgtttagtattttaacacgctgtttcttattatatgggaagaatgctgtgaggtagcatgttaatgttttgcagattaa

SEQ ID NO: 172030 - DNA, 122 bp, Homo sapiens
actcttaaaacgcctttgacgtcaaatagctggattcaaatcatagattcattacggcctcgttgtgtgactgttaggcaagttccgtagcttcttctcttagccttcatttcaaatagaaa

SEQ ID NO: 172031 - DNA, 122 bp, Homo sapiens
gcccttttcccaacgctcccatcccgccacgcctcccaacatacccccaccccgacttcccgctcaactcccgctccagccagtcccaggagccacatgcgcatgcgccctcccgcgcccct

SEQ ID NO: 172032 - DNA, 122 bp, Homo sapiens
gagagaagatataaggaatgtttcagacagagatcgtcaagcaagatggaaaaaataagacgtctaagcaagactgagattaaagagatgcaatgtgagagagtgtattacaaggttcgctc

SEQ ID NO: 172033 - DNA, 122 bp, Homo sapiens
tcaagtgcagggtgtggctatgaaagtcggtagaggaagtagagggcgaatgatgtttgacgcatttgaggagctctaagttgttgaatctaagttgttggatgagtcaactatatagattt

SEQ ID NO: 172034 - DNA, 122 bp, Homo sapiens
agggtagaattaaaaagtaacccaaatctcctttgttcttcaggaggggactgacaagaacgtttgcagtcggtagtgttcctcagtactcatcaatttgtgagccacaagaaattctagct

SEQ ID NO: 172035 - DNA, 122 bp, Homo sapiens
tcatcagagtcacattcggggaactggtagatgtggatctcctcttccttcaactgatcccggatctcaggggaaacagatatagagacagtgtgaaacgggccacaatgacagacatttca

SEQ ID NO: 172036 - DNA, 122 bp, Homo sapiens
tagacatattaagttttctcagttctttcttgtgatcaaactgcataggatgaagccgttcgatgccctgactttccaaagggcggatgataagatcatcacattggaactgattgccaaac

SEQ ID NO: 172037 - DNA, 122 bp, Homo sapiens
attgtctcgacaccagaacttgccattagagatgactttaccctggacactaaaaatctccgccccagcaatgcctggggactgcctcttctaaggcacaaactgaacccaggacacttggt

SEQ ID NO: 172038 - DNA, 122 bp, Homo sapiens
cctggtcgggtgggaggcctaggggccgaatctgcctggtcgggcgggaggcctaggggccgagtctgcctggtcgggtgggaggcctaggggccgagtctccctggtcgggtgggaggcct

SEQ ID NO: 172039 - DNA, 122 bp, Homo sapiens
aggtcggggcagcagctttctgggaggagacacgcaggggctgtggggaggctgcaaggccgtggcgctggtgtggcaccacctgtccggccacccctgactgccgtggtccccaccccttc

SEQ ID NO: 172040 - DNA, 122 bp, Homo sapiens
agaaggagcgcgaccgtctccctcttagtgtttctgcagagagtttctgcagagaaggagcgcagccgtctccctcttagtgtttctgcagagaaggagcgcgaccgtctcccctcttagtg

SEQ ID NO: 172041 - DNA, 122 bp, Homo sapiens
cctgtgtctgtcttgagtatgagtgtgatttgttttccgatcagcgtccgagctaaactccggtcgcagtgtgggacccactaccactcttttgtggtgtatgtgtgtgtgtgttgcggaag

SEQ ID NO: 172042 - DNA, 122 bp, Homo sapiens
aatttcctgatattcatatctcgaatcaaagtgatgattactgggtgactgccgttgaggcgctctgacctcctcctggtcccggacatagctgacccccgctctccggcatccaccggacg

SEQ ID NO: 172043 - DNA, 122 bp, Homo sapiens
caggtggcatgcctgtggagctggggagcaggatgagtcaccttgctcctgcaaggagtgcgggctgcagggtgatctggcactgtgggaaatggggcagttttctagtgagtcttctccgc

SEQ ID NO: 172044 - DNA, 122 bp, Homo sapiens
ggggacagcctggtacttgacagcaactgatgcagagggaagagccccaggtccggggaacgaggacgaagatctgggtgctgagttgttgcttgtcctctggggctcatcttcctcatctc

SEQ ID NO: 172045 - DNA, 122 bp, Homo sapiens
cgctctctgcccccccaccccgccccttcctcctctccaccgcctctggctggctaggctcgctgttgctacctctcctcgcagatgcaacgaggtaaggcttgtttgcggtgccagctgaa

SEQ ID NO: 172046 - DNA, 122 bp, Homo sapiens
ggccagacaaagccccggcagcagggccggcacttccgagcctccggactcgggacgccgcgctcttaccctggcctcatccagagtgacgccggcgccaccgcttcccccggctttggcgg

SEQ ID NO: 172047 - DNA, 122 bp, Homo sapiens
tgtttggccaggggctaggcaggattgatttatgttctcaagtgcgccccctggcggctgcggggagaacagccttggcgggggcggtggaggcgccaggtgagagaccagatgagatggtc

SEQ ID NO: 172048 - DNA, 122 bp, Homo sapiens
cgaacacctgaggccaggggtctgaccagccccagacaagtcctgggagcgtgcctgtcccgggcaccccgtggcctccccggcagtgcagaggccggccggtgctctttggaaggggttgc

SEQ ID NO: 172049 - DNA, 122 bp, Homo sapiens
gcagtcaggaaacagttcctctgggtttaatcatcccattcccgattcttcttcccctagcgcgccgagcgcagccagttctggaggaactagccctccggagcagccaaggcaggccaggc

SEQ ID NO: 172050 - DNA, 122 bp, Homo sapiens
acacctcctggaatatggcattttgttcctcttctcatctgtggccactttgtgaaccctcgggtgtttgtcagtttcagtgcgggctcctgcgggatttaggtgggagtcttaggagcgtt

SEQ ID NO: 172051 - DNA, 122 bp, Homo sapiens
agcacctccatttctaaatccattgtcccaaacatgcttctcttattgtaaatagaaaagcgaagaattaaagctctctgggaaatgaaggaaaggaaaagcccctttcccaagttacctaa

SEQ ID NO: 172052 - DNA, 122 bp, Homo sapiens
gtgcacccgatcctgtgataaccccaaatctacccccggaattccttttggggatagggtcgcaaggaacgggctccgttgagtcttttactggggaagggatactagtgggggtgatgaac

SEQ ID NO: 172053 - DNA, 122 bp, Homo sapiens
ctcttcctgggtttgaagaagtcgcatttaaagttctgagctgaaggggctcctttatttcgttaggtgctttcttcccgatcacgtccctgagaccacttctcgcctccctgtgcctctaa

SEQ ID NO: 172054 - DNA, 122 bp, Homo sapiens
gtatatctgattcatcttggaacctctgtggagctgctgcttgggacaggacagggcagacgaggggctctgaagtccagcctgtctgggttttgattttagctttgccacttatcaacaaa

SEQ ID NO: 172055 - DNA, 122 bp, Homo sapiens
aaattttacccactagacgacaaagtaggcaaacttacctctaaacgaaccccagaatggcggccgcccgctcgggtggagtcttttatacccggacgccgcccaacgcgcccaaacgtgct

SEQ ID NO: 172056 - DNA, 122 bp, Homo sapiens
gatgaaaacttcaggggaagaataattggggggcaagtcaagaataaacatgacagtttccgtaatacactttttggaacaggttccttgttacttttggggctgtagaaatatctaggcca

SEQ ID NO: 172057 - DNA, 122 bp, Homo sapiens
gcgcagcggtcggaagcaccaggctcggagcgggcggcctcgtggctttagagacgggctcgggccccgcccaccggcgggtgcagctgagggcgcggccgaaggtgcccgacgccgcccac

SEQ ID NO: 172058 - DNA, 122 bp, Homo sapiens
agcggtagtggcaggtgccacagcagaagcggtaggagccggtgctgcagttgaaggtggcgtcgtactggcccatgacatcgtagtagccgtggcagagctcggcgggagggggcgcccgg

SEQ ID NO: 172059 - DNA, 122 bp, Homo sapiens
ccccgagaaaggctgtggggcgggccgggggcgggcgcccgcactcaggtccctccgcagcgggttctcagttgctcgctgggcagacccaggtcgcgctcccactgccgagcccgcgaggt

SEQ ID NO: 172060 - DNA, 122 bp, Homo sapiens
tcccttcatggagcgccacaccacgtcatgagagcgccacgttacatcatgagagcgccacgttacatcatgagagtgccacgtcacatcatgagagcgccacgtgacatcatgagagcgcc

SEQ ID NO: 172061 - DNA, 122 bp, Homo sapiens
aaaagtttcagattttagagcgtctcagatttcgtattttcagattaaagatactcaacccgtatcaactatgtacagcatattaagacgtgtgtactaaatgcattactctaaatgcttca

SEQ ID NO: 172062 - DNA, 122 bp, Homo sapiens
tcaggctcagcctaaggccttggactgagcaggtttcaatgagctctgggcccctggccacggttgcatctccggccgtcagtcctaagcctcgctctggggactgtctagagtggtaggtg

SEQ ID NO: 172063 - DNA, 122 bp, Homo sapiens
cgctggcagcttacctgtcctggatgctatgactttgctgaacggagctgctcctgttagcgcgccctgtggctgcgagacgcagctccgcagtggccgataaagcaaacccggccgggctg

SEQ ID NO: 172064 - DNA, 122 bp, Homo sapiens
tgggagggcagcccgcctggagccctactgcctctgctccctctgggggtcctggggacccgatggccaccactctgccacacgagccgcgcgctcacacactcctcacccgccggccacat

SEQ ID NO: 172065 - DNA, 122 bp, Homo sapiens
ttgggatgactgatgcaaagccaagttctacagcagattaaaaataatacaggtttctttcggggaatgtcttcagtatcctcaaaagggaactgattcagtaacctgtagaagataggacc

SEQ ID NO: 172066 - DNA, 122 bp, Homo sapiens
gggaggcccacgtatggcgcctctccaaaggctgcagaagtttcttgctaacaaaaagtccgcacattcgagcaaagacaggctttagcgagttattaaaaacttaggggcgctcttgtccc

SEQ ID NO: 172067 - DNA, 122 bp, Homo sapiens
gataagataggtgggcgagtctcacttgggcaacgtaactttgagagttctgcttacggtcgcagggtcaaccaacttgttgttgggaccccggagctgaatggctttcctctctgtcgacc

SEQ ID NO: 172068 - DNA, 122 bp, Homo sapiens
ccattgttcggggtcactatgactgaccacaaggccaactaatccactttaaggtcgtgacgcgatagtcaggcgggttggccaatagacataggaaaagagcggaagtcagctggtgaaga

SEQ ID NO: 172069 - DNA, 122 bp, Homo sapiens
tgatacaatctacctctctgcatttcttgttctcctttaacactgctgtgtgcttcctcccgagcattatgctgatactatactgatcacgttcatcaatgccctgctaattactaatggaa

SEQ ID NO: 172070 - DNA, 122 bp, Homo sapiens
ccatgacgtgagtggcccctgtgacattagtggaccccgtggcatgagtggctgccatgacgtgagtggcccccgtgatgtgagtggcccccgtgacattagtggaccccgtggcgtgagtg

SEQ ID NO: 172071 - DNA, 122 bp, Homo sapiens
cttctgctgaactgtgcttttccctgcactgtgtcagaagaggcaggtgggtgccgggagcgctctgtggccaaggctctgatcacaagctgccaaccccggaaccccacctatcctacttg

SEQ ID NO: 172072 - DNA, 122 bp, Homo sapiens
tagcggcttcagggcccagccacacccttctccacgtacgtgttccagacccagtcaccccgagcagggagaaccaaccctcataataagaactgtggagattggacctgtggtataagtag

SEQ ID NO: 172073 - DNA, 122 bp, Homo sapiens
gggcccggctggcggtgacctgcagtcacctctctgccggaggggccctggaatgaaaggcgcgcgggccaaggtgacctcgccttggttggcactgcggctcagcccccgcccggggactc

SEQ ID NO: 172074 - DNA, 122 bp, Homo sapiens
tcccatctctctagcagctgcgtccgttccaagcatcagaggtttctgtgccagggcaaccggactggattccacagggcagccctgcccgggactgacactcaccaatttgctaatctctt

SEQ ID NO: 172075 - DNA, 122 bp, Homo sapiens
tgcctggatttctccccttacacacacgtgcacaggctcagcagtaaagtcgtgggaggtcgcttgacaggaaagttccaaattcagtcccaaagctccaagtatgcagttgggcatttaaa

SEQ ID NO: 172076 - DNA, 122 bp, Homo sapiens
atgagacactttggcaaaggccatgtttgcagggaaaacacttgcaaccacaagcaaactcgccgctccctgggtcccttcccagtggactctgcacattgggagccttataaagtagcctc

SEQ ID NO: 172077 - DNA, 122 bp, Homo sapiens
ctgagaggagacgcctctccccacctgtcctgggagtccacttgtgccatgatgttcaggcgcttctattgcctactcctctgaggaggagtatcctgcttggctcaggatacctgcaaaaa

SEQ ID NO: 172078 - DNA, 122 bp, Homo sapiens
tatgctcaagcagatggacttacctagttcacaagcgagagcaggtagaacgtggggcagcgggctgtgagctgacagcaggagctggaaccttttattgaggtcctaattgcacagttaag

SEQ ID NO: 172079 - DNA, 122 bp, Homo sapiens
accagtgtaatgactttggcttttattctggagtgagagctcatctttaaaatagagaagcgcatagatctgatttacagtttaaaagaatcgctctggctgatgtattgaaagtagattct

SEQ ID NO: 172080 - DNA, 122 bp, Homo sapiens
gaattgatgtgggatctcttcaacaagctggtcctgagacgcaagcgtaggaggcagggccgctgtctgccatgggctgtggcatcgttaattctctcttgcctttttcttcctgtgtttaa

SEQ ID NO: 172081 - DNA, 122 bp, Homo sapiens
tacccttgctattgcttcctgctggagagctattcacagtccccgatgagcagtcagatccggccccattgtttccaccgtggccaaggaaccagggatgagaacagctgagttcctaactt

SEQ ID NO: 172082 - DNA, 122 bp, Homo sapiens
agagcacctggacaaggtgtgtaggacagctaccccgtttcacggaccacatggctgagtcgcgaggatgtttcctaatgtcttatggccgctaggagagaaagacacagaccctcctgaag

SEQ ID NO: 172083 - DNA, 122 bp, Homo sapiens
caccgacgtcaacgatgccctgggctatgtgacccgcttctaccgcgaggcctcgtccggcgctgccaagaagaggctgctgctcttctcagatggcaactcgcagggcgccacgcccgctg

SEQ ID NO: 172084 - DNA, 122 bp, Homo sapiens
cagacagagggcccagcaggtcctgtctgccctggctctggccacgcagcacacctctggcggcacccgccccaacgctgcaaggctgcactccacacacccgcccacaagccatcctgcaa

SEQ ID NO: 172085 - DNA, 122 bp, Homo sapiens
ggggagccgacagttagaatgcgcctcggggcgactagtcccaagtcacggaaacctcggcgcatccccgcccgcccttcccccggggtcgcccccgccgcctcctggcgcttcctcgctgc

SEQ ID NO: 172086 - DNA, 122 bp, Homo sapiens
tagcaatcagcgagactccgtgggcgcaggaccctccgagccaggtgccggatataatctcgtggtgcgccgttttttaagccggtctgaaaagccaaatattcggttgggagtgaccagat

SEQ ID NO: 172087 - DNA, 122 bp, Homo sapiens
gaacagtgtttctgtcacttagtagagcttagatgagtctctatcaaagatcaggagacacggctctattgaagctactctatcaaagccacttcaaatccaggaattctatcattctatca

SEQ ID NO: 172088 - DNA, 122 bp, Homo sapiens
caagaagaaaaaaagccttatctttgctctagattttgcaaaggggaaatttcaacagaacgcaatcattgctacacgtctgccaagacacaaggcttgggcgatcttttttgttcatttgt

SEQ ID NO: 172089 - DNA, 122 bp, Homo sapiens
tccctgatccactctgcccgtcagcaggattccggtctacaccccgcagagactccgcagcgtacgaggagaaccccgccttctaccagaaaaagaagcgacttcctagatctcccggaagt

SEQ ID NO: 172090 - DNA, 122 bp, Homo sapiens
agcccctctctatgtggcagggatccaaggatcggcactggcccctcagcgccctggctccgcccctgcccacagcctcatctgtcagctgcccagccccagcctggctgacctcggtctgg

SEQ ID NO: 172091 - DNA, 122 bp, Homo sapiens
agtacaagaacacaacacctgtgggaggtgtgggcccaggggagggatgccgagctcacacgacccctaggtagcaaatagacgcacgtgtgcctttcacactccaccctcacttcacactg

SEQ ID NO: 172092 - DNA, 122 bp, Homo sapiens
tcctaatccctgttctggccggtgattcagctccaggtggaggctgtgcagaaacagccccggtcatctttgtgtgaaatacatttgtcgtcttcattttcttttttcttctgctggtatct

SEQ ID NO: 172093 - DNA, 122 bp, Homo sapiens
gttctggcccggccgcccctcagctatttgttcacgtaatgcgattggaaacgtgcaaggcggacagctcctcgcctctgcccctccctctctcccgtccctgccctcctccccccagacac

SEQ ID NO: 172094 - DNA, 122 bp, Homo sapiens
tgtgtgtgttgccagatctgtcagttttgcttggccctggctttactcatcttcctgggccgatcatcccaagagacagtaaaaaagctttgtgtcccaaactgagaggagaccttaaggtt

SEQ ID NO: 172095 - DNA, 122 bp, Homo sapiens
agaagcaaccctccccggccctgggcagggttcgccaccccgtgcccaacctccgtggaacgcggacagccacttcggactcacgtctcaatgtttctttattgtgctaacactgctgcctc

SEQ ID NO: 172096 - DNA, 122 bp, Homo sapiens
agagaagtctaccacctgtgatacacgcctcagatttatgatcggtttccagggaccagccgaacagcctcgctgcctgcctcttcataaatcaggcactgaaagcagttcagatgcgaatt

SEQ ID NO: 172097 - DNA, 122 bp, Homo sapiens
ctaacagacctgccctaaaaaaacctcagatggaggcctcaggagaatgactgatcaggccggtgagaaaggaaagcctgggggaaaacttggcttcctgcctgggggagaggctggagagc

SEQ ID NO: 172098 - DNA, 122 bp, Homo sapiens
gtcggcctctaaaatttttctgacactggaggctgttgctagctgtcatcagagtcactccgataccacatgtacctggagcacaacattgaccaagtgccacctctcctgtgacaaagggg

SEQ ID NO: 172099 - DNA, 122 bp, Homo sapiens
caacgttgtcccgcaagtggtaaccggtacgcctcagagaccggcagcgtcaaacaccctcgtgataggtagcccacacaccgccagcactcactttgcctctcagaaccagccttccgact

SEQ ID NO: 172100 - DNA, 122 bp, Homo sapiens
aggacgcccccctttgtgggttccagctgagatctggcgcggcaccagcggcctggcctgcgggcgggtaggggggtggcagccatgtcgggttgagggggtggccctccctgcagtcagcg

SEQ ID NO: 172101 - DNA, 122 bp, Homo sapiens
gcagtgactgtgccttagggtgtcccgttggcatccagggccccccgtgaaggatggcaccgagcaccattcaacataagtcttgtcagcgttccgatgaaacaagattaggggaattttac

SEQ ID NO: 172102 - DNA, 122 bp, Homo sapiens
ggaggagtgagccaggcagtgagactggctcgggcgggccgggacgcgtcgttgcagcagcggctcccagctcccagccaggattccgcgcgccccttcacgcgccctgctcctgaacttca

SEQ ID NO: 172103 - DNA, 122 bp, Homo sapiens
ccgggcagcccagagggtcagaagggggttttctcccggggttgtgagttctttggccagcggcaccctcccctgccggggccgcccacccgcaagccccgccccgaaggctggagcttccc

SEQ ID NO: 172104 - DNA, 122 bp, Homo sapiens
aaaggtctgataagccatggggtgagggtgggggtgcggacatccctgcgcgtgcacgaacgcatttgcacgcgcgctagtccttcagtgcgggtgcacccttcccacctcctcaggcatgc

SEQ ID NO: 172105 - DNA, 122 bp, Homo sapiens
aggcgcggcgctgggaggcgggggacacgggaacgtggggagccgcgggagctcggggagcgcagccctcataggaattcgtggggcgcttgtggggctgggggcttgtaggacgcttgtgt

SEQ ID NO: 172106 - DNA, 122 bp, Homo sapiens
cccggcgcctgcaagtcctgcgccccgtccccgctctcatgaagccgtgacagagccggccgtctccaccccgctgtagccgcacagactgacaatctcggcacaaagaggagacagccaag

SEQ ID NO: 172107 - DNA, 122 bp, Homo sapiens
tctcgaactcctggggtcaagtgatccgcctgcctcggactcccaaagtgccggggttaccggcttgggccactgtgcctggccgaacaaagctatttgacaatattaaagaaacagttatc

SEQ ID NO: 172108 - DNA, 122 bp, Homo sapiens
ccgggccccgcccccgcccccgccgtgccccgcccccacttcctcccgcccctcgctgggcggctattaaaagctgctgacgtcaaaacggacggccatctttgatgagggcagagctcacg

SEQ ID NO: 172109 - DNA, 122 bp, Homo sapiens
tggtgtcatcagaggacatcgagatcctggagcatgcaggcgagctggtcatcgcctcgccggagggccagctggaggtgcagacggtcatcgtctagcatgaggtctgcggggtcctggcc

SEQ ID NO: 172110 - DNA, 122 bp, Homo sapiens
agatcacttggattgcactgtggctggggctcctggaggtgtgcggtgtgtaccctgggccggtttgcaagcccctctcttttctgttgttactaaatgttgcctgtggtctgacgcttggc

SEQ ID NO: 172111 - DNA, 122 bp, Homo sapiens
tctcctattaggttggtggtttttattttcctctaagttccttccaccaaataaatattacgtaaaaaattcataccaaatcaatgagaatactggcaaggaatacatagggactttctgct

SEQ ID NO: 172112 - DNA, 122 bp, Homo sapiens
gaagaaatccagtaaggacatacagttactcaaaaagcccaagatggcaaagataattaacgctgcagtcttggtagaagaatgcttctgtttggtgccgtggttctcccatacatacaaat

SEQ ID NO: 172113 - DNA, 122 bp, Homo sapiens
gctaagcccctcagtgcccgggaccagcaggccggccgcccgctcagagtgtggggggcccgccaagcccacgcccacccggaactctggcccgcaaggctgcgcgcaaccccggttcccgc

SEQ ID NO: 172114 - DNA, 122 bp, Homo sapiens
cacccagaagggactaggcagttgttctctgaagtagaggtgggaaaatctgttgtaaatcgagaaggactgagagcaggctcagcaaacgtggtctgtgatggacctgatagtaaggggct

SEQ ID NO: 172115 - DNA, 122 bp, Homo sapiens
gaatgcaaatgaaatcccatcagaaatggggctcctcagctgcagtagcctcatctgaggcgtggcctcgggcaggtgagaagacacctgaggcgtggcctcgggcaggtgagaagacacct

SEQ ID NO: 172116 - DNA, 122 bp, Homo sapiens
tgttaggtgacgaggatgaatgcaaggtcagcctcaggccacgtgcaagctgaccgtccacgctcatctcggtgcctagtgtattgtcggggttccatttctccgtagacctcgagccatag

SEQ ID NO: 172117 - DNA, 122 bp, Homo sapiens
gtggtagggcgtagcatctagtcaggacaaggcaccacgtcccctcctcggaaaccctcacggcctggctggtgaccctggcgccacagagacggcacacctggctccaggcagcacagagc

SEQ ID NO: 172118 - DNA, 122 bp, Homo sapiens
aggtccgtggaggatgggtgtcgtggggggctgggggccgtgggggatggagggccgtgccggctggctcccaggccatgctgaccggacactacattcctaacaagatccccgacgtgggc

SEQ ID NO: 172119 - DNA, 122 bp, Homo sapiens
gcattgggaaacttaatcctctttttcctaatgatttttccaactgggcagagttgaccgcgggcgggtgtcaatggaaagcacccagaaagacggtgtttctcgcagtcgtggagagtaga

SEQ ID NO: 172120 - DNA, 122 bp, Homo sapiens
ggagacagaagggatcccggcacatcagtggtaacagcggacgttgtcctcgtggtcacacgtcccgtcttgggtgtggatggagggcagcccggggcagagcctcagccccgcggcccctg

SEQ ID NO: 172121 - DNA, 122 bp, Homo sapiens
tctgtgaagaggacagactaacctgaaagagccagagaggatttcctaaattgtgctctacgacagactaaattgggcagagacaagagacaggtacagtgaagcaacaggtagaggagtag

SEQ ID NO: 172122 - DNA, 122 bp, Homo sapiens
tggatggcggggccagcaggctcatggcactgggctggtgctctggcgaccgcacgatggcggacatggcgatctgctgcctcgcggtggctggcgtggatgggtgtgggtggtccgttgct

SEQ ID NO: 172123 - DNA, 122 bp, Homo sapiens
gagactgagaatgtaggctccatgaaagccgggattcctgtttcctcacagccatcacctcgtccttttaacagggcccagaatacagtaagctgccggataaaagttttttgactgaataa

SEQ ID NO: 172124 - DNA, 122 bp, Homo sapiens
cggcccggggagatgggggatgcttgctagtgaccctccttcacctgactccgccaaaggcgtagcacctcggacacccccgggcccaccgtcgcccccctcgccccctgctgcccccaaag

SEQ ID NO: 172125 - DNA, 122 bp, Homo sapiens
ggggaagtgcctgtgtctgggaagagaacaagacttagggggaagggggaagcttaaccacgaagcttatgcctgagagcatcaggccagggaaggactctgtaaaataggaataaattcca

SEQ ID NO: 172126 - DNA, 122 bp, Homo sapiens
gggctatgggggttaggggaatgagggtcgggtaagagggcaagtgtaaatgatcttgtccgtttttgagttaatgtgtaatgagacggggagaaaacaggagagcccagaatgacctggat

SEQ ID NO: 172127 - DNA, 122 bp, Homo sapiens
ccaccatgtccttctgttgtacaacccctcagttaagccaggagggtgcctctcccctcacgaccagcctgggcaacacggcgaaatcccgtctctacaaaaaatacaaaaattagcccatc

SEQ ID NO: 172128 - DNA, 122 bp, Homo sapiens
atatgcatcagctaagaccccaaggggagtgcttctgagcctcttagcttagccccatggcgcttatgaattggctaatggttcaatggggagccaggcatcatgccagcctcacttcaatg

SEQ ID NO: 172129 - DNA, 122 bp, Homo sapiens
accagacgcccgaggttgtagtaacagtctgggtatttccttctgtgtttaattgctgtccggtaactttgctctgctgcttcaaaccgtttcaggctattctgcactatgcctagattcat

SEQ ID NO: 172130 - DNA, 122 bp, Homo sapiens
ctttggagctggatactcctaaacacgtttgggtttgaactccagctctgatcctgccagcgaggagccttagagcaagtgacttaaccttctgggcctcagtttccctcatctgaaaatgg

SEQ ID NO: 172131 - DNA, 122 bp, Homo sapiens
cagctgcacccacgtcgtgtctcctcctggagtctaagtttcctgtgctgtgactgcaggcggagaggagggcccaacgtctaggggtgagtcaccacgtgccgattctctgctcctagggt

SEQ ID NO: 172132 - DNA, 122 bp, Homo sapiens
agtcacaaagcaataaggaaagacggaggattggtcacagatcagaggagacgaaggagacgtgatgagtgaacgccatgtggggtcccagattggaccctggatcaggaaaacgacctcat

SEQ ID NO: 172133 - DNA, 122 bp, Homo sapiens
acgcgcgttgggggcggggcctatgtgtaaaaccggaaagggagggagaagggtgggatccgcgagggcctttgggaaatgtagtctttaatctggcccgtgacagatgcttgcggaggggc

SEQ ID NO: 172134 - DNA, 122 bp, Homo sapiens
ccgagaaggtcgggcgcatgcgcagtgctcggattttttgcttggctacccggagtgaagcggccgggttgggcgattaacaggccgtggttaggaaggacggagaaggggcgttcgctcct

SEQ ID NO: 172135 - DNA, 122 bp, Homo sapiens
agcacccaccaccccacgcgccaccccacaaccccgggtagaggagtctgaatctggagccgcccccagcccagccccgtgctttttgcgtcctggtgtttattccttcccggtgcctgtca

SEQ ID NO: 172136 - DNA, 122 bp, Homo sapiens
ccttgctaacgcgccattatcacttgaaaaatatccatgagagcctatctccccaggccacgccgccgctctttcccttccttcgtagacatatttctctccatgaattaacaacataaatt

SEQ ID NO: 172137 - DNA, 122 bp, Homo sapiens
cggctgcagccccgaagccttgaccgtggcccgttcgcagccgtttaatgtgacgattagcgaacagttttccagggggttaaagagtgttagcaagattcaggaacttgcccacagtcacc

SEQ ID NO: 172138 - DNA, 122 bp, Homo sapiens
aatacaaaaattatacaaaaattagccaggcatggtcacgtgcctctagtcccagcttctcggaaggctgagtaaggaggatcgcttgagctggcagattgaggtttcagtgagctgtggtt

SEQ ID NO: 172139 - DNA, 122 bp, Homo sapiens
catgttggatcggatccttctggagtccgtgtgccagcaacagagctgggtccgggtgtacggtaaggaccacaggccgtcttagaggctggtgtttcctatttttgcttgggctgaaattc

SEQ ID NO: 172140 - DNA, 122 bp, Homo sapiens
ggttggagttaatgagagcttttgtaagtgggggtttggtagggttaggggcaagagtgacgggagtatgtagagggtagttagagactaatttcacttgtgtattttgtatgtatgttagt

SEQ ID NO: 172141 - DNA, 122 bp, Homo sapiens
agagcgcgagtattgcaaccgtgcaagtgtggtattgctggttacaaccgtggatttcatcgtcgaaatttcacttttgccttttttaagactaaaaagttaagctgtagatgaatatatac

SEQ ID NO: 172142 - DNA, 122 bp, Homo sapiens
ccaagttcttttttgcaagcctaatcataggtgaggggatgcaccccagagccaccaatccggccccttccgcccctgggggaagcattaatgacgccgaaatgtgtcagagctcccaccag

SEQ ID NO: 172143 - DNA, 122 bp, Homo sapiens
tctgcaaattttagcctcgttttaatttgtcggggctgtttatttttgtttctcagaatccgcgtgacgagtgcacccagcacgtggtagaagctcaagaaatgagcaagtgaacgaaagat

SEQ ID NO: 172144 - DNA, 122 bp, Homo sapiens
aagtgcagaaatttgttcaaccaaacccaacatttcatggggaagaaagagaagctcagtcgagataaaggcagattaagaaactactcaaagtcacctgggtagagagacatagaccccac

SEQ ID NO: 172145 - DNA, 122 bp, Homo sapiens
agcccctcctccccttcctgcacccgtacccccgtggtctttgaataaagtctgagtgggcggcagcctgtgtgtgcctgagttttttccctcagcaaacgtgccaggcatgggcgtggaca

SEQ ID NO: 172146 - DNA, 122 bp, Homo sapiens
tgtcggaaaaggaggcggaagcggggaggagccgctgccagagccagactgcatccgccgcggcgtctccatggcacgaccctggcctccgacttcaacgacttcataaggcggcgtttctg

SEQ ID NO: 172147 - DNA, 122 bp, Homo sapiens
cgtggccgacagacctgatcaggaaaactcgcgtccttatatgaaacagccccgaggccgcgaaagtagcctcaggagttgtcagattcaaaagcaattttgatttaaggttttcaaaagcc

SEQ ID NO: 172148 - DNA, 122 bp, Homo sapiens
tacattgaaatcccaagcaagagtcaaaaaaaaaaatcactgaaataaggaagatggggacgggtctgtgaaagaaagccatgcaaaagcaaaagagaaggtactttccagacacttggggc

SEQ ID NO: 172149 - DNA, 122 bp, Homo sapiens
atgttaaagatgagtgactaaggcagcaagggtgtcagcactctgacatgaatagtttgacgtaattgagacctggtagttttgtgggttttttcctaatccaggtgttattgtcaattaca

SEQ ID NO: 172150 - DNA, 122 bp, Homo sapiens
tactaaaattacttgttttcaatagtctcccctttatcctggctttcccgggtttcatcacgcgcagccaacctcggtagggaaatattatacccaatgacatctgttgagagaccatattc

SEQ ID NO: 172151 - DNA, 122 bp, Homo sapiens
ctctcccctcccgggtgctctgtcccctcgtgggtgggcgtggccctcaggggtgtagggcggggctccccctcccgtcgtgggtgggcgtggtcctcgggcatagggcggggctcccctcc

SEQ ID NO: 172152 - DNA, 122 bp, Homo sapiens
gtcggccccacctcctcctgatgtcacggaaatgaagggcttcgcagaggatgtcccgcccgctcccttcagacgggcgtagctggcaccttcctgagatatgcctgcttgcccccgatttt

SEQ ID NO: 172153 - DNA, 122 bp, Homo sapiens
gcagctgcagccgcttccagagccacacgggatacttgtgtagaggcatcgcgagcctggcgggaggtgggggctcgcagtcagtcgcagcctggccaggcccccggcactcaccccctacc

SEQ ID NO: 172154 - DNA, 122 bp, Homo sapiens
gaatcttaacctctccatggctcagtttccccattcaaaaacaagtatatgttgatagaacgttttatagagtagcaagcattaaatgagttaatacagtgcatgaaacatagtgctcatta

SEQ ID NO: 172155 - DNA, 122 bp, Homo sapiens
ttctaaggaggagtgcctaggaggaagctaagggagattggaagaatcaagaaactttaacgcaagtctgactcttgtaaaagagataagaaaagagtgaaagtagtgtggacaagtcttgg

SEQ ID NO: 172156 - DNA, 122 bp, Homo sapiens
ctaatgcttaaagccacgcattacacgaaggtttaccaggcagagcaaataaatggtcatcggagacatgctttcaaacagagatctctgttcttggcatgaaggttaaggttagtgaaaaa

SEQ ID NO: 172157 - DNA, 122 bp, Homo sapiens
ggagttctcgccgatcctgctgaataaagggggttccgagctgggccgagatggggcatgcgcgggaagacccctgcccgctgttcccccccaccgccccagtggatgccatgcctggggcc

SEQ ID NO: 172158 - DNA, 122 bp, Homo sapiens
aagatgaaaaagtagaaccttgtttctgttccttctcacaacccaacatcggaggagttacgcatcaagaaggggtggagggagtcatgttcagcaatgatgttgataagatagtttcacca

SEQ ID NO: 172159 - DNA, 122 bp, Homo sapiens
aggaagcctagggccagctgcccctgctgctgggtgtgtgacagagctgtgcccacaccccgccagccaggaggggctgttttgaaatgcagccttgggaaaaagccaaacaagccagggca

SEQ ID NO: 172160 - DNA, 122 bp, Homo sapiens
ccagccaaaccaggctatctgtgttttgggtcctttgacctgccttattccacactgactcggaggcttcacatcagcatttgcttttatttgacaccctccttctcccctcagtcatctag

SEQ ID NO: 172161 - DNA, 122 bp, Homo sapiens
ttgcatttatttgaaatgtctgtaagtctctttccatctacagagtttagcacatttgaacgttgctggttgaaatcccgaggtgtcatttgacatggttctctgaacttatctttcctata

SEQ ID NO: 172162 - DNA, 122 bp, Homo sapiens
tccctgctgctgtagagccgggcgcccaggccggcatccccctcgtgggtggcaggagagcggacttagagcccccgagggcccctcagcagaggaaggggagtcccctcctccgccaccga

SEQ ID NO: 172163 - DNA, 122 bp, Homo sapiens
gcccccctctagccctgactaaggacatgagccccggaagaagtgagcatttctattgaccgattgcaaaggtgagagaggatctccaaagcccattgtcactgctgccatctgaaagacag

SEQ ID NO: 172164 - DNA, 122 bp, Homo sapiens
tgtgagacgcccccttctactcagcccacgtggctaaagtaaacagaaggtgggccggggcggggagaaacagaactcggtcaatttcccagtttgtcgggtctttaaaaatacaggcccct

SEQ ID NO: 172165 - DNA, 122 bp, Homo sapiens
gcactaccaggtggagaagctctttggcgccagctcgcccccgccgggggccgtgcccagcgggcccccgctgtcccgcgtggccacagtggacttcactgagctcgagtggcacatctgct

SEQ ID NO: 172166 - DNA, 122 bp, Homo sapiens
gcaacgaaggccgcgagagtcgagtgagggcttgagtctggtgggggcgggagtgtctcccgccgccgcgcttgtgccgccgcttctccacacgtgcactcgggtctctcggctccctcccg

SEQ ID NO: 172167 - DNA, 122 bp, Homo sapiens
gcacccggcgtgaccggcccatgggcgctcggtctcacgcccgcttcgcagagctcaccccgccagctcctgctcggtccccagtcccctgccccgagccctcagggatcgcaccgcagtgc

SEQ ID NO: 172168 - DNA, 122 bp, Homo sapiens
agataatccaggaggatctcctcatctcaagatctcttacttagctacatctgcaaaggccgttttttcaagtaagatcatattcacaggttccagggattatgaggtagacacacctttag

SEQ ID NO: 172169 - DNA, 122 bp, Homo sapiens
ctggtgatgtctgctactatgccagccggaacgacaagtcctactggctctctaccactgcgccgctgcccatgatgcccgtggccgaggacgagatcaagccctacatcagccgctgttct

SEQ ID NO: 172170 - DNA, 122 bp, Homo sapiens
cccctccccagccctcaatggtgttacctatgatgtgaggggtcggctctaggtggccaccgaggtatccccctttccagctctgatactctgtgcatcttgccccagtctccaccgggaat

SEQ ID NO: 172171 - DNA, 122 bp, Homo sapiens
cgctcaagtcttaccgggaggctctcctagagagcagcgcgaagccatggcttttgggcccggggacggaccgtagcgcgtagccggaagcggaggcgtggaggcgggtctgaggtttggtg

SEQ ID NO: 172172 - DNA, 122 bp, Homo sapiens
aagaaatggaatctcgctgtgttgcctaggctggactgcagtggtgcaatcatagctcaccgcagcctggaactgctgggctccagtgatcctcccacccgcctcagcctcccaagtagcta

SEQ ID NO: 172173 - DNA, 122 bp, Homo sapiens
taaaagcagtcagttaggaattacatatttaattaaggatcgcccacacatctagccatacgctaggacccctgagtgacacagagctagacagcaagggcctgcctcatgcagacagcagc

SEQ ID NO: 172174 - DNA, 122 bp, Homo sapiens
atgtaagcagctgtccgccggaggaaaggacgatggctgaaaggaatgaaccaccgcaggcggtgtctctcctgtccagctgtggacaggacctccacggcccggccttcctggcctcgggc

SEQ ID NO: 172175 - DNA, 122 bp, Homo sapiens
ctctccattcagcgtcacgaaagcccattcgaaatggatatcagctgacgttggcctgcacgcgtttgccttcctcccctcactccgcttgtgcgcctctctttcggctggctttcctctct

SEQ ID NO: 172176 - DNA, 122 bp, Homo sapiens
cccggctcagtgcctggcacaggtcacagttcagcaggcagcaggcatcaggcaagtgaacgaacactgcagaatgggtccagggcctccttcctccttgctgtgctccccctgttcctgca

SEQ ID NO: 172177 - DNA, 122 bp, Homo sapiens
gggaccgagccagaggggcggaagaacccggaagacccaggcagccggacggccgaggggcgtgggaccgggcagagcgggaccgggagagagcgcctttcccagctccctaaagccacagc

SEQ ID NO: 172178 - DNA, 122 bp, Homo sapiens
gacttcacttcccaggctccatttcgccaggatcccgaagctgaacttggcgccgtggcgcgttgcttgccggtcattgtagtccagaagaaaggattttttttgtttgtttgtttttcttc

SEQ ID NO: 172179 - DNA, 122 bp, Homo sapiens
ttctccagtgttttacccctccaattcatcagtgcaagtttttcagtcacttcccaagttcgttcatcaccatgtcactagataaacctactccatatctgtcacctaatcatatatatcac

SEQ ID NO: 172180 - DNA, 122 bp, Homo sapiens
tcttttaagaccgcagctccagcctctcctcccagcgaggtggtccctgccacttcgacccgcttatatccgaactggatgggagttctgcctaaggtagaaccacgctaaattgggggatt

SEQ ID NO: 172181 - DNA, 122 bp, Homo sapiens
ttgtcacacaacacttattcacagtacactgtaatgagattcttcccctgctttcatctacggcagatattcaatcttacccagtctcctactttgtctggtgaaaatggtgtccctgatgg

SEQ ID NO: 172182 - DNA, 122 bp, Homo sapiens
cttcccagtggactctgcacattgggagccttataaagtagcctctgcatctgcctgcctcgggcagaggagggctaccctggggctgagagttcacctgtctcaggaaccacctgaggtag

SEQ ID NO: 172183 - DNA, 122 bp, Homo sapiens
gcgcagaccaacgtgtttcctctttctccagcctagggcggtgccagcccagggagcctgcgcttagcggccccaggcccgcccctgacactgaacgccgcttgtcccctccggcttgccgt

SEQ ID NO: 172184 - DNA, 122 bp, Homo sapiens
gccgggcacacagtgggcggggcttcgtgggtcagctcctgcgggaggaagaaaggcaggcgggcaccgcagtctgtgcctggcacacgcacgcatacacgcacacgcacacatgtgcaaac

SEQ ID NO: 172185 - DNA, 122 bp, Homo sapiens
cctatgtaacaaacctgcacatcctctacatgtaccccagaacttcaaataaaagttggacggccaggcgtggtggctcacgcctgtaatcccagcactttgggaagccgaggcgtgcagat

SEQ ID NO: 172186 - DNA, 122 bp, Homo sapiens
tttgatcacgaggagaaatcttggtcctccctcatgtgaaaggtcctgaaaatagtctaccgttgctctttttctcaatgtattcagagtaaaccatgaccaggaatcatgtagccccatct

SEQ ID NO: 172187 - DNA, 122 bp, Homo sapiens
tggtcttcttgaggatctcggagtggatgcgcgccacgccgttgacggcgtgcgaccccgcgatgcacaggtgtgccatgttgatgcgcttcactgcgccctcctccaccagcgacatgcgc

SEQ ID NO: 172188 - DNA, 122 bp, Homo sapiens
atggaactctggacctgaagcagacagcagctgtctcacagtattcacaagcagaactcacgatccatacctctgaatgaggatgatgaagggtatggccactgacaagcaccaacagtcac

SEQ ID NO: 172189 - DNA, 122 bp, Homo sapiens
ccgggacagaagtcccacttttgtgaaccttgagtttttgaaactttcactgaaaaaaaccgcgtgcgatgctatccgccgggagcgctggagccttggctctcaaaaccagccgcggtgct

SEQ ID NO: 172190 - DNA, 122 bp, Homo sapiens
agaacagcttctaaaaccacaaatctgacccagagaatgttcccctttgcccaagcaggacgaatgccaacgcccttggcagccggcgtcgctcacctcgccagcacagctcccggctgagc

SEQ ID NO: 172191 - DNA, 122 bp, Homo sapiens
gcataccgagtctcccagaacgtggacgatcgcccagggcaacgcagtggagtgcgagcccggtctggtttgcacctggctgctccaggagccctgggcctcatcctaggagcctggcggaa

SEQ ID NO: 172192 - DNA, 122 bp, Homo sapiens
ctgaagtgtaccaaactcggatccgggaagcttgattacaagcagcacggttcaggcatgcgactcagctcagcgggaaagccgtgtctgacctcggagggcagggcattctgtcgggcaag

SEQ ID NO: 172193 - DNA, 122 bp, Homo sapiens
tgtctgcgagtcatgctcgtcacactgtagttttcacacacgtcacagagagaccctgttcgtatgcacattggggtgcttgagcagggttgcgcccacgattctgtggtactacggagccc

SEQ ID NO: 172194 - DNA, 122 bp, Homo sapiens
gtgttttcaccatgttaccccagctggtttctgaactgagctcaagggatccacccacttcggcctcccagagttctaggattacaggtgtgtgagccactgcactcagcctgtagttgtct

SEQ ID NO: 172195 - DNA, 122 bp, Homo sapiens
agatgtcaatcaaacgtgggtgacatttgcttgtcaatacgaggatgatggctgggaagacggtgacttattacatcagggtgagaatctgaaatgagaaaagcaggaacaaataagactac

SEQ ID NO: 172196 - DNA, 122 bp, Homo sapiens
ggccccttacctcgtcccagcttttcccctcccagccgcgacctcacccggaagagaatacgcagcccccggaactgcaccggaaggcctgcatgggctgcccttgtccgagggcttgcagc

SEQ ID NO: 172197 - DNA, 122 bp, Homo sapiens
aaaggaggaatcctggcccaacagcgcagagtgtgctttgttaaggtggggatcaggtagcggagggaaggcaaggacactcagggaataaatggcagaggaagaaggcgcgcgagggaaga

SEQ ID NO: 172198 - DNA, 122 bp, Homo sapiens
attaggtttgagcactaccagagcaaaaagtcaccgtttggaggtgccggggatcgaacccgggacctcatacatgcaaagcatgcgctctaccactgagctacacccccttcctgaaaaaa

SEQ ID NO: 172199 - DNA, 122 bp, Homo sapiens
ggttcacactgacatttatcacgtccgccatgttgccgccgccacagccaagtccattttcgtactgctgtaaaggcctgccagagactggataatttacaaaggaaggaggtgtaactgac

SEQ ID NO: 172200 - DNA, 122 bp, Homo sapiens
cacccctggttgagccggcccgagggccaccagggggcgctcgatgttcctgcagccccccgcagcagccccactccccggctcaccctacgattggctggccgccccgagctctgtgctgt

SEQ ID NO: 172201 - DNA, 122 bp, Homo sapiens
gaatggtcgtttggcagaagtctccgggaccgcactccaggacaggcacagtcagggcgtcgcgtgggcctactgtggcaaaggagacgtccgcgcgaatccggtcctggggaaagggcagt

SEQ ID NO: 172202 - DNA, 122 bp, Homo sapiens
caggccgagcccccactcttccctggctgcccagtgttggtgagggcgctgaggctgggccggctgagcccaaggggaaaataatccccagatgtggggccagccaggggagagattgctgc

SEQ ID NO: 172203 - DNA, 122 bp, Homo sapiens
acgtggccatgacggatcctggctgaatgcaaacggggaacataaacctgagtaatcaggcgcatcactgaacatcccaggcggccgcccctaccctggggctcaaaaccggctccctctgc

SEQ ID NO: 172204 - DNA, 122 bp, Homo sapiens
caaactttaaagagatcaaaactctgacttcatccctccccagacagcatcttgaaaaggcgtcccagagcatcagcaaaggacatctctgggtcagcggggacagaactgtctcttgacct

SEQ ID NO: 172205 - DNA, 122 bp, Homo sapiens
acatttacacggcaaacaggaatgcagtaaacgtccacgtccgtcccacggctgggctgccgttccgtttcctccacgaacgggtacgcgcttccatgagaaaggatatttggcaattttat

SEQ ID NO: 172206 - DNA, 122 bp, Homo sapiens
ccagtaggcaagctgggaagcaggctggcttctttctaagcgacagtggcggaggccaatcgtttacgagactcgtagatggggcagacggaccccggcgcagccaatggggagaggtatct

SEQ ID NO: 172207 - DNA, 122 bp, Homo sapiens
tctcagtttaactggggaccacatgccaaccagggataaaacacatccctggaattcagccggagtcattaatttcaggtgtgtgcttcataaaaccaaagtctgggaattctccacaaact

SEQ ID NO: 172208 - DNA, 122 bp, Homo sapiens
ttctcgatgtgccgcaccagctcctcctgctgctcataggctgcacagcagtccacccagcggcacgcctgccgcccggccaccaccctgcctgccaggcccagccccaggcctccaaggct

SEQ ID NO: 172209 - DNA, 122 bp, Homo sapiens
acctggggaagcagtttccttccccagtaaccgtaggtcatggtcagagcagggaaaacacgttctgtgagattttgtagttctgtctgctgacttcagaacaccacctccaccaccaccta

SEQ ID NO: 172210 - DNA, 122 bp, Homo sapiens
ttagagaccatattctgtggctgcagacgaggaagcgaaggctcagagaggatgccacttcgaggagccacagagcattgagaggacgccttgggactagaacccacgttttcacatagtcc

SEQ ID NO: 172211 - DNA, 122 bp, Homo sapiens
gcagagctcagagcttggcagggtggggcccgagggcgcccgctcctggatcctgcacaacgtccctgacatgtcggccagcagcacagacccagcctcaccctcagggcaagctcagcaga

SEQ ID NO: 172212 - DNA, 122 bp, Homo sapiens
ctgatccgagtctgcaatggtgaatcttcgtctccggctttcctggtccaagaaggaattcggggactctgaacccttaggaccaggcaatggttgtttgcacttactggaccctccataaa

SEQ ID NO: 172213 - DNA, 122 bp, Homo sapiens
tttataaggcaggcctggagcatcaagcagagcagagacctgagaggcaccaggcccagccgtggcaccacacacctcccagctctgcaggtgagaaaacccaggaggagaggggagaggct

SEQ ID NO: 172214 - DNA, 122 bp, Homo sapiens
ttggaacattgtgtccaaagatgaggttcagagacttcatttccttgtagatgaacactacgctgttcctcatttcttggccacccacaacaccttgtaagggaggaaaaaataattttcct

SEQ ID NO: 172215 - DNA, 122 bp, Homo sapiens
tgtgcagcagcacgcggcagcttcgcatattccctcgaagcgcgcctcttgcgcgtgcgccgccctggcccagtgcccttggctgcaggaatggctggaaccacccggcttctagccggagt

SEQ ID NO: 172216 - DNA, 122 bp, Homo sapiens
gatgcctggggaaggcagtgtcatccccacatgctacccagggcctgagacgccactgtacgccaccaccaacttgagactttcagttccacactgcctttcaaaaccccttccccaagaga

SEQ ID NO: 172217 - DNA, 122 bp, Homo sapiens
gcggcggctgcggcgactgcggcgactgtggagcggggatgtgctgctggccgctgcactcgctcctctgccgccgccgcacgaggagcgccggccgcgtcacagcccgccctcgcgctcgc

SEQ ID NO: 172218 - DNA, 122 bp, Homo sapiens
atgagaatggttgctgtggtgattgctgcgtcttcccattggtcattgccgagcgtattgcggttctccgggagggttatattggttcccattccacagcggccgcaacgtgtcgagagccg

SEQ ID NO: 172219 - DNA, 122 bp, Homo sapiens
gacttccctggattttcttttcctcattctctgaattttaatctgtgtgcttttagtcttcgagttaactgagaagccttttcgttctgtgaactaagcacattccttcaaaaccacaggca

SEQ ID NO: 172220 - DNA, 122 bp, Homo sapiens
cttgctccaagtgctggcacccccagctcctaggaaaactgctggcagtgtccacgccgacggaaatttccttggcctgtccgtttgtttcgctttgtttctggccctgccacggcatggcc

SEQ ID NO: 172221 - DNA, 122 bp, Homo sapiens
tggacagcatggtggaaccctctctctacaaaaataaacaaattagctgggcatgatgaccggtgcctgtaatcccggctatcctcgaggctgaggagggagaatcatttgaacctgggagg

SEQ ID NO: 172222 - DNA, 122 bp, Homo sapiens
tcacccttgctctacagccaaacatgcaggactctagtaacccgcgaaatgatgggatagcgttgcaaatccttaaaagagtcttaacggtaagaagaggaaacagctttattttataaata

SEQ ID NO: 172223 - DNA, 122 bp, Homo sapiens
agaaggaaaagcaggctcatcggagcaggaggccttcgagggtggggcggggggctgccccgtcatgagcacagccgtcctgaactgcttggggatcgtggacgttctccgctgcagcaagg

SEQ ID NO: 172224 - DNA, 122 bp, Homo sapiens
gcgctggggactccaggccgcccgcctcggctctggccaaggggtcagcacgtggggtggcgtttgccccagcattccagccctttggtctccaaaggctttttgtattcactagggaaggt

SEQ ID NO: 172225 - DNA, 122 bp, Homo sapiens
caggaggctgatgtgtaaaagttcagaatggagtggagccctccctcttggcaccctatgcgcggagtcaccctttgtctgccacaggaagcacccaggtcctggcagctagaaaactgtaa

SEQ ID NO: 172226 - DNA, 122 bp, Homo sapiens
ctgctggagaaggacgaccgtatcgtgcgcaccccgcccgggccacccctgcgcctggcgcgcaacggttcgcaccaggtcacgcttcgcggcttctccaagccctcggacctcgtgggcgt

SEQ ID NO: 172227 - DNA, 122 bp, Homo sapiens
ggcaccccggtgtgccccgagagctgtctgggcacaggttgcggggctgccccggccggacggggcatctgtgtttctcggtgtggcctcagggctctggtggctttgaccgaggccccggg

SEQ ID NO: 172228 - DNA, 122 bp, Homo sapiens
cgcagcgctgggagctttggaagccgtgaggctccggagctgctctgagtccgggctgcgcgtcatttgcagtctggggaatgttgatcacctcactaattacacctctctctcccccctct

SEQ ID NO: 172229 - DNA, 122 bp, Homo sapiens
gctgcagtgtgggtggtgacatcgtcagggcccgctgggctcacagggcctccaggcaaccgggggcctttgggtccccagttacacactgtggtcacatcagccaggctgacctgagggtc

SEQ ID NO: 172230 - DNA, 122 bp, Homo sapiens
cagaacaagaagtggtggctttatttcacacacctctatatttaataagcaggaccatgacgaggtttggtgacctcagggcccaaatggactgtctgctggcataagtggtgcttgagtca

SEQ ID NO: 172231 - DNA, 122 bp, Homo sapiens
ttgcatactgtcattctacactattctattggccaaaacaggtcgtatagtcaaactcaacgccaggaagacatattccatcaccttacagggagaaactgacacaaaaagatggaatatag

SEQ ID NO: 172232 - DNA, 122 bp, Homo sapiens
tgtgaggcggcccgggccgggtggcagctccaggaggagagagagccccttcctctgcggcgcaggaagccggagggagcgtccaacctgttgaacttgtgtattgacaagttgtcaagctc

SEQ ID NO: 172233 - DNA, 122 bp, Homo sapiens
tcgtcacaagggtgcgaggaaagtcagtgagcaaatcgcggaccaccggggctgccagctcgcctgactcccggcctcttgcgctcctaggggcggagaagggtgcgggctcttcgcccttt

SEQ ID NO: 172234 - DNA, 122 bp, Homo sapiens
gatcttacgatcttctaaaataactccagctccaaatgaaggccagtggacccatgaacacgctggctcttgcccagtgtgctgagaagagggcaggagggaggagtagggtgggcacggca

SEQ ID NO: 172235 - DNA, 122 bp, Homo sapiens
cagaaagacacactgtaattctgctgagtctgcaaagaatgttcaaggggtatttgtgtccgtagctgctcgtgcagcatctcagcctgcggtgtcagactcgaacccagagctgtgtcaaa

SEQ ID NO: 172236 - DNA, 122 bp, Homo sapiens
gaaccgggtttcagttccactgtgcctgagcgttcagctcagcagaggtagggactaaggcgcttgccgcccacagcgtccagagtggcaagaaagaagcttttcagcgtctccaccatctc

SEQ ID NO: 172237 - DNA, 122 bp, Homo sapiens
agcacaggccgcccgccctggtggaatgggtcgccgccaccacgtgaccactttgtgccgcgtggatgtggccttcgtgaaatcgagatctggctgtttgtcgtgtcacacttcacaccttt

SEQ ID NO: 172238 - DNA, 122 bp, Homo sapiens
aggtgaccttggggaagtcatttaccacctcagcgctccggcgttctttagactgagtcccgggggtaactagggagagggtgcggagcagggcttgagaatgcactagaggagaaatgacg

SEQ ID NO: 172239 - DNA, 122 bp, Homo sapiens
caacagaccttgtgccgattcagtcatagcacaaggtgtctaacgggcagcccaggtcctcgggctggggtgctcaccctctctggggaactcaccaggggccaggcagccgatcccccatc

SEQ ID NO: 172240 - DNA, 122 bp, Homo sapiens
tagggaacctgacctatgctagtctctgacccacacagcgcacatctatccctcctggaccgcacaacctgcaaaagagagcggccaccagactgttccaatattcactaactagaaaaaac

SEQ ID NO: 172241 - DNA, 122 bp, Homo sapiens
cccagcgtgggatgacattttgttttttctcatttcattacttttcttccctatccctctcgttaagaactggcattaaatgctctgtggggtttgatcagaaatacacagagaatttagac

SEQ ID NO: 172242 - DNA, 122 bp, Homo sapiens
tccccagtcctgtgctccaggccctgtctttactctctacttccttctcaaagtgccaaccgcagcctttcaagccctgggtttcccctctggaaaaagggaaccagcattctccaaggaca

SEQ ID NO: 172243 - DNA, 122 bp, Homo sapiens
tagaaaattaggtaagacactgttcaataatgaggcaaaataggatgtggatgtcacctacgctatcaaatagaaatgtggggtttcatcgaataaatctgaggttgagtgtatagaacatt

SEQ ID NO: 172244 - DNA, 122 bp, Homo sapiens
tgagcgacagactccgtctcaaacaaacaaaaattagccggggatggggatggcggtgcgcgcctgtggtcccagctactccggtggccgaggagggaggatcacttgagcaagagtgggca

SEQ ID NO: 172245 - DNA, 122 bp, Homo sapiens
ccgatccgagcagcactaacacgtcctcttcctccttcaactccaaggtctcggatttgacgaacatcctaccgaagagagaaaggggaaaaaggcagtgaggtgtaaggaaagaaacagag

SEQ ID NO: 172246 - DNA, 122 bp, Homo sapiens
tcaaatggataaacaggcgcagggtgcggtgaaagccgtcattccgttcagcagcagccacgccgctgagacggagcaacggccgagcatacgcagccgcactcaccaccgctggtacaggt

SEQ ID NO: 172247 - DNA, 122 bp, Homo sapiens
cattttagacccgcatgaaagcaaacacatgagtctgtccagatggagtgccgtgcttctcgttggcaggtttctccggcatttcggtactaagttggaaatagctccagcttcactgattt

SEQ ID NO: 172248 - DNA, 122 bp, Homo sapiens
aactgaggtgatcgttagagcatagcgacatcacgtgcggtttcttaatgtccctggtggcggatacgccgagtcctcggaaggacatctggacaccactttcagccacctccttgcagggg

SEQ ID NO: 172249 - DNA, 122 bp, Homo sapiens
gtatgacatcttcttacagatggcagggccagcagcctccacactgagctggaggaaacacgaaaagcagggggaagagggggaagacatggggattaaagctccaattcagggtgcacagg

SEQ ID NO: 172250 - DNA, 122 bp, Homo sapiens
aggaaactgaggcacagagaggttatttggtaaatggtggagccaggattctaacctggccgttctagctttgaaatcgatgattttaaccaccttgtacttctctaaaacacactgacatg

SEQ ID NO: 172251 - DNA, 122 bp, Homo sapiens
cctcatttcttaccttaatttctcaaccgcagccgttctttcttgctctgagaagtcacccggcgtgatgctgcggccatgctactcctcagcgctctgcttcccaaccaaaacaatgctcc

SEQ ID NO: 172252 - DNA, 122 bp, Homo sapiens
ggcagtgctgctccttcactaagcggtctgagttctttagctatctcggagattcaactacgtttactcgtactgaatctttttaatgaatttcctgagagccaagaagggccaatctacag

SEQ ID NO: 172253 - DNA, 122 bp, Homo sapiens
tgtggctagttggcctctccgtcataggtatagccattctgggatcccatcgtagggaaacgcttcccaactcctaatcagagcactatatggagggaaagagggtgcctggggaaaaatgg

SEQ ID NO: 172254 - DNA, 122 bp, Homo sapiens
gctggccatcgagaagaccgagaggcagggtcaggggcggcacttttaagatagtgacaacgagagcagcgtggagccagacgctgctgcgagctgagctgcgatcgcaaatgcacgcagct

SEQ ID NO: 172255 - DNA, 122 bp, Homo sapiens
ggacacacatggagcacgcagcccaaatggggctcctctgttctccctgcagagtcagttcgtacctttcacatgcacaaaggtgttgatccaaccgaagcaatattgattcttgttatatt

SEQ ID NO: 172256 - DNA, 122 bp, Homo sapiens
catttgtcccctagtgccatgtctccccgtggtgtgtacgtgacactgcgcctgtgtccacgagtctggcccggccgtggctggaggtccatctggcctgtgagtctgtgcccacttgtcca

SEQ ID NO: 172257 - DNA, 122 bp, Homo sapiens
agaagtcctcgatgagccgccgcaatgtgaccttaggccagtcacttgagctccaaggcacggcccacaggggtacccctgctccccaacccgcaaatgggtggtgagacctgagggactct

SEQ ID NO: 172258 - DNA, 122 bp, Homo sapiens
aagggtaaaaatgtgttaatataccttgttccatggtgttgttcttttggggggaggggacgctactcaacacttaatagaatcacaacgctgttgggccagtagtatttattgctttagag

SEQ ID NO: 172259 - DNA, 122 bp, Homo sapiens
cttaagccctagagacttctagctacccagagagcagcctattcagtgatgtttactgagcgcatgttgtgtgccttgcactgggcctggagcaagggctaaggagtgaaattagacctgat

SEQ ID NO: 172260 - DNA, 122 bp, Homo sapiens
gaagaacagaatgggagacgttctgcagaacctcagtcacccctggggcatccaagccgtcggagtcaggagggcacgggggggtgggaaaggaaccagaaacacctgaaagaaagcccaca

SEQ ID NO: 172261 - DNA, 122 bp, Homo sapiens
ctcctgggcctccccatagaaggttaacccgggccggatcccacgaggactggtgggggccgggcggcccgtgatttcagtttccgaagagtccggccctgcgcaaaggcgggcagggagga

SEQ ID NO: 172262 - DNA, 122 bp, Homo sapiens
ttagaagggtgattgtttatgggaagtcccaccaacaaactacaaatgggaaaaggagtccgttgcaagagacagtgctgctgcccaacatcaccaaaaggaagtgagcattagtgttcatg

SEQ ID NO: 172263 - DNA, 122 bp, Homo sapiens
caaatgggtacgcccaagcccatgccagtgtctagatcatactgctagcaagtgatggagcgcgacttagaaggaagcggttctcttaacctctgtgccatattgccttctgattacaagaa

SEQ ID NO: 172264 - DNA, 122 bp, Homo sapiens
gtgcacagagatgctggctgcatggggcgtggaggggcgggatggggagccggcagacctcgctttcttcttcttcttcagggaagaagcagctggaagactcaacatctcttggcatccaa

SEQ ID NO: 172265 - DNA, 122 bp, Homo sapiens
cacccagttttgtgcttgaaatcaagggcccttgtggtataggcacccgagggaatctcccggtctgtgggtggtgaagaccatgcgaaaagtgtagtatccgggccggaatgctccgttcc

SEQ ID NO: 172266 - DNA, 122 bp, Homo sapiens
gacaccggctggcactggggctggcatctcgccggcatctgcagacccttctcagtcctccggccacagagctgctgctttccgtctgacttaagcgtcatggccgtgcctgtcccggccag

SEQ ID NO: 172267 - DNA, 122 bp, Homo sapiens
ctctccttccaagtatctttggcttggtgagaaaattctgagccggaaggattctgattgcgattagtgttccatagattattttgtcttttgtctgaagtgatgctgaatacaacctcagt

SEQ ID NO: 172268 - DNA, 122 bp, Homo sapiens
ggttgtagaaaattaagtactgtgtcagttcatttcagcatacaatttactaattacctacgtatgtgccagacactattctcgatgctagaaatacagaaatgtcacatactctgctcata

SEQ ID NO: 172269 - DNA, 122 bp, Homo sapiens
tggcaggtatggggaaagtgtggcaatagcaacaaacataccaaagaagaaggtatggggcgaacacacaatgttttgaaaacaatttaaagggattttaagaaactggtcactgaccaaaa

SEQ ID NO: 172270 - DNA, 122 bp, Homo sapiens
gctgacgacttcggtctgcgccggaagtgcatgagctgccgatgtggtgcttagtgattgcggtttcggtcgctctcccgtgtttcccgggctgggtatttgcctcgcaccatggcggtaag

SEQ ID NO: 172271 - DNA, 122 bp, Homo sapiens
ggctcacaacgcgccccggccgctgcggcccgcctgcctgcccgccgctggcattgggcacgtcatacagtgggtcctgggctggcctgggggcaggcacccagatctgagcagggagccag

SEQ ID NO: 172272 - DNA, 122 bp, Homo sapiens
gacgctgcggagggagggactcccgggctcgccaaacagcggggcctcgggcaagagcgtcgctggcgcgtcctcattctgcgattgctgtcaggggaccatccatcagcgccgccctggac

SEQ ID NO: 172273 - DNA, 122 bp, Homo sapiens
cgttcgggcgccattcaaacggaccaatgagtgatcgacgtttttgtggttggccttcaccgattggctggagtttgtcgtccctccctcctcgtcacgcctctggctccacccctttgcac

SEQ ID NO: 172274 - DNA, 122 bp, Homo sapiens
ctccaattaaaagtcggcatcgattaaatatttgctgaacaaagtaaactgtctctccaccgccgggctgagcgcccactcgagatccggcccggaacaagggcgagactggcccgcgggtc

SEQ ID NO: 172275 - DNA, 122 bp, Homo sapiens
ggagaatgatatttataaagcaagatctggtgctagatgtacctattgctactggggtgtcgctgcttctaggtcctcctgggaatcagtgcaagaaaatataaacacacacacacacacac

SEQ ID NO: 172276 - DNA, 122 bp, Homo sapiens
ttgacagattacagaaagcctgtttcacattctaaagagtcataaattaaatctgtagggcgggtaaagaggagctactcagggctttaagaaggaaagtaatcaatttgaatttgagaaaa

SEQ ID NO: 172277 - DNA, 122 bp, Homo sapiens
caagtaacacacactgtgggcctcagctaagactcagacatgcagacttcaggtgtgacccggcatattcacagctgcggtggctacgaggaaagactccttctgcttgagaaaaggggagg

SEQ ID NO: 172278 - DNA, 122 bp, Homo sapiens
cagactgtccctctcctccccaattctctggtaattttgggcttgctgagactcaatgcccggggtgagagaagctccccaggcagcatgcctcctgctctctccacccaccttctcttccc

SEQ ID NO: 172279 - DNA, 122 bp, Homo sapiens
tcgtacatctcaccagcactaaacctgcctaaaaaattataaaagtaagcaggccaggcacggtggctcatgcttgtaatcccagcactttgggagaccgaggcaggtagatcacttgaggt

SEQ ID NO: 172280 - DNA, 122 bp, Homo sapiens
gccggggtccccgctcacctccatgcctggcctggcaggcggcatgagactgcctcgccccgcccagtcccactcccacggtgacgcccgccaggcagtcctgtgggggaggcccgggctgt

SEQ ID NO: 172281 - DNA, 122 bp, Homo sapiens
tgcagggcctgctggagacgctgctgggctacacggccgccatccccttttggaggaacacggcggtgtcgctggaggtgctggcggagcaggtggatctctacgactggtacaggtgcggc

SEQ ID NO: 172282 - DNA, 122 bp, Homo sapiens
agcccgctttgtgaccttgggggccttatccgggctttccctcatctgcagaaggagccccggtgggctgctcggctgtcttctgctgccggcaggtaggtagggacacccatccctgggat

SEQ ID NO: 172283 - DNA, 122 bp, Homo sapiens
actgaatttcactctgagacaggaatccattacagacatggttttgagcagggaaatgaccgaatccaattttatttttaaatgtgtcattgcagttgctttgggaagaacagcctgtagga

SEQ ID NO: 172284 - DNA, 122 bp, Homo sapiens
gtggtccttaggggcctggcaggtactgtggagtcaacaggccctgccagggagcccgcccgggctgtggtagacagtttgtctgcccgtcctgttcgctggagccagcactattttgtgtt

SEQ ID NO: 172285 - DNA, 122 bp, Homo sapiens
gtcccatgcagctgtgggtctgcagtgggggtacagacctgactaccaagagcctcttcccgtcttcacagatcatctctcagacctggccctacctaagcatgatcatggaaagcaagttc

SEQ ID NO: 172286 - DNA, 122 bp, Homo sapiens
gcccagccggcaggtggtgacagctgccagcagctggctgggcgagggctggcctgagtccggggtagcggtggaggcggggctgtgtgcccgggtcctccaggagcccctggagttacagt

SEQ ID NO: 172287 - DNA, 122 bp, Homo sapiens
ctgttcgttccgtatggactctgggtgccctgtgtgggctcacatctgtctgcccagcaacgagccgcatcatcacgagcatacctggagggtcttctggggactcaccagtaagcccgtga

SEQ ID NO: 172288 - DNA, 122 bp, Homo sapiens
ctccccaaaaacatccactaaaagaccaaatcctatattgcattttttctaatatcctcacgctaagatggtgtgcattctctcttgtgacaatgagtaataaaccccagttgttcagctat

SEQ ID NO: 172289 - DNA, 122 bp, Homo sapiens
ggtgcgaaggcaggatcggctcagagcctccccctcccatcggggcttgcgaagaacggccggcccccatcccaatccccagagggttacaggccaggagagggaaaggcagggggagtccg

SEQ ID NO: 172290 - DNA, 122 bp, Homo sapiens
ggtgtgaggttagtgggactgacccggggcccaggcccaccccaacgcacgatgcccgcccggtgggtccctgcctgcccaggcccaccccaacccacgatgcccgcccggtgggtccctgc

SEQ ID NO: 172291 - DNA, 122 bp, Homo sapiens
cttggtcttggtcttgctcgccaggacagaggaccctaggttgccgggggtcgccatggccgcctcctatgtcccctccaccgccgtgctcccgaggccggggacccgccctctctacaccc

SEQ ID NO: 172292 - DNA, 122 bp, Homo sapiens
caccagacgattgagtctaccttcttttcttggccacctccccattcacaactactttctcgctcccagaaggttgatcagatattctacaatcacagagtagcaaggacgtttgagatggg

SEQ ID NO: 172293 - DNA, 122 bp, Homo sapiens
cccacctctgagggcccgagggtgacgcggtgaggacaccacgggttctggtccttcccacgcgcgcgtccgctagcccaggcccggcggaaatgactgtgagctcaaggtgtgaagcgggg

SEQ ID NO: 172294 - DNA, 122 bp, Homo sapiens
attaagtggaggctccgagctgcggtcggtgggcagttgctggagtaattgtgtcttctccgttgctgcaggcgatcttctcccggctccctgatccccggactgactcctctccttgtccg

SEQ ID NO: 172295 - DNA, 122 bp, Homo sapiens
agccaactccagggctgggggtcaggagtcctaggctcccattcctgctccattaccaaccgaaggctcggtcttaattcccccacctgtctaaggggaacagaaaacccctgccaaaacta

SEQ ID NO: 172296 - DNA, 122 bp, Homo sapiens
gggccctcctgacctgaaatactttgttgagtgttttccccccagtcatctggctgcatccgggttcttatggtgtccagacgttaatggtctatggggcctgtgttcgaatcccagctcca

SEQ ID NO: 172297 - DNA, 122 bp, Homo sapiens
aggaaggaggccgcggcttcgcgtcccgcctctcgcctggctggccgtggggggcctggacgcagtggcctcccgaatctcccaggaccctaatatcgcccgaggatgctgggaggaacgct

SEQ ID NO: 172298 - DNA, 122 bp, Homo sapiens
gatgtgggccacgggctgctcatgttcctgttcgccctggccatggtccttgcggagaaccgaccggctgtgaaggccgcgcagaacgaggtgaggggcggggctggggtcctgatgagggt

SEQ ID NO: 172299 - DNA, 122 bp, Homo sapiens
tgctccctgttgcctgtacctatccccttctatcacttattgacacagcctctgccggcacgtgcacgtgactttgggatgtccgttttgttcttgattccctcttgctgctactgcagggc

SEQ ID NO: 172300 - DNA, 122 bp, Homo sapiens
cccagacgccaatgccccggccggggcgtcaggtgagcgcgctaggcccggcagcaagcgcgcagcccgctcccgcagccgcggcctcctcggatcctccgcatcctcctcctcttccgcct

SEQ ID NO: 172301 - DNA, 122 bp, Homo sapiens
ttaaatcctgcaatgatttcccagcttcttactgtgaaatccatggcctgtgtggctcaacgtgctcggcctctgcctagcattacaaattctcccaccactttcttgctgcagtgaacatt

SEQ ID NO: 172302 - DNA, 122 bp, Homo sapiens
actgtatgtgcctacctactcatagtctgtgctttgtgtagggccagatgcatctttcaacgtaagggaacataacagcaaaggatcccacagtaaatcaaggcccatgataatgccagtat

SEQ ID NO: 172303 - DNA, 122 bp, Homo sapiens
agtcacgcttggcccaggctgccccggaccgggccacatccttggccgccccgcacctgacgtgagaagaggctacgtatcatagattcctccatcagtagtaaggagcctgagtttctgtc

SEQ ID NO: 172304 - DNA, 122 bp, Homo sapiens
cctcaagtgatccacctgccccggcctctcaaagtgctaggattacaggtggagccacctcgcccagctggggagacatttttaattgtcacaactgggatggtgctattgacatctagtgg

SEQ ID NO: 172305 - DNA, 122 bp, Homo sapiens
ccatatcccctactttgctaacgaggaaactgaggcccagagaagtgattgatatgacttcggcaaagtcaccctcccagcaggacagatccacacttgaggaccctgtttgtcaagtttga

SEQ ID NO: 172306 - DNA, 122 bp, Homo sapiens
tcactcatggcagttttttgagatgggttgttcaggcttcaccttcattaagtaataccacggaatgccttggtcccaagtgactgctgaaactggcccagttttcatgagtcacaattgtg

SEQ ID NO: 172307 - DNA, 122 bp, Homo sapiens
tgtgttggcggggctggtctccagctcctaaccgcgagtgatccgccagcctcggcctcccgaggtgccgggattgcagacagagtctccttcactcagtgctcaatggtgcccaggctgga

SEQ ID NO: 172308 - DNA, 122 bp, Homo sapiens
ggtggcctactcacctgggggcgaactccttctggcacatggggcagctgcgcagggccgcggcaccctccacagacggctgctgctccaccctgggggccctgcagggatcaggtgccggg

SEQ ID NO: 172309 - DNA, 122 bp, Homo sapiens
cggagagactgggatggctgggcttctctctctgcctgcagtcctgagtctctccttcttcgtgtagtctctttcagtggcctggctggcagggtagctagacctctcacatgcagctcaga

SEQ ID NO: 172310 - DNA, 122 bp, Homo sapiens
tccactgcaggccaaaccctaggaacgagagcaagcggcgacctgaagactcacaggaagcgagggcagtgcggcggcagcgcgcatgcccgaacacgcacgccgggagaggtgcacacgcg

SEQ ID NO: 172311 - DNA, 122 bp, Homo sapiens
gtcgcctcattagccttccccgcccctgtcccgggcatcggcccctgcggaggagttcaccgcctccccacgggtgatttcttatccgccccggatacgtcctgggaaacaggacacgggaa

SEQ ID NO: 172312 - DNA, 122 bp, Homo sapiens
aggttcacaatgtctgaatgggatttgttggtgatggaacatccatttactgccaagatccggtctcctactttcagcttgccacagcggtcagcagggctcccctcaataatccgacctat

SEQ ID NO: 172313 - DNA, 122 bp, Homo sapiens
actgttaggcaaagctttcaggttagtctgtctcagggaagacttgtgagttagaaaagccgtctgcaaggccagctggtttttgtgtttctgtcattaaagacagagcgtgtgtacacaca

SEQ ID NO: 172314 - DNA, 122 bp, Homo sapiens
gtgtgtggcgggtgctgtcctgacattacatgtggaaactccatctttgcagcaaccctgcgaggctgctgctcccagctgctgtgcaggtggagagaggctgctgttgtgcaggtggagag

SEQ ID NO: 172315 - DNA, 122 bp, Homo sapiens
tggggggcgctgagaggcatcaggctcacatctgcggggaagctgcgggctgtctgtggccgtcctgcatgggccccgctcatccctggccttttccacagtgtgtgccgggatgggcggct

SEQ ID NO: 172316 - DNA, 122 bp, Homo sapiens
atttacccgccggagctttttgcacccccgccaccacgactttttgaacccccgccgccgcggcattttgccccccgccgcagcgactttttgcccgccacggctttttgcacccccactgc

SEQ ID NO: 172317 - DNA, 122 bp, Homo sapiens
aagtaagactgtgttcttgagaaggtcagagcaagacctgttcaccccactgagcagacacgtgtcaggtgcagagactgatgtgaagacagagcagcccaggcccaagggagccactgatg

SEQ ID NO: 172318 - DNA, 122 bp, Homo sapiens
ccgaggacctgagccaggagagcaggcggctgagcccggagaagcacagcaacctgcccccgagtctgcgcccgctgcgctcactccgccgagaaaaagttggaaagaactttgaggggccg

SEQ ID NO: 172319 - DNA, 122 bp, Homo sapiens
ttgaaacttagtaattatctctccacttcggctgagaaatgtcccagaatagaatcttaccgtccccttgtacattgatgtttcctaagttctagagtaactggcttctttagaacagtagc

SEQ ID NO: 172320 - DNA, 122 bp, Homo sapiens
tgccaattgccaaattcagcgtgtaaaacagagagctcacatctgtctgtttgtaagcttcggtgagaacaacaaggaaggccctcaagatccctaggagggcggcgaagggtctctggcga

SEQ ID NO: 172321 - DNA, 122 bp, Homo sapiens
caggcctgcgagctgctcaaccgcttccaggactagcccccgcaggggcctgcgccaccccgtcctggtgaataaacgcactccctgtgcctcagacctcctggcttgctgctgctggtcgg

SEQ ID NO: 172322 - DNA, 122 bp, Homo sapiens
ggactggctgggctgcagccccagtacacaagcctggggagtcagaccccagggaggcagcgcctggagaaggcagctgccccccagtatcctgccccacttcctcagagctctgaatgtcc

SEQ ID NO: 172323 - DNA, 122 bp, Homo sapiens
ctaccgggaggagagcagcagcaagcaaggagccggcctcgctttgggcaggctgctgggcgggggccgggcgtgcgggcgccccgggagcggggagaactcggcggcgggcggcgcgggtc

SEQ ID NO: 172324 - DNA, 122 bp, Homo sapiens
ctcggggatgtgcggctgggagcctggaggagaaggaggagttggtaggggtggcatacacgtaggaaggcccgaagcaggaagagttgtggcttaggccaagttagagctggaccacaggg

SEQ ID NO: 172325 - DNA, 122 bp, Homo sapiens
ctctcagaaatttccaaatccctgctcccaacacaattttagtacacctattaagtaccacgggtcatttagaaaaacagaaaaaaatatacacctagtctttgcaattaaaaaaaaatcat

SEQ ID NO: 172326 - DNA, 122 bp, Homo sapiens
tttcatgtaagcttcccaacctctcagtattgcagatacttagcagaaaggattaagtcccgagttgccgaagcctaacgtcaccaaccttgctattgccaagagcaggcatggaaaggttt

SEQ ID NO: 172327 - DNA, 122 bp, Homo sapiens
cagctgcatggagcccggcccttgggcactggtgagcgttggaaccttgtcgtctggctccgagcctctgctgtgcgcaacagcctctgtcccatgtgctgccgtgagcccgacctggtgga

SEQ ID NO: 172328 - DNA, 122 bp, Homo sapiens
cactcaccaccacctaaaattataatagttaacaactttattactcatttcttgtcttcccgtataagatggaaattgacagcaaggactttgttctgtcctgtttactattttacccctag

SEQ ID NO: 172329 - DNA, 122 bp, Homo sapiens
atcagaggtggggattggcgtcccgtggtcgttccccctctctacatcttcagggtctgtcggaaacaacaccagagctgctgatggggtcacagtagtaacagtagttgccatttcgatca

SEQ ID NO: 172330 - DNA, 122 bp, Homo sapiens
agccccatctgggtcctgctctcacggagctcactcacacaggtctaactgaccctgtgtcgtcaatgccatgatgtcaggaagctgaggggctacgagagtgcaggagaacacacttgacc

SEQ ID NO: 172331 - DNA, 122 bp, Homo sapiens
ggacagcgcctcggtggccccaagacccatgaattgtctctggaactgcaggaacagctccgggtcgtatcggaagttggggttcgccaacaatggctccccaagacctgagatccccgccc

SEQ ID NO: 172332 - DNA, 122 bp, Homo sapiens
actactgagaacgtcaaggttggaatccatattgcttcaagccagaggccagttcctagtcggtggctcccatgctggtctctgatgtttaggaagtggtgtcagcagagactgagctgcac

SEQ ID NO: 172333 - DNA, 122 bp, Homo sapiens
aatcccaatatggaccctaaggaactgcagaagacatccttagacggagagttactctcacgaaagagtaggggattctgaagccgatgatccccttgagctctaaactgccaagtcccgcc

SEQ ID NO: 172334 - DNA, 122 bp, Homo sapiens
gagcccaaggtcctcaactctaattctaatgctatctcagggcagtcgagaggctgaaaacgggcgccaaacgggggaacacgtacgcagcattcgcaggctatggggagcttttacagtgt

SEQ ID NO: 172335 - DNA, 122 bp, Homo sapiens
cagtgcccggcaagcggagcgcagcacccattgcgcctgcgcataacaggctctagtctccgggctgtgggaagccagcaacacctctcacgcatgcgcattgtagtcttcccacctcccac

SEQ ID NO: 172336 - DNA, 122 bp, Homo sapiens
tgaggaggacctgccagaactgtcggacagcggggacgaggccgcctgggaggatgaggacgatgcagatctcccccacggcaagcagcagaccccctgcctgttctgtaacaggttcgtcc

SEQ ID NO: 172337 - DNA, 122 bp, Homo sapiens
gcatggccccaagaaataagagggtagcaggtgtaaagctttcttattggccatagaacccgtctattccccagcaggcacccctgggaggatatgagggtgacaacaaccagggagaggac

SEQ ID NO: 172338 - DNA, 122 bp, Homo sapiens
gctatgagcagatcgactctgcccaagtcttctctcacccaggtccagtgggcgacaggccggacttagactcggatccagacggggaaggcgcagcatctcttgcagctgcagagagattg

SEQ ID NO: 172339 - DNA, 122 bp, Homo sapiens
tcatggacacatgggcagatgtgtccggtggtgtaccccgtcagcctgcaggctctgcgacggcagcccggggtcctcacgcctcttccttctggttttcactgcagatgttcggcttcttc

SEQ ID NO: 172340 - DNA, 122 bp, Homo sapiens
taggaaaaggctagcacataagcagcttggctgctgcctgtgttctaagcgtggtcacaccgttgctctgttaaccagccctccatggttcccaatttgcatcagcagaaagccacagcaaa

SEQ ID NO: 172341 - DNA, 122 bp, Homo sapiens
cgtgcgaatcccaggcttgtcagaggggggcgctggaggctggggtcgctgggcccgcctcgggctggcagacgtccagactcacccagggtgagggcgccaggcttagggtagaacagagc

SEQ ID NO: 172342 - DNA, 122 bp, Homo sapiens
tggccatggaacatcgacagttttataaaatgagcatgtacgaggctagtgcacatgttccgcttttgatgatgggaccaggaattaaagccggcctacaagtatcaaatgtggtttctctt

SEQ ID NO: 172343 - DNA, 122 bp, Homo sapiens
gcacctgccccagccgggcacaggctccacttccggccaggtgcgctcacctggagtagtcgctctgcacctccagggtccgggtatccagcagcaggccgcaccaggggaataggccgtgg

SEQ ID NO: 172344 - DNA, 122 bp, Homo sapiens
agcttctcccttagggaagcaacaggagtgggccatgagtccagcattctgggtttccagcggggttgcccaaggcactggtttctgtcttacatgactcagagtgcagagtttggatgcca

SEQ ID NO: 172345 - DNA, 122 bp, Homo sapiens
gcacgcgcaatagacattccaggacttccgggcacttcgtaaggtttaaaaaggatgcttcgcgttttctctctcctttttggagacagattcgcagtggtcgcttcttctccttggtaagt

SEQ ID NO: 172346 - DNA, 122 bp, Homo sapiens
caggctgagctggtgacccgggcaggaccggagccaaaggattaatccatcacaatgagacgttctattctgggcaggcggcgcgagcagatgctgggcgccggcggaggcagcgtgcaggg

SEQ ID NO: 172347 - DNA, 122 bp, Homo sapiens
ctcagggactcgcccatccaggtggccgcagcccgagttcgcacgcacccctacccacgccgccaccaccctgcacccggccccaagaggcgtctctccaacacgcacactagccccggact

SEQ ID NO: 172348 - DNA, 122 bp, Homo sapiens
ggcaacctcccttggtggaaggtgtctaccgggtcacactcccaagcccaaacaggcgaccggggattctctctgctcgattctccgcaactcacctctacaggaagaacttacatggagat

SEQ ID NO: 172349 - DNA, 122 bp, Homo sapiens
taacgtggggacttgcccatttatatttggacggtatttttctctggctgtcccacttcccggggccttggagctccctcccccgcagggcggcttctctcctcctcctccctcctccctcc

SEQ ID NO: 172350 - DNA, 122 bp, Homo sapiens
tgctcagataagaatcctggtaatagatgccaatgacaaccccccagtgttcagccaggacgtgtacagggttagccttcgggaagacgtgcctccaggcacctccatcctgagagtgaagg

SEQ ID NO: 172351 - DNA, 122 bp, Homo sapiens
tcagcggcctcagggacctcccacaacatagacacttttgagctggattggttgaaatgtcgctatggttctgcctattagggggcggaagctttaccagttctattttcattgggtaggtt

SEQ ID NO: 172352 - DNA, 122 bp, Homo sapiens
cggaatgcgcagtcgggagaacggaatgggcggaactcagggtggggcaacttcctatttcgagtctaaagtaatcttggtctcttccggccgccgtaaaggggttgggtttagtgttctcc

SEQ ID NO: 172353 - DNA, 122 bp, Homo sapiens
tggaaagctgtttgtatttacccagattcttactttttcttgttccccttcccatctgttcgcggaaacttcccaaaaggtaatgagaagggaactctttaaattccaaaactgcatggaaa

SEQ ID NO: 172354 - DNA, 122 bp, Homo sapiens
ctcagcctgcctgctgggaggaggggagtctgaaaagtgcatatttcacaaaagccactccgtagagggctgtgggtcttactcaggagctgtgggaggaatattgacaagattctctgcat

SEQ ID NO: 172355 - DNA, 122 bp, Homo sapiens
acacatttgcccagggccaggctgacggtaattgctggtctgatattgcatatatgctcacgacgacggggccgggtgattagcagaaaataacctcgagtattgcaagcgtcctgcgggtt

SEQ ID NO: 172356 - DNA, 122 bp, Homo sapiens
agggagcctcagtgctttgctggggacatcacagggtaaattaacaccaagaggcagccacggtctcctcacggagctggggtactttaggaagggctgataccaaagaggcagagacggcc

SEQ ID NO: 172357 - DNA, 122 bp, Homo sapiens
tcagcaagacggctggtccctgcgttaagagcactttcaataaggacagatggagcctctcgtataaccttcaccggccccctgcaagagaagcgcgataatggcgcccccatctacccagt

SEQ ID NO: 172358 - DNA, 122 bp, Homo sapiens
atgatccgcccacctcagccttccaaagtgctgggattacaggcgtgagccaatgcgccccgcctttttatcaaatacttttaagaagtaaaaaagaatgagggctgagcaagacgattgga

SEQ ID NO: 172359 - DNA, 122 bp, Homo sapiens
aatataatatggaaggtgaaacatttacttaaactattgcaatgcattattaaaagatgacgataaccacaaaagatgtaaaaataaattacaatgggggttaaaagaagggagaaagggaa

SEQ ID NO: 172360 - DNA, 122 bp, Homo sapiens
ttccctgtgcggttcggaggcggggcaggtgggggcgggcccaggtagcaggtttggctgcgcgggggccgcgcgtcggaggtaaatactagggcggtgggtgtggggagccggggccggcc

SEQ ID NO: 172361 - DNA, 122 bp, Homo sapiens
tggggcccaaactgagaaagagaaccacagaaagcctccatggattccattaattgctatcgatgccaggaacttgagagagagaaaaaaactgggaatcagaaaacttgggtttctaactc

SEQ ID NO: 172362 - DNA, 122 bp, Homo sapiens
gagtcattcacagttgtcaccatcctgcagacccgtgtgagatacagggacgcaggccctcggggtgtggccgctggcctcactggccacgcaggacggctctgggagcgtccaggtgtaga

SEQ ID NO: 172363 - DNA, 122 bp, Homo sapiens
gacgggcgtctggggctcaggcagggctctgtgtgccacagtcacagtcctttgagcggtcggtgcagctcctcgaccagatcccatcatacgacacccacaagatcgccgtcctgtatgtt

SEQ ID NO: 172364 - DNA, 122 bp, Homo sapiens
aattatgttggggatgggtgggcaataagtggtcagcctgggaaggcagacccccagctccgtccccgccaggctggactgtgtctggttccccccatcgtgcctgggccctcatctctcct

SEQ ID NO: 172365 - DNA, 122 bp, Homo sapiens
tattccatcaactatagcttttcctttgcatgctcttgcatgcacgttctcgctctctctcggtctctctctctctcagatttttatattatactcctcactatttctgagctttattgttt

SEQ ID NO: 172366 - DNA, 122 bp, Homo sapiens
cattataactctcctgtcctcgctgttttgcttatcgcaggggtgcaggtttaaggaccccgaaatttcactgaaattcactggccgtttttaaaaccagaagatgccttgagattgtaggg

SEQ ID NO: 172367 - DNA, 122 bp, Homo sapiens
gtattttaaaactcaggttgatctctcatcttaactgtgattggttcaattttaccataccgaaagaataaattcatttgagcttttacctacgcctttgctttttgttaaaggaagaattc

SEQ ID NO: 172368 - DNA, 122 bp, Homo sapiens
ttggtcttaaccattatcccatattttatattaatcaaaagacttgtaaatcttgggattcgaatcagtggctaggcttgtgtttgtacagttgtaactgatggaaggacagcacatacaat

SEQ ID NO: 172369 - DNA, 122 bp, Homo sapiens
ggcagagctaagcaggccacagacatctttccccagaaaagctgagggtgagaggcagggcggttcaccctccggatggctgtttgtaaagtaaatattgattttgagccatcccccaacct

SEQ ID NO: 172370 - DNA, 122 bp, Homo sapiens
agccactgcacaccctgcctggagacagctcagctcctccctttgcctttcaagagcaaacgccctggaggagcagctgaaggagcaggagctgagagcctgcgagatggtcctggaagaga

SEQ ID NO: 172371 - DNA, 122 bp, Homo sapiens
aaatcctttaaaaagccatgctgttgtgataaacgcaagagagctcagggacctggcaaccggctacctggtgttaatatcaatgcatttttaaaccaaaatgcttcatgactcaattttcc

SEQ ID NO: 172372 - DNA, 122 bp, Homo sapiens
ttgtgatcctctggatttggtgtccactctgaacgcggcgtgggtgtttaacaactgtgacgggacagatgtcattaatgtgaaaatgctcgcagccttccccttttccaccctgctaaaag

SEQ ID NO: 172373 - DNA, 122 bp, Homo sapiens
ccacaaacaatcagcaattacattttctgcttgtttttaacggggaagtagggcactcaacgaaaaggaaataaaagcagagtcaagaaagtgccttttatccatggagtgcccaatgtgtt

SEQ ID NO: 172374 - DNA, 122 bp, Homo sapiens
ggactgccacttggggaggtgggagggctgaggtggcacaaggctcttcccgcatggggacgccaacagtggggacatcttgtaaacacattgggctctgttccttgcccagcatctgtgcc

SEQ ID NO: 172375 - DNA, 122 bp, Homo sapiens
tagaatcttctgtagtgacggcaatgttctatgatctacttacacagtacctagtagccacgtgaggtaacggagcacttgaaatgtggctcatgcaactggggaactgaactgttcatttt

SEQ ID NO: 172376 - DNA, 122 bp, Homo sapiens
ctccagcgtgatggaacgcggggtgtcccgggatagggctaaagcgatgggatttccagacgagtctttcccaggccaacttttaaaggtcggaggaaagtttctcgtggggtgggggccca

SEQ ID NO: 172377 - DNA, 122 bp, Homo sapiens
gggtcccagcaggaagcgccgcggcccgggcttcccaccccttccctcgccgcccgggcccgccctggccagttgcagcggcctggccacctcaggagcacgctgtctcttcccgacgtgca

SEQ ID NO: 172378 - DNA, 122 bp, Homo sapiens
gaatcttggtgagcatccaattcagccttcccgtggccactcctcccacagacaggcaaacggaggcctgggggtttcagtgggccttgtattagcaacataaggaaaatgcacatttattg

SEQ ID NO: 172379 - DNA, 122 bp, Homo sapiens
accagtttggagaacttcccgggcttcctgaggctgccaggatgacgtccgtgcttggctcgggggacggctcctgcccagccttcccactctcgccctccggctcactgggcttgggcagg

SEQ ID NO: 172380 - DNA, 122 bp, Homo sapiens
gagagatatgtttggtcccaagtctcgcgagggctctggggagcgctgggtcttcaaggacgttttggatttgaatacttggtgagagcgtcgggtaggggaacagcaggagcaaagcccgg

SEQ ID NO: 172381 - DNA, 122 bp, Homo sapiens
aactgtgagccaccacacctagcctcttggtcattctttgaaaaataaacctcagccaggcgcgatggctcacgcctgcaatttcagcgctttgggaggctgaggtggcggatcacctgagg

SEQ ID NO: 172382 - DNA, 122 bp, Homo sapiens
gcccgcggaaccggctgggccccagggaaggcaccctcaggccacagtcaggtggaagggcgttccctgcctcctagcccgctgcgtcactctgcttggctccggcccaagggcgtgcaggt

SEQ ID NO: 172383 - DNA, 122 bp, Homo sapiens
aggcagaggtcaaatctctgggcctgaggcctcagcaccctgcagttgcagagcctagggcggccaggaggaacagctgggagggcacttctcaccatttctgaggccacgctcaacgggcc

SEQ ID NO: 172384 - DNA, 122 bp, Homo sapiens
ctttttaaagattgctttaaaaagcaatacagtagtacttggaagaggtttctgggctgccgaaaatgttctatttcttgacctgagtggttatatggacctgagggatgtttcactctgac

SEQ ID NO: 172385 - DNA, 122 bp, Homo sapiens
gtgtgggctggctataggggaggccactgctaggggactggcatccaggcccccttgaagcgtctcaataagtccgcgctctcctttttggtgtcttgcaggagaggcagcttccccccttg

SEQ ID NO: 172386 - DNA, 122 bp, Homo sapiens
gtccggctgagccttaacggctcggaggagtttgtctccatttccaagcccgccctggagcgctcgcgggggcgtgacggcccccaggacccaaggttccgatccgcgccaaggcgttccgg

SEQ ID NO: 172387 - DNA, 122 bp, Homo sapiens
gcgggtgggcgccgtcgcctcactaaccgggcgcctccgggaaatccgggcggggtccgccgctcgcacataggattagcgtcctctaaactccatccctgggaaaagccgccgcacttctc

SEQ ID NO: 172388 - DNA, 122 bp, Homo sapiens
gcgtgaactggactgttctagaagcttcctggccccacagagggagctggggctgcaagccgtgtcctgcctcaccccggcctgcatgtctgaccccggccagcctcggtctcagggcctca

SEQ ID NO: 172389 - DNA, 122 bp, Homo sapiens
gccccgacgaccgaacgtggatagtcgccgccacagcacggtaatcagaaggctttcgttcgacttgtgattcggatggtccggggagttcaagtcgatatcttcggcgcctgaggggacga

SEQ ID NO: 172390 - DNA, 122 bp, Homo sapiens
aggagtacccgaaatgccagcaggagaaatgcaacctgtttaggccacaccttcaatccccgaggctgtctggagagactgcgtgcgggggacttgccggcgttcccacaccgcgcctgcaa

SEQ ID NO: 172391 - DNA, 122 bp, Homo sapiens
ccagggcccacccctctggggaaaaataagtcagaacattaaggaaacacaaggagtccacgcgtctctgcattccaagccgttgcacctgaactcccaacaataacagggcgctctgagac

SEQ ID NO: 172392 - DNA, 122 bp, Homo sapiens
cacagcacagaacaaaaaacataagaaaaagcccgaaggtgtcgccagctgtggaaggaacgtgggcccaccaggggccgcagttcctgcatcacgggcaccagtccagcccagctcctagg

SEQ ID NO: 172393 - DNA, 122 bp, Homo sapiens
gtgcccggctcaccttggtgctcgccctgacagtgattctggagctgacgtgaaggcacccgccccggccactccatcaggcactgacatctccacgaccggttttcatttcttttctaaac

SEQ ID NO: 172394 - DNA, 122 bp, Homo sapiens
ttccagttcctataaaatcagactccagacaatatatccagccaaagctacgactgccttcgcgcttctgaagaaactatacaccgcagcatgccctactacaaaccagttgctttttcttc

SEQ ID NO: 172395 - DNA, 122 bp, Homo sapiens
gtgaatggggttcttccttttttatttaccggtggctgtgcttccaatttaggaagaccccggcgacctgttcctcacccccgcttcgccctcacactttcgggatgtctgcgattcctgct

SEQ ID NO: 172396 - DNA, 122 bp, Homo sapiens
ctcaactgctctccctgtgcaggcagtcggcaggcggctcggggtctaggggtccagggccggccggcccagtcgcttgtgtgagcagagtaccagctgcttctggaagttgggggcctcca

SEQ ID NO: 172397 - DNA, 122 bp, Homo sapiens
aaggtgtgcctaagaatgtagtcctaactgccaggtccttcactggctcgcactgctccacggcaccatgctgccctctagggtaaaatgacacagtggccatagcttctttccacaggggc

SEQ ID NO: 172398 - DNA, 122 bp, Homo sapiens
gaggcctccctagaagcccagctgatgcaagcaccatactttttataaagcttgcagaatcgtgagccaattaaacctcttttctttataaattatccagtctcaggtatttcttcatagca

SEQ ID NO: 172399 - DNA, 122 bp, Homo sapiens
ctcctcggctcaggacactgaatgggacacgccccctcagatccccaccactaggtggtccggcccccagggcccaaacctcacgacactgtccccacgccccggtccccacgccccctccc

SEQ ID NO: 172400 - DNA, 122 bp, Homo sapiens
aggccactatgaggagaaccgaggccactctctggatgccaacagcggaggccgttcacccgacacccacagtgggggccacagcagttccagcaacagttacggccagagccaccgctatg

SEQ ID NO: 172401 - DNA, 122 bp, Homo sapiens
aaaacaaacttctggctgggagtggtggctcacgcctgtaatcccagaactttgggaggccgaggctgacggatcactgaggtcaggagttagagaacagcctggccaacatggcaaaaccc

SEQ ID NO: 172402 - DNA, 122 bp, Homo sapiens
agcatcatcttccacttgatttaccaaagtcaagcaatctggtttgatttccaccctgagcgcccccctccccaaatttgataccataccaaataaaagcctcaggagctgttccaaatgca

SEQ ID NO: 172403 - DNA, 122 bp, Homo sapiens
ttattctatttggctagatagatactttggcaatagtgtttgaaacatgaagtacagattcgtgtttttgtttagattttagatttttgaattttagatttgtattgaaaaatgttttctcc

SEQ ID NO: 172404 - DNA, 122 bp, Homo sapiens
agagcgcacgacgaaggcactgggagggcacaggcgcttgcgcagtagggtggccgctcccggccgcgtgcagcgcgaacgtcggcgcaggcgccaaggctctggcagttggccagcacacc

SEQ ID NO: 172405 - DNA, 122 bp, Homo sapiens
aaaacttctgaggaaaaattctgcacacctgtgccagcccctgagcactggcgacgtgcccgggacagtgcctgagggaacaattcttcatgtcctcactaggacaccatgaggaggtgggt

SEQ ID NO: 172406 - DNA, 122 bp, Homo sapiens
tctctgcgattaagaagataatttattaaaggtggtccttcctacctctgtggtgtgtgtcgcgcacacagcttagaagtgctataaaaaaggaaagagctccaaattgaatcacctttata

SEQ ID NO: 172407 - DNA, 122 bp, Homo sapiens
gaggcctccacaggcgtacactattgtttctaatgtcggaaaagggtgccgcggtggaaacgacacaagggcaggaggtggggtttctgtggctttaaccgaaagaaacttgcgaaacgcaa

SEQ ID NO: 172408 - DNA, 122 bp, Homo sapiens
ggcgccgggccggcccgcggcaggtactatttcctttgctgctgcctttgttctaccccacgctgtgtgagccgatccgctactcgattccggaggagctggccaagggctcggtggtgggg

SEQ ID NO: 172409 - DNA, 122 bp, Homo sapiens
gcccacctcgcaacagctgcttgatctccctgctggcctgggacgtggtgaactggtgcacgatgtccagggctgtctggctgtaggtgttcctcacgtgggcattgatcccgctctgcaca

SEQ ID NO: 172410 - DNA, 122 bp, Homo sapiens
catttgggcaaacgcttcctgggctttctaactccacagaaacgctaaccaggtattgggcgctcgcaccgcttccaggtaacccgcggagctgcggattccaggctcgcgctgtgacgtca

SEQ ID NO: 172411 - DNA, 122 bp, Homo sapiens
caaagacatcacttttaattatttttttttaattaaaatactgttatacccagtggaatgcggcagcaatcctggtacagggtggcataacaaaacagccatgtttacattttaaatattta

SEQ ID NO: 172412 - DNA, 122 bp, Homo sapiens
caggcagacatgcccggtggcggctcctttgcaccattgacctcaggccagacacctcagcgccaacaatgggacctcggccttccggctaggtttgccccaggctgggcaggaaaccagct

SEQ ID NO: 172413 - DNA, 122 bp, Homo sapiens
tccgcaaacattttgacgggtttggctttgcccggctggattactgagtgtccccttgctcgctcgctttttctctctcccccttctccgagctcgctcccttctctccctctctctcctct

SEQ ID NO: 172414 - DNA, 122 bp, Homo sapiens
tgggggtcgcgccgggctctgccagccgcctgctgcgattgcaggcggactctcttgtcacgtaatcgtgtggccctgccagctgggggccgagtgataatctttctcccataattggcagc

SEQ ID NO: 172415 - DNA, 122 bp, Homo sapiens
acacctccagtgggcactctggacttcaaggtagaagaggtcctggctttcaaagcaaatcgtgtgccccacctccccgcgcctgcctgcctctgcaaatgcctgtcagttcgaccctcaga

SEQ ID NO: 172416 - DNA, 122 bp, Homo sapiens
atttgactccatgataaatcaatttgatctttcactctacatttttgcgagtgttttaaacgtttcatcacttcatacccttatacacgcaaaaaagaaaccttgctattttctaatcaaat

SEQ ID NO: 172417 - DNA, 122 bp, Homo sapiens
aattcatttccttctggtaatgcttggctgccccttgcaaattggagtcattttctcgtgcggccttctagtgttcttctgaaatttgaggtttgctctgttttcaaaatgtagaaacccat

SEQ ID NO: 172418 - DNA, 122 bp, Homo sapiens
ttgtgtgtccaattccaagatttgaaacatgtcattttttcaaattgtcttcagtaaagacgtgatttacaagacccattcccttgtgtgatttgaatgttggcgctgaactcccgtcacta

SEQ ID NO: 172419 - DNA, 122 bp, Homo sapiens
cgacgcgcccgcagatccggcgcggagaccgtttgccagctccgggacgtcgggcagggacgggtcccagagccccaacccccccgccgccgcctcccggccggagaccacggtccctcccg

SEQ ID NO: 172420 - DNA, 122 bp, Homo sapiens
agtccctgttgctcacacacagcatccagttcacaagggacgggcaacgtggacaaagaacgaaagacaacggacaaaaaactgaagggacctgaaattggagtttccagcgtggactttga

SEQ ID NO: 172421 - DNA, 122 bp, Homo sapiens
ccaaaatgtaccataccctggggattactctgaactttgttcatttgttttcttttaattcggcttttttggttgcctttcacctactttttcgcagagccctccgctggggccttcacttg

SEQ ID NO: 172422 - DNA, 122 bp, Homo sapiens
ctacttgatattatgtaatttgttgtttgactctgtttcctgagccttctgtgatgggtccgggcagagcctgtcttgcacacacctttgtctccagcacctgaccacagcaggcacttcat

SEQ ID NO: 172423 - DNA, 122 bp, Homo sapiens
gaatttggaataagtagctgcagggcttccgcaggcattgcccaactctgtggcctcctgcggcttccagcagcccaggaaggagggccctgggtgaggatggctggaaaggaattctggat

SEQ ID NO: 172424 - DNA, 122 bp, Homo sapiens
tgggcccggtggagccttgtgggccaacaaaatgtgaactggagacgagcaatacggaaacgaaggcagtgctggggttctagtggaatctccaactgtcgtttaaagattgtgtactccac

SEQ ID NO: 172425 - DNA, 122 bp, Homo sapiens
cccgctgaatcgcaatgcccgggggatggtctcagggtctgccgcgtccctctcggtgcccgagtgggtttgccactgtagactttacacacacacgcacacgcacacacacacacacaccc

SEQ ID NO: 172426 - DNA, 122 bp, Homo sapiens
gtgcccttaaggaagggctgagggcctgggtttgcctttttaccttttcacctcctgccgcgtgagggcccagccacaaggtaccatctgggaagcagagtcccaacccttgccagacactg

SEQ ID NO: 172427 - DNA, 122 bp, Homo sapiens
ttgaaaggcttctccacagcattactcagtccaactaatgatgggaaaaggagggaaaaacgagggcgccgagccgcaaccgcttgcctacctccacctaaaacgcaaacacagcccgagtc

SEQ ID NO: 172428 - DNA, 122 bp, Homo sapiens
tatcattgtacaagccacagcaggcctctccctcttgcaaaactttgccttggagaagaccggctggaagttcttagtgccttgcctactcctgggcaaaccccaatggccatatgaggccc

SEQ ID NO: 172429 - DNA, 122 bp, Homo sapiens
cgcatctgcgtactgccctggcgactgacgtgagcatgaagggagctttagtcagccgctcggcccgcgggaaggaagaggcgagcaggagtgactcacaccaggctcgggctccaggcttc

SEQ ID NO: 172430 - DNA, 122 bp, Homo sapiens
gcatctgggaagtccgaaaaacaatggacaagatctcagggcagccaggccgtgagtaagcggcaaacttatttacagctaacactgtcttcctgatgggtttctgggaatattctgccacc

SEQ ID NO: 172431 - DNA, 122 bp, Homo sapiens
acactatcaaggagaagaaaagagtgactaagaagactcctagccagcatgctagtgaaacgactagcagcgatgctatgcaaaaggcgctgatactggaaggcttgaacaccgtatgttaa

SEQ ID NO: 172432 - DNA, 122 bp, Homo sapiens
gaggcctgtctgaggctcagagaggctctgaagtgggagtggcctcacccatcagacactcgtccaggtcctggtggcaggtgggccccgaatagccaggctgacacaggcagagtgtggag

SEQ ID NO: 172433 - DNA, 122 bp, Homo sapiens
tccgtcatccagctactgaaatcaggtgcacacggttgttcctcctgtgatgagacagggcggagggattgttaccctgttgccagggaaaaaggaaggggctgttcccagttgctatggtg

SEQ ID NO: 172434 - DNA, 122 bp, Homo sapiens
gacctgtaagaaaggttcctgcggcatttgctctaaacctgatgaagacatgcttcactgcgtcctctcttcccatccaactttacgggaaactacccccaactccaacattttgccaggaa

SEQ ID NO: 172435 - DNA, 122 bp, Homo sapiens
atcatcgtcaccactgatcagatccaagatgagcacgggcgagacgaccttactgtgccgcgtcatcaggctgcgaaattcggactccagggcctccttcccgcgctcaaagagcagtttct

SEQ ID NO: 172436 - DNA, 122 bp, Homo sapiens
cgtggcctcagccaccctgccacacatatggcctgaccccatcctcaccttcaccctgtgcggtggtccttgcccgccacggccccacgcggcctcgccacccccacccacatcccatccct

SEQ ID NO: 172437 - DNA, 122 bp, Homo sapiens
gaggtgctcgcctaattccgggaggggcccaaaagggctgtcaggtccaggaggccaaaacgggccagagcctcagttctgacttttctccacatgggcttgcttctttctggctcctccag

SEQ ID NO: 172438 - DNA, 122 bp, Homo sapiens
tgtcttttttaaaaaataaatcagtgctgttttagatagtagcgtgcagaacgctttcatcgtattttccttggaataattgacaagaagaggaatcactggttcaatagacagacattttt

SEQ ID NO: 172439 - DNA, 122 bp, Homo sapiens
taagaagctggccaggcacagtactcatgcttataaccccagtatttggggaggccaaggcgggaggattgcttgagcccaggagtttgagaccagtctgggcaacgtagtgagatcttgtc

SEQ ID NO: 172440 - DNA, 122 bp, Homo sapiens
gaaacataagatctaaagaggaaaatctacacaagattgtgtgtgggccagaaaggccgccgtgaatggtgagaaggtgagtcaatccatccatcctaagtcaaagaatccaaccagttcca

SEQ ID NO: 172441 - DNA, 122 bp, Homo sapiens
ggcctgcacctccctagccagtaccccagcagttgtgtttccacccctctcctgcccctgcgaggcagcgggtcccagcccacagtgtgcactggactctgcacactcccggcccactccct

SEQ ID NO: 172442 - DNA, 122 bp, Homo sapiens
gccgccggctggaagaggacgtggccccgccctatgcaaatgaggcctctccgtggggctcgctacttgggccagtcggagcgctggggagggtccgggctcctacaggattgggtgtcccg

SEQ ID NO: 172443 - DNA, 122 bp, Homo sapiens
ctttgtccctgttcctctgtggaaacagcccttgctttttgctcatgagtggccacatcacgtactcttcaccataagtgtctattcctggtgctccatggacgtggctacctctctcctgg

SEQ ID NO: 172444 - DNA, 122 bp, Homo sapiens
agctggcgcctccagccctggtgtgaatttccattcagggtccaaaatccaccttggcagcgccctcattctgcagctccacggagccctccagccagagaagagaaatctgagtttaaccc

SEQ ID NO: 172445 - DNA, 122 bp, Homo sapiens
agctgtggacacgccgtttaggagaaaataagttgaggccagagccagccttagatggaacgaccccgctctcagaaactcgggccctcccaatccctggcccacgcccagcgtcttcggcc

SEQ ID NO: 172446 - DNA, 122 bp, Homo sapiens
gggttgtcccagcctcctgccaacaccaccatccctgtcaccgggcaacgggaggccaggcgctatggctcctcagccaaggccttctctgcctagggctgagaacagcccctctacagcaa

SEQ ID NO: 172447 - DNA, 122 bp, Homo sapiens
atcccgtttgatgaagatggagtctgccacgtgggggttccagataagacagctgagattcggaagggcaggcgactccacctagtcacggggacgctctttttgacgctccagggaccgca

SEQ ID NO: 172448 - DNA, 122 bp, Homo sapiens
ttgcctgcgacgtggaggggtggggacctcggcggtttgggtgtttccgcagtctggcagcgctgcctctgaatccagctttccccacacactccctctcccctctgagcctcagttttctc

SEQ ID NO: 172449 - DNA, 122 bp, Homo sapiens
tcccggcaggcgcgcgtgggctcggcgtcccgcgctccctcctcgaccgcgcggctccggcgctgccaggtttcctgtatagcactataaccagtgaggcaccggcggagagcgcccggcag

SEQ ID NO: 172450 - DNA, 122 bp, Homo sapiens
cgtaagacagaggggctggctcttcaaaacgtggaaagtaccctcgttctgaggactcttcgggatgctgtctggagtcaaggtcttgagagtgctgattatcaaaaggtggccgagatggg

SEQ ID NO: 172451 - DNA, 122 bp, Homo sapiens
tccccctagtcaaccccacgacacacattgtcctggccccacattcacacccagtctgcacgttacgaccagtttataccagtagttctgccttctcaccaccaggaggcactgcttcaccc

SEQ ID NO: 172452 - DNA, 122 bp, Homo sapiens
ttttgccgcgtccccaacaccagttgttcctggggatcctctgtggagcagataggtgcccgtcataaatgagacggtgaattcaggactggcgggtgaggtctaaagtgggaaaggaaccc

SEQ ID NO: 172453 - DNA, 122 bp, Homo sapiens
caaaatcatctctgaagatgctatcagcaagacacagtctaagcaaacccagaccaatgacggaccaccttgcttcaaataagacatccatcagtgtatattaggaagagctgagaactggg

SEQ ID NO: 172454 - DNA, 122 bp, Homo sapiens
gaagcttcctttacggcaagttcagttatgcactatgaatcctcttgttatgttttaacccgaatttctaggtattggaataggtagacttttcaggtctactaccttgccagaaccaaaat

SEQ ID NO: 172455 - DNA, 122 bp, Homo sapiens
actcgaactcccgcgtcctagttctaactcaccagaaaaaaacctctgcacttcatcggccgagcaagaccagggcaagccccggaccttcaccacgaatccctctccaccttccgtgccca

SEQ ID NO: 172456 - DNA, 122 bp, Homo sapiens
agcgtgcagagagaagctggggaagcgccgggagagcgcggagcggagcagcgcgaggggcggcgaggccgggcacggaggctgcgagagccccgcgggccgcccgctcccctgcccggcca

SEQ ID NO: 172457 - DNA, 122 bp, Homo sapiens
gtacggtcatgaaagtctcagaaaactgtaagaactccctgctcgatggcccccttctcccggtagaacacctaggcagtgctggggtgatagcagggaaggccccctagacccccctaagt

SEQ ID NO: 172458 - DNA, 122 bp, Homo sapiens
ggctcacaaaggataactgatagaactcagtgtggtactttggggacatcaaacattgtgcgacatgcaaaagactattcacgaataacacaaaatatacattcattgtgccatccatcaca

SEQ ID NO: 172459 - DNA, 122 bp, Homo sapiens
ccgtgcgagctgagctgccgttagagtcggtagattacagcgaagctgcagtcagcagctcgtctgcctggccctgcacaccgtgagactcgaggcagtgcccgggacgggaccacctgggg

SEQ ID NO: 172460 - DNA, 122 bp, Homo sapiens
tttttttcaagaaggaaattacagcatgagtgtgcaccgacaggaatgatctagatagaacgaccagccatcctggtttacatgggacgcaggaactgccgttttaaagctgggctgagttg

SEQ ID NO: 172461 - DNA, 122 bp, Homo sapiens
gccgtcataggcagaaaagacacatctctgacctctagaagcatccagggtatatgcatacgtaagcactttgtagcaatttaagatagtaaataccaaagagataaaaatagctaatggga

SEQ ID NO: 172462 - DNA, 122 bp, Homo sapiens
gctgctggttcagatacaccacgattcacaggtccccctgctgctggttcagatacaccacgattcacaggtccccctgctgctggtgctaggcacgtgcactgtttctgctggttttgatt

SEQ ID NO: 172463 - DNA, 122 bp, Homo sapiens
tagtcccggtggctaacaacttgagttgtcttgttcacccttagttccctagagccttggcgcagtcttagccagcagtgggcgttccgtaaacacagtgggcgttccgtaaacacagtggg

SEQ ID NO: 172464 - DNA, 122 bp, Homo sapiens
tgttgcttcttacagcgcgactcttaggcggtcgatgtaagagaacctgcggcacataggcggatgcggctccctatatacaactcggtcaccatggggatgggccggggccttttcctgtt

SEQ ID NO: 172465 - DNA, 122 bp, Homo sapiens
ccagaccattgccctcttgaacatttactgtaaccctcaaaacgcttcccagtcggccgacggtttgcgctgtgccctgagcgatgttgaggtgcaggaacactctgatgaattttttgagg

SEQ ID NO: 172466 - DNA, 122 bp, Homo sapiens
cgtcggccaataggacgtggctttgttggcgtgtgccgcggccgcgcgagtcctggaaagcgttgttggcccggttgctctggagccgggtctcgggtctggtggctgccggccctgcggca

SEQ ID NO: 172467 - DNA, 122 bp, Homo sapiens
gccttattccatgttgaatctgacgctctcaatgtccaggctcggctgcggcgtggggaccgaaaaggggcggggtgggtcggacggcagtttaattacgtccccgggaactgcgccgattt

SEQ ID NO: 172468 - DNA, 122 bp, Homo sapiens
gactcttctgtcaaccctgacttcccctcgctcagggattgtcagggctcagagtggaaccgaggtcatctctgagggatgtggaaatgtcttctgcagcatccctgaaaacggggcagcta

SEQ ID NO: 172469 - DNA, 122 bp, Homo sapiens
gaaacttgctaggaccaagaagccaacgacgggcgaaaccgcaggggcctgcgatagagacgccagcggcgccgccgggggactgggttcaggaggccgagcaggaacccgtgcgtcggcgc

SEQ ID NO: 172470 - DNA, 122 bp, Homo sapiens
ctctcaattatgtaactatttatcatgatgacatttactgaacacttgccatgtgccagccgtggctctaagcagtttaaacatatttgattgtgcaacaagtttatgaagaagatttctta

SEQ ID NO: 172471 - DNA, 122 bp, Homo sapiens
tttggctttccatttgcttggtaaatcttcctccattttgagcctatgtgtgtctttgcacgtgagatgggtcttctgaatacaacacaccaatgggtcttgactctttatccaatttgcca

SEQ ID NO: 172472 - DNA, 122 bp, Homo sapiens
ttcactgaccaaaagcacatcagcctccaggagcttgtttaaaatgcagaatctcagactcggtcctggctacactgtctgaacctgtatttaacaaggccctcggtgaaccgagtccacat

SEQ ID NO: 172473 - DNA, 122 bp, Homo sapiens
atgcagaccaccacacagattaggagtggacgttctcagcattttggccttgggaacactcgggctgctgtgtttgctcaggttggcttccctgctctgcccaaggtcctccctctcttcct

SEQ ID NO: 172474 - DNA, 122 bp, Homo sapiens
ctccgtggagcctgccaggagaggggctgtggtcgtattaagggtgtgagtggcaaggcccgcagcgggatgggcagtccccgccatgccagtgcagctctgtgtaaatccttagtcccgag

SEQ ID NO: 172475 - DNA, 122 bp, Homo sapiens
tctgttcctccgctctgagtgggaaaggagctctgatggctggccctgcacagaggatggcgcactggacactcatggactcactgctgtaccttctgcatcttactcactgcccactgcct

SEQ ID NO: 172476 - DNA, 122 bp, Homo sapiens
caccccctcggtcccacgcgcgtcagccacccgcgccccccgccgcttccgggtcccgcccgcccggcctaccgcggcctagcccgccccggagcccggccctactcacccgcgcgcggtgg

SEQ ID NO: 172477 - DNA, 122 bp, Homo sapiens
gcgggctccagcccggagcgggctgggggcttggcgaggaaggcatggccggtgtctgctcggggccgctctggccgggcgacccggggggcctccttgggcagcaagacgggctccatgag

SEQ ID NO: 172478 - DNA, 122 bp, Homo sapiens
ggagaaggggcacatgtccctggttatgtggacagtcttcatttgtgcctgggattttaacgtctctgcatgctatctgatttagtatttgtcccactctccttcaaaggtgtgggttttgc

SEQ ID NO: 172479 - DNA, 122 bp, Homo sapiens
tgagtgagccccagcggggtggaagtgcgaccgacgaacgggatctctgcccaccacacacgtccagtgggaagaggcctaagacagcatcctcctcaggggcgccaaacacaatgcacctt

SEQ ID NO: 172480 - DNA, 122 bp, Homo sapiens
accctcctagtacatgatgctgtcggggcaggtccccttccagggggcctctggccagggcgggcagagccaggcggccgagatcatgtgcaaaatccgcgaggggcgcttctcccttgacg

SEQ ID NO: 172481 - DNA, 122 bp, Homo sapiens
atcgcttcccggcccaaacggcggcgcggcggtggctccccgggccggcggccccgccctcgcctcgtcacttccagtggcaccgcccgcccgccctctaggtctggccgagccgagctgag

SEQ ID NO: 172482 - DNA, 122 bp, Homo sapiens
gactgagattcagggctgagaggattagggcgggggccggaggtaatctgaggcaaggagcggagcccggggaggagggtccctgaattaatgaaggtgggtttactctaagggactttgct

SEQ ID NO: 172483 - DNA, 122 bp, Homo sapiens
ttaaaggtacatgttccgatccctgaattcggttttattttgaggttaggagtgagaacacgattggttgtcgtcgtttcctgtgggagtggctcttttcagaggcagacagttgtctttgc

SEQ ID NO: 172484 - DNA, 122 bp, Homo sapiens
tgcactgccaaagcttctttcatgataccaaagttccactgtggatttagagacaatagacggctcataagtcgtgttaagccatgatgtgtcaaaggtgcaggtattaaatgctgagtcat

SEQ ID NO: 172485 - DNA, 122 bp, Homo sapiens
gtggtcacaaaccaaacatgactgagtctggcgagcagtcacgtgaataaggaccgcgaacgcgccgtcatctctgctctgacaaggtgagcaagcattcactcgttcatttatcacttgac

SEQ ID NO: 172486 - DNA, 122 bp, Homo sapiens
gggttcccggcacctcggtttgtgttggttggaggtgatcgcacacttggcccttggttacgtcctcataaccttagacctgaaagggcccataaatatactatgttcacgatcagacacgc

SEQ ID NO: 172487 - DNA, 122 bp, Homo sapiens
ggcgggccctgcggtcgccggcgctgatagtcagatgctttgtctcctgcctgggaaggccggagctgcatggacacgtatgacagacattctagaactaataaaaaagaacaccacagccc

SEQ ID NO: 172488 - DNA, 122 bp, Homo sapiens
tgggcagcggtgggccaaggtggcccctacaaagacccaggtgggaatcctgactgggcccgcccctccgaggctcagttttctcatcattacaatgggtagaagagggcgctcagcgtccc

SEQ ID NO: 172489 - DNA, 122 bp, Homo sapiens
gagctgcggcgcgcccctctcaccgcgattgttcacttgccaggcgccacgtgtgggcgacgtcactgggctttatgctttcatcgccgctatctgcctacgtgagctgctctcctcccatc

SEQ ID NO: 172490 - DNA, 122 bp, Homo sapiens
gcctgcccgctaagcacttaagctggtgaagtcaccctactgccacctggcagtcactttcgctgttggtggcaacccaggctggaacccagctcttgccggaacccctgccccatccttga

SEQ ID NO: 172491 - DNA, 122 bp, Homo sapiens
tttgccatttgagcctcatataagggctactgagtaacaccagcagcatcaaccatcaaccgtggttttgaagaaatgcagcaatcttctttatgcctgtttctcctcaggcatgctattaa

SEQ ID NO: 172492 - DNA, 122 bp, Homo sapiens
ctgcccagccaggaagcacccgcccagcaggtctgacgaggcctccattctcttgcagtgcgctatgtctatccactccaaaagccacagcacacacaacttcaactctccagaaaatgtcc

SEQ ID NO: 172493 - DNA, 122 bp, Homo sapiens
tgtgaattcaccttgggcctctttggacaagaggctacttttgcccccttccttcacccccgccccaaattaggatccaaccaggatgtcaggaagctagcatcccaggcgaatgcaaaaag

SEQ ID NO: 172494 - DNA, 122 bp, Homo sapiens
atgaccgcagcgtcctaatagccctcggaacagcacggactcatccacacacaacatgaccgcagcgtcctaatagccctcagaagagcacggactcatccacacacaacatgaccgcagcg

SEQ ID NO: 172495 - DNA, 122 bp, Homo sapiens
cacaccacagagcctagtgtgggtaggctatgccatgtgggtctgtgcaagtacaccctacggtgttcacacaatgactcatgacacgtttcttggcacatatccctattgtttactgacac

SEQ ID NO: 172496 - DNA, 122 bp, Homo sapiens
tccggaggtcggcacctctggttctcagaccaggtgtaggtggtcctgcaatcacacctccgcgctgtgtcatcaggggacggagtgcattgcgaggagggccccgagtgcatctcagatga

SEQ ID NO: 172497 - DNA, 122 bp, Homo sapiens
ctcaggtgatctacctgccttggcctcccaaagtgctgggattacagacatgagccacttcgcccggccaagggtcatgtattgttgaggcttgaggaggaaggaaacactggatcatggaa

SEQ ID NO: 172498 - DNA, 122 bp, Homo sapiens
agagaaggtgggtgggtaagtattgcttcctactgcctctgtgaaatgtagacacacacacgcacacactcctcaggcctcatgtctgtgcagtgtagaagcacttcaggagctctgagcct

SEQ ID NO: 172499 - DNA, 122 bp, Homo sapiens
aggcagctgtacccatcactgtcctcagagtacttttaagaacaaggaggtctctgcccacggcagcccaagcaggtaatagcggttggttgttactgcctgtacctctctctcgcctcatt

SEQ ID NO: 172500 - DNA, 122 bp, Homo sapiens
ggagggcaggcctggatctcaggatctcggtcctgcatgcaatgcaagcctgagctctcccgccataaggctgcagcggtgtgggctccttgtgcccagatcctttgtattcatagggggaa

SEQ ID NO: 172501 - DNA, 122 bp, Homo sapiens
tatcccatcttgagtattctaggtctctgaagaattacaacagccaaagagaatacaggacgtggaatactggatctctgctgacatctgataacactgaagagacaagtcggggatctctg

SEQ ID NO: 172502 - DNA, 122 bp, Homo sapiens
tcatttttaaaatatctgaagtcctttcatattcatgacctcattcaccatcatgtgagacgggttgggtggctttgttgttgcttaagattctcagaatcctagaagctgaacttcactat

SEQ ID NO: 172503 - DNA, 122 bp, Homo sapiens
cacctttgtgctctgtgcccaagggaaagttcaaacagctgcattcacagataccagagacgccagtgtcttcaccatcaccagcgacgtgtgggtgctgcctcaacaggtattgggaactt

SEQ ID NO: 172504 - DNA, 122 bp, Homo sapiens
tatatcctggtgcctgtgtgtatgggcccacctcgatgatgtcggcgttggtgcggctctcgtgtggctcattgtactccgtgtacttgagcagcaccttgtccatgtcggtgctggcgtac

SEQ ID NO: 172505 - DNA, 122 bp, Homo sapiens
atttgaatattctaatgctcagaatgaaatatttttcatactgattaggcctcgaaactgcgtttgaatgaaaacattgtcaaacagaggttgtagtgcaaataatataaaacataagtata

SEQ ID NO: 172506 - DNA, 122 bp, Homo sapiens
ttggggaaagctagaaaacaaagccggttatagttacttgcaagggatgagacgttctctcgttcactttcacactctactctaccataaaaacatcctcctgtaatagtcttgacttacct

SEQ ID NO: 172507 - DNA, 122 bp, Homo sapiens
tcagtgaggtcacactctggagcttttcacccccaccccgtgtgactgcaggaggatctgcgcctccccgcaggaacccctctcccccacagcccgtgcttactgctatctataaagctgtt

SEQ ID NO: 172508 - DNA, 122 bp, Homo sapiens
tacgtttgtggttttaagaaagcctgagggcctgaaggcagcccctggagaagccctttccgagggcattcggaaccttctggtcctagaggtgaagctgaactgtcaccaggacttatgac

SEQ ID NO: 172509 - DNA, 122 bp, Homo sapiens
gagttaaccagcaaaagcacattagacaagggtaaggtttgttatacagacttaagtccacgcattctccattgataagactctttagtgatttagttatccttctcttcttgttgtcgaga

SEQ ID NO: 172510 - DNA, 122 bp, Homo sapiens
aagagagatcaagtaatttgcctaggagcacagctggtgaatgttggagaaagtatgaagcggtaaatattacttaaatcacatagcaaatatagctgtgactgcaattctagggtgtgtgt

SEQ ID NO: 172511 - DNA, 122 bp, Homo sapiens
tccttctggcacttgaactgaaattacatgtgtatattaataaaatgagaacatagcactcgattgaaccaagagtttattcacacaccatgcatcatgctgatccagggagcctttgtgcc

SEQ ID NO: 172512 - DNA, 122 bp, Homo sapiens
gcggggtgggctggagaggtttcctgccgtctgggaagcgtaaacggaccgcccacctgtcgggcctcggccgcccgcacctgcttgtgagaagcctgcggctggggcaccgcccccggtcc

SEQ ID NO: 172513 - DNA, 122 bp, Homo sapiens
gaaactggcacctctcacttctgctgccgccacacgcacaactcgtgtattcactgctcacgattcagagtagaaagcgtgaacacgcacgaggaagcaacactcaccgtttctccgatgtc

SEQ ID NO: 172514 - DNA, 122 bp, Homo sapiens
attcgccttttccttcatggtcccaaggtggccccagctgctagaagtgccacggcttcacgttgcaacactcagggacatcaaggaagaggagcaaatccctgtcggcgtttccctttata

SEQ ID NO: 172515 - DNA, 122 bp, Homo sapiens
tgcccctaatctgatgctccggttgcatgacatgactatgacggatggccagggtgctgtcgtttatcttttggagtgaaaccggagaactcaggcagagcccagtgagcacttctcatgaa

SEQ ID NO: 172516 - DNA, 122 bp, Homo sapiens
gggttagggatctaagtgaggcaacggcgccccctgctggaacaactcggagaggctgggcgggggcggcacggtccccccacccctccaccctgcttcgggctcacgtaatgcctggggac

SEQ ID NO: 172517 - DNA, 122 bp, Homo sapiens
ggacaccaaagtaaaacgaatgcagggaaccggccgacccgccacgtcgccccccagacacggtcccatccctccagcgtcccgctcagctccagcagccaggagcccgcagcctagagagt

SEQ ID NO: 172518 - DNA, 122 bp, Homo sapiens
gggtccaggagggcccctctcccgcgaccgccgaccacgatgagagcgtgaagaccctctcgaaaggaagggctctgctctacacactggtgtctcctgcggaagggcagctgggcacgcct

SEQ ID NO: 172519 - DNA, 122 bp, Homo sapiens
gttctttgggctaaaaggctaatgggattgaataaccttccttattactggctgctgctacgggagtcgtactgcatcgccatcttgagcttgttgctgtttcctcgagtcttggttatttg

SEQ ID NO: 172520 - DNA, 122 bp, Homo sapiens
tcgcgcctgcgcactgcccctgtagcgggggtggggggacccggtccggagactccaccccggggcctaaactcgagtctaaaagattgggcctcgttgtgtcgtttccgggtcgcgcgacg

SEQ ID NO: 172521 - DNA, 122 bp, Homo sapiens
aggcatgagccactgtgcccagctgacagccctctctaaatctttaaaaattcagtcaggcgtggtggctcatggctgtaatctcagcactttaggaggctgaggcaagaggaatgtgtgag

SEQ ID NO: 172522 - DNA, 122 bp, Homo sapiens
cattgagcacttgcaaatttgaggtgattaaattctgtacaggctcctggttgcaatatacggtaacacattgtgctttgtattgagatgtcctggactcgcgcacacaaactcagggctat

SEQ ID NO: 172523 - DNA, 122 bp, Homo sapiens
agcggcccctctctcagacagtcgtctgtgcgccgtgagactttggacctactgcgcaggcgtcatcctgttggaacctggtcagctgggttagagagatcgctacatgccagcctggcctg

SEQ ID NO: 172524 - DNA, 122 bp, Homo sapiens
cttccgccgtggctgggtgtgggtggcaaagccaaaacagccctctgaggaggggagcgacgccctcgcaccagccttctcagggcggcgacgccccgggttgctccccaccgggtcggagt

SEQ ID NO: 172525 - DNA, 122 bp, Homo sapiens
cgggccgtggcactgaaatggcgaggcaccctccccgtttgcagattgtaagtcttggagcggggctagcgattcgtacttatttccgcgggcggctggggtgcgaggtgtatggggagaac

SEQ ID NO: 172526 - DNA, 122 bp, Homo sapiens
ttcccgagggtgctcggggcatctatgggtacatctgtcgcctgccttcagcccctaccccgacggaaacgctccccactatcccgccacctggtggtcgcagcctcctctcttctgcagga

SEQ ID NO: 172527 - DNA, 122 bp, Homo sapiens
cagagccaaggagtagcctgttttttacagaagcatgtaaggcaagtgtgcttttctcttcggccccacttacttccagctcctaccatcccagcttatgaatcaatatccttttccattat

SEQ ID NO: 172528 - DNA, 122 bp, Homo sapiens
cacttcaaagaggacggggagcgcggcagaggggctcccgggccggcgggctggggccgccggacctgctcaccacgccccccaccctgggcgagtttgcataaataaacaaatccaagccg

SEQ ID NO: 172529 - DNA, 122 bp, Homo sapiens
ttacctaagttgaaaaataaaaggttgtcaatcgaatggtggtttaatgtttggacctgccgatgtatttgtatagtggtagaaacatgctgcttaagtggcctaacctgtttcttgccaat

SEQ ID NO: 172530 - DNA, 122 bp, Homo sapiens
gtgaaggagcccagctgcaaattcaactccgaaagaccctggactccgcaaacgtctggccgcggctcttgagctcttctattaagtttcggtttctgaagcttacgtttagtttcgatttc

SEQ ID NO: 172531 - DNA, 122 bp, Homo sapiens
tagaggaaatggaattccccagactggtaagagcgcgcgcagacacagccttgtctcacgcgcccaatcaggagcgtgtggtgggaggtgccaaggattaattaccagatacctttagtcta

SEQ ID NO: 172532 - DNA, 122 bp, Homo sapiens
atcttggagctcagagaccctgagtggagatgagcatggtgtagaggggagagtgtgagtcgcagcaattctgagaaacatggtttggcttctacagagtagagcacatccaagcaaaccaa

SEQ ID NO: 172533 - DNA, 122 bp, Homo sapiens
attttcctgggctgcagcatctcgctcctgtgtacccaatgacctgttagggtgactcagcgtttatctcttcgcctccctgctgccccatctcctctcttgtcctcttctgtccccagtct

SEQ ID NO: 172534 - DNA, 122 bp, Homo sapiens
aatgacttcattgagcttcacagcagtgtgcatgcgccgcacattggattggtccctacacgtagtgtagccagtcacaggtcgccatgagccatcctgcaaggagggtccccacccctggc

SEQ ID NO: 172535 - DNA, 122 bp, Homo sapiens
cgacttgtagagctctttacggctctgcggaggccctgccggattctctgggcgaacaagcgtaactgcgtgacttgcccgctggggttctcgtctccttcctggtttccaccaccctcttc

SEQ ID NO: 172536 - DNA, 122 bp, Homo sapiens
atggcaatttccaggaatctgggtggtagttatttcaatcaagttgagaaatgggatcaccgagagggggatttccgcagaatctgggctgtcagggaaatctttaggctgtcagggaaatc

SEQ ID NO: 172537 - DNA, 122 bp, Homo sapiens
tggaggccagaggcagtgctgcattttggggtctaggcctctgagctcataaaaatagctcggtgctttcttaaaccgttatgtggtttctcttcttccttcatttcttgccaagcccggaa

SEQ ID NO: 172538 - DNA, 122 bp, Homo sapiens
aagtggcataggagacacttcaccacaaacttaacatctgttgttttgcctgcttgtgagcgggttatatgtaagatcacttatgacatatagtaaatgtttcattttgttgaggtatgatt

SEQ ID NO: 172539 - DNA, 122 bp, Homo sapiens
ttgagtgccaggcgctgcctttgacctcctccccagcccacagaacaccgcccccacgcccgctgacccgcgctgtccacttgaggcaggaaggccaggtgttccttatgctcctcggacaa

SEQ ID NO: 172540 - DNA, 122 bp, Homo sapiens
caacttccacccgggaatgctgcagcggcgcggcgggggctcgcggaccggctccctcagcgactacagccgctccgacgccagcagccccaccatcagcccggccagctcgccctgagccc

SEQ ID NO: 172541 - DNA, 122 bp, Homo sapiens
gatggaggcagagactggagcgaggtggccaccaccaggaccgcccaggacagcggcagccgccagaaaccaggagaggcaggaggacacccaaggatccccacaggacccacagagcggcc

SEQ ID NO: 172542 - DNA, 122 bp, Homo sapiens
cagcaaatatttgaacctgcccaagttaatcatgaagctgcgatctttatctaagggagacgtgcgagcgcctgggctcctttcctccccgatacagtagcgaaatccagttggcttctcaa

SEQ ID NO: 172543 - DNA, 122 bp, Homo sapiens
acactgcctggggtgataaatactttactcaattataaactaagcaagcagacaggttgacggaaaaaaaaacttaccctgctaagtcctcagcttccttccttctctctttcctccaagtg

SEQ ID NO: 172544 - DNA, 122 bp, Homo sapiens
gagagggtgcccccaaggatgagacacaagctgttgccacatcagcactttgcgcctggacggtcccccagttgtcctggctgcaggcagtccgaacagtccgcttcctggaatattagcca

SEQ ID NO: 172545 - DNA, 122 bp, Homo sapiens
tgccccgcgactaccagggccttttccccctcgccaccccctgagtgtaccgggtgtcggcgggacaactacgcacaatgagggccgcacccccacactccactcggtcagaaacgcacact

SEQ ID NO: 172546 - DNA, 122 bp, Homo sapiens
gcggccttcactatgtttcgaatgacgaatgtcttaatggccttgtccttgggcacgcatcgggcacagttagtgcagcgaataggctgcacgtggccgcggccctttttggcacgaccatt

SEQ ID NO: 172547 - DNA, 122 bp, Homo sapiens
ttttcttgcatcacctgggcccgttcctgttccagaagcttcttttcttctaccaacttgcgtccctgagagataagggcttctcggtaactagcagttctgttttgttccttttcgagttc

SEQ ID NO: 172548 - DNA, 122 bp, Homo sapiens
gtacaaccccctgtgatatggttcgtaatatccagtgggggagagggtgatattactccccgtatcgcgtgaggtgtacacccttctgtgttacggttcataatatcccggggggggggcgg

SEQ ID NO: 172549 - DNA, 122 bp, Homo sapiens
atcttggctcactgcaaccttcacctcccgggttcaagtgattctcctgcctcagcctcccgagtacctgggacgacaggcatccaccaccacaccctgctaatgttttatatttttagtag

SEQ ID NO: 172550 - DNA, 122 bp, Homo sapiens
cacaggcactgtttgagagcttcctggaaatgtagaattcttgaccctgccccagaagaacggaatcaggatttgaatttttacaaaattccaggctttttcgtatgcacattaaatactag

SEQ ID NO: 172551 - DNA, 122 bp, Homo sapiens
atacaagactgtagaattctaggccagaattggctgtgaacgtcatgcaaacgcaagcggcggtccagacttgattctcccctttggctggcttcctccactgtaacacagaaagactcctc

SEQ ID NO: 172552 - DNA, 122 bp, Homo sapiens
ggttgtaagaacccacgtggaagccaagaagccgcgatgggattccagcagggggagcggcgctgatgtggtgggcgagcctggtgcgcttgggaaacatcgggcaggcggttttctaactg

SEQ ID NO: 172553 - DNA, 122 bp, Homo sapiens
cgcccggctcaggacagggacccggaagccaaggatggacgtggcaaatgcccatgacagcgcatggtcaacaggtgtgcctgccatgacagctggtcctgctgccaccgggagagacggaa

SEQ ID NO: 172554 - DNA, 122 bp, Homo sapiens
ccctacgcccgcaggggcacgcagaaaagacttagttaccacggccaagtacgaagccttcgagatagcgttcttcttaccctacgtaaacacgcagtttcccgagctcgacaatcggctag

SEQ ID NO: 172555 - DNA, 122 bp, Homo sapiens
ggtagcagcgctcgctgacagcttgggaggaaacctgagatctgtgttttttaaattgatcgttcttcatgggggtaagaaaagctggtctggagttgctgaatgttgcattaattgtgctg

SEQ ID NO: 172556 - DNA, 122 bp, Homo sapiens
cagactcgagtgtcagtttaatgcttgttccctaaggtctccccagggctgttaggacggcgttagggttaggattcgggttcgggtgcgcctctccgcgcctgcgccggcgctggggggcc

SEQ ID NO: 172557 - DNA, 122 bp, Homo sapiens
acccaccccctccggctcccaacccaacttggagtatagcaggcagcacagctgaactggcggtattctgcaccccccacactgtacccaccacccaagtgtttcaaacaatgttaataatg

SEQ ID NO: 172558 - DNA, 122 bp, Homo sapiens
ggccttgcctcagggcctgtgagcctggaggtggggctgtgagggctggcctggctggagcgctggcctcccgggtagaggtgaggttgggactgccaccagggctctcgtcccatcatgag

SEQ ID NO: 172559 - DNA, 122 bp, Homo sapiens
acccagagccaatgtaagtatgaggccagaggtcagacgtgaagctcctccaagaaccggcgcggggagagctcagttaatgggacccacgtgggcgatgctgctccagcatcagctccagg

SEQ ID NO: 172560 - DNA, 122 bp, Homo sapiens
taacaataacaaacaacacagggcttagcttgagccagagtccgagaccaacccccacgacgctacggggaggtttggatatgccccaaccccttgctcccttcctccatcctcttgtcagt

SEQ ID NO: 172561 - DNA, 122 bp, Homo sapiens
cgcccgtcttgcactcggagagcggtcctggcaggaaggccggccagtgtgcacccggttcgggcccctgcgcccgggctggcaagatggccacgcccccagcagagacggcgcctctagga

SEQ ID NO: 172562 - DNA, 122 bp, Homo sapiens
caggagaggcggccggggaagcagcgagggcaagaagtatgcggaggcgggggacctcggcgaaaagccaccgctacccggacctggcggtacctgtgttctgtcgcaggtgcacacctccc

SEQ ID NO: 172563 - DNA, 122 bp, Homo sapiens
ccctccccctccccctttcactcgccctcattgtcctgagtctttgaaagttgggagaatcggagatacttctgaggactggtaatgaagtctcacttaagtgggatgcaattcccgccctc

SEQ ID NO: 172564 - DNA, 122 bp, Homo sapiens
accgaagtgcgcagccagtagctccttatatagcctcccggagtcagaacgaggccgtcccgccctctcgcacctattggacatggaagtagacaggggtgtggtcgcgaattagcgggagc

SEQ ID NO: 172565 - DNA, 122 bp, Homo sapiens
atggatactacctttcttatttctctccgagggtagtttgctttttacaaaagcgctgcccgcgttcccttccccggcgctgcccgcgttccttccccggcgctgcccgcgtgtttttctgc

SEQ ID NO: 172566 - DNA, 122 bp, Homo sapiens
aaagaaggaaaatgctctctactttaaaagtgggccaaaatttactatactcatcaggcacgcatgcatgtgtatactatccatttggcttccacagacaaaatactcacactcaactgaca

SEQ ID NO: 172567 - DNA, 122 bp, Homo sapiens
tctggtgactccagcagaatctaaatgttccccgcagtgggcccctctgctcgagcaggccgttaaactcgtctggctggtcaggctgcgccacccagcccacaacatacatttcacacaga

SEQ ID NO: 172568 - DNA, 122 bp, Homo sapiens
taagaaaactaggggcttggggacaggaagcaaaaggctcagagttgtagagcgagtcatcggtgggcctgggagctgcacccaacccaatcctcggaagattaacagcccctttttcacag

SEQ ID NO: 172569 - DNA, 122 bp, Homo sapiens
ctggagccacgggagcgcaaggcctcccaagtcagggcccgaattccgcgtggtgccaaacggcagctggctccctgaatgcccaccctgaaccctggtaaaaaataaaaaaaacaacaaca

SEQ ID NO: 172570 - DNA, 122 bp, Homo sapiens
caggattagaaaaaacttgcgcgaattaatctgcgtagttaaaaacaaatacgaaatgagcgagaaagcacatagtagtcaaatctcgccaccacataaacaggttaagtttggaagcacag

SEQ ID NO: 172571 - DNA, 122 bp, Homo sapiens
gcaccatttcctcttgcctgatgctgcttcctccctcccgcccggtttgctgtgaaagcacgtccaaatttgaaaaccatgtgagattcagaatgtgcacctgaagctgccccctggggctt

SEQ ID NO: 172572 - DNA, 122 bp, Homo sapiens
cagcctgactctgagaataactgggaggaatcccctgctgtcacacactgggaatcagagcggcacatcctgcccttgcagggccctgaggctctaaaagcaacatgttccaattggaagca

SEQ ID NO: 172573 - DNA, 122 bp, Homo sapiens
actacaatgacaaaggcgtcctctaggaggaaatgctgcaaataatatctcctgcccatgcgcgtccacctgatgggaaaagtaaaaacaccctggtccaagaccccaggtcccattctctc

SEQ ID NO: 172574 - DNA, 122 bp, Homo sapiens
aatgagggtgatgccctctatcttagtgagccccagagaaagacactggtgtgaagacgccggcctggggcaagtgtgcaccagggccccgctgtttcttcccccagggcgacttccaagcc

SEQ ID NO: 172575 - DNA, 122 bp, Homo sapiens
agcatttacgagggagggtttcagggccaattggaagctgggttgcctcagggtggcattcgcccgtggccaggaagaggcggggacgcccctagaaccctggttgtgggaggctggggagg

SEQ ID NO: 172576 - DNA, 122 bp, Homo sapiens
tgctgaactatgttatcatcattgtatcggctttacaacacttaaaaaccagacttgaggcggggcatggtggctcacgcctgtaatcccagcactttgggaggtcagtgcgggcagtatca

SEQ ID NO: 172577 - DNA, 122 bp, Homo sapiens
acttgcaagatatcattaaataccaggtacatacactaggagccaagaagagttactctacgattctctcagtcacagataatttccttaccatactgggatttaggcctagcactgcaaac

SEQ ID NO: 172578 - DNA, 122 bp, Homo sapiens
gcttcgcagcccggctggctggtggggctgcctgcacgagagcagcccgctccccagcaccgccgatggcaagcccgactccagtcagaggcctagcaccttggaccagatcacagggcacg

SEQ ID NO: 172579 - DNA, 122 bp, Homo sapiens
ggttccccacttctagctgtaagaacagaaggcttaaaaggattaaactgattccacaagcgaggccaggccaaggcctcagtggcatcctgagggagcaggcccttcctggaggggaatag

SEQ ID NO: 172580 - DNA, 122 bp, Homo sapiens
tgttctgaacaaggtcctccagcacctcgggggccagcttgctgttggtcttccccatggcggggcctgtgggacagagggattcctccgactgggtccagggaaaggccctgcctcagcca

SEQ ID NO: 172581 - DNA, 122 bp, Homo sapiens
gagattcagataggaaagagcaaattatctgcgtgggaccgtgagcagatcaccgtggtacgttgggaagtgggagaaattaatggaggaggtttcttatggaggagagcagaataaggata

SEQ ID NO: 172582 - DNA, 122 bp, Homo sapiens
ccccttccagttcctgcccaacttcccccactccctttaccccttcacggaccgagccctcgcccacaacttgctggtcaaggccgagccaaagtcaccccgggacgccctcaaggtgggcg

SEQ ID NO: 172583 - DNA, 122 bp, Homo sapiens
tgaactcctgacctcaagtgatccacctgcctcgacctcccaaagtgctgggattacaggcgcgagtcaccagccccggcctaggctgaatgatctagattgccactattaggaatggtttt

SEQ ID NO: 172584 - DNA, 122 bp, Homo sapiens
agggagaattggagaaggaagatgaggaggaagaaagctatagtgcagagttttgcactacgaacctctggatgctagagcagatacagaaattctgtgtcagcattcctactgtgttgtgc

SEQ ID NO: 172585 - DNA, 122 bp, Homo sapiens
cttacctttagtgccaggtgctgaactaaacacctggggaggatcggcccctggtcctcacgataagtctgtgaggtgcaggtgctattaagcgtctcaccttatcgaagcggaaagaggcc

SEQ ID NO: 172586 - DNA, 122 bp, Homo sapiens
ctgtagagaagcgcttaacacacttttactgtaaacctgttgggagtttaattgtgtccccgcaaaagagaggtgaaagtcctagaccctggtacatgtgatcgtgaccttacttggagatg

SEQ ID NO: 172587 - DNA, 122 bp, Homo sapiens
gcgcctttctttcagtaggccagacgctagctggggtcgtcgggggatccccagcggtgacgccattgaaaagggtgcgctctggcttccaaatagccaatagaatcccggggcctggggca

SEQ ID NO: 172588 - DNA, 122 bp, Homo sapiens
gtggagggacccatcaccctccgaggctcacacccactgcccacctctcctcctggcgctcgagtcccttgcctcattccttgggctgtctctggcacccatcgtttcggttgcctcctcat

SEQ ID NO: 172589 - DNA, 122 bp, Homo sapiens
aaaaataactacaacttgggatgggtagggaacacttcctgaggaattgagactcctttacgatcatgtcagatgtatggtaagtagcgtatctcatgtggatagaaaaatgaatacaattg

SEQ ID NO: 172590 - DNA, 122 bp, Homo sapiens
ggtccagctgcatttttgaacaccatggaaccccaagcctttcattttgcctgggccacccgttacctccggtccagtgaactctccaggctggagaaggatctccctttggggggccgcag

SEQ ID NO: 172591 - DNA, 122 bp, Homo sapiens
taatctcctttctagttgaaatacccacacaagagccctttgagacacacagcatggctacgtgatttgctttgctttatcctgcaaagaggctgaaatacactggaatcttctcttctcca

SEQ ID NO: 172592 - DNA, 122 bp, Homo sapiens
tatgggttttaggtcatagatcacagctgcttttggggcaaaggccctggggatcattttcgagcagtgggcagtctctcagcgagaccctaagggaaggagtgagacctgggaggagcagg

SEQ ID NO: 172593 - DNA, 122 bp, Homo sapiens
gtaatatgataaaaccaaggctggaaaggccgagtggaaccaaaacacagggttttttaacgtcaagccaaagtccttggacttgcttggaggactgttgtagagtgttatgtatattggtg

SEQ ID NO: 172594 - DNA, 122 bp, Homo sapiens
cattttcctccgctgacagctcagcagcgtgcgcttccgctggattcaggccaggaccagcgaagccgcaccttacacccaccgaggaggaaacaagcctggccacccgaggctaccccgct

SEQ ID NO: 172595 - DNA, 122 bp, Homo sapiens
ttcttccttttatataccattttatgtcctttctgctttttttttgacttcatgttatatcgtgtttcccgaagtcatctaaatgttttcataaagaatgttttaacggtgtctgtgattgt

SEQ ID NO: 172596 - DNA, 122 bp, Homo sapiens
ttttgtgagtagcttatcttgctttgcacgatgtccttgaggttcacctctgttgaagtacgtatcagatttcctcctttgctaaggctgaatcatatcacattgtatgtatattccaagtt

SEQ ID NO: 172597 - DNA, 122 bp, Homo sapiens
ccaggccagacgcctgcacgagacctgctcttgctgggacctgctccgtgacaatgcagccggggatggtcagaaacagacccaaggcccatcttgctgggacccactccgcgacaatgcag

SEQ ID NO: 172598 - DNA, 122 bp, Homo sapiens
gcccgcccgtgatgcaaatgaccctgtggatgatcgccatgcacccccaggcaagagaaccgttggggaccagatgaagaaaaatcaggctgctgacgatgacgacgaggatctaaatgaca

SEQ ID NO: 172599 - DNA, 122 bp, Homo sapiens
cctctggtgatggcagtggtgagcccttgcatggcctcttgttgggcagcatcctgaggtcgatctttggggtagagggctagaggtggaccagcttcccagaggccctgcctttctccatc

SEQ ID NO: 172600 - DNA, 122 bp, Homo sapiens
ggttacctgggagttgggaaccacaaaggggagccgatagccgagttgtattccaggtcacggcctttttatttttatggcgccttttttttttttggcccctcatttaattgggaagcttc

SEQ ID NO: 172601 - DNA, 122 bp, Homo sapiens
cgaaggatccggggatgggcagcgccacccggcccgctccagagtcagcatgggtaagggcgcccgcctgccgcagccggggcttgggcccctcaccctgttcccgaccatagcccggccgg

SEQ ID NO: 172602 - DNA, 122 bp, Homo sapiens
tcctgggctgccctgagaagcctacgtctccccttcgaggcccgggaagacctccaaccccgctgacaatgctgggccctcagccagacctgccctgcgtgccacgttctgttctaagatcg

SEQ ID NO: 172603 - DNA, 122 bp, Homo sapiens
aggggaggggcgcggcgcggcgactcggggcggggttcttttttccattttgaaagaaagcgtcggggttggggtggggggagtttcagtcctcgggatcagccctctccgcgaagcgcagc

SEQ ID NO: 172604 - DNA, 122 bp, Homo sapiens
agcaacttgcctaaggtcactcagcaaaaaaagtgtcagtgacaggatctgaacctgatgcgtctagcccaagagctcttgttccttctgtgcccacacactgtcttccttgtgaaggactg

SEQ ID NO: 172605 - DNA, 122 bp, Homo sapiens
ggcgtcgcgacctggttggccggccggggcctgggggatgtcacggattggtcgcggccgcgagcgcagtggtgtggagcgcgccgggtcccggagccggctgtctgagggatggacgagac

SEQ ID NO: 172606 - DNA, 122 bp, Homo sapiens
taccagctcagataataattaaacatccccaaacctgcaattcttaatatagaagctcatcgtcagtggagtccatccatccacaaaggacattggagagagtcaaactactcctccaaatt

SEQ ID NO: 172607 - DNA, 122 bp, Homo sapiens
gccctcacccaggctcccacattcacacccctccactctccagtgggctgtgtaagttaacggcaaataaatggcccagaatggcttcctgttagagaaaaaaagggacaaagacttctgcc

SEQ ID NO: 172608 - DNA, 122 bp, Homo sapiens
cgcgccacggggagggcgcgcgcggccaggcggggtcccgaggcagccaagcccgctccccgtcccgcagccacctgtgggttgactcacagccccgcatcccgggggagggggctccggcc

SEQ ID NO: 172609 - DNA, 122 bp, Homo sapiens
tgccctccccctccctgcccaggatgattaccttgacctctttggggaccccagtgtgaccggcaaaattggcactgacatccaggacaacaaatgcagctggctggtggttcagtgtctgc

SEQ ID NO: 172610 - DNA, 122 bp, Homo sapiens
gcccaccgcaccagctcgcggagcagccgagccgcccgttacgccgctcacctccgtccccgtaggtctccacgccgtacccgtcttgcagcccgttactccaggtaccctcgtagcgagcg

SEQ ID NO: 172611 - DNA, 122 bp, Homo sapiens
ggagcccatgtgcccagtgggcatgaacaaactctggagtggatacagcctgctgtacttcgagggccaggagaaggcgcacaaccaggacctgggtaggtacctcccacccggcccccgtt

SEQ ID NO: 172612 - DNA, 122 bp, Homo sapiens
cttttctcccgggtccacaccgcagttcccaccgctccgggtgtcctccccagtgcgccgcgatttttgtgtccaagccccagagtccctctgagaccaacccccagccagcacagacttcc

SEQ ID NO: 172613 - DNA, 122 bp, Homo sapiens
ggaaatttggagatagagagacacacagggagaactccatgtggagatgaaggcagagaccggtgatgctgccaccagccaaggagcatcaaggaaagtccactgaaaaccactggaagctc

SEQ ID NO: 172614 - DNA, 122 bp, Homo sapiens
ctcctccctctcgcccgcaccttcccgcgctccctccccgccctccccgccgcccgcccgcgctcacctggttgtttttgcagagatcagcccacatgctggtgccgtcccctccgcgcatc

SEQ ID NO: 172615 - DNA, 122 bp, Homo sapiens
actgtcctggcaggaagcctttatatttagattaatccaaaaggcgtcatttgttaactgcggcacactgtgcctgaagcgcaggtcacgcagaacatctggttttggtcaagtcttagttt

SEQ ID NO: 172616 - DNA, 122 bp, Homo sapiens
ctgtagtacagtactactacagtgtagtgggcagaacaggtctaaaaacctttggattgccgggaataagtaatatagctgcctggatacttcaggggcctttgtcacccagtaactgaatg

SEQ ID NO: 172617 - DNA, 122 bp, Homo sapiens
atggtgtcttcccggccgggtggcactgaccggtcatgctcagggcccccttctggttgccggtgcctcacctctggccaggtggcatcggcttccgggtaaatctgagctgcccaaagcga

SEQ ID NO: 172618 - DNA, 122 bp, Homo sapiens
atcctcctgcccgtctcccccccagcatcaggcctacgagttccagtttggcgcagcctacgcctggatgatgtgcgtcttcacggtggtcatgacctacagtatcacctgccccatcatcg

SEQ ID NO: 172619 - DNA, 122 bp, Homo sapiens
agcttcctccgagcgactaaggagcagcaacaagctctggaatttcctctcggggtggtccgttccaccttaaataacttgggctttttggtcccaaacgcgccctgtagttcaggtttttt

SEQ ID NO: 172620 - DNA, 122 bp, Homo sapiens
tgggggaattttcaaaatgcctttcctcctgcttgctttcatttcagctcctaacctttccggcattacaaccaggcttgcaacttcctgtcttgtcctatttggatttggtaactcagctc

SEQ ID NO: 172621 - DNA, 122 bp, Homo sapiens
acaaacaagggggcgggagcgcaaggaaaagagcaccgggggagggtgtgggggaggggtcgcagataaagcggtcactggctcgcctgcccttctgctggggcactcaccccgcccgctgt

SEQ ID NO: 172622 - DNA, 122 bp, Homo sapiens
aggcccgtgccagcccaggctgtcatgtggactcgctgtggccagggacaacctcgctgacgcaggagctttgggagagactcacaccagcatcaggcgtgcgcccgcccatctgcccaggg

SEQ ID NO: 172623 - DNA, 122 bp, Homo sapiens
agctgccccgtctcatgacgaaggggacttgttcaggtgagaaacgttcaactgcgcgctcgcttactgaaaaccgccgagggggaagacgggacgagcgtcttgactttcagggtgcacgt

SEQ ID NO: 172624 - DNA, 122 bp, Homo sapiens
cctccggagcgccgagagcgcgagaagggcgggggcgcccagggcaggcctggagacccacggccccctccgcggccaggactcgggctctccgctcgccttcctcgcctagctctgcgccg

SEQ ID NO: 172625 - DNA, 122 bp, Homo sapiens
gacaaattacgtgaggcatttgatgcattattataaaggaggcttcgtgggggatgacttcgcccagctgtaggctaatggaagtgtgctgagtgtgtataaggcaagaaggctcagctgtg

SEQ ID NO: 172626 - DNA, 122 bp, Homo sapiens
ttatacaagagttaaggagcctcccgcatttcagtggagcgctaagcctgtttgtaggcgcggaatgggccaacaggaatcgaattctgtgactaaacaaactagaagaggaagcaggcacc

SEQ ID NO: 172627 - DNA, 122 bp, Homo sapiens
cccctgcacctgccctcagagctgcatggccctgtttagggatccagcccccagacaccccgggctaccatcctgtgacttggggattcagacacatcaccccacaccaaagctatggcctc

SEQ ID NO: 172628 - DNA, 122 bp, Homo sapiens
tgacccacttccccagttttcccctcggcagcactcacggaggtggaaaggcgggcgcctcgctctgctgactgacccgggagagtcgctgctgccagatgccagtggcccgcaggagctcc

SEQ ID NO: 172629 - DNA, 122 bp, Homo sapiens
agcaaatgtcaaatgctaataattctccatggaacttttcatttcagtttctgatctcaccgtggtctacatcgttattgtctacagcacttaccatatatatttttaattatctgtatatg

SEQ ID NO: 172630 - DNA, 122 bp, Homo sapiens
gcccgagacggagggtggagggaacagccagcaggagccggtggtcggagacgaggagcccgccctgcactaatcagcctcgagagggactgcactcttgtcagggaagccctaacagcgaa

SEQ ID NO: 172631 - DNA, 122 bp, Homo sapiens
gagcaagtaaatttttaccaaacaccagttatgcacctgacattgcactaggtgcattcacgtacttgatctccttcaagcctcatcacaattcatcttacagaggaaagagctgtggctta

SEQ ID NO: 172632 - DNA, 122 bp, Homo sapiens
cggcaaaaaaaaggaggctacatttctcttaatttctatatctaatgattctgattgtggcgcttataggcccattctaggcacagacggggtaataaaaatggttatcttgccaaagcttc

SEQ ID NO: 172633 - DNA, 122 bp, Homo sapiens
agtttaggtattttcctgtgtgatggcacaatttactgaccctgtttttctctttctgttcgaagttagagttccactcgtttgatcaaagcagccaatcaaaggatgagaatgacggaatg

SEQ ID NO: 172634 - DNA, 122 bp, Homo sapiens
gcaatataaaggagaatgaggcggcgcgcctcccagacgcagagtagattgtgattggctcgggctgcggaacctcggaaacccgaatgtgaggaccttaagggatccacagctgccgcccc

SEQ ID NO: 172635 - DNA, 122 bp, Homo sapiens
gtctgactggttgtcatgatgaattgagctctctgttacctgcgcatcacaaccggtgagcgtctgtctctgtgcccctcaaagtggcccatagttttgtcctgggggcccgcctgggacgg

SEQ ID NO: 172636 - DNA, 122 bp, Homo sapiens
gaagcgttggttacagcagctgattggctgcagccaagactgtgaaaggataaagaggcgcgaggcggaattggggtctgctctaagctgcagcaagagaaactgtgtgtgaggggaagagg

SEQ ID NO: 172637 - DNA, 122 bp, Homo sapiens
cactgcagggagagagacggagaccctgagtgaggcatgagcttcatcctgtgtcttggacggacagggcagaaacccggccgcacgagacccctcacgtcctggctcatgggaaactgacc

SEQ ID NO: 172638 - DNA, 122 bp, Homo sapiens
ccttgttctgtggggcactagcccggctcacagtcgctcatgcattcccgaacctgttcccggcatgcagaccctcagaaagatctgtgcgttcatggcatgtgccctccctggtcctggca

SEQ ID NO: 172639 - DNA, 122 bp, Homo sapiens
gcgcgggagcgcgcctgagggaggccgcggggggcagggccgggactgcgttgagacagtcgccgtgcctcagtttcctcctctgcgaagggcgggaggagtcggacgcgccctagagcccc

SEQ ID NO: 172640 - DNA, 122 bp, Homo sapiens
aggggccaggcggggagggcaggggccgggtctggggtctggggcagacgcctgacctcgcgctcgccgcacccgcctgtgtggggcgccctgcgttcccgggggggggggcagcaggatct

SEQ ID NO: 172641 - DNA, 122 bp, Homo sapiens
agccacgtcacagcgatccctggcggccggcgggcggagcggcgtgggctcagcggaggtcgtggaagaggatgactgcacagtttacctacgcccagcccttgctgcgcttcattcattta

SEQ ID NO: 172642 - DNA, 122 bp, Homo sapiens
caggccgtgcgtctgcagagccagagaaaggcccggagcttccctccccaggtccccaggcggcctgcgggcccctccacagcccagtgatccttcaagcactcccaagcccagcctccgcc

SEQ ID NO: 172643 - DNA, 122 bp, Homo sapiens
ggtagaggaaatggaattccccagactggtaagagcgcgcgcagacacagccttgtctcacgcgcccaatcaggagcgtgtggtgggaggtgccaaggattaattaccagatacctttagtc

SEQ ID NO: 172644 - DNA, 122 bp, Homo sapiens
tacctccctctcccttccacataggcattttatctcccatcaagaatgtgaatacatgtacgtattcagaggaaaagagttcatgcagcctactacagtataattattaatatcttactccc

SEQ ID NO: 172645 - DNA, 122 bp, Homo sapiens
aagccctctcctgccaagtgactcatcccctctgttgccgtgggtggagggccagcctgccggggtgggggagggtgcttgctttcctcgagtttgctcgcaccttcagggccatttgttcc

SEQ ID NO: 172646 - DNA, 122 bp, Homo sapiens
aagattactttttgttggttttattttgctttatcttaagagagaaatgggaataaaattcggagaaaataaaattttataaagtcatagatgtttcctgggagtcaattaaaaatttgctg

SEQ ID NO: 172647 - DNA, 122 bp, Homo sapiens
gcatttttccaagtaaactgttaaataccatacaaaaagcaaactggcttaaaaactgcccgagctgtaaatgtaattaatttaaagagcacatccaggctataacttttcttaacatcccc

SEQ ID NO: 172648 - DNA, 122 bp, Homo sapiens
ctcgcccagcatttggtgttgtcagagttctgggttttagccacgctgttaggtgagaggcgatatcttatgcttattttaatttgcatttccctgatgacatgtgtggtgaggagcctctt

SEQ ID NO: 172649 - DNA, 122 bp, Homo sapiens
ggccgcctccttttcttcctcctgcttggacgactgtcttccgcctcaactgtggagcctcgccgaccgttagtcctcacagacacctcaggggcaaccgacgcagcgccacctcatcgtgt

SEQ ID NO: 172650 - DNA, 122 bp, Homo sapiens
ttctgctctccccagtggacccctctgtctggcactgccatgccacttagctggggtcagcgtgggcctggggtgtggaatgtcccaccagggtatgacgggctgtagcttgcctggcaggc

SEQ ID NO: 172651 - DNA, 122 bp, Homo sapiens
agcccacacagcaaggggcgggagcaggactctaactcccaatgttgggtttccctctatcgtgctctagccccactgcaacctagggcttggaggattagggaagccagctgggatgttcc

SEQ ID NO: 172652 - DNA, 122 bp, Homo sapiens
tccctcccaccctgacactgctcattcgctttcagtctctatggaggagtctcttctggacgtttggtgtaaatggaatcacaccatgtgtggcatctgtgcctggctcatttccctaagca

SEQ ID NO: 172653 - DNA, 122 bp, Homo sapiens
cactgatgtttgttaggccaggaagggctttcccaagaataacacagagcagcctcatggcggagtagagaaatccaggcgaggctgttccttctggccttgcggttaatcttttgtccatg

SEQ ID NO: 172654 - DNA, 122 bp, Homo sapiens
atgtacctcagattctgaaagacctgtccttggcccttggctggtcgcggggggcccagccggcgggacagaaaaagagcggagggatcctcagcccgcgcgcagagcctgctgggaggtgt

SEQ ID NO: 172655 - DNA, 122 bp, Homo sapiens
actctagaggcaggcagcccaaggtcaccgagtcctagcctaaaatgccttctcaccattcggctcacccctccgtgtacttacccagctcctgagggcagagcagactctcccctagggaa

SEQ ID NO: 172656 - DNA, 122 bp, Homo sapiens
agaggactgggattagggccagggctgcctgcctcacttaccctaatccccctcagagcccgatcctaggctctcagctctaagagtgggggtgcataagcagctttatgggtcctgaaagc

SEQ ID NO: 172657 - DNA, 122 bp, Homo sapiens
aacaaacccatacaggacaaatttgtacttgcggccaggatccagggaggtgatgacggccgagcgctggggtccttccacgggcaccacctggggctgcccgtccctgtctttgtactgga

SEQ ID NO: 172658 - DNA, 122 bp, Homo sapiens
cctgaactctgcgctgtgcggagcgggattcttgggcggaggggaccatctttgagtcagcgacgcgtgtattcaagtcctcctcctcgttttttattacaaacaaataagaattattttag

SEQ ID NO: 172659 - DNA, 122 bp, Homo sapiens
ggggagccgccagacactcccatccaaggcctctttctcatgactttttaatctcctgctcggaagtctacgaggacgcttccgggtcacgcggcgcggacaccaggagtcatgtgatgtca

SEQ ID NO: 172660 - DNA, 122 bp, Homo sapiens
gctctttgagcttgcctgtctctgtgggctgaaggctgttccctgtttccttcagctctacgtctcctccgagagccgcttcaacaccctggccgagttggttcatcatcattcaacggtgg

SEQ ID NO: 172661 - DNA, 122 bp, Homo sapiens
agccaccaagtcagtctgtggtattttgttatgaaagccctagcaaactcatattcctttcggtatatttacaaatatagaaaccatacaatagttgtggattaatgtactatatgagtgca

SEQ ID NO: 172662 - DNA, 122 bp, Homo sapiens
ggtaaggcgctcggcggtgcgtgcccggaactccgcagatggatggaatcagaacactggcgttcttaattcagtttgtggtctacagcacgccaccggagagtctgttttcccagctttaa

SEQ ID NO: 172663 - DNA, 122 bp, Homo sapiens
gaagctgttcgggcacctggagcgcggggtgctgctgcacagcagccggcagggcgtgttcgtcaagcggctgtgccagggccgcgtgttctgcagcggcaacgccgtggtgtgcaaaggca

SEQ ID NO: 172664 - DNA, 122 bp, Homo sapiens
agcctgtaatcccagccctttgggaggcctaggcgggaggatcacccgatgtcaggagttcgagaccagcctggccaacatggtgaaacccccatctctactaaaaatacaaaaaaattggc

SEQ ID NO: 172665 - DNA, 122 bp, Homo sapiens
cgcgcgccgtggagaaccagtactccttctactagcccgcggcgccgcccgggtgggacacgccaagctcttcagtgaagacacgatgttattaaaagcctgttttagggactgcacccggc

SEQ ID NO: 172666 - DNA, 122 bp, Homo sapiens
acgcgtgactggacaccaagagccggagaagtttagagactaggacactgtggcgtggcccgagttgcaggagagaggtgtccaatctccatggggtccttactcttgcaggacagagttcc

SEQ ID NO: 172667 - DNA, 122 bp, Homo sapiens
ggagctgggccaagttggtaagaactgctggtggtaggagctccagcatagcgcacagggcgggcccagagaaaggcgggcccattgttgggggattcggcttccggaggaggggacagcat

SEQ ID NO: 172668 - DNA, 122 bp, Homo sapiens
caccgggccaggccccacctcctctgcagtcggtattgtccgatggttcccggcgtacctcggcttccctcggtagtttccggcaatggtcgagagtttctaacgtgcccccttgttgtctc

SEQ ID NO: 172669 - DNA, 122 bp, Homo sapiens
gggccctctgagggatcttcctccggcctctctggtggcgctggacccagccactcaactcgtcagcaagcctggggaaatggaggagctcaggacctccatgccaggccaagattcccacc

SEQ ID NO: 172670 - DNA, 122 bp, Homo sapiens
atgaaggggtcgtcttcatcttcgccggatgatttccgcccacatagagggcgccagtgacgcccacacacgtgctggtgtcccgggaagagttcctggcaaagagctcaggaacgttggat

SEQ ID NO: 172671 - DNA, 122 bp, Homo sapiens
tagaaaaagagtctttggccagctttcccaggggctccatgccatagagagtactgcacccgtgtgcacagggggccctgacatgaggactttgaggataacactattcctccaactctgct

SEQ ID NO: 172672 - DNA, 122 bp, Homo sapiens
gcaaggctctatggcctcccaacatactcccttgctcattcttccctgctagcagcctttcgcattccagcataatagttaagaaaacatgctttggaaatgggcagagaccagctgagttg

SEQ ID NO: 172673 - DNA, 122 bp, Homo sapiens
gaggagtccgcgggggcgggaaaggggcggggcctgagcttttctccatctcgctctccgcgcctctgttttcaaggttttagaggtgaaacccgccagtgaggctggagcagctcagcagt

SEQ ID NO: 172674 - DNA, 122 bp, Homo sapiens
acgtgatgcgaaagcataaacaattcactggaaggattaaaaaaacacacattttgaagtcggttacctctggagaggtggggaaaggatgagttaaaagcaaactccgtttttccccatta

SEQ ID NO: 172675 - DNA, 122 bp, Homo sapiens
tgcttactttatccattatttccatggctctctcttgtccctaagctgctcctatgtctacggtttcaccctggagggccaaaagttccaataaccaagtaaagcccatgcttgcttagccc

SEQ ID NO: 172676 - DNA, 122 bp, Homo sapiens
acttatccatggtgacagcattctgattatcctggttttgtttcatgtatcacatagaaacggggcagaacgtctctgagttcatagatcctacagctgttctggactccctgttccacatc

SEQ ID NO: 172677 - DNA, 122 bp, Homo sapiens
tgcggcccgcgggtgccgacctaatcctcagaggggccagaaccgaaccgagcattgcagcggcgctttcccagctcagctggccttcctcggtgtctcttgcacgtcctcctcttcaagcc

SEQ ID NO: 172678 - DNA, 122 bp, Homo sapiens
gctgttagcgtaattgaatgggcgatgtgctcccgtgatgaggatctggcttggagtgcccgtgttaagtgaacagagacttgttagcaaggacctgttgttaaaagtcactctcatgcaca

SEQ ID NO: 172679 - DNA, 122 bp, Homo sapiens
gcgcccggggcgcgattgcagggctggcggggagcggtgccctccacctgacccgcctggcgcctcccatgagagggataccgcttggaatcctcccagagcaggaacgctgcgcagcgccc

SEQ ID NO: 172680 - DNA, 122 bp, Homo sapiens
acggcgccgagccctgattgacgttcagccaggccaatcatagcctgtgtctgaggcgcgcggagctggagcgcccagggcatgtccgccgatcccaaggaggcaatctgtcaggcgccgcc

SEQ ID NO: 172681 - DNA, 122 bp, Homo sapiens
tcctgagatactgggagtaatagcattctcttcttccgggaatattaggaggaatatcaccgggtggatgcacacccactatcttgggagtaacgtcatacgccaccccctggagatgatat

SEQ ID NO: 172682 - DNA, 122 bp, Homo sapiens
tctttttatttattttattttttcctgaggcggcgtatcgctctgtcgcccaggctggagcgcagtggcgcgatctcggctaactggaagctccgcctcccaggttcacgccattctcctgc

SEQ ID NO: 172683 - DNA, 122 bp, Homo sapiens
ggtttagaagtccctaagccaagtccctacccacattccacgctgctccctaatttcacccggaccacagcctctggatgagcttctgttaaaaagagatgactcggtgacaaacaggagga

SEQ ID NO: 172684 - DNA, 122 bp, Homo sapiens
gctcctcctcggtgacctgcgggaggagggcaagagaaaggtcacccagcgcctacttcccggtccagcgtaacaacaaagtcacaactacagtttaggaggcaccagtgcgctgcgggagc

SEQ ID NO: 172685 - DNA, 122 bp, Homo sapiens
cggaggacctgagttcgcagcaaatttctccagccacccgggagcccgcagcccggccctcgcgtctgcgatgggagctcgataaggtcaccgtcaacagcatccacacggcgccacgccag

SEQ ID NO: 172686 - DNA, 122 bp, Homo sapiens
ctgaaatctaaagccatgtcagtgcccaacttgaagtcacataggaaaccttgaacttaacggacaagctacatgtaatcaagctcagtttctccacagtatttaatggtcctggaggacac

SEQ ID NO: 172687 - DNA, 122 bp, Homo sapiens
ttcacacacataaagagtagcagccaaaacagataactgaagaattcccttggcagcctgcgctgagccccggggctgttcgtgctcccagccctctttctatcctcacatggtgtggtcct

SEQ ID NO: 172688 - DNA, 122 bp, Homo sapiens
tgccacaactcccttctcctaaatctcgttttcccaaggaaccccaaacaatggcattggcgatgagcggccccgcacgcgtaggggcgcagccgctaaggaggggaaggggcctctccagc

SEQ ID NO: 172689 - DNA, 122 bp, Homo sapiens
gccaacaaaaaaaacaacgtaaattgggctttgctctggctttacaaaggcagagattgtcgagccctctgactgtctttgtgccttctttatcccgtcctttgtgaaataagccgttttct

SEQ ID NO: 172690 - DNA, 122 bp, Homo sapiens
aagtccagggctatgtactaacaggcttgaaagcaccaggatagaattcagaaagagagccgctaccaaacacgcaatatggttcaaagccacagagaagattttagacctgaaggcagact

SEQ ID NO: 172691 - DNA, 122 bp, Homo sapiens
aaatcatccatggcctctggggctaggcttgacaaatgcctcctctgtaataacagtaatcgcagctaacgctaattgagcatgcctatcaggtgcatgggtctgtgtcctttcaggaggtg

SEQ ID NO: 172692 - DNA, 122 bp, Homo sapiens
aagtacatccagaagctatggaagaagcagtctgatgtcatgagctttcttctgagggtccgctgctggcagtaccaccagctctctgctctccacagggatccccgccccacccagcccaa

SEQ ID NO: 172693 - DNA, 122 bp, Homo sapiens
ggaaggatcacttgaggctgggaggtcaaggctgccgtgggtcatgatcacaccactgggcgtgatcctgggtgacagagagagaccctgtctcaaggagacaaaaaaaaaaagtagttact

SEQ ID NO: 172694 - DNA, 122 bp, Homo sapiens
agtcctaagcctcgctctggggactgtctagagtggtaggtgctggtctgggtgcacacacgtgtcccttgtgtttgctgctgggaggacgccgctctcacaaattttgagaaattggctgg

SEQ ID NO: 172695 - DNA, 122 bp, Homo sapiens
aatattattaaaacagaattcttctcaatatgctgctcagccacatgttatttgtattttcggtactaaaaactactgacataaatgaattaatgtttgcaaacacttaaaagaaggcccgg

SEQ ID NO: 172696 - DNA, 122 bp, Homo sapiens
atatttgtgaaataggctttaaaacacctaaatcccaaagctgccagcctaaggagcacacgtctttgaacgctggcttcacgctgtcatttaagtcatttcgtcctcttggagcctcggtt

SEQ ID NO: 172697 - DNA, 122 bp, Homo sapiens
atttatttttaattttatttgataccgaagtgcagaaaactgcacgtaccgcaagggtagcgctcggggaagcttcacaaccggggcacgtctgcacagccagcactcagtcacagaatgtc

SEQ ID NO: 172698 - DNA, 122 bp, Homo sapiens
tcttaaaaataaagctgcctccaacttccttaccctgttgtagaagggatgctgagggcccgtcatgccgctgtaatagctgctgtgaggctgtggtgacaccactccacctgcgaagggcc

SEQ ID NO: 172699 - DNA, 122 bp, Homo sapiens
gttgtttttcaagatcccagattattgaattaaggctgtgacttgcaagattccagaaatcgaggtaaaatgtaaatcttttgaccagtcattcaaatgtttccaagtagccacatttcctt

SEQ ID NO: 172700 - DNA, 122 bp, Homo sapiens
tgagcttgggatctgcgacaaaagggaccgagggtgaggcagagtgccccctaaagaagtcgggggacgggctcgtggcctgagagccggagctccttccgcccggcaggcccttcttgtac

SEQ ID NO: 172701 - DNA, 122 bp, Homo sapiens
ctggggtcccctaactcagagaaaaggctctgtcacccaccactcatgctgtcaggaccccgggcaccaacaccacccgccccacagcccacctggcgccaggtgccgctgcctcctcggct

SEQ ID NO: 172702 - DNA, 122 bp, Homo sapiens
ctgcctgaaaaatgccaccaatcagactatagacagctatgtcccaaaaactggggcctccggttacatggtggttgagtcaatttggtggaagttcaaacccctaaaccagctctttattc

SEQ ID NO: 172703 - DNA, 122 bp, Homo sapiens
caaaactaatttttagtgccagaaaggattttgtggttgtctggaggtgaggaaaatcggcggcaagggcggaggcaaatcttttgcaataaagagtcccatcttgattatggtggtagtat

SEQ ID NO: 172704 - DNA, 122 bp, Homo sapiens
tctcaatattctctgcgtgtttcataggtgatgcctgcacggggttctcaatattctctgcgtgtttcataggtgacgcctgtaccgggttctcaatattctctgcgtgttttgtaggtgat

SEQ ID NO: 172705 - DNA, 122 bp, Homo sapiens
cgctagaaggtggggtggggagagcagctggactgggatgtaagccatagcaggactccacgagttgtcactatcatttatcgagcacctactgggtgtccccagtgtcctcagatctccat

SEQ ID NO: 172706 - DNA, 122 bp, Homo sapiens
ggctgaccctgacaggaaccgctcgagcgccgctgccgccgccgccgccgcagccaccagcgccaccgccacagccacctccgctgtagagcggaagaggcgggacactcttccgccaaagg

SEQ ID NO: 172707 - DNA, 122 bp, Homo sapiens
aggcctcagaagactagaaggaagttcctggccattcaggtgagacctcaggttccttcccggccatttgggtcagcccctagccctggggatccgtggggcttgaggacgggcggtagaag

SEQ ID NO: 172708 - DNA, 122 bp, Homo sapiens
cgctcctcacagccctgcgctccgggaaactgcaggtggccggcagtggccaggggatggcgggggcgcttctggaacctgactcagttttgtaggttccttatctcggttgtttaccgcgg

SEQ ID NO: 172709 - DNA, 122 bp, Homo sapiens
cagtggaaagagaagctggcctactttaaagagcttcagagaatgaaattcccagccctccgcagacatgggaagagctgccaccttcaggccaagtgtagatgacaggcctcttcctaaaa

SEQ ID NO: 172710 - DNA, 122 bp, Homo sapiens
ggggcgaactggaggaggccctgcagagcttacgtaacaggcgtctgctgccctgcagcgcggtatcgttggactcttgggcacaggatttgcatcaggattgtgacatactaggtaatggt

SEQ ID NO: 172711 - DNA, 122 bp, Homo sapiens
gacaggcagctttgtgcaagccgaggtattggccgccataacgcacactgacttttgtaccgcctttgctgtcttacgcattttgtcggaataaaccaacacacggaggttgggtaatctag

SEQ ID NO: 172712 - DNA, 122 bp, Homo sapiens
ggctcgggccgcccgggcgtcggcgccggcgggaacgcgacgtcttgcggcaagaaacggcgtggcgcagctcctgcagcatctcctggcacaccgacacctgggggtggcgcgggcggtca

SEQ ID NO: 172713 - DNA, 122 bp, Homo sapiens
ccatcgccgccgccggctccacctgccccagcagcccctgctccagcgggaagtgtggtgcgtgggcaccaacggcaaacgctatcaggcccagagctccacagaacagacgctgctgagcc

SEQ ID NO: 172714 - DNA, 122 bp, Homo sapiens
ggaaggctctcttcgcccggcccagactgaccaggaagtgatactgaggagagtggtagacgtcgtacccgttttccagcgtctggtgttggaacctgcagttctccgggtcgaaatagtgc

SEQ ID NO: 172715 - DNA, 122 bp, Homo sapiens
acaaacagagaggctctgtgtatggagtagctggtttggataccagctggcttggctgtgcgcctttctaatggtaatgaagtcacacagctgctaggacaatcagctggagttcagattgt

SEQ ID NO: 172716 - DNA, 122 bp, Homo sapiens
ccgcctccccgcatcgctgggcctgcagacaccggccaggtcccaggggaaggtgcttcccgctcagccggcaagcacttagtggcgtctgctcgttgctcgtctccaggccgggtgagggg

SEQ ID NO: 172717 - DNA, 122 bp, Homo sapiens
taggaaggctgtgggacccagctttcttcaaccagtccaggtggaggcctctgccttgaacgtttccaagtgaggtaaaacccgcaggcccagaggcctctctacttcctgtgtggggttca

SEQ ID NO: 172718 - DNA, 122 bp, Homo sapiens
agctgaataatggattcaggttctgagcaatagaatctctacataatttattagccagtccgggctctgctttgtgctcaggtgaaccttgccccacttttatctgcggctgctgctgctct

SEQ ID NO: 172719 - DNA, 122 bp, Homo sapiens
agcaaagcaagccaggacacaccatcctgccccaggcccagcttctctcctgccttccaacgccatggggagcaatctcagcccccaactctgcctgatgccctttatcttgggcctcttgt

SEQ ID NO: 172720 - DNA, 122 bp, Homo sapiens
aaagtgaagctgcccatttagggaagtgaggcagtgtgggacccactgcccccagccaaccgcagggattcattgagcctattatgagggcggtgctggcagctgtttccgcccttttcctc

SEQ ID NO: 172721 - DNA, 122 bp, Homo sapiens
ggccccatcccaaactcaacctcctcatctatggactctccttgcagaggagggtgtcaccggggcaacctttgcacatgaatgctcaggaggtctgtctacagccattcacatgcatgctt

SEQ ID NO: 172722 - DNA, 122 bp, Homo sapiens
gacaagtgcagaccggtcggcgcacgtcccacgccacgtggactcgcctttgtcggtggccgcctttctcgtcaggccgcgacgacagggctgtgccttatttgtgtctgtcgagagcagtg

SEQ ID NO: 172723 - DNA, 122 bp, Homo sapiens
gctgcacggagcgcatggggtaggacatggtgacctcgtggtggctctggctgccaaagacggtggcccagaggggctcggcctccagcgccggcaggagggaccggccagtgaggtggatg

SEQ ID NO: 172724 - DNA, 122 bp, Homo sapiens
tgatggcgcccacgatgatggccacgccgttgagtagcgtgatgttccgctgcagggtcacgccctcgccctcgcctgccggcgccgcgccgtccgcgcgcttggaggccagcatcttctcc

SEQ ID NO: 172725 - DNA, 122 bp, Homo sapiens
aggtaaacagacggctgcttcatcttcttaagcaggcctacattcgtaatgcatgggttgcgggtgggaggaggaagggccgggcccccccggtaccagggcactggctctgtcctggctgt

SEQ ID NO: 172726 - DNA, 122 bp, Homo sapiens
gcgttttcccactgaggttatgtaaacatgaagaggagcctacaagtgtcaaggaaaaaacgacagctaaccacagggcaggccatgggcaagatatctcagtgttctccgctctcataggt

SEQ ID NO: 172727 - DNA, 122 bp, Homo sapiens
gggtcgccgacagccttcagtttgcagtcgagaccttcttcgaaaaccaggtttcagtgacgtattcagcaaatgagacccaacctggggaggttgtcgacctgcggatcagggctgcaagg

SEQ ID NO: 172728 - DNA, 122 bp, Homo sapiens
ttcccctccccttcgtcctcccattctcccccactactccccgccccgtccccctcccggcgtctgacgcgacacgccgagccttcgggatcctcctcccgaaccctacctccggctctccc

SEQ ID NO: 172729 - DNA, 122 bp, Homo sapiens
gtggctcctcgcctataagccggccgtccctccgggggagcccggagctagcccggctctcgcccagtggcgaatatatctcgctggggcttccaaatgttgtacccgagcgagttagagaa

SEQ ID NO: 172730 - DNA, 122 bp, Homo sapiens
ccaaaactgaccagaaaatatgcattctgttaagtcaattccataggctaatgtgtgggccgaaataggggaagaaagaaggatttaaaatgtttagataaagggcttagttgtttattcca

SEQ ID NO: 172731 - DNA, 122 bp, Homo sapiens
tacagaggccacggtgactcggtccccccacccaccacagaatcctgtcctcgggcctcacgctggggaacacgaagccccccagggctcctgacgcctgccttgcccaccccctgggttcg

SEQ ID NO: 172732 - DNA, 122 bp, Homo sapiens
tggaaagcaatattgcaatgcctattagcacatgacattaggtgaattctcctttgtccccggacctgctgcctcctcctgcttgtcaggggacagatccagtacatctcccctcagcgctg

SEQ ID NO: 172733 - DNA, 122 bp, Homo sapiens
gccactgcgcttgcgcctgcaggggattggccagtttcgctgacgagcatctctcgacggcgccaccgcccggacgtggccccaggagccgggagaggccggctgaggcacatgcgtactgg

SEQ ID NO: 172734 - DNA, 122 bp, Homo sapiens
ccggcgcgcgtttcctgcaagcaccgcccccgccgcccgcacgctctagcagcccgcgggcgcactgacctgagatggtctcctggtagcccttggtgaagaactgcatggccgaggccgcc

SEQ ID NO: 172735 - DNA, 122 bp, Homo sapiens
cgccccagagcaagctccgcggccggctccacagtcccgcaagccgcgcaacctggaaggcgacctggacgagcgccggctgctctgccacttgcagctggcccaggaccgcgaggcgcgcc

SEQ ID NO: 172736 - DNA, 122 bp, Homo sapiens
cctcctagtgcctgttttcccctcactgtggaattgtttctgaggatccctgcatccagccgtcctggccgttgtcttccactcaggcatttctggaggttgagcggggggcaaggccaagg

SEQ ID NO: 172737 - DNA, 122 bp, Homo sapiens
aaggcctccaccgggcccgagggcgtgttggccaccactgacacacgcacggtgggcgagcggccaccgctgcagctgaccctgtgcatctggctgattctgttcaagatggcgtccacctt

SEQ ID NO: 172738 - DNA, 122 bp, Homo sapiens
gccggggagcccgggggagcggcgggcgaggtctcctggtgggctgatgggcaggcgcgtcgacgggagcgctgcgggggctcaggcgtccgggtggctccggggggctccaggcgggggcg

SEQ ID NO: 172739 - DNA, 122 bp, Homo sapiens
ggcaggggcttatttttggaaggcagatgaaggctgctgacatgaaaccaaagcctccatcgggcactcgggttgagagcagagggacccaggctgagccgcggccggtagagaccatggct

SEQ ID NO: 172740 - DNA, 122 bp, Homo sapiens
cacaggagggcgacacggaggcacaggcggagactgcagtggaatcatgcttccacaagccgaggaacaccgacggctgccggcacaccacagctaggagcgccaagggctgccggtacacc

SEQ ID NO: 172741 - DNA, 122 bp, Homo sapiens
gggggcgctccaagacagggactcttctagcctgttgcctctccatgttagcgatatcctcgttgctaggagactagacgcgtcttacagtgggagagctcagcctcactgatagccgggga

SEQ ID NO: 172742 - DNA, 122 bp, Homo sapiens
ccctgtgatacccacagctacacacttgtacaagcacaattacacatgcatatgccactacgtacacagacacatgtcctcagccgtgttcgtgctccgagggtgggccttaacaagaacag

SEQ ID NO: 172743 - DNA, 122 bp, Homo sapiens
ggccagctggagggggcagagcgggaagttccagccaattagccttcctttgtgacattgcggcccttcatcccaccctccggaagccttcataacactcatgtgtcaacaggaccttaggg

SEQ ID NO: 172744 - DNA, 122 bp, Homo sapiens
ttaggggaccaggaaacgacttaaggttggaggagcgggcgagttggcggggctctgcgccgcctggacccgtgaggacagagggggcaggacaccccgccttcctcagtgaccacagctgc

SEQ ID NO: 172745 - DNA, 122 bp, Homo sapiens
agtctaagcgcattgccagcactgatgtctgcctggttgggacgagttcactgagcgtgacggggtcttcgttcttcttcatcatcaactcctcaggcatcacagggctttgcctctgtttt

SEQ ID NO: 172746 - DNA, 122 bp, Homo sapiens
cccggccgggcccccgccgcgcaagaccagcgacgccgtggtccagaccgaggaggtcgccgcccccaagaccaactccagcacgtccccgagcctggagaccagggagccccccggggccc

SEQ ID NO: 172747 - DNA, 122 bp, Homo sapiens
gcgaggccatggttctcacaccatccagaggaagcatggctgcgacgtgggcccgacaggcgcctcctccgcaggtatgaacagttcgcctacgatggcaaggattacatcgccctgaacga

SEQ ID NO: 172748 - DNA, 122 bp, Homo sapiens
agaaagatgacgtcaaaaggggtgtgcttcagccccattaatgagccacccaaagtaaaccggaagactcagcctgagtagcccacccatttatctcctctgttagcagccaagttcaatca

SEQ ID NO: 172749 - DNA, 122 bp, Homo sapiens
actcatggcaggaagcaggtgaatggaagaaagaactggccccaaactctgtatccatgccggattccagttgggcctcttggcttaacaatacttggagcgggataggctgttcactgaaa

SEQ ID NO: 172750 - DNA, 122 bp, Homo sapiens
caggatgacgtcaggcagtgaggaatgccgtgatgaacgcaaggctgggtgaggtgagagcgggtggtgttttagggtagcagaatcacaaggagtcagttgtgtgaagtctgtacacatgg

SEQ ID NO: 172751 - DNA, 122 bp, Homo sapiens
ccaccacctggctggcagcagctgtttacaggagtatggactgcccttcatggagaccagcgccaagacgggcctcaacgtggacttggccttcacagccatagcaaagtaagtcctgccag

SEQ ID NO: 172752 - DNA, 122 bp, Homo sapiens
ctactcacataccaaggaggggacaggttttcgcattccattttttagtttcagaaactgcggcctgatctatcacgttggaaggagggaagagctgtaaagtgaatgtaaagatttcgctg

SEQ ID NO: 172753 - DNA, 122 bp, Homo sapiens
gtccacgtggccgctctggagcaggttggagttggcagcgggctgcgctgcagggacaggcgcggcggacagccccgggggcagcggcggggtcctgtctgggagaggacagggttgcggcg

SEQ ID NO: 172754 - DNA, 122 bp, Homo sapiens
attgtggaaagcagtgtggtgattcctcaaagagcttataacagaactaccattaaaccccgcaatcccattactgggaatggtgtatacactactgtatacacagaagaatagaaattatt

SEQ ID NO: 172755 - DNA, 122 bp, Homo sapiens
agacccatgggaccatgccccactgtggtattttcccctaagtcatcctcaaaccatagacgcaagccagagccaggagcgagagacaatcgctaggaagaaccccagtggactagatgcgc

SEQ ID NO: 172756 - DNA, 122 bp, Homo sapiens
atatgcaaagctcttcattggacattttaattaagtgtgttaattccctctgctagaggacgctcagccgcctgggcctcacccagggatccagagaagatggaaaggggagggtagagggg

SEQ ID NO: 172757 - DNA, 122 bp, Homo sapiens
tgcccacctgtgcatctgtgaatttccgtgttttcatgcccacctgcgtctgtgaatttccgttttcacgcccacctgtgcgtctgtgaatttccgtgttttcacgcccacctgcgtgtctg

SEQ ID NO: 172758 - DNA, 122 bp, Homo sapiens
aggatgtccagatagcaccagccctttgttaactggagagacgacagacaataaccccggcgtggtgaaacccggcccacacgtcccgcccgccccagagccaatgctagggccatcaggtg

SEQ ID NO: 172759 - DNA, 122 bp, Homo sapiens
gctgggggagcgcagctgcttttccgtctatggtgctggccgaggctggggccggggcctcggcagctgtggattttggctgcccccgcggtcccagatccgtgctgctgatgtctgcttgg

SEQ ID NO: 172760 - DNA, 122 bp, Homo sapiens
acggagccctggctgagcctcacctgcgctcggagcccatttccttttctgtcaaattcacgatgggatctggcccctgactccaccccagcagcaccaaagacaccgccctgcgctcatta

SEQ ID NO: 172761 - DNA, 122 bp, Homo sapiens
gtctccaacttactttatctgattctccattgaaaaagactacagtctattcttactacccggtagcaaaatttcattacattccataaatctgttagctaaagaatgtaattcctgtttaa

SEQ ID NO: 172762 - DNA, 122 bp, Homo sapiens
cctggccagggacggggtcgtccgaactgccgtccagattccccaagggagacaaagacccgaaacacagctcaaagtttccgagagcagtcacagcggggccagggactccagaagtgtca

SEQ ID NO: 172763 - DNA, 122 bp, Homo sapiens
atgggagctcatgcgcaatgtggtggtttaaagagcctgctacctgcccctgcttgctcccgctctcgccctgtgacgcgcaggctcccttcaccttccaccaccagaggaagcttcctgag

SEQ ID NO: 172764 - DNA, 122 bp, Homo sapiens
ccagcggacacacactggtgagaagccctacaagtgtggcatatgtggcaagggctttggcgacagttccgcccgcatcaagcaccagcggacacaccggggggagcagcccccccgaccag

SEQ ID NO: 172765 - DNA, 122 bp, Homo sapiens
ctcttatcccggcccgctgaggctctcccggcgctgcgtccacagggccttcacctcctccgcgctcgcgcactctgggttccagttgcctctctcgggtcctgcccatgcctcccccgctc

SEQ ID NO: 172766 - DNA, 122 bp, Homo sapiens
gcgaggccccgccccgtcctcagcgactccgcccccaccgctcactgactccgcccccaccgctcactggctccgcccccaccgctcactggctccgcccccaacgcgctcagactcagccc

SEQ ID NO: 172767 - DNA, 122 bp, Homo sapiens
tattctatgtcttccaacacgtatggctcctttgcttaggtggtgcgcctcagaacagtccgaaaatggttacttcagataagcatgggatatatatacatacatatacatattctggctct

SEQ ID NO: 172768 - DNA, 122 bp, Homo sapiens
ctaagcccctcactgcccggggcggcagggcctgcaggccgctccgagtgcagggcccgccgagcccacgcctacccggaactcacgctggcccgcaagtgccgcgcacagccccagttcct

SEQ ID NO: 172769 - DNA, 122 bp, Homo sapiens
tcctgtggatcctaaatctaatcactggatgtttctccttttcccatactttgcaaagatcgaagtggatgactgggccctctttttagataaaatatttcagaggccatggagtgatggaa

SEQ ID NO: 172770 - DNA, 122 bp, Homo sapiens
cccatctcacccaccgccatggaaggagtgtgcttcctgccccatgggagctgggcttgtcgaggccatgcatgaggcaggatggcagagtttccactcgcccctcggggaacttccaacct

SEQ ID NO: 172771 - DNA, 122 bp, Homo sapiens
ccttatgacctagcaatcacacttagacatttatcccagagaaatgggcatttatcttcacgcaataagctgtaaattaatattcatagcagctttatttctaatagccaaaactgggaata

SEQ ID NO: 172772 - DNA, 122 bp, Homo sapiens
cccggctatggctacaatttccacttttgtcttcttcttagccggctcgggtcctagtcacgagccgcggtctcgcgtagtcccgcgtgagcgcctaccacctcactgtgccaggccggtca

SEQ ID NO: 172773 - DNA, 122 bp, Homo sapiens
cattcttagtggactcctaatggccagccctgaggacagaagacaggttaaaacttcagccggacccacattaccgattccacagagttgggcgagtagcctgctttcctccaacaaagctg

SEQ ID NO: 172774 - DNA, 122 bp, Homo sapiens
cattctatttctaacctctgagccattgctcacacaattcttttttgtctgaattacccccgtatctcttaaaccatctgcttatccatttacacataactgaagtgccatctcttccaaaa

SEQ ID NO: 172775 - DNA, 122 bp, Homo sapiens
gtcccgggccggtcacccacctgggttgccagtcattccagctccgcggatacttggtgccgccgccgccgccgccgctgctcagccgagaccccggggctctgcggctcattaccttcccc

SEQ ID NO: 172776 - DNA, 122 bp, Homo sapiens
gcggggttggagggggggtctgggtgactttctcccccctgaccctcttttgtctcctcccgcacgtggcttccaggccgaggtggggacagcgccgttcgtcagcttcaggcttccccggg

SEQ ID NO: 172777 - DNA, 122 bp, Homo sapiens
ccacagctggctagcgggatatccgtgtccacgattggcgccatgtgttttaagttgcagcgtcaaaaacatgaagagattgctttagcaaatatttacccagtcctgactctgcacatggc

SEQ ID NO: 172778 - DNA, 122 bp, Homo sapiens
cccaacacggtctccttgaacccaggtgaagttacacctgagcgtggtcgttgtgaagaacggtctgtccaggaactcccgagaacgtgtggtcggccttgcggtaagcttgtgcactcgga

SEQ ID NO: 172779 - DNA, 122 bp, Homo sapiens
ttttattattgacatacaagagtttgttttggttttgtttgtattccggatactagagcccgagaagatatgtaattggaaatattgtctctcattatgcagcttagattatatattcttct

SEQ ID NO: 172780 - DNA, 122 bp, Homo sapiens
tcctccacccccgccccacaacagcctaccctgcctccggctgggtttctgggcagaggccgaggcttagctcgttatcctcgcctcgcgttgctgcaaaagccgcagcaagtgcagctgca

SEQ ID NO: 172781 - DNA, 122 bp, Homo sapiens
atgcctcttccagagattgctgctcagaggatacttgttttacaaataaatgtttcctctcgctggttgtggaatttatatagaaactttgattcttccagggataaagttgggtgagcgga

SEQ ID NO: 172782 - DNA, 122 bp, Homo sapiens
tgcctctgccctgtctcatctcagtctggcatggacagctcagaaggcagtgggcaggcacgctgagactcagtaggttgaggaagaagaggcctccagctaccaaggcggaagagtagctg

SEQ ID NO: 172783 - DNA, 122 bp, Homo sapiens
ttcagttcacctgttaacgtgtttggcactgtcatcttagactcttagcctttgctaagtcgggatgcaacagtgctggattagtgtttttgttgttcctttttccaaagaagcaacttgaa

SEQ ID NO: 172784 - DNA, 122 bp, Homo sapiens
aaccccgtatgcggaggttgcagtgagccgagatcactccactgcactccagagcttgggcgacagagcgacactccgtctaaaaagaaagaaaggaaagtggggccgggcgcagaggctca

SEQ ID NO: 172785 - DNA, 122 bp, Homo sapiens
gagtgatgggtattttaacttgaacttcagggagcattggggcttggtttagtccagccacgtctgagccagagacgaagaggtccctttcttacctattgcaggttccttgttaaatgact

SEQ ID NO: 172786 - DNA, 122 bp, Homo sapiens
cagaggtatgcaaaggatgggaggagcaccagtgaggaaactgaggcacatgaagacgaccggaccctgcaaggactagacacctggcagcactagtccagtgcccggcaaacagcaggtac

SEQ ID NO: 172787 - DNA, 122 bp, Homo sapiens
ggatcagtgggttgtctttgatcttccacaaacccacccgggagagctggccaaagtggtcgggcagcaccgcgatctggttcccctgcagcacgagctcctccaggccggtcagctccacg

SEQ ID NO: 172788 - DNA, 122 bp, Homo sapiens
gtaaacacaccatgcctagaattcggctcctcttcaacaacgcgggcttttgaactgggtcgaagtcactatgccaggatgacatttttttaccttagaatgaattccccccaggtggctcc

SEQ ID NO: 172789 - DNA, 122 bp, Homo sapiens
tctatgctaaagaggggtggaaatgcttctggggtgtccagaagggctgcagaaattcctcgtcactggtcatggggagagcaggactggcttgcctctgtggcctcttctgcctctggagg

SEQ ID NO: 172790 - DNA, 122 bp, Homo sapiens
ggacagtggttccaggcgcccagcagatggcaggatgtagccaaagattccctgcagtcccggagagctgggcccgcaggactgcaaggcagggggacctgcctgtccctcagggagcgtcc

SEQ ID NO: 172791 - DNA, 122 bp, Homo sapiens
cggtggcggcggcggcggcggcagcggcggtagctgaggcggcgactggacccgggactccgcccgccacttcccgatcgggtgctaggagctcagtcccggcagccaccgcggcgccaggg

SEQ ID NO: 172792 - DNA, 122 bp, Homo sapiens
gctacgaaggggttaaatctaatctcagcaacctgatggattctggggggtttccttcctcgactctagaaattaaaacgaaattttgcccaaggtaaagatgagaaccgtttacatcaact

SEQ ID NO: 172793 - DNA, 122 bp, Homo sapiens
agggcggcgagtcgggcgcacgcgcaccccctgcccgcccctggcgcccctccccgcgggcggtgcagctacccctgcagcgcctcccctagctagaagggagcgggagggggctccgggcg

SEQ ID NO: 172794 - DNA, 122 bp, Homo sapiens
ggaggccgcgggggttcagcaccttggggttgcgggagaagtgcatgtgcagggtgccgtcgtcgctgacggtcacggacactttcttcagggtcttgttcccacagtgtgagcagaacact

SEQ ID NO: 172795 - DNA, 122 bp, Homo sapiens
actgagaggcttctactcgtgacttttctaatttagccatcctgggaacagcttgtaaagcgaactagtataggtcaaaacatgggcgaggctgagctaatcagaaactgtcagcagtagca

SEQ ID NO: 172796 - DNA, 122 bp, Homo sapiens
gagacccggggaccccagatgcaatgctgtctttaggggacttgtgacagaattcccttccggggtcttcagttttttcagctgcaaaacggaaggattacactagaccttcgaggtgtcct

SEQ ID NO: 172797 - DNA, 122 bp, Homo sapiens
cgcccgtccccaccagccgcctgccgggcgccctgaggatcagtcacttagccattgctccggagactcccgggaataggccaggaaggacccaggaccagcctcctccggggagagccacg

SEQ ID NO: 172798 - DNA, 122 bp, Homo sapiens
cataaaaactgaagccatgtgccagaagccctcgtggctcaagggctctgtccttggacacggatgagggcagctgggcggtgggaccgaggctctgcctgaatgctcagcttctgcaagct

SEQ ID NO: 172799 - DNA, 122 bp, Homo sapiens
cgttcctacactggtcagaccactgtccttggggcagctggggtctttgggaccctccaccgggctcgccggtccgtcggacttttggctgagatccgtgtcagactcctccgaatagtcgt

SEQ ID NO: 172800 - DNA, 122 bp, Homo sapiens
gaggtggtacccacttccatgagcttgacattctgctgaaggagacagatcatagccccccgacttgtactttgttttcataataaagttttgttcttagagaattccccaaactgtgtaag

SEQ ID NO: 172801 - DNA, 122 bp, Homo sapiens
ttatgtgaacttggctacaataaccccccactctggtttcctctgctgcaattacctaaccgtgaagtgcaagatcctcagctccgggtgttcaacagtctccaggatccaaactcattcca

SEQ ID NO: 172802 - DNA, 122 bp, Homo sapiens
cgacccgggtccggggacgggggagggaaaagtctggggtcactccccgttgccccctcccgccaccccatggatccagacgatgcttggcccgggactccctgaggccctgcccgcggtgg

SEQ ID NO: 172803 - DNA, 122 bp, Homo sapiens
ccacatcgccgtgtgacaaggacatgtgagaaaaagcccagccagcctctcactagaaaccgtggccagctccgcagagccaggacctgcacgctgggcccgccgtcccccaggacctgcaa

SEQ ID NO: 172804 - DNA, 122 bp, Homo sapiens
tccactgcttcccgcgtgtgttgtcattcaccattttaattaggtgactctttactctgacgtctgtctctcctacaaggctgccgcgccctcctgtgatgccttcccccacacgccctgag

SEQ ID NO: 172805 - DNA, 122 bp, Homo sapiens
cggggatctgaggatgaaatctctgagagcccctcgtgggccctggaggacagatgaatccgtgatgggcagcacggatccggggatctgaggatgaaagctctgagagcccctcgtgggcc

SEQ ID NO: 172806 - DNA, 122 bp, Homo sapiens
gggagccatttccaacaatttaatgctctgttcgcgggcccgggtgctggggttgcagcacgaggcttgttcttcgaggcagagccgcacataatgaggcttctcactactgctccccgtca

SEQ ID NO: 172807 - DNA, 122 bp, Homo sapiens
gtcacctgcagcaccagggccggcagcagcggggtgggcgggctgccaggctccgggctgcgcaggtgttccttccactgcccgcctccggtggagagagagatggccaaccgatttcccgt

SEQ ID NO: 172808 - DNA, 122 bp, Homo sapiens
tgggccgggcgataaacaatcgcacaggatacacaacaccctggactgtcacaagcccctcgcaggaaaagataaataacatctgaggcgctgcggcgcggcttccccgggctgaacaaaaa

SEQ ID NO: 172809 - DNA, 122 bp, Homo sapiens
tgcggcgctaccgtgcgtggtggctctgtgtctggcctgaggcttctgctcgctcctttacgccttcagccagctccccgtgtccccggaggaaggagcgggcagtggtggctggaagccgc

SEQ ID NO: 172810 - DNA, 122 bp, Homo sapiens
gtgacgcctgcccatcatacctgtggtgcagttgagcgaagtattgaagccaaggaagggcgaggcagcattcacgcaggccactacgacggtctcgttccgcatctctgtctggaaaggga

SEQ ID NO: 172811 - DNA, 122 bp, Homo sapiens
ctgccatctctaggcgtccctcccactccgccccacccactccagaccttccgctcctgtcgacctcactctacccagcaccctcaggggtcagattctttaagaggagcctgaggaacaag

SEQ ID NO: 172812 - DNA, 122 bp, Homo sapiens
tggctgtgggagaggtgttccggcatatggggaaggcggggcatcagagaggcctggactcgaaccctggcctcaccacctgccagctgcatgatgggggcaagtcccagccccaccccagt

SEQ ID NO: 172813 - DNA, 122 bp, Homo sapiens
aacgttgtgaacaagtcgcagccttggggggagctgtaccggctggatgtgtcctctgagcggcccctgcctgtgtcctccctgtggcctcccaggccatgcactggctctgtgtctcctgc

SEQ ID NO: 172814 - DNA, 122 bp, Homo sapiens
ccagccggacccagctccccgctcccgcccgcgggcggcgcctgcccagcctgctcccgccgccgcccgctttccaggaactgtcactgctgaccgtgcccctggccgatctccacgaggtc

SEQ ID NO: 172815 - DNA, 122 bp, Homo sapiens
caccccaaggctgggttcatgggatcccacccagcctgctacaaggtgctggggcagtgacggcagcaccccgccagcccctccccttgacactgaggccaagtgctggaagcagcagtgcc

SEQ ID NO: 172816 - DNA, 122 bp, Homo sapiens
gtttgctttaatgaccaagcatccctaccttccagatggccttgtgatggatgagcacctcgtggcttccaggactccagaactaccaccgtctgcacgtactaccacttttatgctagttg

SEQ ID NO: 172817 - DNA, 122 bp, Homo sapiens
ggctttgttttcgagttatttatgtatgcagatttcagccttctgggtgagctttcctgccgctgagtatcacagattgttccaacactcactttcatcatttccttcacgaggaaagaggc

SEQ ID NO: 172818 - DNA, 122 bp, Homo sapiens
aaaacgaatacaaatctgcaattgattttcataatgtttctgcggtgtttgcaaaccaatcgcctgaacgtccccgatcttacctaagagagaacccctcctacgtctgcgaagtgctccga

SEQ ID NO: 172819 - DNA, 122 bp, Homo sapiens
aaaagcagaaaaccttgaattgtggcgggttggaatatttttgcggcctgggaaattgggcggcgccttagcccctctattacggaagaaaaggagagttgtgagctttaaagtaagattta

SEQ ID NO: 172820 - DNA, 122 bp, Homo sapiens
agccccccgacccaggtgagcggtacgaccgctgttgccctcgggtgtagagcagtgaggcgaaggcgcgccctcccgagtgggcgagttcagcggaatggatcccccgattagcgggggct

SEQ ID NO: 172821 - DNA, 122 bp, Homo sapiens
taatttaacaggacaaaggtacagaacaatctggcccttacaagccggcggagacgggtacgaattaccatgacaacagcgcgcgcctcgacattgtcggctcgcgcgttgtttgggaagaa

SEQ ID NO: 172822 - DNA, 122 bp, Homo sapiens
ccatcttcacttcctgcatccttcattggcttttaacactgagagggcggtctttttaggcggacaccaggcacgcaacttagtctcacacgccttggagagcaagcgagtcttgccattgg

SEQ ID NO: 172823 - DNA, 122 bp, Homo sapiens
gacaagagtccgggtgagcagcgtgcttggtacaggccgcctctcaaaccgcgaggccggcggacatgtcttagccctgcagctacggctgcggctgtgtctcaccagctgctggccaccga

SEQ ID NO: 172824 - DNA, 122 bp, Homo sapiens
tatccaagctctgtacctatgtgtccacccaacacccccttggccatcccacacacctagcggcatatatcttggtggcaaggtcgtctctcagcaggactcccctggaagcagttttggag

SEQ ID NO: 172825 - DNA, 122 bp, Homo sapiens
tgtctgtcacaaaggcactccaggtgggcgaggtgtaaatccggggcttgtaggtatcctcggtgaggttcaggcctttgtaccgggccagcaactggaagggcacagtgtggaattccagg

SEQ ID NO: 172826 - DNA, 122 bp, Homo sapiens
agaaggaaaatgtaaaccacaccaaagtgaacaactgtagcatcctgttgtttaaccaatcgcttatgtttggccagaggcatcaatgaaagagacaatgaaaaaagagaataagtaaaaac

SEQ ID NO: 172827 - DNA, 122 bp, Homo sapiens
ggtggtgcctcccggggaggagggagaagaactaggctattgatgaaagggaccagagagcggagggaagtgtccgagcagccttccaggccggctttttaccaagaatagcatcaaaagcc

SEQ ID NO: 172828 - DNA, 122 bp, Homo sapiens
gattgacttgagggctagcaggaatccaccaatcagaaggaggctcccagttgtccctctcgcttttttcttgacatgaccaataaaagcccagagttgggtggcgcctgaccctcccacta

SEQ ID NO: 172829 - DNA, 122 bp, Homo sapiens
catcctgccctttctagaagttgctggataaaactcctgctgcctctagcatcaggggtgcgttactttttctcttgtagggcttcccccaggactttgctcctccttgggcattttcgttg

SEQ ID NO: 172830 - DNA, 122 bp, Homo sapiens
agcaatcctccagcctcggcctcccaaagtgctgggattacaggtgtgagccaccgcacccggccacttgtttcttaatgagtgtctgcaactgctggggaggtgcgggtctgccggccaga

SEQ ID NO: 172831 - DNA, 122 bp, Homo sapiens
ggcgcaaagcacaaaagagtacgacgtgtccagcagctctgagtaggcgagtggctgcagcgtagggttcttggagttaggtgatcaagggtgaggaagggactattttccctgcttggacg

SEQ ID NO: 172832 - DNA, 122 bp, Homo sapiens
aacaatgctcagcagtggaacgtggaccaactaagaggcaacccttcctgctgccgcttccgcagtcagaaggtgaagacagagagcaaacctccaggagagggctctgctccactttctcc

SEQ ID NO: 172833 - DNA, 122 bp, Homo sapiens
aaggcccgtgagctgcactctggacggactgtttccagcctcagaggccagggtctacctcgcactgggggaccagaatctgagtcctgatgtcaccctcgaaggggacgcattcgtggcca

SEQ ID NO: 172834 - DNA, 122 bp, Homo sapiens
tgaccaagtgagggactgactccaggttacaaagtgctgtggtcatgtgacctgagaatacgtgtgcgcagagtgtgcccacagtgtccttgtaaagttgagcatgtacatgtcctgccagt

SEQ ID NO: 172835 - DNA, 122 bp, Homo sapiens
accctgatcaagttccacatgacaaatctctccactggccttgggagcaggtgggaccagcgactggaccttcaatagaggaagaatgacatcaagggcattttggtgaagagccaccaaag

SEQ ID NO: 172836 - DNA, 122 bp, Homo sapiens
ggctccttcttccggcacgggccggagctgacacccccacggaaaaccgcacagcgcctccgctctttctccacgggctgagggatcaatgcacttccgcataggcctagggccccacgctc

SEQ ID NO: 172837 - DNA, 122 bp, Homo sapiens
aaatgagcttcttggactccctctgagtgcagtatgagaatataaaactgaaccatcacacggacaaagtcacggaatcttgggtgtctggtcaagaggtttaatttcaagcgtacttcaca

SEQ ID NO: 172838 - DNA, 122 bp, Homo sapiens
aggccacgctgctgccatagttgaagtcgtcctcgatcgaggagcgagggtaccgggggtcggggtcagccatgatggcaacagcacccctaccggtcccggtccactaaccgcaaccgcct

SEQ ID NO: 172839 - DNA, 122 bp, Homo sapiens
aggaagcaaagacgagcatccgaagtctcacccaaaaataactactgctgcgtattatagcgtattataattggggaaacagcattccaaacttctctccatgcacaggtaagtagagaaac

SEQ ID NO: 172840 - DNA, 122 bp, Homo sapiens
gcatccctccctccaggcagcccgcagtggagcagggatgcagagctgcggtcaggccaccggtgtcctcgtccatcaatcgctaaccaggtaggtgagccttgggccagggcccccagcct

SEQ ID NO: 172841 - DNA, 122 bp, Homo sapiens
acgctcacccctgaaggccagcaggaagtcacctaagccctgatttacatggaagccatccgatacgtgcttatgggccaacgactcggccgcttagaagaccatgaccagttctaacacta

SEQ ID NO: 172842 - DNA, 122 bp, Homo sapiens
ctagaagttcacattgaatttcgatgaaaacgactcgcttcccttccatccaattgcttgcgactgtcttacccgatctttccctttccttttttcccacccgttagccctccggaaagagc

SEQ ID NO: 172843 - DNA, 122 bp, Homo sapiens
ggggctggcctaggcatccagggtctcactccacccccagaaagatcacagtttttttaccgggtgtggtggctcactcctgtaatcccagcactttgggaggccaagatgggcggatcacc

SEQ ID NO: 172844 - DNA, 122 bp, Homo sapiens
tcaggggttctgtcctggcctgcgtccctggatcatccagcctgtgttggggtggggagccgacctcgcccttcttagccggggctgacggtgagcgtcccacttccccaaaggcctaaccc

SEQ ID NO: 172845 - DNA, 122 bp, Homo sapiens
tgctgtgtctttggagaaattcatatcttcaaaaataaccccatgctcactttgtcctatcgctggtagtaaatgtacactttatctcctctttctctcctctctcctcctcttccaggctt

SEQ ID NO: 172846 - DNA, 122 bp, Homo sapiens
acagaagtttagattggtacagcatttttagaaagcaatatagcaatatgttatcaaatacgcaaatcttaaaccactgacacagtaatttcacttttggggatctatcctttttcttctct

SEQ ID NO: 172847 - DNA, 122 bp, Homo sapiens
ggaggaaaagagagggaggaaaggcagggagagaggaataaaggcggggagcaggcgagacgagagcagctccgagaagcagtgtgcgcgccgctttcccaaatcttgcagcccagcgagcc

SEQ ID NO: 172848 - DNA, 122 bp, Homo sapiens
gcgcttcagcgggcgcagggcggcccctggaggagccccaccgcttcccggaagggcccgcgtgccatctggcctccttcattgacagaagggaacgagggtctgagtggagaaggcacctg

SEQ ID NO: 172849 - DNA, 122 bp, Homo sapiens
cactattgagcacttactgtgtgctagcaactattgaaaacactttacacactgaatcctcgtaataactctatgtggtaagtccttttattgcctccattttgcagataagaaaactgagg

SEQ ID NO: 172850 - DNA, 122 bp, Homo sapiens
gacttgtgttcccagttattcccatctgaaacaaaaaagaggtaacatcagctgtggtgacgcagtcaatataaaaggaagggcctgggaaatgctcacacagtttcctatgaaatactcat

SEQ ID NO: 172851 - DNA, 122 bp, Homo sapiens
cttccgcgcagtgcctgggggccggtcttggggacagtggcgtggtgcccctgcctctcccgtcttccacacagacaactgcgaaggtgagaagggtgagcggcgtctagacggcgctgtcc

SEQ ID NO: 172852 - DNA, 122 bp, Homo sapiens
gatgctggcgattgggtaaaagctgtatccgtaagctacatgaaggtttctcaatctcggcgctattgacattttggactagctagttcgttattgtaggagatcgtcctgtgcatcgtagg

SEQ ID NO: 172853 - DNA, 122 bp, Homo sapiens
cttcacactgagatgaccctgtccgcatggtgtgtacatgggcaatatcacagctcagcgcgcagggagcacgccacacagggtctacgcagcctgtctgcgtgtcctagcgcttcactctt

SEQ ID NO: 172854 - DNA, 122 bp, Homo sapiens
acccacgcggaagccggagcccgtgagcgtgtctgtgctgtggccgttctctccgatgagcgtcatgttggagccctgctgacaactgtcccgacactggcccttgagacaggtccgcttgc

SEQ ID NO: 172855 - DNA, 122 bp, Homo sapiens
ggcttacacctgtaatcccagcactttgggaggccaaggcaggtggattgcttgagctcacgagatcaagaccagcctgggcaacatgacaaaaccccgtctctactgaaaatacaaaaatt

SEQ ID NO: 172856 - DNA, 122 bp, Homo sapiens
tttgagggcaccggcgcggtaggtcacccgggtttcgcgggccgcaagctcggagacgcgcgtgtcccgcgttggctgcctgacccggaatggcgcagccccttcgcctccagcgcgctggt

SEQ ID NO: 172857 - DNA, 122 bp, Homo sapiens
cttgagcggctccctggccggtgcggaacctgcgggctaataatctagcgaccgggagaacgccaaacatccctggactagaagttgcaggggaaatcaaacagcccagaaagtttattctc

SEQ ID NO: 172858 - DNA, 122 bp, Homo sapiens
ccgcggctgggaccccagctccggccccggccccggctgcgagctgcgctgccgtcccggcgcctctttagcaggggagctgcacagcagctgccatgttgctacaaactgcatcctgggag

SEQ ID NO: 172859 - DNA, 122 bp, Homo sapiens
agatgccctgtagaatgctaaaatggctactcaggaagatcagtagtgctcaggatggaccgaaaaaagttttgccaagagagatgaagtctctcttcgaagcctgtgtcttcatgtgtgca

SEQ ID NO: 172860 - DNA, 122 bp, Homo sapiens
ccgaagagacacgaaaatagggcgaaatagaaaatcccagccatggttcgccggtgccaacgctgctcctgccgcttctatcccagtggaataaatgcttaagttaggagagcagcgggctg

SEQ ID NO: 172861 - DNA, 122 bp, Homo sapiens
cccacgaccgctgcatatttccattttagaaaaacacggcaacaacaactcaaaccaaatcgttcagaaatgagaataaagaagcaccgacaaaggaggcgattgctggggccgctcggggg

SEQ ID NO: 172862 - DNA, 122 bp, Homo sapiens
tgtctgcataagcagaaaccaacttgggcccaaggaagccactcgtgttcggcccctgcacgggggaaagcacccatgtctgctgtgccaggctgcctcccctcagctggtcctgacgagct

SEQ ID NO: 172863 - DNA, 122 bp, Homo sapiens
tctccgccccgcccctccccgctccgccccgcccctccccgctccgcccccgggccgccccgccccgcaggctcgccattcccgggcaggccccgccccctgtttccgctggcggcggcggc

SEQ ID NO: 172864 - DNA, 122 bp, Homo sapiens
cactcgcgtgccagctgccgtggtgggtacgccgtgtgcagctccgcagagcagctggtgcgtggtccctggggcaagtcggccggcggaatcccacctccacccctcatcactctggcaga

SEQ ID NO: 172865 - DNA, 122 bp, Homo sapiens
ggcgtcgcttccacagcgcccggtacagccacaactggcctcagggcgaggaggcttctgcgtccccatcccgagacgcgagccggtgcggagcgggacggggctggaggagactgcgcctc

SEQ ID NO: 172866 - DNA, 122 bp, Homo sapiens
gcaagacccaccgccagaggttggtacctcctagagaacagcgaagcgcatcccgagggccgccggccggaagcgccctccagacccgccccctgccctccggagccggaagctgggcatct

SEQ ID NO: 172867 - DNA, 122 bp, Homo sapiens
catcctcttccccaggaagcccttggcccccaagaagggagacagttctgctgaagaactcgaactggatactcagctgacaggaccagaaatgcccatcggcaatgtctacaaggagaaag

SEQ ID NO: 172868 - DNA, 122 bp, Homo sapiens
acccccaggccttggggaaacttagggcggcgcgcgctcccaggtcggctaagaccggagcgaaccgacttgcaaaaccacaagggcaactgatgggataaaaagagacacccaaagccata

SEQ ID NO: 172869 - DNA, 122 bp, Homo sapiens
gaggttcttacaagaaggctgcgttccgggagcggcccctcccactttcccggtccgcggcgttacttacaaggctgcaacttgaccgggtgcaacttcctagcgagcctccgccccgcccc

SEQ ID NO: 172870 - DNA, 122 bp, Homo sapiens
agggtctgctgctgaaatttgggggcaaataaccggagtaggtttgttcctgtgccttggcgagtcgccggtgcgtatcggagtctctgccagccattgatttctacgggtttcaagaagag

SEQ ID NO: 172871 - DNA, 122 bp, Homo sapiens
ctgctgaatgcatgtcctcatccttgtataaagatgagtgcttgaatgagctgggcagagcgacacaaagtgcccggcacaaggtaaaggttttgacaatagaggcagggccttcctcccca

SEQ ID NO: 172872 - DNA, 122 bp, Homo sapiens
cctggagaggagaaagtgagagcaagctgggcccggcctaccggccagcacccaccctcacgcccagcagctccgagaacagccccagtggagacggaaatccctgcgggggccgccagctg

SEQ ID NO: 172873 - DNA, 122 bp, Homo sapiens
ctcccctcgatggcgaagcggccagggcgtgacctaccagagccacccagccaatgtatgcggcagcccaccagaacctgggcccgggatcaccctaggttaaaaataatgttctaataaat

SEQ ID NO: 172874 - DNA, 122 bp, Homo sapiens
acatttctgcaggtacattccgggcagcagaagagctgctgtccatagctgatggatggacggccgggcgtggagggtaggggttcctctaggggcacaaaatgagaggaaaggccaaggct

SEQ ID NO: 172875 - DNA, 122 bp, Homo sapiens
gaccagcacttactgggaattcctcattcatggggaaaaattgcaatccctgatcaccatcgccaatgaggttcaacaggttacccacatctgccacatagggtaggcacacgctgagccag

SEQ ID NO: 172876 - DNA, 122 bp, Homo sapiens
cccgagctgcagactctgcaggacatcctcggggaccctggggacaaggccgacgtgggccggctgagccctgaggttaaggcccggtcacagtcagggaccctggacggggaaagtgctgc

SEQ ID NO: 172877 - DNA, 122 bp, Homo sapiens
aaactggggcggagcccagggatgaacgacagcgccagtcaccaactggtacggggcaagcgggaagagctgggtggggcggccaggcagaggcgaaccctcacgcccccaggccccgcccc

SEQ ID NO: 172878 - DNA, 122 bp, Homo sapiens
ctctggcagttagccaagaggtggataagtgccccaccttagaccagtacaccataagagcgtttgccgacgctctggagtcgccccatggccctttctgaaaacagtggcatgaatcccat

SEQ ID NO: 172879 - DNA, 122 bp, Homo sapiens
cagagaaggagaaagagagagggagaggttggggggggggagagagagagaaagagagagcgcgagagataacaaggtaaccattttaaaggctggggaagtaaaaggaaacttgcgctgag

SEQ ID NO: 172880 - DNA, 122 bp, Homo sapiens
tctgtctcctggagtcctatgtaaggagtaagagatagagggcagaggctcccccttttgcgctccaatgtcttgccctcataggaaaatctgagctgctggacacaacatatcaacaatgg

SEQ ID NO: 172881 - DNA, 122 bp, Homo sapiens
ggtcgtcacccctggaaaccggcatcatgagacactgccaggcttcttcacggaggggcccgggcctctgcgcccggggcggcccagcaacccctgctcgcctccgcagaggccttttgtcc

SEQ ID NO: 172882 - DNA, 122 bp, Homo sapiens
gacgcttctgatggtgtgatgtgtggtgagattagtgctgtggtcacgtccccaccgtcacgtctccgtttttataaagtgggtccctgggtatgacgtgatgtcacatgaaatgccttatt

SEQ ID NO: 172883 - DNA, 122 bp, Homo sapiens
ttttattcattttttgaaaggatgatacattcacatagtccacaactcagaaggtacagacgggaagtatctcccagccaccctgttgctctctgctgaattttttacaaatccttgcagac

SEQ ID NO: 172884 - DNA, 122 bp, Homo sapiens
cttgagggcagcttcgccagccaattagggcccttgtcattcgtagagatacagggaacccgagacagagggacagggaaggaaatttagccaggcaagccatcctccatctccaaggaagt

SEQ ID NO: 172885 - DNA, 122 bp, Homo sapiens
ctgagggaacagatggcgcctcggcccgccgtgccggccgcattccttcactctgtcccccgataagtgacctagacagcacacgaccatctggtgtgtggcacgtcctgcgggccccggac

SEQ ID NO: 172886 - DNA, 122 bp, Homo sapiens
ggggcggaggcagaggcggaggcggcacccaggggccggggcaggggaggccgggaccatcgcagtgacaatttattttcctgcagcagcggcagcagggacggttgctgcaggttcggggt

SEQ ID NO: 172887 - DNA, 122 bp, Homo sapiens
ggctcgggagcaaccttgagcgcggtcgcggaggcagtgatttaggtgccggcaccggagcgtgaaggtaaatggccacatttcaccgtcgggaggtgagccggaggcgcccgccctggccc

SEQ ID NO: 172888 - DNA, 122 bp, Homo sapiens
tttcagcgatttgagtaaccaggagctcagtagagtaattgagcaagctctgagcatgcacgggatcttgggtgtgaccaagttggacctaaggagaagtggtgccagttgggcatgagggc

SEQ ID NO: 172889 - DNA, 122 bp, Homo sapiens
gtccgcctcccagcgcttcagactcaaccacaatattcaaacccaagccactttcctcagcgcttcgtttcattggctgccgctcgcgtgatgtcatcacgtcggacgctgtcacggctcgc

SEQ ID NO: 172890 - DNA, 122 bp, Homo sapiens
acggaggaaccagggtaggaagggaaggatgcgagtgggacgggagagaaacggggctggcgcctgaggtctgaagtgggagtatgagtcgatacagtgaagcactgaggatgtgggggaga

SEQ ID NO: 172891 - DNA, 122 bp, Homo sapiens
aggagttcctaaatggtattcttaacagttctataataataatcaacactaggtaattgccgtttacaaattcaaactttccaagaaaaccaagttggtgtctgatatgacacgttaaatga

SEQ ID NO: 172892 - DNA, 122 bp, Homo sapiens
cagacattacttttgctgtaacaaccattcttagctacctgaacaaggcctcataatagccgggggaaaagggagtatataacaggctatgacctaaaaggcctgctatatgttttagctat

SEQ ID NO: 172893 - DNA, 122 bp, Homo sapiens
atacaaatagtttaaaaactatattgctgaggaaaacatgatgaaaatcaaggaagtcatcgcaatatgaattaaggtaaggctaaatttcaggtggcagaaagaagattgagaagggagga

SEQ ID NO: 172894 - DNA, 122 bp, Homo sapiens
aggaggaggtgggaggcccagccaggctggagggtcagaacccgtggagctagaagagcccgtaggggagccccaagattgctgagaccagtgaccttcggccccagatggccttgccttgg

SEQ ID NO: 172895 - DNA, 122 bp, Homo sapiens
gtgctgagcgctcgtcacctggagggacttgtgcctctctcagtggtaggagaggggctacgtcttcctgccacggtcatgattgagaggcaatgggtggcgagcctacaggggacgtcgtc

SEQ ID NO: 172896 - DNA, 122 bp, Homo sapiens
acaccaagccacctcgcttctcacctcgctctaacaaacactccatggtgttgtgcacaacgatttgggtttcatctggttcggcctgcacgttagtcacagggtcagcgtctcgtgggttc

SEQ ID NO: 172897 - DNA, 122 bp, Homo sapiens
gttgtgggcttggagcttagagcatgcgcagtaacaggagcctcacggattccctaactacgctgacccctacccttcacatcagcgactgggttcatgcagaagtaaactgactgtagaat

SEQ ID NO: 172898 - DNA, 122 bp, Homo sapiens
cgtggacagaggagggggagctaggagtcggggagtctccgtggcgcgcgagctgtgggccgcgcgctcgggggccacgtgaccacggggaatctgggaggggtgggagtgagcgcgccaag

SEQ ID NO: 172899 - DNA, 122 bp, Homo sapiens
tggggtggggtggggtggggtggggtgggatggggtgggcttgggacagagttggggaatcgactttaattaacctggtcagaggccaggctgagcaaagacctgaaggaggccaagccagt

SEQ ID NO: 172900 - DNA, 122 bp, Homo sapiens
cgagcgggagatgtgcggcgagtgcagaagggcggacccgggatgtcccgggttttcgagcggggagccgcctgctgaatgcccttctgctgccctccgttcccgcggctcccctaggagcc

SEQ ID NO: 172901 - DNA, 122 bp, Homo sapiens
gcctgagccttccccccgcgccccccccggccccccccccgccccccgtgggctcctgtgcggcccaagcctccccgatgagcgccaccccctgctccaggcgcccagtcccatcgaccacc

SEQ ID NO: 172902 - DNA, 122 bp, Homo sapiens
ttttgcattactcaacattatcttacaagatatccaactttaaataagggacaagaaaatcgatacctatgagatgctcactgttttcaagtaatagtaatcaatctgtttttgaatcctac

SEQ ID NO: 172903 - DNA, 122 bp, Homo sapiens
cccttaatttggccaggccacagggtgccctgcctgggtgacaggagtgggctgggattgcgagagacgcaggcttcgagggcctggccttggtgattgtgaggggaggagtccctggggca

SEQ ID NO: 172904 - DNA, 122 bp, Homo sapiens
gaaaggggcctgctgtgggacctgatggtgtctcccttgtcaccttgtaagcctggccctcgtggcctttgtgatgcagctccccacagagccctccagccttgggtcctgctgctcccaca

SEQ ID NO: 172905 - DNA, 122 bp, Homo sapiens
ccttggtccctcctgcccccggtgagggctaaaagcaaagggagagaaccagaggcatctcgtgacactttaaactgaagcaaaggaaaggggtggggagaagcagcgctctgagcccaggc

SEQ ID NO: 172906 - DNA, 122 bp, Homo sapiens
gccgcaggaggggtaaggaggtgcacccctcctgctctgggattgtgcgcctagctgatgcgccatgaaacagaaaatgggcgtcctttccaagcaaagaccccgagagaagccagaagatg

SEQ ID NO: 172907 - DNA, 122 bp, Homo sapiens
cagcccgcttgagctcagctccctagctagcacctttacaaaggatggagagacggaatccgcaaacgctatccctttgaataaaggcagccttgttagggaaaggaaagactgtcagtccc

SEQ ID NO: 172908 - DNA, 122 bp, Homo sapiens
tctgtttaagtcacagttgagtttcattgttttccccgaggctggaggcttctagacacacgggagggagggcggacaaacacaccccagcactgcgggggtccaggactcccctgcctgat

SEQ ID NO: 172909 - DNA, 122 bp, Homo sapiens
tagacctgacacattcaacgtctcagggtaacacaccagcccagtggtgtagacctgccacgttcgacgtcccagggtaacgcaccagcccagtggtgtagacctgccacgttcgacgtccc

SEQ ID NO: 172910 - DNA, 122 bp, Homo sapiens
ccctggtactaagcccggagctgccggaggtcatgcagcctttccgcgcccaggtgaaaccgcctttgcaaaatgatgactgaaacagtgaaagagatctaactcagccgactctatcttgc

SEQ ID NO: 172911 - DNA, 122 bp, Homo sapiens
cccgcccagaaatttccgggacacgccccggaagtactgagagggacttccgccccgaggcgaggcctcggagctggttgctgctcacaggcagagaaacgctggtatgcatttgggtgtcg

SEQ ID NO: 172912 - DNA, 122 bp, Homo sapiens
gaggtaagcaaggccccgacggcccaggccgcctgaggtcagccgcctttctcaaaaccgcgtgccagatatttggaagaaagaactgggttccgtgggcctcatactcgcgaaattttacc

SEQ ID NO: 172913 - DNA, 122 bp, Homo sapiens
tgggttgcagattttccgggcaccttcttggtagaaggcaggcgggatctggtttcacggcgaattcaaaaggggcaaagcaacgcggcgcctcctgaattcctggccctgcgaacgtcatg

SEQ ID NO: 172914 - DNA, 122 bp, Homo sapiens
gaaggcaatgagagagacccgcgaaaaatgagaaacaagggttagggctgacgtcttttgcggacaaagaaaaagaaaccaaagtttcctcagaaaacttaagttgcctcacagccgcctgg

SEQ ID NO: 172915 - DNA, 122 bp, Homo sapiens
accattgctgagttgtaaggcaaaccttactctacacacaccacaaggcacaacactctccgctcaagtctctgtctcatagagtgttcagtgacaatcaataatgtagcttcctcccagcc

SEQ ID NO: 172916 - DNA, 122 bp, Homo sapiens
cacccaggacccctccgcactgtccaaccacgggtatcttttgcaccagcttgagtatgacggaccgccatccccccagaattcctccatatcaaagtccagccccagggccaatatttcac

SEQ ID NO: 172917 - DNA, 122 bp, Homo sapiens
cttggtgtctggcggtttccgagcgttggtgtctggcggtttccgagcgttggtgtctggcggtttccgaccgttggtgtctggcggtttccgaccgttggtgtctggcacgcgccaccctc

SEQ ID NO: 172918 - DNA, 122 bp, Homo sapiens
aatcctaggcttagatcaaacagaatggaaaacagatactcaaacacaacatattcacaacgcattcatagcaacactattcacaatagtaaaatgatggattagtgggtacgaatatggag

SEQ ID NO: 172919 - DNA, 122 bp, Homo sapiens
cggggactccacctttgcggtcccgagtgaagctactcaaccttttaaaaaaaacatccacggacgggacgcgatggctcacgcctcaaatcccagcactttgggaggccgaggtgggagga

SEQ ID NO: 172920 - DNA, 122 bp, Homo sapiens
tcacttagtgcccgtgattataaagccatacccagtgtgctgtctaatcttattctttaccgttgccatgaacctgtgtgagaactgtctgatggggcaagaagcagacaggcactcagaaa

SEQ ID NO: 172921 - DNA, 122 bp, Homo sapiens
accggaaggggcggggacgttccccgtgagccttcgcggtgctggctgctcatctgcatacggaagttcggcacattatgaattatttattttcctcgagggaaaaaattaaatgaaaagca

SEQ ID NO: 172922 - DNA, 122 bp, Homo sapiens
gctgctggtgtcgcccgtgtgctcctgcggtgtgggatggtcgcggtgtgggacggtctgcggtggtgtcttcgcgttccccagggagtgtgccctgtgcatctccatggtacctgaagtcc

SEQ ID NO: 172923 - DNA, 122 bp, Homo sapiens
tcaaggctgcgccccctggttgccttctaagagccaacccacatctgctgcaccggagcccggtgagcacgtgagccatgctgttcaggagcctccagccgtgccctttacaccgcagccca

SEQ ID NO: 172924 - DNA, 122 bp, Homo sapiens
ctctgcctgctctgtttcccgaccctgctgctggagcacgcagccctgcagtgaccccgtcgcatatgcttgaacaatattctagagcaccatgaaagactcaggagggtaaagcactagcg

SEQ ID NO: 172925 - DNA, 122 bp, Homo sapiens
ttgttattgctctatgctatgtgttattctaagtactttatatgtattaactcatgtaatcgtatttgctcatagatgatatgcatagtactcccagaactcattaagttggtagtactgtg

SEQ ID NO: 172926 - DNA, 122 bp, Homo sapiens
ctggaaagaccggcagcctctggttcctgttgttgttttttaagtgcgcggaggcgcaggcgaaactcggagtttccaactcgttgcttattttgcaaagtaaacaagcaaatgttatgtgc

SEQ ID NO: 172927 - DNA, 122 bp, Homo sapiens
gcccattttactaggacggaccaggctcggagagatgaagtcatctacccaaggtcacaccgcgagtgtgctgcgggccgggatcggaaccacgacctggtgttgcccccacagggccagga

SEQ ID NO: 172928 - DNA, 122 bp, Homo sapiens
tggctcacgcctataatcccaacttcaaaatcaataaagcgggccgggcatggtggctcacgcctataatcccaacttcaaaaccaataaagcgggccgggcgcggtggctcacgcctataa

SEQ ID NO: 172929 - DNA, 122 bp, Homo sapiens
tctcagttcccagctaaaccctccatatggtttctttccacttagaaagtgggccaattgcgacattcctccccccatctggggagacagatggacagaggaagaggctggactgggaggag

SEQ ID NO: 172930 - DNA, 122 bp, Homo sapiens
cggctggcgggggcgggaccgcagtgcgggggatgtcgcggggcgaggccagacgagaatcgaatgggacctaggctgagggcctggtcccgcctccagacccaggcgtccgcattggattg

SEQ ID NO: 172931 - DNA, 122 bp, Homo sapiens
caggcagtgttggagggtggcaggatgctcaccttgcgctggctgccggcagtcaagctgcggtacagccggcgcccctgcttgccagcgttccagatggtgaaggccgcccagcggggcag

SEQ ID NO: 172932 - DNA, 122 bp, Homo sapiens
ccgggcctcacctgcacccagcgccagagacgtgagtgctccaacggaggtggaagactgcggagcattgggggcgcggaggggggcggggtggggggcgggcactggaggccaacagcgcc

SEQ ID NO: 172933 - DNA, 122 bp, Homo sapiens
caactccactcgagcgcgcccggtcttatgtaaaggctggcggaggcccgcagccaatggcgcggcagctggagccgggggcccggggtggggggcgccggcgcggccaatcgcggccccga

SEQ ID NO: 172934 - DNA, 122 bp, Homo sapiens
agaaaaactcttccattttacagaagaaacccctgaaattccctcgggcaacatttcttccggttggcctgattttaatagcagtgactatgaaactacgtctcagccatattggtgggaca

SEQ ID NO: 172935 - DNA, 122 bp, Homo sapiens
gctggtgcggatgggaaaggcgcggggtcgagtcagcgtccctctcgatgttggtttcttcgttttacaaataacacttgggcggggcgcggtggctcacgcctgtaatcccagcattttgg

SEQ ID NO: 172936 - DNA, 122 bp, Homo sapiens
tgatgcccagaagcagcctttgaggaaactataaacaaggaatatcaaacagtgcggggtcggttgggggtggtcaagtgggtttctactactgtgatggttctcttactttaacaagcatc

SEQ ID NO: 172937 - DNA, 122 bp, Homo sapiens
tctaggccttagggcttccggtgaccaggataggaagtgttgcaggccctgccccgagggcggcgcattagcttttcccccactgctttcatctacccatctcaccagattcccccatcaac

SEQ ID NO: 172938 - DNA, 122 bp, Homo sapiens
gggttcttggcagagttcttcttgtctgtcaagatgctctcctgaaaaccagccaggctccgggggctgcaggaatcagatagatacttcccagctgtggacaaaatcctgtaatgaaagga

SEQ ID NO: 172939 - DNA, 122 bp, Homo sapiens
aaattaggagtcccgtggttccgggagctcaaaccgaatggtgtttttaccgctgcctaacgctagagagagccctccatcaaggtttgaaaccgtcaacccctttctcgcccctcccctcc

SEQ ID NO: 172940 - DNA, 122 bp, Homo sapiens
atccagagcgccctggccagaggtgagcaggctcagcagaccagcaggcggggacgccgtcgccgtcaccaccagcacagccagaagcagccccagctccagcgagaccagggacgccatac

SEQ ID NO: 172941 - DNA, 122 bp, Homo sapiens
catgactaagatttgaagcaacccctaagctccctgctcaacaactagaactgtggtatgcgcaaaccattacaggatgtgagattcaaaccactaacagaagacctgattttggattgcaa

SEQ ID NO: 172942 - DNA, 122 bp, Homo sapiens
tgaggcctgtcctggggtgcagagaggagagaggccgcgctgcctgggatgagcctcgcccggcagaggaggagctgtgagagccagaaatcccattctgctaacgaactaagaccccactg

SEQ ID NO: 172943 - DNA, 122 bp, Homo sapiens
agccgcggggacaccgggaagtgcagcgggccaggcaggctgggtgggagggaggagggccgagacaggagcagcccacccagcagaaatacaatccgagctacaaagcatgggaaaaagag

SEQ ID NO: 172944 - DNA, 122 bp, Homo sapiens
gcagggaaaacacacgcagaggagaattggaattggcttgcgtgggggtatgagataaaccggctttgttgtcatcctagtggacgatgctagtgcgttaggggtgaaattggaaaaacatc

SEQ ID NO: 172945 - DNA, 122 bp, Homo sapiens
tcccccgatatctggtgcccagcatggtttttctttttttcctaagtgcacgtgggaacccgattccctttggtaggtgcggagaaatgtcatcggttcggtccacagaaatgcttgttcga

SEQ ID NO: 172946 - DNA, 122 bp, Homo sapiens
ggcagaaccactgtagaactcctaaaccccacagaacaaacagtacattctggaatgatacgccggccaatccggctggcagccgattgacctgacccaggcgagggttgctgcaccgagta

SEQ ID NO: 172947 - DNA, 122 bp, Homo sapiens
agaccccgacggagggccgtggtgaacacacactcctcggccgctttgtactcacatgcacgccagcctacatatgcacttccccccgagtgacactggccaccgagaactgacacacgcgt

SEQ ID NO: 172948 - DNA, 122 bp, Homo sapiens
tagttttgtgaataccagtaacatgcaaagggaccgttttctggaggagagtcaccttctcgttgaaccaggcctccgcgtccctgcggttctgctctgcaagggcttcgtactcagctcgc

SEQ ID NO: 172949 - DNA, 122 bp, Homo sapiens
ggccttcctctggagcggaaagggacagcagcatctggccgaggggagtgggagaggagccggggctctcgccactttgcaacagccgtccaatccggtgccaaggggagtgggggaggagc

SEQ ID NO: 172950 - DNA, 122 bp, Homo sapiens
ccgccgcggcccggggctcggcggtccagtcttctgcccgtggcgcggctggagcggcggcgtcggcaacaggcaagcttaaaggaaaaggagatgatcgtgtcaatcgcccgcccgcgggg

SEQ ID NO: 172951 - DNA, 122 bp, Homo sapiens
cggcccccacacagtcaccgttcggggccggttgatctttccccccggagctcccatagtcgcgattccactccagttcacggtccgtacttccgctcagcgccggatccgcggggctccgc

SEQ ID NO: 172952 - DNA, 122 bp, Homo sapiens
caggtcctcgtttctcccagcgctgccctccccatctaagcccaagtcgccgtgagcccgcgctgcccccttgtggccaaagccctccccagctcaggaaacgggaacgcttggcggccagg

SEQ ID NO: 172953 - DNA, 122 bp, Homo sapiens
gggctctagcccctcagcaggcaggtggtcggagttgctaaacaccagtcgccagccccacggccatgcccgtgtggccgccttagagggaagccacaatcctattaccagctgcatcatta

SEQ ID NO: 172954 - DNA, 122 bp, Homo sapiens
caggaagtgacgtaagcccgcctctctgcccggaagaggcggttgggaggcggagcccggcgcgttaacccttctgctgctgcgtgctcgccgcggagtttcccttgccggcgactctctgg

SEQ ID NO: 172955 - DNA, 122 bp, Homo sapiens
gccagtatggggcaggggccgcgcccctcagggcctacgccgggcaggaggtgggcctggcgaggcctactttgggacgctttgggccactttgggccacatcgaggaaggcagcttggggc

SEQ ID NO: 172956 - DNA, 122 bp, Homo sapiens
ggcggccctcaaaccagcaccccctcttcctgacagcacaggcactccccccggggcctgcgccacagtgagaccagctctatgcagatacagctctgtcctgtgagggggtgagacacagg

SEQ ID NO: 172957 - DNA, 122 bp, Homo sapiens
ggaccaggtttctctgttaattgctgttctgccacaccttatgtcatacctggcacaacacgggcactcagtagggatgtgttgaatgatgtcaatgaacaaagcagacacctatccctctc

SEQ ID NO: 172958 - DNA, 122 bp, Homo sapiens
acatggagttgccgaagtgggcgtaggagtcaaagtagtaatctttggacgtcatgccctcgacgttcggcttctcgctgctttccgcctggccacaggacacctccatgatgcagttcacg

SEQ ID NO: 172959 - DNA, 122 bp, Homo sapiens
aggaagaaaaataaactacagagtaaatgctctattaataactactcagtgtaagaacaacgtggaaagatgcatgttgtagatgacataagaattatgtcattaattgacagtgttgctta

SEQ ID NO: 172960 - DNA, 122 bp, Homo sapiens
agtttcaaacatttttcctctccttaaattcccaaggtgggatgcccttttctggcactccgtctatgaaagggacagggaaaagatcttatagaaactgaaccctgacacggggcttattt

SEQ ID NO: 172961 - DNA, 122 bp, Homo sapiens
tgaagttctcaggatccacatgcagcttgtcacagtgcagctcactcagcttagcaaaggcgggcttgaggttgtccatgtttttaatagcatctccaaaggaagtcagcaccttcttgcca

SEQ ID NO: 172962 - DNA, 122 bp, Homo sapiens
agccagccggaaacggaaccgggctggcggcggtgggcgggacaaatcccagctgagaggcggaaggaggtggggcctgggaagactgggttgcaacggtcgcgagactcccctcgccgtag

SEQ ID NO: 172963 - DNA, 122 bp, Homo sapiens
tccatctccagggctcaagccattctcccgcctcagccacccgcgtagctggaccacaggcgcgcgccaccagatctcagttctctcaacaggactctcattgctaagatccaaggatccat

SEQ ID NO: 172964 - DNA, 122 bp, Homo sapiens
cacgagttgtatgattccgagtgcacgaatgtccaggacaggcggatccagagagatggacgagattcgtggctgcttagggcggggggaaggggtgatggagagtgagggctgagtggatg

SEQ ID NO: 172965 - DNA, 122 bp, Homo sapiens
ctgccctgaactacctggaattggtccagaccccacaggtcagggactcagcccacaagacggccccgcacttcagatgccaatcacagatcggggcctccagtgcgtctgactgactggcc

SEQ ID NO: 172966 - DNA, 122 bp, Homo sapiens
tgcacagactatttcccatacaggcgcgctcttcaaattaccaaagatattttcagctttcgtccatttactgatctattcatttatttatttattccacaaatatttattgaaagtccatt

SEQ ID NO: 172967 - DNA, 122 bp, Homo sapiens
ccaccctctcagtgaaggttaagaagtggggaaaaggcctttccctccacggacgctgtgcgtgccctgctggagcagcaagtacccacagtgcggtagcacggagaggaccactatctgca

SEQ ID NO: 172968 - DNA, 122 bp, Homo sapiens
ccccccgcccccagccctccccagctgggaaccacccactgcccctgcacaaagaatgggcggaaacaggagttcaccccgtgccatttctcactggccgtcggctgggccggacctacagg

SEQ ID NO: 172969 - DNA, 122 bp, Homo sapiens
cgccccacccttcccgggatggttggaatagttggagcgggagactagggcctccgctggcggcgggagcgggacgggcggaggaatgcgagctgaggaacggaatcaggttctaagagtgt

SEQ ID NO: 172970 - DNA, 122 bp, Homo sapiens
ccgctgctcccaaggagccctgaccgaggtctgaccagcaccacagccccgcgagacggccgtccacaccactcggtgcacatgtcctccaactccagcgacagcttcttggctgcccagtc

SEQ ID NO: 172971 - DNA, 122 bp, Homo sapiens
gcatctttgctggcttctaccgaaacaccatggatccagacgtggttttgtggtcctgcacgtggaagccagccctgcgtggggtgagcctgggactgtgggcagagaacctcaagcaccgg

SEQ ID NO: 172972 - DNA, 122 bp, Homo sapiens
agacaacagcataagggaatggaacatgaaggtaggggacacttttagaataagatgatccgagaaggctcctctgaggaagtgacatttaacctgaaaccttaatgatacgaaggatcaaa

SEQ ID NO: 172973 - DNA, 122 bp, Homo sapiens
cactcttctgtgcctttcctctttcttctacttccttctcttctcagctctggcctctctcggtgggatgctcttcagggtaaaagtggaatctctggttagctaagagggcaagcaaagtc

SEQ ID NO: 172974 - DNA, 122 bp, Homo sapiens
ccttgcaatcagatccttgtcttctaaaacctgccacacctaagagcgctgcctgaaggccggtttggcctgttgactcctggttttgactgttggtgatttaagcgattggaactggaagc

SEQ ID NO: 172975 - DNA, 122 bp, Homo sapiens
tgtcaccctctcccccttttcctcaccaagctaacgaaggcccaggtttgggaattttctcgggggcaccaaggtgagagtggtctttccactgctactggccagaccagaccagctcctca

SEQ ID NO: 172976 - DNA, 122 bp, Homo sapiens
ggcagtcagtgctgtgatgatgctgtgaatattagcattgttggggatggccactacttgcgtgttgggcatggtggggtggttaataatcttgatcccagctggaaacttgcaagagttgg

SEQ ID NO: 172977 - DNA, 122 bp, Homo sapiens
cgtgatccacccgcctcagcctcccaaagtgctgggattacaggtgtgagccaccgcgcccggcccacagtacagttttacaaagaaaggtgtagctccaggaaaggaaaggaataaccttt

SEQ ID NO: 172978 - DNA, 122 bp, Homo sapiens
ctctcagccgggcctctcacccaccccgctggccgcagccggaggctgccacgcggacaccgtctcaagcctctgagcattgctctgagcctctgcctgcaatgtccttcctctgtcatctc

SEQ ID NO: 172979 - DNA, 122 bp, Homo sapiens
ggggctgaggcgcagttccctactcacccaggtccgaatccaccgcggtgctgtttccagcgagtcagattccagatcgcgctccagcctggactcggaattcctgccccgcgggtctgcat

SEQ ID NO: 172980 - DNA, 122 bp, Homo sapiens
agcagctcagagcaatgcggtggtcaggaaaggctccaacgacttcgggccagagagggacgggtttgcggggtgaagaaaggggtgatgggcttcagtgcttcagacagcagtgtgcagcc

SEQ ID NO: 172981 - DNA, 122 bp, Homo sapiens
ctttctagcctaaaaaataggttagcatagatgagtagtcccctatacagagcatgtaaacgttaaggtatcatataccaactctaaaactccatgagtctaataagcattctaggatatct

SEQ ID NO: 172982 - DNA, 122 bp, Homo sapiens
gctgggataaaactaagaggctttgtggggaaatcatacaaactaaattatagaggaaatcggaaaaaatcaaattgttggaacacaagattttgtatgttttgctgcaatgccactgacaa

SEQ ID NO: 172983 - DNA, 122 bp, Homo sapiens
ccaatcgctgccctcctcgccccgtccgtcaccaggcgcctcatcccgccgaccactgtgcgcccagtccctgggacgcccagagaacgcggagccacaccctcggtttcctgggcaacgcg

SEQ ID NO: 172984 - DNA, 122 bp, Homo sapiens
agcaatatactgtttattaatgtttcctcccgtttcacctaatggcagcactgtactccacggtgttctggactttgctttattcacttaatatattctggagacttttccatagctgtaca

SEQ ID NO: 172985 - DNA, 122 bp, Homo sapiens
gtgtgtgtgtgtgtgcgcgcgcgtgtccctctctctccccccgtctctcgctcgcccgctcgctcgcgctccccgtgttgctctcaaggacgaggtgaaatccctttgctggtcatgaggcg

SEQ ID NO: 172986 - DNA, 122 bp, Homo sapiens
tggcttttctgaacttcacactgagtgtagtgactgtgtgtctttgttttctccttccgtcgcccgtgggcacgcagcacgtgtggagtgagagcgaggactgcctgcctttcttgcagcta

SEQ ID NO: 172987 - DNA, 122 bp, Homo sapiens
agggtgcaggtcaggtgctcgctctgttcctcaacaggagttgtttcccgcagcccctgccgccttggcttcgttagcattcaacagcaatttattcctctctcgctgccttcttttgtgca

SEQ ID NO: 172988 - DNA, 122 bp, Homo sapiens
cattcacgtgaatggagtcctgcactgtcgggtgcgctacagccagctcctggggctgcacgagcaggtgggactagcacccctgccttgagacagcttcaagcccttccctacacgtggac

SEQ ID NO: 172989 - DNA, 122 bp, Homo sapiens
ctcctcctgcacctcctgcagcccggctcccgcggccgcgcctggtgcccctctgtctcgcgccacctgagatgcccaggctggcctctgccaggggcttagtctgccctctcctggggctt

SEQ ID NO: 172990 - DNA, 122 bp, Homo sapiens
agacccagtcccaatattagtgagtttataacgtagtcaggtcttcagaaaaatccccagcggggcctgttgagcataatagattgtgatcactgttcttgagcaatgtgtgacaacctggg

SEQ ID NO: 172991 - DNA, 122 bp, Homo sapiens
ggaggagcacggcgtccagggcgtggagagcgtactggaggagggcgtcctagaggaggtcgtattggaggcatggggctgctgcagactttggtgcggcagggggtgagcattgagaagac

SEQ ID NO: 172992 - DNA, 122 bp, Homo sapiens
ctgggttgtcacggagacaccccaaacatcgagagctggtctgggcagccggccaatgcacggctcccatcactgccaggctgtgatctcccccttgtccccttgtggccatcagcctgaac

SEQ ID NO: 172993 - DNA, 122 bp, Homo sapiens
gcttggggacacctacctgtctaaaaaaagagaaaacggctgaccaatttgagacattctcggggaaggctttcctgatgcccagatgtggcaatttcatgaaaaatatcacaggttttcct

SEQ ID NO: 172994 - DNA, 122 bp, Homo sapiens
attacaggactgagctaccgcgcgtttcttgttctttaacttattctacaaacattaatgcgtactcactgtgtgccagactgatcctggctcaagctgctggcacgcagcttcccataaat

SEQ ID NO: 172995 - DNA, 122 bp, Homo sapiens
gatgacagttaggtagtttcgtacaaaattaaacatactcttaccatgtgatacagcaatcgccctccttagtgtttacccaaaggagctgaaaaccagtgtctacacagaagtttgcacac

SEQ ID NO: 172996 - DNA, 122 bp, Homo sapiens
cgggttgagttctggagagactgctccaatccccgaggcggaaggaggcaaccgatttggcgcagcactcagccagggggtagaagctcaggggaggagccgagcctttctcctgtccaaga

SEQ ID NO: 172997 - DNA, 122 bp, Homo sapiens
aggctgttccctgagctgcctctgctgctgggaaagtgctgctgtcctgggagacggctccggctgctgacttcctgaggccccagcaacctggggctggctgaggtctggtggggcccctg

SEQ ID NO: 172998 - DNA, 122 bp, Homo sapiens
taagtaagattagagtgagtgtgctctgttgctgtgatgctgtcagccacagcttcctgccgtagagaatgatagagcagctgctcacacaggaggccggatattctgagaagcagctttat

SEQ ID NO: 172999 - DNA, 122 bp, Homo sapiens
ctcccgatggggtgtagccaatcagggcagagatgggtggggctaggctgcgggaaggggcggactgcagctgagttggctccaaagtgtgggactcagccaatcggaaccgtgcagggcgg

SEQ ID NO: 173000 - DNA, 122 bp, Homo sapiens
tcacctccggccagcatgctccccctctgacaagagaagagcccttcctgagtggctccacgtcaggctgccaccagcaccccccagcagcagacacaggctgatgccctgtccttgttctg

SEQ ID NO: 173001 - DNA, 122 bp, Homo sapiens
aagacaagagtttattgttactttccactacaaccaggtggactgtacctgagagagaagcgggatgagaataaaagggagggactcccatctcccctagaggagcgatggcctcctgttac

SEQ ID NO: 173002 - DNA, 122 bp, Homo sapiens
atttgcatgtgttgtttctagtgcaattctgaaggctgggaatgttttcatcactttatccgaaaagattcaaccaaattgtttcctcataaggaggttgatccatttgcgtcatgcaaatc

SEQ ID NO: 173003 - DNA, 122 bp, Homo sapiens
ctgagaaagctggttttgcagcagccctgctgaattgcttgcacagtaacatgcacagcacgccctggccatctgtacatgtgctttcaattgtgctgggagtttcttatgggaaatgtgtc

SEQ ID NO: 173004 - DNA, 122 bp, Homo sapiens
cactcatgcatcctctatgtggcttttgtgtctgtctctacctctgctctcaattacttacgtgtgtctgtgaggagtgtggagctctgctgatgggcctgtgcctcacagccccttccatc

SEQ ID NO: 173005 - DNA, 122 bp, Homo sapiens
aatcaataggcatgggagtcagcttctgtattttatatccttagaatgctacatgaaacccgttcgcaagcagcagcatcttctttagcccgtaagaaacctctgtgagttacgtactatca

SEQ ID NO: 173006 - DNA, 122 bp, Homo sapiens
cggagatttctctggccgtggggagacgtgggctcggtcagggaggttccctgtcaggcccgccgacccgctccgcccccggagaggacgcaaggccgctgcgcagggtggccaggcaggcc

SEQ ID NO: 173007 - DNA, 122 bp, Homo sapiens
catcttaaggtttgtcatacaaagtgaatggcctcagcatcctcaggactctgaataccacgattcctggctgttttgctaaggcaaacaaaagacctttttacacattcaccctagggcaa

SEQ ID NO: 173008 - DNA, 122 bp, Homo sapiens
acgccccccaagcaaccattggtggagacgccaagttagacccacccctttccttacgtacgaaaaatcagccggtagtattagcgaagtcgcctgtcattcctccgccctgaggcgttgct

SEQ ID NO: 173009 - DNA, 122 bp, Homo sapiens
gcagaggccatgtgagtggtggtactcgcagcacaggtggtatccggcaggtagggagcacgggggaggaggaatgtgcccggggcctgggcaggatgccagtggacagtcccagcagcccc

SEQ ID NO: 173010 - DNA, 122 bp, Homo sapiens
ggggcggggtaacagggggcgtggttccggggcgctggcactactcccggctccaggacccggttccccgtctatgtcccaaagtccaccccgcctagctccgcgcccaaataccggctccc

SEQ ID NO: 173011 - DNA, 122 bp, Homo sapiens
gggacacattagacagtctcattattgtttgaacatcatagggtatacttacacaaacctcgatggtatagcctactacacacctatggtatacagtatagcatattgttcctaggctacaa

SEQ ID NO: 173012 - DNA, 122 bp, Homo sapiens
gggtttgcccagttggaaaggaggtgcatcgctcgaggcgctagcggcactagccgccgccgccgatgctgtagtcgctgtatccgccatggccactgacgcccgcaatctccggccctttt

SEQ ID NO: 173013 - DNA, 122 bp, Homo sapiens
cccaaactgcagggtgagcacagcgagagaaaaggtggcccaagcagaggcgaacaactgcggttcttaaagccttgtttgagtttgggcccgcgccgagccacagctagaggtagatcccg

SEQ ID NO: 173014 - DNA, 122 bp, Homo sapiens
ggcagcaagtcagtatcacatcagcaggcgtgggccgtggtgagcctctccctgccctcccgctggaatagaaagctgatcccgacgtcccactccgacccacggtcaggaagccgtcctgt

SEQ ID NO: 173015 - DNA, 122 bp, Homo sapiens
agggggagggggaagtgcttccggggaaacgggccggggttggtgtttgtaaacttgcctcggtcccggtgggggcagccgcggcggtggggttggcagggtgtgctggggcctggaggagg

SEQ ID NO: 173016 - DNA, 122 bp, Homo sapiens
ggtcgacatttccgagacccgcaaagcaccggtgggtagggaagttccgtcctccacccacgcattcttctgcctggccgctgaggtggccccatgcttcactcccatgccgcagtgttgat

SEQ ID NO: 173017 - DNA, 122 bp, Homo sapiens
tgccgcgggcaggtagacagctacctggtaaccgggtccggcccaggaggcttgggcgcgcgcagccatcccgggcctcgccggggacctagggacgcaggcaacgcctgcgcccgctcacc

SEQ ID NO: 173018 - DNA, 122 bp, Homo sapiens
gagaccccatctctataaaaatttttagccctcactcgccgccgacgacctgtctcgctgcgtgcacgccctgccgccgccccgcagaaatgcttcggttacccacagtctttcgccagatg

SEQ ID NO: 173019 - DNA, 122 bp, Homo sapiens
gctttctttttcatttaattaaaaaatttaagacagcacccaggctggagtgcagtggctcgatcgcagcgtactgcagcctcaaccccctgggctcaaaagatcctcccacgtcagcctcc

SEQ ID NO: 173020 - DNA, 122 bp, Homo sapiens
gccatttaaaaatcgatctttcctacgtccagcaagggccaattagagatggctgtggcacggcggccccgccccggaactcctcaagagcttcgcccctccttacctatggaaacacagga

SEQ ID NO: 173021 - DNA, 122 bp, Homo sapiens
agttccctgcaatacactgtaatttcctgcagctctctctggaggcttaagaagatgcttcgggtggcagcattactcatacacctgggagttgtgctgtcgtaaaagagaaattgtcatta

SEQ ID NO: 173022 - DNA, 122 bp, Homo sapiens
ctgggccgcggggatcggggacccgtgatctgggaccggcggtttggggtgcgacctgtgcgcagaaaagaccctccccacgccgcccactgttcctcaccagtcagcaggccccagggctg

SEQ ID NO: 173023 - DNA, 122 bp, Homo sapiens
cttcttggtattagcctatacccagatattaggctgatcctcaaagatgagttcaaagggcgcataatctcttcactaggggctggttgagatggtgacatctgaaatatcacagccaaaat

SEQ ID NO: 173024 - DNA, 122 bp, Homo sapiens
gaacgaatgaaccaaggaacgagtgaatgaacgaatgaatgcccgcgaaggacgtggtgccgcgcggtcttctgggaatcgtagtcccctggttcgggcctgtctttacggcgcaggcgtat

SEQ ID NO: 173025 - DNA, 122 bp, Homo sapiens
cttctgtggtgcatgagtgctgtctcgagggcccctggccaccagggcaaagggtctacacgtgcttgagaggtgagtcaagttacacaacaaaatgtctcctggtttgaaccaaagtgaaa

SEQ ID NO: 173026 - DNA, 122 bp, Homo sapiens
cggcccggagcatgctgggagctgtagttcaacccaatggcgacccgcgctccggagcatcgcgcggccaagcgttcagtggccgtgctgggagtagtcagcccagccgcggggagacaagc

SEQ ID NO: 173027 - DNA, 122 bp, Homo sapiens
aatctctctatccttaggattcctgtcttctttctatttccttggttaccaattgtttgacgtgccccaaggttggcttctttcatttatatgggactttgatcgtttagtaaatgctattg

SEQ ID NO: 173028 - DNA, 122 bp, Homo sapiens
gtttcttctcagtgggttcagggcctgggccagcctttacctacctcccccacccaaaaccggcaaaagctcagagcaccttgtctgccaaaagacagggagctgggatggtgcgggttggt

SEQ ID NO: 173029 - DNA, 122 bp, Homo sapiens
tacctctatcatatttagatatgtatatacatgtttatttctcaaggtaggtgttgcacacggactttccttaatttaatatgatgttgtaataacctggggctttatcagtcctatttatg

SEQ ID NO: 173030 - DNA, 122 bp, Homo sapiens
tatacctaatgatgactcaaggtaggggtaccctgactgtgaggaagttggccaacgacccgaacctggaagcctgtcccatttgcttagacagatgcatgtttccccgcaattccctgcac

SEQ ID NO: 173031 - DNA, 122 bp, Homo sapiens
ccctgtgcagcacaaagcgatttctcgcatggcagcctgtctttggtgagcccctttctgcgtttctgcctgggtcctgtggccggctgtcaatggttttcaccccggtaccactttggttg

SEQ ID NO: 173032 - DNA, 122 bp, Homo sapiens
ggggggggtcccctcttctcggaaggatcgggcactgggggtcttgtagaaagggctgcacgccaaacggggtacgccccccgcccggcccgagcacttacccggcgccccacccgcccgcg

SEQ ID NO: 173033 - DNA, 122 bp, Homo sapiens
gccctccaaaaatatggtgccagttcagtctcctgccaaaactatatgcggctgtttccccgcactgctgccaacactggggcctatcaatcatttcatttttctccatcagatgggcagac

SEQ ID NO: 173034 - DNA, 122 bp, Homo sapiens
ccaaagagccctttttccacgcagcccaggggccccagcctcctggcctccacgcctgcgcggctagcggatgaggacgttaatctcggccacactggcctccagcacgttctcggccgtgg

SEQ ID NO: 173035 - DNA, 122 bp, Homo sapiens
gccctcgccctcacccagatccctggcctgggagccgggggctgcgggccacgaggagggcgaaggccccgccgctgcggcgtgaggacggcttcgcacgcgggagcaggcccggcgccacc

SEQ ID NO: 173036 - DNA, 122 bp, Homo sapiens
cctcagtgttaggagcaccaggctccatgagcagccctgggtcctgtgcacaggtcagcccgagccagggctgctacttggccggcagccacagggggagccgttgggggaggcgtgtggcc

SEQ ID NO: 173037 - DNA, 122 bp, Homo sapiens
cgaccaggccaggccaccggcccgcaggagactgcggctgtcggtggacgaggtgaggggcgtggggagactgaggccggggagttgggggcggggagactgaggcccggggggcagggctc

SEQ ID NO: 173038 - DNA, 122 bp, Homo sapiens
ctcgcggtccggtcggtccggcagccactccctgccgcggcccgcccggcctgattcacgcgcccgcccccgccccgcccgtcgctcctgcctcctgcctgcccgggcagcacctgggggcg

SEQ ID NO: 173039 - DNA, 122 bp, Homo sapiens
cctaagctccgcctcccagggcccgcctcctgagcgcagcctgcagcccggactcggccccgcctcccggaccctggacccctccccaagtgggcccgtcctaagttccgcctcccagagtc

SEQ ID NO: 173040 - DNA, 122 bp, Homo sapiens
tccctcactgagtccgtttccaatgggctggaactgcggtcccccgctgttctctgcggccgtctagggatggcgctcctgcctactccggaccatccctgcttggactgaaagcctgggct

SEQ ID NO: 173041 - DNA, 122 bp, Homo sapiens
ggcggcggaggcggaggcgcaggctcttctttaggacctggcgagcccaggtctaagcggcggccccgcgaggcccttgcacggcgccccgggtcgaggccctccccgcctcgccctacccc

SEQ ID NO: 173042 - DNA, 122 bp, Homo sapiens
gtcaactccatggttcagccagtccaatcgcttctctcctaaatatttccctgtaggcagcgagggccttgaacccggtaacacctaatgggttgcaagtcttcgtgttctttgatcacatt

SEQ ID NO: 173043 - DNA, 122 bp, Homo sapiens
caacatttactctttgcctgtacaggagtgattaaaatgttgacggcgtactggcattcccgagctttgtgacagctgccattgccgtggcacctagccgtagagccagggcaggctttatt

SEQ ID NO: 173044 - DNA, 122 bp, Homo sapiens
ggggtcacatgggcagatgggttcttggacagacagatagggtctcaaatggacagatggcgtctcagatgaacagacaggatctcaggtggacagagaggaccaggaatgggcactgaggc

SEQ ID NO: 173045 - DNA, 122 bp, Homo sapiens
ctgtgccgcctcgcgagtcctggagaggcccgcgccggcctcgaagcaaaagacgaccgccgaaacgcgaccgtttaccgcctgctttttccaagcaaaatttggagacaagtcccacccgg

SEQ ID NO: 173046 - DNA, 122 bp, Homo sapiens
ttcccagggatcatcttcatgccgggaacaatccagctgacagcaaaagacatcctctaccggctgcgagcatccaaggccaagtgcattgtggccagtgaggaggtggccccagcggtgga

SEQ ID NO: 173047 - DNA, 122 bp, Homo sapiens
ccgttacagcttttctcttgcctcaggtacccagtgcagtcctgatctccagctctccagcggcttagaacagacacagaatgggccgggaccagggacccaccagagacgtctgtagttaa

SEQ ID NO: 173048 - DNA, 122 bp, Homo sapiens
ttctgttaagggcagagcctcatcttttgtatcctcagtttctccatcttagacctaacgcgcctaatccctttcctagaaggaccagacatctcctggctggggagactcagctgctgaga

SEQ ID NO: 173049 - DNA, 122 bp, Homo sapiens
gtcatttggttaaaagacaaactgcccataaatcacagtaacaaaactgcatctcacaaacggaagcacggcctgtgggcagggattccagggagccccagtccttgaggaagtggggttgg

SEQ ID NO: 173050 - DNA, 122 bp, Homo sapiens
ccccaattgcgcttcttcctcttcagtcctacagcggcttctcacccacactccgtacgccgtcctcaggaaaggcccccgctaatggcaaagccagccacccgcactggccgcgggtcctc

SEQ ID NO: 173051 - DNA, 122 bp, Homo sapiens
cacaggagtgagccattcctggcaaaaacaaaagcctcaccaaggcagagagataggtaacgtaaataaacctgattgaaggggaaccacgtgccggtagtcagcgacaaaacagaccaggc

SEQ ID NO: 173052 - DNA, 122 bp, Homo sapiens
gattttaaaaagcaacaacactttggcttgatattttgtttaaaaacaatgttagccaagcgtggtggctcactcctgtaatcacagcactttgggaggctgaggtgggaggatcacttgag

SEQ ID NO: 173053 - DNA, 122 bp, Homo sapiens
actcaccagctgggtgacttcagacaagtcacttataacctctttttgcctctattttctcgtgctgtaaaatggggacaataatggttccttgcacatataattcttatgatgattaaatg

SEQ ID NO: 173054 - DNA, 122 bp, Homo sapiens
gccgctcaccgtgagttgccccggcttcgcgcctggccaacctcatgccacccagaccatcgggccacactccggagtaactatttcctgatgggtctcggtcaggtctcccagagtctctg

SEQ ID NO: 173055 - DNA, 122 bp, Homo sapiens
tttctgctacttcaactcctttattcttttatttgccgcatattactgtcctcacattcccgcccctgcccatttttagctcttacattggttctttggtcgtatactaagaacctcagatg

SEQ ID NO: 173056 - DNA, 122 bp, Homo sapiens
tcaccactttaaccagggacagcggtgcttgggtctcccacgtggctaactctgtggggccgggtcttgctaataactctgccctgctcggggctgaccccgaggcccccgccggtcgctgc

SEQ ID NO: 173057 - DNA, 122 bp, Homo sapiens
cttcccggtggaagcggcgcagtgaggaatggcaggcttccctggcctgggatcccacctcgggcggctggcaaggccggagccatcctaaggcccttctcttccaggtagggagagtcctt

SEQ ID NO: 173058 - DNA, 122 bp, Homo sapiens
ctaaaagcaaaactagccttttaagcactgcaattgactgaaaagccgttgcaggcataacgaacttctgtcaatcctgctaattcattctgcatgcacagttgagcctcagggtcatgaag

SEQ ID NO: 173059 - DNA, 122 bp, Homo sapiens
aaatcacaaaccagaggcggagtggaaggaggacctagagacatcccagtttactccatgcggctctccaggctagacgtgtgagcagaacttgaaggtttttcggagggagtcacagaggt

SEQ ID NO: 173060 - DNA, 122 bp, Homo sapiens
tactccgtctggctcataacatcttttcgtctgcacgcccaagtttctagagtgcttttacggttaacccgcagagttcctaacacactaggattcactaagctgcttctctcacacctccg

SEQ ID NO: 173061 - DNA, 122 bp, Homo sapiens
agtaccgcgacctcgcccggtcctgccaatggccggcccctagccggtcctgaggcctcgcgagagctcccgtggctacgccttccccggcctcggaacggccccatccttcctctttcccc

SEQ ID NO: 173062 - DNA, 122 bp, Homo sapiens
gttgttttcttccctctcttcctttctgtttttagtggtgcctgccgatttgaaggctgccgaaagtcactttttgttttgggggacggcggctggtgttttgtatggccctatctcccacc

SEQ ID NO: 173063 - DNA, 122 bp, Homo sapiens
aattttaaacactccattcttcacgctcatttctttagttcacaatgttgactgagaagtcggggtaattacaagtggtaataatgcttgataattacatatttgcctctgtttacattgga

SEQ ID NO: 173064 - DNA, 122 bp, Homo sapiens
gcctgtgccctctcccctgactggatcatggctgaaatattacctgctggtggaggccctcgaggtcctacaaaaggaagttatacagagaaaggtcttgttaaacaaacaaccactatctt

SEQ ID NO: 173065 - DNA, 122 bp, Homo sapiens
ttttgggtctctctgaagccactttggaggctgcttaggaggcatatttgcttgaccaagcgatagaaatcctagagaaactcaggcctcagcaaagatttttcctcattcaccaaaaaagc

SEQ ID NO: 173066 - DNA, 122 bp, Homo sapiens
gactcctgagttcaagccacccacctgccttgggctcccaaagtgctaggattccaggtgcgacccactgcacctgtcctgaaagacagattttgcttaatttctacacttgatgttctggt

SEQ ID NO: 173067 - DNA, 122 bp, Homo sapiens
agacagttttggccaatttatcataaaatgtatcataacatgatgacagcactctatccacgtcaccacaccccatctccacatcaccacgccccatctcctccacatgatttttaaaaatg

SEQ ID NO: 173068 - DNA, 122 bp, Homo sapiens
acggggtggcagccgggcagagatgcccctcacctcccagatggggcagccgagcagaagcgctcctcacctcccagacggggcatccaggcagaggcgctcctcacttcccagacggggtg

SEQ ID NO: 173069 - DNA, 122 bp, Homo sapiens
ttataaccccagcgagcggagggcgcgggggatgggcgccgggcgggcgggggcggggagcgcggcgcgggtccccaggtggcgagcggaggtgctcccgccgcggggggaggggcgggggc

SEQ ID NO: 173070 - DNA, 122 bp, Homo sapiens
aaaccaaagttcttatatctgtgtcctaatgaagaactgcgctgtcaggagcaggcggggcgggtgtgttcgcttccctctctgcctatgtgtgtttgggttgagcgggtgggtgtcacccg

SEQ ID NO: 173071 - DNA, 122 bp, Homo sapiens
actgttgatggagtggtcaaaaagactcagggctaagagtactattctggaaaaaccagacgtaagaacttttcagatcatagacaacacaaagtctgagaaagttctgtctcttacagaaa

SEQ ID NO: 173072 - DNA, 122 bp, Homo sapiens
ggcgcccattggccggctgcgtgccgtcatttcggggaaatcaggctgttgtagagctagcggcgaaggggaagtacagggcggctgctccgccccaccctctccggccgggcgccaccgcc

SEQ ID NO: 173073 - DNA, 122 bp, Homo sapiens
ggaggaggtgaaggtggatgccggcagggagcccgggacgccggagccaggggctggggacgggcctgaacacctgccggtcctgcccagaagaggcgccgaggagggaggagtgggcagca

SEQ ID NO: 173074 - DNA, 122 bp, Homo sapiens
aatctctcaagccaagcaggtttctgcagtatacaatccattcattcaggtgtgaaaggccggaacctatttacatatttacaaccccgatagctgtgcctgggataaagtaaatttatttc

SEQ ID NO: 173075 - DNA, 122 bp, Homo sapiens
tccgcggggctcgctcctcgcgaggtgctcaccccgtatctgccatgcaaaacgagggagcgttaggaaggaatccgtcttgtaaagccattggtcctggtcatcagcctctacccaatgct

SEQ ID NO: 173076 - DNA, 122 bp, Homo sapiens
cccacgtgcgttgcctgctctaggaacatctgtggttgccgcccgctgttgatgtctgcgcgctcctccctctaggggtcatcactctggaccctcagaccgccagccggagcctggttctc

SEQ ID NO: 173077 - DNA, 122 bp, Homo sapiens
ctctggctccgaacagattgcgcctcccgcctggctgccagtaggaactggggtgggagccgcgtaactaacagttgcgcgcaggaggcgagccccaggtgtgagcgcagaggctctctccc

SEQ ID NO: 173078 - DNA, 122 bp, Homo sapiens
cctctgcaatgcctcccccattactaacctctagccacctctccttctgccaggaagggacgactagccactccctggggtgaggcagctgagcacagctggtgtctgccagaggccaggct

SEQ ID NO: 173079 - DNA, 122 bp, Homo sapiens
atctcagcctgcctcacctgctgacatgaggcagaggctctcagtggttcagtcctttctcgctgagccttgcctgcaggcctcgaagaacatggcatcatttctaaatttgcctccaccgt

SEQ ID NO: 173080 - DNA, 122 bp, Homo sapiens
gcagaagagtcatcttcttgcaaaaggcggggatggagcccgctgagcttcctttgaaaacgagacagatgacatttcaatcttccatggggtctggaggcctcaccccacccccgcctccc

SEQ ID NO: 173081 - DNA, 122 bp, Homo sapiens
tatgttacagtccagggagggttggcatggctggtcagctctggagttgttcagggaccccgttccttcaatctagtgatcctgccatcccccacggcccacagacctctactggatattct

SEQ ID NO: 173082 - DNA, 122 bp, Homo sapiens
gtcacaggcagatgcaatccagctgtgcctgcagggagggggccgcccatctgtggagggcgggaccacccacagtgacagctcatctctcaggaatcgagccctccatgccccaggccagg

SEQ ID NO: 173083 - DNA, 122 bp, Homo sapiens
gcaatgagagacgtttatgtcactggctgctgcctcactttagcataaaagcaaagtcctcgctgtgacccacacagcccttagtgatctggcccctgtcccctctcagcctgcatctcttt

SEQ ID NO: 173084 - DNA, 122 bp, Homo sapiens
cacatgacttaaaaggtgctgttgcataataaaaagtcaacaaagcatgtgcaaatcccacgctgttactagaacctactaccctgcctttgaacattagagcatactttgtaggactctgc

SEQ ID NO: 173085 - DNA, 122 bp, Homo sapiens
gatctctccctggcagcatccactcaaaagggggtttatattaagaacataatgtgacaacggtttggaaattgaaaagcactctacaggagtaggacattatttttgtttgtttatttatt

SEQ ID NO: 173086 - DNA, 122 bp, Homo sapiens
agtatgaatgcctttgagaacactgaaaaccagacagtctggactgattaagttggtacacgttccctttcttgttaggatgcatacacgtttccaggcgaggtgtgctccatctcaagaaa

SEQ ID NO: 173087 - DNA, 122 bp, Homo sapiens
gaatttctgaggcaattgagagataaaatatcaagtttttttttttttaagaaaaccttgcggttttaaataacatagcaaacaccaacaaacattaaggaggttgaaccactcagttcatg

SEQ ID NO: 173088 - DNA, 122 bp, Homo sapiens
gcgaggtgaagatgctggagccaaaggccggggccagctccgcacccacccagcctaaggcgcctgcccggggcgccacctcggcctctggctcccgagaatgctgctcctgaagatcggga

SEQ ID NO: 173089 - DNA, 122 bp, Homo sapiens
actaagcttcccagatgcccaaacggcgagagctcgggacgtgaatcaggtgctgcgactcgggaactagtgtgctcacatgagacgtgcccggtgagaatgtggcttctggctgtcactgc

SEQ ID NO: 173090 - DNA, 122 bp, Homo sapiens
agtcttacggagcctcatgtttgtgccctgcaggagctggagaatcagtactgtcccagccgatgggttgtccgactgggagcagaggaagccttgaggacctactcacagataggaattga

SEQ ID NO: 173091 - DNA, 122 bp, Homo sapiens
agagctccgctctctacagtgagcaggagaaggcggaggggagggggctcccaggaagaacgtacatcgcccaggttttacctctcgctggaagcccgcctgagatgcggtgagcagttcca

SEQ ID NO: 173092 - DNA, 122 bp, Homo sapiens
cgtgcagaaggtgactgtctcagtggagctgggtcatctcaggtggggagttggggtccccgaaggtgaggaccctctggggaggagggtgcttctctgagacactttcttttcctcacacc

SEQ ID NO: 173093 - DNA, 122 bp, Homo sapiens
gaagtgcagaccgctgacctcccttgagaacctactgggttcttgcagtaggctcctcagcggtgtctaaacacgccactcagatgattctatgcaccatcacattggaaacttttttcatt

SEQ ID NO: 173094 - DNA, 122 bp, Homo sapiens
agggtgccgcccctctcttcgcccaggtgagccccataggcccgcacttgtaggtgaggccgtctccgcagttgaagagctgctgtgctgtgagtccgtcgtctggcacgtaggacgtgccc

SEQ ID NO: 173095 - DNA, 122 bp, Homo sapiens
ccacatacccctgagggagctcagtcctggctttgggggcgcgagagcaccccataagcccggggccctgcgccccaggggagcggacaacggtccactttacgaggcacaacttcgcccag

SEQ ID NO: 173096 - DNA, 122 bp, Homo sapiens
gcatggctgtacagcctattggcgatggaggccagggtcagcaggtaatgctgcaggccccggccatacaaccgcgccatggacgcgtcagccaccagaagcagctccacctggcgggcccg

SEQ ID NO: 173097 - DNA, 122 bp, Homo sapiens
ttagcttgtcattcatccaaatagtattcctatgtgcctatgcccttcctataggcacagcgaacagtagcgaagcaaacgtacaagcagccctgcccgcgtggagcttacctctaggggcc

SEQ ID NO: 173098 - DNA, 122 bp, Homo sapiens
gggcggccccgcaagcgcgagggacgcgccccagctttctgcccgcacccgactcccaaacgctaattaattctacagcctgagctccattagagagaccctccatgattcccccgaggtgc

SEQ ID NO: 173099 - DNA, 122 bp, Homo sapiens
ggggggtggggaatgctttgcatggcgaccctcggggtctggattcacgtacccccgcttcggggaggcaaccaactgcactgatgaagagatggagcaccccgcccctccccgacccccaa

SEQ ID NO: 173100 - DNA, 122 bp, Homo sapiens
cttaatggttccaccattgtgcaaagaggatgaccactcccagtgcgtgcacgttctctccgctaatgtcactgctcaaaacgttcagaaaattaacacttacgccagggtcggaggcctca

SEQ ID NO: 173101 - DNA, 122 bp, Homo sapiens
agctacctgacggccggctgaagaagcggctgcgggcggcctgacggtggcggcagatggcggggttgctgtcgctgctgtggcctttcttccagcgcttcaacttagctgagacaccagaa

SEQ ID NO: 173102 - DNA, 122 bp, Homo sapiens
ccgattgagaactataaggttcgatgtcgttttcagataatgtggtcctagctcttgtgtcgtccttttacatattctacatcaatagaagttgtagcacggtgtcagaataaagtagagtg

SEQ ID NO: 173103 - DNA, 122 bp, Homo sapiens
gtccccatgtccccgcgcacaggtgagggatgggttacagagcaccatcttcatcgtcatcgtcatctccctacaagcccccacccccagcggctcagactttactcagcaacttcaaagcc

SEQ ID NO: 173104 - DNA, 122 bp, Homo sapiens
agggtacggggcagggtggcgccttacgcaaatggtgcgcgcagcgcaggtggaaggtgtcgcagccgtgcacatggtggtacagagtcttctcaatcaggtcctgaggttcgtaccccgtc

SEQ ID NO: 173105 - DNA, 122 bp, Homo sapiens
agaaatggggacgaggaaaaagagatggctcaagggagtcctggcccgggatgcgatcctcgccctagggtctattgcaaccacacaaacccggacagcgcacgctcccccctaccccgaca

SEQ ID NO: 173106 - DNA, 122 bp, Homo sapiens
caggttaaaactgtcacgcggtcggcgggattgcaggtgatgcagcaagcctggtgtcctcgacaggagacgtttcccatctaggaccgttggatagggttcctttctgagcttccagctct

SEQ ID NO: 173107 - DNA, 122 bp, Homo sapiens
gccctccgcggggcccgagggcagcttgggggggatgaaaaagtcggggatcttgtcgggcgtcaacacattgctgtacaggggccccttggaggccttgtcccccgcctcactccccacgc

SEQ ID NO: 173108 - DNA, 122 bp, Homo sapiens
tttacaggtaaatgagaaaaataatttgagctcacttccctagaggatttgtggcatgttcgccagaatgcttatatgagaacaatcatagcagcaatgttttgtttttgtttttgttttca

SEQ ID NO: 173109 - DNA, 122 bp, Homo sapiens
tgtggtggcgccgggtttccgctcaggcaagtgcgagagcgactaaagggcctgggaccccggggccctgttcggacagccccgccggcctgggacctcgcctccgggtatccccgcagtgt

SEQ ID NO: 173110 - DNA, 122 bp, Homo sapiens
tcaacctctgctggtcaggaggaatgccttccttgtcttggatctttgctttgacgttctcgatagtgtcactgggctcgacctcaagggtgatggtcttgccagtgagtgtcttcacgaag

SEQ ID NO: 173111 - DNA, 122 bp, Homo sapiens
cgcggcgcccactggtcctcggagctgccaatcggcgtgtaatcctgtaggaatttctcccgggtttatctgggagtcacactgccgcctcctctccccagtcgcccaggggagcccggaga

SEQ ID NO: 173112 - DNA, 122 bp, Homo sapiens
gcagaagcaaacatgaatcaagcccccatttccaatcttccaggctcataaaacttgccacgctttgcaaggtggggtggcccatcccctattttatctctgggggagagcaggcacagatg

SEQ ID NO: 173113 - DNA, 122 bp, Homo sapiens
ggggtccgcggctccccaccctcgcgccttcccgcgccagtcccgaacgctctcttggggcgttcctgcccagttgtcccggctgacctcgctctgcagccagcttgaggtcaggcggtcgc

SEQ ID NO: 173114 - DNA, 122 bp, Homo sapiens
aacctctgcccccactcaacatgaagactggaaaacgtgttgcaagtcaggactagttaacgttcctggcgtcagcagactcaggagggagctgaacacctgtgtgtatccagcagcaagaa

SEQ ID NO: 173115 - DNA, 122 bp, Homo sapiens
tgcgagctgggactcggagctacgccacaaacctcagccgaacgcatggagacctgcggacggtttgatcactcagccaggcgtttctccaggtccaaaaacacttaatgtaaaacaaacgc

SEQ ID NO: 173116 - DNA, 122 bp, Homo sapiens
tcggagtgcaagaatgggattcccaggtccttcctgcgcagcaaccacaaaaagcaagtacgtgttccctgcacatgtgagggatggttctctcgcgttaacacggacagggggctgtgaat

SEQ ID NO: 173117 - DNA, 122 bp, Homo sapiens
ggcgcggtgtcctcggacttagcagtcaggcagggccccgggaaggccagggcggggaggcgagtgttgacagctgagtgggcgggcggggagggaggagtcgcagctgaacagccgagggt

SEQ ID NO: 173118 - DNA, 122 bp, Homo sapiens
actaaagcggcggaagcaggcagcgggggcggggccggcgggctgcaggcacgcaggcggcgcggcggcctggggttgcgtgacctgccgggctgcggtcgcacgcacttcgtgcttcaggc

SEQ ID NO: 173119 - DNA, 122 bp, Homo sapiens
gggcaacacacccgcactcacacagggaccgggcagacacaccagggactcacgtgcacacgtgtggacgcgggaggaaaccagagtgcccagagacaacccacgcagacatggggagaaca

SEQ ID NO: 173120 - DNA, 122 bp, Homo sapiens
tccaagaccacacacagcagttttccccttgcctagccccttgagatgcattcttgatagcgagagcacaatggttcccctgagagcctccgtggcccttctgtgtgcctttatcaaccact

SEQ ID NO: 173121 - DNA, 122 bp, Homo sapiens
tgtcccacgtggtaaggcgggaaccgctgctgcctgtactgggggcgatactgggggcggcgcagccgattccgggccccagagaactgcctatcagtggtaggggggtcaaatccttcact

SEQ ID NO: 173122 - DNA, 122 bp, Homo sapiens
gtggcccaagtaatagtcaggccgaaatctcgcgatacaacttagcttccgggaagaaggcgagcggtgggaggagacgcgacgtgggggcgccatttttctcgccgcgcagggaggactga

SEQ ID NO: 173123 - DNA, 122 bp, Homo sapiens
agaagaggcaagtatcctgcatcacaggggagtctttcaacctggctgggccagggcctgcggagcagtgagggtcgtttctcagcccagcgagcctggggcaggaacggaccctaattgaa

SEQ ID NO: 173124 - DNA, 122 bp, Homo sapiens
aaaatcggccttgagtacagggttcctgtagggtagtcttaagtcctaagaggcaccaagcggttacaaaggctaggtgacaatccaaatcacaaggtccgacgatataataaatcccgtgt

SEQ ID NO: 173125 - DNA, 122 bp, Homo sapiens
cttaataaattacacggacttctctgctctctcgaatctggccgcaataatttgcacactcgccggcatcgtaaggaagcagttgtgaaaataaccgaatctcttacaatatgaacctgcaa

SEQ ID NO: 173126 - DNA, 122 bp, Homo sapiens
tggggggtgggagagggttcccgaaaggcaggggcgggcgcggcgagcccctgccagatccggggatgataacgtgcctgctccatgtcgcggcttctagctgtccaggctccgccccctgt

SEQ ID NO: 173127 - DNA, 122 bp, Homo sapiens
ggggaccccggggccctcacgaatacccttatcccaatcccctctgggcttcggatcccccgaaaagaccccagtgaggacccgggacccaggctcatgatatctgctctgctcggggagcc

SEQ ID NO: 173128 - DNA, 122 bp, Homo sapiens
aaacaaataagagtcaaacaccagcatcagaaaaatttcctgtttgcatctgaaggtcaacgggcccgttgatggttagccatgcatagtgatccaacactttgtagtgacaaatcatgcac

SEQ ID NO: 173129 - DNA, 122 bp, Homo sapiens
gcctgagggtgcggagtgcagggtgcagggtgcaggtgtgaggacggaagctgacaaccccgccgagggccctttgaatcccagggatggggaaaccacggcgctcctggctcctggctcgg

SEQ ID NO: 173130 - DNA, 122 bp, Homo sapiens
gaagggatcacaaaaaggaggggtatttaaggacacaggagtccccaccccagcccagcacgtctgggcacctcgctcttgcgcccgtctcggtccctccctgaggtccctcctgcctcccg

SEQ ID NO: 173131 - DNA, 122 bp, Homo sapiens
ttaggaggaggcgggaggacagccacactgagggcctcttcactaaagaatgaagtctgacggcgggaatgggggtgggtgggggcgggaatccatcagctccacaaagtgacagggccctt

SEQ ID NO: 173132 - DNA, 122 bp, Homo sapiens
agtctctgtaaagcagccccaggctgcctgtttgaacttcctgcactgactatctctgaccgtgcttttattgtttatttgtttgtcatctgtctcctcctcccacatagaccctagaataa

SEQ ID NO: 173133 - DNA, 122 bp, Homo sapiens
aagtaaatgcaggtgggtaagcgggacccggggtaacctacgtgacgctcaccatgataccgtgcgctcctctccaggacccaggcaaacacaaaaaaggaggctcagacaaccaagcaccc

SEQ ID NO: 173134 - DNA, 122 bp, Homo sapiens
aataacggttcacttacttacggagaccgccgagggacagaagcctctctcaggtgtttgcgcctcaaggaagaatcaagagggaaagggaggaacgaagggagaaagagaaagtgaccgaa

SEQ ID NO: 173135 - DNA, 122 bp, Homo sapiens
cctgattgcagatgttacatagcacccatgttggctgctgctcttttctgttcttaagaacgccatggtctatttatcatctccactctctgtgcatcaggcctcttgactgtccctctgat

SEQ ID NO: 173136 - DNA, 122 bp, Homo sapiens
attgctggaaccttagtaacaagtttctaattagtactccttagtccaatttccccatcccgcagcatattttctacactatcaaaaattttaaaaaatgttatgatggcatttcccatctg

SEQ ID NO: 173137 - DNA, 122 bp, Homo sapiens
tgggtgaccagcgtccagaaatccactggggaaacctcctcccgtttttacccttggtaccgcgagaatgggcggggtctggcttcggggcggaagcgacgggcggtcccggttccagggcg

SEQ ID NO: 173138 - DNA, 122 bp, Homo sapiens
aaggggcatagccggaggaagcgccctcccctgcaggtcctgttcagggtcgggagggggcggtgctgcctgcagtggacccgagccacctgctgtgccctcacctccaggtatttcagagc

SEQ ID NO: 173139 - DNA, 122 bp, Homo sapiens
tggtctcttgagcccagtgcgcctggcctgttcccgcttagcctcacttaaatctcctcgcgaatctgagctggccaacttcctctgggggaaactgctaaactcagctccagttaatattg

SEQ ID NO: 173140 - DNA, 122 bp, Homo sapiens
gtagagtgtagaggtttgctggcgtggctcttcctttgaccccgccacggagtgggggcgcggttgggggcgggtgtctgccattgcccgctagcgttggcgccccaagctcggtttcactc

SEQ ID NO: 173141 - DNA, 122 bp, Homo sapiens
ctggcctcctgatgggtgaacgccagagcagcctcggttcctgtacagcggagggcatgccgcggccagagacagcccgggcggcttccacactgtgtgcgacacttttggtgctacggtgt

SEQ ID NO: 173142 - DNA, 122 bp, Homo sapiens
ttttcttcaaccaactctcatcttgtagtgaaatagatctctttttaaaataaagctttacggccatgcatttggtcaatagagagacacctgtaattgatgagctctggagttgacagtca

SEQ ID NO: 173143 - DNA, 122 bp, Homo sapiens
tttagaccagattgtttgttatgtatataactgtttgcatttcacttacttatcctcaatcgtcacatacctgggagggaaggaggctgcacagagcccccggagccccagccccacgtggt

SEQ ID NO: 173144 - DNA, 122 bp, Homo sapiens
ctcgcagccgcccgccgcggcgccctccccgcccccggggcgctcattggcccagcgcctcgcgcccgccgcccattggcctgcaccttcgccaatccgcccccgcctcccgcgggctgcgg

SEQ ID NO: 173145 - DNA, 122 bp, Homo sapiens
tcctacgggacttggacgacttccagtcctggctctctaggacccagacagcgatcgcctcggaggacatgccaaacaccctgaccgaggctgagaagctgctcacgcagcacgagaacatc

SEQ ID NO: 173146 - DNA, 122 bp, Homo sapiens
aaaagcttattactgactgccatcttgtggtcatttggggaactggcctaggtttaaatccgtggtggaaagagttgagtgaattgtaggatagtacctggcactgagtgttcagtaaaagc

SEQ ID NO: 173147 - DNA, 122 bp, Homo sapiens
aggtgcccatttggcttaagatcctaaggtctctgttgccagaagggtcgggcggaggcccgttaaaatcagagcaggaggatcatctgcttttttcttttttctaaaagcagtcggagtaa

SEQ ID NO: 173148 - DNA, 122 bp, Homo sapiens
gctgttctccccacagccccctgggtggccacccaggcaccaagggacctaaaaatcccacgcttcctggggctcccgaggactcgttctgaaggaagacaattctgcagtgacacatgggg

SEQ ID NO: 173149 - DNA, 122 bp, Homo sapiens
gaagctgggcgggagctgagtccaaagaccttgttgggaggccggagtcgggcctggagacgcagccgggaggaagagctgggcccggagaggacgccgggacgctgcaggtgggtccggag

SEQ ID NO: 173150 - DNA, 122 bp, Homo sapiens
aaatgatgaaagagaagttggaggcaatctcttactcagctccttcacgaggtccaaatacgatgtctcccccactccactcaaaatgtaaatcagcataggtcacaaaaagaggaaggaca

SEQ ID NO: 173151 - DNA, 122 bp, Homo sapiens
agggctttttcattgttcagctgaaacctctccagctcctcatagctgaatttctgggaacgttccctcctctgttcattgatattcttgtccctgaccccagcccccgcaaggccccttct

SEQ ID NO: 173152 - DNA, 122 bp, Homo sapiens
gacaaagagacctgggtttaatccttgcagaccttagctatattgtctaacctcttgggacgtcagtttcctcatctttgaaatgggcatgccaacatccaacttctcatgaggacttatgg

SEQ ID NO: 173153 - DNA, 122 bp, Homo sapiens
aggtggcctaagacctgggaaatcaggagcagtggtccacatacaaaatcagggccaaaacgttttactttccatttgaatttacaaccatatacagacaatatggtaagattttagagaaa

SEQ ID NO: 173154 - DNA, 122 bp, Homo sapiens
ctggtggggagggagctagggagcaagacacatgggggaggggaggggggatcgcatcagcgaggctggcatcagggactcctgagttccgctcctagttttgccaaaggttagcctgggtg

SEQ ID NO: 173155 - DNA, 122 bp, Homo sapiens
tgccgtccggccgggcgtggtgagacaggaatatggcggcctctgcctgcctcagcccaccggcccgggagcgcggccgcggcccctgctgaagtcgcgggaggcggccccgcggagccccg

SEQ ID NO: 173156 - DNA, 122 bp, Homo sapiens
tctctaggccggcagcgcctctcctccatggtcctgtctgtcagcgctgttttgggagcccgccggtgaggccgggccacgctcagacacttcgatcgtcgagtctgtcactggtgagtaga

SEQ ID NO: 173157 - DNA, 122 bp, Homo sapiens
aagacgcaagaacggtttcagatgaaaggagaccaaagcaacaatggtgagagccacacacgatcctggattggatccgggtttctattgctaagaggacatcaggggacaacgatacaatt

SEQ ID NO: 173158 - DNA, 122 bp, Homo sapiens
aggatggggcctctgttcccgggctttgtctgctcagtgtggctccctagagcacccagccggggccaaaccagagagtgggtggggagcctgtctgggacagagccacctgctgccaaggc

SEQ ID NO: 173159 - DNA, 122 bp, Homo sapiens
gggggctgtgtcggagctgaggtgcaagggctcaggcgccaggtgagctgttcacccctacgtgttttggctgcacgtgggtgttggtgtccctgactggggcttgcagccagtgccccgcc

SEQ ID NO: 173160 - DNA, 122 bp, Homo sapiens
cgggctccactccgggagaggctgccaggcagcgaagtgcgcccgtggctcactgcagagcgcaagctctcaaccaggtatctttatagtaatattccacttctctggtaccaattttctat

SEQ ID NO: 173161 - DNA, 122 bp, Homo sapiens
ggggtcagggagttccctttcctaatcaaagaaaggggtgacggacggcacctggaaaatcgggtcactcccacccgaatactgcgcttttccgatgggcttaaaggtgcaccacgagatta

SEQ ID NO: 173162 - DNA, 122 bp, Homo sapiens
acttctgaggacaggttttaataggtagttttatatacatatagaaagagagctggaaaacgtctcagtatatactgaggccatgaggaagctgaaaccagggagagttaggagagaaagac

SEQ ID NO: 173163 - DNA, 122 bp, Homo sapiens
tggccaggtgggtggtgaagacatatacgaactgcgagggaggctttccggggacgcccccgcccccgcccccgcccccaggggcatcaggccgaaggccaggaggagggccgtgcggggcg

SEQ ID NO: 173164 - DNA, 122 bp, Homo sapiens
tgagagcgctgggtgctctgctgtgctgacaccagagggtaagcgcggattctggctccacgcacgtggggtcaatccccggacacagaccttttactggaaggcctggagaatcgcctgag

SEQ ID NO: 173165 - DNA, 122 bp, Homo sapiens
ctactcgcggtgcgaagcctcggatccgctgggaaccgcatagtctccggcacccttggccgcatgcttgtcagaggtgggccccgggaaacacactcgctgcccctccaacaagcgtccct

SEQ ID NO: 173166 - DNA, 122 bp, Homo sapiens
gtgaccgggacttgtgcacccgattaattgaatattaatcaccccaaggcctaggccaaccgccacccagagagtggcagctgcagaacccaaagacgtggagccgggctgggggtggggaa

SEQ ID NO: 173167 - DNA, 122 bp, Homo sapiens
cgcagacgctgggcctgccgctgggcctcaactcgcttggcttgcagcttgcccagctcccgtgcagggtccaccagcccctgaagctgcaggtggatggagcagcgatcagaagccagagc

SEQ ID NO: 173168 - DNA, 122 bp, Homo sapiens
ccccactgggccgtacccacctccttgaccttgctgaggcccatccagaggcgcagcctgcgcaggaacaactccaccatctcgtagtcctggggctcccaggccggccggtacagctctcc

SEQ ID NO: 173169 - DNA, 122 bp, Homo sapiens
tcggagccgcgtgctgggggtcgtaggggcccaccgcgctcagccagacgttcagacgctcggacaagcatggtctataacccaggaaaggggagcagggccactcccgcgggcggccccag

SEQ ID NO: 173170 - DNA, 122 bp, Homo sapiens
agcattagaaagggtcccgttcctctgttccctctgtgagcccagcttgcctgaagggaacgtgggtctaatccgtgtctggaggagtgagccgaaccacaggaagaagaggtaagaaagac

SEQ ID NO: 173171 - DNA, 122 bp, Homo sapiens
cataggtctaatgtgataacatgcgtcccacttggtacaataaacagctaataggccaggcgcagtggctcacgcctgtaatcccagcactttgggaggccgaggcaggtggatcacgaggt

SEQ ID NO: 173172 - DNA, 122 bp, Homo sapiens
agaaaataaatcttgtccacttcgtgaagcattgaggagtcctttcagttttctcttgagcgaccaggccctgcatgaggcccctggggatgagaagggaatgaacttagcccttgcctcat

SEQ ID NO: 173173 - DNA, 122 bp, Homo sapiens
cgcccccagcacagccacctcatgctcctccttgagcatctcatagctggggttggggggcgggggagggcagccactgttggcaggaatgaagaaggtttgggcagtgtggttcatggtgt

SEQ ID NO: 173174 - DNA, 122 bp, Homo sapiens
gcccagacagggccaccagagggctccttggtctagtgggaacaccagcgtctgggaagccgcccgttgccaagtggaccgtggtctagtggtagcgtcagtgtcaaggaaaaacacctgct

SEQ ID NO: 173175 - DNA, 122 bp, Homo sapiens
ctgccgagctgcccaggactgcaaaacaccggcgtcggcgcgtcgcagccaatcagcgcccgcctcgcgctgccctcagccaatcagcgtccacctcgcaccgtccgccaaccaatcaacgc

SEQ ID NO: 173176 - DNA, 122 bp, Homo sapiens
gggagccgaattacaagtcggcccaggaagctatctatgtacaaccttgaggcgcaaaatcgagcaaattcgcctagacccattctccctccggctcttcacacctggatggggcgcaagca

SEQ ID NO: 173177 - DNA, 122 bp, Homo sapiens
cagtgttcagccactgtgttgatcctccacgggggcctgccacacactgctctggcaaggcgtcccaccggggcaaatgcctacctgggagtgctctcaggatccacgttgctcgggctggc

SEQ ID NO: 173178 - DNA, 122 bp, Homo sapiens
gccatctagcatgagctcttagggccaattttcaggcagtgcgttggatagcaacaacttcggaggtccccagattgcagagggagacgtggacgtgagtggagcggggcggtccccagcac

SEQ ID NO: 173179 - DNA, 122 bp, Homo sapiens
gcggcatgggtggggagcttgagggggcgttgggctcccaccaagcgccagatccttgcgcgcctccagcgctcgcccgcgcggctggttcctttgggatgcggaggtgcgacggctcctcc

SEQ ID NO: 173180 - DNA, 122 bp, Homo sapiens
caacccctcgcctggtgcacacccacgcggtcccccaccccctcgcccggtgcacacccacgcggtccaacccctcgcccagtgcacgcccatgcggtcccccaacccctcgcccggtgcac

SEQ ID NO: 173181 - DNA, 122 bp, Homo sapiens
tcagttcccctgggcctcactttcctcatccgggcagtgggttgggccagaaagtgtgctcgcaggggccgaactttgtaattcccgcttcccttacctccacgcccttcctggtagcgggt

SEQ ID NO: 173182 - DNA, 122 bp, Homo sapiens
ggaatgatcccagcatctctcgcagtgatgtcagtgtaatcctgagtcggatcgggctcccggctgggtggcgggggggcagatgatgctcccgccagctgggcagagcaagggtgttcccc

SEQ ID NO: 173183 - DNA, 122 bp, Homo sapiens
cgtccaggaccccagcacctctacacccaggtccttctcagttcccaccggccgggctgacgctggtctccagggtgatggagctgattcttcgggtttccctcagctcagatcaaatttaa

SEQ ID NO: 173184 - DNA, 122 bp, Homo sapiens
cgggtggggaagcgaaaggggagctgagcgtctgtcctcagtccttgggccacacgggggcgctgccgctctgcgctcggattctgatgagccgctctggagaggatggggcggtggtctga

SEQ ID NO: 173185 - DNA, 122 bp, Homo sapiens
caatgggaaatgacccccacagatcccagaacacagcagctctgcgatgcagtcagactgcgttgatgccagtgttctcttggttcctgcaagactttcttgaggtttcttgtttccgcaag

SEQ ID NO: 173186 - DNA, 122 bp, Homo sapiens
aggctccaaaccggaaaacacaaatattaactagaaagcattatataacattttatttaccgtcttttccggtagacggtaagctccacaagggcggggctcaataaacgtttacgagtggc

SEQ ID NO: 173187 - DNA, 122 bp, Homo sapiens
tggccttgccctcctctcaggggcgggaccccaaaacctaccaatcagaaagtggcacgccggcattggccccgccccgtccctcgcatccgccactcaggagccccgcggcaccgcccccg

SEQ ID NO: 173188 - DNA, 122 bp, Homo sapiens
ccctcgtgttgaattaagtccgtggctttgagcctcagaaacggtgcaaaatgcagtccacgcgtggctttcggccccggtctggtgctcggaagacatgtgcctccctctacctgcccccc

SEQ ID NO: 173189 - DNA, 122 bp, Homo sapiens
cgctctcggagggacaccgggggcgggaggcgagactgcagcgcaggggccagaacgctgcgactttaagagccgaggatcccggaccatgtgctcggcgtgagacaaaagcaacaacaaag

SEQ ID NO: 173190 - DNA, 122 bp, Homo sapiens
ctgcagtgactggagttacaagcctttaaggctcatttccctgtaatgaccagcagagggcgcctgcacctcatacttcaacactgactcaggcttttaaaatgaagtcttgaatctatcag

SEQ ID NO: 173191 - DNA, 122 bp, Homo sapiens
caggcggagagagagccggtcactccatccccacgggattaccctccctaccacaacccacgaatgtagctgaccgaaatcccggccgggttttccgaagggccctcgattcccgccccctc

SEQ ID NO: 173192 - DNA, 122 bp, Homo sapiens
gtgttcctggaagaggtcggggagcggggggagaggcattccaggctggaggcctggaaacgtttggaagctttgctaaccttggagaccatgtcaggaaagaagcgtacccaggccgtctg

SEQ ID NO: 173193 - DNA, 122 bp, Homo sapiens
ttaatttgtcctgttcttttgctggtccaagaaaatatcctgaaatctttatttcttctccgtttcctccttgtcctaggacagactagccctatccccttcctgaattaagtccgaatata

SEQ ID NO: 173194 - DNA, 122 bp, Homo sapiens
ggtcttgcaagagagttccaaagtatttatttcactactctaattacttaaggcacaattcgcaggtcattaaaaaacgtttactagtctgcttttgattgcttattcagcactacctgtgt

SEQ ID NO: 173195 - DNA, 122 bp, Homo sapiens
aacctcaatgccgctccgccagccgcggcggcctcccagactccatttgccggggagctccgagccgcgcaaaatctctgcaagctgtgctctgcagaatgcaaagccgggctggaatccgc

SEQ ID NO: 173196 - DNA, 122 bp, Homo sapiens
ccagggttgcgggaacgcgccctgggcaggttctgcacgggcgccgggcacattccggggcgtcctgggcttcggatcctccagcctctgcagctcgggcaaaggttctgtcttccctggct

SEQ ID NO: 173197 - DNA, 122 bp, Homo sapiens
cctctcggttgtttgcccggtgtttctttggccatagcacctgcctctcggttgtttgcacggtgtttctttgtgcgcagcacccgcctctctgcttacatggtgtttctttgtgcatagca

SEQ ID NO: 173198 - DNA, 122 bp, Homo sapiens
cgccctcatcctgccatccctgctgcggcttcactgtgggcccaggggacatctcagccccgagaagggtcagcggcccctcctggaccaccgactccccgcagaactcctctgtgccctct

SEQ ID NO: 173199 - DNA, 122 bp, Homo sapiens
ctcacccaacatctgcggacaccagaccacacgttcacaaggaacctcacccaacgtctgcgggcaccagaccacacgttcacagggcacctcacccagcgtctgcggacaccagaccacac

SEQ ID NO: 173200 - DNA, 122 bp, Homo sapiens
ctatgaattaggccctcggccaggtagcagatataaagcttaataagatatatggctttccgcccaggtgctcatggtctagtggaaggtcaaaaaaggtgggaaagggaagatagaacttt

SEQ ID NO: 173201 - DNA, 122 bp, Homo sapiens
gtggggagggcttaagggagtgtggtaaaattagagggtgttcagaaacagaaatctgaccgcttggggccaccttgcagggagagtttttttgatgatccctcacttgtttctttgcatgt

SEQ ID NO: 173202 - DNA, 122 bp, Homo sapiens
tcctgaacacaggactcttttctgcctcagtttccctgcttcattaatctgagtacaacccgactgaccctcatataaaaaacttgacactaacagcttgggcacacccgtgaagattcagg

SEQ ID NO: 173203 - DNA, 122 bp, Homo sapiens
taaaatctaggacatgtgacaaaagatataataaggatataatttggagaatacagcttacggttgtaaatgaatataagaaaaataagcaagtgactggccatcttcatgtgagcctttgg

SEQ ID NO: 173204 - DNA, 122 bp, Homo sapiens
gatgacctcatttttaaaaataatgaccaaatctccccgcttatgcacacgaagatgttacgcacataacactcgggtaccctgggagaccacctctgtgatgaaggtttgcatttgaaaag

SEQ ID NO: 173205 - DNA, 122 bp, Homo sapiens
aacagagagaccgctggacagagagagcagagccgagtacaacatcaccatcaccgtcaccgacttggggacccccaggctaaaaaccgagcacaacataaccgtgctggtctccgacgtca

SEQ ID NO: 173206 - DNA, 122 bp, Homo sapiens
gaccatgacagccaggaaccaccgcgcagccagttaggacttgtcatcccggagtgaccacggaagcctaaggtgactattctcacctgccaggcaccctccaaccaagtctatagggagag

SEQ ID NO: 173207 - DNA, 122 bp, Homo sapiens
tgaggataaaggtggaggaaagtgtacgtgcacttgtgcacacatgcatccacacacactcgcccttcaagtcctgataactttgagtccttggatctaggaaagtctgaaacactattgtc

SEQ ID NO: 173208 - DNA, 122 bp, Homo sapiens
ggccctggagcggggaggtggagacacgaggggatggcaccaggcttggctcccagactccgggagcgtctccagggaaagataaacgcctttatccgtcccacagcctcttcccaaggagg

SEQ ID NO: 173209 - DNA, 122 bp, Homo sapiens
atgacactcctccgcccaccaaactcctcccccccatgaaactcctcccctcgggccccacgtgagcctgtagccagccctctgggggaactgaggcttcagtggaaggaaggccctgaaag

SEQ ID NO: 173210 - DNA, 122 bp, Homo sapiens
cctaggaaccaacttcacccttgccgaactgggcatctgtgagccctccccacaccgaagcggctactgctccgacatggggatccttcaccagggctactcccttagcacagggtctgacg

SEQ ID NO: 173211 - DNA, 122 bp, Homo sapiens
ttcccaactctgcagaaagcactgcacgcccaaaaactgaacaccgctggaggatttgaccgagaaacaattttgttttgtgttttgttttgagacggagtctcgctctgcagcccacgctg

SEQ ID NO: 173212 - DNA, 122 bp, Homo sapiens
atggtgggattttcacttttgtggcgtagacaccagggctgatattgatccgtgtttttccggtggtccggcgttgcagaagtggaaactgcagcgggctggtaagccctccgagccttctg

SEQ ID NO: 173213 - DNA, 122 bp, Homo sapiens
catgatggtcacgtagcgagctgcctctctgctttccagggattcatccgaaggaggaagcgtgtggtagtttggcactgcacaacatcagcttttcctaacggcctcaaatgatggaactt

SEQ ID NO: 173214 - DNA, 122 bp, Homo sapiens
cctgtggacgtggggcttgtggcagatggcgctctgggaggaggggcctgtgtgtccccccgtggatcagtgatagactgacagagttttgcaggtttgagtcgtaggtgtgactgttgttt

SEQ ID NO: 173215 - DNA, 122 bp, Homo sapiens
ttttggagaaaaagaaagcaaatctcctccagatgacgtcagccacaggaagcacagacgcgaagccccgttccaccctcttaaagacacaggatggccccgcccagcagccggctagcagc

SEQ ID NO: 173216 - DNA, 122 bp, Homo sapiens
gggtgggcttctgcggctccgcgcccctcctcgttacccagcaccccggaggccagggcccgcaaggcacgaatcacacatgtgaggcggcaccccctgcacccacagaccgaccgggaagt

SEQ ID NO: 173217 - DNA, 122 bp, Homo sapiens
ggagtagcagttgtctccagggttgacagctccggtgaggacctgatgcagatgcatctccggagcccgggctggacagaatgcgcgggaggtgcgacaagctccgcgcctgaccctcctcg

SEQ ID NO: 173218 - DNA, 122 bp, Homo sapiens
atgtgtaaaaggagcttcatggcttggaaagcggtgtgctctttgtcgacaagaaattcccgaggatttccttgacaagccaaccttgttgtcaccagaagaactcaaggcagcaagtagag

SEQ ID NO: 173219 - DNA, 122 bp, Homo sapiens
tgaattacttgaaaatgaaaggttaacaaagttactgagattaggagagaacgtgaggagcgaacagacctagccatgaataaccaacaaataaaactcgaggaaataaaaaggaactcaaa

SEQ ID NO: 173220 - DNA, 122 bp, Homo sapiens
cggccgcgtctacgctgtccggagggtgaacggccgcgggcttgtcggggctgggggtggcgcccgagccgggcgggcagacgaggggcccgcggagacccagccccgcccgaggccgctcg

SEQ ID NO: 173221 - DNA, 122 bp, Homo sapiens
ctacccacctgtttcctacagggcagatggcctggcccgtaacactttcctgaaggcatgcgtgagtgaatagaactgttctaatgagtgtatgtttgaacgctttataaatttttaaatac

SEQ ID NO: 173222 - DNA, 122 bp, Homo sapiens
cctcacagttaggtgggcagaaatgtatgaaacagaataccctttcctcgtcttctgggccgtgtggaggggctgctgagccactgagctctctcccctaatctggttggatgtggacccag

SEQ ID NO: 173223 - DNA, 122 bp, Homo sapiens
gtgtttgttttcttcctcctacgatgctagagaaaagtattttcctcattctggttttaacggaagtctatgtattctctgcttctgtctcacagcaagctctaattggctcagaaacagca

SEQ ID NO: 173224 - DNA, 122 bp, Homo sapiens
cggagggccctcgggaccgcacagacccggacaacagcagcgggtctgcagcgccggccgcgcccagcctatcccgccacccccagcggccggccgcccgctcgctcgcccgcgcccctctg

SEQ ID NO: 173225 - DNA, 122 bp, Homo sapiens
gtggttggctctgcatgtcttctcccaagcttctggtcccatgactcatctgacagatggcgtttgttgagtccctgctggtgagggctggagcctggggagataaggatgtggagggacat

SEQ ID NO: 173226 - DNA, 122 bp, Homo sapiens
tgggaccctcggtccacgccgctgtggctgccctggcctacagcccaggggctgggggtccgggctggtcagtagtcatccacgctctcgatctcaccagaagatccgtgcagggagtaccc

SEQ ID NO: 173227 - DNA, 122 bp, Homo sapiens
atttggctagcccaatattccagggtaatctccccatatcaaggtcattatccttgatcacgtctacaaaattccatttgtgatgtaaggtagtacatttgcaggtttcaggattaggtcat

SEQ ID NO: 173228 - DNA, 122 bp, Homo sapiens
tatgtcaaatcctgataactgtttgtggaaggaaatgaatcggttttgaaggaaatgaatcggttttaaaggaaaaagcaaatgaatttcagacacatccacaagtcaaacgagtctttctc

SEQ ID NO: 173229 - DNA, 122 bp, Homo sapiens
gggccgttgcattcgtcctccaggggtggtcttggttttctttcctctcccagtctgcaacgcggggcccaggagacgccctgaggatcccgcggggctcctgcattgctccggggctcttt

SEQ ID NO: 173230 - DNA, 122 bp, Homo sapiens
tttccgtttctttccaacaggagtatgacaacttttcaacttgagtgcacacactgtccccggaatcccgcgttccagggaggaagcgcctttgacagcgcgcgccggttcgtggggcccga

SEQ ID NO: 173231 - DNA, 122 bp, Homo sapiens
cctaatgggattcttattatcagactcataaatcaaaccgttaggccgtcacgtctggcacgtggacaacacccccatcccccgcggcaaacggagagggctagagctgcgttttccccttt

SEQ ID NO: 173232 - DNA, 122 bp, Homo sapiens
ggaccctccccgccctcgtccgacgagcacccgcgcctgttacctgcagcgcagccggcgcggtccagtgaaagcgcctcttcagcagcccggagacctggcagggagagaggaagatgacg

SEQ ID NO: 173233 - DNA, 122 bp, Homo sapiens
gcagtctggccgcttctcctatctgcctgcctcaacgtcctcctgcgtttctcctgcccacgcacgccaccctgcggccctgttttcgcttgtgggggccttttgtgagagacacaggcact

SEQ ID NO: 173234 - DNA, 122 bp, Homo sapiens
aaaaagtcaggaaacttttttgtttttttctcaatgggtttgccaccagaacacaggtatcgtgaaaactacccctacctataagccagaacgagaaaggaaaagactcatatcaacactgt

SEQ ID NO: 173235 - DNA, 122 bp, Homo sapiens
cgaaggcttgcgggtggttaggccgccatgtcttctgtctcacattcttattcctgtacccgacagtggaaaccccttcaccacgcgcctcaataccaccaggccgccacttcgcggaccgc

SEQ ID NO: 173236 - DNA, 122 bp, Homo sapiens
gaccaggcacccttctgattgattcagctcttccttgatgcctcctctgatgttaacctacgagaaaggtgtgattattctctttgttctgggcaggagactgtgtgccggccagctgagcc

SEQ ID NO: 173237 - DNA, 122 bp, Homo sapiens
tgtctgtcctctgcgtgtatcaggccgggttgagggggtggcaccatccctgctgcggaacgagaggcaggcaggtgtcccagactacttccttgtcgcttctggaagcttgtgcctccagc

SEQ ID NO: 173238 - DNA, 122 bp, Homo sapiens
aactaagctcccaataaagaacacttcacctgccctccgcaaccctctacctctcttccccgccaagatcttcacccaaggtctcaagagggcggttcccaacctcacgtgacacagcggtc

SEQ ID NO: 173239 - DNA, 122 bp, Homo sapiens
cgcaggccttgtgaaaatcaagtccacaaatccctccgtcagaatttttatcttgggaagcgcaaggtcaaaagcatcaagtacgctttgagacaattctggctctgtagaacctgaggatg

SEQ ID NO: 173240 - DNA, 122 bp, Homo sapiens
tccactcactcccctacgcttattgtcctgcagctgcaactcatgcctgccaatccccagcggggccatgaactcagatgcctttgcttcatgtgggacgtgccctcattccctttggcagg

SEQ ID NO: 173241 - DNA, 122 bp, Homo sapiens
agagcccatgcgcctgggaagccgggctgtttctgggcggggctgcagactcctcgtgctcgtgtcaccgtgtccttcccaggagacagagaaggaggagagcccggaaccagggccggagc

SEQ ID NO: 173242 - DNA, 122 bp, Homo sapiens
cgactatgagggcagcggctccgacgccgcgtccctgagctccctcacctcctccgcctccgaccaagaccaagattacgattatctgaacgagtggggcagccgcttcaagaagctggcag

SEQ ID NO: 173243 - DNA, 122 bp, Homo sapiens
ggatctccacctgcgtccgcctggcgcccccgccaactccgatcaggtacccatttgccccgggctccctgggtgccctgggcccagcccagccccatgcccccgcctggcccacctggcca

SEQ ID NO: 173244 - DNA, 122 bp, Homo sapiens
gcatcttttttttttttttggatacagggtctcgtctcggtatgttgcccaggctggtctcgactcaaacccctgggctcaagtgatcctctcacctaagcctccagaatagctggggttac

SEQ ID NO: 173245 - DNA, 122 bp, Homo sapiens
cggagcgggaatagagaagggagtgagtgattcagagagcaacgtgcaggcccctgcagccggagcaggacttttgctcctattcctgagcgaaagggaacaggctgctatccccctgaccg

SEQ ID NO: 173246 - DNA, 122 bp, Homo sapiens
tcagcggcagcctctccaacccagtctgtgatggccagtggtggtcagtgagggctgggccgcgaggctcacagctcaggccgcacccgccggtttcacagaccggccaggaagctcccagg

SEQ ID NO: 173247 - DNA, 122 bp, Homo sapiens
ggcagatgacaggcttacagaaaaactgtctcaagacaggctagtcccacaatgctaaggcgtttttattttccagagaggcactctagcagcagtaagactgctggaggggctgttttgtg

SEQ ID NO: 173248 - DNA, 122 bp, Homo sapiens
tttgctctcgtgacatggcaaatttcggcggcttgtctgtaaagagattagcattcgttacgctgcagcacctttcatcaaactaatgacatttcaatcagcacattttctccagtttcggt

SEQ ID NO: 173249 - DNA, 122 bp, Homo sapiens
cccagctcggcctcagtccccttcagccataagatggcggctgcggtgacatccggggcccggcacagtgattgtgccctggcctggagccctctttcagcagctctgcacccgcagcaccg

SEQ ID NO: 173250 - DNA, 122 bp, Homo sapiens
ttcggcccgggatcacgaaaggtttgggccgaatattatgcttgtgttcaaagtagttcccgtcctgtgaaaacaaagcgttaaaaaggccctcagtggaaggcggacactgttgcagataa

SEQ ID NO: 173251 - DNA, 122 bp, Homo sapiens
ttattgagaaagggagatcctgtagcaactttcactgtagaaagtacaaaggtacacaggcgactggtagatcagaaggctgggtcctgagctttctctgtagtctggtaattattaaacag

SEQ ID NO: 173252 - DNA, 122 bp, Homo sapiens
cacttgggaaggctgaggcttggccagacatggtcgtgggcaactgtcgtcccaactactcgggaggctgaggcaggagaatcgcttgaacccggaaggcggagcttgcagtgagccgagat

SEQ ID NO: 173253 - DNA, 122 bp, Homo sapiens
aaagtggggcttggccgcttttgtgtgaccgcaacaaagagcttttatatgaggcagaaacggccatcttctcgcaccgggcaggagggtgggcgtgagtgcgcgcccgcgtgtggccccga

SEQ ID NO: 173254 - DNA, 122 bp, Homo sapiens
ggacacacagagcaggtgcccaggccacaaagcagcagcctagcctactaaagcacccttcggggccttgactttcctgcctctgaaaaggaggaagaccaacattctagtgcaggatagat

SEQ ID NO: 173255 - DNA, 122 bp, Homo sapiens
cttaccctgggggtctccatgggaatgaaagccaggagttcatcaggcacccagctgagtcgagggggcgggacccagtgcagcccggcccctccctggcccaggacctcaaataccggccc

SEQ ID NO: 173256 - DNA, 122 bp, Homo sapiens
ggtaaggaagtggggttccgctgctggtgggagcacagagatcactgctggacactcaagcgtccatggggatgagcccctatcctatggccaaattaattgttcccccattaattgccaag

SEQ ID NO: 173257 - DNA, 122 bp, Homo sapiens
acagaccctcccaagagcagtggataagacaaagactgttgcgacctcagggggttgctacgagggtcaagtggggacaggagccctcgcagggctgcagtaaggagttactgtctccatac

SEQ ID NO: 173258 - DNA, 122 bp, Homo sapiens
ggcatcatgatgccagcttttggctctcctatctcactggcttcttgaactcttccctggcgtgtccttaaacattgctgtttttgagggctctgtcccattccactcctggagagggctgc

SEQ ID NO: 173259 - DNA, 122 bp, Homo sapiens
acgggagctgagccaggagagccgtgtggactgggctgctcggcctgtgtcttggtgtgtcgggggtggagaggcgtgtggactgggctgctcggcctgtgtcttggtgtgtcgggggtggg

SEQ ID NO: 173260 - DNA, 122 bp, Homo sapiens
actctgcccgctagtcagttacacggcccgctaggccagggggcggagctgggagccgggcgggtccccctcccaccgcggccgcctgacctgcaccaaggccgccagcgcgaagaaggcgg

SEQ ID NO: 173261 - DNA, 122 bp, Homo sapiens
accctgtgcacagtattctgcatggcgtcttttcattttatcaacggtggccacttccctcgacgaaacagtcgacttcattgtgacaggagtagaggtccatgctgggcaacccaccccca

SEQ ID NO: 173262 - DNA, 122 bp, Homo sapiens
cagcaccttcccgagcccgaggtggccaagccttgcgtgtgactgtgaaccagtgcctgccgcaggccccgccctcaacctcgtcctccatcgcgtgctgtggggcctggggagatgactga

SEQ ID NO: 173263 - DNA, 122 bp, Homo sapiens
tggattctgaggtggagaggaacaggaccaggcctgaggctcagaaagtcgctctgggggcggcgacatgtataccagggcgcatctggaagcagaggaacagtgacgacaggccctagagt

SEQ ID NO: 173264 - DNA, 122 bp, Homo sapiens
cctgacagatgagatcaggggcttcttcctccattcggccttcggggtcagggggttcagcgggtgacaagggagaggcgtctgagggaccgggattattcagctgacccggtgcggggccg

SEQ ID NO: 173265 - DNA, 122 bp, Homo sapiens
gcgcggacccgcgcccacgttctccctgagcgtcccggctgcgcccgccagcccttcccgcgccccaggcctcgcggaaccccccgccccggtctcgtccccaggcctgcgcaccgccccga

SEQ ID NO: 173266 - DNA, 122 bp, Homo sapiens
cctttcctggcgcgaagcgactcgccccggagctcccctgcaccgtcctgggtgtcaggacgcgtcaacccagatgacccgacccggagatcctggatcctctgccctcttccccctaccaa

SEQ ID NO: 173267 - DNA, 122 bp, Homo sapiens
gctgagtgccttctaggtactgatgctctaccaggcatagggccacagtgatgaataactcgcagtccttgcaccaagcagctcatagtctggtaggaaagacagacatgagcaaataaatt

SEQ ID NO: 173268 - DNA, 122 bp, Homo sapiens
tgctcatttaggagtcgttcaatgtaacaaggatcttggtcttcacagagaccctaaacgcgtgtggcccagggccatgtggatgccatcagccactaggtggcagcaggggccctttggat

SEQ ID NO: 173269 - DNA, 122 bp, Homo sapiens
tggtcggcggcagtcgggccagacccaggactctgcgactttacgtaagtgctttgtaggcgccggcgggcactaggggagcgggtttcctgggcgtgggcaggagtgggtcccggggagag

SEQ ID NO: 173270 - DNA, 122 bp, Homo sapiens
agaggagatggacgcctataatgccagaatggacaccagttaagcagaccagcaaatccgcgtgcgcaacaggacccaggcggctcctctcgctccatggtggggaggccgtggctggggct

SEQ ID NO: 173271 - DNA, 122 bp, Homo sapiens
cagggtccgcttcgaggacggtgctgtctttctggccgcctgctctagcggggacaccgacgaggtgagaaagcttctggcaagaggtgctgatatcaacacggtcaacgtggacggcttga

SEQ ID NO: 173272 - DNA, 122 bp, Homo sapiens
cggccagttcccggatgatctcataacaccatcctcttgatgtgcatcatcagcactaatcgtctgggacaccgggaatccctcttgtaagccgacagctctactgatgagttcagcctctt

SEQ ID NO: 173273 - DNA, 122 bp, Homo sapiens
gagccaatgatcgctcattgtcgaggagaaaagacctggagaccacggcttatccagtctcgctcctgacctgcatctgaacacctgaaggaagaaactttaacaagaaaaagacttcaagt

SEQ ID NO: 173274 - DNA, 122 bp, Homo sapiens
cccgcccgatggtgtaggagccgcggtagccgatggtgatgtagcccgagcgccggctgccgtccagcgactgggacggcgtgagcagcgggcccgccgcgcccccggacggactgcggcta

SEQ ID NO: 173275 - DNA, 122 bp, Homo sapiens
tgagtgaggattcacagggccagacagagcatgtgcaaagctgccaatgcagttcgcattcggctgtgcttttggcggagtgagaactgcatttgggtcatgtgagcagagagtgccatctc

SEQ ID NO: 173276 - DNA, 122 bp, Homo sapiens
gtaggtacgcgatcatgagccggcatgcctcccgtgccccatgcccgtgcccctccactccgcctccgtgtctctgtgctcgtgttcacgctccgctgctgtgcaacctgtcatagccgtga

SEQ ID NO: 173277 - DNA, 122 bp, Homo sapiens
cttccaagctctagtttttgttcactcaccccttcctcccttcattgtccatacagaagccgtaatgatctttccaaatagcgttttgctttagcacttaaaagccttatagctcttcttgg

SEQ ID NO: 173278 - DNA, 122 bp, Homo sapiens
acccgtcaggtcgggaggatgctgcccggctcacagtccacacatggggacgcgtcaggtcgggagggtgctgcccggctcccggtccacacatgtggacgcgtcaggccatcagggtgctg

SEQ ID NO: 173279 - DNA, 122 bp, Homo sapiens
atgcgctcccaggtgtttgcagcggaagtgggaaacctgtagggtatggtccagctgtgccgcaccgaggcgagcaggagcagggaacaggtaggaagctggacttttccttctttgcagat

SEQ ID NO: 173280 - DNA, 122 bp, Homo sapiens
gggaggcgagaggaagaagaggtggggctgggggcggggccggagcctggggcggggcttcggccttgccacctggcctcttggggtttcttcattcatgctctaaacttcttccttctctg

SEQ ID NO: 173281 - DNA, 122 bp, Homo sapiens
gccccttggcccacagccagaatgtggcactgccaggatcccaaatcaggctgactgagtcgagtgcccacatcctcaacccacagcacaccaaagggaaaaaaaaaaacaaaaaccaacct

SEQ ID NO: 173282 - DNA, 122 bp, Homo sapiens
gcagctgagaccccatcaccacatcccggggccgtcaggcatgagttgaccctgaggtgacgtcggcgccatgcctggggtgacatcggcaccatgcctggggtcaccagggccgtgctgag

SEQ ID NO: 173283 - DNA, 122 bp, Homo sapiens
gtgtgcgcgtgcgcggccacacacacacacacacacacacacacacacacacacacacaccggcgtactggaacctctctcgcgatcccgcacccagcttgaattcagcaagaatcgaaaac

SEQ ID NO: 173284 - DNA, 122 bp, Homo sapiens
ttttatagcgtcatcttttatgcctctgagtctttacctctttggattgttgctgtttgccgcacttttgtttgcttcccaggctgtttttactacatgtttctagcttctgtgtcttccct

SEQ ID NO: 173285 - DNA, 122 bp, Homo sapiens
ggcgccgagggactggttctgggctcctagtcccagcagagccgtgggcaggtcctgacccgggtccgcgattgcctcatccggcgccgccttctaggggcctgggcgcctcctccgagtct

SEQ ID NO: 173286 - DNA, 122 bp, Homo sapiens
tccagcacggagagcaccaagaggctcccaataatctgaccgctggtgcacatccttcctcggtcatcttccttccagatcagagagggaaatcaaccatctacctttttttcttccactat

SEQ ID NO: 173287 - DNA, 122 bp, Homo sapiens
tgcgcggcggcggcggcgggcaggcctggggcctgtaaacaagccgggcgtctgcccgggcgctcccgggaggagacgcgacaactccaccccctggccggcctcctcccccgagccgggcg

SEQ ID NO: 173288 - DNA, 122 bp, Homo sapiens
gggctgctggcggcctcaaccgggattcccctggaggggcagccagaggagtgcccgcagcggtcacaggagtcgaggcaggcgctgggcagccctccagagtagtcttgtttcacggttct

SEQ ID NO: 173289 - DNA, 122 bp, Homo sapiens
gccagctcccacctacccctcatcctccacaggtacccagccctctgtcccctgccagcccgtttctcctgaagtgtgggaccctctgggccttcctaatgtctcttgcttttgcacaatgt

SEQ ID NO: 173290 - DNA, 122 bp, Homo sapiens
cggggtcccggcgagagctgcgattgggcgggcgcggcgatccctttgaagtgtggctgccgatcgcggctatttgacgtgcggctcgaggaaggcgaaggtttttgtgttgctagccgggg

SEQ ID NO: 173291 - DNA, 122 bp, Homo sapiens
ttcccccgcggctgcgtagcgccccgatacttgaaggcggggggcaatccctgttcacaccgcgcttcctcccgccagctggggctgctgcccctcctcagccagctctcgggggaggtggg

SEQ ID NO: 173292 - DNA, 122 bp, Homo sapiens
ctgtctcaaaaaaaaaaaaaaaagatctgctgaagggttggttcaccaaaaagcagaatacggcaacaagaacaggtttaagagggagcagagattagtatccttttggacatgctgagttt

SEQ ID NO: 173293 - DNA, 122 bp, Homo sapiens
cttgcacaaaacagcaaggtcagggtttgcccatgagatcttctcactgcattctcaagacggtgtgtccagaccctgctctttgaccaaggagttgcatgttcaaataagcttaggaaagg

SEQ ID NO: 173294 - DNA, 122 bp, Homo sapiens
ggggactcaggcgccgggcttcattacgggctcgttggccacaccagcggccccgcctctcgccacagcctcggccacaaccagccccagccagtggctcaaggccgccgccgccgccagct

SEQ ID NO: 173295 - DNA, 122 bp, Homo sapiens
ccgggagctggcccctcggctgcttctctggctcgggggggactttctctggctcagatccggacccctgaactggacctggttgtcgtccccccgcttctcagccccctctggggttcctc

SEQ ID NO: 173296 - DNA, 122 bp, Homo sapiens
aacatgttttggagcaaagcaagatccaaagagggtaacttcgttactggaagtcaccaccgtttagcaaagaattcatggtggaatgcctgggaactcaatggccagttgggagaccctat

SEQ ID NO: 173297 - DNA, 122 bp, Homo sapiens
agtatgccacttctctggcccttggactactatggcatggtgacaaactgctggcagtgtcgggccatttagttctgcaataatcatattacctccttagacccagggacttggcaaggtag

SEQ ID NO: 173298 - DNA, 122 bp, Homo sapiens
aattgcagcagaaaggtttctgctagatcagtgacatgtggtgtgagtagatatttctcccggatctgttgactttggctgcattattcctggtcttgcggcatccaagcgagatctttggc

SEQ ID NO: 173299 - DNA, 122 bp, Homo sapiens
tcggcacctctgccccagggttgctggggtcggctgcggaacggaaatctctttatcatccgtgagaaaagttagagaggaagtgggttcctttgacagagcttactccagaagaaagactt

SEQ ID NO: 173300 - DNA, 122 bp, Homo sapiens
ttgctgagggtgaaatcataggggtgtgggaaatggtcctccttcatgctgagacacttccgggtgaggccataggagccataggtgggtcctgtgccactaacctttgccaccctctgccc

SEQ ID NO: 173301 - DNA, 122 bp, Homo sapiens
aaaataatatgctcacatcatttcatgactgtggtgctacagtgtttctaccggcttgcacgcctcctacgggtgggctgatgtttattgtattagtacataatgctgcaactttccactgg

SEQ ID NO: 173302 - DNA, 122 bp, Homo sapiens
ccatgtaccacagtggatggaaggatgcgcggtgcggcggggcagctgtcctcttctccccggacccagcgcctggagagccagccctgcagggtgggctgggcgagccaaactgcgttcct

SEQ ID NO: 173303 - DNA, 122 bp, Homo sapiens
ccagtgatccgacgtaaaggtgcaaacgtaaagcgcacacggccaatttaaaagcagcggcgctgataggcccggacgaaccgacgtgaacgcgtagaagtaaggtacgcgcgatgagctta

SEQ ID NO: 173304 - DNA, 122 bp, Homo sapiens
gatggaccccccgcctccctgacttccaaccaggcaccttccccggctccatgctcatggcgacgcagccgattttgcgtgaagacctgtgtgctacccatgggaggccaataaggagaagg

SEQ ID NO: 173305 - DNA, 122 bp, Homo sapiens
ctggaacgccccacgtggacttcccctgaaatagctactgtcttcctctcccctagctatcgaacactaaaagcatatttgaagcctgattaattgattatggcttccatgcatttaattag

SEQ ID NO: 173306 - DNA, 122 bp, Homo sapiens
ctgccctttgtgatctgttctctttcatgcagccagtgtgaatgggtatgctgcagtgcgcgctctgcccagagacgtggaaatgccaggagacccgaatactttagtggggcctttattta

SEQ ID NO: 173307 - DNA, 122 bp, Homo sapiens
ctcgcagtctgccagggccgccgggagtggggggcctcctgccgtgcctgccctgggttccgggcttgcccagtgccctattcttcacagtggcctggtcctcacccccgggtcttgtgagg

SEQ ID NO: 173308 - DNA, 122 bp, Homo sapiens
gaatgaaactcaagaagatgagccgagagaaccggatccgagaactgaccgccaacctcacgttttcttaggtctgaggccggtctgaggccggtcagaggccaggattggagagggggcac

SEQ ID NO: 173309 - DNA, 122 bp, Homo sapiens
attaccacaatgagctaacatatccaccatttcacatagttactttttttgtatgtgtgacgagacacataccttcttaccgaacttacacctgctttcttaccaaacttcaagtacaatac

SEQ ID NO: 173310 - DNA, 122 bp, Homo sapiens
ggccaaggtcataggcctcttcagggctaagattaggccgatagccactgtccatgaccccgtaggcataagtgttcccactacccgtggagaacatatttcctgagagccgagtcccatgt

SEQ ID NO: 173311 - DNA, 122 bp, Homo sapiens
gcctcctgcagcaccctggaggcccagggccggcggggcggcggctgtggggatcccgggcgcggcccacacctgggacaatgagcaggaacccaggtgagcagtttgtgggggaagggagc

SEQ ID NO: 173312 - DNA, 122 bp, Homo sapiens
gaccttccagcagcttctcagacgcgccacagtgcacgccggggcccctgcccaccgccccggccagcctgggcctggccctcccttaggtgcgcttaccagccttgccccgggtgcctggt

SEQ ID NO: 173313 - DNA, 122 bp, Homo sapiens
gtgcatccagtaacgtgggataaaacgagtttgggcactacagcaattaaagagcatctccgaggccaagtgcgggggaagtccacgctacctcggcaagcctgaaattacctgtttgtaaa

SEQ ID NO: 173314 - DNA, 122 bp, Homo sapiens
ttgatattatgaccccaaatagttaaccttagttgtggtgaattgcattcatttattttacgatcttcatgggatgaaagagtttgtcgagctgagtcttcattcagaaattcgcaaaatat

SEQ ID NO: 173315 - DNA, 122 bp, Homo sapiens
cttgagggcaggcaggaggtggagttgcagctgttggccggcatcacgttgctcgttgctcggcttatgggaggccgccctggagggcccggaggtcccaaggtccctgggaggactgggcc

SEQ ID NO: 173316 - DNA, 122 bp, Homo sapiens
agctcagcgtgtgcgcgagtcagggctgcggagggagacctgggcgcgggcgctgccgggcgctgtcctcggtgctgctcagctcagcgttcctccagagttctctccctacaccccgcacc

SEQ ID NO: 173317 - DNA, 122 bp, Homo sapiens
aaactggcttgggggtcgagtatccggggctctcccccgcactggcgcttcccgcgcgggcgccccaggtgtccgttccgttccgccctctgcctggcagggcatccagaggtgtccgcgct

SEQ ID NO: 173318 - DNA, 122 bp, Homo sapiens
atatgaagcctggaatagaaaacaagcatcttaggagaagggaaggcattgaaattttcacgcagttagccgtgcagagaaaacacagtttatttttctatgactaatatgatcattttgca

SEQ ID NO: 173319 - DNA, 122 bp, Homo sapiens
ggagggagctgagatccaccgggagattacatgatttctggggtctttaattgcatggcccggtcagcatccattagtctgctgcctacacaatgcctttgtttctcagatggtagcagagg

SEQ ID NO: 173320 - DNA, 122 bp, Homo sapiens
acttgggcaggatgtccgtggccttggtctggatgaggactttgcggctgtacagtgcaacgctggagcccagctcccggctcacatcaaacatggacggtttctgggggtgaggagaacac

SEQ ID NO: 173321 - DNA, 122 bp, Homo sapiens
ttggggaggagtgtttacaggagtgctcttcctttgggaaaaccccaaaaataaacactccgatatctgaatgtttagttcatcctaagaagtttgtagggagcagagggtgggaggttggg

SEQ ID NO: 173322 - DNA, 122 bp, Homo sapiens
aataccctctggtatttaaccactgagtctaattcgaaaaatcgggactgggcccctaggcggcaccccaggggctccaacctggcccgcgcctccccagaccttggcgctgagagcgctgc

SEQ ID NO: 173323 - DNA, 122 bp, Homo sapiens
ggggtttctccgagacctgggcgctgttctgggggagcaggggcccgggccaccaaggttcgtgcggaccgtggggtgtcccacgcccaggccgggggatcccagagccccgcttccctcaa

SEQ ID NO: 173324 - DNA, 122 bp, Homo sapiens
gacgtctccgctaaaggaagcttatcgggcagcgcctcctggtggccaaacatgacactgcgccatcaagaggtggccctggtcgtatggtgtccaagaaaacactgggaggaaaaggcatc

SEQ ID NO: 173325 - DNA, 122 bp, Homo sapiens
ctgtccctttcccgggactctactacctttacccagagcagagggtgaaggcctcctgagcgcaggggcccagttatctgagaaaccccacagcctgtcccccgtccaggaagtctcagcga

SEQ ID NO: 173326 - DNA, 122 bp, Homo sapiens
attggataggaaagcacatgagtttcaaattgtaagcagacaaaaaaagaggtgtgatttcgttttggaattcattctgaatctatatagtatggggaaaatgtgacctttaatttccaagg

SEQ ID NO: 173327 - DNA, 122 bp, Homo sapiens
gcctctgcccagcggaaagcccctctccccgcccgggtctcgctcttcgcttcctctcagcgacccagcccagctcaaatttcccagagagcaattagaacgggaattaggctgcattgatg

SEQ ID NO: 173328 - DNA, 122 bp, Homo sapiens
cagtccccggacccagcggctggcggtctgcctgagagggagccccctccgccggggaggcggcccagcccagagcccacacagctggggttttgttgtttgttgttttaattaattaatta

SEQ ID NO: 173329 - DNA, 122 bp, Homo sapiens
cctcttcatcgtcctctggcgcgcctcccgccgccacaagggccggcgcctcgcggccctcggcccctgccaccgcttcgtccaacggccttcgagagccgggccccaagcccgcagggccc

SEQ ID NO: 173330 - DNA, 122 bp, Homo sapiens
cgtagctaacacgcagcagcatggggttcccacagagcccatctgcagtggaaacgcacccgcagctgtcttttgggaatgtgcgaggatgacgctgcatttttgaaagaacctccttctat

SEQ ID NO: 173331 - DNA, 122 bp, Homo sapiens
tcagaaaattccacagcccttagccattcctcctgcttctcatgtctgggggctgcctttcgagagcagattatttgtggaaagacattatttatctggaaactgttcagtgaaaacttgat

SEQ ID NO: 173332 - DNA, 122 bp, Homo sapiens
tctgcactcacttccaaatattatttgagacccaagtttctcatatcatttccagcattgcgtcatgatttcagtgcttcttggcatattttgttttgggcttgaaatattctagctcatgc

SEQ ID NO: 173333 - DNA, 122 bp, Homo sapiens
aggtcaaggctggagccccagatgggctcccgtggggcgaagtcagaagtcagaggtgctcgaggctgccccatcagatggctcctgggagcgtgcacaccgcggtctgtgcgcacagaaga

SEQ ID NO: 173334 - DNA, 122 bp, Homo sapiens
ctcccagtgctccttgaccaaggcctgccgccagccacccattgtcttcttgcccaagctcgtgtacgacatggttgtgtccactgacagcagtggcctgcccaaggccgcctccctcctgc

SEQ ID NO: 173335 - DNA, 122 bp, Homo sapiens
cccccgcgtttaattgcgcctttgcagatgggccgcgagtgtgcgcttcatgcagatgagcgcggcctcgccgccttcctcggacctccgggagccgcggccgggcgtgctggggccgaggg

SEQ ID NO: 173336 - DNA, 122 bp, Homo sapiens
ctctttttgccgccgtactccattgagagtcttagtcatggagggaaacccgaaaaccaccggtgtccgggacagatactctgacgcattctcccggaacaccctggggactgcgagaaagc

SEQ ID NO: 173337 - DNA, 122 bp, Homo sapiens
ctgcgtcacagcctctcatgcgtcacgctggagttactgtcaccgggacctgctgcagaccgtggggagggcttcctaaaggctaatgacaatttgcgttttgtttttcccgttttcagaga

SEQ ID NO: 173338 - DNA, 122 bp, Homo sapiens
gcaaaaggctcatagccacacccgagtctaagcccgcctcgtgcagaaaaatcccactcgcgcctgaaagtcaagaaggatgagggtacccccccactccaggacatagtggaaatctgtgg

SEQ ID NO: 173339 - DNA, 122 bp, Homo sapiens
ccaggccctgtggatatcgtccaggcccagcacagaggcgcccaggaggccggggcgccgcgcccgctcgtagttgagcacgctgaacagtgccttcaccctcgaggtgagacgctcggcct

SEQ ID NO: 173340 - DNA, 122 bp, Homo sapiens
tttttcatctggttgcaatacataacacagcgccctatgtatgccatctccccagggagccgagcagcttgggaggagaaggcttgcttgcggctcccgagtttggggaaacacgggcactg

SEQ ID NO: 173341 - DNA, 122 bp, Homo sapiens
caggggccccagccctgctcacccggactcttcaggttgtagcgggtctccatggtgggtcgctggcttggctccggcctcccgggccgctgccacctcctctccacgcggccgctgcccgg

SEQ ID NO: 173342 - DNA, 122 bp, Homo sapiens
aaggccggctccgggggaccctgttcagtgtgacaacgctgacccagatattttccgttccgacccggggctccggcgcccgggctggctgtttatgtaactactgcacaatattatatgcc

SEQ ID NO: 173343 - DNA, 122 bp, Homo sapiens
agaaaccagcggcgccaccagaaggttccgtctgtggagaagggcggcccgcaagccggacgagagcgcccccaaacggaaccttgagcccaaggaccccggaggcatcgtcgaccgcaggc

SEQ ID NO: 173344 - DNA, 122 bp, Homo sapiens
cgccccgtgcacctctgtggccaaggacagcgcgtggccatcgtggacaggcacgagtcacgcagggaacacgcagcaagtctggctccggccagcggctggggcttcccaggggaacaggg

SEQ ID NO: 173345 - DNA, 122 bp, Homo sapiens
gaggctgaggcaaaaggactgctggagcccagggctttatgtccagcctgggaaatgtagcgagaccctatctctattgaaaaaaaaaggggagaggggaagggaggggaggggaggagagg

SEQ ID NO: 173346 - DNA, 122 bp, Homo sapiens
ggaagggtgtcccaggtgcaggcgaagcttccttcaggtgctcctggaggacttttggctcgcaagcgcttctccattctcccaacgtctcgggcctggtgagtctggatgtgagcgcatcc

SEQ ID NO: 173347 - DNA, 122 bp, Homo sapiens
tcccgcccgccaagttcctgcgccacccaatcccctcgcggcccagactccctcggggcccgccccttcgcgcgtcattagcaattccgccatcttgaagtgactctgtcggggactacaaa

SEQ ID NO: 173348 - DNA, 122 bp, Homo sapiens
acaggtatagaaccgaaatgcgagtgcagaagcccgttttggtgcagtggcagagattcccgtggtgcacctttgaagccgaaatttgacagaaaccaagcgagcatgccgctgaggacgga

SEQ ID NO: 173349 - DNA, 122 bp, Homo sapiens
tcataattcagatgtcacctcctcagagaggtcttccctgactgctctagctaaaattaccgcctctcctccactccccaacagcagatacatatattatttttctccctgtaactctaact

SEQ ID NO: 173350 - DNA, 122 bp, Homo sapiens
ggatggagactgagcaaaatcagggttctattggaaggcaaaattccagagaagtcaaggcgaggaaagaaggcattgtgattctgtatgctactgctcatgtgacgtatgtaaagtagtca

SEQ ID NO: 173351 - DNA, 122 bp, Homo sapiens
gactctctccccgcgttctgtaagaatcggcggcagccagcaggcggggaggcgggggcacgtgtttggatgtgggtgcttgtgtaaccagttccccaagcgccagccccgacagcgctcct

SEQ ID NO: 173352 - DNA, 122 bp, Homo sapiens
tcacacagccttggtgaggtatgactgtaattttctaggcacacatgcatggtatgcatgcgataaattttatgggttgattgacagctccgtccctgggagggggtttctagtgactccaa

SEQ ID NO: 173353 - DNA, 122 bp, Homo sapiens
tccgggggggttaggtggctggcgcggggagccggggttgtgaggggtgatgtcctcaggcggcggcgctgcggggtgcggcgaggacaccggtggggtgagagcaccggcggggcagcagc

SEQ ID NO: 173354 - DNA, 122 bp, Homo sapiens
cgagaaagacgggaaaagctcaccaaaccccataaaaaataaaaaataaaaagaaagccgcggctgtaaataaaggcaaatccgccactctctgaggggccgtttgtcctcccctccttggc

SEQ ID NO: 173355 - DNA, 122 bp, Homo sapiens
tagagatttgaaagccattaatatagaagccaggggaatgtgtgggctatcccaagcaatcgatgtttgttgaatcacttgaaaagcatgagcagtgtgctcccctaagtgcctttttcctt

SEQ ID NO: 173356 - DNA, 122 bp, Homo sapiens
ctcctggtgcactgtttgttaagcccatcggaaaagcgcagtattagtgtgggagtgacccgattttccaggtgctgtttgtcacccctttctttgactaggaaagggaactccctgacccc

SEQ ID NO: 173357 - DNA, 122 bp, Homo sapiens
ggctccaggactctccaggcttcgcaatgccagaaacttcgctttcagcaccgcggacagcgtctctgctgcccagccccatggggatgtcctggtcgcgccgccacaacccaggcgggact

SEQ ID NO: 173358 - DNA, 122 bp, Homo sapiens
acagacccagtgagccctaggccctcaccccagacccagctgctggataggacccagccccgctcccaggtaagaacttgatgacagcagggaaggcaggggtgctctgaggacacaggaag

SEQ ID NO: 173359 - DNA, 122 bp, Homo sapiens
ggtcccctccatgctagccctgctctgagggccccagctgggggatgccacctccacacacggcctcctgcagcctcaccagctactcacattgcacacgtgggcgggaagtggttaagcgg

SEQ ID NO: 173360 - DNA, 122 bp, Homo sapiens
cccgggccagccccctccccggacccgcctcgtctccgggaccgccccgctcgccccgctcgccccgctcctgggcgcaccctcccgggacgcctgctccgcccatctccggaccccgaccc

SEQ ID NO: 173361 - DNA, 122 bp, Homo sapiens
gaaggtcagcagataaacaagtgaacaaaggtctttggttttcctaggcagaggaccctgcggccttccgcagtgtttgtgtccctgattacttgagatgagggattggtgatgactcttaa

SEQ ID NO: 173362 - DNA, 122 bp, Homo sapiens
agcttccaggggctcggacctttaccctcggccacaagcagccccagtggcccagctttgcgacaaagatttcgcacgcgcacatcccgcttccggcctgggcctcagacggggaaaccttg

SEQ ID NO: 173363 - DNA, 122 bp, Homo sapiens
atgcgggcagcagaggagccagtgtctgaggtgaccgtgggtgtgtcggtgctggccgagcgctgcaagaagaacaatggcaaggctgagttctgggtaaggggcgcacgagccgtgccgtg

SEQ ID NO: 173364 - DNA, 122 bp, Homo sapiens
agtggctctgaagcactgtgtgtggtctgaatgaccgtgtggggtgagagcgcgtaggaccggtggccaggcttccctaaatgcaggccacttttgtcgttgagggtagaaggggaggcttc

SEQ ID NO: 173365 - DNA, 122 bp, Homo sapiens
attttccttgcctataagaaacactacaaggatgtgagtagaggtgaaacatagagtagacgtgtcccaattgtaccccagatgtgtttgtaaacttctaggtatggtttccaaagaaataa

SEQ ID NO: 173366 - DNA, 122 bp, Homo sapiens
gaccggcagggttccctggggcagacgccagcttcagcacagcagtggggacgtggatcacggtgaggtgttggcctgggaatgagccaagttaagccagggcagcccccttcctccagctc

SEQ ID NO: 173367 - DNA, 122 bp, Homo sapiens
ggaaggcggcgtggagatggaaggcggcgtggagctgctgagttgaaggctagggcaaaacggagaagaacctgagcaatgcaccagcacaggccccactgacgccgaggaacaggaggcac

SEQ ID NO: 173368 - DNA, 122 bp, Homo sapiens
ctctaaggtgggtggggcctggagaccaaggcgtggaggcagtccctggtgccccctgcccgtgctgagcactgctcctgccctcagatggtgggcgacatccgcaagtatgtacagcacat

SEQ ID NO: 173369 - DNA, 122 bp, Homo sapiens
gtggggctggctggggtggggacctggccagtgcaaaccagcagggccggctggaggctgcggtgactcgcccgggcagattctgccgccggaggaatcacgggctgggggcgcgcctttgg

SEQ ID NO: 173370 - DNA, 122 bp, Homo sapiens
accaagtcatggtcactcctttcaaccctgcctgcccctgggccatctgtgttgtgatgccggctggccaggatggggagtgaggatttcagtttgtcatagggcagggagatgggtgaggc

SEQ ID NO: 173371 - DNA, 122 bp, Homo sapiens
accacagccagaaagatccagacaagaacgttttctttgaaagagttgaaggagaaagcacgccccaacttttcgaatcaggcagaccatccagtcttggctggcactggtttctggccggc

SEQ ID NO: 173372 - DNA, 122 bp, Homo sapiens
gcagttgctgagccttcccctcccctcctggcgggagtgtgtgtgcaaggggccagggggcggagtcggagaaagggttgggggtgtccgtgtccagcgctcctccggacgcggctccacaa

SEQ ID NO: 173373 - DNA, 122 bp, Homo sapiens
aaacagaccctcgcccactgggatgactcatggtctctgtagaaacaggactgtgcagcacgcaaaagatgaaacaggacaaacggagggagtggactagagatttaatttcaaggcatgaa

SEQ ID NO: 173374 - DNA, 122 bp, Homo sapiens
ataacctttattcctctaaatgctttttgtgaaatgtgtttggtatttgataaatctcttcggtgcgtatctccaaatttggagataggaaccttatcaaggttatttctgttatatgccac

SEQ ID NO: 173375 - DNA, 122 bp, Homo sapiens
tgcccccctcactcccagtctgacaagcaggtgtgtctgtctctttaggaacgactcaatcgccggagcaggaagctcagaaaggacattgcagaacttcagcggctcaaggctcagcagga

SEQ ID NO: 173376 - DNA, 122 bp, Homo sapiens
atctcctggtgcgccgttttttaagcccatcggaaaagcagtcttcgggtgggagtgacccgattttccaggtgccgtctgtcacccctttctttgactaggaaagggaactccctgacccc

SEQ ID NO: 173377 - DNA, 122 bp, Homo sapiens
aagaatagtatacacagcttgccatagtagtaacttcctgctcctatccatgcgtgcatgcggccctcagagaacgccgaatgctgtgcttctgtcccaaatggagaaaggaactcaaaaac

SEQ ID NO: 173378 - DNA, 122 bp, Homo sapiens
gccccaagcccgcagtaacctcagtccgggtttcagcgtgccagtgtgcatgaaggtgtgcgtgaatcgcggatgggaggctcgccaaggcgggtgtcctggggaaggcagacattcggcag

SEQ ID NO: 173379 - DNA, 122 bp, Homo sapiens
caagaggtaaaactttaatctctgcaccttttttccctcaatttcttggaggctttaagccgtctcggcctctccctgcacacgagctgcagctaggcaatttaaaccggcagctcctccct

SEQ ID NO: 173380 - DNA, 122 bp, Homo sapiens
ctctgccgacaccggagagaggtaagcgcagccggcagggggcttcgtgtgtctccggcgcgcaccctccgcgcgggccgggttagggcccagcgggcagcaccaaggagtcgccgcccgcc

SEQ ID NO: 173381 - DNA, 122 bp, Homo sapiens
gcctggcgggagatgctggtcttggctgtgtctgcagctgcccctccacccctgtgtttccgccctgccagcacagccccagggagcagctgtgatcacagacatgaaagcaagccccgtgc

SEQ ID NO: 173382 - DNA, 122 bp, Homo sapiens
acctcagttgatccacctacctaggcctcccaaagtgctgggattacaggagtgagccaccgagtctggccagaaatactttttattagggagaggttagtatacattctgatcttcaacca

SEQ ID NO: 173383 - DNA, 122 bp, Homo sapiens
cctgaccctcagcagcctctcctggccttggcagagcccctcgtgtcctcccttgcagcacgcatgggaagaaaggccatcgtcctcgccattgctaacaccagccttgcgtttcctctttg

SEQ ID NO: 173384 - DNA, 122 bp, Homo sapiens
aatgggcggagacggcagccgcgccgtctgacggcttagccgcggtgcagactgcggcggcggtggtctgaggaagttctatcttggcgctaaagcggagacgcatcccccgacccgaggct

SEQ ID NO: 173385 - DNA, 122 bp, Homo sapiens
tgatggacaggcttgccgtaagttacacccttcggaactggacgttttcagccaccacggcgaacacgaatcctacaatcttgcttggccttgtagcccagtcggcgtgcttttatcagggc

SEQ ID NO: 173386 - DNA, 122 bp, Homo sapiens
gggagattgttttcaaggttggagctgtctgatggtggcggtgatactgcccctgtcccccgccttgttgaaacagagactttcaaaactgcccactgaggatgtcatcaaaaggaagcagg

SEQ ID NO: 173387 - DNA, 122 bp, Homo sapiens
cgctctcgcctggattcttttccttttctgcccaggcgagacccacttatttcctggggtcgcgttggagagggctttcacgcccggggtgcggaaaagaagccaaatccaccttcctccac

SEQ ID NO: 173388 - DNA, 122 bp, Homo sapiens
cagagccttggctgaaaggcatggtcctgaaatgagatggagtcccccatggagagcacacgtggaagtccacacctgagggctcactgctcttcaccacagatgcactcccctactgagtc

SEQ ID NO: 173389 - DNA, 122 bp, Homo sapiens
ttagctgggcgtggtggcgggtgcctgtagtctcaaatactaaatagccgggcatggtggcgcacacctgtagtcccagctgctcgggaggctgaggcaagagaatcgcttgaacctgggag

SEQ ID NO: 173390 - DNA, 122 bp, Homo sapiens
agatcgagagcccatctttataactttggcctcaataagactagtgatagtgtcactctacgaggggaaaggtagttgccatgatgctcttcggtttaggagcaattaaaatgactacagat

SEQ ID NO: 173391 - DNA, 122 bp, Homo sapiens
gagctccccgaggtggccgggccaccatgctgaagatggccatgaagctcaaagcccgggcggcggagagcgagaagaagacggccgcggcggctgccgaggtggctgccgaagctgcggcg

SEQ ID NO: 173392 - DNA, 122 bp, Homo sapiens
gtgcagcgtcccaggccgccccgcccaacccctcctcccagtgctgaagtcccaaggagccgccctgcaggttaggcccttgtgtctctaagagaggggcgttcttgtgtggggtgcccggg

SEQ ID NO: 173393 - DNA, 122 bp, Homo sapiens
aaccggattctctgggctttatttctgtgaatttacccatagcaacagtaattttacctacgtaaataaatgtcgattgtgctgagtctggaagcgcggacgacccaccttgagatgcatct

SEQ ID NO: 173394 - DNA, 122 bp, Homo sapiens
acgacgagatctctgccattttggagcccaggtcgagcagcgagtaggggctgcccgcggcggcggcggcggcggcagcggcggcggcagcggccgactgcgggaagaagacgcgtgcggcg

SEQ ID NO: 173395 - DNA, 122 bp, Homo sapiens
cccagcaatccctcctgctgggattgtttttttctttaaaaacaacccctgtaactggtgcgtcatgtgtgtctgagattcttgcattgggtcaactgatgggggatccagtggtgactagt

SEQ ID NO: 173396 - DNA, 122 bp, Homo sapiens
cgtcagccgggactagcgaggctggagtcagaccctgggggacggagtctccaccagcaccggcagggatggcgttccatccgtccacacattatccttcctgagaaatttctattacttgt

SEQ ID NO: 173397 - DNA, 122 bp, Homo sapiens
cctccacctcctggttcaagcaattctcgtagctgggattacaggcgcacaccaccaacccggcttatgtttgtattttttctagagacggggtttctccatgttggccatgcctagtcttg

SEQ ID NO: 173398 - DNA, 122 bp, Homo sapiens
cttcattgctgtagtctacatgagaatagacaggaaacccaagtttgcccaatttctgggcgtgggaatagatgacatacgtcacaaggccatggagccggtattccggcaaggtgcctgcc

SEQ ID NO: 173399 - DNA, 122 bp, Homo sapiens
tgactcacccaaaacagcaaggacaaggaagaagaaggcggcaacgaggagaggcaggtccggcctggagagcttcagcagcctccacatcaagactttgttgttcacctggtcctgctcct

SEQ ID NO: 173400 - DNA, 122 bp, Homo sapiens
aaagcaccccatcagtgccaagtggctgtgggagctcctcaatctggatgcacagtttcccgtggggttttcaccctacctaaagaatgctttaattgctgtttttcaaaattgtctttcac

SEQ ID NO: 173401 - DNA, 122 bp, Homo sapiens
ctcttctgcgtctgtggcaccagagtcaacattctggaagtggcctcgggggccgtgctgcggagtctggagcaggtgagggcagcctgggtgggtgaggggcaagtggagagggcagccca

SEQ ID NO: 173402 - DNA, 122 bp, Homo sapiens
cgtgatctgcccgcctcggcctcccaaagtgctggaattacaggagtgagccactgcgcccggcccattaacagtaatattaacagtaatggcaggttaatgcttacatagtgcttactaca

SEQ ID NO: 173403 - DNA, 122 bp, Homo sapiens
aaaaatggcgtggaggtaaatccctttcagcagctgaatagaaggctaagatggccgcgacgtttacactttgtacaaaggttaggaaacagttccttgtgagggaaaaggagaaccggccg

SEQ ID NO: 173404 - DNA, 122 bp, Homo sapiens
ccaccggaaaaagcagctctcggggcggggctggcctaggattgacgggctctgggcctgcgcatcggagtccggggaggtaggcgctagtctcctcagggtcagccgcaggactccttccc

SEQ ID NO: 173405 - DNA, 122 bp, Homo sapiens
agggagcgagaagccagagtgactgtaatcatacaacgatttccaacaacaaaggagagacgcacacagctggtgggtatctgcagtgagcaccaagtggcttccgggggtttcttttagaa

SEQ ID NO: 173406 - DNA, 122 bp, Homo sapiens
atgaggctgccatcttcattggtaaccagcagtggagactttgactaggtatgagccagtcggacatcagccttgccctgacctcagtgatgtgggcgggacccaggctggggctgtgatgc

SEQ ID NO: 173407 - DNA, 122 bp, Homo sapiens
aaagagcacacatgtgagacgctgctgatgtgcattgtcactgtgctgagtcacgggctgcggagcgggggtggagtaggagatgtactcaggaagccgtccaaagaggtaaattaatcccg

SEQ ID NO: 173408 - DNA, 122 bp, Homo sapiens
cttaagtggttgcattcaacaaaccagtttttagtgagtgccctcctctacaaaacacaccgaacactaaggtgataatcattgttcccaagttgctcacagtctgggaaaggtgttgtagg

SEQ ID NO: 173409 - DNA, 122 bp, Homo sapiens
gccctgcagccggggagggctcagatcctggggcagtggctggacagggacacgtgaccccgctgcgctgtccagcagcggcggcctctgcggcgtgggcagaggtaacttggccgtgtgca

SEQ ID NO: 173410 - DNA, 122 bp, Homo sapiens
cacccgcggattggccgatcaacggtgacgcctgtcagtggccagactccgattggtcagcgggtagtcccgccccccccccccccccccccccccccaaccgcgagtgtgggaattcggcg

SEQ ID NO: 173411 - DNA, 122 bp, Homo sapiens
gctggggtgctggggaccccagcccactaggcaggagaacaggtgcccatgaagtcatcacgaagagggacgaaagcccatcccctgccacgcaggaggagccggggtataaattctgctgg

SEQ ID NO: 173412 - DNA, 122 bp, Homo sapiens
gacccagaaaggtggtctgcctggggcccagatcactgatgagcacgagattggtcacagcgtcagcaaagcagacagagctcaggcagcccccgaggccctgcccccagctgcccagctgg

SEQ ID NO: 173413 - DNA, 122 bp, Homo sapiens
tgacatcagctagccccctcgcggctgccgggagctgtgagctctgtgctggggccaggccggcaccaggcacagacacttaggcccttgttgggagaacagagagaggctctcttgtccac

SEQ ID NO: 173414 - DNA, 122 bp, Homo sapiens
cctctgacagcctctgtccttaaacccctgtgagagacccggtgggtcccacgtgacacccgagaatcagggaaggatgccccaagccacaacacgtgccaggtcctccccggccagggtct

SEQ ID NO: 173415 - DNA, 122 bp, Homo sapiens
acttccccatcccattttttatgttctatgctaatttctcaagaaaaataggcccggcaccgcctctgcgcacaaccttgctggtctggcccaggcggggggcggggccagcacgatgagcg

SEQ ID NO: 173416 - DNA, 122 bp, Homo sapiens
agcgcctattagtgtcatcctcaccgtcacggccggcgcctcctcctggattcattcactcgctcttttcattcacgaaggtagtgaggcctagtggaaagccatggagagcgctctccccg

SEQ ID NO: 173417 - DNA, 122 bp, Homo sapiens
gtccgggcggggatgggcgggcgtggggatgcgcgggctggggcgcgggggtcgcagagccgcaggtccggccctgccggcgcgcacttaccccactcgaggaactcggccacgtacttgtc

SEQ ID NO: 173418 - DNA, 122 bp, Homo sapiens
gccacatggtagaggggcaggaggaaggtgggccaggcgaggcctcccctccactcccctcgcgtccgcacctgcccaggctctcctggagttttaagccctcccctgaggccagctgctcc

SEQ ID NO: 173419 - DNA, 122 bp, Homo sapiens
agagcagagagcttgggaaagaagtctctgaggagaaagaatgaggcaataagtcagatgcgtatttgcggacctcagaaaaatttgagtacataggaaacaatagatgaaggatagaaata

SEQ ID NO: 173420 - DNA, 122 bp, Homo sapiens
ggtagaggagcccggagccaccagcccagccagacatgctgtcgtctctgttgcaggagccgccctgcctggagctagcctgggggcgagccagggtcccccaacccccgggatgaccgcgg

SEQ ID NO: 173421 - DNA, 122 bp, Homo sapiens
gcatcgatgtcgctccgagtcttcagcactgggccgcgtatgacagcatcttagtgggtgcggagcgggacagcgcgccgggggcgtggcaggggcgtggcctgtccgcggggcggggagtg

SEQ ID NO: 173422 - DNA, 122 bp, Homo sapiens
ctgtggtatcatcttcctgcccgcggttttgtcctggccgtggcaggttctgccagggagcgggaggctgtcagctgggtggaggggggctgtgggagtgatagcctggggtgggggcatac

SEQ ID NO: 173423 - DNA, 122 bp, Homo sapiens
gggcacagagcacaggtggagtggcttcagccacccatcgactctcatggggagtaactccgtgctgagtgcccaggagctgaccctgatgtcagaacctgaaatattgcagagtgtaaaaa

SEQ ID NO: 173424 - DNA, 122 bp, Homo sapiens
tagcgagcgccacctcgacaggtctgaggtccagacaggggtggagctgtcacaggcagccgggtggggctgtgatctgggtcctcccagcctcacggtgatttggaatgggaatacggttc

SEQ ID NO: 173425 - DNA, 122 bp, Homo sapiens
ctcaccagaggctacggggcgcccggccccgcacacccaagaaacactgccaccgcgacgcgcctgcccccaggatcctctcgcgagcttcagtacccaaggaagatgggccgtcccggaag

SEQ ID NO: 173426 - DNA, 122 bp, Homo sapiens
tcgtgggggaggctccggcggcgtaggagcccacagcgaggtggggaggctcaggcatggcgggctgcaggtcccgagccctgccccgctgggaggcctggggaggcagctaaggcccggcg

SEQ ID NO: 173427 - DNA, 122 bp, Homo sapiens
cccccacacgcggtgccaagagcccggggtgagctctcagaagtgtccctgcgactccagcgggtccaagcctagcaacttgtagagatgcatcaatcagtttgaaatgggaaaagaggaaa

SEQ ID NO: 173428 - DNA, 122 bp, Homo sapiens
cagacaatggaaccgtttcattaacatcaacacagatgcgggacaggcctcattataccccgccagcattaacatggacacagactttaagtctgataagaaacgttttacaacctattctc

SEQ ID NO: 173429 - DNA, 122 bp, Homo sapiens
tgcccgcgcaagccccgagcgcggccggccggcgcggcctcagggcgggaagatgccgcgcgtcgtgcccgaccagagaagcaagttcgagaacgaggagttttttaggaagctgagccgcg

SEQ ID NO: 173430 - DNA, 122 bp, Homo sapiens
tgtgcagtctgaagacacgggcaatgtagcagtgagcaagaactcagaggcaatagtgaccgggagagcctggtgtttgtatccttgagggtggcccaggatgcaactccagcgagacttgt

SEQ ID NO: 173431 - DNA, 122 bp, Homo sapiens
aaatgctaacatgtgagattcaatcttccacgtaaaacactcttttccttgggttcttaccgaagaaggaaaaaaaaaatccagatactgaattatattgtcactaacactctggtggaaat

SEQ ID NO: 173432 - DNA, 122 bp, Homo sapiens
aatcccatgtatgggatcacagaaaacacaccagtaggatgggctttatgtcagaagcaccgggtttcagggttcccagcagctacctgccctggtaacaatgcagatttgggtcccagcct

SEQ ID NO: 173433 - DNA, 122 bp, Homo sapiens
ctccagggccctcccctctggcccaggctctagtccccattaatcacaccgcgcgggctgcgacccctttaagtccggcttggatgacccagatccaaagtcatcgactctctagctgctat

SEQ ID NO: 173434 - DNA, 122 bp, Homo sapiens
aacaaacacaagcgtgagccacaccagagccctccagctgactgcctagcagcagttacacggtctcccatcaggaccctgtgaccagaactaccaggcagctttcatggaactgaagttgg

SEQ ID NO: 173435 - DNA, 122 bp, Homo sapiens
ttgctttgcatctggcatctttatgtggagagcagtcagggcaatagacatacgttcaaacgcaggttactgcttatcagttggttttaaaaatatatagaaattaacaaattattcttttg

SEQ ID NO: 173436 - DNA, 122 bp, Homo sapiens
cctgccctgctgtggtcaggcagggcccatggggcgcctttgtcctgacaggaggagtggcggggctggcgtggccccgtgcaccctcggctctgcaggctccgctgccttccccgtccctg

SEQ ID NO: 173437 - DNA, 122 bp, Homo sapiens
cgccgcccgcccgcccgcccgcctccgcccgcggcaagccagcccgccggcgccccggagcgctgccgccaccgtcaccgccaccgcccggtccaggcccaagcccaggccctgcgcggagc

SEQ ID NO: 173438 - DNA, 122 bp, Homo sapiens
cgcggggtttctaggagagctggctccgggagggaaatgtcctcgaggtagtggcggccgcggcccaccaccaactgctcgccaccgaccccactactcgccaccgacccgctgctcggagc

SEQ ID NO: 173439 - DNA, 122 bp, Homo sapiens
tttctcttgtctggtcttgtcgtgtctccccatggcctctgagggccttggccacagtcccggtttcatcttcctctctttacctgctcttctatcccacctacaggtctagccttccctgc

SEQ ID NO: 173440 - DNA, 122 bp, Homo sapiens
ctctcggaggtcgcttggggtcggaatgtgggtggcaggtctccaatcaactccgcctaccgctggggcccccagctccaaggagcagagcttcaaggggcagaattcagccccagtccaaa

SEQ ID NO: 173441 - DNA, 122 bp, Homo sapiens
tcccccggctgccctctccccgcttaactactctctggctctggaggaccccgggaggtgcgggatgcccactggggacaactgtacatggaaggtgacagattccaccccaaggcctctcc

SEQ ID NO: 173442 - DNA, 122 bp, Homo sapiens
ggtaggggtgaggcaggggcagcactgacgcctcgcagggctgagtagcaacagctcctccgcgccgcgtttccggagaccctgaaggagtccgcgcgtgcgcagagcgcgtcccgggaact

SEQ ID NO: 173443 - DNA, 122 bp, Homo sapiens
ggaaccagcatcagaaacctcgatttagagtccaatttggaaacagatccgtgcctttctcggtgaaatgggaagttgcctaaacgatgcatctggctttagattttatggggaatatgatc

SEQ ID NO: 173444 - DNA, 122 bp, Homo sapiens
attcaacactccagccagaggaagaacagcaagggggccagccatacaagttcacctgcgcgtccggggtctcggttctgctgtggcccggctactccccattctcaactgtgttttcttca

SEQ ID NO: 173445 - DNA, 122 bp, Homo sapiens
aacaggctgccgtaaaaatttccctccagaagccgttccctgtccttgaggcttatgctccgggagggcctgctaaggtctagctccctaggtttgtcgacaatgttatcgtaggaatgctg

SEQ ID NO: 173446 - DNA, 122 bp, Homo sapiens
cagaggaagggggtgtcggggagctggtgcggctgtggcccccctgggtgactgacacggcggtcttgacagcatagatgtttgcctcctcttggaactttccgatgtttttcttatagcga

SEQ ID NO: 173447 - DNA, 122 bp, Homo sapiens
cccacgtacatgcacgccatgtggtgagtgtttcaggatcctccaggtgccgtgctcccccgccctccgtggcactgtgatgtcatggaattgcacggagctgggcagggaggccccacacc

SEQ ID NO: 173448 - DNA, 122 bp, Homo sapiens
aagcagatgtgaagccggtggggaagccaaaagtggggtcgggacaaggtcagaggctgacgctgggagacagagacagcagcagtggccttggacctgagagcaaccgagtcagggagggg

SEQ ID NO: 173449 - DNA, 122 bp, Homo sapiens
ctctttttcagcaaactgggctgccgtatctcttcccacatgggggcctcagtttgctcccgtataggagttggttgaaatgggaaatctctaagactcgtctagtttcccagttttttaag

SEQ ID NO: 173450 - DNA, 122 bp, Homo sapiens
ctcgcctgctctccttcccttccacagctcccacccacactgaacccactcccccagtaacgcaccaagtgttcacaggagctctcagctgctggatggagttggacccggtccagtgctcg

SEQ ID NO: 173451 - DNA, 122 bp, Homo sapiens
ctcgggagccgaggcgtggaggagagcgcggacgcgggcgcgcggtgcatgtcacgtgatcgcgccggcttaccttggtgcccatatttgattagggcacccgggttccgccgtcctgctct

SEQ ID NO: 173452 - DNA, 122 bp, Homo sapiens
gctggcaggccacgtgaactgaaggctgaggccacatgaactgaaggctgcgcggccctgcgggagtggaggtgcggtccaagcccgcaggcagacacaccacgcctcgtcagggtctgtct

SEQ ID NO: 173453 - DNA, 122 bp, Homo sapiens
agccagaagacccggcaagcaaggtgatcccaccttcttccacctgcttagttctagctgcgatggcagctagcagctgattggatggtgcccacccacactgaggatgggtcctcctctcc

SEQ ID NO: 173454 - DNA, 122 bp, Homo sapiens
gaagcatgagaagtcccgccgggccctcaaatggcgggaggagcagcgaaaggagtgctacgctaaggacgacagcgagaaggactcagacacaggtgatgaccaaccagacatcctggagc

SEQ ID NO: 173455 - DNA, 122 bp, Homo sapiens
gcctcaagagatgctcccgccttggtctcctagggagctggggttataggcctgagccaccgtgccaggcctgatgcgctcttttccgtggttacgttctaccagtgtgacctccatccctt

SEQ ID NO: 173456 - DNA, 122 bp, Homo sapiens
gccatggcaggtttcctggggcggggaggaagtgggaacagagaagaggaggaacaagtacgtgtacattgcagcacacacctgtcaccaggtgacctagggtgttctcccctgcagcaggg

SEQ ID NO: 173457 - DNA, 122 bp, Homo sapiens
gacctttgtcagtgtaacaagcaagcatggacgctccctgtgcaccaggactcagcagaccgggcgcagtgagctctccccagatatccggaggacccggaaacggaccttcccctgggaga

SEQ ID NO: 173458 - DNA, 122 bp, Homo sapiens
aagggggttgggttccttcaggggctgatagtcccgagttgggccgaactccaccactttcgaactttgtgaacttgggcaagttttttaacctctctgaatctggttttgcaactttatta

SEQ ID NO: 173459 - DNA, 122 bp, Homo sapiens
ctgggaaacagactcctcatcacctcctccagttttctgccccttcttcacctctcctgacgctccatccgtaccttttgcaagggaacgtgccataattcggctatgctctattttcttgt

SEQ ID NO: 173460 - DNA, 122 bp, Homo sapiens
tattcatctccatcctctccctgttcccaaagttgcattctatgacacaactttacaaaacgatttaaatcatggactaatgtacatgtagaattcaaataaatctccaagtaagcctaggc

SEQ ID NO: 173461 - DNA, 122 bp, Homo sapiens
gaccaaaagataaagctgatctcgaggtaaccgcgctcactaatgaagatctcgtggacccgcttgcgaggtataaagagaaacctagtcctactggagaacaaccaggaagcgatgtgaga

SEQ ID NO: 173462 - DNA, 122 bp, Homo sapiens
cgagcagaagaaggtggtgtggacggagcagagcccccgatgatgcaccgtgccccttcccgggactgtgggggcttctgtgtgcctgttaatgcagtcctgttcctcagcccaggccctct

SEQ ID NO: 173463 - DNA, 122 bp, Homo sapiens
ggcgcggacaacaccccgggcactgcgcttcgccgccgcgcctcattggccgggcgtgcgcgggaggcggggcgcgggggacgtggtgggcgcgcgggcggggcgcggggacgcctcagaca

SEQ ID NO: 173464 - DNA, 122 bp, Homo sapiens
ttattagcgggggtcctttgcagtgtccaggtttgagtcattgaggagggctgaccatggcgaggctatgaagccctcactataaggaggtctttggatccttaccgccgtctccttcccta

SEQ ID NO: 173465 - DNA, 122 bp, Homo sapiens
gaagattttctagaagcactatttacacaaatatgcaaatgtgaaataaccgatctataacgtgaaggaggcagacatgagctgtactactcagtatgcaccacagaataagagtttgccgt

SEQ ID NO: 173466 - DNA, 122 bp, Homo sapiens
gccaatctgcactcactgaagaacacctgcaaccaaaggctgtgcctattctcttttgtgcgtttgcagctatcaaaataaatgagttatgaggatgggaaaattacatttcttttcagagt

SEQ ID NO: 173467 - DNA, 122 bp, Homo sapiens
ttgggcgaatctggatgctgtatacacagccgacacacgcacattaggctggggcgtcttcgcgcctgcgcagctgcgctgtcaggcggctgaaaacgggggggttggggggaggggggcgg

SEQ ID NO: 173468 - DNA, 122 bp, Homo sapiens
acggagcgttttggtggagacactcactggggcaatctgaggtaatccaacagactgtggcggagggaccggaagcgccaggcagggacccggggtagatgctaaatccaaactgaaacgta

SEQ ID NO: 173469 - DNA, 122 bp, Homo sapiens
cggagccggcacacggacccccgtccttggaggtgaagacgtggcaggtggtcacgcgcacggcacactcacgttttcacgtaggggtccgagtagccgttggcgtccatggcggccaggtg

SEQ ID NO: 173470 - DNA, 122 bp, Homo sapiens
tcacgaagtcacctcagacagcacaatcttcaatgtctagccaagctttcaacaactgaccgggcactgccgacctctgtcatctctgtcctcgtctgcccagacacaggctccacctaacc

SEQ ID NO: 173471 - DNA, 122 bp, Homo sapiens
tctagtccatcactcaagcaattcagagtatgtaccttcaaaatgataaataagcctctacgtccacctatcctacaaaataagcccttgtaaaagaaatatcaagcaactaaaagagaagg

SEQ ID NO: 173472 - DNA, 122 bp, Homo sapiens
attctttccgctccaggaccgccctgggcctgcaggatcctgggcgggagcccaggtgtccgggatctgggccactagggactggggaggaacctctcagagaagcccatagcccgcagcgg

SEQ ID NO: 173473 - DNA, 122 bp, Homo sapiens
ggtcgggcaccagggagctgctagaggccatgagacgcccagaggagccgactggagacccgctcacaaccggcaccggcagcagcggcggcggaggcgacagctccagccggacatcgccg

SEQ ID NO: 173474 - DNA, 122 bp, Homo sapiens
aatgatgtacataaatttggggcgtgcttgcaccgtccgaatgggcctggggtccggcggcggagagtgacctgggcggggcaggaggtggcagcgggggtcctcccggctcaccagagaga

SEQ ID NO: 173475 - DNA, 122 bp, Homo sapiens
aaatttacctggatgtcctgtattttatctggaaaccctacacagaaatcaaatggctcacgctgtgtctcagagctgcaacgatccaacgccctccatccttcagaggctgtctgagtccg

SEQ ID NO: 173476 - DNA, 122 bp, Homo sapiens
tatctatatcaatgatattgatcacgtccagggaagaagcctgggcaaaactagagacaccgagtgtcagcaaaagaaagcttcttaaccacaagttgcgtgccgcctgaggaaggtgccct

SEQ ID NO: 173477 - DNA, 122 bp, Homo sapiens
gagtttctcttctccctctcccagcctgcgacgggtccttcttcctggacactcacgacgcggacccagttctcactcccactgagtgtcgggtttctagggaagccaatcagcgtcgcgcg

SEQ ID NO: 173478 - DNA, 122 bp, Homo sapiens
agagtgccaacgtccgggccatggaggtttggcgaattggctcagatgacggttacactccgctgcgtcttcttccaaaggcccagtcaggccaagctacctccgcagcatgtgtggcggga

SEQ ID NO: 173479 - DNA, 122 bp, Homo sapiens
gccgccggcgccggggtcaggcctggtggacccgagctccttggtgagacctggacccaccgtcttctccttcaaaagcacagggtggcagcggggaaaggatacgttcccattgaaggggc

SEQ ID NO: 173480 - DNA, 122 bp, Homo sapiens
gtaggccaagacaaacccttgagacttaaaaatattgctaaataatcagtggaggccaggcgtggtggctcatgcctgtaatcccagcactttgggaggccaaggtgggcagatcacttgag

SEQ ID NO: 173481 - DNA, 122 bp, Homo sapiens
ggcgtaggaccctctgagccaggtgtgggatatactctcgtggtgcgccgttttttaagccggtcggaaaagcgcagtattcgggtgggagtgacccgattttccaggtgcgtccgtcaccc

SEQ ID NO: 173482 - DNA, 122 bp, Homo sapiens
ttcagtttacggtcagaaaatgaacacagacacttcgtgatactctacacttttcaaaggcgtaagggatgccttttaaaggattatggattagaaaaattcctccctctttcttgtgcctc

SEQ ID NO: 173483 - DNA, 122 bp, Homo sapiens
aagaggaaaaatcatacatgcccgtaggggcaggcaagcaacgtaaacagatgaaggaaccggatggtggtttctgcacagacaccctccgtctgcgtattaaacacgcaggaatactcttc

SEQ ID NO: 173484 - DNA, 122 bp, Homo sapiens
ctcagttcagattgggtaatacagctgaaccctgattggataaagcagatgagttctgatcggttacatcaggtgagccctgattggtcaattcgggtaaattgtgaaaatcccaaaggggt

SEQ ID NO: 173485 - DNA, 122 bp, Homo sapiens
gaggtggaggtgggcgacaagacccactgggcagtgggtgtatgccgggactccgtgagccgaaagggcgagttgactccactccctgagactggctactggcgggtgcggctatggaatgg

SEQ ID NO: 173486 - DNA, 122 bp, Homo sapiens
ccggcgaccgcaaccggcggatttgctttctgctgagagcctcttttctttctgcagggccgagcaaaaatattaaatggaagcaaatgaagcatcgaaatggagaccaatttacagaaatg

SEQ ID NO: 173487 - DNA, 122 bp, Homo sapiens
gggtggggtggagggttgcacgtccccattctggggttcatttggcaacagctgctgcaacgagcgcgggagccaaaagggggagggggcgccagcctctccccttcccctcccccaccgcc

SEQ ID NO: 173488 - DNA, 122 bp, Homo sapiens
tatatttttagtttttggaagaacctccacattatttcccacagtggttatactagtttacgttcccaccaacagtgtacaagggttctcttttgctacatcctcgccaggattccttattg

SEQ ID NO: 173489 - DNA, 122 bp, Homo sapiens
caaaataggggttgagattctggtctctacaagcctttcaagcgccttcaactttggcggcggcagcagcaggttgcgttgccatggatactgtactgtatggctgtggcggcggccacggc

SEQ ID NO: 173490 - DNA, 122 bp, Homo sapiens
ggggtggaactgagggggcggggacgcggcgggcgggtggggccgcctcccggctgggcacgcctccaagccagactggacgcgaaggaaaccggaacctgtctgcctacggtgcctgtttc

SEQ ID NO: 173491 - DNA, 122 bp, Homo sapiens
tgggcgtggggggccctgagccttgtctgaagtgaccaaccccagtgctcattccccagacgtgcgtttgtctgcttctgcgcacttctattcaccctacaaaaccccggctgcagtgcccc

SEQ ID NO: 173492 - DNA, 122 bp, Homo sapiens
acctccgagtcagggaggattctacgccagggagcgccccagactgagagcgccccagaccgctacactcccggacccggagcttcgcccgaccgcgggcagtgcccacctgcagcctccac

SEQ ID NO: 173493 - DNA, 122 bp, Homo sapiens
ttgtgattggaaggaatgcgcaagttggtctggggtgctgtccctgggcgccgaaccagccggggacatggcccctggagagctgccgaccccggggctaggggagtggtcttgcgaggagc

SEQ ID NO: 173494 - DNA, 122 bp, Homo sapiens
gggcacactttagatttatacacccaggctgcccgatgctcacttctccgctgcagtggtcgcatctccagccagctgttatcaggctctgctgacactgacaatggctggtacccatgcac

SEQ ID NO: 173495 - DNA, 122 bp, Homo sapiens
agtgagccagtcatgcatgggccgagaaccaggtttggcatattgtagctgctcagtggacgttagctgttatgattggaccacaacgtgcttccgtttcaattctgtgggccttttggagg

SEQ ID NO: 173496 - DNA, 122 bp, Homo sapiens
caccattcagggtgcaggtgtcatggcctggaaatggcaatatctgagcaaacaggtgggcgtcgcttcccggcggtgcggtggccgctggctcgcagcgcgctccagctttcggcgccgcc

SEQ ID NO: 173497 - DNA, 122 bp, Homo sapiens
catccagaatgtagtttgctacagtgaacaccaatgtcaggagcaggcatcaccgtgagacgccacgggggcaggtcagcgggacggggacagggaggttggtcatcgaaaggcaggtgatg

SEQ ID NO: 173498 - DNA, 122 bp, Homo sapiens
actggagagtgtcatggaggcctacgagcaggtccaaaagggacccctgaagctgaaaggcgtcgcagagctgggagtgaccaagcggtgaggcccgagggcccgcgggattccgtcttcat

SEQ ID NO: 173499 - DNA, 122 bp, Homo sapiens
aagatgacctttagtaggagctcccaacccagaaccacaggaaatcaaaaaaagcccgcacgggcggatcacgaggtcaggaaatcgagaacatcctggctaatacggtgaaacccagtctc

SEQ ID NO: 173500 - DNA, 122 bp, Homo sapiens
gagagtgcgtggaggagacgtgcagctacgaggaggccttcgaggctctggagtcctccacggctacggtgagcctgggctgctcggacggtgccggggcctcagaccgggcccaactctag

SEQ ID NO: 173501 - DNA, 122 bp, Homo sapiens
cttaagaatttccagtaatctcagttccctctttgttctgcagttgagttttactgcagtcgcaactatagtttctgcccatataattattttgtaggaaaatgtcagtagttttgacaatt

SEQ ID NO: 173502 - DNA, 122 bp, Homo sapiens
ggagcaccagctggagctgggtaacttgcaggccaagcatgacctggagaccgccatgcacgtgaaggagaaggaggccctgcgagagaagctgcaggaggcccaggaggagctggctgggc

SEQ ID NO: 173503 - DNA, 122 bp, Homo sapiens
taaaggaggcttcccttacaaatgctggatttctgacagctagttttcagacttttctttcgcaagttgatatctagtaactcaggatcactgcctgaaaatcgcttccaaagggttcaaat

SEQ ID NO: 173504 - DNA, 122 bp, Homo sapiens
tttttggaaccactcatgctaatatttgctttcctgagcaccaactgtccgttagctacacgttcaaaggattgaaaagaaaagagtgttaaaaattgtaaagggggaagaaagggaaagat

SEQ ID NO: 173505 - DNA, 122 bp, Homo sapiens
gggagggcagggcaggacccatactcctggaggcctgcggagctcagggaccttgagggccgcgaggcagcactcggatgggccgaggcgggggattgtccaggacgggctcgggccgagcc

SEQ ID NO: 173506 - DNA, 122 bp, Homo sapiens
tgactttaggagtgaagccacggaccctcacggtgagcgttacagctcttaaaggtggcgcgtccctagttattcgttcctcctggtgggttcatggtctagctgacttcaggaatgaagcc

SEQ ID NO: 173507 - DNA, 122 bp, Homo sapiens
tatatactgagtagcatttgagaagtgtaagacaacttagcacagagtaaacccacacaacgggacaccatcggtaactatgacagggagtgaaggaggataattggggaaaacatccaaag

SEQ ID NO: 173508 - DNA, 122 bp, Homo sapiens
ccagatgtggcccctccactgccaacgacaggggctgggaatacagggccacctcctcgacgctccccactgcccactgcagaagctgcaaatgcctcttgggaggaagatgagaaatcagt

SEQ ID NO: 173509 - DNA, 122 bp, Homo sapiens
gactacttgctgccaaaaggaaaatggtgaaggaaattcttttttacttgctgtcactgccgtagtttttaaatgcatgtgttaattctccatggttttgtattttagttgaatagcattta

SEQ ID NO: 173510 - DNA, 122 bp, Homo sapiens
ctgtcacgcatacacacacgcacatactcctgcacatgttcccatgcatgtgtgtgcactcggaccgagcatctcccacgcacctctaccccaccccaagcacctctctccccccatgcacc

SEQ ID NO: 173511 - DNA, 122 bp, Homo sapiens
gagcacagccttttctcatctgttcttgctcttggatggggggctgctactccggagcggcgaactggcgggcgggggtgcgcctgtgagtgtgagcgcgcgtgtgcgtgtgtgcgcgcgct

SEQ ID NO: 173512 - DNA, 122 bp, Homo sapiens
tctgaaccaggagcctacccctgtgcaggaggctcttctgcttaaccacttgaaggtttgcggagttttctccataaaaggaagccatttattcctctggagctaaaatatgcctccctcca

SEQ ID NO: 173513 - DNA, 122 bp, Homo sapiens
gtgtgagttggctcccgcaggcggtgaaactgcctcttggctaaatggagtcctggtggccgggagctgaccactgggtctggctgaggacgcagctccaggccgggacattgtcgctccct

SEQ ID NO: 173514 - DNA, 122 bp, Homo sapiens
aagctgaatataaacatcatttaattccccccacacagacagcctccgctcctgtgagggcgtggggaaaacggagtgggagaagggggctagcgaggaggaagaggcgggaggtgcggcag

SEQ ID NO: 173515 - DNA, 122 bp, Homo sapiens
agcaaaatttctagggcagctgaagtctcacatctacactccaaactattgaaagtttggcgtgtaaacatgagacttcagatgccctagaaattttttttctcccatgccttgaattaaaa

SEQ ID NO: 173516 - DNA, 122 bp, Homo sapiens
gtctcccttccaccctgtggaagtagagtccttcctggttctcatccttccagtagctcccgtgcctccagggtctttgcagtcacatagagggtttgagcaagtgacttatctgacctagg

SEQ ID NO: 173517 - DNA, 122 bp, Homo sapiens
tccttcccaccactgctgcctaccctccggttccaggtatgcaggcttcctcccttctgacggttcctgctgctggagtcgtccttcctgaaaccctgcctttgcttagcctcattcccatc

SEQ ID NO: 173518 - DNA, 122 bp, Homo sapiens
tctgtgatgaatacagtataaagttaaccccccacatggaatgactaacaaaagcagatgcgaaacagctaacaaagaaagcaaacacaaagataaaacagcatgcgtcaaatcctatgtca

SEQ ID NO: 173519 - DNA, 122 bp, Homo sapiens
gcaggccaactggtctgacccaaggttgtctgtggccatgttaggacgtatattcttactcgccgagcgacgcagcccagagggttcaggaaaaggaggtggtgagtgggcagccaggatgg

SEQ ID NO: 173520 - DNA, 122 bp, Homo sapiens
agcagctaaagggctggccctgtaacatctgattgcttagataactcccactgttagctgcggtttctacaaagatggtaatttcatgccacttgttctaaagcaatcttcttccccttcct

SEQ ID NO: 173521 - DNA, 122 bp, Homo sapiens
tgaccagcgcacgccggcccgcggcgggcttggccgtggggcgaaacaaggggggcgtgccgaggagacctgctacgataagaggctgaccctccgagccccgcgtctccgccgcctcccgg

SEQ ID NO: 173522 - DNA, 122 bp, Homo sapiens
ggtggcctcccaggtgccagcccctcaaccggggcacctaccctgtgcgaagccaggtggcggctccacttctgtccccggaacctcaaacgcaccacccagacacaccgctgtggccgtgg

SEQ ID NO: 173523 - DNA, 122 bp, Homo sapiens
cgcaaccgggagagccgattccggccgctgccctcggggggctccgcatacatctagtagcgccatgaccgcccagcacccagagatctgtccgctctcggaggaggaagtgaaagcgaaag

SEQ ID NO: 173524 - DNA, 122 bp, Homo sapiens
ctacatgcgcacacacacacgcgcacacgcaggccctgggcccccacccaccttcctcagcgccctccctgcacgtgtgacgcggtggcccccaaaatgcctctgaccctgcctggtcttcc

SEQ ID NO: 173525 - DNA, 122 bp, Homo sapiens
agggactggccctgggctgcggtgaggaaacccagcgtcctgaccacactgctgggtcagcgaggcgtccctcagagaccggaaacgcggacttcagctcgcttgggaaacggcttccatta

SEQ ID NO: 173526 - DNA, 122 bp, Homo sapiens
aaacgacaccacctgctaagtaacaaacactcttcttaatcgcggtggcaaaaacgtatccgtcccgtgtgtgtttgtttttacccttccgctacactcttaagaaacttggccgcttccgc

SEQ ID NO: 173527 - DNA, 122 bp, Homo sapiens
agacccaggagcccagccacctgggctgaacccctgcaacctgaaatgctgacctgggcacggcattgggcctggtacccgctgtccttcccccagggcctgtgggacaacaacccatgcct

SEQ ID NO: 173528 - DNA, 122 bp, Homo sapiens
cgtccgagggaagttgattgactgtaaggtttgcggtggccgctaggcgatgacaatcagcgaaggtctcttagattctgagccgttagggcttatggccttctcagaaaaaaataaacctt

SEQ ID NO: 173529 - DNA, 122 bp, Homo sapiens
aagcaaattccttcatttcataatttcatctggcgcccccgttcaatcagcctgcattgtcgaggctttaggagaggcagttaggaaaggagagatactgatctctcagccccagggcagca

SEQ ID NO: 173530 - DNA, 122 bp, Homo sapiens
gcatcctaccgagaatttccggaaccacgtgcgagatgatgccagtcatgaacgtctccgcgcttcctttcgctttggaaatatccttaagtagaaattttctgagctttgcctaaaactag

SEQ ID NO: 173531 - DNA, 122 bp, Homo sapiens
aaagaacttctgttcactgtgattggcccgggcctggacttaaagggacagcgcccaccccgccccgccagggtcaggagggagggaagtgacctgcggagtttgtagcagagtcagaccac

SEQ ID NO: 173532 - DNA, 122 bp, Homo sapiens
tgcttctcggaatctactcaaacatgcttgagtcagccttccaggaagcaggcacaaggacgtttgtgacaacttggtcagtaattttaagaagtaggaagaaacctgagtttctctgaatt

SEQ ID NO: 173533 - DNA, 122 bp, Homo sapiens
gcttacgggcgaagacttgcttgtccgtgtccttgccatctaagtgggtaagctatctttcgataaatgtttttggccaccaaccatgtccaggcatcgccaggctgcccgtcccgcccccc

SEQ ID NO: 173534 - DNA, 122 bp, Homo sapiens
gggtacaggtctccccagtggaaggctggctcagaggaattccacatgtggatgtgggcccgggatcgccgttcagcagctgcatatccagaggacgactgaaaggggaggaacaaggcaca

SEQ ID NO: 173535 - DNA, 122 bp, Homo sapiens
ttcctcatctgcacgatgatattaaattcatgggattgttatgaggcttcagtgaattcacgtttgtgaaatctagaagtacaatgcctggaacagagaagattctttccttttcccctttt

SEQ ID NO: 173536 - DNA, 122 bp, Homo sapiens
aaaccaggcatgagtggcgtcctgaagctgtgagaaggaagcgtttccaggcgtgtagaacgctcagctgtgtcaaggctgcttacaagacagacaaaatgaggcctgagaattgcccaatg

SEQ ID NO: 173537 - DNA, 122 bp, Homo sapiens
gaacatattgatttgtgtgcgtatttcaagcaaccattttacgcatgcggagcccatggccgacagcattctcccctgggaaggtggcttctctaattgcagtgaatggtgattctatttgt

SEQ ID NO: 173538 - DNA, 122 bp, Homo sapiens
agaggaggcgcttgctcctgggcagctgctgctgtctcccagattcattctgaatgtccacgatccctgcgttcacagaacgagtctgctagtggctgtcatgatcatttaggcttttattt

SEQ ID NO: 173539 - DNA, 122 bp, Homo sapiens
ctctcggtgtgtccacaagcacaatgccatagagcacggatggccaggccaatgagtgcccggccctggggcgctcgtcctcttgtgcagaccaggctggccgtgcaccagcgagtgtgcac

SEQ ID NO: 173540 - DNA, 122 bp, Homo sapiens
gagcccagctccccgcgacgcagcggcctccgggacctgtgggacgccggggcttcgtggcgcctggcgaggcagccgccccctgagccaggtccccgcccgcctctgtcctgccaggcgct

SEQ ID NO: 173541 - DNA, 122 bp, Homo sapiens
tgtaggggaaaagagaggctctgcgttaagggaacccgagtgaggggatgcccccactgacggaccgcggtggggacttccaacctgaggagcccggggggaggggaaggttcggtgctggg

SEQ ID NO: 173542 - DNA, 122 bp, Homo sapiens
cacggacttcacggctgcgcggccggcatcacgggctgctgttgctccagcgtgttgggacgtgcgagaggcatttacgacctcagcgacacattccctcaacctcatcacgctgcaagtgc

SEQ ID NO: 173543 - DNA, 122 bp, Homo sapiens
cccgcgccctccgccctccgcccccagccccggtgcgacccccgtgctgcccggcgcactcgcctgcccacggtctggttagccagctgcttcatgcggttgaactgcttcttcatggcggc

SEQ ID NO: 173544 - DNA, 122 bp, Homo sapiens
tgcctgtaggtggaaaagtattgtccctctaagtaggctgggtcttgctggttttgaaaacgttgtactttggatgtggcgacagtttgactctttgttctctttctctttcttgatggtgt

SEQ ID NO: 173545 - DNA, 122 bp, Homo sapiens
attaaactcctttaaatttaatttggctgacgtttttcttttatcagatggtgtcagaagcggaatccgaagtggagcttctagagatacccaggagcgctgagtgaacattcaaggtacct

SEQ ID NO: 173546 - DNA, 122 bp, Homo sapiens
caaccttgcattcctgccagggctaatgacaatcttttaccctgattccaataaaaacagcgtcactcccaccagattgtggccaggggagtagagtaggttcagttttgagctttgttctt

SEQ ID NO: 173547 - DNA, 122 bp, Homo sapiens
ctcgagccagcaacgagatctcgatccgagaaagaagtcaggactctggccaggaatgagcgtccctgagcgtccccaggcagccaccggagctcgcagtagcttcaaccccgggtagcctg

SEQ ID NO: 173548 - DNA, 122 bp, Homo sapiens
tcaaaacatcaggttattgtggggcttcaggtgtaaggtcctggaagttcagcaaagtttcgtggacaagacatgggcacagagagtagaagcagaaataaatggttctatgttttcaactt

SEQ ID NO: 173549 - DNA, 122 bp, Homo sapiens
cctggcacagaggttctaagttggggtgtctgttcccactcccaggtgccctggattcctcggtctgctcacgggtcccagcgggggatcacggcacaccacctaggacctcgggaacacca

SEQ ID NO: 173550 - DNA, 122 bp, Homo sapiens
gctactctacgggggccgagggggcgccaagagttctgaaagtgacagaggcgctgatggcgcgctgggctggatccaagcgagcacgatctcgagtgcgctggagattttaaatcttctgg

SEQ ID NO: 173551 - DNA, 122 bp, Homo sapiens
cagacctcggctttcatctgtcggatcacagttcgtttttgatgaactgtgttcatcaaccgccccccagggccgcacagagggtgacggcacgggcgaggagtctggctgccagggttcaa

SEQ ID NO: 173552 - DNA, 122 bp, Homo sapiens
ctcggggcagcctgactcaccgctgcgctcccctccggctcccagcgctctctgctgtgccggagcgccgagctgctctcacacaggcttcttgaattcttagcccctcctcccgtactcct

SEQ ID NO: 173553 - DNA, 122 bp, Homo sapiens
cttagggttagagagttgccctcctagctctgctcatagctatctctgtgggtggggccgcgcttaggtctggatcccctcctctaccctccggtgtgaccacgtcctcccactccgggctc

SEQ ID NO: 173554 - DNA, 122 bp, Homo sapiens
tccggacgcaggccggaagtacgtgagaggagacttccggccactgcgttgtagtcggcccggctgcaaagcgtttttctgcaggctgttttcccaggttccctcggcctgtacctcgcgca

SEQ ID NO: 173555 - DNA, 122 bp, Homo sapiens
gagctgcaccctcgcccgccccccagtcccgccgctgtgaaaggccccagagaactgctccgaagctttgctggggtttttgctttctggcctccttgctgatttgctgtccttgcaacttg

SEQ ID NO: 173556 - DNA, 122 bp, Homo sapiens
ctctagagggcgcgcgcgcacggccagggcgatttcggggtccgcagcccacgtgctgcgcggtctcttctccaggccaccccgcttgtctagctatgcgctgggggcagggaaagatctcc

SEQ ID NO: 173557 - DNA, 122 bp, Homo sapiens
accaaggctcgcaattttgagagagttttgggaaaggtatgggaaaggtaggggagaagccgtggcttctaatgaaggaaaagaaagcaccgtgcttggtgccgttgtgagctttgaataat

SEQ ID NO: 173558 - DNA, 122 bp, Homo sapiens
gccagggcctggcctcaggtccatgtgcccctgagctctttcccctaatcctgtgtgtgccgctttccaaggcccccgactggaaatccgcttgctggggagggttaggttggactgtaaat

SEQ ID NO: 173559 - DNA, 122 bp, Homo sapiens
tgagccatcgcgcacggcttagtcccaagattttagagccaagaagcgtttgcaggaggacgtagggaaagactgactcccctccctacaaagccccttttcctttgacacctcctggccaa

SEQ ID NO: 173560 - DNA, 122 bp, Homo sapiens
cccttaatgccttatgctaattcctgttggtaacatgaatgacaagagacggaatcagtgcgaatccaggtggtgcaaagtagactgactggtatcccgcaccccctttcctccctggggag

SEQ ID NO: 173561 - DNA, 122 bp, Homo sapiens
tggcgaggttttagagggagtcccgctctccaattaaagcggcccagctgcgcctggctgcgcacagagctccctcccaggcccgcgaacttggccattcagccgccgctgtccccgctgcg

SEQ ID NO: 173562 - DNA, 122 bp, Homo sapiens
cctggttggcgcggggctgtgccacgccggcccgcagcccgggtatcccgcgcggcccagcgccaggaacaagtaagtgcgcgccccttggctggccccaaaccgcctacccctccccggcc

SEQ ID NO: 173563 - DNA, 122 bp, Homo sapiens
acttgttccaggtcactcaagagttatcagaatccacagctctggtccatgcttattagacggtcctgcctcccttggggtgatctgcagaagaggggcactgctctctgagtgcagagagc

SEQ ID NO: 173564 - DNA, 122 bp, Homo sapiens
aggccgtcccgagccaggagactggaggcctaggcccggcactgtgggcatcttgggcaccgtggcgcggtgcgggccgggggcgggggtctcccggggtggcgacgccgggggtgcgagca

SEQ ID NO: 173565 - DNA, 122 bp, Homo sapiens
gccccccggggtcttgggaccctcccaaggtgggtcctgctctagttcagaagcttatgacgcctttgcggggatgcctggctttgggatcggttgggatctgctggaattgggtccgtggc

SEQ ID NO: 173566 - DNA, 122 bp, Homo sapiens
gcgtttccgagccatgttgcttgtctgggcaaattccacttcgcgagtgacgcacccggccgcgatgcgctagaacgccggccccgccccgaggcggtgcgcttggccacgccccttcgttg

SEQ ID NO: 173567 - DNA, 122 bp, Homo sapiens
gactctgtatcaaaaaaaaaaaaaaaagaacttttaaaagtagccagacactgtggtatgcgcgcctctcagatactcgagaggctgaggcgtaaggattccctgagttccagacggagcta

SEQ ID NO: 173568 - DNA, 122 bp, Homo sapiens
ccaaaagatgaaaacaggcacgtctggcaggcagcgcgtgcaggagcaggtgatgatgaccgtcaagcggcagaagtccaagtcttcccagtcgtccaccctgagccactccaatcgaggta

SEQ ID NO: 173569 - DNA, 122 bp, Homo sapiens
ctgcgccccggtcgcgtgggtgcgggcgtcggaggaaggggcgcggaggtcagtgccagccgcagggtctggccagcccacctcgcgtgctcgctctgcacccctagagggagagctgggca

SEQ ID NO: 173570 - DNA, 122 bp, Homo sapiens
ctttctgaggttctcactgagctgtcagctggagactcagggcccaggagaggacggacacgtgagggggctgcacgcggtgccaggtgatggctgtcccttccttcctcctctgaagctct

SEQ ID NO: 173571 - DNA, 122 bp, Homo sapiens
gaccccgccaggttcccgtccagtccgcggggtgactccacccacagctggccgcgccaccgctcaggtttcaatttttattggttcgcagttctcaccccagggcgggacactcccaggga

SEQ ID NO: 173572 - DNA, 122 bp, Homo sapiens
atacaaagaatgcactaagctgaaatggactgcatgtcacacacttgaaaaacgctatcccgatggatggtgctcgatgcctagacacttttaagtgccttggcctacaacatattttaaaa

SEQ ID NO: 173573 - DNA, 122 bp, Homo sapiens
caggagaaggcacgtccagaggggagcccgtcgaggtgcagagtagcagccggccagggacgctggggtgatgggggtgtcgccgccgccgcttgggggccgccggcgtcccgcaccccggg

SEQ ID NO: 173574 - DNA, 122 bp, Homo sapiens
acggggccccggccgggaggtgagcgcagctgtcgttcagcttgtgggtagcactcgggccgagccatgcaggcggcgcgcgtggactacatcgctccctggtgggtcgtgtggctgcacag

SEQ ID NO: 173575 - DNA, 122 bp, Homo sapiens
accaccactctgctgcagacacgggactaatctcattactgtctttatccctgttcacatcgcccatcacaagaagcccagatccctgctcagccctcctccctgcatctaatccccatctg

SEQ ID NO: 173576 - DNA, 122 bp, Homo sapiens
ccaggaaacagactctcaaatgcagatgtgcacaccggaagtttattgcggagtgccctccgaaccaacaactgtggggcagtgaaagacgtaagactgaacagaggaaggagttgatctgc

SEQ ID NO: 173577 - DNA, 122 bp, Homo sapiens
agatcatctaaagcagcgacagtgatgagaacaggacctgatcttaaagggtgcaataaacggtagctcttacttttactacgaacggcatgtgcagaggatactatgcttttctgtcagct

SEQ ID NO: 173578 - DNA, 122 bp, Homo sapiens
gtattcattcactgttggttctttggttccgtcttctcctcactggtggacaatattgggcggaggcaaagaacacggctctagagctggactgcccgggctcaatgcttcgctgtgtgacc

SEQ ID NO: 173579 - DNA, 122 bp, Homo sapiens
tggaaaccaaggcccccgcgctcggcaagtgagcctggctgccgggtgagtcaccgcgagcgggcgacaaggattcccagcagctggtaattaattgcgccgtggctcagcccacgacggaa

SEQ ID NO: 173580 - DNA, 122 bp, Homo sapiens
gtgtggcctctgtccaggtggtgggggcatccggggaccaggtgggggcgcacgcaggagcggtgcgtttcaggctgcaggtgccgtctgcccgtctcacttccggcctctccactgtgctg

SEQ ID NO: 173581 - DNA, 122 bp, Homo sapiens
ccgcggggcgtcagttcccgggcacgctgaggatgaagcccgagcgattcttggtgaagtcgggctggggctggttgagccgcgtctccacggagacggtgcacttcttcccgtgcaggctg

SEQ ID NO: 173582 - DNA, 122 bp, Homo sapiens
ttacaatccctctcctacacactgtttcccgctccatccatcagcctaccacaccaccatcgcagacccctaactcctggaaaaccctccttggcggaagcactagggccctcaggtaccgg

SEQ ID NO: 173583 - DNA, 122 bp, Homo sapiens
ctcgtttatttattaagttttgctgtagcagaagtttacttttgagccaagagtctgatccggtctccctcttttttttttttttctttctttaaagagatggggccttgctatgttgccca

SEQ ID NO: 173584 - DNA, 122 bp, Homo sapiens
actcagatgtgtctccactaaaacattatgagaaacaaagtccggcgctctctaggcaaccgtgagggcttgagcactaactagatctgctcaagggcaagagaggagcgagtaccgtgcag

SEQ ID NO: 173585 - DNA, 122 bp, Homo sapiens
tgtggttcccaccgttttctacccccgatcagccggagctagttcgccctcctccctcagcgagcacccggggagagctgtcctaggagagtctgtagagtccctcgattaccggtcgcaaa

SEQ ID NO: 173586 - DNA, 122 bp, Homo sapiens
ggcagggacggaaacaggccgggaagcagtgacacctggggcagtcagtcatccaggagccgccgccacccgccccacccccagtctccgcgggaggtgtttgtcttcgcctatgctcccgg

SEQ ID NO: 173587 - DNA, 122 bp, Homo sapiens
cctctgctggggccgtcttgggagtggttctccaggtgccagggcctggtcagggaagtccggcctcagctcagcgtggccctggagccacccacaaggcacacgggagctgggctggggtg

SEQ ID NO: 173588 - DNA, 122 bp, Homo sapiens
ctccggggcccgatccccggcaggcctgagcactgagcactgcacccgcttttctttgggcgcgtggctcgtcctcggcctgctgcggccccctccttgccctggctttgtttttctttttc

SEQ ID NO: 173589 - DNA, 122 bp, Homo sapiens
caggaaggattcctgagtgccagggatgaccacactggatcctcacaacagccctcctgccggggacaatgctccttatcccacaagcggggacctgggctctgacaggaggccacacactt

SEQ ID NO: 173590 - DNA, 122 bp, Homo sapiens
cccggcagggcctctgaggcctgagcggcaggtgaggctggcaggcgcctgctcagagcacgcgggggatgatggtgaagggcacggcggggctgctggcctccagctccaaggctgtcagg

SEQ ID NO: 173591 - DNA, 122 bp, Homo sapiens
cgggatgcactcctctaacacctgagccccacttctcgcggccgtcccggggagctctcgcgagagctcgcggccccaccgcgctgacaggcatcagctgtctccgtctgtctgacgcgcgc

SEQ ID NO: 173592 - DNA, 122 bp, Homo sapiens
tctaggccccaaatctaaatttcttggaggaagtattggcccaccttggatgctgtaccccgcacagaggccaatcaactacagtcaaggaggcagctgtgtacaaacatggctcctgagag

SEQ ID NO: 173593 - DNA, 122 bp, Homo sapiens
tctgctcccccctgactcagagtctcggctggtagctgaacccaggaagccctggccccacgtctctccctggaaccaccagaccacacagcctcctgtgctcaaccctttggctgggtgtc

SEQ ID NO: 173594 - DNA, 122 bp, Homo sapiens
gtctcaaaaaaacaaaatatatatatatatgatctaacttaagatattgacaaggaaaatcgtgggcagaaagcaggcattaaacagacactgtaagttgaggggtatcgaagtcaagcatc

SEQ ID NO: 173595 - DNA, 122 bp, Homo sapiens
cccagcccagcaactccatggtaatatctctacccactactgactagtgacctgtttcaccggcccagcaagaagatgacccagagccttagccaaagacaggcaccctccagcttccttct

SEQ ID NO: 173596 - DNA, 122 bp, Homo sapiens
ccgcatagtgagggagctgaatttgatcactaaggacaaatgtaatgctgctcatcctcccgctcttacccgtggcagacatcactaatcaatcatgtgctttttttctgctgagttcagat

SEQ ID NO: 173597 - DNA, 122 bp, Homo sapiens
tgaaccattcatgaaagatgctcctggtcacccaagcctttctgttggagcgccaaatcacgggcaaactgggcttcaagaacccttcagagccttgcgggtttctgagcggtacaccagta

SEQ ID NO: 173598 - DNA, 122 bp, Homo sapiens
ggtgccggcgcctcgctccccggagcacagggacgtccctgccgtctccgtggcccggcccgcccgctgcccgtccagccaggacgccctcacctcccggcacggccgccagcgccggcgcc

SEQ ID NO: 173599 - DNA, 122 bp, Homo sapiens
ggtggggaggcccgggaggcgaatccaggagcctttctcccagaacgggggcccgagatacggatttgagagatgctttcacaaagcctcaccaagtcccacggggccaatttcttctccgg

SEQ ID NO: 173600 - DNA, 122 bp, Homo sapiens
ccagcggttcggatggcctcgtgaagctctggaccatcaagaacaacgagtgtgtgcggacgctggatgcccacgaggacaaggtctgggggctgcactgcagccggctggacgaccacgcc

SEQ ID NO: 173601 - DNA, 122 bp, Homo sapiens
ggtcccgcaacaatggggaccgactggagacgcggcctgggcccctgccatgcagtggctcggggcagctagatggacccagcggcccgggccttcggggcacggggtcccccacccgggaa

SEQ ID NO: 173602 - DNA, 122 bp, Homo sapiens
cgggcagcatttccccatccccactgggccggcctgtcctccggtgcagccctgggggcccgtcccagctgccaggcatcaagaagtccaggggccatgcacgcttcttgatgccccctttg

SEQ ID NO: 173603 - DNA, 122 bp, Homo sapiens
acacaagcgagaggatcatggcggatggccccaggtgtaagcgcagaaagcaggcgaacccgcggcgcaataacggtgagtggcggaggggaccggggagcggcggagtcagggggagctgg

SEQ ID NO: 173604 - DNA, 122 bp, Homo sapiens
atccgcacacacaccaacgagaagccacaccgctgtccgacctgcagcaagagcttctcccgcctggagaacctgaagatccacaaccggtcgcacacaggtaagaggccggggccgggcgg

SEQ ID NO: 173605 - DNA, 122 bp, Homo sapiens
cgggacttcctgtgacctcggcacccttcgccctggagggaaaggccccgctctgaggtccgccacctgccaccctgcaggacgctgcacggacctgacatctgagaatgcgccctgcacac

SEQ ID NO: 173606 - DNA, 122 bp, Homo sapiens
aacagaaaataagctgcttgacaatagagacttggcctattttgttaaaagctatatcctcgggctgggcgtgatggatcatgcctataatcctagaactttgggagggcgaggcaggggga

SEQ ID NO: 173607 - DNA, 122 bp, Homo sapiens
ctcgccagatcaggcggcacccttccccgcgtgggaggggcgcgtctcactcaaccgcctcgacccccacaccaacgagctccctcaggacccactggtggacatcgcggcggtgaccggag

SEQ ID NO: 173608 - DNA, 122 bp, Homo sapiens
ttgtcttaatttgctaaatacagttaacacttgaacaacacgggtttgaactgtgcggatcgatcaatgcaacctggtacatgggattctaaacaccgtattgagagggccgacttttctta

SEQ ID NO: 173609 - DNA, 122 bp, Homo sapiens
tacagccttgtgggcattttgcttatccacgttgactttctcatctgggacactggcctacgtagtacgtgattccagcaaacagggcagtatgttgagctcttgaaataagtatgttgtga

SEQ ID NO: 173610 - DNA, 122 bp, Homo sapiens
caggccctgacacttgatgagctcatagtccttccttctcccagtgctgcagctcctgcccgatctgggtgtccctctgccctgccagctgccacttctgccaccaagccttccgtttcctg

SEQ ID NO: 173611 - DNA, 122 bp, Homo sapiens
acgctgtccagcccacggccttgcggggaagactttagggccaatcgtgtccatgctccccgcgaggcccgccccctagagcatacattggaggaagcgggcgcagggcggggcagcgtcgc

SEQ ID NO: 173612 - DNA, 122 bp, Homo sapiens
gggctccgggtggcccggccgcgccagggatgggaacccggcaggagtcgctggggaggccgtgtgtgtttcactgtattaccaactatgtgacaggctgcgggtgtgacagaatgtgatct

SEQ ID NO: 173613 - DNA, 122 bp, Homo sapiens
gggctcacaccacggactggagtcaggtatgttgatcagccccctggggtttgcctgggacgtcgctggcttcaacactgaaagtcccacctctcaggaaacccactcgtcctggtgaaccg

SEQ ID NO: 173614 - DNA, 122 bp, Homo sapiens
ctttgtaaatatcgaattgtgaatttctcttatcggtcccacagacagatataattttaccgtatttcacagatgtggaaactaatatcagaggctaaataattccctgggggacacagagc

SEQ ID NO: 173615 - DNA, 122 bp, Homo sapiens
ggagaaggagctgcagacatatgtggcacaatcaatgcaggaggcaggggcagcggtccccgtcacagagaagtcaccgaccacctctggccttcccctagcctccaggctgccctcgtcac

SEQ ID NO: 173616 - DNA, 122 bp, Homo sapiens
atttcagggaggatcgcagcgcattttcgccaagacaggtgagactgcggttctgacctgcgtgtctcgggatgaattgcgttagggcacctgggcgccggtagaccccttcccctccgcaa

SEQ ID NO: 173617 - DNA, 122 bp, Homo sapiens
gtgcctgttattggaacaataaagtcatgttacttcattaggagtccggcctctagattgcgaggcctttaaatggatgatccctccggtgtctggctgcccagttagcccccgttaccagc

SEQ ID NO: 173618 - DNA, 122 bp, Homo sapiens
gcctggcactggacccctgggcagtggggtccgggaaggggccagttaaagggccaggggcgctggggagaggcggggcggggtggggggaggggagctgggactcggacccgggactgagt

SEQ ID NO: 173619 - DNA, 122 bp, Homo sapiens
agagcaggaggaggaggggccggtgcattctcgccgctgttctttgcaacctgcaggggccggtgtatgtccggcgaggagccggggccgctgcgggtgcgtgcaacccccgaaggagacaa

SEQ ID NO: 173620 - DNA, 122 bp, Homo sapiens
tgccgctgctgacagacaagaccaaggctcggctgggccccaccccagatccggcctgagcgccttccgcgctgctcggcctcaaggcgtgagtcaccaagggcaagtcccgtgacttggtc

SEQ ID NO: 173621 - DNA, 122 bp, Homo sapiens
gcccggccagcagggcgcggagggcaggaccggggctgggggcggggcggggtgcctgagcgagggaaaaccgcgaggtcttcggctgccacctttcccggaggaggatgccagtagaaggc

SEQ ID NO: 173622 - DNA, 122 bp, Homo sapiens
tatttcctggaagttaaaaattattacatcattgctaaatgaagcttttcacaatacaggcgtgtattagatacaacaaataatttttcattgttctaaacatgatctttggtttaaagctg

SEQ ID NO: 173623 - DNA, 122 bp, Homo sapiens
tcaactgcggaccttcgcatgctcaggactgaactgaggtttgtggtttcgcagctgccccgatgccgggagcatgaaattctatctcggctgagaaccgagcaacagaccgcacaagaacg

SEQ ID NO: 173624 - DNA, 122 bp, Homo sapiens
acggccccgcgggactcgggagccttggtaaggcggaggctcagaccccgttcacgaaaacgcctggctcctccaggatttgtcaggtcttaagcagctccgagaaggctccgctggctctt

SEQ ID NO: 173625 - DNA, 122 bp, Homo sapiens
caaaaaccgtaattttatcatcacggcttgtagcaggaagccaacaaggggtgccgatgacggccacgaccccgtatctctgggctgtctctctcacctccatcggccactgcctgcttgct

SEQ ID NO: 173626 - DNA, 122 bp, Homo sapiens
tctccctcaggggcaggtggtggaggggcgcccagggtcgtctttgtgtatgggggaaggcgctgggtgcctgcagcgcctcccttgtctcagatggtgtgtccagcactcgattgttgtaa

SEQ ID NO: 173627 - DNA, 122 bp, Homo sapiens
aatctcaccctcaggcatgggcaggagaagtgagggaggaaagagctctttgttcacaggcggtgcattaaaggactaagagacagcaatccactgcaccactagctcttagcatgtcctgt

SEQ ID NO: 173628 - DNA, 122 bp, Homo sapiens
tagaatgtgcataccaatcacctgggcatcttattaacatgcagaagctggttccgcaggcgagggctggggcagacagctccccagtgatgctgggctacagatggcactgagtggccagg

SEQ ID NO: 173629 - DNA, 122 bp, Homo sapiens
aataaaattttagatataagccaagcttgtcatataaaggatccctgtgatcagaccttccgagaatcttcccataaagttaataaccatatttttgttatgtggttaatcctacattttta

SEQ ID NO: 173630 - DNA, 122 bp, Homo sapiens
ctgcaggaaaagacatgcagctggccaagtgacagagcagtctaggcattctgtgtttctcgatcaggacagataagtaagtgggggttcctgggggaccctatacccgggagggagggtaa

SEQ ID NO: 173631 - DNA, 122 bp, Homo sapiens
gtcccgccccctgatttctccttgaccctcattcagcccgggacaaggcggccaatagggcgcagaggagagaacttccgaaggcaggggtgcgcccgcccgccctccttatccccgtggcc

SEQ ID NO: 173632 - DNA, 122 bp, Homo sapiens
gctgggcctgggggtcggcgctgaggcgggaggggccgcccgggatggagacgttgcggccggtggccacagaaacttgagccgcggcagagaaacctctgctccggtctctgcgtcctctt

SEQ ID NO: 173633 - DNA, 122 bp, Homo sapiens
actgtgtcttgactacctttcaaaaccagcactgtgtgggaatgtccgccaggcagagctcggagcctcattgagacaggggagagagaaagacaaagaggggaccttcttccagatgcctt

SEQ ID NO: 173634 - DNA, 122 bp, Homo sapiens
aagacgaaacgagttctgcagatggagggtggggacggctgcccggccgtgagaatgtagcgaatgctccaaactgggcgcttaggcagcatcaccatggcggattctgcattacgggtgct

SEQ ID NO: 173635 - DNA, 122 bp, Homo sapiens
gcggagggctggatgcctgccgggctctctctccgccttcctcttccctcccagtcctgccgagctgacggcgtcccggatcacatggagcccccgccccaccccagcccgccccccgccgc

SEQ ID NO: 173636 - DNA, 122 bp, Homo sapiens
tatatggtatattactgtttcttcagtttcatgtatcttgctagctgaaagacaactaaacgaaactgaaggcattatcctccctccgattctcactccctgctgtgtccctggtggtgtca

SEQ ID NO: 173637 - DNA, 122 bp, Homo sapiens
ccaggaatgaaagttactgggagataacttcgaaggattttgcaacaaattcgagctgtccgactctgagaatggtcagtttaccaatggttcatttgctattgttggaaacaagcaggcaa

SEQ ID NO: 173638 - DNA, 122 bp, Homo sapiens
tgcctcttcttacccagctgctttgtgttgatactgaagtccacacaggtaactgcatctcggtggcccttaaaatgcctttccagcgaggggtcctcctgagagagagccagggtcaaatg

SEQ ID NO: 173639 - DNA, 122 bp, Homo sapiens
cctcacagaccttctatttgaggaatgtgctcccccaatcccagaccgctcctggtggggcgggcgcgagcgcaggaccgcggagcctgctgcgttgctcggctgcaggggaggagctgggc

SEQ ID NO: 173640 - DNA, 122 bp, Homo sapiens
gacgcagctaccgaacagcttctactctcctgctgtgaggattaaatgagtcagcagttccgaactgcttcaatcggcctggctcaagggaagctccacggaagagtcagctaggattatta

SEQ ID NO: 173641 - DNA, 122 bp, Homo sapiens
caggaaggtgcgctggtggcgaatcagggcgcacagacctggggcccagaagcggagtcgcgaggacctgctggggggtggtgggggcggggacgggggcggggccgcggtgagaaggggcg

SEQ ID NO: 173642 - DNA, 122 bp, Homo sapiens
tctccacggtaatggccgtggatgataattggctaagtctcttaagggacgtctggtttccggggacgcagtgataagcgcagaacgggaggtctctgaagcaagatggggctccagacata

SEQ ID NO: 173643 - DNA, 122 bp, Homo sapiens
aaaatatttattggttttgggccaggcacggtggctcatgcctgtaatctcagcactttgcggggccaagacaggtggattgcttgcggtcaggagatcgagaccatcctggccaacatggt

SEQ ID NO: 173644 - DNA, 122 bp, Homo sapiens
tggcagagggaccaactcaggaccaaggcaggatgctgaggaatagcaggaagccaaccccgctggggaagaagcagagcctcagagtagccccgcggtcctggtggagagacgcggccccg

SEQ ID NO: 173645 - DNA, 122 bp, Homo sapiens
cgcgcggggcggccaggcaggtgcctgagccgaagggcgagtcggcggggcggggcggggcggggaggggcgtggaggggcgggcccaaagctggggcggggaggggcggggcggaccaaag

SEQ ID NO: 173646 - DNA, 122 bp, Homo sapiens
tctgcagcttcattctagaatcatgccaagaactcacaaatttctgacacattgcttttccgcaggaggttgcgggaagacgtacaaggaagggtcgggatggtgcttgaggtggtcagagc

SEQ ID NO: 173647 - DNA, 122 bp, Homo sapiens
ggtgtgaccttgtacttctgcagcattttataccttctgcggcacacccttgtagtgggtcgaattgtgttcccccaaaagatatgttctagtcctaattcccagtacctgtgaatgtgact

SEQ ID NO: 173648 - DNA, 122 bp, Homo sapiens
tggacttcagagttatacagaagacagaatcaagtaataaagtccagaatagagttgcaccgttttgggctaatgaaaaaggaagaggctagggaaatctttcaaatgctgaatcttaaaat

SEQ ID NO: 173649 - DNA, 122 bp, Homo sapiens
ttgagccattggtgaatgaagacacccatcacttgtcatgttggtttccaacagtcctttcgattatcctttattttcttatcctcccttctcttgtttcttttatttataagttaccattc

SEQ ID NO: 173650 - DNA, 122 bp, Homo sapiens
ttcttttcagtgcagaagtttttaattttgaccgagccaaatctatcaatctaggcctggcgccgcgtcagcagagggggcggggaggcgagcgcggaactgggggaggggaaggggcgggg

SEQ ID NO: 173651 - DNA, 122 bp, Homo sapiens
acctcgcgatccgcccgcctcggcctcccgaagcgctgggatgacaggcgtgagccgccgcgcccgcccattttttttaaacgtgttggggtttgggtttcagccacaggccttctgcgatg

SEQ ID NO: 173652 - DNA, 122 bp, Homo sapiens
aataaaatgaaaggaaaccgcagggcgggccgttcgggtggagcttgggcgggaccagcccggagcgcccccgagaaagtgggaaaatcgggctggaagggctagggcgcgtctgtcttccc

SEQ ID NO: 173653 - DNA, 122 bp, Homo sapiens
agactcctgctcatcggacacgccacgctgggaatctgagaatctgtggtgggaatgggccgggctggcaggaacaaaggatgaaagcgaggttgtgcggccggctgggacgtacacaccca

SEQ ID NO: 173654 - DNA, 122 bp, Homo sapiens
acttatggctatgagtacttgggctgtacctcaagattggttattacgcctctcacagaccgatgctggctgactctcatggaagcactacacttgaatctaggaggctgtcctgccggtcc

SEQ ID NO: 173655 - DNA, 122 bp, Homo sapiens
gggcctggcacctgctcagggccccaaagagaaaccgagaaccacagccaagggccaccacggcctggtgaccagtgaggcctgagcaggttagaggcaccccagtgctcgctgagcacctg

SEQ ID NO: 173656 - DNA, 122 bp, Homo sapiens
ccactcctgtccagaacagtgaggacctgttccatccatcagaaaggcctccgcagaagccgcgagccgtgccttcgcgtgtgcacacctgagagctcacgcgtgtctgtgggtactcaggg

SEQ ID NO: 173657 - DNA, 122 bp, Homo sapiens
cacagcagcccggggagaggtgggctgggctgcaggtcctggcgttgtgctggatcatcgcgcccgtactctgaagttttctccgtggcgctctttgagaggggttcctcctgcatcttgag

SEQ ID NO: 173658 - DNA, 122 bp, Homo sapiens
acagggggccgaggcctcaggatggagctgcctggggagccactttgctgaagagggggccgtgccacgtggtgccgcctgctgttcttagacaggacccttgtacctcactgaatctgctg

SEQ ID NO: 173659 - DNA, 122 bp, Homo sapiens
tcctttaacaaaaggtaacacagatcttcaagtacctggtggaggtgcctttcctcacatcgcagatgctgcatttaaaggcttcagcactgtttctgaaggtgcagacgctacaatcccaa

SEQ ID NO: 173660 - DNA, 122 bp, Homo sapiens
gcagggtatatagtaaagcagtgtacagcacagagctgtactatatcacatgtttgctttcgcacctttgcacctctcccaccaggtactctgaggctgccaattctagctgctgcttttac

SEQ ID NO: 173661 - DNA, 122 bp, Homo sapiens
ttgggtacacgtttgtttaaaagtaaaatcctcatagggcagtttgaaaaatcatttggccgtcccttgacgtaagtatttagcattagtcgtaggtgttttagcctgagattgccagaaaa

SEQ ID NO: 173662 - DNA, 122 bp, Homo sapiens
aaggccgactacaaacatgaccacatcatcaaggaatggtaccccacattcatcgacgcccggggggacctgggcggctccgccttctccacgtgcttcctcttttccaccttcccccggac

SEQ ID NO: 173663 - DNA, 122 bp, Homo sapiens
gagcgagttagagaaaacgccacacttcgagacgaattaggagtccgtttatttagccggcggccaagagacggctaacgctcaaagttctccccgcccccgaagaaggggctagattttct

SEQ ID NO: 173664 - DNA, 122 bp, Homo sapiens
tcctgggagaatcaggaagtcgtcgtaggtgaggcagtcggcgctggcaaagagctgctgcgcggggagccagttatcgggcacatagtcggtgccgcccctgatcaggtagtccgtcatgc

SEQ ID NO: 173665 - DNA, 122 bp, Homo sapiens
gggttctgaagcctgtctgcggaaagggaggggcggcagagaggggtgtgcaggggtaaccgtgctccctgggtgtggcacttccagggagcaagggctgccaaccctgggagctttgaggc

SEQ ID NO: 173666 - DNA, 122 bp, Homo sapiens
tttgattcctgaaatctgcaagcaaccttgcatttcccttgtgcacaatgcaatcaagtccgtatacctgcactgattcgcagacatttccgtgggctggcgcccaatctaggtaaagccca

SEQ ID NO: 173667 - DNA, 122 bp, Homo sapiens
ctgcctttatgagctggtaacactcatcacgaaggtctgcagcttcactcctgaagtcagcgagaccacgaactcaccggtaagaaggaacaactccagacgcgccgccttaagagctgtaa

SEQ ID NO: 173668 - DNA, 122 bp, Homo sapiens
ctggcacagacgatgcacccgccaaaggacacaggagtggcggccgtctaaagaaccaaacgtgtgagacaggaccagtggttccctgggcagcaaggctgacaggcacttttatttgctgc

SEQ ID NO: 173669 - DNA, 122 bp, Homo sapiens
cccacatatttggattggctaatatgttttcacctcttccgtgcgattggatgactcgaccgcccctcctcaacctgaaccgtttaatatattattggtctattcaaatgactaaccgtcat

SEQ ID NO: 173670 - DNA, 122 bp, Homo sapiens
cgttgagctgcgccatggtggactcgttgaatagcacagggatggtgactgagccactgacgggcgccgcgcgcccggccccccagccctcgccgccgcccccgccgccctcgccccccggg

SEQ ID NO: 173671 - DNA, 122 bp, Homo sapiens
agggagaggaggtactgaagagcgactaaactggctgcagcggagagatcagcccgaaggcgtccttgaggagcatacggaactccaaggaaggagtagaataaggagcaggcagagaaacc

SEQ ID NO: 173672 - DNA, 122 bp, Homo sapiens
ctgggcgaggtcccggtcggtggccttgggccagggtgccttgggctcgctgctgccggccgcagggtgatagctgcccaggctcaggaggctcttgggctcctgccagccccccgcccccg

SEQ ID NO: 173673 - DNA, 122 bp, Homo sapiens
gatggctcctcccaactcccaacttccgcgacgcaggaagcgcccacaaagggaggatgtcgccggccaatgacatcccggagctctcagcgcgcgaaatccgctttgaacctgccccgccc

SEQ ID NO: 173674 - DNA, 122 bp, Homo sapiens
aggcagggtgtcttttaagtgactgcacgtttgaattcccaccgcaaactacctggcctacgtcatgtgatcaataagggaaatgaaattgctggtcagctttaggctatgatggcctcaat

SEQ ID NO: 173675 - DNA, 122 bp, Homo sapiens
caagaggcatctcgcggatacaaactcgcttctttgttccactgagccccaacggggatgcgtcgttgccgtggatgctggcagtccagttgacgggacagggagccaggcagtgcggcacc

SEQ ID NO: 173676 - DNA, 122 bp, Homo sapiens
atgtaaggcattgtgccagaaaagaatctgcacacacaggctgggaacaaggcagtagtgcggtggctcacagcagcagcagcagctatcaggggcaagtgggtttctcctgcctctgtggg

SEQ ID NO: 173677 - DNA, 122 bp, Homo sapiens
tgcaacctccctgcctgattctcctgccgagtgcctgccgagtgcctgcgattgcaggcacgcgccgccacgcctgactggttttcctatttttttggtggagacggggtttcgctgtgttg

SEQ ID NO: 173678 - DNA, 122 bp, Homo sapiens
cacttaggcagatgtcatttcctaccttattgactctggtcttcatcccaaatctgcactcgcagacagggatgtgatgacacccacgtggctgaagatggctccaggctccagtggtactg

SEQ ID NO: 173679 - DNA, 122 bp, Homo sapiens
atcttccttacttctttttgaagcaagccataagtctcacttaacctttcatggatttcacgtgaacaagaaatagacttctgttaagtaaccaggatttgggggttatgtgttgcagcagt

SEQ ID NO: 173680 - DNA, 122 bp, Homo sapiens
ctcaggccctgcaaagcccaggagccggctgtaggtgtccttggcgaatgccagaccgcgcgcaccgtcccagcaagtcccgagcgagtgtgggacaggcagcaaatcagtgccccctggcc

SEQ ID NO: 173681 - DNA, 122 bp, Homo sapiens
ctcactgcagagaagagggcaaagccagcccccacctgcattccccgagtccagagggagcggaggcttcgacatggccccctcacggggcagcaaagccccgaaccggcggcaggcttggc

SEQ ID NO: 173682 - DNA, 122 bp, Homo sapiens
tcagtccgcagtcagaaggtccctggctgtgggctccagggacttgtcttgggggtgggacgctgggactcttgtcagtctaagcacaatgagagagttccttggaacttctcaggcgctac

SEQ ID NO: 173683 - DNA, 122 bp, Homo sapiens
actggtgactggttagtgatgaggctagtgatgaggctgtgtgcttctgagctgggcatccgaaggcatccttggggaagctgagggcacgaggaggggctgccagactccgggagctgctg

SEQ ID NO: 173684 - DNA, 122 bp, Homo sapiens
aatctccccagggagggtgcactcgaggtttgagcgtgggggtggaaatggaggcgtttccgttctattttggtttctcctactgactggctgctcagctgttcatgagtcatcctaacctc

SEQ ID NO: 173685 - DNA, 122 bp, Homo sapiens
cactcgtggagggcctgtccactgccgcccatgtttccaccagagcccatccttgcagcacggctgccactgggtgccacagctcatgctgtggctgcatagccgctccgggagcctggggg

SEQ ID NO: 173686 - DNA, 122 bp, Homo sapiens
cgcttttcagccactgtgggagaggatccgtgtttaaccagctccccggggctcccaagtcgaagacctactgccttgagagcgctgtccagggtgtccgggggtgttggatcagtgagagg

SEQ ID NO: 173687 - DNA, 122 bp, Homo sapiens
tccggccggcgcctgttggccggcgccgcctctgactgtggcgtgactggttgtaggcgccgccaggtgcctctgacgtcacttccgctatcaagtttgtgggccggggagaccttggcctt

SEQ ID NO: 173688 - DNA, 122 bp, Homo sapiens
tctggcgcggcgttttcctctggctcctgcgagggcttggtttagggcttcagctctctgcgttctcggctccgggaggcctcggtgattcagccacagcctctgcctcccgttgctctgtg

SEQ ID NO: 173689 - DNA, 122 bp, Homo sapiens
tacaagttgttcagtctggcttgtgagtaggttatatatagagagagaatggaagtgatccggagagctaggcagagaccacattatgaataatgaggggtctaccatcaagacttttctca

SEQ ID NO: 173690 - DNA, 122 bp, Homo sapiens
tcacctaatagagctggaaataataataactagcaaaacaaaatggtacactgagataagcgctttccaatttgaaccctgtttaaaagggaggatatagtaaaaatccttttttagcaaca

SEQ ID NO: 173691 - DNA, 122 bp, Homo sapiens
tccgagtgccagatacatggtggaccccgacaaggcacgcaggtctcagacaacaggtgacgctgtgtccccggcctgtgcagcggggacacccacctcattttactccccccaggtcagct

SEQ ID NO: 173692 - DNA, 122 bp, Homo sapiens
gatggaaaagagctttcctacttaaatagagctggtgtggggaaaagagccactttatttcgaatgcgaatctgcctggttaaccccaagtcccaggagtgcctctaaaatgtctagttggg

SEQ ID NO: 173693 - DNA, 122 bp, Homo sapiens
ctctccatcctgggggtcagtgggctggcacatccctgaggctcaagcgtggaggagaaacggacagaaacctgggcccggaggccttttgcccctgtgggtcctgagcaccgaattcggct

SEQ ID NO: 173694 - DNA, 122 bp, Homo sapiens
gccgtgcgtcgtgcgcccgcaacagagccccaaccgggcctttgccgggtaaggggctaccgcgacgccacttgtccacgcagccaccaccggcccgggccagtccctgccagtccgtccgc

SEQ ID NO: 173695 - DNA, 122 bp, Homo sapiens
acctcaagtgatcagcctgcctcggcctcccaaagtactgggattacaggtgtgagccgccgtgccgggccaatggggcaaggtttgaacaatggtcctgtagtgaagatggctaacttctc

SEQ ID NO: 173696 - DNA, 122 bp, Homo sapiens
agcccccgggagagagactgcgtggggagagccggagctccgggtcaggggagcgtggcccggaggaggcccccgaaggcggtgctgcagcagcccggggccagcgcccccgcgtccccgcc

SEQ ID NO: 173697 - DNA, 122 bp, Homo sapiens
gtccacggcgcgggccggagcactcaccatctcgccgggggagcgaggccacttcggggtcggattggaaatgttgaggcttcgcttgcttcctccgcgacatgctggctcaaacatcagct

SEQ ID NO: 173698 - DNA, 122 bp, Homo sapiens
cccaaggggaggggacagccgggcaggcaggaagctgcggcttaaaagggcaacccgcgccggacccttccttcctagtcgcggggagtctgagaaagcgcacctgttccgcgaccgtcacg

SEQ ID NO: 173699 - DNA, 122 bp, Homo sapiens
cggcacaaggggacgccctggaaagccctcggcacgcggtcgtggcggcatcaggcctcacgagccagggcccatcagaggcggaatctgacctgggctgaactcaggcccccaaggtgcac

SEQ ID NO: 173700 - DNA, 122 bp, Homo sapiens
cgtcgcagactcgggaccagatcactgttttactgtggggctgcccatacgtcgcagactcgggaccagatcactgttttactgtggggctgcccatacgtcgcagactggggccagatcac

SEQ ID NO: 173701 - DNA, 122 bp, Homo sapiens
gatgaaaacagaagaggatttatgtagctccggaggggttcaataagtaggaacatgacccggattcaagcttcctggcacagacaccccaccatcacagcttattcagaaattaaatactt

SEQ ID NO: 173702 - DNA, 122 bp, Homo sapiens
ggagagggtggggcccgactccgccacaccccaacggtccttccccctcctcaccactcccgcccccacccccaatggatctgggactgcccctttaagagtagtggcccctcctcccttca

SEQ ID NO: 173703 - DNA, 122 bp, Homo sapiens
gtgtttctccttcctacagtagctcgcagggcacccgtgaagagggatgctcattcttcccgcctaccttgccccaggtattctgggcctgtgtaggtggttgatctggacaacttcagagt

SEQ ID NO: 173704 - DNA, 122 bp, Homo sapiens
tccccgggctccccggccacgccactccggcccggcgatccccaggccgatccctagctccggcctgggctgcccgacccatgctcaggccccaggcgaggcagagccctgccgccctggac

SEQ ID NO: 173705 - DNA, 122 bp, Homo sapiens
gtacccagtgagaagccacccatgatgccccaggctcagccagccatccccagacctaaccggttattcctacggcagcttcgggcatctcacttgggaaatgagctggaaggtgagagctg

SEQ ID NO: 173706 - DNA, 122 bp, Homo sapiens
cacgcacacagctcgcagctcccttccttcgtggggtgaaatccaaattctttgtagacacgggcactgtgcacacgtgaaatacctgtgttcttcggcaccagatttttcaaaaggtgact

SEQ ID NO: 173707 - DNA, 122 bp, Homo sapiens
tgctgaggtaaggatgaacaacagaacttctcaattgaattctaagcttgggcctaagcacgctgtgccctctgcctttgagtttgcaccctggatggctcccctcctcccaggagacccag

SEQ ID NO: 173708 - DNA, 122 bp, Homo sapiens
gacacctccatccataacctacactattgtccactaaacactccctacctgtgtaaattccgtatcaagggtaaaaccttataagatttttcagacaactggcatttaagtgacttgtttat

SEQ ID NO: 173709 - DNA, 122 bp, Homo sapiens
gccggcagaggtaatttatgtgctcctgaaaattgggcgggtccttctaactcctcctcccgcagctggggagcggttggcagcagcgggctggaaattccgacgattaaacaaagggagtg

SEQ ID NO: 173710 - DNA, 122 bp, Homo sapiens
tccacctcccctgggaccccagccctgcagcagccccaggggagcggccggggatcggggcggggtgcccaggacgcgccctgattggcccagtgttagccaatcaaagctctcgcatcccc

SEQ ID NO: 173711 - DNA, 122 bp, Homo sapiens
acagctcggacgtcgagctgttccactctatcgcttcccaaggaagcgggctaggggtaacgggcacggttggtgggtttgcccccagcagaggctagcggtggcgattaggagtccagatg

SEQ ID NO: 173712 - DNA, 122 bp, Homo sapiens
gagggctccaccctcgggcctgtgtctgctgacctaagtgataacaggaacttctgttttcgggcccaaatgttgcattttccaagaccactctggcccatcatcccccacatcctgtgccc

SEQ ID NO: 173713 - DNA, 122 bp, Homo sapiens
ggcactttaattggggtcattaagatcaccaagctttgatgccccaaccctgagtcaagccgtcccgttgacccccctcaacttcctggcctcactgcttgctacccccagtgacaggagaa

SEQ ID NO: 173714 - DNA, 122 bp, Homo sapiens
tatccactggcccctgagcatgcatgccaaatggtctgccagccgtggctttactactcccgtatgcttggtagagcaggccaaatgcagtactgccccacaccaagaaaagccccccttct

SEQ ID NO: 173715 - DNA, 122 bp, Homo sapiens
agggagtgagcagctgggggtccatgggacttgcctcggtgctttatctactgctcaagccggcaccatcacaggcagaaccaggttgcaaagcagacttgtctcaagatatgctccaggtg

SEQ ID NO: 173716 - DNA, 122 bp, Homo sapiens
tttcccgcgggtacagataaaaatcccctcacccttccgtagatgccatggtctggggaacgccccctcctcttcagcactatccggcagctgtgggcgagggagaaagcggacgccggggt

SEQ ID NO: 173717 - DNA, 122 bp, Homo sapiens
tcaccttggtgatgagtgagcactgactgggtaggtaggacgggtcatctcatctacagacgcccctgtaaggcaacacactacagcttcgaatctggggaaacaaatccaggcttagcgtt

SEQ ID NO: 173718 - DNA, 122 bp, Homo sapiens
gcgggggaggttgcgggggaggctcggcgtccccgctctccgccccgcgacaccgactgccgccgtggccgccctcaaagctcatggttgtgccgccgccgccctcctgccggcccggctgg

SEQ ID NO: 173719 - DNA, 122 bp, Homo sapiens
aaccccattttcttttggacggagctcgccgcagcacgtgaccgcccacatgaccgcctccgccaatctcagcagtcctcacaggtggtctcgctccgcagggcccgcagccgcctagaatg

SEQ ID NO: 173720 - DNA, 122 bp, Homo sapiens
caggcttaggtcacagcttggcctcagggctctgtgtggctccagcacagcggaccggaccggaggcagccagctcttacccaagcactggctctccagccactcagctcccccaccgctcc

SEQ ID NO: 173721 - DNA, 122 bp, Homo sapiens
acaatgagcaataaacattctcataatcgccaagacaagccaagtgcaaaacaggaagggcgaagacagagggcagcaggtggtccctctcgctcgcgactccgggaacgccaagcctcagc

SEQ ID NO: 173722 - DNA, 122 bp, Homo sapiens
ccagagcaggaccccagctgacagcgggtgagctgggcagaaacccatgccgggaagaggcggacccagtggaccgcagcgcccgcagtcgccgggccaggcgcagaggcgaacgggaggcg

SEQ ID NO: 173723 - DNA, 122 bp, Homo sapiens
aaacagaacacccaggaaatataaatattactttgcaggagctacaaggatcggcggagacgcctctccctgggctgcgtgggaggcaagcacggcttcccgggctcctttccggcggcgca

SEQ ID NO: 173724 - DNA, 122 bp, Homo sapiens
accccccacatttcaacaatgctcgttgaaatccacgaaactgatttcccaatcccctaacggtttatggtcagcaatttggaaaacactggctgaaatactaatgaaagggcatcgcgggc

SEQ ID NO: 173725 - DNA, 122 bp, Homo sapiens
tctgaggaacccagcctgatacaaatacccagctgagcgagtgtctttgctgatcttcaccgcctgaagccagtgctttaaaccatgagaatgaaacattgaggggcactatgtggacactg

SEQ ID NO: 173726 - DNA, 122 bp, Homo sapiens
tgtgggttgttgtaggtcttttttctcttactctaggctgcttggttttcaccccttacccgctgtttctgtcatcagtttctttatgaaacaccaactgatgtaaacgtaaaaggtgtgaa

SEQ ID NO: 173727 - DNA, 122 bp, Homo sapiens
tgtgattgataatgaatgtcagaggagagtttccttttccatcaacgcttcaggagacagcggaccgccaccaacacagggcggaagagcacccctgtcacgcagactgtgccgcccccggc

SEQ ID NO: 173728 - DNA, 122 bp, Homo sapiens
accagtgatgaactgataaccctggtaggaaaatgaaacattggggctgggcttgtaatacgctttcttaaaagaatgccccattgaaattagagtggcacggtgccaccagaccaagggtt

SEQ ID NO: 173729 - DNA, 122 bp, Homo sapiens
tgtgtttgaggttgaggctcttatttcgagccagggctaggatacggcctggagtccccacgacgatatgcgggcagttcttcttcagcacctcttcatccttcttgatagacagaccacca

SEQ ID NO: 173730 - DNA, 122 bp, Homo sapiens
aagaaggtgggggtaaactacgtgtgtagaaatgtgtgtgcacactggtgtgcgttggcacgtgtgcgcgactagatttgaatctgtctgctccaccagagacacacattcaaagccgaagg

SEQ ID NO: 173731 - DNA, 122 bp, Homo sapiens
tctgcgtctgctgtgttcctcccaacgcctgcagcaccccaatttttggccagacagggccggtgcacttcaggaggtgaacagaaagaaacacatgtgacgatctcaacagccggcgttag

SEQ ID NO: 173732 - DNA, 122 bp, Homo sapiens
cgctgtagctcggagctgggcagaaggcaccggggcgccttgcggcggagagtgaggtgccggggtctctgctcctgctctggaccctggagagtaacccattccccggaattcagaatgac

SEQ ID NO: 173733 - DNA, 122 bp, Homo sapiens
cgccgcgcgcgaagttctctcgctctccagccagcccgggatgcgggcctcggagccccccgggaaagacggtcaggggtggacagaacccaagcttgccctctacgaccgggccccagctc

SEQ ID NO: 173734 - DNA, 122 bp, Homo sapiens
atgtctcctttccgaaatactctccctaaaatgacagagaacctggccaggcggacagaacggcccctgcgcatttgcaggggtcctggtgggcttgccgggcagagggcgtgcgggtctca

SEQ ID NO: 173735 - DNA, 122 bp, Homo sapiens
accacccctggcaccaggcccgaagcagctccatgggcagagccgtctttccctggaggccgtctctatttgggcagtgagaatctcctccatccagcatccctcacacggcctggggcttg

SEQ ID NO: 173736 - DNA, 122 bp, Homo sapiens
agccagaggatcttggaggcacagtgtccctgtctaaatctccagataacccagaaagcacgcactgcccccacgctactccaccccctccacgcctccctgtcctatgctcttcatgccca

SEQ ID NO: 173737 - DNA, 122 bp, Homo sapiens
agagactcctcccagctccggagagactcctcccagttccggagagactcctcccagctccggagagactcctcaaagctctggagagactcctcccagttctggagagacacctcccagtt

SEQ ID NO: 173738 - DNA, 122 bp, Homo sapiens
ggagacacggcatgccgtggtgcaggcttccaagctgcccatgtccatcatcatcgtgggcgtgggcaatgcggacttcgctgccatggagttcctggatggggacagccgcatgctgcgct

SEQ ID NO: 173739 - DNA, 122 bp, Homo sapiens
ccggggcgggttctagaggtgcgcgtcatcctgcagcaataggcgtggccgagagacaggcgcagagcgggggcgggccagttgccttgcaagcttcgcagacccagcggcccgcaggcccc

SEQ ID NO: 173740 - DNA, 122 bp, Homo sapiens
attaccccgcgctttttctttccatgtcattatcttctcctcttttatcttaacaacacccgccacaattatcttcttttgatttacatgtttattgtctgtcccggcccccaattccctct

SEQ ID NO: 173741 - DNA, 122 bp, Homo sapiens
gctgtggtgggctccggtgcactgtgggatggaaaccggagcggcgcgtcctggcaggaccgggcggcggcggcggcggggccggcggcggccagggacccgggcttaggctcggccaggcc

SEQ ID NO: 173742 - DNA, 122 bp, Homo sapiens
cacaatcaccacacgccccagggcggccgcgggaggatttagaattagaattattattgccgttatatttgtttagagatgggctctccctatgttgcccaggctggtcttgaatttctgga

SEQ ID NO: 173743 - DNA, 122 bp, Homo sapiens
gtcagtgcacagccctgttccagacagtgctgcctggaagatttctgggctctcctgaggcgccaccccgcacctgagccacctccttggactcctgtcctctaccccttgaggacctccct

SEQ ID NO: 173744 - DNA, 122 bp, Homo sapiens
atgggagccacttcgtttggctaagcattgggtctgggttcaggagccacgatgctgccccgggtaccccccctgccaccgtggcaggtgtggcacagacacaggcctctgccaacagggca

SEQ ID NO: 173745 - DNA, 122 bp, Homo sapiens
taactgagattattaattgcggtaagtcgcattgcgccattccaccccacttcagcagctcgtttacgacccaaaacggggtcacaaatgcccctgagagagcagcggtagactgggataga

SEQ ID NO: 173746 - DNA, 122 bp, Homo sapiens
tgaagtagttcttcagcctcgggttggcattgcgtagcgaggccatggcccaaggcctgacggagaagctgcgatagtaccctccccgcgctgggactaggggccgggcgcgtgcgggcgtt

SEQ ID NO: 173747 - DNA, 122 bp, Homo sapiens
atctctcggggctctgggttggccacccagtcctcccctggtgacataaaaagaaagagacggaaaaggaagaattctacctgagttcgccgtaaagcgcccgccctctcgcctctacgctt

SEQ ID NO: 173748 - DNA, 122 bp, Homo sapiens
gggaaaccgtcctaagaccgtccgcactcgcttcagagccgctgcaaacggccgtcaatccgtcattcagacgcgaagacaaagcgtccctggctcagccctgagaagcagcgggacggcgg

SEQ ID NO: 173749 - DNA, 122 bp, Homo sapiens
ctgcgcatggtctccaaaggctgagcgagggcctgccagtgcgcatgctccgctctttagcgcttcctgagcaaagtttgaacgcctctcgagtccagttggcttatgcgcatgcgtttctc

SEQ ID NO: 173750 - DNA, 122 bp, Homo sapiens
ttcccacattatcacacagcaccctcttaaggcaaatcatgatactccccattttgcagacggagggcaggacatggaggctggcgttggttatgagttgtgtaaaggttagaaccttcaca

SEQ ID NO: 173751 - DNA, 122 bp, Homo sapiens
ctcaaccaagaaaccgaaccttcctgaggtgggtggattggtgggtgagttgctgcttttcgccccctctcctccccccttctgcttgtcgctgtggctctcagcagcagggatttatttat

SEQ ID NO: 173752 - DNA, 122 bp, Homo sapiens
caggccgccctttggttttcttaaagaagtccccatgggccgcagcctggacgtctgctccgttctccaccaggagggtcaccagggccatgttgcgtctctcgatggcgatgtgcagtgct

SEQ ID NO: 173753 - DNA, 122 bp, Homo sapiens
ctgccattcagcgggttgtggctgttagaattggagttctcgttgttctccctgcaagtgcgggagcaaagcagcggggtcagcagggacatcgagaccacccagcgccatctcagtcacag

SEQ ID NO: 173754 - DNA, 122 bp, Homo sapiens
tttgacgggttttggtcggcggagaatggtctctaaacttcccaaaccgcccccgtttcacgtcctgtgaaaggaagtgctcctctgatgaccaatcagcggcgagaagctcttttaacgtc

SEQ ID NO: 173755 - DNA, 122 bp, Homo sapiens
gtagaatgtaggcctatcatgcaacgtgtggaccctgcctagtagaatgtaggcctgtcacgtgatgtgtggcccggcctagtagaaggtaggcctgtcatgtaatgtgtggcctggcctag

SEQ ID NO: 173756 - DNA, 122 bp, Homo sapiens
ctgcagtgttagacgagcggattgaggacacttcccggccgcgggccgcaggcttggaagcgttggttggccgaacccattgtctcatttgccttgtcacagcagggaggacgccgggggag

SEQ ID NO: 173757 - DNA, 122 bp, Homo sapiens
ggcagtcttgcttcctagctttcttttgattttgatgctaatatttgcgtcccttgagaacggctatgatgctgaggggtcctgtgcttagagtccctttcagcctcacacacacactggga

SEQ ID NO: 173758 - DNA, 122 bp, Homo sapiens
gtgtggtatgtcggcagtcacggttggcacagcttctgaagggatcaggaagggtgggtgcgtggctgccctgcaggatggggcccagcaacagcaggagctggacagcagcaaccagggca

SEQ ID NO: 173759 - DNA, 122 bp, Homo sapiens
agagctattgatggcttttgtctatgtcagacagaagcctaagggaagggtgactgctctcgcctggtgtcatggatgtcacatgatagaaagttttatgtttgtttctgacattaggcaaa

SEQ ID NO: 173760 - DNA, 122 bp, Homo sapiens
caggctggagtgcagtggcacgatctccactcactgcaagctctgcctcgcggttcacgccggaggaaattaagaaggaatagtcagggaggtaggagaaccaggattttattcctctccta

SEQ ID NO: 173761 - DNA, 122 bp, Homo sapiens
ctgccctgccgggccggggcgggcggggccgctggtaaacaggctgggttctggtgacaccgggcggcggcggaaggcggcccgagggtcccgcgcgtcccacaaccctccagtcccgctct

SEQ ID NO: 173762 - DNA, 122 bp, Homo sapiens
ttgttccaatttacacgttcaccaaattggcctgagtgctttttttcttccaatgcattgcgcacttataatttagaacaagtgaccaaaacgcttaagagcccatcacgcaaattgttatc

SEQ ID NO: 173763 - DNA, 122 bp, Homo sapiens
gaaaattcgtgggaggataaaactaacttgccttccctggacaattccgccactagacggcgttccgtggagttttgtctgccacataaaaaagcgaggactgaatttcctttgtgtttctt

SEQ ID NO: 173764 - DNA, 122 bp, Homo sapiens
ctggagttggatcagaaggacgaactgatccagaagctgcagaacgagctggacaagtaccgctcggtgatccgaccagccacccagcaggcgcagaagcagagcgcgagcaccttgcaggg

SEQ ID NO: 173765 - DNA, 122 bp, Homo sapiens
tcgttagacacggccagggaccggcagagccaagcaggcgggccaggcagccgcgccgcccgctggccagggtgccctattttgaagtttttaaattggctaatacaggtcctcggtaggat

SEQ ID NO: 173766 - DNA, 122 bp, Homo sapiens
tgcccttgcccggggcgggcggcgggaggggccgcggggcgggggcgcgctggaggggagcgcccggggcggcgtgcccgcggggacgcgcacgcggggctgcggggcgaggcgcggggccc

SEQ ID NO: 173767 - DNA, 122 bp, Homo sapiens
tggtgggaggacctagagagggacttcccttgtcctgtctgtcgaaagacatcccgctaccgcagtctccgacctaatcggcaactaggcagtatggtggaaattgccaagcagctccaggc

SEQ ID NO: 173768 - DNA, 122 bp, Homo sapiens
gggcgggcgcctttgacttcaagggtccggagtgggggctctgtcctctcctctgacgaccgctgcgtggctcttgcataacctcccctttcccccacaacacgaacctcagttttgagtct

SEQ ID NO: 173769 - DNA, 122 bp, Homo sapiens
gagttttttaaaatatggactacaactcccggcatgccacaccaggattcgaggaccacacgcctcagccagccccggcaagggcctatcaggggtgggtcggggcatccgagcgggtttga

SEQ ID NO: 173770 - DNA, 122 bp, Homo sapiens
cagcctctgcaggaccagactgtcgtcaagtaggcctgtccagggacagctcctgcctcccggcggcctctgtaggcccagactgtcttcaagtaggcctgtccaaggacagctcctgcctc

SEQ ID NO: 173771 - DNA, 122 bp, Homo sapiens
aggcgccgagggccgcccaggcctagcgctcgggctgcacggaaactcccaaccctccggcgggctcgggcctcgcaacttcacaaccagccggcggaaagcaagaagatgcgaggtggggg

SEQ ID NO: 173772 - DNA, 122 bp, Homo sapiens
ttacttgcttatgtatcccgactcctgacgaggtacctgaaatatagtaagctagttgagcgaatggtgatagctgtcaccattgccagtgattaacagagcaagtttccctagttatgtga

SEQ ID NO: 173773 - DNA, 122 bp, Homo sapiens
cagggttagggcgctacccccagcatctccatgttcccatctgtgacacgtgggtggcagcgccttcctcctggcggggatcccgggagcggatgcgctcaggcctcgggatctcgcgggcc

SEQ ID NO: 173774 - DNA, 122 bp, Homo sapiens
gctgcggaattgccagacagtacttatcagggatacatcttaactagaagcttcttccggcgccgaggcaaccgcctcgccccaccaatgggtcccccagagaccccacccccgctcaagtc

SEQ ID NO: 173775 - DNA, 122 bp, Homo sapiens
ggacccgccagggctggaatcccactgctacctgagcatccagttggtgaccaggctccccgaattaataaaagtatttgttgttgtttttatagcagttgtccaggaagtatctcctttcg

SEQ ID NO: 173776 - DNA, 122 bp, Homo sapiens
ctgccggggtccccgaagccgccttcgctccttttcggttcttggcttaaattagaaagccggcttggagcgctggaagccccttcacattctgcaggggacctggtaaaatagcccgtctt

SEQ ID NO: 173777 - DNA, 122 bp, Homo sapiens
catggcttgaatttacattttccaacatgaggtgggtttttttgtcttggcctaccatgacgtctgagtcatggtgacgtgggtgccaggaaagcacggtgatgtgtttctgctcacagcac

SEQ ID NO: 173778 - DNA, 122 bp, Homo sapiens
ctcccacctctctgccccaggtgccgtccacgctgcagccaaccctttcacggcagctcccggggcccacggacccttcctgagccccagcacccacattggtaagagccaagggcgtgttg

SEQ ID NO: 173779 - DNA, 122 bp, Homo sapiens
aatgggaatctgattccagtggatgtctcttttcagtgcactgggtggtcaatgcccactcgctctgaaatcatctgactgtgatgccctgccttggagtttagaagttgagtgcaggcttg

SEQ ID NO: 173780 - DNA, 122 bp, Homo sapiens
gtccacattctgcacctgatagtgcaacacttcaaggtgtgtaggagggacggtgggctgcggggcgcgcgtcttcaggcattcactttgaacctttaccttgtcttgttctgcaataatca

SEQ ID NO: 173781 - DNA, 122 bp, Homo sapiens
ggctccagaggccacaggcttaaccacggaatcctagcccgcccgcacatccctccatcgcgggagcgacctatctcatccgtagacaccttccgctgcacccagccgcagctggtcaggcg

SEQ ID NO: 173782 - DNA, 122 bp, Homo sapiens
aggtgtccccaactacacctaacgcccggagcccaaagttggagcagaactggggagtcccgggggcgcgtttcttttgttccccgggagctggcgtcaggttccaagaataaaaagtgaag

SEQ ID NO: 173783 - DNA, 122 bp, Homo sapiens
ccaccggctgcaaacaggctgcaaacaccggggagctgcaagcgagggcggccagtccatcgagccagcagagggcgctgaaacgcggcccagtgaactagggacgtccagggccagcgctg

SEQ ID NO: 173784 - DNA, 122 bp, Homo sapiens
tgttcattggttctcagggcctggatggctaaagacagctactcagctaagcgtggtttccgactgaactgcatcctttgtttcagtagacggccggtctcaggctgctacacgtattttgc

SEQ ID NO: 173785 - DNA, 122 bp, Homo sapiens
aagaataaatgtagagcagcaaggtgacccttagaaggaaaggacacctgtttggatgtgcgcttttgtcccattgctgggaatgagtcctgtgcccttatggatttgaagcttgacaaaat

SEQ ID NO: 173786 - DNA, 122 bp, Homo sapiens
atgcaaatataatatctatattgttttcaaaaacctatttcctaagctagtttccttagacggatattatcgaaaattttcttgcaaaagcattaacatacatttaaccctacttaaatgct

SEQ ID NO: 173787 - DNA, 122 bp, Homo sapiens
ccttgatccgtcttcacgttccggtaccgatctacctgaaactctactggctgaaatggtcgattatgctcttccctcgatccgtcttcacgttctggtaccgatctacctgaaactctact

SEQ ID NO: 173788 - DNA, 122 bp, Homo sapiens
tccggtgtaacgttcgggctccgtctcaggggctgaagtttgtgaggtgagtagtggccccgggcccacagagggtaattccagtccgcgccactgtggccggggactcagtccaaggggag

SEQ ID NO: 173789 - DNA, 122 bp, Homo sapiens
cttctgcctgtccatcataagatcctacctggtttggggagtgtgaatggattcttcctccgttcctccacgctagtagaaaatacggcgcactccctccttttaaacagctcccgatcagg

SEQ ID NO: 173790 - DNA, 122 bp, Homo sapiens
gtactctttgtgcaccctgggtggaaagcctcctaattctttcagtggtcaatgatgagccgaaaaactgccggttctttcgtcttacggccaggccctttaatctttaggatgctttgata

SEQ ID NO: 173791 - DNA, 122 bp, Homo sapiens
gcacccggcgcaagagccttccccggggacagccaaggaggaacgcgaggagcctgagaacgcgaggccctaggggcagccacccgcgcccagcgccccgcgccccgcgccccagccgtgct

SEQ ID NO: 173792 - DNA, 122 bp, Homo sapiens
aacgtacgagtgggcagggggagtggtagaaacgcccctgctgattgcagggtttactcacgtatttaccttaacgcccgttcttctgcgactactataaacattaaatgagataggggatc

SEQ ID NO: 173793 - DNA, 122 bp, Homo sapiens
gaagctgacattattccccccctgactcagcggagatttaggtaacttcatctctgctcccgatagccgtgggcagtaacatgacgccttacgccatctgctgatgccaaatgaatactgca

SEQ ID NO: 173794 - DNA, 122 bp, Homo sapiens
aaataccaggaaggaaacagattctgccagttacagagtattgacaacactctgtcactccgaaaaggcagactcaactccagaaaagtgagtctgtccacagtttcaagtttcagttctgt

SEQ ID NO: 173795 - DNA, 122 bp, Homo sapiens
cgcgcgtcttgggctagggcggctggggcaatgaccccctgcggcgcaggcgtggggttgcggcgagagggcgagcctagaggctttaagggggaagagagggtgatggcctggcaggtact

SEQ ID NO: 173796 - DNA, 122 bp, Homo sapiens
atccccggaagaacatgagctccaatgagggcagagacttctgtctgttgggttcactgccgcattcctgggacccgagcggtgcctggcacgcaggaagcacttggaaattatttgctgag

SEQ ID NO: 173797 - DNA, 122 bp, Homo sapiens
ctcgttctgctgctcaatcactttgttctcctcttcgatggtcttcaggttgctctccatcgtggtaatctgaaacgcacaagtgtgcgtgacatgtaacaccaggaggacctaggagcgcg

SEQ ID NO: 173798 - DNA, 122 bp, Homo sapiens
ggctcccgggcccagccgggctgaggtggcgtgggcgccctgcgggccgggcctccgcggcgcgtcccagtcccagtctccgcgctggtctggcccggtccctcagctccaccccctgcctc

SEQ ID NO: 173799 - DNA, 122 bp, Homo sapiens
tcttaacagcttcagtacacagtgaggacagccctgtcatggacctctggggctggattccgcttggctggtcagctcttgacagaagccctgagatgtgtcattctaggagttgccctgga

SEQ ID NO: 173800 - DNA, 122 bp, Homo sapiens
cacctgtagcttttagatccccaagtgctcgcaggtggggggtgggcccaggagggatcccgggggaggggcgtccgagcgcgcccacgattggtgcgcagggacgcgggggcggtaaaggg

SEQ ID NO: 173801 - DNA, 122 bp, Homo sapiens
tcacacaaaaaggctgggtgtggtgtggctcacacctgtaatctcagcactttgggaggccgaagtggggtatgacttgaggccatgagttctagaccatcctgggcaacacagacctcctc

SEQ ID NO: 173802 - DNA, 122 bp, Homo sapiens
atcgtttaagcggttatggctacaggatagtggggtttctcggctgaccagaggttactccgcctcctcctccggcggcaattacactaaaccgcccggcccagcgggaacaatgaaacccc

SEQ ID NO: 173803 - DNA, 122 bp, Homo sapiens
tggagaggtggcccagccaatgggtgaggccgactgaatcgaaagctacggtgattgtgccgaggtgattggaatctttggcgccttggtttcagaggtgggcgcatgatgagcgggtacag

SEQ ID NO: 173804 - DNA, 122 bp, Homo sapiens
ggcgctgggcctcacgcccaggaggaagacaggtgaggcctgactgtccccttccctccccggatcggggatgggcacgcacgcatgcacacacatgttcacacctttccgtggtgaaaaga

SEQ ID NO: 173805 - DNA, 122 bp, Homo sapiens
tccctccctcttctaagaagcctggattacgaatccctggacgcaagacgcatttgtgcccggcttcccggtattgtcattttacaccttctccagtttggtcccctaccccttatttacac

SEQ ID NO: 173806 - DNA, 122 bp, Homo sapiens
caggcccctttcctcctccctgcccacgccccccagctcctcccctttcctagcgaagctcgctccggcaatcaaactccctggagagctgtagttcccatcgggtgggttaccccaactca

SEQ ID NO: 173807 - DNA, 122 bp, Homo sapiens
aagagacacactcacctcgggctgtggctggctgcccctttctacccactgcctgagccacgtccaactcccaggctgcctctgcgatcactgggagacaggaatgctccaatgacacccag

SEQ ID NO: 173808 - DNA, 122 bp, Homo sapiens
aatagtttggagcttgagcctcagaggcccgtgccacctctcatcagtcgtgttcattcacgggtggttacgcagccaggctgtcagccctgtgcagcgtgtactcaggacatgaccaagac

SEQ ID NO: 173809 - DNA, 122 bp, Homo sapiens
aagttctgagctcaccctccccgccaggcccacctgcggaggcacatggagatccacgaccgggtagagaactacaacccgcggcagcgcaagctccgcaacctgatcatcgaggacgagaa

SEQ ID NO: 173810 - DNA, 122 bp, Homo sapiens
gaagtcacgcgcttccgcaggcttgcgggggcaccttcgcccacggacacgccctttctgcggaggcagcccccagcgaccctctgcccagcttcggcgcctcactcgcgacgctcccaaac

SEQ ID NO: 173811 - DNA, 122 bp, Homo sapiens
tcgaggggcctttacgggcctgcggagaagcggagcctggttacccgggagactcgggtgcgaggggcggaggcaggccgctggggcctgacctggccgggctggcctgccccattgatcgt

SEQ ID NO: 173812 - DNA, 122 bp, Homo sapiens
gcctggtccccccaagtctccatcgcgcagcgtggggccgagaggaatagtgagcgatggcggaaaacctgaaaagactggtctcaaacgaaactttacgaacgttgcaggaaaagctagac

SEQ ID NO: 173813 - DNA, 122 bp, Homo sapiens
gctgcgtgagcaggacattgacggacccaagaggccacactttcccttcaaaccagaaagcgcttccatcttagaagaaaaacagtggcgttcttagaaacgcgaataaccgaggagacttt

SEQ ID NO: 173814 - DNA, 122 bp, Homo sapiens
cttgtgcagcgttaaactgagccaaggcccttgccaatgcagctccagctcgaggctccccgccggtaggagtcgagcgtccccgagccgtgtagaaggcactctcagacgcccattgccgc

SEQ ID NO: 173815 - DNA, 122 bp, Homo sapiens
gcgggcaattgatgcagggtcacctgcacttgctgggcacagctgggggcttccagcagtcggtcagctccccaagcccactggcagtctcatggcaggtggcaccacagcaggttgggcgc

SEQ ID NO: 173816 - DNA, 122 bp, Homo sapiens
tggggcacccccagggggctgccaggagctcgggggcctctccaggaggcgcgtcggggtcgctgcgggccgggaacgtccggcctcgggcctcctcagggcaggcaccgggccggccccgg

SEQ ID NO: 173817 - DNA, 122 bp, Homo sapiens
acccccaagaccggaacctgttacaccagagggttggtgcacattcacgatgccctctgtcgaagggccccaccttccatgcctgcgcgtctccttttgttctgtcaggtttagcattgagg

SEQ ID NO: 173818 - DNA, 122 bp, Homo sapiens
gctagccagcgagaaattttgccccacaaatccgccagcagcagtggcgggaagcctcaacggcagcgaccccgccgctggcctcgtgcgcagctggtccccaccctcgcgcggcgctccct

SEQ ID NO: 173819 - DNA, 122 bp, Homo sapiens
aggcacattttaattcattcactcacttggttttcagtggacaactgtgagacctttcctcgggagagctcgtgtccactgaaatttcctatcctcggtgtaataaacctgtcaccaagatc

SEQ ID NO: 173820 - DNA, 122 bp, Homo sapiens
atgggtgacagagacctacgcacggattataatgaaccaggcaccatcccgagtgctgctcggggattggatgatacagtttccatagcatctcgtagtagagaggtttctgggttcagagg

SEQ ID NO: 173821 - DNA, 122 bp, Homo sapiens
ccacctctccctgccgggggcctgagcagatcagaccacaagcacaggctgcaaaggtaccgaccgcagcagtgggcctgacagtcccatcagcacccagccaaggccacagcaaaggcacc

SEQ ID NO: 173822 - DNA, 122 bp, Homo sapiens
tgactctccaaagcccacagtctggaatggccaagtagatcaaacagcagagatggcacccgcccctccccctaggggttcagtcttgtatcaggcaggctccaccctgttgctggtggctt

SEQ ID NO: 173823 - DNA, 122 bp, Homo sapiens
gctccaagaggactgcatttaatgggttacaagcctgtaggggtgtgtaaaaagcacaatcgcacaggacagctatgaggcaagacaaagtggctggcgagttcagtttgcggggcggtttc

SEQ ID NO: 173824 - DNA, 122 bp, Homo sapiens
atgcccgcctgggctcaggcacggacggagtggagccaggtggcagcaggcagggcgcgccgccagagtgcccagctcccggggctgcccacagggtggggccgccctcgccgccgctccct

SEQ ID NO: 173825 - DNA, 122 bp, Homo sapiens
gagctgaagctgatcggtgagtggccaaggcttccgggaagtggttcggcttccgggaggcggttagcacgtggatgaaggtgcccatgtactctatctagtccgtcccctaaatttggtac

SEQ ID NO: 173826 - DNA, 122 bp, Homo sapiens
tggctcccctcccctttgcttttgccagttctcaagcacacccggcatgctcctgcttcacggtttttggacctgctgttcccttgctcctgctgtggcccagaaagctgtccttgcagcac

SEQ ID NO: 173827 - DNA, 122 bp, Homo sapiens
ggcattcaaagaaagtactgtgtggttctggccactaaaaagtgatctaggcttgtatttcggatcttcaggctatatatttcatcccttcaatgaaattcacttaacttgttttataacaa

SEQ ID NO: 173828 - DNA, 122 bp, Homo sapiens
tgaaatctgaaatttaaacatctgtgaagataatcacattttctttaagattggaatcaacgcataaagctgagtcatatgatctgtaaaaactttagtacatatggtagttgagttagaca

SEQ ID NO: 173829 - DNA, 122 bp, Homo sapiens
cctattaaagaaggaaagtgggtaatggagtcccagccactcaagagactggatatcccccgagaatggcttgggttaccagctatggacccttggaagatgaatctaatccttctcactgg

SEQ ID NO: 173830 - DNA, 122 bp, Homo sapiens
ccagaccgttccctcccctagctcgggcgctgtctgggtggactgggggttgggatggttcggacgacagcggcggaacagcaggagccgagaggggcagagaggggcaggaactacagggc

SEQ ID NO: 173831 - DNA, 122 bp, Homo sapiens
ggacggggacctaggtatggggccgccgtaatggaaaggattccttaaacatactcaccgcggcgggagagctgagagcatggccaggtgccgcgtggggatctgcctcagtcacttaaaga

SEQ ID NO: 173832 - DNA, 122 bp, Homo sapiens
tggcagctcccgtcacacccttggctcaggttctgccttctccactgcaaagcagcctggcgcagatagctggcagcctcagccacccagcctggggcccctgtgagttgggcactgaatat

SEQ ID NO: 173833 - DNA, 122 bp, Homo sapiens
aggcaaaggggcctgaagcgctcgagttactcggccaaggcaagcctacaatctggcctccgtcggtgcgggggggtgtcggggaaggtgtacgccgctctggagtagttggcccctagttc

SEQ ID NO: 173834 - DNA, 122 bp, Homo sapiens
gttgtcaaacctaaaaagattttcctagagcatggcctatgacgtcaaggatccaggtagcgcccggaggaaagcgccaaaggaggccgccatctttcatacagcagcccggaattttgcgc

SEQ ID NO: 173835 - DNA, 122 bp, Homo sapiens
ctgagtatcctgtcctaggcccctccatgctgcgaaacatccctggagaacgttaagggacgggggagaaaagctctagttttaacttcaggcaaatcgctccctttttcccttcaataaaa

SEQ ID NO: 173836 - DNA, 122 bp, Homo sapiens
ggataaagggttctcagtaattcagactctcacatggcttctgccgtatgcctgaggtgacggcgacggcggtaacagtgtgtcagagccaggtggagatataagatggtcaggcccagagg

SEQ ID NO: 173837 - DNA, 122 bp, Homo sapiens
aggtcagctgggggtcgttttctgcctctgtgccagaatccccttcagggttcaagaaggcggaaccagctgtaatgaaagcagcatggtcaagaaagcgttttcagttctggtttcatgac

SEQ ID NO: 173838 - DNA, 122 bp, Homo sapiens
agctgataagtcagaatgtatgtgaaatggctagagaagaggcctaagacaatatataagcgtatttgtttggaatttattctatttactgagaaattttaagaaagggaggggtcacttga

SEQ ID NO: 173839 - DNA, 122 bp, Homo sapiens
aactgaggctcatagaaagcaaattacttttcgcccgctgggcagagctcgcctctctgccgctccctccccctgctgcagatcagggcattgggatgttttagtcacttattaagtcctat

SEQ ID NO: 173840 - DNA, 122 bp, Homo sapiens
gataaattatagtttttaatctttagaaaaatctaaggaagtcggcattatttccattaacgtataagaaaatagaagcctgaggaggttaattttcaggcttaaggttaaggtaggttcca

SEQ ID NO: 173841 - DNA, 122 bp, Homo sapiens
tggcacaacacaagagctcccaggggaaaagcctccatttgaagtgcctgtaaagtaatgcggaatgtgtcagatgattcatgtgcgtaaatatcagttggcagacaaggaaatgtcatttt

SEQ ID NO: 173842 - DNA, 122 bp, Homo sapiens
gccgccccgcccactgaagccgatagctggagcaaagctcggtcgggcgtcttccggggtcgtcacgtccggttgccaaggtgactggctcgctaaagcccaacccttatgatgcaatccaa

SEQ ID NO: 173843 - DNA, 122 bp, Homo sapiens
tcactgggacaggtcagcccggtgcccgcagagacagggacacagagaaagcgagcatgtcggcccatggctgagcatgaccagcacggagctgcccgcaccctccttctcctcctcgaggc

SEQ ID NO: 173844 - DNA, 122 bp, Homo sapiens
gcccccaataaatatttgcaggggatgccagggcttgcggccgtggcgggggtgggtatgcgccaaccctatttcaggcagcgctcgaagtaggtggagcctatgtagccatcccgcatgga

SEQ ID NO: 173845 - DNA, 122 bp, Homo sapiens
gaagacccagccggccgagagcctcagccaccttcctgcaggaggtcctcacaccccagacggtcagaatgctccccagactgaggaatcagctgcacatccccctgatgtctctaaagctg

SEQ ID NO: 173846 - DNA, 122 bp, Homo sapiens
ccacctgcctcttccacagggtgggggcgagagtgacagcgagacagcacaagaaggacccgctctgtttcaaagcgaggatgtgagtgacttcgtctgtgccgaggtctcttcgtctccaa

SEQ ID NO: 173847 - DNA, 122 bp, Homo sapiens
tcagtactgaaatctttattttctggaatttcatagtctactaatgtcagtgggtcaatacggttatgatctgcctaatttcctccagatgttaggatcctctgaaaagcagatgtcaaaat

SEQ ID NO: 173848 - DNA, 122 bp, Homo sapiens
cgggaggaggcagactggagtgggcaccagtcccggtagtaagagtcttaacgtcttcctcgctttcctctcgcagagtagtatggaagcatcagctcctccccctgggcctccaaaagtta

SEQ ID NO: 173849 - DNA, 122 bp, Homo sapiens
ccagggcgctggccgtgggttgccccccgtgcctgtctgtgcctgatctcccagcaggcacgtgtgctgggcctatgcctgcttcatcttcagagaagtgagctgcacctggtgcagagagc

SEQ ID NO: 173850 - DNA, 122 bp, Homo sapiens
accaggaattcatttattcatgcatccaacaaatgcttattgtacactatgtgccagacacggtgctgagcattgggaaaacggccctgagcttggtagaggagtcccctgcctctatggtg

SEQ ID NO: 173851 - DNA, 122 bp, Homo sapiens
tctgccccatggcgacacgaacccggctgggacactgctaggcgcgcactgccgcccctgcgctcccggccgaaccccgccccgcccaggccccgcccccagccccccaggtgaccgcggct

SEQ ID NO: 173852 - DNA, 122 bp, Homo sapiens
agtgagcattagaactggagggggtctgcgggggaatggagaggaggatgttcactcacccgaaccaagtaggaaaccccgggtcccatgactttgtcgttgggatgcagccagccccgcgt

SEQ ID NO: 173853 - DNA, 122 bp, Homo sapiens
ttaaagaaaccagcatatggtgcagtgaatatacctagctacaagctagaggcaaatgtacgttctgctggttcgctgtactactgaagcatattgtgcccagcatagatgttattatggtg

SEQ ID NO: 173854 - DNA, 122 bp, Homo sapiens
gcctgctccccggacgaaatccgcggaccgggctttaggttcgccggaatcccacgctcccgacttctgcttccgggtcggagccatggcggtggcaaattcaagtcctgttaaccccgtgg

SEQ ID NO: 173855 - DNA, 122 bp, Homo sapiens
cctctcactgttaactactagaaatatgatgagaatttggctttaatgaaatagtaaaatcgagtttgctgtccctacagcaaagtgtatttattctgtagatctaaagtcatggcccaggt

SEQ ID NO: 173856 - DNA, 122 bp, Homo sapiens
gcatgcctcccggccgggagccaaatgtttccagggagccggtggcctccacaaccggaccgcaagctcgcgagggcagggccggcccgccgcgccagggactgctgggcgctgcgcgggaa

SEQ ID NO: 173857 - DNA, 122 bp, Homo sapiens
aaatcatatgttgcatcccataaaggtctaatgggctttaagtggagttggagagaaaagcgggcacctcaacctgttgtgcagaacagaaacagcatctggaggtaggcccccagatggct

SEQ ID NO: 173858 - DNA, 122 bp, Homo sapiens
ggggcatgggggacatatacatgtgtggctgcagcatcattctttgtcgtggagccctcacgattgcttccttattgttgccatagtaactgtctactgatggtgtatttataggggaagaa

SEQ ID NO: 173859 - DNA, 122 bp, Homo sapiens
cggctgcggctccggttcccgctgcggctccagcctcatcctcagaccctgcggcagcatcggctacaactgcggctcctggccagaccccggcctcagcgcaagctccagcgcagacccca

SEQ ID NO: 173860 - DNA, 122 bp, Homo sapiens
ggggtagccgctcccccttctgtccccgcctcagaggcgacgggcgaggggcctccctcccgggatttgtttatatgtcttctcaaagcagcttgaagcggctgaggggcggagccctcaga

SEQ ID NO: 173861 - DNA, 122 bp, Homo sapiens
tttgtaattcatgatccttgtgcctgagggctcccttctgctactcagtctacaattccccgtccctgtgaaggggcacccaggcctgacagccccagacttggctttgccaaccctccagg

SEQ ID NO: 173862 - DNA, 122 bp, Homo sapiens
atttgcagaagggagggggacctgttgattagggacctggccccagcctgtcctccctcccgcccacccccacctcagtgtccctggggatgcggaaggtgggggcagggagggggagcctg

SEQ ID NO: 173863 - DNA, 122 bp, Homo sapiens
tgccggtgtaggggcaggatccctggccgggcctctcaagggcttcgtttctgctctccccggcatgcctggcttgtttgaccaaagagccctctttccacgagactgaagtctggggagga

SEQ ID NO: 173864 - DNA, 122 bp, Homo sapiens
gaggaccctgaggtagattgggtggtttcaacaggaacgcatccactgtctgagaggtgacggaggcacacgttggtgtggggagcgggaggggagagggaggggggcgggtggggggcggg

SEQ ID NO: 173865 - DNA, 122 bp, Homo sapiens
ttgagaacttggctttctactaaaatatatgccttcctgggaaaggttctgttcctggttcggtatcagcatctctgggaatctgtactgtgtatgcagattgtctgcattcaaatccaggt

SEQ ID NO: 173866 - DNA, 122 bp, Homo sapiens
caggcgattggctagacaatcgaacgatcctctcttattggtcgaaggctcgtccagctccgagcgtgcgtaaggtgagggctccttccgctccgcgactgcgttaactggagccaggctga

SEQ ID NO: 173867 - DNA, 122 bp, Homo sapiens
ttttaacagtggagatactgtgcatctatttctttaagctctctcaaatcattttgggaacgaggctggaaataaataaatatcctgaggttgaacagctgatctttgccaacaggcagaga

SEQ ID NO: 173868 - DNA, 122 bp, Homo sapiens
attggagcagagcggggttcccatatgggcgaagtggacgccagatcgtcccccgctgtgcgcagcccaaacttaaaaggtctttttaactgagctatcatgaagctgccgtgtgtctttgt

SEQ ID NO: 173869 - DNA, 122 bp, Homo sapiens
gggcctaatggtaatacatttaaatgtcaagtcaccatcccaaagtgaatatacatgagtcgtatgttacatgcatgtttcttcaatatgcatgtatcaggaccaccttcatgaatattcac

SEQ ID NO: 173870 - DNA, 122 bp, Homo sapiens
ctccagtccagtgaggcagactgactttaataaaagcataatgactcataggatgggagccgcgaggaaacacccagggggcacccagacccgctcacagagccttggagaggaataagatt

SEQ ID NO: 173871 - DNA, 122 bp, Homo sapiens
cacccggaccagactccagtgccgccctgtcccgccaccctttttcccgcccagactccgcgtcttctgaaagagggcgtggtccgcaggaagttctcacgttacggaaagtaaagtgtttc

SEQ ID NO: 173872 - DNA, 122 bp, Homo sapiens
accacacagggctcctgagtctgacccctgcgctgtacacggcactgttcatcacacacgcggctccagagcccgacccccgcatgcacacagcgctgttcaccacacagggctcctgagtc

SEQ ID NO: 173873 - DNA, 122 bp, Homo sapiens
acagattcataaaattcatcctgcctggaaagtctgctgcctccccatgctgcaggtggccggctggctcccctgtacccagttggagggccccgccctcatcagaagatgcgctggaaatc

SEQ ID NO: 173874 - DNA, 122 bp, Homo sapiens
tcccaaatgtcccaccttctttcctccctacacagtttcccaccactcgggtcagttaatcgtccccaccgtgacagatggcagctgaacccctagaccaactgccccctcactcccagact

SEQ ID NO: 173875 - DNA, 122 bp, Homo sapiens
tatctcagaaaaaaaaaaaccaccatagatctctttaaaaccacttacaatgtaagcattcggacatggttttacctttcccgagtataaaaatgtgttaggaacacagaaagcttaaaata

SEQ ID NO: 173876 - DNA, 122 bp, Homo sapiens
cctctccgggccgtttccctgaccccttcttgctcagctgcccccgagcccctgcctggacgtcatcagccacagttcattcagagccctagggccctcagggttgggtcgccatgagcccc

SEQ ID NO: 173877 - DNA, 122 bp, Homo sapiens
ctgctggatgctgtgcgctccttccgaatccgccaccggccccaggagcagctgcgcttgcgcattggcatccacacaggtaaggccactgaaggtgcaggcgggcatccagaggccaaggc

SEQ ID NO: 173878 - DNA, 122 bp, Homo sapiens
aactttcatgactcagcacagaggaagaagccgagcgcgattctccaacacactggggtacgtactggctggcctaagtcctgggtcgtccaagagcaatagttgttcacaatgatgggtca

SEQ ID NO: 173879 - DNA, 122 bp, Homo sapiens
ctctgttctcttagcaaccgtctgtagcaaagaagtgcttccagcatcactccagcaacacgcccatgcgtcttctctcagcgtatttgggtcttctttgcccaaaagaacacaaaagcctt

SEQ ID NO: 173880 - DNA, 122 bp, Homo sapiens
ctcgccccctgatggggaagcccgccacgctcgccccctgatggggaaggccgccacgctcgccccctgatggggaaggccgccacgctcgccccctgtactggaaaggccgccacgcccgc

SEQ ID NO: 173881 - DNA, 122 bp, Homo sapiens
tgtcgccctccgcctcctgggctctagcccttgcctttcttgactctaagtctactctgtcgcccttgcagtgatgtgaagacctggagtgcccctgcctgagaaaatagaaaggaagcgtt

SEQ ID NO: 173882 - DNA, 122 bp, Homo sapiens
taatcctcgcaaataaggaaaactgtccacctccgaaggggagctggcggccgtgagaaacgcggtcaggtcactgtagctggtgttctcaggcaacctcagagcccttctctggaaatgaa

SEQ ID NO: 173883 - DNA, 122 bp, Homo sapiens
gccgccctcggccccggggcatccactgcgtccccccggacgccgccggagtccccacctcgcagcaaaagcaagaatgccgacacctaccctggtgatgaccaaaggctggttgaagtcta

SEQ ID NO: 173884 - DNA, 122 bp, Homo sapiens
ggcgaaggggaagcgggcagctcttacgtggccggagacccctcctgctttctccccatgcggctcactcgagtcatgtggccccagccactgctcagggggagaaggatggggacccgccg

SEQ ID NO: 173885 - DNA, 122 bp, Homo sapiens
gctctcccacccactaatcataatcactggccggagcccctcttttccagaagtgtgggccgccccctcccacttatcacctgtagtgtgccccctccctcactctatttgttgggtgcccc

SEQ ID NO: 173886 - DNA, 122 bp, Homo sapiens
ctttgccctgtctgaggccatggggcttttctgtttgatggtcgccttcctcatcctcttcgccatgtgaggctccatgggggggtcaccggcctgttgctactgcaactccacaccattct

SEQ ID NO: 173887 - DNA, 122 bp, Homo sapiens
ccaggccgccaaggatggtctcggactggccctcgctgtacacgaaggccgtgtctatctcggtgtggccgcgctccaggaaggcgcgcgtgactgcggcgctggtgggcgcgtccatgcgg

SEQ ID NO: 173888 - DNA, 122 bp, Homo sapiens
aattgctgaaagccgtttcccgtgtttggagggttcacacctgtccctttcaaatgctggcgctttcacacactccttctctcctgccagcaccttctggtctcaggagcattgcaggatgt

SEQ ID NO: 173889 - DNA, 122 bp, Homo sapiens
aacagaggaactgagacctagtggaggaggggagagggaagaggggatgaggggaggagacgggccatctgaaagatatgggaaagccccctggctggacttccgcggcctaggagtggggc

SEQ ID NO: 173890 - DNA, 122 bp, Homo sapiens
aggaagggatttgcttctggtctcggcctcccagggatgtaatcacgctggagaaactcccgcacagctgggaagcaaatgtggaggattttccttgctgagctggatgtggtgggtggggc

SEQ ID NO: 173891 - DNA, 122 bp, Homo sapiens
gctgccggaggagggagtgaggccgctggcggccggaggcggcggtttctattcctgactcggctggggggtggtggtgtctggagactgggcctacctgcaggggcatcctccggagttac

SEQ ID NO: 173892 - DNA, 122 bp, Homo sapiens
tattcaatctttccaactcacaagctcccactctcagtttacgcggacctgactactacccgaacaacccccaccagtctggaggattttgagcctagacactcctccagagcaggctcctg

SEQ ID NO: 173893 - DNA, 122 bp, Homo sapiens
tttgggaggccaaggcaggaggattgcttgagccagggagtttgagatcagcctgagcagcgtagacctcatctctacaaatttttttaaagttagttgggcgtggtggtgcatgcctgtag

SEQ ID NO: 173894 - DNA, 122 bp, Homo sapiens
tttaatttttgagatggagtcttgctctgttgtccaggctggattacagtggtgcaatctcgtctcactgcaacctccgtctccagggctcaagcgagtctcctgtcccagcctcccaagta

SEQ ID NO: 173895 - DNA, 122 bp, Homo sapiens
accccaacccctgccctgaccctcctctgttcccacagctctgccccaaggaagccagagcgtctctgtgcaggctcccagggctgatgtccagggaccagagctgggtcctcaccctgcca

SEQ ID NO: 173896 - DNA, 122 bp, Homo sapiens
gggtggcagagagcaaaaagccaaggttacaaccgtccaagaaaggaagaagatatttgccgaggctgtagaaaaaaacaggctacagagttgcaaagggagaagcagcaggagttggcagg

SEQ ID NO: 173897 - DNA, 122 bp, Homo sapiens
ctccttcctatgccaaagagagggccccaccattcccccatgactccagggagggacacacgctttggctatcactcttgtttctgagtttgttctgggtatgagctgtcagtaagacaggg

SEQ ID NO: 173898 - DNA, 122 bp, Homo sapiens
gtggtgttttttaacgtaaaggagatccgcggtgtgagggaccccctgggtcctgcacgccgcctggtggcaggccgggccatggtgggtgctcacgcccccggcatgtggccgccctcagt

SEQ ID NO: 173899 - DNA, 122 bp, Homo sapiens
tgccctgtgcctgacacaagggacacacgggacatgcagaaccagatcagccaccgctgccgggcggactcaccgtctgcagaccctcaggccctgggagtttctcggcccgacctttgccc

SEQ ID NO: 173900 - DNA, 122 bp, Homo sapiens
ggactttccgggtggacatggggggcttggctttgtcaccgggacctcttgaaaggcagccggtcctgggcctctcatctggccccgcacccttcttggccaccgacgtggaaggcagggcg

SEQ ID NO: 173901 - DNA, 122 bp, Homo sapiens
ccccggaaggacggccggcttgtagcgggggcgccacctgaaaaaaaattttcaggtccccgaaaggtgaccatcttccaaaggagagcggatcgactactgtgtgggtgcccacaaaaatt

SEQ ID NO: 173902 - DNA, 122 bp, Homo sapiens
gttggaccggcacccctaagtggccaaactaatactttattggcttccaaagtcctatgccgaaatgctggttctgccatctttgcttcacaaaattctgttcatccagcagtaatgcattc

SEQ ID NO: 173903 - DNA, 122 bp, Homo sapiens
gcgagcgacagcctgaaacacacgtgtgcctagggtgctttccgtgtgtgtggacacgcacgtgtgtgcatgcatgtgggtgctcaggttattcacaggcaggactgagagccagaatgagc

SEQ ID NO: 173904 - DNA, 122 bp, Homo sapiens
tcagcaccaaggcggtgggcagtgactcccgcgtggacatcactgacctctacaagtatccggaaggtaagggccacatggcggcctttattaccttcccccggatggcccatcagctgcag

SEQ ID NO: 173905 - DNA, 122 bp, Homo sapiens
gagtacagcaaaatctgctcatctctttcaatgaatattctccatgactagtgctggcggcggggaggcggagcaagctatcttttctaccagccgtgtcacacccctcctagcactaaccc

SEQ ID NO: 173906 - DNA, 122 bp, Homo sapiens
tcccggaggtgagactcgaagcctgccaggaagagcacaccggagtgggtgcctgccctgcggccgcacacccaccatcactgatcacactgatcacgggcgtctgacacactgggttcgag

SEQ ID NO: 173907 - DNA, 122 bp, Homo sapiens
cgacagcccgccagcccgcccgcccgcccccctgtcctcctgcccccccgcctgtcctcccgcctgtctggctgccctgcctctggatcagcctggcacagagccctgggctttcggccagc

SEQ ID NO: 173908 - DNA, 122 bp, Homo sapiens
gtatggatagcaagcatagtgaaaggaaggaaggtcgggggcctcggctgttacagatgacgatattgaagtgactgagcatgatgagactcaagccaactaaaatggctaggaaagaagca

SEQ ID NO: 173909 - DNA, 122 bp, Homo sapiens
tggcttactctgtgaaactgctgctcacatcaggtcaccatcagggcagatgtttctctacgacacgcagccacatgcaggcccagggtggggctgggctgaagaccgcaggtttcagattt

SEQ ID NO: 173910 - DNA, 122 bp, Homo sapiens
gaagcccacgatgtagccagtgagtgcccagaaacaggctcctctaaaaatgcgaggctgcggaggccacggttctcaagcagcttctgccccctcgaagggtctagaacccttggacttgg

SEQ ID NO: 173911 - DNA, 122 bp, Homo sapiens
gggcccacgtcacgttgagccctgtgcctcctggtcagtcactctggggaaaaaacaggacgtcagcaaactgcctagaggagaattaaaaagtgcgagctgccaacatgttacgaggggtg

SEQ ID NO: 173912 - DNA, 122 bp, Homo sapiens
cagctgccgctatgaaaatgcagacctgtggggcaggaattccgagtccggggtggagcgcgatgtggaatctgactcgcttgaaacagcaccgcggtggattcggatccgggtgagtaggg

SEQ ID NO: 173913 - DNA, 122 bp, Homo sapiens
cagacacatccttgccaccacctttaccgtccatcaagcctgacacctgctgcacccactcgctggcttttaagccccgattggctgcattctagaagacaggaagggaagggggagtcagc

SEQ ID NO: 173914 - DNA, 122 bp, Homo sapiens
tgaggtcctcccagccggtctgcacctctctcagccgggcgttgatggccactgcctgagcgggatggccggcagccagggcatttgcctctcgagtcagttcgcccacccgggcggcgatg

SEQ ID NO: 173915 - DNA, 122 bp, Homo sapiens
ggagtatttaccgtgttggctgtttaaatttctgcctccatcagaaggcagaaactgactcgcgaactattccatccccagccgatagtagacgcttaaaaaagaacgaaagaaggtgggtg

SEQ ID NO: 173916 - DNA, 122 bp, Homo sapiens
cgccctgcgctccttcgactatgagcagttgagagacctacagctgtgggtgacagccagcgacagcggggacccgcctcttagcagcaacgtgtcactgagcctgtttgtgctggaccaga

SEQ ID NO: 173917 - DNA, 122 bp, Homo sapiens
tcattcactcattccttctgtcttgagccccagctcagggctagcctgggtgctcccggccgtggggctccgccccggcacggggccacgaaggagggccacccccctcgccgcgcgcccgc

SEQ ID NO: 173918 - DNA, 122 bp, Homo sapiens
gactggacttcacaagcacatatgagtcccatggcacagcatgttgaagattttgtctagcgcagggcctggctgtcagcaggaactcattggatgttggacagatggatggacaagagtga

SEQ ID NO: 173919 - DNA, 122 bp, Homo sapiens
gctcagtgatggtgtcactggttctttccacaaacaaggcatacagggttcccaatgcctcgattcaaatatgaatcagcacaaagcattagttctctttgtctccattgaatgagtgtttc

SEQ ID NO: 173920 - DNA, 122 bp, Homo sapiens
taaacccagccctcggcctagctcctgccggccttcgggtttgcagtggtgctgttgtcccgggcaaggctagcggcagcacggccatccccaagctttttcccacgctcctgcaaccacag

SEQ ID NO: 173921 - DNA, 122 bp, Homo sapiens
ggacacgcgtcgcacgaacgtgcacagcgcgggcagccgagcacacgccgaggagcctcccgctcgcccgcagacacacaccccagcccgtgcgccccgcagtcgcaccccatcctccgcca

SEQ ID NO: 173922 - DNA, 122 bp, Homo sapiens
aagccatcctctatatccagagactagctgcttaagcaaatccctcatcccattcagggacgcacagtccagccattactccaaaaccctgagccagcgcccctctgccctcatccagagat

SEQ ID NO: 173923 - DNA, 122 bp, Homo sapiens
aagccccagtgtgatcggtttctttcggcctcctttgtctcttcctccccccccaccccccgcaaaacccccccagggattgcgtgaaagaaacaattgttcagcgaaactaacctgaagtt

SEQ ID NO: 173924 - DNA, 122 bp, Homo sapiens
gaagctgagtcagactgaaacgtatctcctaaaaagctctgctatttctaggattccatccggtcaaagccagcctcctcttccctggggaattcctttgagggtggagagatagaggggac

SEQ ID NO: 173925 - DNA, 122 bp, Homo sapiens
ctgccactgccaggaggacggcatcatgctgtctgccgactgctctgagctcgggctgtccgccgttccgggggacctggaccccctgacggcttacctgtgagtactgcccgcctgtcccc

SEQ ID NO: 173926 - DNA, 122 bp, Homo sapiens
ggcaagagagaggaaaggctgagaactgtctgtatttcaggatctaggccaaggggccaacgagaaataagaaggccactcttggtattgtttattatatcctattgcaaagggctcccata

SEQ ID NO: 173927 - DNA, 122 bp, Homo sapiens
agaagagacccaaccttttctgggtcctgtggaggtgttctatttcctgaggtcacagcacgctggcacatgctctaccctctgcttagcatggtcttccctcctttcttgtctagttagct

SEQ ID NO: 173928 - DNA, 122 bp, Homo sapiens
gccaggcctggtctctgagaccccgtcagaggggtctggagctccatcaaaaaaagtccccgcaggctccggaacgcggggacggcccaggcctaggccgctgactcggcgctcgtgcgggc

SEQ ID NO: 173929 - DNA, 122 bp, Homo sapiens
ggatcccttccagggaggcagcccggagggataacaaggatctggatgcaaggaaccaggcgtttactgaaacccgaaggaggctgatgaagaaacaatggggcttggagacgctcagacga

SEQ ID NO: 173930 - DNA, 122 bp, Homo sapiens
ccacagcctttttctggacaacagtaccctagtgggcagcgtgggtcccggctcagtgctcgagctactggaggcctgcccgcgcctgcgcgctctcggcctgcacctagccagtttgtcgc

SEQ ID NO: 173931 - DNA, 122 bp, Homo sapiens
gatgcttctcccagtcccgatgctggcagaaggacccgcagtagcgtgccgcgttgcagccgctgcacgtctcactggctttccgcccgcagttccagcagctctgggtgggggcagagggg

SEQ ID NO: 173932 - DNA, 122 bp, Homo sapiens
ccactgcactccagcctgggtgacagagcaagacttcatcctcaaaaaataaatgccggacgcggtggctcacacctgtaatcccagcactttgggaggccaagatgggaggatcacgaggt

SEQ ID NO: 173933 - DNA, 122 bp, Homo sapiens
cggcctaagccgaaggaagaactcgcctgcaggagcccccgttcgttcccagggtttggacgccccgggctgggccccgctaagcccctcgggccgcccaggcgccggacccccgtccccgg

SEQ ID NO: 173934 - DNA, 122 bp, Homo sapiens
gcaaccactgtggctcctcggaggggccggagacctttgcccaatagcacgatgcagacccggttttgagccatctctggggacctggtgtgggagaagggcattctccaggggcatagggt

SEQ ID NO: 173935 - DNA, 122 bp, Homo sapiens
tcccattctctagtttttactagtagccagccaaagaaaagaaaaaggaggtcagaatttcggtatttacatagaaatttaaggggaaaaggccaggcatgtttttaaagtgtggaaattaa

SEQ ID NO: 173936 - DNA, 122 bp, Homo sapiens
tgtctctatttctctttcttccctcctctttttttcttggtccttttgctagatgggttgcgagcatggctccctgcccctctcagtgggtttatcttcattttccatgagctcccacctca

SEQ ID NO: 173937 - DNA, 122 bp, Homo sapiens
gtagtgtgttgagaattcaagggcattacatctggttgcaatccagtttcatgccgctgccgggctgttaagacctcgcgctgacgtcagagcaggggaattacttctttttattttatctt

SEQ ID NO: 173938 - DNA, 122 bp, Homo sapiens
acacacacgcttgtgagcacccctaacccaccacttgtctctgatgaatcatgtttccagcggataatacctaaaacttccgtggtgggaggaacactgacttggaaccagaagccacaagg

SEQ ID NO: 173939 - DNA, 122 bp, Homo sapiens
ggcgggcgggaagctgtgaaaggcgtggaggccgcaggccccgaccactcgcgaaagtagcgtctgtgctgtttaagcctgcgggggaagaagtggaggccgtggaggggtgcgggggctgt

SEQ ID NO: 173940 - DNA, 122 bp, Homo sapiens
ctgcgcttgcgcgggttgagggcggtggctcaggctcctggaaaggaccgtccacccctccgcgctggcggtgtggacgcggaactcagcggagaaacgcgattgaggtaggtgtcctgatg

SEQ ID NO: 173941 - DNA, 122 bp, Homo sapiens
acccggcgaggggcgggggcagctccgaaccggccccagatccttcccgcttccgcctcacgcttcccggaaagcttgtccctctccgccgagctgctccgggagccccgccgcgccgaggt

SEQ ID NO: 173942 - DNA, 122 bp, Homo sapiens
gtgaatctgggctgctgacttcctcacggcaggtgaggtagtgaatcttcacattttgctcgtcctgtttccccatcagtaactggcaggcaactcacagggcttggggatccatagctcgg

SEQ ID NO: 173943 - DNA, 122 bp, Homo sapiens
gcattcatcatcgggagtggagcccagagtctggctgccagggcttctccactgtcccctcgtgctgtctggaaggtggcttggctctttgctcagaaatgctatttgctttctctcttagc

SEQ ID NO: 173944 - DNA, 122 bp, Homo sapiens
atacccccctgacagaagtctatgaaaatccaactgagagggattaaaaggcagacagggcgtattccatttccttgaggccctgggaaaatgtcacatccgaggctgagccagtcctgatg

SEQ ID NO: 173945 - DNA, 122 bp, Homo sapiens
gaccaggcagcttgcaggtttgctccaatcacagcagcaaggattgaagcaccaaccagccgggaggggggcgaggtctgtggccctgggattgggagaagggggagtggtaccaaggctaa

SEQ ID NO: 173946 - DNA, 122 bp, Homo sapiens
gagtgccctgtgctgttaccagtggggaaaccgaggcatgccacctgtgagagtcttgtccggcacaagcgcgggcacctgaggcacgagtgtcaggctgcggacaccttgctcttatcttt

SEQ ID NO: 173947 - DNA, 122 bp, Homo sapiens
tatgtgagaattgagccaaggaaaatactcatgcaaccagcctgagtcgcggtgaggggacgagaggttgtacacacattggtagttattttgcaccagcagtgcctttctcactgggggta

SEQ ID NO: 173948 - DNA, 122 bp, Homo sapiens
tggggtcataggcttgtactgtggtccaccaaagccgccttagaaataacccacgtgggccgggcgcggtggctcacgcctgtaatcccagcactttgggaggccgaggcgggcggatcacc

SEQ ID NO: 173949 - DNA, 122 bp, Homo sapiens
aaattatctgggtttaatatttatttatttcccatcttttcccactgtcaccatgagaggcgggaccttccctacctggttcattactctatctcagaatgtttattaagtaatacaattta

SEQ ID NO: 173950 - DNA, 122 bp, Homo sapiens
acacatggttgaaatcaatgctgcactctgagcccttagaaaccgtcgcaaaggactccacggaagggtgggggcagccccagcgaggtcgtcagggagcagagcccgagtcatgggacaca

SEQ ID NO: 173951 - DNA, 122 bp, Homo sapiens
cgcctctcgtcttcctgagtttgtttgatgggcactgcccgaggtttccagttgcacctgcgggaaggaggaaactgcacacctgttccatcttcttaggaggggaagtctgaggctttttg

SEQ ID NO: 173952 - DNA, 122 bp, Homo sapiens
ctccccactctccctgaccagagtctccttgatctggaggctgggcagcccccggggacccggtggccgccgctgaccccgtggcatgcggctctcaaaggccccattcatctctgggggct

SEQ ID NO: 173953 - DNA, 122 bp, Homo sapiens
ttgggccatgtgatcccagccctagcagggagcagggagtggcagggagctgctgcttgccggtctgtcccagaaaaggaaggaaaaggccatgaaaaagcccgggagtgatgaggggtggg

SEQ ID NO: 173954 - DNA, 122 bp, Homo sapiens
cccagctcaaagacagtgcagcagaaaaacttctttcttaacccttcatcctagtcaagccgtccatgggttggatgaggcccactcacactcaggagggaaatctgcttcaatcagtttac

SEQ ID NO: 173955 - DNA, 122 bp, Homo sapiens
gggtgggcaatggggggtggcggagctgtcgtgacatgcccccttcgcaccccctcttggcggattactggcactttatatcagattcatgaatgcaagtgtgtgtgcgcatgtgtgcttac

SEQ ID NO: 173956 - DNA, 122 bp, Homo sapiens
aatgaagaggacaaagtcagctcctccagcttccgccagcgaatgttggggaacctgcttcggcctccatatgtaagctcctctccctccttccctcctgcttggtgtcctggcaatgctgg

SEQ ID NO: 173957 - DNA, 122 bp, Homo sapiens
ctacagtccctgagactaccatggcctccagcacaacctccactgcaggctctgagaaaacgatggcctcctccataatttctgagaccaccatggcctccaccacaggctctgagactgcc

SEQ ID NO: 173958 - DNA, 122 bp, Homo sapiens
tgaaagaagctgaagggactagaacgtcgcagcacgaaacatggcctggctgacattttccgatcctgtccagcttctgtgaaacactccctctccgtttctctaccctgggcctgcctcgg

SEQ ID NO: 173959 - DNA, 122 bp, Homo sapiens
tgacaggcgaacagccgtctggatctccctggaggtgatggtcgaacgcttgttgtaacgcgccaggcgggaagcctcgcccgcaatacgctcgaagatggcataacgaaggtgttcaagat

SEQ ID NO: 173960 - DNA, 122 bp, Homo sapiens
tctgctgctctgaccacagggaacgtcagaggggacggggcagcggaacaaagcacaaagcgtccctgcgtcctctcaacgtggcccagctcctgcagacactcagcgagccgtggcctctc

SEQ ID NO: 173961 - DNA, 122 bp, Homo sapiens
cacatctcaaatgttagtgaacctaaataatgattttatgagaaagaaaaaaacaaaggacgaagacagacaaagcaaaagatgttttcagcagctactccacacacttggctaccagctgt

SEQ ID NO: 173962 - DNA, 122 bp, Homo sapiens
gacaaaattcaaaactaggtaaccgccctcataaggtacttgaaactaaaatttttgccacgaaaacatggcatgtgcaaaagttctctctctggccatcactcctgctaaggacactggga

SEQ ID NO: 173963 - DNA, 122 bp, Homo sapiens
ggccgtgccgagccagaactggcaggagtgggggcctgagttggaggtgccggggacaggcgctcggggcagcccgcgccttgccgaggtccctgccccgtcccggccggcctggcttgtct

SEQ ID NO: 173964 - DNA, 122 bp, Homo sapiens
cgcagcctgggaggtggggagcggccagctccactactcgatcccggaggaagccaaacacggcaccttcgttggccgcgttgctcaggacctgggactggagctggcggagctggtgcctc

SEQ ID NO: 173965 - DNA, 122 bp, Homo sapiens
gcaacaggggactatcaaagtaactcattgctgcgagccctcttctaaacagcctctcatcgcacaggctcagaggcagctagtacagtcaccatgctcctagccagggtgagtcatgtcaa

SEQ ID NO: 173966 - DNA, 122 bp, Homo sapiens
cttttctgaaatgaaaggtggggcctcagctcccaatgccctccttcctttcctctctcccgccctctacacgaacgagcatgagcacgtctgcacaaaggtcccaaactcccgcagtcctc

SEQ ID NO: 173967 - DNA, 122 bp, Homo sapiens
tcagcctactttggagacccctggtttgaactgggagtgaaggaagcaggccgtagttctcgttcatcttggtatccccagcatttggcataggagctcattaactgctcataaaatgaata

SEQ ID NO: 173968 - DNA, 122 bp, Homo sapiens
aaggctgctctgatcaaggattcatacaggagcttctttcatcgttgattttgcattggacgcaacttatagagtttgcaggtctttttcaggagaggtggacattgaggtttactgagcac

SEQ ID NO: 173969 - DNA, 122 bp, Homo sapiens
ccaggagagatctggagcagacatccagtaagcagccagcggcaggcaccaaaacagtgtcgccacgcaggggctgctttcggctctagcctcgaaacctgcattccgtccagcccagcaac

SEQ ID NO: 173970 - DNA, 122 bp, Homo sapiens
gtcgtgctgccactgtgctggctgccaggcctagggggccggatgattggccgtggccgccgtgcgccctgagctgcccgtcacgagccggtgttgtctgactgcacaggccgtcaggcgca

SEQ ID NO: 173971 - DNA, 122 bp, Homo sapiens
gatgacttcaaagctgtgcagccagaggtttgggacgacattggccccatcaaaaggttccgggacgaaggcatgctgccggcggccttcctcactcctggctccgctcccggccatcctgc

SEQ ID NO: 173972 - DNA, 122 bp, Homo sapiens
aaacacctgagactgggtaattcaaaataaacgaggtttattggtcacggtgctgcaagccgtacaggaagtatggaggcatctgcttctggggaggcctcgggaagcttccagtcatggca

SEQ ID NO: 173973 - DNA, 122 bp, Homo sapiens
acgtagcccgactggctccagcttcgggtaaaacttttcatgttcccctcagcttgtgaacgtgacggtacggccgggcctggccagggcgctgagcgggtccaccgagccctgcgcgcagc

SEQ ID NO: 173974 - DNA, 122 bp, Homo sapiens
agatgcaccttctgagctgccttgtgcaccctccccattaagcgtaggttaggaggtttccgggaggctgctcagctggatctggagccagctggctttgctccgttccctggctagtctgt

SEQ ID NO: 173975 - DNA, 122 bp, Homo sapiens
gaagaattactggacagcacgccagaggcagggacctgagggcaggccatcttgctatgccgggaggagacggtcactgttgctaagggtcatccatccttagtctcgaagaaatctcttcc

SEQ ID NO: 173976 - DNA, 122 bp, Homo sapiens
acctgccccagccacaccctgggcccagttaggatcctacaggatcctgagccctcctgccgttatccagggcaaagatggcaaatggctcctgcaagatgacacccagggccttgaggcaa

SEQ ID NO: 173977 - DNA, 122 bp, Homo sapiens
ctgtccaccctttcgcctcctccccgtggagagctcgtggaaagacgcgcgagagggggccgggtgtacaggactagcacttgcaggcggaagaccagggccacaacatggcagcaggaacc

SEQ ID NO: 173978 - DNA, 122 bp, Homo sapiens
acattcttgtccctcctttctgaaaaacttttctcaggcgcctgaacttggcatggggaccggcctcgaaaagccggcgggtagcacggccgcggtatccaacccttcgccctccttcccac

SEQ ID NO: 173979 - DNA, 122 bp, Homo sapiens
attcttgtgggtttttctgtggatctttcctaggactggggaatttggcggaagaaaccacggcagtgtggcagcctcccccaaccctccccatattctctgctcctgaggaccgggaagaa

SEQ ID NO: 173980 - DNA, 122 bp, Homo sapiens
taagtggagacacgtgctttggcctgttggaggggaaacccgctctcgcctcctggtggtcgccgactcgcagtccgcaggatgactcagggcagccctgaccacagttccgccgccatcgg

SEQ ID NO: 173981 - DNA, 122 bp, Homo sapiens
gcctggcatggccttaggtcctgttaataatctggtatcttggccgggcgtggcggttcacgcctgtaattctagcactttggggggccaaggcaagtggatcgcctgaggtcaggagttca

SEQ ID NO: 173982 - DNA, 122 bp, Homo sapiens
gggcccccggggcgggggggcggctgcgcttgcgcgggagtgtgtcgggctgagccgcagcgccgagacgcgggctgtttgatctgggctggtggccctgggcgtcggtcctgttccccgat

SEQ ID NO: 173983 - DNA, 122 bp, Homo sapiens
aataggcacatctgcctagtagctactgtgttggatagcacagccctccgggttctggtacgtctgtcaaggccagaaaaggtatgttgcgatggatagtgctacatctgccactgggtggt

SEQ ID NO: 173984 - DNA, 122 bp, Homo sapiens
cagagagcagcttatggggcatttactccataagctgctgattatgttctttaaagtctgcgaggctcagtttctcacagatggtacctgctgtactcacaacttctgagcatgatttgtca

SEQ ID NO: 173985 - DNA, 122 bp, Homo sapiens
ttaccctagttgattctaaccagccatccccaagtgtattaggtacattttcagtttgctcgcgaattctcatttactcacaatatggcttctgtctgcttccctttaccaagacaagtctt

SEQ ID NO: 173986 - DNA, 122 bp, Homo sapiens
gaattttaatgggcttttgttactaaatatttctcagtttcatcttttactaatagaagtcgtgaagcagttgcctctcccaaccctaaaagtccctgaacttgtggactctattcccttcc

SEQ ID NO: 173987 - DNA, 122 bp, Homo sapiens
aagattctcgcttctgaaatacagcgtgatggttaagagcatgggccgtggaaacagacccggggaaagcctcagctcggccactctttgccgcgtgaccctgggtggcaccttctaagggt

SEQ ID NO: 173988 - DNA, 122 bp, Homo sapiens
tttaaaaattactctaatctctgtagtttttccccttatcttcagaactaaggtaacacacggctctgtaggtagccgtctggtgctgagaattgcataaacatttcttcagcttcttcttg

SEQ ID NO: 173989 - DNA, 122 bp, Homo sapiens
tgagctctggacatcaggagcaaggtgctgtcagcccagagaggggtggcttcctactcacggtcacacagccggtgagtcacaaagctgggttctcagcccctctctttggcttgggccca

SEQ ID NO: 173990 - DNA, 122 bp, Homo sapiens
tgccattgcactccagcctgggcaacaagagtgaaactccgtctcaaaaaaaacaaaaaacgaaaaaacaaagaatatgtaggccttggtgatctatgggatataggaaagagcagggagca

SEQ ID NO: 173991 - DNA, 122 bp, Homo sapiens
cctggtcgaggtcacctttcccgccaagcgcagcgcaaggcgcactgggagcctcagacacgggaagcctcagcgccacgtctcaggcagtggaaaagccagacagaagggggaaggttaag

SEQ ID NO: 173992 - DNA, 122 bp, Homo sapiens
gaaaagaaggttcagaaatgaaaactatgacaaggcgcttgccagcattagctgcagagtcgacagagacgaggagataatgtgtgaagtggtagaaaaatgagaagagattgttcagtgtg

SEQ ID NO: 173993 - DNA, 122 bp, Homo sapiens
gaagctttaacaggctgccaggagcgggggcggcgggggcgggccagctggacgggctgccggccgctgcgccgccccacctgggcgagactgcagcgatggattggtgtgtctcccctgct

SEQ ID NO: 173994 - DNA, 122 bp, Homo sapiens
cccgggcccgggcacaaagggagagaggcctccattgtcccgcaggggccgaaatgcagacggtgcatccccggtgacctccgggacccttctctgatcaccaggattctcttggactctag

SEQ ID NO: 173995 - DNA, 122 bp, Homo sapiens
atcggattccaagcagctcaggggattgtctttttctagcaccttcttgccactcctaagcgtcctccgtgaccccggctgggatttagcctggtgctgtgtcagccccgggctcccagggg

SEQ ID NO: 173996 - DNA, 122 bp, Homo sapiens
aggagagcctgggaccggggaaagggggtgggggacagaggcctgaggcaggagcgcgcacggcccctcccgcttgcaaaataactagccaacccacaggcggcggcggcgcgcacgcgcgc

SEQ ID NO: 173997 - DNA, 122 bp, Homo sapiens
cttctttgtcccccagtacccccagcccagccagccaataagaggacacaaatgaggacacgtggcttttatacaaagtatctatatgagattcttctatattgtacagagtggggcaaaac

SEQ ID NO: 173998 - DNA, 122 bp, Homo sapiens
ggccattcttttgtaaatggagatgaatgctgataatcctaaacataacttgtataattgcgtaaaaggagagtagtttatttcagaggtggatttgggttgtgctgggcaatttttctttt

SEQ ID NO: 173999 - DNA, 122 bp, Homo sapiens
aagggaggacaggggcaccccccaaatcctcctaaaacacaggatttcagtcaagtctaccggggatgactactcataggagaaaaatgactttcctaaaggagcggccacaatgacttttg

SEQ ID NO: 174000 - DNA, 122 bp, Homo sapiens
gcgagaggccagcgctggccccggaaggtcacccctcactccgccctccccccaggtactcggccaaggcccaggccctggaccacagctgctcctgctgcaaagaggagaaaaccagccag

SEQ ID NO: 174001 - DNA, 122 bp, Homo sapiens
cgagagagagaaggagagagacggacagacagagacagagagagggaacacagagagctgcgagagtcaccactcttttatgaagcaaggaatgtgtacccttccagcagggcagatgtcct

SEQ ID NO: 174002 - DNA, 122 bp, Homo sapiens
cctcccagacagggtggcgggtgggcagaggcgttcctcacattccagacgatgggcggccgggcagaggcgctcctcacctcccagacagggtggccgggcagaggtactccccacctccc

SEQ ID NO: 174003 - DNA, 122 bp, Homo sapiens
aattaaagcgctgccgcctcggcccccaggaccccgcccccgcccctcttatcgtcccatcgcaataaagtctccaacgcgccgcgccacagccaagcgcacccggcagccccccgcgcccc

SEQ ID NO: 174004 - DNA, 122 bp, Homo sapiens
gaaaatacctgtatgaaccagtatcgacgactagtatatacatttgcggagaattacgtacgtgtatttgtgatacatttgtgtttaacttgatgatgataatagcagctaatatttgtcgt

SEQ ID NO: 174005 - DNA, 122 bp, Homo sapiens
cagggcttctgccatccccacacaggcaggctggcgggcagcaggaaggctgctgtggaccgggcccggcgctctctccgtcatagcaagaggcatctcgggaccctaggagccgcggtggg

SEQ ID NO: 174006 - DNA, 122 bp, Homo sapiens
atcaaaccccaaaccaagcctgtgtatatgttgacatcttttgaacctagactaagtctccgagacttcccttcttaagtagagaaaataagagaaaaagaaccttcctagattttcagctg

SEQ ID NO: 174007 - DNA, 122 bp, Homo sapiens
taatgccaccctcatggctcctggctcctctctggcccaggcaggggcctgtccctggaccgctccgtcccaccggcccagcaagctcagcagctgcccacttgctcgccagccccttacac

SEQ ID NO: 174008 - DNA, 122 bp, Homo sapiens
ggttatgggttctaggcacagagtgtgcctccctgatgccagggccttacctgcaccattcgctcaaacatgtgtgctaaaggcaaataggaaatgtgcacatccgcacaagtgggagccca

SEQ ID NO: 174009 - DNA, 122 bp, Homo sapiens
aggttcttgtccccagattttggggcttcctggggagggaagaaccaagggactctcgttcgtccccagggttgcccatcccctcagtcccatgagaacaggaagggccagaaaaccttgac

SEQ ID NO: 174010 - DNA, 122 bp, Homo sapiens
ctcccaagcctcctggcctgccgcacctctcctcctcgccctccaggagcttccggtaggcgttgatctccatgtccagggccagcttcacgtccagcagctcctggtactcggccagctgc

SEQ ID NO: 174011 - DNA, 122 bp, Homo sapiens
ctatcaagctggccagggtcaccaaggtcctgggcaggaccggttctcagggacagtgcacgcaggtgcgcgtggaattcatggacgacacgagccgatccatcatccgcaatgtaaaaggc

SEQ ID NO: 174012 - DNA, 122 bp, Homo sapiens
cccctcgacccaggggacgggatcctgtaagtctcacctgcctatctccatcccaggcctcgggcacgagggtggttgtactatcctggttatggtagctccactcgagcaagctttatttt

SEQ ID NO: 174013 - DNA, 122 bp, Homo sapiens
ttcctgacgtcatactatttttgtctttgaatagctcattgacacaattgcctcggagatcggagaactgaaacaggagatggtgcggacagatgtcaacctggaaaatggcctggaacccg

SEQ ID NO: 174014 - DNA, 122 bp, Homo sapiens
atccagactgcaaacacagcaagctgtgcttaagattagagacctttactatggtatgcacgttctccccagcttaaataacactaataaaaggagcctgctgggaggtcggtaagaaaaac

SEQ ID NO: 174015 - DNA, 122 bp, Homo sapiens
cagcaacgttactgaatacaaaatcaacatacaaaacatacaaaacctaacagtagaggccgggtgtggtagctcacgcctgtaatcccagcactttgggaggccgaggcgggctgatcacc

SEQ ID NO: 174016 - DNA, 122 bp, Homo sapiens
acttgtgatagccctgggaagaaatgctccccgggtcctcagagctttgttgtggctggacgcatcttctggaactgcgacagcggaggaggaagccaagagagtgaaccaaaacaaggaag

SEQ ID NO: 174017 - DNA, 122 bp, Homo sapiens
cggaggcctccggtcgcctggctccggccccaccccgccatcccctggccctggctgactcgccacccccgacactgcagcgcctgccgacctcggggccccgccctctgccttcgctcgcg

SEQ ID NO: 174018 - DNA, 122 bp, Homo sapiens
cgagagtctcccgggtctggactgggcctggcggcgtgggaggggcagtgcggcgggcggcgcttccggagagcggggcctgcgcgctgctcttccccgcggagcccgcgcagtccgcgcag

SEQ ID NO: 174019 - DNA, 122 bp, Homo sapiens
cgcaattcatgacaatgagcgtggcgaccaccatgacgaaaataaggaacctgaggagcccggaaggcatgacatcaccgttcctcctcccagctaccgaaggcgccgcgcgctgacctcac

SEQ ID NO: 174020 - DNA, 122 bp, Homo sapiens
tccatgtctctagggaggggacctcaaggcctcagagctgcgggaagggctgggctgccccgcacccgatctggatagtgtggagcccaggccgcgtgcgggtgagcggaggctgggaggcg

SEQ ID NO: 174021 - DNA, 122 bp, Homo sapiens
ggagcgcgcgcctcggtccccgcggaaagctactccgcgcgtctggattggtcgcgaacgcggcttccccgcccatcccgccattaggagcgctcccattggctgatgttggcgcgaaggtg

SEQ ID NO: 174022 - DNA, 122 bp, Homo sapiens
aaaaaacccctcccacacccaacttcagagccaggaagtacactgcttgcaagacatcttcgcagcccctgtccctcctcccagcgtcctgcctgtatttgcagaatgtcccgaggctggcc

SEQ ID NO: 174023 - DNA, 122 bp, Homo sapiens
tggactatgaaagaggacaattacagaagctaatgacagaattccaagggccaggcgtgccgtctctgcctgtaatctttgggaggctgaagtaggcagatcacctgaggtcaggagttcga

SEQ ID NO: 174024 - DNA, 122 bp, Homo sapiens
ttattctggggttatctttgtaagggtgttttggatgagactaacatttaaattgacagacgaaagcagagtgccttctataatgtaggtgggctttatccaatcatttaaaggcctgaata

SEQ ID NO: 174025 - DNA, 122 bp, Homo sapiens
ttaccagtgcgagcgtgaggtgtgtcctggaaaccacagcctgggctgcttcccacacctcgacgcgccagctcagcccacactggcagctccagcgcctgacaggggacggtctcctgact

SEQ ID NO: 174026 - DNA, 122 bp, Homo sapiens
gactcagggatgggttgtgcctcaaccgttgaaaaaggacagcccaggctctgtaaccttcggtagcctccagatctcacagtccccacccctcccccttcttgtcacaaaggccactgtgg

SEQ ID NO: 174027 - DNA, 122 bp, Homo sapiens
ctgacttctaggagtgttccggggctcctgatgttagggcagccctctgtcttttctatccgcccccacttcctaggtgatcttgtccaggctcattaaaagctgtccatatgctaatgatg

SEQ ID NO: 174028 - DNA, 122 bp, Homo sapiens
cgcgcggctgctcctttactagatcattaaaatactttggaaaaccccaaagtggagccgcgcgaaaatggcccttggcgtgctttggggagccgggggggaggggggctggggacagggga

SEQ ID NO: 174029 - DNA, 122 bp, Homo sapiens
gcctcgccgccccctgcgccttttcctgcagactggtgcatagtatttttaaaaatattgcgaggacaacgtcttctctgcgagcctggggaagaggcgaaaccacgggaagagttgagatg

SEQ ID NO: 174030 - DNA, 122 bp, Homo sapiens
gatggacaacgagaagaggatccggctgctgcagtttgtcaccggtacctgccgcctgcccgtcgggggatttgccgaactcatcggtatgttttctctcgccctctggcgtcctggctggc

SEQ ID NO: 174031 - DNA, 122 bp, Homo sapiens
tcagtccccctccctccaccatttccctctactccctccctctcctgcaccccctccccccggttatttgggagattagagttcattaattaaatcctgtgcttagatcgaactgtaacatt

SEQ ID NO: 174032 - DNA, 122 bp, Homo sapiens
tgggattacaggcatgagccacagcgcccggcttaaattttatgttttctccaatgatcacgcattattcttaaaactagaaggaaaaacaaaacaggcaagcagaaacttaggtagtgcca

SEQ ID NO: 174033 - DNA, 122 bp, Homo sapiens
gtccagagcacagattcagagtctgagcaaattcaacccaaatgcttccggtgcctcctccgtgcctggcagtgggctcaagtcccaccagtcacttcctaaatatgaactaaccatatcat

SEQ ID NO: 174034 - DNA, 122 bp, Homo sapiens
gccctgacttgtagttggtcatcggaaatcctgaagatccagactgtgaccggcgcctgacgtggcggaaaatcttctgggactgagcccttaacttgcaggatctgacattaactccaggt

SEQ ID NO: 174035 - DNA, 122 bp, Homo sapiens
ccttcctttccccagaggactttgacccaacaggggcccgggagggacctgccccacctgcgggatgactaggcggggtcagaggggagggggcttccagctctctgcaggaatgggggtgg

SEQ ID NO: 174036 - DNA, 122 bp, Homo sapiens
ctaccatggtacagatggaggcgaatttggagactgtcattaggatttccatccggccagcgccatcttccacccaatcacagcggcggcggcgggcgggggaggaggggagccgggccgcc

SEQ ID NO: 174037 - DNA, 122 bp, Homo sapiens
gatcctggtgctgcgctaactccctgcaagttcccgaaacaccgtgagtcctctgggcctcgtcccttctactgcaaaaggaagagactgaactggtttatctctagggtctcttcgagctt

SEQ ID NO: 174038 - DNA, 122 bp, Homo sapiens
cccccaaaaagtttgtctccggctggaaaaagcattaatgaacgtatctgtgggaagaaacggaaagtgaatgagtcaggagggccaccttcggccaaccgcctcaggaaaagcaaagaagc

SEQ ID NO: 174039 - DNA, 122 bp, Homo sapiens
accgtccttttgtctcagcgaaccgcagtccgcgcccgagcgccactagctgtcctgggacgggaactgcagcggcaagtgtgtgactttcttgagcccggagccacaggcctgggaagcgc

SEQ ID NO: 174040 - DNA, 122 bp, Homo sapiens
tctcatctacattgtcattttccagccccgagaggaggtgtcccacatgctcatcactgccgtgctgagcaggcctttctgagtgggatcctgtgctggtctagagcaggtgctagaaacct

SEQ ID NO: 174041 - DNA, 122 bp, Homo sapiens
ggcaggccacacactgcttggcgcggagctggaagatcacctgcagggccagaacaatgacgggctcaggaggcccctgcccaggctgggccagctggggagccggagggccttccgggcag

SEQ ID NO: 174042 - DNA, 122 bp, Homo sapiens
tgtcaagtgatagtcaggcagttgttagtctctctaaaataataattcaggaggccgaggcgggtggatcacttgagatcaggagtttgagaccaggctggccaacgtggcaaaaccccgtc

SEQ ID NO: 174043 - DNA, 122 bp, Homo sapiens
ctctcctgggtaggctcaatgtttgagtgctctttctcacattcatcttgcaagtaggagcggtggtgaacgctgccttccgcactaggtggaaggcttactcgtctaaggaattctttttc

SEQ ID NO: 174044 - DNA, 122 bp, Homo sapiens
gcactactctgcgccggccacagccggcgcgccgttgggggagggaaaaccgctgagtgccgcgcacagcgcctgcgccgccccgccccgcaacggcaaccccacccctgcgccagccccgc

SEQ ID NO: 174045 - DNA, 122 bp, Homo sapiens
agccctggtgggggttcccctgagataagggctgttcactttctctgaccacatggtttccgcttctgtgtctcttgtttcctaggctgataaaaatactgagccctagaggccctggcttc

SEQ ID NO: 174046 - DNA, 122 bp, Homo sapiens
cctgggaggcgcgcttctgccgccttcttgccgcgctcgctctagcctcgcccactcctgcggccttacagggccgaacctcaccctgccctgcggaaggcaggcctacaccttccctccgc

SEQ ID NO: 174047 - DNA, 122 bp, Homo sapiens
ggggttattatgaatagtgctactatcaacattctattaatgtattttggtgtatgtatgcgtgaatttctttggacatttttgtgttttttaaatccacagtcagtgaaccctaagtgttc

SEQ ID NO: 174048 - DNA, 122 bp, Homo sapiens
ctccaccgcctcccggacgttggcgatggactcagcatggtactgggggagggagcggagcgagggtttcaggggaaggtggccaggacctcgaggcatcctcctgccccacccactgcccg

SEQ ID NO: 174049 - DNA, 122 bp, Homo sapiens
gggtcacggcgggaaggtgagtgctcacaggcgcgagctcacgttaccaagttgggtcagcgtgcagagaaaagggaattgggaattggagggctgtaaaatgtaaatgtgctttaaatttt

SEQ ID NO: 174050 - DNA, 122 bp, Homo sapiens
gccttggatactccatggggtgggggtggaaaaacagaccggggttcccgtgtgcctgagcggaccttcccagctagaattcactccacttggacatgggccccagataccatgatgctgag

SEQ ID NO: 174051 - DNA, 122 bp, Homo sapiens
ggagctgcattcagcctcgggagagagtaggacaagggcaggtagtggaggtggtcttggcgcaaacgaatctaacagcgcccagtctccattgcagatggctgcatttctccacatgttat

SEQ ID NO: 174052 - DNA, 122 bp, Homo sapiens
ccagagctggacagtgcaccaggggccggtactggttccccagctaggagacaccttgggcggggctttgctcgccggaagcacgcagagcgtggggaggagggccccctctgcctgtgttt

SEQ ID NO: 174053 - DNA, 122 bp, Homo sapiens
ccctgctgcagagggacgcgcccggcctgcgccgcctgcccgccccagggctgcgccgcccgttgtccccgccggctgctgttcccaggcccgcatccccccggctgctggcggcggcctcg

SEQ ID NO: 174054 - DNA, 122 bp, Homo sapiens
tgacgagtacactcacatttttgtggacattccggttggtgtggactagctcatccaagtcgacaactgaattctatgcctgttgtttacagtgcagaataacaatgtgcaccatgtaaatg

SEQ ID NO: 174055 - DNA, 122 bp, Homo sapiens
taaaataccaagttaagagcattaattccttacaaccctgatgggtcccagctgtgcacacgcatgtagggtgtgagggtgtgtgctcagcgggcacaggtgctgacggggctgttccacct

SEQ ID NO: 174056 - DNA, 122 bp, Homo sapiens
ttaaattcctcagctgagaaatgagagatgtacagataatgagacacacggaggctttgccgcatcagacttcatgagcttggagaacatgcaggtgctcttctgacctcttagctgtttgt

SEQ ID NO: 174057 - DNA, 122 bp, Homo sapiens
gggtggagccatggtgcctgcagcagtgccaaacgagccagcgtgtaggcgttactgcgccggcctgtcgcggggcgcaagcctgccaaggagccggagcgctgtgccgcgtggagggtgtc

SEQ ID NO: 174058 - DNA, 122 bp, Homo sapiens
agcacagtgcccagaacaacagaggcactcaatataaaaacactgattggattttcagtacgttctttgcttcttctagagcggaactcaaatcaggcctatcttagcctccatcatccctt

SEQ ID NO: 174059 - DNA, 122 bp, Homo sapiens
cgggccaggtgtgagcacccaactggattgatgtctgccgcctgaaatacacttgatctgcgtttccgaagccaagcctcgcaccctgcaacaccgcggttcccgccctcttgggagccgga

SEQ ID NO: 174060 - DNA, 122 bp, Homo sapiens
acccgccgcgtcctgcttgacagaggctgatggacgtgtatttctccacggtgtgggccgcggtggtaggatccaactcccttgggtgttttcaagttgcgtgacctcctccagccccgccc

SEQ ID NO: 174061 - DNA, 122 bp, Homo sapiens
gggcctcagggcagagctctgacagaagctgctggtgcccacgcacaggctcaagaccaccgcgcctcacccccgaggttccccacccgctatgggcagtggtgtcggtgagtgactcttca

SEQ ID NO: 174062 - DNA, 122 bp, Homo sapiens
tagcggctgcgcaagcaggataggcgacgatctgggcgcgaagctgggggcgggcgcgtgcgcactccgcggggggcgagggggggcgggaaaaggattcccgaggggaggggtgaggaagc

SEQ ID NO: 174063 - DNA, 122 bp, Homo sapiens
actctgacccaatcaagatatattaagcatctgggtgtacagcgatccagaagataacagcgatgatatatctgtcaagaaaaaaaaaaaggaaaaacattcattaataaatcaataaaaga

SEQ ID NO: 174064 - DNA, 122 bp, Homo sapiens
caccgcgccttggcatcctcccccgggctccagcaaacttttctttgttcgctgcagtgccgccctacaccgtggtctatttcccagttcgaggtaggagcatgtgtctggcagggaaggga

SEQ ID NO: 174065 - DNA, 122 bp, Homo sapiens
gactggaaatcctaagtaccatcttccttcaacacagctaatccattcttacatgcctgtcgcacaaaagagagcaacaagtcatggtgtgggtgtggccctcatgggagttggtggcagca

SEQ ID NO: 174066 - DNA, 122 bp, Homo sapiens
ggagctactgggggaaaagggcagtgtgccggggccactcctgccccgggaagctgtggacgcaggcggggtgggctcacctccgaggcagctcgcgcggactccccggggcagggctgggt

SEQ ID NO: 174067 - DNA, 122 bp, Homo sapiens
cacctgcccaatcctagaattctctttccctcttttaggtgctggacaagttgcatatcccgttaaatccggggcccactccgggagccccctattaaaggtaagcagcccccaacccacct

SEQ ID NO: 174068 - DNA, 122 bp, Homo sapiens
gtagacgtctgccagcttggtgggctccttggcccgcagctggttcagctcagcagccagcgccttgttttgctgttccaggaagcgaaccttctcgatgtagctggcaaagcggtcattga

SEQ ID NO: 174069 - DNA, 122 bp, Homo sapiens
ccggaacataaaagttctcaggaaatcacgattaataataaacagtaacaaataatgatccgtccaaaccaagagaagataatctcctttggctgtaagaaaatatgacttaaacagctctt

SEQ ID NO: 174070 - DNA, 122 bp, Homo sapiens
ggcggcctccggaggacacgatgtgactggctgccgctacgtcgcactcagatgagtctgcgccggatcgacctgctgccgagtcctgccggacaggcacaggcagggagtgaaaattatct

SEQ ID NO: 174071 - DNA, 122 bp, Homo sapiens
ttctttgggagagtgtgagccatcatccgaacgacaattatgtgcttaaaaatattaactcggaatagtggccttgctcactttaggataatccattgcattcaggaggggagcagctcagg

SEQ ID NO: 174072 - DNA, 122 bp, Homo sapiens
gaataatcctccgtggcacgagggggcagtggtataatcctctgtggcacgaggggtcggcggtataatcctccgtggcacgaggatggtcaccgcattcgtcactcttagctgcagtgcgt

SEQ ID NO: 174073 - DNA, 122 bp, Homo sapiens
taaccagagccggcagcttcatccacgtctgaaacaggaagccccagcctgtgcatgagtcgccactgagagcccgggccagaggatggagaagcagcgggcactcgtggccgccaaggatg

SEQ ID NO: 174074 - DNA, 122 bp, Homo sapiens
aatctggcctggattccctaatcccagggccctgcccctcggcttcagggccccgcccctcggcttcagggccccgcccctcggcgttgcgcaaactctgttgctacctaagtcttttcctc

SEQ ID NO: 174075 - DNA, 122 bp, Homo sapiens
gtgctttgctattcgcagctcgacgcctagacctcctgactgcaacctccgaggcctttgcgctcccaggcgtcctttgctgcaagcaaacaggcccccaaccgccccctatggtttgtact

SEQ ID NO: 174076 - DNA, 122 bp, Homo sapiens
gccccccgcctggcagcccttgctggccacctcagcatcaaccaagacctgtacttaggccgggcagaggagttcattggcgcaggcgagcaggcccggtactgtcatgggggctttggcta

SEQ ID NO: 174077 - DNA, 122 bp, Homo sapiens
cctctgtaaagaccgcgtcaccagccaaggtcacgttcggaggcactgggagttaggcttcgacatcataatttggggggacacagctcagcccctaacaactgtcgtaagctttggacttt

SEQ ID NO: 174078 - DNA, 122 bp, Homo sapiens
gtccgggccacttcggtactgacactgagtcggggagaggctggcaccggcggcacgagccgtcttggcgtgggcacccactgggagtcatcccccagggccgggacacgggcgggatcggt

SEQ ID NO: 174079 - DNA, 122 bp, Homo sapiens
gtctttttattgttttctgttgcatcccagaccctacaaccccttcctgaaagggtaagtcgcgcttcccttaagaaaaagttgttagcaggtgtctcctttctcacaggggataattacaa

SEQ ID NO: 174080 - DNA, 122 bp, Homo sapiens
aatcagtggggaagataatttgtgggtgggaacagagagtagagagttgaatttaggagtcgaggttgtgccagtggaatgattggggttatcatcccacaaaaaccaatgacatacttgag

SEQ ID NO: 174081 - DNA, 122 bp, Homo sapiens
caaatgttttaagaagacaagaattctaattagtctggatgggaaactcagcatgacgttcgatagctggtttgatgtttagagtcattacactgaaccgtgttggtaggattatacaatac

SEQ ID NO: 174082 - DNA, 122 bp, Homo sapiens
gccgctaggcgaaagtggggaccgccacacagttggctgcggattaaaggtagggtgtgacgtgctgaagagggccaaagcgagcccctccctgccgcctgcatgattgggtactatacagc

SEQ ID NO: 174083 - DNA, 122 bp, Homo sapiens
aatataggcagcgagggagagggaggtggcaaggatgactcctagttcctgacttgctcgcggatgtttgtcgaatgaatgatccagtgaccccaaggcagaagtatctcagagagatcccc

SEQ ID NO: 174084 - DNA, 122 bp, Homo sapiens
actcagttgggcccccaccacctccacccgccaatgtgtgagtgcttccttcagcacttccgagccccagcctcagtgttctagtgggcaaagcaacactcctgcccatgccaagaggtcag

SEQ ID NO: 174085 - DNA, 122 bp, Homo sapiens
gacttccctgtatccacacccttcttcagtgtcctcccactctgactctggattcagcaacggtagcaaacttaaacagaaacttgaaacctgtttgcatgttttcagcttcttcttctgga

SEQ ID NO: 174086 - DNA, 122 bp, Homo sapiens
aaatcaacttttatggatattttgaggactaaaagaataaatagggcgtccgtactgtagcgaaagtgcgactaaggttaggcatctggatttcccccgtagccctctttcacccccccccc

SEQ ID NO: 174087 - DNA, 122 bp, Homo sapiens
tccttttgtggcttcaagtgtctaagtacattagagtcaggaacggcgctttccagcgtccgccatttttgtggcgtcaccgcgtcgctgctacgccatccccagcgcagtggctgccgcgc

SEQ ID NO: 174088 - DNA, 122 bp, Homo sapiens
ttgaccggcggcggcttgatgtagttctccaggaagtagaggtcgcagtcgtagaggctccgcaggaggtcgcggctggcgcctagcatgacccgccggtcggccgggctcttgccctgggt

SEQ ID NO: 174089 - DNA, 122 bp, Homo sapiens
tggggccggcggcggcggctttctccggctactgctgcccatcctgggcgagctcaggcgcgtcttgggcgccacctcagcctggcggcgacccacctgcccgggctgctaccgcgttgccg

SEQ ID NO: 174090 - DNA, 122 bp, Homo sapiens
gaaggcactgaaggaaatacaccctgctccttcctcagggatggggaccctccagtccaccgctaggctatgctgctcttcatgaacatgccctgtccacccacctccccctcttcaccctc

SEQ ID NO: 174091 - DNA, 122 bp, Homo sapiens
aatgtgttaagtgactgcaataaagtttcatgtctgtatttccttgtgattaaaaaggatcggaggggaaaggtacaactttcaccagaagaatggttatttctagagattacatttcaagt

SEQ ID NO: 174092 - DNA, 122 bp, Homo sapiens
tggagaaaggcgacactcttgtccccgccatcttttcgagctgtgctggatgcagggaagcgtatggagagctgggcgctggatgcagggaagcgtgtggagagctgggccggagagccgcg

SEQ ID NO: 174093 - DNA, 122 bp, Homo sapiens
cctcggcctcccaaagtgctgggattacaggcatgaggcaccactcccagccttaaatagcgatgttgacgatgcagttcagtataggtgcaggatcgaggtctgagctggacatataaatt

SEQ ID NO: 174094 - DNA, 122 bp, Homo sapiens
gttagtagtaacaatgggttcagtcctttccgtgtgcccagcactccgccaggggctttgcgttcatcctcttgtttcgctcttacatgaagcttgagagggaagtatcatttttattttta

SEQ ID NO: 174095 - DNA, 122 bp, Homo sapiens
cacctctcgcatcacaatagcccctaggaataccggctcaaaacattgtacagaaaactccgcaggacacacaactcatgtcagttctagggaaatctaaactcagatttaaggaggaaaca

SEQ ID NO: 174096 - DNA, 122 bp, Homo sapiens
gtgggagggggccgcggctcgggggctccgggccgagacgggggcagggcgggcggggaccgaccccgggctgggaagccgcgctcacgcctccccaaccccagccctccgctcgggccgcc

SEQ ID NO: 174097 - DNA, 122 bp, Homo sapiens
ccaaacaacccaacagcttaaaccaagacgacactccgaacagcttataacaagttctatcggaaccaaacccaagcttctcactgacaaaaaagatgcttggtaatggcctgatacagttc

SEQ ID NO: 174098 - DNA, 122 bp, Homo sapiens
cttattctccctcgcccagccccgatgcaggtacagtcccagatcatggagtctttaggacgctcataagtgtcacccactcggtaagtgttcccagtgtacttgtcaaagcaagtctcttc

SEQ ID NO: 174099 - DNA, 122 bp, Homo sapiens
cacccagtcattttggcctccattgtggacagctacgagagacgcaacgagggtgctgcccgagttatcgggaccctgttgggtgagtggtcagagaaagttaacattcttttcttcctccc

SEQ ID NO: 174100 - DNA, 122 bp, Homo sapiens
gatttggaggctggaagacaaaaccatgtaaggtctgtggaaatcacagctgttcagacccgcctccaaccccggccaccccgcccccttgccctagccttcctgtgtccttcccaccctta

SEQ ID NO: 174101 - DNA, 122 bp, Homo sapiens
caggcggctgagcagcggcctggagcagcagagccaggctttgtagcgaggccaggtcttcggccgcatccggtacggagagtgcagatgcaggaaggcccggcctgccgctatttatagtg

SEQ ID NO: 174102 - DNA, 122 bp, Homo sapiens
ccccaagtggatcagcctgctgaactgtcggctagggttataggtggttctgagtccttccggaagctgccgaatcttagaagtcgcgccactgttgtggcgatggaagaaggcgaagctct

SEQ ID NO: 174103 - DNA, 122 bp, Homo sapiens
acgggatgatgggtgctgggtgctggagttgaccggctggcccggcagagctggttcccgcggggaaccccgggggcgtggtgctcacagcaaccttgttagaagggacactggggagggtg

SEQ ID NO: 174104 - DNA, 122 bp, Homo sapiens
tgtcctgaatccgcaagaatgagctaaggattggtcattttaaaggtcaagaggaatatacgggcaggggatgtgaatgctctcagatctctaaaagaattacagaacactgcaaatttatt

SEQ ID NO: 174105 - DNA, 122 bp, Homo sapiens
aatccgtggagagcgctcaggtacagatcatggctgtgtgcagtgcaggctcaccgtctgcggcgccaggccgggtccctcgtttgctgctcatctgggagtgcccagcacatgtggccatt

SEQ ID NO: 174106 - DNA, 122 bp, Homo sapiens
ccgtgcgtcccgcttccggcgcccgaaactgtgccgcgccggccggtgagtagaaagatgcgccttacagcctccaaatacagaggcagcagccagaaccccaaagggcgcctagaagccct

SEQ ID NO: 174107 - DNA, 122 bp, Homo sapiens
acaactatagtgcgatactaaaaccaagacactagcactggtgcaatccacagatgttaccggttatacatgcactcctgcgtgtctgtgtgtgtagctctatgcagtctgatcgtacacac

SEQ ID NO: 174108 - DNA, 122 bp, Homo sapiens
agaatccgggcctataatcccagcactttgggaggcagaggcaggaggatggcttgagcccgggagtttgagaccagcttgggcccagggagaccaccgtctgtacaaaaaaaatcaaaaac

SEQ ID NO: 174109 - DNA, 122 bp, Homo sapiens
atcagtccttaatgatgcaaatgacttggctagctagtcctatcaaccccttcttacattcgaagtctctccagaagtatttaccttggaaaaacagaactttctcagagaagaggactgca

SEQ ID NO: 174110 - DNA, 122 bp, Homo sapiens
ctctgaatagctatgtaataatgtgggtctgcgttcacaaggaaaagttttaaaggacaacggagaggtcaacaacacggttctacctctgccagtcacttagcacctctgaggctcattat

SEQ ID NO: 174111 - DNA, 122 bp, Homo sapiens
tagagagaggatatgatttggggccctggctctgcggacccctggggcacacatggggggcgtggctatgggcctggcccgggatcagagccctgcagatcctggggcgcacctgcaggagg

SEQ ID NO: 174112 - DNA, 122 bp, Homo sapiens
atccacccgccttggcctcccaaagtgttgcgattacaggcgtgagccaccacgcctggacgggtagccagtagtttctagggctggagagatctaggatgagagaagtttccacattcctg

SEQ ID NO: 174113 - DNA, 122 bp, Homo sapiens
aggctgccagtcctttgaaggcagggccctgatatgattatcttatactcccagcagccacggtaatgcctgatacacagtggatgcctagtatatctgagcacagtacagagtacagtgac

SEQ ID NO: 174114 - DNA, 122 bp, Homo sapiens
ggccaggtcctgcccacgtgcctgctctgctgggcttgcagccaggccacctccctggcccggacccctcagggcctctggacaggggctgcaggctgcctctggactctgctcctggactg

SEQ ID NO: 174115 - DNA, 122 bp, Homo sapiens
ccgatccccaagggagtcccttcatcggagagacccgaaggccgcgccgggatggagaggcgcttttggcaggaatcatttttaggaggagttcgaggctcgatgagtaccctcaacctggc

SEQ ID NO: 174116 - DNA, 122 bp, Homo sapiens
gcctgtgtctaccagggcattgcagtaaagcttctaccactcactgtaaatacctcccatcgaggctgaggaaaagttgtagcatacttggaaattggggtggagtattgtcatccaaaaag

SEQ ID NO: 174117 - DNA, 122 bp, Homo sapiens
gttttatagggcgccgccgcggccgctcgagccataaaaggcaactttcggaacggcgcacgctgattggccccgcgccgctcactcaccggcttcgccgcacagtgcagcatttttttacc

SEQ ID NO: 174118 - DNA, 122 bp, Homo sapiens
gggcgcctgttattgttgggccctcagcccaaactgatcccgcagaggcggcagccagctcgtcagtgacttccgggacgtcccccatcccgcgctccctgctcctcaggcccagcttgctc

SEQ ID NO: 174119 - DNA, 122 bp, Homo sapiens
ggctgtacctcctcacgtgacttcagtgtagactttaagaacctaaactaacgcttctcgcgagaggaaagattgaccgctcgcaagcgtacatcagctggtgccccgccttccctgggccc

SEQ ID NO: 174120 - DNA, 122 bp, Homo sapiens
actggctctggtcctgatccacaagctctgaaccaatagcgggtcttgggatgacgtctgcggagcccctcggtcccagcgtggctggcgtccaggaccccagcacctctacacccaggtcc

SEQ ID NO: 174121 - DNA, 122 bp, Homo sapiens
gccgccgccgccgccgccgcgagcccggacctgcccgcccgacctggcggcgcagtctcgcgggatcgctcagctctcgctccccgtgcggctctcgaggcagctccagtcccggacgcaac

SEQ ID NO: 174122 - DNA, 122 bp, Homo sapiens
tcaccccgtttcaccccatgtgacaccttatttaaaaattaccaggatctactgaggggccgacttgagcgcccagtgcgtcctgggttttgggcgcagagcgcaaggtgaggctcctccct

SEQ ID NO: 174123 - DNA, 122 bp, Homo sapiens
cggtgtttgctaaacatgcgtggaacaaatgagtggctaacaagccagaaatcccaagcgcgtgccccgtgtcgctccagacacaacttccccaccctcatcaccctgtgggtcactccgac

SEQ ID NO: 174124 - DNA, 122 bp, Homo sapiens
ggccggcatctcaggagggagatgctggtgggcacagagccatggccacagccaccaacacgcggagcagacgcgcgcgcgcgcgcacacacacacacacaggcagggcggccacggtctgt

SEQ ID NO: 174125 - DNA, 122 bp, Homo sapiens
ccttttcctcctgagtggatttgggtgttgccaatgatgtttgcgtcataagatggggtgcgggctaacagagatgatgtgggaaaacaagtgctttgtagacgatggcgttggaaggcaca

SEQ ID NO: 174126 - DNA, 122 bp, Homo sapiens
ctctcccctcatcaggacttggggtttcctaaccatattgagtagttcagccccctccctcgccgtgttctgcggtgttctcttcctcacaccctcgccccgctccgccccgcactccggct

SEQ ID NO: 174127 - DNA, 122 bp, Homo sapiens
ttttaacatctacactgggacgtctaaagtgcttaaaacttaacaggccctagctgggcacgatggctcacggctgtaatcccagcatttggggaggccgaggtgggcggatcacttgaggt

SEQ ID NO: 174128 - DNA, 122 bp, Homo sapiens
tgtccctgacgttgggtgacctctggctttcttgccaagcagcgactatccacttctccccgctgcactcggccttggtgcccgcactcaacggctgggtgtccgggctgtccctgacgttg

SEQ ID NO: 174129 - DNA, 122 bp, Homo sapiens
cagacacagggtcacgcactgtagacgcggagctggatgcggtactcctgggaccgagggcgcttgccctggcacaagaagatgcgctcgtcttggggggtgacttgagtcagggccagagt

SEQ ID NO: 174130 - DNA, 122 bp, Homo sapiens
gggccctccacgaggaaggatgtaggcatcttgatggagccccagtgtttggaagaagcccggaggggtcatgaggactcccctatgccacctgccctgtggaaggacccaggtgacaccag

SEQ ID NO: 174131 - DNA, 122 bp, Homo sapiens
ttttcactggttgctctatcagatacttaaaagtttctgggaggccttgccttttttacccgaggaagaagtgaaaatgcgtcttgcacaattgcttaactattcccaacgcaagacttctt

SEQ ID NO: 174132 - DNA, 122 bp, Homo sapiens
atgtccggaggtcagttcagaggcctgggcacagtagcaacagagggcgcgggggcaaggcgggttgggcacgtggagggcatcggtgtccctgccacgtttcagtggaaagccgagtgaac

SEQ ID NO: 174133 - DNA, 122 bp, Homo sapiens
atccaaattgcaggtgggatcattttagaatgtacttcaatagcgttcttcatcctgcctcgcgtttttaaaaggactgagtggagagcggggaagaggtcgtaagatcccctgttagggtg

SEQ ID NO: 174134 - DNA, 122 bp, Homo sapiens
gaggcaaaacataactgtaagtttagaatgggggtgagaggctgtcatctggagggagagcggggggcctcagtagcctcttgagggaagtgggactcctggctccccagggcctggcctac

SEQ ID NO: 174135 - DNA, 122 bp, Homo sapiens
gtggacaaagcctctgaggcctaccggctactctaccccacctaaggcctccaccaggcccgccaagacccagtctccaagacagtcacagcgaagccacggcctgacctggccagaaagat

SEQ ID NO: 174136 - DNA, 122 bp, Homo sapiens
gtgttgtccccagtgtgggaaggtcatttgtcatcctggcatccagaagcccggccccggcgcattcccagaacagccccgtgtttctcttttcagcgaatccactttctgttgccacccgt

SEQ ID NO: 174137 - DNA, 122 bp, Homo sapiens
tgggctttctgacagtgacctgtgtctttcagaagtaggcggcacccagggccctccccccgccgaagaacacacaactgggaaatacttgcaagtggatcctctcgtatgctgctatattc

SEQ ID NO: 174138 - DNA, 122 bp, Homo sapiens
tggaagtggcctgtcctttgaatgattcgggtcactgagtgaaaagctccatgtggctgacgatggagaagttccccacagagcctctttcagaggctctttcagtctttcagtccagcagt

SEQ ID NO: 174139 - DNA, 122 bp, Homo sapiens
agagtacgatcttccctttgttatttttccccccgtctgtcttgtgttgtactctgccttcgatttaagaaacaaataaataaaaagaggactgtaattgaattaagaacagtgagtcccaa

SEQ ID NO: 174140 - DNA, 122 bp, Homo sapiens
cagcgatgctgcagctgtaaaagcattaatagaaaatcaatccacaacctcgcggggcagcgatcgtcgagcgccgtttccaggctgccttccctggggtcgggagcggccccgctcccccc

SEQ ID NO: 174141 - DNA, 122 bp, Homo sapiens
agacttacgtaaacgagccttgccacagtacttttttaaattagtaaatgagtttgggtgcgattgatcagtgagccccagaggtggtggcccaccaagcgactagtgtttctttgcggttt

SEQ ID NO: 174142 - DNA, 122 bp, Homo sapiens
ccttcctgcccacacccaccagcctgcacatagacaggcacccacacaccactcaagacccgcctgactctcctgcctgtgcacactcaccctttcggcatttggagcagctgaggcagtgt

SEQ ID NO: 174143 - DNA, 122 bp, Homo sapiens
gacttagaccgtatcagccaatagccattgtgcgaaggcaggactgcactaaccttttcccgcccctaccctttgggccaatcctttcttttgaattctttgtgactggcaggcattcagac

SEQ ID NO: 174144 - DNA, 122 bp, Homo sapiens
gtttgagaaccctgcccctaggcgacagcaagcggaactgcagcaagctcccagtaattccgggtgctgcacttccggtcaggcggtcgggctgcggggccctggggccagctcaccgccgg

SEQ ID NO: 174145 - DNA, 122 bp, Homo sapiens
gtatgttacaaatgtttattattattccagcgagaaacagatatcattttcaccactacacgcagtagtgttgtaagaggcaatatagagctcactctccttttttgagcgttacacaaata

SEQ ID NO: 174146 - DNA, 122 bp, Homo sapiens
tgttggctcagtgggatcgatgcctctgccattgccttcgggccaggacagcagcacttgcgtgtcccggccgccgcccctctcttgcagatggaggcagggccgtgcccaggtgtcctggt

SEQ ID NO: 174147 - DNA, 122 bp, Homo sapiens
acagaacagaaggggagctgctggagagatgctccttctaccccaattgggtgctccctgcggctctcccaacctgcctgcagtctgagctcagcagcaggagtgcagagctagggtttccc

SEQ ID NO: 174148 - DNA, 122 bp, Homo sapiens
ctagagcgggaaaagatggaggcggcaatcagatttctctcaaaccacgaacacaggggtcggtatctgaggcgccggcaccagacacggcagggtctgagtgctccctgacaagcgatgat

SEQ ID NO: 174149 - DNA, 122 bp, Homo sapiens
gatcccgacccccagtgcctgcctctgtaaaggagctccccggtgtgggctcaccatcctcgccttccacattcctccacctgccgggggcttgctctgtggaatggaaggtttggtttgca

SEQ ID NO: 174150 - DNA, 122 bp, Homo sapiens
tgccgttccccaccctggccacaaggcggcgggctaccgctgcagaagcctgagtgaaggcggcggagacccagggaagccaaaccaggactacccagacagcctgggtggaccccctgctg

SEQ ID NO: 174151 - DNA, 122 bp, Homo sapiens
aatcgtgacaggacattttgaagtgttaggagatacataggacagagctcctgcaccattcgcctgtgaacgtttttcatcatactgctctcttaactgtctttcttcttcctgatttaaat

SEQ ID NO: 174152 - DNA, 122 bp, Homo sapiens
gcaaggccagggctgagcctaagtcacaggcagaaaaaagacgcagaaacattggaataacgctccacacgcactgcttgattctgcgctagaaaccctgttatctccgaactgttggtgtt

SEQ ID NO: 174153 - DNA, 122 bp, Homo sapiens
cagtcggctggggaagctccaatgtccaggctcagagaagcggactgggtaggcggggtacgaagctgatggaaaagtacccagctgcctcctcttcagttcttcagcctcaccgtgtgcgg

SEQ ID NO: 174154 - DNA, 122 bp, Homo sapiens
cacgcagcaaatggccttggaggctgctggcagccatcttgtgaccatgaggcaagtcagcgcaggccgaagctgacgacgcgaagacaatgaggagagggagaaagagccgatctttggtg

SEQ ID NO: 174155 - DNA, 122 bp, Homo sapiens
ctgtcactcactgtggccacagtggccactcagatcacaccccgtcactcggtatggccacggcaaccactcggattgcatcccgtcactcaatagggccacggcagccactgtgatcgcaa

SEQ ID NO: 174156 - DNA, 122 bp, Homo sapiens
cccagggcgaggtggggaggtcaggggagggtgggaaagaagaagggcagtctcctgggacgctaggtgctcagttgctaccgctgctgatgtcgtttaggagggtctttggttgtttcaag

SEQ ID NO: 174157 - DNA, 122 bp, Homo sapiens
acgtggcgcccgatgccgctcaccaggctctcggcgtatgggtggaagagctctttgaagcggccggtgtggtgcaccacgcggctctgcagtccctgcagcaaagcccaagcctcgtccac

SEQ ID NO: 174158 - DNA, 122 bp, Homo sapiens
ttcttagaatctttatctcttgagacaagcttggaaattacaacatatatgtaccatgaacgcgaagtacctgagctcaaagcagttgagcaatcttaagtgggggtgcccgaaagtggtgc

SEQ ID NO: 174159 - DNA, 122 bp, Homo sapiens
cagcccaagttccataccataaacgtttgttttcattccaagaagtagttctgcatttatcgagatctggggttcttaatttggaagaatacatgcatgagatgcagtaggtcctgagactg

SEQ ID NO: 174160 - DNA, 122 bp, Homo sapiens
gaccctatctctgacaaaatgtggtggtcacattttgacgtttgaggggtcaccacccctcgacaggccctggtatgtgatgttcccctccctgtgtccatatcttctcattgttcaaatcc

SEQ ID NO: 174161 - DNA, 122 bp, Homo sapiens
ggggcctggtggtcccctgaaagcgccgggcccagccgctgcacgtgggtgccgcgggggcggggcctccggccgccgctcgcccattcgcacatggcttctcaaggatcgctgttgtcatc

SEQ ID NO: 174162 - DNA, 122 bp, Homo sapiens
gaaataagacccacacaaatatccactttatgagatactatatgataagtgccatttggccgttttgaaccaaagattctgagtgaatgcagaggagggagggatttgtcttagttgggtgg

SEQ ID NO: 174163 - DNA, 122 bp, Homo sapiens
cggtaatgcagggagcacggcggctggcggtaacgcagggagcacggcggctggcggtaacgcagggagcactacagctggcggtaacgcagggagcactacagctggcggtaatgcaggga

SEQ ID NO: 174164 - DNA, 122 bp, Homo sapiens
ttgcaagtaaaattgacaataataattcccgtgccgagctcatcgcaggaagaggttaggcgggacagcccgaggcatgctggttgttgtagtctagcgttggcgcagtgcctgatgggagt

SEQ ID NO: 174165 - DNA, 122 bp, Homo sapiens
ctcgggtctctcggaaagcaaagaccctcaggcacggcagcttctccccggcgctgcggtcgtcccagtctctgcccatgatgtggaacagaacctgcactttgggccggctcaggtagact

SEQ ID NO: 174166 - DNA, 122 bp, Homo sapiens
ggcctgctacgtaggtacgcgtgtgccacggaggtctgttaggtaggtacgcgtgtgccacggcggcctgctacgtaggtatgcgtgtgccacggcggcctgctacgtaggtacgcgtgtgc

SEQ ID NO: 174167 - DNA, 122 bp, Homo sapiens
ccttaccccatgctctatgccaccaagtcaatacaaggatgaggatgctgaatgtctggccgtgaggcagctttggaagcacattgagttggcagtcagatcgctgtgcatagccatggacc

SEQ ID NO: 174168 - DNA, 122 bp, Homo sapiens
ctataatggttggaactaaacgtcaccaaggtggcttctccttggctgagagatggaaggcgtggtgggatttgctcctgggttccctaggccctagtgagggcagaagagaaaccatcctc

SEQ ID NO: 174169 - DNA, 122 bp, Homo sapiens
ggtaaagagataactttttcaaacgaccatacatcctatgctgtgaccacagtagctctgcgggggactgttttagttttggtgcctgattgattacagcaacagttctaaactgatgtcct

SEQ ID NO: 174170 - DNA, 122 bp, Homo sapiens
ggcgagctagggccagtgctgggcaggggtccgagaggcccggggctgcgggcgggcgggcggttatcctccagagatcgcgcatcagcacagaacatctggactgatgttcttttaccgcg

SEQ ID NO: 174171 - DNA, 122 bp, Homo sapiens
gagccccccggccggcccacaaactcccgtcccccttccggctctgcctggacgtccctgcgggccccgggggaaagcacccaacttctcccgcctcggcttctagcagaaacgtgacgggg

SEQ ID NO: 174172 - DNA, 122 bp, Homo sapiens
tttaatattttatttccttatttttttttttctgatcagtttcctatccaccatgtaaagcgagcatcttgtggccatattgacagactcagagtacctgtttcaaatgtttgggtcagatg

SEQ ID NO: 174173 - DNA, 122 bp, Homo sapiens
cctgctggaggaaagcagaaagggaactggggtataaccaagcttgtccaatccgaggcccgtgggtcacatgctgctgagggaggatgactttgaatgaggcccaacacaagttcgtaaag

SEQ ID NO: 174174 - DNA, 122 bp, Homo sapiens
cactgccccctctggaattcctgcatccgaccccaaagaaattgctttctcctgttcctccgttgcttttttcccgttccaaaaacagcctacaattttatttaatgaaagatacatttatg

SEQ ID NO: 174175 - DNA, 122 bp, Homo sapiens
ctcttcccgctgtaatagtatttcacaaaatcaccaagcttcatcttgcagtcagcctggcgggtcacatcaatcacatcaatctctttgtcagaacctggagtaaagagataggttctgca

SEQ ID NO: 174176 - DNA, 122 bp, Homo sapiens
acagtagaagaaggaccacctgcgcctccagagccagccaatcccgaccctatcatggcgcggtttgcccacctcctgatgaaggaggagccatgggagacttgaccaatcgactaccgcat

SEQ ID NO: 174177 - DNA, 122 bp, Homo sapiens
agcgctggccgaggagctgggaggtccggtccatgcgctggccatccaggcacggacccccgcccagtggagagagaactctcagctggacactagccccccatgcctgggtgggaacaaga

SEQ ID NO: 174178 - DNA, 122 bp, Homo sapiens
tgcgtggaaggaactgtgaatctgccagcacctaccggaacagcacaaaactcagagaaccggaagcagagagtgcaggaggcagaagtgatgagagcagcgggcgtccatggagctcagct

SEQ ID NO: 174179 - DNA, 122 bp, Homo sapiens
accgtctgcacttgcaccgagcaagcagcgaaatggctgtggcttcgtaccggtgactcgcgtcttggagattttaacactcctcaagtccgcaagggtgagggggtccaagggtggcgaag

SEQ ID NO: 174180 - DNA, 122 bp, Homo sapiens
gcgggctcccaccttcgtcgccccgccctgcctgacagcgggctcccaccttcgtcgccccgccctgcctgacggcgggctcccacttcgtcagtgcattctgcaaacttgacttgacctgc

SEQ ID NO: 174181 - DNA, 122 bp, Homo sapiens
aaaatcagtgtgttagaatttatacaagagaactactttctgctagaggctgcccagctccgcccctggctctgcatggggtcggggcctgggcaggggagagtgagatgcctgcacctatt

SEQ ID NO: 174182 - DNA, 122 bp, Homo sapiens
ggggactgtgtgacggcgtgtttgcaaattcccatgccgctccttcaaaacactggtgcgcgtgacatttacatgcctacccgcgtttgcatcaggactgccatctcccaacttctctgtgc

SEQ ID NO: 174183 - DNA, 122 bp, Homo sapiens
ctgtagaatcaagagcagggacagctgccctggcctgtagcatcaagagcaagggacagccgccctggcctgtagaatcaagagcagggacagccgccctggcctgtagaatcaagagcagg

SEQ ID NO: 174184 - DNA, 122 bp, Homo sapiens
ggtccgcccctccgctcctgcaccgacgccgcaccttcgcctcgagttctcctgtgatcccgtgtttcctggccggagtttcttaccgttctctggaacgtagctcctcacacacccctcct

SEQ ID NO: 174185 - DNA, 122 bp, Homo sapiens
aataggtaagtgagacttaaaaaaaacaaacacaaaaacaaaggaggagctgctgttccacgtagcagtgctttacctgtagctgctcacttgctccaggtttaattctgacatcaggggaa

SEQ ID NO: 174186 - DNA, 122 bp, Homo sapiens
tggagagcagccactgaacagagctctgtctcagatggaggaggggtggcaaggggaagacgggagaagaggaagggacaggacattccacttagacaatcaaacttgaagtgtttacggtc

SEQ ID NO: 174187 - DNA, 122 bp, Homo sapiens
gaggtcagaacaggacgcggtagcagcggggcgccactaggcagggataggagcgtggggcggtagctgccagacaggcgggtgctggaaaggccaccagtatcctgggtcagcgcacctct

SEQ ID NO: 174188 - DNA, 122 bp, Homo sapiens
tttggggggagtgggggtggggaagtgtcgcagagatggagttgggggcaaaggagggtgcgcaggaagatgggatggggacgccccacttaagttgtgtagatctctcctacacttcttca

SEQ ID NO: 174189 - DNA, 122 bp, Homo sapiens
accgcatacagcacaactcaagtttgcatcagactgggaagcgaacttaagccagcggtgcgtggcccaggagtgggaaaggaaatggatgcctgaagtggaagaggtggtgcagagggggc

SEQ ID NO: 174190 - DNA, 122 bp, Homo sapiens
atgtttgcataaatagcttttttcattctcttacctctgtcagtgtgttaatacttaacacgcatctcttctaaacagtgttttactgtgtcttgctttttaattgtctgacaaactctgca

SEQ ID NO: 174191 - DNA, 122 bp, Homo sapiens
gacgaagagaaccagaaagttaaactttaaaatggagaatcaaagaataggagacctgaacgtactgacatactgattctttgaagagaaacttggggttcactatatttaacaattccttt

SEQ ID NO: 174192 - DNA, 122 bp, Homo sapiens
gaaggtcgtggggtacggggtgcagagcgtgtcctcttcagtagcatttgcggagccgctcgtgcttgagatgcttgtaggagaggcagtagctgaagatcacgtagcatgccagcaccatg

SEQ ID NO: 174193 - DNA, 122 bp, Homo sapiens
gtgcaggaagtgaggtgggatcaggcctggcctgtccccgcaggcccgctgggctcacagcgtgctcaggtgccgccgtgagtccagggcccccgcccggccccgcgcggcagccgcggact

SEQ ID NO: 174194 - DNA, 122 bp, Homo sapiens
agccttgaacaaaagttcgatcccaacgccaagtgcctgcacagtgtgcgtctgccgcatcgccaactcagaaggtgaatatgagaggtggaagtggcactcgagttctgcccgcaaaggtg

SEQ ID NO: 174195 - DNA, 122 bp, Homo sapiens
ttggtttttaaaggagccggaggtgggagctgcggaagacccgggatccacgggaggcggcggtgagcagcccttgggggagggcaaggagtggctggagagagggcgggagtgggggcggg

SEQ ID NO: 174196 - DNA, 122 bp, Homo sapiens
tccccaggaatatttggggccctccccaaccagtaattacatcataaagagacaaaagtccggaatttcctcctggcagagcatagaagtaagaaatcaggagcaaaggttgggggtgggga

SEQ ID NO: 174197 - DNA, 122 bp, Homo sapiens
acccaaaatgtccagtttcacacaacagaaacacaaatgactcattcacagaaaaaaaggcggcaacagacactgctggtaagaaagcccagatgtcagatgtaacagctgtcagattttgc

SEQ ID NO: 174198 - DNA, 122 bp, Homo sapiens
gctggggaggccagtgttgtgggcttcctgctgggactgagaaggctcacgaagggcatccgcaatgttggtttcactgagagctgcctcctggtctcttcaccactgtagttctctcattt

SEQ ID NO: 174199 - DNA, 122 bp, Homo sapiens
ggcaaaacatccttgaattagaggttgatgtattgcgcctgtataaagcaagtggaagggcggtgccaggctgagatgccctcggaagtttagtgatggttgttagtcacatatgagacctt

SEQ ID NO: 174200 - DNA, 122 bp, Homo sapiens
gggaggcaggaccccgtagggagatgaaagccaagctggacccaggcagaaaaagaggaacgaaggacaggaagtccaagagcagtcactgctgacgtgagtgcggcctgcaggcagccagt

SEQ ID NO: 174201 - DNA, 122 bp, Homo sapiens
ccgtggagccctggcgtctgcactgtgagctcctcgtggtggttccggtcactggaaggccgatctccacgtggtggccctgcctgctgcctcccggaggccagcatgttccactgccacgc

SEQ ID NO: 174202 - DNA, 122 bp, Homo sapiens
tccaggagcacagaaccaagcactgcttcctgggagagtgatgtcagcatgactcaaaggcggcctcagcagagatgcttggggacccgggagccacagcacagagtgactagacctgaggg

SEQ ID NO: 174203 - DNA, 122 bp, Homo sapiens
gggttctgcacagcgcggctattaaagtgcatggagaagtgcagtccttgccccgcatcccgcagggaaatctcattttaaaagctcaaagatgtaatgagcgttaaaatctaaaatatgaa

SEQ ID NO: 174204 - DNA, 122 bp, Homo sapiens
tctcggcggaagtcgctcagggtgaggacgaaggtgtcccccaacctcttgcccgagaaccgctgggtgtccagcccctcggccgccttgggcttgttttgggagaggtataggaggaaggt

SEQ ID NO: 174205 - DNA, 122 bp, Homo sapiens
aagagggcggacgacgcagcgggggaagaaaaataagctagtctaggacaagtgtccaggcgacgtggaacccagtaagggaataaagaagactggaaacgtctctcccctcccctatccca

SEQ ID NO: 174206 - DNA, 122 bp, Homo sapiens
gctcacagggcaggggtctcagctgcccccatccttagggcaggggagttagtgtggagccgagagcaggtcccagctccccctgccagccgcactgtcccaggcccagggacctctgccgg

SEQ ID NO: 174207 - DNA, 122 bp, Homo sapiens
caggtaggacgttccgcaggccttccagatctccttggcaggtttatgggcgagagaaagcggttcccagcctcctgccctgatgcggctgcaccttctggaccaccgtgaacactctgccc

SEQ ID NO: 174208 - DNA, 122 bp, Homo sapiens
ggatccggaagtggatgggcggggcgaagggtcctcgtatataaaagggccccggccgcgcggggtctctaatctgccattttctgtccctgagtgagtctctggcgtcccaaattgcctgt

SEQ ID NO: 174209 - DNA, 122 bp, Homo sapiens
gcttcaagtgatcctcctgccttgccctccccaagtgctaggattacaggcatgagccaccgtacttggccaactatgtcattttatatcagggacttgagcctccaaggattttggtatct

SEQ ID NO: 174210 - DNA, 122 bp, Homo sapiens
tgaatgtgaaaatgagaacaggagttaaggataacatccagttttctaggttgaataactcggtggttgctgaagctactaacctagaaggatacacacggtggagagggtttgaggatgga

SEQ ID NO: 174211 - DNA, 122 bp, Homo sapiens
acgtttgcacccattcacctgctcctgaaggttggaacatattccttccatctcaccatacgtttgcatccgttcacctgctcctgaaggctggaacgtattattccttccatctcactgta

SEQ ID NO: 174212 - DNA, 122 bp, Homo sapiens
catctgcctgagctgatagtgctggaagtctgactttggaggatatgataccattcatagcggaatgatcccagtaaaatagtccataattatctgtaggctctgccagatattttataatt

SEQ ID NO: 174213 - DNA, 122 bp, Homo sapiens
caaaccttgggcagggaccaaacggtcacttccccgccctccgggctcaatatgcaaatccgagcaccaggaagtagctgggacctctcggccgagcccagagacagccagttcctctcccg

SEQ ID NO: 174214 - DNA, 122 bp, Homo sapiens
aagctctctctttgttgccatccacgtaagatggggcttgcttctacttgccttctgccacgattgtgaggcttcctcagccatgtggaactgtaaattcactaaacttctttcttttgaaa

SEQ ID NO: 174215 - DNA, 122 bp, Homo sapiens
agcaagaggaatcctgaaatgagagtggaagaactggggactgtgaggccagagaaggcacgcagggagctgggtctttgaactttctagttctagtgtcaggattctgaaatacagtaagg

SEQ ID NO: 174216 - DNA, 122 bp, Homo sapiens
ttgctctagatcagtccactccagccctcaactcacttgaactctttctctgatttgcctcgcaggtctcttacaagccactgggtagtaaaagcatcctgaggtggcataccatatcgcat

SEQ ID NO: 174217 - DNA, 122 bp, Homo sapiens
ggcttcccaggaggtgagaaagtcccgcccctagccgatggagggctgggattggttctccgggaccgattgacggctcagggcacgagcggggaccgcagcggcggaggtgagggcgccag

SEQ ID NO: 174218 - DNA, 122 bp, Homo sapiens
tttgtccatggcctcatgggcctgcatcccttccccatcaggatccagaactaagctgcacgtagtcaccatttctcactaaacacacatcctcctcacttcaagagatgcgggagtatgat

SEQ ID NO: 174219 - DNA, 122 bp, Homo sapiens
tgggggctcgaggggacggtggctggtgggcaaccacacaccattacagcggcgggtgagcggcctcggccagctgcctctgtgaagcgaccctgtcccgcagggacctctctgtgcatagg

SEQ ID NO: 174220 - DNA, 122 bp, Homo sapiens
cggcctcccgctcactcaccgaggtcgtccatggccggaccacgggcgccggctcagggtcgcgctagctgcccgtcccggggccgctcgtctatgccccgcaacttttccgccgcgagcct

SEQ ID NO: 174221 - DNA, 122 bp, Homo sapiens
ctgcctgcagccgcccggccaacagcagcggcgcggccggacaccactgcacgtccgggacgagaactgccagggcactttctgagcaactaacccgaggcaggggtctcctgaaatcgctc

SEQ ID NO: 174222 - DNA, 122 bp, Homo sapiens
agcaggcctcagactgtccgcaggatgatgcattcactaacgggttctaggagacggggacggctcctcttttctctctccaaaattagaacgcggggccctgaatggtatccccaactcgg

SEQ ID NO: 174223 - DNA, 122 bp, Homo sapiens
ttcgctaggtgcttgctgaaacttctaaggcatgtggaaaagctaaccaattattcatgacgatactcagatctgctggtatgcaacttatggtattaggtttactcttcctctcaatttat

SEQ ID NO: 174224 - DNA, 122 bp, Homo sapiens
ctctccacaggtacattgcgccctgcaaaagatgccaacagaaacaacacagattgcaaacgaatgggaaacgtgtaggaacaatgaaagtctgggataacaaataataaacataatgatgc

SEQ ID NO: 174225 - DNA, 122 bp, Homo sapiens
tgcccaaacggagacaggacccagggtctggacatcaggcaaggggtactctgcagtaaacgtggacattggccgtttcgtgggtttgttttcactctgccaagtccttgaggcgtacactt

SEQ ID NO: 174226 - DNA, 122 bp, Homo sapiens
ccaatcagcaggacgtgggtggggccagataagagaataaaagcaggctgcccgagccagcggtggcaacccgctcgggtcgccttccacaccgtgggagctttgttctttctctctttgca

SEQ ID NO: 174227 - DNA, 122 bp, Homo sapiens
gccgtcagcctaggttgaggcgccctgcgtgtgtctataactttgtgctgctgccgcggccgccctgctcgtggaagggaggaggaggaatgtggaaggtggcggcgcgcgagctgacaggc

SEQ ID NO: 174228 - DNA, 122 bp, Homo sapiens
tcattttttagcatttcttttccttcacttttatgttaggaatacttctgcaagcatcttcgtttgtgccgtatcatgaaagtagtttgagtctattctccttatataatataaccatagtg

SEQ ID NO: 174229 - DNA, 122 bp, Homo sapiens
gggcccgcgtaccttggctttgttgagcaggagccccacgaaggtggagagcagcagggacggggagagaggggagcgcggccgcagctccttggcgagggcgggaaagggggcggcggggg

SEQ ID NO: 174230 - DNA, 122 bp, Homo sapiens
tttttccttttcgctgccagtaataaaagagtttattacttgtcagcaatgatgaatgttcgtgtggcatccagcgttgagttcctatgtacgtaatttgagataagtaaagataggaaact

SEQ ID NO: 174231 - DNA, 122 bp, Homo sapiens
tcagtcctctggcatgtacgaatcctggtgtggtttttgcacaacattctgcctgggatgcgtagggagaagctgtgataacaggatcgggattcactcatgcttcattcatctgggaggcc

SEQ ID NO: 174232 - DNA, 122 bp, Homo sapiens
gggaacccccacctcgggcggccgggagggcagttggtggcggcgtggcctctttgtccccgtcagcccgaggcggcgctggtgcccacccggcctccccgtggcccagccccgcgcctccg

SEQ ID NO: 174233 - DNA, 122 bp, Homo sapiens
taaagttgaacattttaaaataatgctttgcggcgctgcggcagtccagatcaaaaatggcggcagttggtgtgttctcggtttctcggctgctgggtcggtcccgcccacagctggggcgg

SEQ ID NO: 174234 - DNA, 122 bp, Homo sapiens
tcggccgaagaacaacaacaatcacatcggtaatggtgataatgccttggattttaatggcgcttttcctcctaagagaccgaagtgcttctgcatatatcatctccttctccgctcccacc

SEQ ID NO: 174235 - DNA, 122 bp, Homo sapiens
gcgtcagcagtaatatcagaggctgcttctccttaaaatgactccggctgcagaggcggccgcaagcaacagccttgtccataaatcctctttagttaccactaactcaccttgaggggagt

SEQ ID NO: 174236 - DNA, 122 bp, Homo sapiens
cacgacccactccatcccaccctactccgggtcctcctgcggggctgcagccaaggagggcgctggccgggcacatcactcgccaaatcacataaataccccacgagcgaatgacttcctat

SEQ ID NO: 174237 - DNA, 122 bp, Homo sapiens
gccttcagagtcctcaactgagaggcggggttgagccacctacccagaggcctctgcgcacgccaccggcgcacaggcgcagtaggacactgggcgccgcttagccgactcttactcctcct

SEQ ID NO: 174238 - DNA, 122 bp, Homo sapiens
ctggtctccgcatgagagaaaagccacctccgggtggggctcggctgggccttgcagaatcgaggtggccccgactggccctgccgtgcgggctcagcctgggcttgttgcagatggtggtg

SEQ ID NO: 174239 - DNA, 122 bp, Homo sapiens
tctgaaattgtcatcagaagtcaaagagttttgcttttattttaacccaggccaagaaggcgcagtacctgcactgcttcatgaaacaaaaaacaaaacgtgttatcaacccaactaaatgc

SEQ ID NO: 174240 - DNA, 122 bp, Homo sapiens
atgtaactcttgctctttggggccatttcattctttgttcctggggcctgcctgtgggctcgtcgggacactagagagcaggcattcccgtggccgcgggagagccgcgttcctggctggcc

SEQ ID NO: 174241 - DNA, 122 bp, Homo sapiens
ggttcggcgccggcgcgagcgcgttttcgtggcgcctgccccgccccctcactccaagcccgcctccccggccccgcccgccatggcccaaccttcatccgctcagagataaatcagcgcgc

SEQ ID NO: 174242 - DNA, 122 bp, Homo sapiens
tttgatgtctctcctttcaatttgctttctcacactaacgtactaaccagctgtgctccccgctgcctcgcctctgtttacctacattgaatcattcctgatagagctatttggtgtagagc

SEQ ID NO: 174243 - DNA, 122 bp, Homo sapiens
cctctgacttcagcaaggaccacggaggaccttcaaactagggccaggggaggatgctttcgtggtccagagggcttgctgaggatgacagggagccgggagccggaggatggaggatggtg

SEQ ID NO: 174244 - DNA, 122 bp, Homo sapiens
gtgggtgagccttgcgcccaggaggctagagatgcaggagccccagaacctgcggtgcagcgagtgcacatgcgcatagacggggcccaggagctgaccctggccctcccgttcgcttccgg

SEQ ID NO: 174245 - DNA, 122 bp, Homo sapiens
gggcttctcggttctaggtctccgcttccgtctggctgcgcggcctgggttacctgctcacgttcactcgcgggcctacagccccaagctttcccagctggactgcggagtgccttgggccc

SEQ ID NO: 174246 - DNA, 122 bp, Homo sapiens
agaataaaagtgcaacagaagaatttgattagtctatgaaaggttctcttaaaattctatcgaaataatcttcatgcagagatattcagggtttggattagcagtggaataaagagatgggc

SEQ ID NO: 174247 - DNA, 122 bp, Homo sapiens
agggacctcatctgcaaaccccagagctcccagctccggcttctgggggttgccagatgacggcaggcgagacccctcacacagcacctgccacacacaacaaaagctcgccatggagaggg

SEQ ID NO: 174248 - DNA, 122 bp, Homo sapiens
ggcaagaagcatctagcacagctttgctcctgaggggccacaggcaacaggtgaggtgtacgagcacatggctgttggaagatctcagattttcaagtcctttctacctcctaaggttctgg

SEQ ID NO: 174249 - DNA, 122 bp, Homo sapiens
cagcgcaccccacgcagcatccacgctccgagtgtgcgactggtttacgggctcatcggtcgctgcaccccagatgcagagtctctggagacccgagctccgtgccatgcacaggaaatgca

SEQ ID NO: 174250 - DNA, 122 bp, Homo sapiens
cctgcctcagcttcccaagtagctgggattataggcatgggccaccacgccccgctaatacggaggcacttttaattagcccacagtccagtgaaatttgacggagtgaggaagtgacctca

SEQ ID NO: 174251 - DNA, 122 bp, Homo sapiens
ccgcattgccccctagtgccgcgcggagtcagggcgccgggctcccccgcctgatgtcaccgccgtgcagtcagcccagaagcggctcattgaaagcagaccctcttcggcgctcgctgggc

SEQ ID NO: 174252 - DNA, 122 bp, Homo sapiens
ttcgccgtgttagtggccaatcggcagccaggcagggtgggcgcgcgtagggggcggggccgggcgcgcggcagggcgcgagagcgcacccgcggcggcggtggcggcgactgtgggggggc

SEQ ID NO: 174253 - DNA, 122 bp, Homo sapiens
tggtgctggccttaccaactgctgtctctgaatttgtcttccttatgccacccacagacccgccatccccctttctctttaaatgtttggacccatcttagtgacatttcacttcccctctg

SEQ ID NO: 174254 - DNA, 122 bp, Homo sapiens
tatttctgtaataggtttgttgtgagaataaagggagcttggtatcagctcttagaataccggacaggccacgttggctccactaagctgttgtcatcatccctaagggcacccagttaaaa

SEQ ID NO: 174255 - DNA, 122 bp, Homo sapiens
cactcataagtgggagctaaacattgggcacacgtggacacagagacgggaacaagacaccgggaactactgtgctcactacctgggtgacagtatccgtcataccccaaacctcagcatca

SEQ ID NO: 174256 - DNA, 122 bp, Homo sapiens
acagaggcagcgtggcagcagctctcagcagcccgtgtgggtgtaaagctgcagcatgaccgaaactcacaagcattcccatgctctgagggggtctggcccccatgggacccaagaagagg

SEQ ID NO: 174257 - DNA, 122 bp, Homo sapiens
ggcaggcggccaacaagcagcttgtgggggcgggtttatggggccgtcgccatggcgccacggtgcaggctccaaacacacacacacacacacacacacacacgcgcgcacacacgcacgcg

SEQ ID NO: 174258 - DNA, 122 bp, Homo sapiens
ccacgtccaaagggcagaggccctgacagaggtggcctcactccacggcccactcactgccgggcatgaggggaggacagcccccaactcaccctcagggtccctcaggtgcctctgcttga

SEQ ID NO: 174259 - DNA, 122 bp, Homo sapiens
gagacacagtctttgtcctttctgatgccaccaggtccaactgcagaacacctgatttggcgatgaagccaatttaaatgtagaacacgattctgcttagaggccagggtcagatgtcatag

SEQ ID NO: 174260 - DNA, 122 bp, Homo sapiens
gatcacgacctttcaaaccgccccgcagccctcgcaaagaggctcgtggcgcccgccttccggtgcctcagtccctgccagtagccacccgacgccgtccggctgttcctcgttcgccctct

SEQ ID NO: 174261 - DNA, 122 bp, Homo sapiens
gcttcgcaaggagcgtgttgttttctcaatcgaaatgggatcaagatcccagggtttcctcgtctccttgttttgaggtgataggatcttagccaatagatcgaaaacgtgaaaagtacccg

SEQ ID NO: 174262 - DNA, 122 bp, Homo sapiens
cacgaggctctgtgcactggcaggcccagtccccgtcacatgcgggtccaagacactccacggcagcattcctgctttgacaacacgtttcccacttggagtgaaatcagtccgtgaaaatc

SEQ ID NO: 174263 - DNA, 122 bp, Homo sapiens
ggcagtttccccggcttccgtggggtcaaggctctgcttgctggccggcaggacgagcggcgttatcagacaacccagctggcgcagaggtggccccccagtgctgctaaatcggggccacc

SEQ ID NO: 174264 - DNA, 122 bp, Homo sapiens
caccccccaggaccccgccccccagccacccctcccggccccttcggaacgccccacccccggcccgctcctaaggttcttgcctgcttggctcccgctcctccggtggccgaacgtcgctt

SEQ ID NO: 174265 - DNA, 122 bp, Homo sapiens
caggaaagtcacaacgaacacgaatccctcttgtgttgctggttttaacacgaccgggcacgactcacgtttcttcagagcgtagtttgtgacaggcaccgtgctcagcgctatgcatgcgt

SEQ ID NO: 174266 - DNA, 122 bp, Homo sapiens
gtcactcagtatgatagggtcagagctgcatttggggttctgcctggcaaaaagtaaaagcggcctctcttcaggatttttatgaactcaatgatgcaatgtatcaatgtctctgttggcct

SEQ ID NO: 174267 - DNA, 122 bp, Homo sapiens
ctttcaaccttcagattgattctacttaaacaggttagctacagggttgctgaagtgcaccgtggcagccatgtggtttttggcccattttcctctatacctctaaatataaagtaagtact

SEQ ID NO: 174268 - DNA, 122 bp, Homo sapiens
ggaggcgagaaggcggggagcgacggtgcgggggcgtcgcggagaaatgacttcatgacgcggcttcttaaaggcgccggcccagcgcgccgcggatagcacaggcacgtcccgggggctcc

SEQ ID NO: 174269 - DNA, 122 bp, Homo sapiens
gtgccatgggtctctgtggccagggccacacagtgcagggctgtacctttatcacgatcccgcttattctcagagcaaggctggaggctctacggtccaatgaaggatgccacgggaaggct

SEQ ID NO: 174270 - DNA, 122 bp, Homo sapiens
ggaggcccagctcagtgcggctgtggcattgagactcagagtccagggctcaggggtccccgtcactcctccgagcagccgtcagcggtcccgccccacactgtccccggcgggttcagcag

SEQ ID NO: 174271 - DNA, 122 bp, Homo sapiens
tgggtgccgtggagcagggggcggcgctcatagggaaggctcgggctgcacaggaccccacggaggatgggggaggctcaggcatggcgggctgcaggtcccgagccctgccccgtggggag

SEQ ID NO: 174272 - DNA, 122 bp, Homo sapiens
ccccaacctctgaaaaactccaacgtgagaactccccggcactgcttctgactggcacggcggtggcaggtgagggcagccggccatctgcatctggtctggaccacagagcgtggagggct

SEQ ID NO: 174273 - DNA, 122 bp, Homo sapiens
cgcgtgggttcacccgcactcacacactcccacacgtgggttcactcgtatgtattcacacgcacactcacgtgtgggttcacctgcacacactcacatgcacactcacacgtgggttcacc

SEQ ID NO: 174274 - DNA, 122 bp, Homo sapiens
tccatttcattaggaagctcttgccatgtggctcagttctatgcgtggaaaagcaatgagcgaccttcaagatctgatgctccattccaaggcgacagagaatcaaccacagatgggcgcga

SEQ ID NO: 174275 - DNA, 122 bp, Homo sapiens
aggccccggaggcccagctggccgtccgcccgtgcggacacccgggagccaacactgacccgaagacaggtcagccagacttcccacctgctccctcaggaggtgggatccggtcccctcct

SEQ ID NO: 174276 - DNA, 122 bp, Homo sapiens
ggcagtgggcaggcaaggtctgctgtgcggaggctgcctgtcgacgctgggcacctgggccggtgtcctcctgcccatctggggcgacgtacttggtccaagttcggttgcggctggcggag

SEQ ID NO: 174277 - DNA, 122 bp, Homo sapiens
aactttgaccacaaatatctgctgaacagggagttcttctgcagaaccctggtgttttatcgtgtgaaaagaaacatgggtcataggatttgcaaaatgaatcacagaggcaaagattcctc

SEQ ID NO: 174278 - DNA, 122 bp, Homo sapiens
gggcacgccccccattgccagtctgaccagacactcacaaccattcagttactctagccacggagtcatcagtctccttcattaccacctgcccaccctcctctgccgcacagcaaagccca

SEQ ID NO: 174279 - DNA, 122 bp, Homo sapiens
gttaccagggaaggtggggtggggtgagcagtgccaagtcagggcacagacagggcccggcgggtgggcatgtgggtctggccaagtccctgaacgcgccgctcgccctgtccccagcttgc

SEQ ID NO: 174280 - DNA, 122 bp, Homo sapiens
agaagcttgattggtccacaggttctgtctcccttacagtgattggttcaaataaaagcacgtgaccaagtcaggccaacgaggcacaaggagaggtcagctgtagcggcttccggcaaagt

SEQ ID NO: 174281 - DNA, 122 bp, Homo sapiens
gagctaagggcagggaagggagtctgattcaaggacacctggagtgaacgggcgtcatcccgaggctttgcacaggggcaagcttcgagttccgttttccaagacgcctctggcaaataggg

SEQ ID NO: 174282 - DNA, 122 bp, Homo sapiens
aaccgggtctatcccaccttccttgattattctggacggtgaaaagagcgctttatggaacggaaggtggccttcggaaatttcacctaaggtggcattcagtcggtaaagaataggattga

SEQ ID NO: 174283 - DNA, 122 bp, Homo sapiens
gcgatcgtgtttactaataacagcaacaaacaatcacacgccagcccttctttcagtcctcgggctctcttcgctttttgggggcagcaaaggagagtctggcggggaggtgggagggagcg

SEQ ID NO: 174284 - DNA, 122 bp, Homo sapiens
tgtgccaaaaaacagagaagtgtccctgagcaccaggtgtggtctcccctgccagcccctcgatgaccaggtcataaagataactgcaatcctttactgaggtcttactaagtgctaggcac

SEQ ID NO: 174285 - DNA, 122 bp, Homo sapiens
caactgttctgagctgtgtggatcccacgtccagctgtgcatctgtgtaataaccagacacgtcctccggcctcccagatataccctggaattcgaaagggaaagtgaaagtcacaacttcc

SEQ ID NO: 174286 - DNA, 122 bp, Homo sapiens
ctggcagtgagtccaggcagcaagcggccagggcaaccaggagcccgaggagcatttaaccgggcgcagccccaggatgcaacagctctcatacaattggccaggaaggcgttcagatggtt

SEQ ID NO: 174287 - DNA, 122 bp, Homo sapiens
tgcccccttccactgcgcccccacaagccccgagctcgccagtccttccccgcggcgctccgctctgtggccccctcgcatcccaccgtgggggtgcagctcccctggcacagcccgacggt

SEQ ID NO: 174288 - DNA, 122 bp, Homo sapiens
tagcattgttgaaagactaacgcaatttctccttcgggcagttgtctgctcagtaacgtccggcgatattaaccgtggtgttgtaactttacatagtcccagggtacatacaggcagagttg

SEQ ID NO: 174289 - DNA, 122 bp, Homo sapiens
tgatgacacaggagccccctcggacccattgatctcatgtctgccctgttgcaggtgcatcgccatctacaggagcagaagaatggacttgctaaatgacctagcactattctctggcccga

SEQ ID NO: 174290 - DNA, 122 bp, Homo sapiens
acactgattaatgaagtccacggtgggggtcacatattccccgcacctgagggtttccgccgcgcttccgggtgttcaatgccgtttctgtttccccacagacccgcagtactcatggtcgc

SEQ ID NO: 174291 - DNA, 122 bp, Homo sapiens
ccctccagagcccggccctgaagcaggtctctgctccacgcttttccttagttggggaatcgagagttgggggatcaaagccccccacatctccctcacccgctgcagctatgtttatcaag

SEQ ID NO: 174292 - DNA, 122 bp, Homo sapiens
cgctggaggcgtgcgccgggcgagaagccgcggccgcgggagcgcagtatggggaagaaccgcgagatgcgcctgactcacatctgctgctgctgcctcctttaccagctggggttcctgtc

SEQ ID NO: 174293 - DNA, 122 bp, Homo sapiens
agcaggctgcttcgcccttaaatgacggaagtggggaggtgggcgaaaagggggccgcagcgttgtttagactgcagaaatcaactactatcgttaaagtttagggatcatcacaaaccaaa

SEQ ID NO: 174294 - DNA, 122 bp, Homo sapiens
atacttctgaactggcttttgttgagactatcagtatagaagcatgcgctgtcccaaatccgctgttactatgagaaatgaagagctgcttttaaggtatgttgttgtgtcctttgttttta

SEQ ID NO: 174295 - DNA, 122 bp, Homo sapiens
ccactctaggattttttcttttcgagaaaccgcccagttggagggggctgcctgaaggaccggaccatgagtttgccgtgatgcattttcttaaatgcacaaaaacatgctaattgtcaaaa

SEQ ID NO: 174296 - DNA, 122 bp, Homo sapiens
ctccgcagaagactccgcggttccccatcccagggccccttcctctctcggctgtcccagcgccatctaccattcggtgttttctcggagaagaagtgggctacacatttttgtcctcagaa

SEQ ID NO: 174297 - DNA, 122 bp, Homo sapiens
gagccagaggcagggaccgagcctccagaccagactgaggactgactaaacaaggagaggcgaaagcacctccgcatgagacaggccaccagggccaggtccgtttaccgttgggcgaccac

SEQ ID NO: 174298 - DNA, 122 bp, Homo sapiens
tgttccctatcattacatgttccagggacacacaggcctgaagaccttcctaaacagtgacgatatcacctcaggcgggacccagcagaagcccgcgagtccccggtgccccgccgggatgg

SEQ ID NO: 174299 - DNA, 122 bp, Homo sapiens
aggagtgtgtttctcactgcagcagttgagtcaccagcaagacttgcctgaggtgagctccgcacatccgcgttgggacttgcagacacgccttcttctcacacaaaccttacccagccccg

SEQ ID NO: 174300 - DNA, 122 bp, Homo sapiens
ggaatggaatgaggtgaggacgcatggatgcatggatgaatggatgggaagttgagacgacgcgcccacacgagggaatttcctttgaaagagagcgaaattctgagttgggaaactcttcc

SEQ ID NO: 174301 - DNA, 122 bp, Homo sapiens
gggtccttcccagagcctgcagatgctctgtgccaccttgacattcacagctccatgagccggcgggggcaggggaggctgtcatttaggatccaattgcatccacagcaggctgtgctcct

SEQ ID NO: 174302 - DNA, 122 bp, Homo sapiens
tatattatttttatttatttttaattaacaaagcatagaaacagattcaggacattcctccgaagacgttccagactcgagtcctaggacatggttggggcgggggtcatttgatcgagtgg

SEQ ID NO: 174303 - DNA, 122 bp, Homo sapiens
tcacacagaacccacggaagggtgctgacccctgtgccttttttccacatcccgtgattgcgacaaggaaggagactgggtctggggctaaggagccacggctgtcacttgccaatctccct

SEQ ID NO: 174304 - DNA, 122 bp, Homo sapiens
gcactacccaaacacgcagtgaaaggaggaggagggatcggtgggggcagcaggggtgcgcgatggagatctgcacagacccccaccttccgctagagggcagcagagctcggagcccggag

SEQ ID NO: 174305 - DNA, 122 bp, Homo sapiens
caaggatttagcagaacaaacgggatcttaggacccctgccaggctgaaatcttccccaccgcagggtaccacgcttgtaccgagcccacctccttggagtaccccctgggtacgtttcgct

SEQ ID NO: 174306 - DNA, 122 bp, Homo sapiens
gaagcccagtaaagaaagcgcatgatggaaaaagtgtcaaatgtgtcaaaaaaaaaaaaacgctgctattaggtcaatgaaggtgagaaacataagctgaccattggatttggcaacatgga

SEQ ID NO: 174307 - DNA, 122 bp, Homo sapiens
cgccgccaggccctgcccacctaccgccgcgtgtcggccgcgctggcccagcagcaggtgcgccgcacccccgcgcagtgccgccgccgctacaagttccttaaagacaagtttcgcgaggc

SEQ ID NO: 174308 - DNA, 122 bp, Homo sapiens
ggcggtcctgctgcatggcggagtcctaggttcagcaggtgcgaaagcggggcttcgtggcggaagtggccgacggggatttaagtggcacatcatcgcctgggaacctacggggcctggct

SEQ ID NO: 174309 - DNA, 122 bp, Homo sapiens
tggaggggtgtcgggggttccggtcgggcctgcaggctgacctaaactcctggaagccaccgaggaagagtcagagacccaaacgtgttctggaattctaacttcctttatttcagaggatt

SEQ ID NO: 174310 - DNA, 122 bp, Homo sapiens
ctttaattttaattctcaagctgtattttcctaaatgtctcacgatggagagtccaattgcgaaaccaaacctcattggaaataccgtgtgtctcttgccataagccctaaggattgctcag

SEQ ID NO: 174311 - DNA, 122 bp, Homo sapiens
taaggcgaaagtgtgaggctttagcctaaagtgagactatttagccgggttagaaggagacgggttaattatccgcaccttagaactccgtgggcctttggtgcagaatgggttaagccgga

SEQ ID NO: 174312 - DNA, 122 bp, Homo sapiens
cggctcccgggggtggggtggcagggccgtccggtgccacagcgccgcagcacaaacaggcgccggacgcggagccgccaggaagcgcgggagggggggcgggcccgagggggggccgggcc

SEQ ID NO: 174313 - DNA, 122 bp, Homo sapiens
ccgcgagcagcagagccggccaagcagcgggtgactggggcactgtcgggaggcgaaccgcgaggcccccaaatcagggtagggtgcaggccacttcccagcactcgctgtgcgtgcgagga

SEQ ID NO: 174314 - DNA, 122 bp, Homo sapiens
ggaggcctcccagctccatgcccattcacactgttcccaagcatgcttaattgtttctctcggtgtttcatagctctgctggctgctggcaaagtcatgcattcaaaagatcacccagctag

SEQ ID NO: 174315 - DNA, 122 bp, Homo sapiens
ccgcccccagtgcaggcacggggctgggtgatctgtcccgtacagtcctgtggcactagccgaggaccacgactgtcacctccacattgcagacgaggagatggagcaagcctgggatgcgg

SEQ ID NO: 174316 - DNA, 122 bp, Homo sapiens
gcgatcgccggcatctgcggggcagggcgcgcagggcgatgagcgaagagggcgggcggccgcgagccccgggcacccaggcgtcccagcgccccagcccggaggcggggaccccgcggcgg

SEQ ID NO: 174317 - DNA, 122 bp, Homo sapiens
tcgaacaaaggattcttagcaaagcaattttacttttgcgcagaggggtgcctccttggccggttgccatgagaacacacctgaacaaaggggtacaagagcctttattcccaacgcaagtc

SEQ ID NO: 174318 - DNA, 122 bp, Homo sapiens
tatgcttaaaagctgctaggtcatgcatccccaaatcgaaggtttgcagacctggtaggacgcctgggggtcagaagtgatttttggagtacccaagtttttagtgtcagtgaagagtttgt

SEQ ID NO: 174319 - DNA, 122 bp, Homo sapiens
ctggcccgggggctccgggctttccagccccaaccatgcataaaaggggttcgcggatctcggagagccacagagcccgggccgcaggcacctcctcgccagctcttccgctcctctcacag

SEQ ID NO: 174320 - DNA, 122 bp, Homo sapiens
tccgcatcagcccgccgttccgggttcgctgtttgtgcacaagtccctcctcaggaaggacgatcaaggagtgatttatgcctacatgtttagtcatgacggggttagtagttgtgttccac

SEQ ID NO: 174321 - DNA, 122 bp, Homo sapiens
gaactgagcagagcctttgaccactgtcaaagtccagcggcgaatgacagacctgcctctcgtagagctgtgggcgggaggcagcagggacatggggcagcgtaccctgggtcaaggtcatc

SEQ ID NO: 174322 - DNA, 122 bp, Homo sapiens
ttatcctctcaactttagagggtgggtacctgctgcaatctgaataagccccccaaaattcgaatgtggaaacttaatcaccaaagtcatagtaaggggggtctttaggaggtgattgagtc

SEQ ID NO: 174323 - DNA, 122 bp, Homo sapiens
caacctcccaaacttcttcgagaagaatggtgactttcactacaagcagatccccatctccgaccactggagccagaacctgtcgcggttctttccggaggccattgagttcattggtgagt

SEQ ID NO: 174324 - DNA, 122 bp, Homo sapiens
cacgcccagacacagcagggaggagggaggcggaaggattggtataaaatctcacgcctgcgttctagaagcccagccctgggggaccgttcagtgtgggggcaatgcacattcaggaactt

SEQ ID NO: 174325 - DNA, 122 bp, Homo sapiens
agaaagcaaagaaagaggtactgtttacggagcgttcagccgtgagcccaggcgcaggcgcggagctaaacccggaggtgaagcaactacagctggggccacgcccacagactccgggctgt

SEQ ID NO: 174326 - DNA, 122 bp, Homo sapiens
ctcctcagcggcgctagggggagccccgggtccggagcgggggagcggcggcagccggaccgggagcccctcaacacctgcccctgtggcagagccgcgacaagccaggcggcagctccgag

SEQ ID NO: 174327 - DNA, 122 bp, Homo sapiens
attttctttttttttttttgagacggcgtctcgctctgtcgccaggctggagtgcagtggcgcgatctcgtctcactgcagcctccaccgggcccgggttcacgcaattctcctgcctcagc

SEQ ID NO: 174328 - DNA, 122 bp, Homo sapiens
gagctctgcacatgccagcaggctagaagcaggaaaacacacaagttcaagctggcttttcgtatattgtgtataaaaagatcagattcaggatgatttggtgggattgccaggggctgacc

SEQ ID NO: 174329 - DNA, 122 bp, Homo sapiens
ctgccttaggacctatctgcttccgtaaagcttcggtttgatggtgttgcgtttagcttgcgtgactccatctgggtttggtctggtccgttggggcctcttgcgggagctcagtccaaaac

SEQ ID NO: 174330 - DNA, 122 bp, Homo sapiens
agtccagctaaatttgcaattccaactttcatcctaagaataataactgtaatggcaaagcggaaatgccagttcctcctgtattccattgagatgggatttcacattttcctctcatcaac

SEQ ID NO: 174331 - DNA, 122 bp, Homo sapiens
ataggaaacactcttgggaaagcggccaaggctgtatgggcccaggctcagctagatgtgcggtcgaggataaagcaagtacaattcgaaaggacttcacagtttacaaagcacaaacgtgc

SEQ ID NO: 174332 - DNA, 122 bp, Homo sapiens
caccacccatgccaggctgtccatgaggtgaggccccacttgccaggatgtggccctctccggcctccagcaggctctgcctggctcactctgtgccctccgcccctcctcacctgtgcctg

SEQ ID NO: 174333 - DNA, 122 bp, Homo sapiens
ggctcttcaggcccttgggaaaagctgtcctggtgacagaggcccggcaggtctctcttccggctgtgaaacaagcgctgcggaatgcagtttccttgcttatcgtgcccgtgggctctgag

SEQ ID NO: 174334 - DNA, 122 bp, Homo sapiens
cgcgcagatgggggtcggtcctgacccccgccggggcgtccacagcggcccgcaggcagccggagacttcgcatagtgcccggctcatcggagggctgtgatcttttttttttttgcagaaa

SEQ ID NO: 174335 - DNA, 122 bp, Homo sapiens
gccctctggggcagactatttgcaaatccccttctgcttgctcccactaagttagctacccgatatgacctgcctcattttggtagctctgtgtagtaggcaaccttcatttttttcttgtc

SEQ ID NO: 174336 - DNA, 122 bp, Homo sapiens
tcaccaactaatttctcactgaattggagtatgtcttctggaccctccctgtgtgggtgacgtcttaaatgagtaatccacttgaacatttcagtctccctaagcctttgcattccttcctc

SEQ ID NO: 174337 - DNA, 122 bp, Homo sapiens
tggagcccgccatcgacacggtagagactgggaggatgtctccgtgccgcagggatggctcgtggtttttgaagctgctgcacgcagagacaaagaggatggaaggctggtgcaaagagatg

SEQ ID NO: 174338 - DNA, 122 bp, Homo sapiens
gccactggaccccgggttctgctcctcctggctccaccccacacacccccatccgcccgccgcactcacaggctcccatgctgttcccttggcccggagcccccccccagagaggccttcct

SEQ ID NO: 174339 - DNA, 122 bp, Homo sapiens
gctttcctgagtccgggctccgaggacccttaggtagtcccggtctcttttaaagctccccggcttccaaagggttgccacgtccctaaaccctgtctccagctcgcatacacacacgcaca

SEQ ID NO: 174340 - DNA, 122 bp, Homo sapiens
ggagacaccagggctcagggtcagggcccagccatgcctggcacccgcacagccccaggccgccccaccacactcacctgtgctcctgtcattcttggtcagagcctggaggggagagaaag

SEQ ID NO: 174341 - DNA, 122 bp, Homo sapiens
gcagagcgagcgcggggcgggggtgtggtcttctcgcgtgaattgatggcgtcatcgaagcgacggcccggaaggaagtcgcgtgctgaggggtgtgacggttttcttgctcgtgggctcgg

SEQ ID NO: 174342 - DNA, 122 bp, Homo sapiens
actggagttgctggtgggcagccctgcttcctgcatggaactggagctgtatggagttgacgacaagttctacagcaagctggatcaagaggatgcgctcctgggctcctaccctgtagatg

SEQ ID NO: 174343 - DNA, 122 bp, Homo sapiens
cacaaggcacccacttctagaccgcttgcgggctcaggttccctcccaggccctcggccacggctgtccacagagcctctcccatctggtctccggccctgacttcccaaccagagcctggt

SEQ ID NO: 174344 - DNA, 122 bp, Homo sapiens
taggagcatcagaggctttgattattggtagaagaacttgagacacacctgcgtgcctgccgtggcctgagagcgtccccagaggctcacgcggtggaagctggatcccacggccggccgcg

SEQ ID NO: 174345 - DNA, 122 bp, Homo sapiens
ttttgaggttaaaaatgttcaggcttggagaacctacccctggaggagtgttagggtttccgggctcggatgtccgcgagcttgacgcctgacctagttgtgtctgtctgggcggtgacgtt

SEQ ID NO: 174346 - DNA, 122 bp, Homo sapiens
ctgccaggaacccgcgcaaggagctctgggtctccgttctcggttttagccactaaaaggcgcaaatgtcaagcgcctttcatttgcggagcagctaagatacgatgaatagtgatttagct

SEQ ID NO: 174347 - DNA, 122 bp, Homo sapiens
gcctcttcccagctgtgttttagttaatgactggtcagcctattagcctgctctactaaacggattctctgcacaagcaacacctttttttaccctgactagaaattattcacataaacaac

SEQ ID NO: 174348 - DNA, 122 bp, Homo sapiens
gtgcgccgggagggcgcggacggagctccgcctacggcccgcccactcctgccctcgctccgcccatggaagtctcccacgccccggactccgcggctccctgcgctccgagaagcggccct

SEQ ID NO: 174349 - DNA, 122 bp, Homo sapiens
agggcagcgggtgcggtgacacctgtgggcacaggtgagcggcgggagggctacgcggcccgggggcggggcggccgggacccggggcctggaagccggggcgaaggggaaggaaggcctgg

SEQ ID NO: 174350 - DNA, 122 bp, Homo sapiens
agaggatcaccggcccggccgagaggactaggagccaggtgtgcgaggccgagggatccacgccgttcccgcccagcgccccctgggttattaggcctcgctcccccacacagcccagctgg

SEQ ID NO: 174351 - DNA, 122 bp, Homo sapiens
ccatgggcaccaggggagacagcccagccacaggaaggcggtgccgctgaatggcatagccgccagggggaactacagagactctccggagtgaaagtggcctctcaacaggcggcctccag

SEQ ID NO: 174352 - DNA, 122 bp, Homo sapiens
ggccgtgggaagtgggtggggcccggggatgtgggtcctgctgtgtgagccaggcgcccccgccctctctgggccccggggactcgggcaactcggacctccgggactcccgggccgcagcg

SEQ ID NO: 174353 - DNA, 122 bp, Homo sapiens
ccgctccttgaagcacctgtacgcgctgccggcggctgccttgtttagggccacgcacagcgccccgctggtggagaaatccagctggtggcagaacctggagtgggacagagtccagagtc

SEQ ID NO: 174354 - DNA, 122 bp, Homo sapiens
cccgaccccctttccccctgcctcaccgcctcctctccccatgcccccacccctgccatgcgtgtcgtcccattacttgattagatcccgatagtccaaaaaggataagatgaggagcaggg

SEQ ID NO: 174355 - DNA, 122 bp, Homo sapiens
tgtgccctcagtggatttggatttgttttcattagttcatgcttcctctcgccacttcctcgctccagtttactctcctgcccattagtctggtccctgcctctcattacgacctggagcta

SEQ ID NO: 174356 - DNA, 122 bp, Homo sapiens
ccttagaccactcggccatcctgacacgcactgttactccttaagtttcattatgtaactcgtagtcagcagacgctgactccgacaaaggaggaaaagacctcggatgggtggcgtacgct

SEQ ID NO: 174357 - DNA, 122 bp, Homo sapiens
accgggtcctgcccagactcgccagccactccatttcccacccctcctccacccgcctgccgggtccttcaggaagagtgaaatggtccattgatccctgaggaggaaaagagcatgttcgg

SEQ ID NO: 174358 - DNA, 122 bp, Homo sapiens
ggacagggacgtgccccgggaggcagcccctccacggcactcacctccgcctgcccacgtcggcctgctccgctccgccatcgctctcagctgcgtggtccacatgtctctcggtggccgaa

SEQ ID NO: 174359 - DNA, 122 bp, Homo sapiens
gcaagggagaatcaggcgctggggaggcaaggagagggccgcggctctcctcgggggccgcggggcgcgactcttccaggacctcggctgcttttcccagtaaagcccaggcggcccgaggc

SEQ ID NO: 174360 - DNA, 122 bp, Homo sapiens
gcaggtttctggctgcccctccagcctcttcctgggggccctgatgctgtgggcagggcccggagtcagttcctcaaggggcctgtgcctgcgtccccacccccagcaggcagccgcccaga

SEQ ID NO: 174361 - DNA, 122 bp, Homo sapiens
acctcgcaaacctaaaaagctactgcaggcttcagtgctgtttcttgtctccgccctacacggtacatcgctacttcacactggcaaagagaatggggcattttgattaaaatacagacaaa

SEQ ID NO: 174362 - DNA, 122 bp, Homo sapiens
gcgtacctaggggtaggtctctgaactggcaccccccggggcgtacctgtctcttatggtcgagattgcagaggtgagatagactccagtctcccatagcgctcccatctcccatagcgctc

SEQ ID NO: 174363 - DNA, 122 bp, Homo sapiens
tattctttaccataccctattgtaaacactccctgttatttcacttaataatccttgcaacgaccctagtaaatataattagtatcctaatttttaccagtagcagatagtactgagacaga

SEQ ID NO: 174364 - DNA, 122 bp, Homo sapiens
ccgggagagcgacgtccgccccgccctcgccccaccctcgccccgccctctccccaccctcgccccgccctcgggttctccagactgagccttgcttcaggggccactgcctcggtccctcc

SEQ ID NO: 174365 - DNA, 122 bp, Homo sapiens
gaccgcgggcctgtggagcagggtgatggtgtagcacctccaggggcactatgagggctgcgctgggagagagcactctgtgactgggggtgtgcaaggggaggccacagtctgccaggggt

SEQ ID NO: 174366 - DNA, 122 bp, Homo sapiens
ctcctcatctgcaaagtgagggaactaaaaaggatgatctctcacatagactccttctgacgataaaatgctgtgactcacactggtgaaagaagacaattcaggccacagcagaatttgtc

SEQ ID NO: 174367 - DNA, 122 bp, Homo sapiens
cctagaccctgaggagggcgtccatgatggctagccgacccgcgttaatttagtcagccacgctcagggctcaccgtcatcagttcctaaattcacctgcagggctagggccaggcgcactc

SEQ ID NO: 174368 - DNA, 122 bp, Homo sapiens
caccaactcctcgaatatccctggggtcctggcagaaagcggatggcgcgctgcgtctaacggagagtttttggaaaggactgtttacaaaagctgtcgcaggtgcaggcaagccgtggtgc

SEQ ID NO: 174369 - DNA, 122 bp, Homo sapiens
gtgtgtattaaatcctctcaattactgtactaatggccatcttttatgaaaatgtacttccgggaatgttagagcaaattcatttttgagtacctgctggggtaatgtactctgtattataa

SEQ ID NO: 174370 - DNA, 122 bp, Homo sapiens
gtggcttggggtcctttcggagtcttacagatatttggagtattaatttgaggacctcatcggcctggcacaggaatttttgagtgtaggatattttgcataaaatagtttattctgggatg

SEQ ID NO: 174371 - DNA, 122 bp, Homo sapiens
cctgggcctggcaagatgcactggctggaccagcggcctgtgaggggagcccggagcctgcgtttgcagcagaagttccagctgattcttatctcattaatgcccgtaagcccgtggggcag

SEQ ID NO: 174372 - DNA, 122 bp, Homo sapiens
atcctcccgtctaggcttcccaaagagctgggatgacaggcgtgagcccgggcgcccggccgggagtgtgttaagtatacggcaaacacctggactgcggccggctctccaggaatgccatg

SEQ ID NO: 174373 - DNA, 122 bp, Homo sapiens
aaccctgtcctgactacctccaggattggatggaaactcggatgagtaaatatggtagaacgactttgcaaactagcaccctattcacacgtaaggggttgctcttgtcaccgagactgtta

SEQ ID NO: 174374 - DNA, 122 bp, Homo sapiens
atgccctgtcggcccagcagggggcggtgctgctttagttttggcctggtcggggttgagcggaggagggagcgacttcgaattcagtctgcacctgactgacctcgagcaaaaacgaagcg

SEQ ID NO: 174375 - DNA, 122 bp, Homo sapiens
acccgccccctcgcggggcccctccctcaggaccccgggaagggcggccccctcccccaccgcagccgggacacacccagatacgcacacccacctcctggcagctccccgcccgccgccgc

SEQ ID NO: 174376 - DNA, 122 bp, Homo sapiens
tgtgccgcagggccatgacggggagctgctctgccaccggatagagcaggagtaccaagccggccccctggagctgaaccgtgaggctgtcctgaggaccagcaccaacctaaacagccagc

SEQ ID NO: 174377 - DNA, 122 bp, Homo sapiens
agcccttctatgcaggcacaaacagcatatcccaccctagtatgtacagaatagcagacccggccttgcgggtaatggctgtgggtgaaacagaggcatggaagccacagccaggaaaaatt

SEQ ID NO: 174378 - DNA, 122 bp, Homo sapiens
gacccaccgctgctgctccctgctttccaccttgaaagccacaggcctgcgcctgggcagcggcctcccaggtgcacgctccagggcctccagcgcctcctttaatcagattcaggtagccg

SEQ ID NO: 174379 - DNA, 122 bp, Homo sapiens
acgatgaccaccaaggagtgcctccacagattctgctctgactgcattgtcacagccctacggagcgggtaataggagagacatgtttgagatgagatgaaggggtacaaagttagggccct

SEQ ID NO: 174380 - DNA, 122 bp, Homo sapiens
cgagggcgggcaactgcggagcatcaacggggagctgtacgcgccgctgcagcatgtgagcgccgtgctgcccgggggggcggccgatcgggccggggtgcgcaagggggaccgcatcctgg

SEQ ID NO: 174381 - DNA, 122 bp, Homo sapiens
ctttccaagacaatcctgagcataaacaggcccacaaaacatgtgctgactgcactctggcgacccttttccagttgatgttttttgtcatgtgactgttctaaatccagtgtttgaccctt

SEQ ID NO: 174382 - DNA, 122 bp, Homo sapiens
agcgcagccaattgccaggggctgtcccgcctactccccgtcctcgcagccacttgcctgcgcgaaatgcctgccaacttctgactggcaggcagtctggcaaatcaaatcgcgacctttga

SEQ ID NO: 174383 - DNA, 122 bp, Homo sapiens
cgccggcattcgccgcgtggttcccagcgacctgtatcccctcgtgctcggcttcctgcgcgataaccaactctcagaggtggccaataagttcgccaaagcgacaggagctgtgagttccg

SEQ ID NO: 174384 - DNA, 122 bp, Homo sapiens
caatggaacatgggtcaaccaatgttaggagtgatggtgggtgttatccactgaggactgcggcagaatagccatgtttattgcccatcatttctcaatgattttatgccatcatttgggag

SEQ ID NO: 174385 - DNA, 122 bp, Homo sapiens
cccaggcatccgcacaggcgtgaccctctgcccaccaggcaccctgcccacacagcgcgccgcaggaagccctccgcattggtgtccaagctcgagcaccaggtggaggaacccgtggccat

SEQ ID NO: 174386 - DNA, 122 bp, Homo sapiens
ggccgccgacgccgcggggaaaggaagcttctgcggctacagatggcgcaggccccaggtcgcagagaagccctatccaactctgcggactggccctgggagaaagggcccgggagttgctt

SEQ ID NO: 174387 - DNA, 122 bp, Homo sapiens
ctggaaggcctttgtcattattgttccatctcaggggcactgagcggcaactccaagtcccggatccgtgcagctcgttggccagtcactgctccacacagctttgccttctgggccagagg

SEQ ID NO: 174388 - DNA, 122 bp, Homo sapiens
tgacatcaggatggaaatgtcagtcagggagttaagtagggggagcagctccgccctccacgtccccagctcctcccgcccctgttttttctcccagtgaccccacgtgaaacgtctccgcc

SEQ ID NO: 174389 - DNA, 122 bp, Homo sapiens
ccttggagagacggctcttctggcaggtctccaaatggtcgactctgtcccccgaggccccgccctagcctcgttcgggccccgccctagcctcgttcgggccccgccctagcctcgttcag

SEQ ID NO: 174390 - DNA, 122 bp, Homo sapiens
gccttttccttcctttcctttgcttcatttcttttcccagtctatcgtttctctaggggtcgttgctttgctctttctccctctctgtctgttggtccctttgatcctttctttctacccct

SEQ ID NO: 174391 - DNA, 122 bp, Homo sapiens
cagggcggcagggtggcagggcggcaaggcggcgggacggcgaggcggcgaggcgagaggcggggctagaggcaggggccagagggcgtggctagagggcggggcggcaattcagcccggcg

SEQ ID NO: 174392 - DNA, 122 bp, Homo sapiens
tgctgaggccgcgagtcccgcctgaccccgtcgctgcctctccagggcttctctgggccgcgcctctgcagactgcgcagccatgctgcatctgctggcgctcttcctgcactgcctccctc

SEQ ID NO: 174393 - DNA, 122 bp, Homo sapiens
gagtcggccgccagcctttgggccccacgctccgggtctggtgcgcggtctggccgcgctcgggccctcgccaaatgagagcgcagcgcctctccgccttcggatccagagaaagagcttgt

SEQ ID NO: 174394 - DNA, 122 bp, Homo sapiens
aaagtggcagctgtttgttttctgcagggcctgtcgggaagcctctggtttcttttcatccgtgaggagtggggaggaggcctcttcaggaagagcagtttatttttgtgaaaggaatactt

SEQ ID NO: 174395 - DNA, 122 bp, Homo sapiens
atgtgggggtcccagccttgtgtgagccagagtcacctctaccacgtcccctcgcagtcccgagaggcaagggcttggaggctcatgaggctggaaactgcctgattcacccgacagatcct

SEQ ID NO: 174396 - DNA, 122 bp, Homo sapiens
cgcatgacaaatcacataatttctaactgtcaatggaggatgcatcttcccattccaccccgcgctcccctcaattaggaggagaaaccgcacaagctaccaaatatataaaaggcattgat

SEQ ID NO: 174397 - DNA, 122 bp, Homo sapiens
aaaagcccaggcagtcccttggcatgtttagcagagaatcagtaccagcagcccccggcccggccttgtgtccaggaggtgcgcagggtgcgagatatatggtgacaatagcagaggctccg

SEQ ID NO: 174398 - DNA, 122 bp, Homo sapiens
aatgccggaggctattgtcgaagccacggcctgccatttcataccctttgcaataggtggcgctgacgcctggcagggagaaggcggcagcacatgctgggctcgggggcgatgggcttgtg

SEQ ID NO: 174399 - DNA, 122 bp, Homo sapiens
acgcacacacacacagatatatacacactaatatatattacattacgtctgaggggcgggcgccggagaccagaagagctgcacgaggctgcacgcgctgtgcccgacgcgcatgcgctttc

SEQ ID NO: 174400 - DNA, 122 bp, Homo sapiens
tgcgcctgacctgtatttactctttaaactatatattgctttgtattgttttccaatacacgatacaatctctaagcttatctgtaaatttaaggcacaaggcatttatttattgctaaatt

SEQ ID NO: 174401 - DNA, 122 bp, Homo sapiens
ggccctccctgcccctcctgggcccccagctctcagcagccagtggggaagatgctattccggagcctgcacgcctcagcactggcctagcctgtgtctgagccctggcccgagtcttgcct

SEQ ID NO: 174402 - DNA, 122 bp, Homo sapiens
agcgcgagggctacaaatcacttactcgagctggccaatggggataacctttcatcttggcgaagatgaggtctccaggtttgaaatcgcgagtcatgtttcgggggcgagaccgggggtcc

SEQ ID NO: 174403 - DNA, 122 bp, Homo sapiens
gggcgggcggcctcgggcgctctggctacagccgcctccgcgggcccaggcgacgccgagcgccccgcaccccgcccgccgcgcacaagcagctctgccccgccaggcccacgtgttgcacg

SEQ ID NO: 174404 - DNA, 122 bp, Homo sapiens
ttgcaggggctcccccagttctgcgctgtgagccggggcacaaagagccctctgcactagcgccgcaggaccgcggacccgaggtaagacgtcgccccatcctagaagccttccttcccaag

SEQ ID NO: 174405 - DNA, 122 bp, Homo sapiens
gcctcacctcgggagcggaggatcctgaaggcagaaaagcggctgaggatgccaatcgcccggcaggccaccatcttgagctgaagaggacagcagtggagagcgcctctaacgggtgcggc

SEQ ID NO: 174406 - DNA, 122 bp, Homo sapiens
tcagcagcccctgctccagcctgtagggtgaaccggccgctttcccagcaaaggagcaatcgagctgagggtagcgcctcctccgcaggagggggcgggagctcggctgagaaagctttcct

SEQ ID NO: 174407 - DNA, 122 bp, Homo sapiens
gcttgaggatgaacactgaatcatcatacatgctgtttactctaccaaccacctgaagcccgcttcttcctggtcattgtctcaccactgccgttatctataaaaggacaatatcagggacc

SEQ ID NO: 174408 - DNA, 122 bp, Homo sapiens
gggtgggtgggccagcggtgggaaatgcttgccatcaagctcgggagcacccaggctgggcgagtcgcagtggaagccttggccaaaggtgccatcggaaggcgtggacgggttcatggagt

SEQ ID NO: 174409 - DNA, 122 bp, Homo sapiens
gttctcagaggcaggtggaacttcttaatgcgcctgcgcaaaactcgccattttactacacgtgcggtcaacaagagttcattgcaaaaaaattgttacctcctggctgcttgtctaataca

SEQ ID NO: 174410 - DNA, 122 bp, Homo sapiens
acactgatactactttgttgctcagccccgcaaggaaccggccacttgccaccatggaaacgccggcggagttgctgcgttctagactcgtgcgcaagaccggaacatgggcagggtcccga

SEQ ID NO: 174411 - DNA, 122 bp, Homo sapiens
ctctacggaagtgcgccgcagtccgccagttccggcctcgccccacctccttatacgacccgcctccccgcgccggaaacccgccccggagggtgatgccagccaatcaaggagccgtgtgg

SEQ ID NO: 174412 - DNA, 122 bp, Homo sapiens
cctgtaggtagcgcccttccattggtcaaaaatggaaccggggttgcgggagaagccaaacgcggcgagtcttgctaaagccgtcgccgtagcaacgcgcggagccgtctgggagaggcctc

SEQ ID NO: 174413 - DNA, 122 bp, Homo sapiens
ccccacctactcggggatctacccgcgcaggatccagcacacacaaggcgagagctagctcgtctcctagaaagacaaaataaatcactccctctgccctcatgtactttacaccacgtgtc

SEQ ID NO: 174414 - DNA, 122 bp, Homo sapiens
cagaaaacaggaattccatcatctgggatttccttctcagaaaacacaaaggccgtcactcgcgacgccctctcgcggaggcctgagacccacgcaaacaataccaccagcaggagccaaaa

SEQ ID NO: 174415 - DNA, 122 bp, Homo sapiens
aagctgggagctgtccttcagcaccaagggccgccttgtcctcgggcaggacggtgagggcgaaggtggagttagggacactggactggtccgatccgcagccggctcgagcgtcttccagt

SEQ ID NO: 174416 - DNA, 122 bp, Homo sapiens
tatttagtgtccccttctgatgaatatgatgatcttgaacccattcttcctcctcaagcacggtcatcctcctctgatggcaacagcagaacctctgggaaaggaacctttcggtatccaga

SEQ ID NO: 174417 - DNA, 122 bp, Homo sapiens
aagcccaaccagaggaacagagggctgggctgctcctccctgggccagggccagaggacgcgggcaaggggggcctggctggcgagggcaccaggcccactttgtgcccactggccacctct

SEQ ID NO: 174418 - DNA, 122 bp, Homo sapiens
cacagaggcccagagaggtaggattatctctttttactcttttacctccagaatggctgccgtctattattcccagaccccactccgagaagcaactccaaccctctcgggtcttttccttc

SEQ ID NO: 174419 - DNA, 122 bp, Homo sapiens
cgcggtagccagatagagatctttctcagccccaaacagactgcatgtcttgcacgactgcgtctccttaagcctcaaggtccccgcttccgtagtggggttaataatagaagccagctcgg

SEQ ID NO: 174420 - DNA, 122 bp, Homo sapiens
gacactccagagaagggacacggggtctcccagaccccctggcatacgggcaagagggcccggccagcactgctgcagatccccggggtgctgcccggcaggagtgcgcccacgccactccc

SEQ ID NO: 174421 - DNA, 122 bp, Homo sapiens
atagtggttgccaagaggcaaggggtcacccccttccatggaagatggtctggaggcaggcgcaaggtgaattactcctggatatcccaggctgagcaatgtgggaacagtacacacacaaa

SEQ ID NO: 174422 - DNA, 122 bp, Homo sapiens
gggcctgggcttcgctgctcagccagctcctgcgaccgccctgcgcttcgtgcaccggggcggtccgttgccaaagccaggtgagcgagacagaattatctctggtctgtcccagcagggtc

SEQ ID NO: 174423 - DNA, 122 bp, Homo sapiens
ctggtgagacttaaagtgagaacgagtattaaaaaacaaaccctacctctgtcaatacagcgtggccatttacttccacctttacctgagggcgtgttggcgctaggaatgctcgagctgag

SEQ ID NO: 174424 - DNA, 122 bp, Homo sapiens
caggaaaccaaacctcgcagctattgttttcatcgaaaccctaagccatgggctcggctgcggcctctcaaaggcccccaccagcgccaccctcagctcttcgcccaggatccccctgaggc

SEQ ID NO: 174425 - DNA, 122 bp, Homo sapiens
agcataataaagaccaaccagggaacccagagccatcagtcatgggtgatagataagagtcgtccttgcactgaggtgctcctgtttcaaataaacatcatttggctccaaagaacaactcc

SEQ ID NO: 174426 - DNA, 122 bp, Homo sapiens
tggtgcgcggcgtggactggaagtggggccagcaggacggcggcgagggcggcgtgggcacggtggtggagcttggccgccacggcagcccctcgacacccgaccgcacagtggtcgtgcag

SEQ ID NO: 174427 - DNA, 122 bp, Homo sapiens
ttcaagggcgaaagaattctgcttaggtaaggcccaaatcccttggctaaggttaatcctcggtgggaccggcaatagggacgcgtcccctttaaggcgccagctctccggcggcggcggcc

SEQ ID NO: 174428 - DNA, 122 bp, Homo sapiens
gcatccccaggcatctcggattgcttctgtacgatggagaacattgggttttgccaccgccgctcctctccctcagtatcaacatagattcaaacattccgctttgtttacctccagcctga

SEQ ID NO: 174429 - DNA, 122 bp, Homo sapiens
ccacgctggtggatcttgagcttggagagcgcgccataggccttcgggcagtgcgcacagcggaagggcagttcgccagcgtgcgaggccaggtgcacgcgcaggcacacgggctgcatgaa

SEQ ID NO: 174430 - DNA, 122 bp, Homo sapiens
cagaccgcgcccttgctgaggacagcccgggagccggacagcggtgtccgggggcgggaccgcggcgtccagggggcgtggccgcgctgtgccgggcggaccctacccgttcattggcggga

SEQ ID NO: 174431 - DNA, 122 bp, Homo sapiens
aaaagaggttctcagcggagcgtgtgtgaggcggggggttacgggggaggggagacggggcgggtgtgaagtctgtgccgggaaaagaaaaatatgagtgttctcttttgtgtgcgcacaaa

SEQ ID NO: 174432 - DNA, 122 bp, Homo sapiens
ctccagggaggggggtgcaccccgggggtgggacccacggggcggggccaggcgacacctcgcccactgccgtgactatgcccagccccagccaaagcccgcccactgccgcagcatgccac

SEQ ID NO: 174433 - DNA, 122 bp, Homo sapiens
gttactttgaggaataacggaggtgagcaatttccaaaaagttcattcctttaaaaactgcggagcacattttgtgtacatgctgtttttattgttactcatgaagacgcgggggaagcttt

SEQ ID NO: 174434 - DNA, 122 bp, Homo sapiens
gccctccagcccgcgcctgtatctcggggtggtataaacaggatgtcagacagcgcgctccgggcttgtttatgaaaacttgccgtgcgcgctgggggagggggcggcctggcttaaccgct

SEQ ID NO: 174435 - DNA, 122 bp, Homo sapiens
gggcccagccgggctgcctggttagcccggggagggccacatccctgccgccccagtcaccgcccttcttgagccgggaatcccgcccacgccgcgccacgctccgcccccgggtgagggac

SEQ ID NO: 174436 - DNA, 122 bp, Homo sapiens
ggagtctgctttatgtcatcctcgtggctctcgaaatgccttatttggacagtggctctgcgacgggaccagttagggcctccgttccgatggcggattcctgacgggaggcccgagggtcc

SEQ ID NO: 174437 - DNA, 122 bp, Homo sapiens
gggagagagacaggcagacagcagacctggattcaagttccagctgcagagcttgctgagcgtgtctaaccttgggtacgtcactccacgttgctgctctggccctcagacagctcatctgt

SEQ ID NO: 174438 - DNA, 122 bp, Homo sapiens
actatgcacttttcaggtaagctttacttttattttgtagcattaattcctatattgcaacgtaagggtgaacaatgaaggctccaggcaagaaaagagaagtaagcagttttcctggacat

SEQ ID NO: 174439 - DNA, 122 bp, Homo sapiens
accctctgccgctctgcccagtcgacccggtctcctccggcttccctccggccaacagcgcgctcaggctcgcctcaggcccctccaacggaacaggagtcgaggggcagtgaggccgggat

SEQ ID NO: 174440 - DNA, 122 bp, Homo sapiens
tatccacttctccccgctgcactcggccttggtgcccacactcaacggctccgctccactcggccttggtgcccgcactcaacggctctgctccactcggccttggtgcccgcactcaacgg

SEQ ID NO: 174441 - DNA, 122 bp, Homo sapiens
cgcctcgttcccgaggccctagacacccctcagtgaggaagccattgcgggagggctcagcgttttctggacttcacagctgtggcattcccgttcctcgacgccagtgggcgctctgctcg

SEQ ID NO: 174442 - DNA, 122 bp, Homo sapiens
acaagaggataacgttacagggttccatagcataatccttgaaagccctgaggcccaggccgctgtcctgctctcctctctactgactcccatcctcaatatactttccatgagagaaaggt

SEQ ID NO: 174443 - DNA, 122 bp, Homo sapiens
atccacacgattggatttcattcatgaaaccggggcctggtgtgtctgtgctctgggacacgggtggcaaaggttcctcggctctacgcagacccgacgggcccgggcacggaggcggatcg

SEQ ID NO: 174444 - DNA, 122 bp, Homo sapiens
gttcgccgcggagacaagtgagcagtgagtcgcagtgaccctacaagtggttcttttacccgagcggctcgtaggcgcgttgcggtttttcgaaactacagctcccggcaggccccaagccg

SEQ ID NO: 174445 - DNA, 122 bp, Homo sapiens
ctaaaatgcatcctgaggcctgtccatcgcggatttgagaagagccgcagcagcagaacacgccattaggcgataatggcccgggcccgcttcagtcatagggccgggaaatgagggtgatt

SEQ ID NO: 174446 - DNA, 122 bp, Homo sapiens
gtgcccgtgcgcccggcctgctagagcgcgccctccaccccggcccccgaactgtgccttcgcttggagacccacaaagagagtgcgccctgcactccccgaacccgagtccgcgctggggg

SEQ ID NO: 174447 - DNA, 122 bp, Homo sapiens
gaagccgcggccggccacactcacctcggggaagcagtccttggcgaagacatggagcagcgcagtttttccacactgactgtctcccaccacaactatcttgcatttcacgttctgattag

SEQ ID NO: 174448 - DNA, 122 bp, Homo sapiens
cccgggtgatccaggtgctcccggctctgccgcgcactggggtgccaccgtctccaagggcgccgctgtcagctgtgacccctgcgcccccagaggcggccaaacaagcggcctttgtggtc

SEQ ID NO: 174449 - DNA, 122 bp, Homo sapiens
cctctgcgtaacaaccgcctgcaggataacagaaaacagtatccacaaagacttagaaaccgttccaagcggttttttcaagtgtcgactaaaagctaacaaagacatccaaaccaaatgtg

SEQ ID NO: 174450 - DNA, 122 bp, Homo sapiens
gcagacttagtgaaagattcaggcctcgctgatggtggagactgtgaagctgcggaacagcgaggtgctggatgcaaaacaagcatcgtgagctgtgtgtaggtgacaggtgttttaatcta

SEQ ID NO: 174451 - DNA, 122 bp, Homo sapiens
aacttcagaggggaaactgagaatgggactcggcttgcttctcctggtgtgggttcaggccgccattttaaggagccagtgaagggcgacgttccgctccttacatggcggctgtatttact

SEQ ID NO: 174452 - DNA, 122 bp, Homo sapiens
atcagttgaaatgtgttggacttgagttctgtgttccaggtgcctgcagatgcctctccccgcatgcagcctcctctgcctctgtgacgcttcattctcctttcttctgtacaggccccatc

SEQ ID NO: 174453 - DNA, 122 bp, Homo sapiens
ggacgggggtggggttcacagcagtggcctgggcgtgatgaccctggcgaaggacggggtcgcagagcccttaaatcctggaccagtggctgattccaaaagcagcagggaccatgccagga

SEQ ID NO: 174454 - DNA, 122 bp, Homo sapiens
gggcttctgatgaacactaaggtttgagaaccagtggtttcaagcaacagaggaagaagccgagcacctcctgtcgagccagggttaattcactggctcggggctgtttcaggtaaactgaa

SEQ ID NO: 174455 - DNA, 122 bp, Homo sapiens
agggtgagaggagtaaggcacttgcctcagctgcaaaatttaaggagctgccaaaaacctcggtaattaagagaatatttcaggacaatattttaaaaaattaaaatttatgcaaaaaatta

SEQ ID NO: 174456 - DNA, 122 bp, Homo sapiens
acgccggcagagggtgccggcgagacgctgagggacactggagtttctgagccgaacctgcgactttaagatagggaaactggtaggacatccaagaaaaaaaaaggaaagaaagaaagaag

SEQ ID NO: 174457 - DNA, 122 bp, Homo sapiens
gaatactaggcgcataccttctgagcttcgaattcagtaacctcactgggaccttgaaatcggactgggttggagtattcccattactcagataatgcaaatccgggccatcataccccttt

SEQ ID NO: 174458 - DNA, 122 bp, Homo sapiens
aaatagctcctgctgtccccggggcaggagtggcttaagaaagcatttaatccaggagtgcgtgtctggagctttgtgttaatcagattccatatgactgaatgacctttgttttccctctg

SEQ ID NO: 174459 - DNA, 122 bp, Homo sapiens
cccagaggaccccactctatagccccccaggaccccgctgtgcggctccagggtctctagcgccccaaaagtgattccaagaatttaaaggactaagacccagttggggggaaggggggtgt

SEQ ID NO: 174460 - DNA, 122 bp, Homo sapiens
gaagaaataagatgactttcacccaacactgcttccaaataagcagtactctggagaacacgagaaatcctcagaaaaataagctgcagctctgaggtgctgattatggtagggcaatcaat

SEQ ID NO: 174461 - DNA, 122 bp, Homo sapiens
cgcggtgggtgcgcgctcgtgcagttgtttgtgtttgaaattcaattgctccctcctctgcgcgaggcctcttcctccaccccccgcccggtccccactcctcctcctccctcctcccggac

SEQ ID NO: 174462 - DNA, 122 bp, Homo sapiens
cctgccacctcgccgagtcctcacgcacgcgttccctaagaataaaggaccctctgcagccgcagaaccatcatcggcagacaagaaccatttcagagcatcgctgtccactttatattcaa

SEQ ID NO: 174463 - DNA, 122 bp, Homo sapiens
gtccggtgcctttgctgcgagttctctgacaaaattggaggcggcgaagcgcgttcctcgcggccccctaaagtttggccattttaagtgcatcatagtgtcagtggaatacgatttggttt

SEQ ID NO: 174464 - DNA, 122 bp, Homo sapiens
gatgctcagaggctcgctggcacggagctcccgggctggggcgtccagatctggagaagccgggggccttggtcacactcagagctgacgtccagtgcggcccttgctgaggactcgagcga

SEQ ID NO: 174465 - DNA, 122 bp, Homo sapiens
cccagggctctgtggacaggcacatggggtgtgtggatgagtgtgagcatgtgtgtagtacgtggtttggataagtgttttgcatgttgtattggagcctctgggctagggacactggcgtg

SEQ ID NO: 174466 - DNA, 122 bp, Homo sapiens
ggctagtcagagtcatggttagtcagagttttggggctgctgggagtgcagccaagcaggcgatccaccccccaggcaccctttgaaataagatatacagctggtcttttcagtcaggtttt

SEQ ID NO: 174467 - DNA, 122 bp, Homo sapiens
aggtcttcacagcgtcctgggcaggatcctggtcacaaaactggcagaggaccttctcggcggaggtcatggtgttggcgtcaaaggcccgctcccgacgggtctcgctgggagagttgggc

SEQ ID NO: 174468 - DNA, 122 bp, Homo sapiens
actccctgcacgtggtaggccctagaaattattgacagtatgatttagtttgtagccctgcgctccccgggattgaagccaatgaaattgaagccagagaggataccttcctcactagatgc

SEQ ID NO: 174469 - DNA, 122 bp, Homo sapiens
taagggtgctgggtgagttctgggagtatagattctgactggggtcactgctgggctggccgccagtctttcatctgacccagggttaaactgtggcttgggactgactcaggtcctctctt

SEQ ID NO: 174470 - DNA, 122 bp, Homo sapiens
ggcccgtgggcctgtcactcacatcagagttgggaagcccgcctccaagcccggaagacccgcctcctctgtaaggttaaaggaggaagaggcagagattggaggttcaggcagtgacgtaa

SEQ ID NO: 174471 - DNA, 122 bp, Homo sapiens
aggcagctgtgtgggcactggatccctcccccccccatttgaaaatttaaacaataaacccgggcaagtattggaagatttctttgttaagactattgacactgtgtcacttggtcaaacta

SEQ ID NO: 174472 - DNA, 122 bp, Homo sapiens
caaagattaaattaagttttatttgctcgctctcattttacaataatctctcacaaatgtcgcttagaaacagaacacatatccagggtgtgtgatacaaaattataagttagttttttcca

SEQ ID NO: 174473 - DNA, 122 bp, Homo sapiens
gccggccagagatcactgcacaccatctggtcacagcagatgctgaaagcagaagctaagcggcaaattatgaggcctccaggactagatcttctgaacctctccccacccgcctttcatca

SEQ ID NO: 174474 - DNA, 122 bp, Homo sapiens
tcggaggggctccagcaggggtgaaggaggtcggggaccctggaggccccaagggcgagccgtctgggggcagaaagtgcagccctctgcagaccctgcccggcccccctgcacctcctggc

SEQ ID NO: 174475 - DNA, 122 bp, Homo sapiens
ctccctgggacagcaagacctccgctcaggcccctctttcgaatgctccacgccctcctgcgatctagaatggtatgaattctcatacttgcccagaccaggcgtttcagatgagggattgc

SEQ ID NO: 174476 - DNA, 122 bp, Homo sapiens
gggggccatgcagtgatggaagccagaaggaatgaaggcctgcagtgaggatggagtggtcggcctgaagccatctctagcaagtggtcaggacgctgattgttctgcgcaggttggaggta

SEQ ID NO: 174477 - DNA, 122 bp, Homo sapiens
gctccggtggggtctgcggcagagcaggactggagcccagggcgcagctgcacagctcaacgccggttcgcgccctggtttacagcgttgggctgggtcaccccttctttcctagcttgctg

SEQ ID NO: 174478 - DNA, 122 bp, Homo sapiens
atggctgacattcaggggtgaacagagggctagtagcccacgaaagaagtcaagaaggaccgaccagagaagtacaaaacaaccaggagagaagaaatctgtctccagaaggagggagtgat

SEQ ID NO: 174479 - DNA, 122 bp, Homo sapiens
gaaggacataaaggctaacacactgtataggctgagccttgatcctccctctgccaggcacgtcccgaaacacaaaagttcctgcccaaagcctctcacgctggatccagttgcaggggcac

SEQ ID NO: 174480 - DNA, 122 bp, Homo sapiens
tggagactagggagtgtagagattgttggggatgggggacttgcaggggacagaatgggccgcagctggaccctagttctccagggaacgcagtatgatttgaatacagatctctgcctcca

SEQ ID NO: 174481 - DNA, 122 bp, Homo sapiens
ggggtaggcgcggcctcgggaaggcaccgacgcgggcctcccagtgccagcgcgggcggccgccgccagcttcccgcatcgcctccgcacccgccgaccctgccccgcctgcattcctgcag

SEQ ID NO: 174482 - DNA, 122 bp, Homo sapiens
cgcagacccagctgaaaccgtaaaatgctcggtaaaaccagtcgctctgagggtgcagcgcgtgtgtccatgggtaaaatatctccccagaccttcccaccctatgcgtgatttctgagttg

SEQ ID NO: 174483 - DNA, 122 bp, Homo sapiens
agcctaagggggccttgtgtccaagacagacacaaaagcaagggagagtgagggaggaagcgtgagcaagacccagagatttagagggaaggttccgagcagacaggacgcgtgggcccggg

SEQ ID NO: 174484 - DNA, 122 bp, Homo sapiens
aaatcacactcactggtgtgaatgggagtttttttggctcaggggcccagcatgcaggtacgtacctggtacaggcaaagccagcctgaaagcactaaacactattcctcagcactgtttct

SEQ ID NO: 174485 - DNA, 122 bp, Homo sapiens
aggcccatcttttgtctcctcatcatgagtgtggttctgtggatggttgcagactgtacacgtgtatggacatgcatcctggaatggacccctggctggggaggatttcattttagtgtctt

SEQ ID NO: 174486 - DNA, 122 bp, Homo sapiens
gaccccagggctcccacggctgcgttccagaggccaccagaaaaccgagtaccggaaagccggcaggacctccagccctcaggggcacagaggggccacttctctgtggccgaaaacaggcc

SEQ ID NO: 174487 - DNA, 122 bp, Homo sapiens
actctcccctcccgtccctctctgcaactcctcccttcccaaaaatatctttaggagaagcgagttctctcggcgtggaagcagtgtttcccgcaaaactgccagcccgccccccgctcacg

SEQ ID NO: 174488 - DNA, 122 bp, Homo sapiens
aaaagaaagtaaaccagtcctttgtattcagttacctaatggggtgccatcaataagctgcgatacagccctggagctcagtcagccacaccttcctgcatcctattggccttattcatttt

SEQ ID NO: 174489 - DNA, 122 bp, Homo sapiens
gccctcccctggcctctcgggacggccgcgcttacctgaaccgaactgtacgcacaagcgcgctcctgactccaggtgcacaccgtggaggcctgaaacgagagccatgaccgcgacgcgct

SEQ ID NO: 174490 - DNA, 122 bp, Homo sapiens
catctgaatggagtgccaatcagcactcattagtgggaacacaatgcggccccattagcacgaaaggagctttggcaattgctcattagctttgtagattcaaataattattttaagggatg

SEQ ID NO: 174491 - DNA, 122 bp, Homo sapiens
tcgcagccccgcctttagcgccgctccccaggctgcggccagtttggcgcttgccccgcgcgtgaccccgtgttttcccgacccgagtccctaaagctcctggtctggagcattcttgaaca

SEQ ID NO: 174492 - DNA, 122 bp, Homo sapiens
agcgaccccacattcaaggacgccaatggcatgttgagctttcccaatctaaaccaggtgcgtggagggaagcaagtgcttactcccagcttgaaccctgagcagcggttctctaactttag

SEQ ID NO: 174493 - DNA, 122 bp, Homo sapiens
tggttgcaagtaacagaaatccaactcaaagtggcttaagcaaaagaagccatcaggaatcggtctctgtctcctacctctgctatcctgtctgcctcacaggtgggtctggaccctgcagg

SEQ ID NO: 174494 - DNA, 122 bp, Homo sapiens
tgtagtttatgcacacagatgcgtgtaagaggcatcatgctctaaaacagtgcagaaatgcgcgcacagagggagtgcaagcatcttgagggtatcttttcgtggtgcaccatgggtatgca

SEQ ID NO: 174495 - DNA, 122 bp, Homo sapiens
caccctgcgccttcccctctcggagggttgctgctcggcaacaggcaccgggggaagggccgcttccttgggggtctccctgcctacctggagcagaaggaccctctcccgtgatgcgccca

SEQ ID NO: 174496 - DNA, 122 bp, Homo sapiens
gtttcattagagccccgggcccgggccgcgcgccaggaacttccccgcacgcggcgagatcgacgatcccccgcccccagccccagcccggctccaggcctcgcaatgtcaggcacgagcgc

SEQ ID NO: 174497 - DNA, 122 bp, Homo sapiens
acaggcgtgagccaccgcacctggccgaccagtaacttttaaaactggcaagctgccaagcgactctggggacactgaggttgggcgtctctggccctggcctttgccgtcatgacactgtg

SEQ ID NO: 174498 - DNA, 122 bp, Homo sapiens
ccacctggaaccaacatcttggttcccttttgagggatcagaacttgtttaattggaatacggcaaaattctgaatttttctgccgtctctattccaacttcagagttctgccgtccagccc

SEQ ID NO: 174499 - DNA, 122 bp, Homo sapiens
agcgcggggtgggcgtcccgtcaccctgcgcccagcttccccggcccgttcccgcagggccggcctcccggcgccatgcccggcctgtactgcccctccagctggacgccgctgccgctcac

SEQ ID NO: 174500 - DNA, 122 bp, Homo sapiens
ctccgtgcactctgggctctgccaccctactctgcagggtgctggtcatctgggcatcgccgagctcaggctggcacgacaggctgctcttgggagtaacagaccttttggtgcctttccag

SEQ ID NO: 174501 - DNA, 122 bp, Homo sapiens
ccatggtgctgaccccgtcctctgcctctagaagtggccagaaatgtgagaacgctgtgccgctggaacccactgcctccctgcagctatcagttctgcaaatgcaggcatcaggagtccac

SEQ ID NO: 174502 - DNA, 122 bp, Homo sapiens
caccaggcagcacagttcccctggctgtaggcgatagaccacgccttcctaatcagcgggcgcattccctgacttttgcggaaatagcggtccaaaaccgcgtctagcattagcaaaagcac

SEQ ID NO: 174503 - DNA, 122 bp, Homo sapiens
gtctgctcctcccggagccggcttgcaggcgtgttgggggaagccagcgaggttgtttgccgggaaaggacagtttgggacccgggaggggagttccctgcgtctgggccgtggggggagct

SEQ ID NO: 174504 - DNA, 122 bp, Homo sapiens
ccggctgggggcggggctgagctggcgggggcggcaggctacaaagcccgggggcggtgccggggcgcagagtccccgcagcgccggtcgggagcgcagcgcggcgcacgtcggcgcgcacg

SEQ ID NO: 174505 - DNA, 122 bp, Homo sapiens
ctgacagccagaaacagtaccgtcagaatcattataaagatgacagtagctaacgtggaccgaatgcttgctgcatgtgaggagcttcaaggatatcagctcatttcgtcctcacaataacc

SEQ ID NO: 174506 - DNA, 122 bp, Homo sapiens
agttttcatcatcacgtttagttaatgctgtctactttttccagggccccatctttacagcgatcagctagcagagtcaaaaagcctgtgtggagttttcaacaaagcagaggtgcaatttt

SEQ ID NO: 174507 - DNA, 122 bp, Homo sapiens
aataaaatcctctgtgtgatagtttcacaaaacgatgcagtattaagttaggactctaagcgtcgctgttgaccaacctgggcaagaaaatcaacggaaactcaagttacatcctccaacaa

SEQ ID NO: 174508 - DNA, 122 bp, Homo sapiens
tttggggtgcccttcgcggtttctgcgtttcccccgcgttgccagcagccactcgcgccgcgcccctagcccagaaccgcccctcccaagggcgataaccccgagggcaacggccgcgggcg

SEQ ID NO: 174509 - DNA, 122 bp, Homo sapiens
aattgccaatgtgaatgtcagacgggttatttgctgcataaataccaattaaacaagccccgcagcagcttcaacctgctcagccaactttgaaaagagcacatctctccagacctctaact

SEQ ID NO: 174510 - DNA, 122 bp, Homo sapiens
aacctcctttgagtcagaacaatgggaggcactggaaacacagcagtatctccaccctcacggaggctgttattttaacagagaaatcagatgttaagcaactaagaaaatgattatttaat

SEQ ID NO: 174511 - DNA, 122 bp, Homo sapiens
ggtggtaggccctcgctgccctccgggttgaggctgcaggaggcaaacacaagtcttctgcgggcgccggggctcagcgggcgcccccaagtccgcgggaacctgcggatgcgtacatccag

SEQ ID NO: 174512 - DNA, 122 bp, Homo sapiens
agaggctagagggagctgaagcctcctcaccgcgtccaggaagtggcacagtgacaactccgaggagactgtttcaaaggcgccagggcgtttcaacagagaaaggaaagtcttttccaaaa

SEQ ID NO: 174513 - DNA, 122 bp, Homo sapiens
gttgaaaaccatggaattagacaacttcctgaattccctttgagccttgcagcctcatttcgttactcctgttactcacggtgcttataagcaggtaaccatatggtctcttagtgaagcaa

SEQ ID NO: 174514 - DNA, 122 bp, Homo sapiens
cggtgggtgagcatctagagcaagtggggctggggtccagagcactgtcccggaggtcagcgctgcccaccccagggaggaaagacggagccagctccatgaggctggtttgccgcagcccg

SEQ ID NO: 174515 - DNA, 122 bp, Homo sapiens
aagtgacaaaagtgtctaattttactacatatgtaggtgcagagttcagatttcaagtagcgtccagcaaagcacgtggcttttctgggcgagaaggggatagcttttggttggctatcaca

SEQ ID NO: 174516 - DNA, 122 bp, Homo sapiens
tgttccccaaacacagccttcattctagccaggccagaatgaattcccagatgtctctgacgaatgccacagcctcccatcctcagtcttttcatatggttattcttctacagagaatgccc

SEQ ID NO: 174517 - DNA, 122 bp, Homo sapiens
gaagtactcgaagatctgcaacagggacagaccagggtcggggcaggttccttgagggcacggctctcagaaagggagagcaactgccaggacaggggctgtgcaggggaaggggctttcag

SEQ ID NO: 174518 - DNA, 122 bp, Homo sapiens
cggcctctgagtcctggttgtagtcctggcgctcctgcgaggtggacggggtcgccatggcggcgactaaagagaggcggctgcagcggcggcgctggagcggcggcggggggaccttgggg

SEQ ID NO: 174519 - DNA, 122 bp, Homo sapiens
tccacatttacacaatagcaaagtaatttaggtgtgagctggtcagtcaggtacataagccgatctggctatcctgagttttcttttcccttcacctcttgttttcctccctttaatttgga

SEQ ID NO: 174520 - DNA, 122 bp, Homo sapiens
ccaggttccatgcgctctcgccgtgccggatcagcaccagtttgtaggcggccatggcggcgggctggggatgcggcaccgactgtgaaagtgttttgattatttgttagtccataaatact

SEQ ID NO: 174521 - DNA, 122 bp, Homo sapiens
tgtaaaacatagaatagtcacttcactattacattgtccccaattttttcaaaagcttgccgtgaagggaaggaagctaagtaagaaaaaggtcaatgaagccagttgcaaagaagattatg

SEQ ID NO: 174522 - DNA, 122 bp, Homo sapiens
tccttcgttgtctttcttaggagcacgtggagttctcctaggtgggcttgcactcggggtcgcccagccgttctttgagggttcgagtgggtaggcttcccctgtaggacgggcttccccgt

SEQ ID NO: 174523 - DNA, 122 bp, Homo sapiens
ggtgctcactcaacattcctgggatcaatgggaaatgactgtcggggaaccctctgcagccgtccttgtcgagggccccagatggggtgtgggtggcccctccccatccagatggtgttgga

SEQ ID NO: 174524 - DNA, 122 bp, Homo sapiens
atctctcgggtaaccaggagctgccctcgaagaatcggcagcagtccatgctggcggcgtcgctgtccgacgtgtcactgtcaggcatcagtgtccttttaaggccgctgagggggtctcag

SEQ ID NO: 174525 - DNA, 122 bp, Homo sapiens
tagctgccttcccgcggggccggcctcgggactgcagcccgccatgcctgagccttcccccgcctccgtgggctcctgtgcagcccaagcctccccgacaagcgccgcccctgctccacggc

SEQ ID NO: 174526 - DNA, 122 bp, Homo sapiens
ggctcctgcggctgtgtccagagcagctctcgttggccggctcgagcgctgagtacagaacggggagagaggagagacctatgtcctgtggtggctgtgtgtgggctcccgagcccccctgg

SEQ ID NO: 174527 - DNA, 122 bp, Homo sapiens
acctcaggtgattcactggcctcggcctcctaaagtattgagattacaggcgtgagccaccgcgcctggcctaatttttgtatttttaatagagatgggttttgccatgttggccaggctgg

SEQ ID NO: 174528 - DNA, 122 bp, Homo sapiens
tgcattccttggtctggcgtccggggatggaggagggtggaattaagttagtaggtgatgcgggccgagcaaagaccctccgtgctctaagaagcacgaccgaaatgcggcgacccctcttt

SEQ ID NO: 174529 - DNA, 122 bp, Homo sapiens
gacggagtggaatgaaggtgaccggccgctgcagcaagctctggagtctcgcagttgggacgttaggggtaccactccaggacagagctccctcctggggcagggactgggaggagccaaag

SEQ ID NO: 174530 - DNA, 122 bp, Homo sapiens
gctgggcaaatccgctttggccagctcagcggctccgcccctaccgcgagcggcgctgggcggggctgcgtgcgtggcgtgtccgctggaccaggggacgggggcgcgccgcaggtgtagga

SEQ ID NO: 174531 - DNA, 122 bp, Homo sapiens
cccggcctaatcccgctttcatttccaccgacggccgcgggggaagcgctcccggcctcccggcccctcaggaggctgattaggccacaaagagcccccattatcccgagaagaaaaccggg

SEQ ID NO: 174532 - DNA, 122 bp, Homo sapiens
tcggaaagggaactccctggccccttgcgcttcccaggtgaggcaatgctcgccctgcttcggctcgagcacggtgtgcgcacccactggcctgcacccactgcctggcactccctagtgag

SEQ ID NO: 174533 - DNA, 122 bp, Homo sapiens
cgacctctcaggggtcactcgcagccgaacagcctggaatatggccttgtgggcccttcccgcccaaccccctaggaccccactgctcatcttgtcaaccagtttctgagcccctaccctgg

SEQ ID NO: 174534 - DNA, 122 bp, Homo sapiens
gcccctggctgtctgtctcttgcggcatctcggcatctcccgcggaggtggcatctcccgcggaggtggcacctcctcagggctgactcctctcagaaaggactgccctggttccaccttct

SEQ ID NO: 174535 - DNA, 122 bp, Homo sapiens
gggtcaaaaggcgccgcgcgttcaagggtggggcgtgagacaaaaatgaagcgaaggcggcgaggcgttggatctctcgaaactcactaatagtcccatctgtctcgccttcaactgaagac

SEQ ID NO: 174536 - DNA, 122 bp, Homo sapiens
atgtggtgatgcacgtgcactagcaggcatgcagacacacgccaacttgcagcccgcaaacgcccacagacccagacacgcagacgcacgctccagagcccacacggtgccccggcctccct

SEQ ID NO: 174537 - DNA, 122 bp, Homo sapiens
tgcctccatcttcccatggcattctcctgtgtctgtcttcacattttctgtctcttataacggtacttgtcattggatttagggtctgtacaaataatctagtattatcttgagatgcttaa

SEQ ID NO: 174538 - DNA, 122 bp, Homo sapiens
ggtttttgcggaggttgggtgaggttgtgttcactctcctcactgaccccgccgtgtggtcgccggctggtgccttgtctgtctgccccagccccgaatgccccgagactcccggcgccggc

SEQ ID NO: 174539 - DNA, 122 bp, Homo sapiens
cgcctggatcacgtccggggccacggtcaagaagctcggcgcccagctgtgcctggatcacgtctgcggccactgtcaagaagctcagcacgcccaacgcccgaggctcaacctcagtacgg

SEQ ID NO: 174540 - DNA, 122 bp, Homo sapiens
gaccggtgctctcctgaactcactattcgggattcatgctggacatgtcactgcagctgccgccgccgccaccgccgcccttgctgccgcagccgccgccctgactctccgcgccacgggta

SEQ ID NO: 174541 - DNA, 122 bp, Homo sapiens
cacgagattttagctgagggttcaggaatttccacggatgcctgttcagcctgggtgaggcggcatcccgaagcacgctgcccgctccgccgtaggtcgttcccttctgccgagcagctggc

SEQ ID NO: 174542 - DNA, 122 bp, Homo sapiens
tctgtctcccagggcttgtgcgacttggtttcagactctgccacccactgccgcagacagcggccgtcttcccaggaagaagacatttcctggcggggtaccgggactgacgggcggcggcg

SEQ ID NO: 174543 - DNA, 122 bp, Homo sapiens
cctgtgtgcctcaaacccggctcccgccaggaattcgagtcagacaggtccctgggccctcgccatgccccaaactggcagccatacagaggacgccccgcatgcaggtggggacccacaat

SEQ ID NO: 174544 - DNA, 122 bp, Homo sapiens
gagaagtgatactgcgataggaactgagggtgggtaaaggtcaacgaatgaccgaccgtgcgctaggaacaacctagtgtgggagaccgtgccttagtggtgtaccaggaggtgcaaacaat

SEQ ID NO: 174545 - DNA, 122 bp, Homo sapiens
agagcgagccgggggattgagactgtccgatccaacctagggcacgagcctggtataaatcgcggactaacagagactatctgatgaagagactaacggagagagagggagaggaggaaagg

SEQ ID NO: 174546 - DNA, 122 bp, Homo sapiens
ggcctcaaatggcggcctgttttggctcctgaccgcggtgggagagaagaggctccagtccgagttgagacgctcttccaaaggcctctcctgacccgcccacggagtgggggcagtttggt

SEQ ID NO: 174547 - DNA, 122 bp, Homo sapiens
agcgctcgcgcgcgcccttccggagccccaaccacgccacaggctggtcgcgagggaatacgcccgtcttggctgtcagcaataggattttacagcgaaactgctgcctttgcttgcagcat

SEQ ID NO: 174548 - DNA, 122 bp, Homo sapiens
ggggccccggctggcagaggctaccttttcctataaacaagcttgcacaattgccagggccgggggaaagaatgtgttgggcaggtcactggctcttaaagcttctatctgtaataatacac

SEQ ID NO: 174549 - DNA, 122 bp, Homo sapiens
gacagcagagagccgggcaggggcctcaggaggactcgctgggagtgggcagaggcgcctcggcccctgccggcccaggcgggccccgcgcgccccccgcccctcctctccgcctcttctcg

SEQ ID NO: 174550 - DNA, 122 bp, Homo sapiens
cgcggtcacccgtccttctgtgagaggcatttgagtcatgtcccacacttggccatcatacgagcacctatcacatcctgggtggccgcgtgcatgcctttctcttgtgcgttcatggggcg

SEQ ID NO: 174551 - DNA, 122 bp, Homo sapiens
ggcatttctgccgcaggacccctttcccttgcccgctagagggcggcgctgccccagagacgcacagccagcggcttagccaaggccccagcaccagcggccctgggccctgccctgaccct

SEQ ID NO: 174552 - DNA, 122 bp, Homo sapiens
ctggctcgacagcccaagcaaatgatagttagcattcttgggagcagcagaattgctgatcgtgcgagattactagtaggagccagatgagtgtagacagagaactgctgtacttaggaaat

SEQ ID NO: 174553 - DNA, 122 bp, Homo sapiens
cacagccctcctcacacaccctttcccttcctccctgtgtgccaagttcgcccccggagtcgtcgtttccttctttcccggcagctgcagcgacgacccacggcctgagagagccgctgcag

SEQ ID NO: 174554 - DNA, 122 bp, Homo sapiens
gctgcgactctccggctcgctggctccagatgtcacgaggcctgggagtttctctgtctgcgtgagggatgggaaagctggaggcagaggccagctggagcttctggggctcccgttttaat

SEQ ID NO: 174555 - DNA, 122 bp, Homo sapiens
caggctgggccgggacgtggtcgcgagctgccggccttcccgggacgtcctaccagcccgcgtcgctcctcagcgggaggagagggccagttgcttctccaaggctaggagggaaggcagag

SEQ ID NO: 174556 - DNA, 122 bp, Homo sapiens
gggggcttaaaaagagagaaaaggccgggcacagtggctcatgcctgtaatcccaggactcgaggctgaggcaggcagatcacaaggacaagagatcgagatcatcctggccaacatggtga

SEQ ID NO: 174557 - DNA, 122 bp, Homo sapiens
ttttatatattttttctttaaaaacgtggttatgtcaggctctaatcaaataagcgaaaacgggaatcagcagaatacactgaaaaactacttggtatgttgccatggattggtgatatttc

SEQ ID NO: 174558 - DNA, 122 bp, Homo sapiens
caccgtgcctgtacagtacttttatggtattcctgcccaaaatggataacttacatctaacgatgaagaaacaccaaacaaacctaaactggggaatattctagaaaatgactggctggtac

SEQ ID NO: 174559 - DNA, 122 bp, Homo sapiens
gctttccctattttccgtgatcgtacttccattttaaaaagatcttttcctggggccgggcgtggtggctcacgcctgtaatcccagcactttgggaggctggggcgggcggatcacgaggt

SEQ ID NO: 174560 - DNA, 122 bp, Homo sapiens
cgccctgcgcaagctcccggctctggttgctggtccacaaaatcgggaggctgaattagccggtcgggtggcccccagccttatagcttcgaattctgtgatcctattttagacccagactt

SEQ ID NO: 174561 - DNA, 122 bp, Homo sapiens
cctgttagtcaacagccagatgccaacagataatcacattagactcatcagcaagcacaccgtgcacacaagttccactcccatgtacaggttcctgtcccatgtacacaagcctgcacaca

SEQ ID NO: 174562 - DNA, 122 bp, Homo sapiens
catcctcactgttgactcctggcttaaagggatctcccggggtgagtgaggaggcgggatcggaccctagcagtctgacggcagcacctgtgttcctctgcactgggccgtggatgacatta

SEQ ID NO: 174563 - DNA, 122 bp, Homo sapiens
cttgcgttgattacagactgtatcagaatgtcaacgacaagggcagcacgtgggaagcggcgcattccacccacagagcccgcagggagcacagaagtggagcagggggggctctccccgag

SEQ ID NO: 174564 - DNA, 122 bp, Homo sapiens
tcctcggcagggacagggagccagcatcagcctggagcctggggcggccactgcacaccccgctccatccagctcacaaccggagcacacagcttccctcctcactgcccaggccggaattc

SEQ ID NO: 174565 - DNA, 122 bp, Homo sapiens
ctccaaatgcagtctgtagttaatagtaatatacaaagtcgacgtcttagttttgacacacgtaccatggttgcgtaagatgttgacagaagaaactgggtaaaggatatatggaacactgc

SEQ ID NO: 174566 - DNA, 122 bp, Homo sapiens
gctttgtccgtgctacaaagcagcctgttaaactattggaactaatgcgccgcagctgcgcgagtgacttctgctgcttatgtacataaaaagtcctggggggagggcttaaccatcagatg

SEQ ID NO: 174567 - DNA, 122 bp, Homo sapiens
agagcagcccgcagagttcctgtctagacctcctgcacatttgttcctaatttcatgctccgcgggctcccagatgcctgcgttcagtaataaacagacgaggaagtgctcggctgccctgt

SEQ ID NO: 174568 - DNA, 122 bp, Homo sapiens
gcaacatgtcttgcccaaaggtgcagagctcaggtgggtcttgcgcactgcataaggccacgttgccatgtccttgagcacctccacagaggagcagccaccccaggaagtagctgcagact

SEQ ID NO: 174569 - DNA, 122 bp, Homo sapiens
aggcgggctgagtcaggcggcaggaactgggcggggggcggcgccgggaggagccgaagccgagccagagccgctgggagcgagcccggagcccagccgggcggctcgaagtggccagggcc

SEQ ID NO: 174570 - DNA, 122 bp, Homo sapiens
actttcatctgggcatgtcccagcagcacaggaaactgatatccagggctgcacaggtggcgcagaaatgcgagatccgaggggagagatccctgggcttcagctgcctgggagtccttctg

SEQ ID NO: 174571 - DNA, 122 bp, Homo sapiens
agccccaagtgaggacggaacaaaggtttcatagtctcctgtaacaggaagtctcctagtcgtacgaaactgctacgtgatacccggatggcctctttctcgatcttcaggggtacgtatct

SEQ ID NO: 174572 - DNA, 122 bp, Homo sapiens
gtccccacacccgcggccctggtgactgatgaggatgaggttctgcggggcctctctggccgcccagctctgcctggggaaggtggggccagagtggatgtgttcccagcgtggtcactccc

SEQ ID NO: 174573 - DNA, 122 bp, Homo sapiens
cacacgcagccgttttacacacgacagaggcaagggcatcgtcgtcatcatcctcccccacgatgaaccattctggcttactcatgggacctgggccccggtgttgtcaaaacgacccacgg

SEQ ID NO: 174574 - DNA, 122 bp, Homo sapiens
ggtcgccgcgagagctgcacgcattctctgtgatatgagctgaacccgccaccctttccacgcagggcgtttcagctcacacttgcgctgtgttccttgatgctttaactgtcctagtcagt

SEQ ID NO: 174575 - DNA, 122 bp, Homo sapiens
tacaaaacatatggtccctgcttttttatgttatggcatttagtgttactgagaaaagaacggaaagttccacctcaaggtcacttcttttatgccagatttggcatatttgatggctgcaa

SEQ ID NO: 174576 - DNA, 122 bp, Homo sapiens
aacaaggcttaagcagaaagtcctcacaatggtgtccacattccatcaggatgacgtaatcgaaggttggaaccaggcggcctctgcctttgtgttccgggacccctcactcagtgcagagg

SEQ ID NO: 174577 - DNA, 122 bp, Homo sapiens
tagaagggttactgcagcagtggcggctgacgtagagatggcgggctcgcgagtgctgttcgtgccttgcgtccgccccaaccccgaccccaagtccccgaatcggccacttagctgttgtc

SEQ ID NO: 174578 - DNA, 122 bp, Homo sapiens
ttgtaagaaaacccttgtttccaccattccttgggctgccatgggggcccgggtatcaaacgacatcatcttatctccatgttgttggtttgagttgtctccccagggaatatgaagcttct

SEQ ID NO: 174579 - DNA, 122 bp, Homo sapiens
ctgcaggctggatagggccaaaggccaccaatttgcagtgtctgggttagaattattcagcgggttacaaaaagaaaatgcagtgcttgtgtgcaggttatggggaagccaatttctttgtg

SEQ ID NO: 174580 - DNA, 122 bp, Homo sapiens
ctggacccgccggcagccgccaccacccgggcgcgactcgagctgccgggaccaccaggacgctcctgctccgagatcccaggccctggctcgcttgactccggcatcttcacctctgcgcg

SEQ ID NO: 174581 - DNA, 122 bp, Homo sapiens
gccatcataggtacgaggcctattgtgtagtagaggtatcctagacaaaggagttcgggacgcccactggggacagaaggagaacacttcctgttcaccataggccatggcatggactcggg

SEQ ID NO: 174582 - DNA, 122 bp, Homo sapiens
gacccccttggtgactcaccacccagtggtccatggcaggggtaacccagccacaggtgccggtgatcctcggctctctcccttcccccagggtctggccagctgaggatgccccttggttt

SEQ ID NO: 174583 - DNA, 122 bp, Homo sapiens
tcctaacctgcagttacctgtagctgccacggcggggacggggcttggtccccaaagtcacgcagctaccaagtggccgagcttgtggctgctccaagacccgagttcttcctgagtgccag

SEQ ID NO: 174584 - DNA, 122 bp, Homo sapiens
cgagactcgcccgcttccaggtctcaccggtgagacagcacctcagagcgaagattggcgcgacgcctgcagcacgacttccacggcgctctcggatgacgtacaactgtcgcgagaggttg

SEQ ID NO: 174585 - DNA, 122 bp, Homo sapiens
ccgcgctggcccggacgctccaccgagtcaggtcctttgaggccaaggagcggagctgctcgggcccgtagtcctgaaacttcctctgcttcctcctcctgcccccgggtcccaccgcagcc

SEQ ID NO: 174586 - DNA, 122 bp, Homo sapiens
acgtgtgctggcagccgccaagtgaggccgcttttgcgacgcggtgacagccaaatggtgcgacaggaggagctgcagccgcggccgcagcgcccgcacggagaggcttgaggcggctcctg

SEQ ID NO: 174587 - DNA, 122 bp, Homo sapiens
gattcttccgtttttctgagatggagtctcactcttgttgcctacactggagtacaatggcgtgatctcggctcactgcatgagccagcacgcccagctcattttgtttgtatttttagtag

SEQ ID NO: 174588 - DNA, 122 bp, Homo sapiens
gcagaagctcctgccttgggtgatccatcatttaataaaccccagagaatccagtgtccccggcaggctttttgctcccctgctctcttgccttctgaggccctgggtcgtccccgcagctc

SEQ ID NO: 174589 - DNA, 122 bp, Homo sapiens
gcggtgggatgtgaggtgggggcgggacctggcctggtgcctggaggggaggagtccaggcggcgcctcggacttttgctcccacaagccctgcctcgaaggcggggaagctgggccaggag

SEQ ID NO: 174590 - DNA, 122 bp, Homo sapiens
tgttttgtgaaggacataaccccccgggacacacgagaatgcctccgttgggactggaatcgctgcccacaaacaaacggagaaacagtcaaaggtggcctaagacctgggaaatcaggagc

SEQ ID NO: 174591 - DNA, 122 bp, Homo sapiens
ctgtctgactctacatcttggacttttctactgagcttttgttccttccttggtagagaccgttatacataaatccagtgaatcagtattgagccccagcgcagctgtattccagccctgtg

SEQ ID NO: 174592 - DNA, 122 bp, Homo sapiens
ttgaagtagaggctctcgtggacgctggccatggcggcccgagactaagtctcgggcccgcggcgcgctgccgccagttgtcaccacaaggcacaacactaccgggtctacatctccgcccg

SEQ ID NO: 174593 - DNA, 122 bp, Homo sapiens
aatttggtcttgcagcccatttctgtgaatgaagttttactggacacggccacgctcattcgtttatgtgtggtctatggctgctgttgatctataacagcagagttgagtagttgtggcag

SEQ ID NO: 174594 - DNA, 122 bp, Homo sapiens
catgcacaagatgccccagggatgggaggtatgggctgggggctatgtatagtctgtatacgttttgaggagaaatttgataatgacactgtttcctgataataaaggaactgcatcagaaa

SEQ ID NO: 174595 - DNA, 122 bp, Homo sapiens
ccaggtgcgggtgtggcaggcgtctcggagcgccaggtgcagcttcctggtcaagatggtcgccgcctgccgctcggtagccgggctcctgccacgccgccgccgctgctttcccgcccggg

SEQ ID NO: 174596 - DNA, 122 bp, Homo sapiens
agaaaggagggaggtgctgggctgccctttgcagctggctgcctagggctagaagctcttcgggaggaggcggagaaaggggggttgagcatagaaggtgcccacctcctgctctcagcaat

SEQ ID NO: 174597 - DNA, 122 bp, Homo sapiens
aactactgcccttcaggtccgggccagacccgcaatgggcaggatgggtagggtacagggcgtgcgtccccacctacactagcctggttgcaggcggcctccaagggcacagcgggaagctc

SEQ ID NO: 174598 - DNA, 122 bp, Homo sapiens
cctcatccgcctgccttggactcctaaagtgctgggattacaggcatgagtcacctggcccggcatgtctgattcgtttttgaatcaccagtacaaagctagatgttgttctttttgtgaaa

SEQ ID NO: 174599 - DNA, 122 bp, Homo sapiens
ggtgagaactgtggcttggcgtcacttctcagtgagggttactttggtgtccggaaagggcgttgggccaccagtatattgtcacgagtgggagcaggagttctgcagtcggatatcgtgga

SEQ ID NO: 174600 - DNA, 122 bp, Homo sapiens
ttatttttatttttaatctgcaagcaaataatgtttggttttattttctgtgatcctggccggatagagagcccagtgtccatgaggggatgtgcagagccatctgtctgcagcagaaatga

SEQ ID NO: 174601 - DNA, 122 bp, Homo sapiens
aaggaggaggctggggcaggagaacagcatcaggactgtgagccggctgcagcagctgttcggattacactcaccctctttgaaccagatcacaaacgctgcccagagttcttctacccaga

SEQ ID NO: 174602 - DNA, 122 bp, Homo sapiens
acgcggtgattttcttttttttttccgactgccggagcccgtggtggtggtgctggggggcggggtcggcgtgggcagagctgcgggggctgccgcggaggccgccctaggagggagggggc

SEQ ID NO: 174603 - DNA, 122 bp, Homo sapiens
acaccgcagacccgacctatgcgcaggcgcgcacccgcacttcctgcccgccataccggccggggcgcccttcgctccgcccacacccggcagtcaatacagccgcccagagtcgttctccc

SEQ ID NO: 174604 - DNA, 122 bp, Homo sapiens
gagtccatgccccgccgccctggctgcggtccagcaggttgccaactcttccgcttcccgcgacttcgggagagcctcacccgggcccagctgtctccaagttaactagggtttccacctgc

SEQ ID NO: 174605 - DNA, 122 bp, Homo sapiens
tgcggcggcggcggcgtcaatggcttccttacccacatgcccacctgcaggcccaggctgcgttcctcctgttctgaggtctgcttttcagggaacaggcgctttgctgccgccgcccctgc

SEQ ID NO: 174606 - DNA, 122 bp, Homo sapiens
accagcagcgggccagtggtcgacgtaggcgggcggcgtggcggggcggaaaaccgtttccgggagagaccttccgtggtggacgtcgccccaggctcccacacttagaaaactaaagggaa

SEQ ID NO: 174607 - DNA, 122 bp, Homo sapiens
gtcttctctctcgctctctccgctgctgtagccggaccctttgccttcgccactgctcagcgtctgcacatccctacaatggctaaaacagcaatgggtaaggcactgcgcctcgttctccg

SEQ ID NO: 174608 - DNA, 122 bp, Homo sapiens
ctcttgggagcagatgtggttcgttagattcccaacagggtctctgactccagagtcccacgaaccgctgccccaaagcctgtgttcattgtaatgtgagtttttcttgcctttgcttcctt

SEQ ID NO: 174609 - DNA, 122 bp, Homo sapiens
ccctaaaatatgaccaaaataagatggctgttttcagctgtaagttggggatgtgtcgcacgccgacagagacaggagcgccctccttccaaaccataaacctagcatcgctcgacagcacc

SEQ ID NO: 174610 - DNA, 122 bp, Homo sapiens
ctgccagatttcatgcacgcgattgtcccaagcagaagcgtgaaagagcctgtgagccagcgtgctcttggaggatgggaagtgtcctggatgtgttttcaaaccttggagccgccacccac

SEQ ID NO: 174611 - DNA, 122 bp, Homo sapiens
acatgcatcactgtgcatgtgtatgagtgtgggggactgggggacacccttcactcactccgccaataaaagtgtacacacactggcacttagtgtgtataccccgaggttggtcactgggc

SEQ ID NO: 174612 - DNA, 122 bp, Homo sapiens
gttccgttaatgtttaatcagataggatcgtccgatggggctctggtggcgtgatctgcgcgccccaggcgtcaagcacccacaccctagaaggtttccgcagcgacgtcgaggcgctcatg

SEQ ID NO: 174613 - DNA, 122 bp, Homo sapiens
taccaaaaaagcggagggggctttgtctaacacctgtatacacctccctccgtagcatcccgctcattctagcttcttagggaaaccatagacaacgacgtttcagagagtgccagaggtga

SEQ ID NO: 174614 - DNA, 122 bp, Homo sapiens
tcccttttcttgaggaccatgtccttatctctctggcttttgtcctttagaagccttccacgatatgaggctgaggtaagagcttgtttgtgcacacacggagagaacttttactgcctcat

SEQ ID NO: 174615 - DNA, 122 bp, Homo sapiens
aaccctgctttacatgattgatccaggctgaacctatgaagacaccttggccagtgtcaccgatgttcccctagcagttgtgtccctctgctctagggtaccagtggcctcactagtgccat

SEQ ID NO: 174616 - DNA, 122 bp, Homo sapiens
gacgcgagcgccgcgtggacgctgacctcggtccgcgcctgcgccttggtttcttcccggcgattggttcccatctctgagggagacgcctcacttcagttttcactttctttttttgcccc

SEQ ID NO: 174617 - DNA, 122 bp, Homo sapiens
aggaagtcggcctgtggccggccatgttcatgagggcgcgtcccttggcacccctgtagccgctatgtttcccacgcccgtggcaggcctgagagattatgtttgcggggggtgcttttttt

SEQ ID NO: 174618 - DNA, 122 bp, Homo sapiens
gacctcctacccataacctcttcagtaatcggccagaagggtcaggacttaatctttaaccggcagcttccctatttcttgcccctgcttccagctctgggccaatcagagaaagccaaatg

SEQ ID NO: 174619 - DNA, 122 bp, Homo sapiens
aatcacaccaactttcccacttgaggactgtgttcggccaaacaagcaggttcagggctgcgggattccagaagttgctctgagcttgcaatcagacctcaaagccccagatcccctcagct

SEQ ID NO: 174620 - DNA, 122 bp, Homo sapiens
caacgccttggtcctgcagccgctggcagtctcccgcttgaacccttcgaagggctcacacgaccaggctcgtcagatggctggtcctgaattatactctagaaatgtggtcatagaagctg

SEQ ID NO: 174621 - DNA, 122 bp, Homo sapiens
gtggggctagggggacagacacagaaaccccatacaggaacgaggtcccaacagggcagacgtggcagacccagttcagtcccagccagtgtggaagacaccaaggggggtgttttatgggg

SEQ ID NO: 174622 - DNA, 122 bp, Homo sapiens
gatagcgagtttgagaagccggcaccctccagcatgagtggtgtaggctgagagaatgcccgggccccatagggaaggtcccaggaagtctgagatcaggactagatggggaagaaaccctg

SEQ ID NO: 174623 - DNA, 122 bp, Homo sapiens
tggagtttgtcacgctatgattcagcccgtgggagtgattttcacactgcctgtcagcttcgtgcgatagttaaaaacaatttgcaagtgacatagtagagccttaaggccataaataggaa

SEQ ID NO: 174624 - DNA, 122 bp, Homo sapiens
agccgagggagggaaggagaggaacgccggcccactagccgaccccagcgcaacccagcgcggttcccagacgctgccgggtaactgatgccgccggcacagcttctgttctcacttgtgga

SEQ ID NO: 174625 - DNA, 122 bp, Homo sapiens
cgggctgcctctgggccgtacagaaatatggcgacctcctgacagccgctccttgatccccgcccctaattaattattggcgtatgccataggccaggccgccgagcgggaaagcgcggggg

SEQ ID NO: 174626 - DNA, 122 bp, Homo sapiens
tcttctcctctcctccccatgacccacagggtctgtgtgaagagaggccgggctctgggacgttcagagaggaggattcagcgttttgttgctctgggacacagcttggtcactccgggaaa

SEQ ID NO: 174627 - DNA, 122 bp, Homo sapiens
gggctgaggagggcttggggagggtctctgaggagccccgaggtccccggcaggcggggtcgaggtctctggcgtccctggggtctgagggtgtctctggggtgccggggagagtctgtgac

SEQ ID NO: 174628 - DNA, 122 bp, Homo sapiens
actggagccacgaaagcaacagccctgggcagcccagcaccatcctgggttccctgctgccggcgccagccccacgtacccccgaccacctcagctcctggccctcagcctctcctttgcaa

SEQ ID NO: 174629 - DNA, 122 bp, Homo sapiens
aggttggctggccgcctcaccaatcacagagcggcattggaagatggggccggggcgtggcggagagaacccaaactccgccccacctgactccgcccccaactggagggaaacaagcgagc

SEQ ID NO: 174630 - DNA, 122 bp, Homo sapiens
gctctgcctcgcgattctccggaatcgtacctcttcgtgggctcgcgccagcgctgtgagcgcacaattagtttaaactatggccccgccccctcgcgctgccctctgattggcctctgtcg

SEQ ID NO: 174631 - DNA, 122 bp, Homo sapiens
cctctgggctgacagcctcctcctcctccagcttgacttcccccagctgctcctgctccacggcagctgggactgattctccaagcatccttcactgcggggatgcctccctaacgccagcc

SEQ ID NO: 174632 - DNA, 122 bp, Homo sapiens
cccgggggccatggtgtgcagggccccgctcctggaggaggctgcctctgcggggcaagacgcgtggagcccgaggaggcgcgcggggagcgcgggcggcctggggagcgggcggcggagtt

SEQ ID NO: 174633 - DNA, 122 bp, Homo sapiens
agtttgtaccaattcacccacccaccaatgtgaatatctaatattgcctgcctgtctgtacgtgtgtactggtatagcattgtggttttaatttgcattttccagtgcctaatgaaataaag

SEQ ID NO: 174634 - DNA, 122 bp, Homo sapiens
tcacaggggtgttcttggtatcgctggcctccacatttcgttctctccatgccaagtgcacgcagtgggacccatgaagctgcacactttcactgccatcatgtaagccgctccgaccagaa

SEQ ID NO: 174635 - DNA, 122 bp, Homo sapiens
agctatggatgaaagaatggggccacagggggaacagggaggaggaagctgcccagggagcgggagacagaggagagatgaactctttgtcaaaggcacagacaacttcctgcaaaaacttc

SEQ ID NO: 174636 - DNA, 122 bp, Homo sapiens
ccctgccccgccacagtccgcttctggctgaccccgccggctttcccggcgcaggtactacgagaccggcagcatcaagccgggtgtgatcggtggctccaagcccaaagtggcgacgccca

SEQ ID NO: 174637 - DNA, 122 bp, Homo sapiens
gcctgtcccgggaaaccaccaggacacctctgtgtgcctcccgattcggccgcagatggacggcggcttcagtggtggccccagaggtcacctcatccccatcacacccgccggctccctgc

SEQ ID NO: 174638 - DNA, 122 bp, Homo sapiens
tgagacttagacataaggcacaccatcaagcaaacaccgggtgctccataaatgcagctgcgccctcccgccccaccccactggggagcgtgagtcagctcggtccaggcgaggctgggaag

SEQ ID NO: 174639 - DNA, 122 bp, Homo sapiens
ggcagccgtcgggggatggcactgaggcttctccccccgctgtgtaggtgtacccattgccgttattgttattgtttccgttgtgcgcaaagctcagggcggggctaggggggctgtagtcc

SEQ ID NO: 174640 - DNA, 122 bp, Homo sapiens
gggggccactggccctgggtctggacagacagcactgggctctcagaggtggggtagagtcggtgcaagcagcgggtctgagcttgcagggcgtcagtgcaggccacgtaggggaggcgtgc

SEQ ID NO: 174641 - DNA, 122 bp, Homo sapiens
gcatgggcgcgccactcctggttacctggcaggcgtcgtgcaagtttgcctggggcccgccgctccgagtgtctccagcacacagcatgttgtcggtgactgttctgttaagtaaatgttgt

SEQ ID NO: 174642 - DNA, 122 bp, Homo sapiens
aagacgtccgctgctctgggccaggctggcagcgttcaggctggggcagagacgcggagtcgggcgctggctccaacaggcctggctcccacatcgaagacagctgggccatttgctgttag

SEQ ID NO: 174643 - DNA, 122 bp, Homo sapiens
tttgccttttgctcaaggtcacacagctcaagttcactgggcggctgggactagagggtccgaatattctgcagctatgatatgaaaaaaataagtttggctggagggtggagggcatccag

SEQ ID NO: 174644 - DNA, 122 bp, Homo sapiens
ttcattccggtactgcgtggacggaaagccccgggtagccgacaccacgtccccggctagcgggagagagcgtggaaaaggattacaccaaactgtttaaatccaacgactcctgcttccat

SEQ ID NO: 174645 - DNA, 122 bp, Homo sapiens
ggaggctgtgaaggggtggggaaagggaagatggaacaaggccaagaaagaagggactgacgggtcagggccaccaggtaagagcagtgcccctcgacttgggacaggcagtggcccacagt

SEQ ID NO: 174646 - DNA, 122 bp, Homo sapiens
atgcttcccgcccagcacggtctcgagggtggtggatcccaaaattccttgggatgccagcgcagtcccttcagccacccagtcagcaggtatttattggcacctactggatgctaggcagg

SEQ ID NO: 174647 - DNA, 122 bp, Homo sapiens
ccttcccctggcaagccggaagctccgcacctgtaagtagaggttcaggcttcgaccacgcgcaggtgctgttttctagctccgaaagccaggcactattgatgcagacagacaggtcccgg

SEQ ID NO: 174648 - DNA, 122 bp, Homo sapiens
gaaactgatgaaacacttgaaactgtgcgagactcctgactccttgattattaaaatgaacgtgttctaaaaatggcttcagaaactaggccaactcactagatgtcaggaagatggacagc

SEQ ID NO: 174649 - DNA, 122 bp, Homo sapiens
agcactgaaaggtagaaactgggttagaagagagaggggagcacaaacgcccggagagagcgagccctcgggataccattggctataggctggcctccgaacaactggacggtccaagtcct

SEQ ID NO: 174650 - DNA, 122 bp, Homo sapiens
gtcccgcacgggggctccaccagggcagggatcgtggtgagggtggctcctgggtcccctcgcggggagcagggtctggcactcaccagcgcgcacgactaggacttgttgaattaatccat

SEQ ID NO: 174651 - DNA, 122 bp, Homo sapiens
ctttttctaatattgtctaaaataagtatcctaaacaggaaataccaaaaaaatccccctcgctttcgtgacctacaccggtaagcgtcaggatctttcgctatgcgagaaccttttggctc

SEQ ID NO: 174652 - DNA, 122 bp, Homo sapiens
ctccctgcaggctgagaaaactgtggtgaaggcgggggtctcgccctttatcccctcctgcggtgcctatgggcagcacctgccgtggcgccttggttcgcaggtgtccctcttcacgatca

SEQ ID NO: 174653 - DNA, 122 bp, Homo sapiens
ttcgagtttcgccttaggactgaaggggcctttgttgatgttcggaggagcagtccccgccgaccccttctagttgagctagacgttcgggagggggtgcttggcggaggttgtcccctcct

SEQ ID NO: 174654 - DNA, 122 bp, Homo sapiens
gggggagcgaggggaggagacagggacgggccgggccgcctccagagccgccgtggggcgcgccctgtcccgcacgcctctgacccccgctcagcaaacgaggcccacggggtgggcggcct

SEQ ID NO: 174655 - DNA, 122 bp, Homo sapiens
cttctgggcatattcccagagctgtgaaagcaggcactcacgcagacgtttgcacccctacgttcacagcagcaccattcccagcggctcaagagtccgtcaatggacaaatggatacaccg

SEQ ID NO: 174656 - DNA, 122 bp, Homo sapiens
catattctccacttcccatagaaggccacttattctttgaaaactggtgttcatgtttgccgttcaatgaagtcccttgtcaaagacaaggacggtcaattcacgtgtcactttcactaggc

SEQ ID NO: 174657 - DNA, 122 bp, Homo sapiens
tggcaccaggcagagctggggtggaggactgtgctaaataataatggtagctcctactcacgtggtctgtgctaagttcttcacaagccttccaactttacagagtgagaaactgaggcata

SEQ ID NO: 174658 - DNA, 122 bp, Homo sapiens
ccctgttgtttaagccagtttcacagaccgatgagtttgcagttctcaccagactacatccgtttggacaaattttgttgtgggtcaccaataaaactggatgaagttctcccttcatcttg

SEQ ID NO: 174659 - DNA, 122 bp, Homo sapiens
ggtttccatttaaaccaagtttctcatttcttcacctttttttctctaagaatttggattcgtagacattgacatcccgaagaactgtcaaggaagcaagatatgctttcttcatctgcaaa

SEQ ID NO: 174660 - DNA, 122 bp, Homo sapiens
ggccagagcctgaccgtagccacgggctaacaggctctggaaaagtttccccaggactgccgcaggctcatccgcaggtagactccagaaccacggcccagcaggtcacacgtgtggctgtg

SEQ ID NO: 174661 - DNA, 122 bp, Homo sapiens
tgtttcacagtgtgctcatcatgcccgttttagagatgaagaaaaccatggctcagagagcgcctgtcatttgttcgagtcacaacaaattaaatccaggtctgtctggttagttgtaaagg

SEQ ID NO: 174662 - DNA, 122 bp, Homo sapiens
ccacttttcagattggggaggatgtgaacgtctaagaacagcccccggtgtgagagagtacgtgggaactcctgccgcgcaggcacggggatgggtcccagcaaacgcacggtgtatttcca

SEQ ID NO: 174663 - DNA, 122 bp, Homo sapiens
gcggcgagcgggacctgcgcaggctctacagcgtggatgctcagggcttcctggacaagccgggccgggcagacgagcagtggcggccctcggcggagctgggcagcggggagcctggggag

SEQ ID NO: 174664 - DNA, 122 bp, Homo sapiens
cacagatccagggccaggcccagtccccagcacagatcaaagctgtgggcaagctgacgccggtgagcatttcccagaggaccatgaacgtgtgcgtcttgcggtcagtcagcccagcgtct

SEQ ID NO: 174665 - DNA, 122 bp, Homo sapiens
tattcatgacaaaaagccaaatataacaatagaccaaagggccaactgaaccacagcctccggccagctaaacaatgactaaaatcccagctggaacccaaagcaggctctgtctcctcagg

SEQ ID NO: 174666 - DNA, 122 bp, Homo sapiens
catcttcatcttcatccagtaggagctggattgttgctgaagggttataagtagtttgcccgtatagctgtgtgactcatggactgaagagggatcacactcagacaagattagtgagcagt

SEQ ID NO: 174667 - DNA, 122 bp, Homo sapiens
acttttcaaattaaaatgaagccattttatgaaggtctgtgtcaggagagcacagaaaagcgttccaatatccctgaccaaacgttgtgttgcaagcctgggtaagaatgagccaaattgtt

SEQ ID NO: 174668 - DNA, 122 bp, Homo sapiens
caagagaaaatggcttcatcagagatgtgtggtactatagaaatgcctaaccagggcctgcgcctgggcacaggtctccctggcttgcacgtgacttgaatttggcttgcaatgagggagta

SEQ ID NO: 174669 - DNA, 122 bp, Homo sapiens
tggtcgtcctagcacagccactgctcatctggcagcagcttgaggatggcctcaacgatgcgcttcagctcgaacaccgcgctggactccttggcgtccgtgaagatgctggtcttgtggcg

SEQ ID NO: 174670 - DNA, 122 bp, Homo sapiens
tgccacgggctgtcgggcagctgcgaggtgaagacatgctggtggtcgcaacccgacttccgcgccatcggtgacttcctcaaggacaagtacgacagcgcctcggagatggtggtggagaa

SEQ ID NO: 174671 - DNA, 122 bp, Homo sapiens
acctttgttaaggctgataagagcatctccctgagggttggccagcttccctgagcaaggcggagggccatccagagccggcaagcctggctgtgacttgccacccttcctgcctgctccag

SEQ ID NO: 174672 - DNA, 122 bp, Homo sapiens
agggcagggtgtcaccatgacaaccacagtctgtgctcagcagccacgacgtgagtccgacgccgctggacacccagcgtcaactgctccccccaagcctggggcctccagtaactgatctg

SEQ ID NO: 174673 - DNA, 122 bp, Homo sapiens
tattccaaactctccagcctggtgagtttgaacttggctgccagagttctaggagccaagcgggaagaataccaagcagctcagtaggcatcatcttaagtttcatatggctcttcaatttc

SEQ ID NO: 174674 - DNA, 122 bp, Homo sapiens
gcgcaggccgtcttctacgtcccgagatctgcttgcggtctggaggacctgcaccgggagcgcatagtgtacagggacctgaagccaggaacatcttgctggatgaccacggccacatcctc

SEQ ID NO: 174675 - DNA, 122 bp, Homo sapiens
tttccattcccatccaagtccgggtgggcaggtggctcttgccccttggattgaggagcacgggggtcagcctcacggcccagggtggccggcgccagctaatgaggctgtggtcccgcagg

SEQ ID NO: 174676 - DNA, 122 bp, Homo sapiens
cagccactaggctgcgggctccgggctgtccccagcgtgggagaggctgtcctgctggcccggctgtttattgcagcgatttggatgttccaagagtcacaagggacactgctcacgtcccc

SEQ ID NO: 174677 - DNA, 122 bp, Homo sapiens
tttgttcccctggcgatgtgtacgaggctccagtctccctgcatcctcactggcgccgcccgtctttctgattacagtcatcccactgggtgtggcctggcagctctcagaggttctgatgt

SEQ ID NO: 174678 - DNA, 122 bp, Homo sapiens
ccagggggcatttgtggagggtctatttccaggtagaatcctgggatgcagggatgaaatcgggcagagaccctgctctcaacaagctgatggtctcctgggggtcatcatagctcgggtga

SEQ ID NO: 174679 - DNA, 122 bp, Homo sapiens
tctccatctcctgggacaggtaagtggcacacccttaagatgcccccaagttactttgcccgccttggtggcccccatttggtcaccgggctcactgcgtcttctgtcccagctgagtggtt

SEQ ID NO: 174680 - DNA, 122 bp, Homo sapiens
cccttcaaagcccgccttcttgccgtgtgatgctgcctgggccagcagggcaggtcaccacgctgtctcttcaaagcagctcgctcatgcccacagcgctgggcacaagggcagccacgagc

SEQ ID NO: 174681 - DNA, 122 bp, Homo sapiens
ttaggtagaaactaggaggccaagagagctgccaggagacagagagaagacaggttggagcgtctcccctagcagggctgccttagtggcccccaaggtgttcactttctgggccagatgag

SEQ ID NO: 174682 - DNA, 122 bp, Homo sapiens
aaagattgctgtaaccagaagtggacgagcatttcggggaggaatgctccccgcacaagccgaggggtctcccagactccactttggtgtccctggagtgcccatgccagcgaccttttggt

SEQ ID NO: 174683 - DNA, 122 bp, Homo sapiens
ataattgggcagccagggagagaaaatctcctcaaggtccacacctgctaacattacaaacgttcattgaatgcaggcgccagagagaggcaacttcctcagcccgcctgttaagagacaaa

SEQ ID NO: 174684 - DNA, 122 bp, Homo sapiens
gggttcccgacctcccgctggggacacctgtcccgccgcccggcccttccccgcctcccgcgcctccgccccaggggagctccgggacaggcccacctaggcagcctgccggcgcagaccca

SEQ ID NO: 174685 - DNA, 122 bp, Homo sapiens
ctcccgctcccgggtctcctttggcctggggtaacccgaggtgcagagctgagaatgaggcgatttcggaggatggagaaatagccccgagtcccgtggaaaatgaggccggcggacttgct

SEQ ID NO: 174686 - DNA, 122 bp, Homo sapiens
acactggggaaggtaacaggggcagggacagcagagcacttgagcagccgggggctgaatcgctggccctgagctgccgggacacgccacctcccccagcacacagctctgcgcttctacct

SEQ ID NO: 174687 - DNA, 122 bp, Homo sapiens
gcatgcccccgctcagcccggagaagcccgccctgtgcgccggctgcgggggcaagatctcggacaggtactatctgctggctgtggacaaacagtggcatctgagatgcctgaagtgctgt

SEQ ID NO: 174688 - DNA, 122 bp, Homo sapiens
tcaccacctcccaggcccagtggactcggacccgagcgtcctccgggagggtttctggggcgtggcggctgagcgcggttcggggagacgcggccgggaggtggcagcagcggccctctggc

SEQ ID NO: 174689 - DNA, 122 bp, Homo sapiens
aaggcagggcagctggcggagccccaactccagtgtctccgacgcgcaccctgcacccagcgaggaaagcagaggaacgcagtgggaaccaggaccgatccttcaacctcttcaggagaaga

SEQ ID NO: 174690 - DNA, 122 bp, Homo sapiens
ctcctctctctgctaaatctgctgtcccagttatataagcaattcctctccctgatgctgcgtgacacgagccccgcctcttccagtctgcagaaacccatcagcatggggccagagtcaca

SEQ ID NO: 174691 - DNA, 122 bp, Homo sapiens
aagcccccaccactgcagacagctgtgaccccctcctcgctggcttcccaccggaatgcacgactttggaaggagactgtgtcatccaagaaacattctatgttttccttggtgcgtgctct

SEQ ID NO: 174692 - DNA, 122 bp, Homo sapiens
cacctcccaccccctggggacacagttgatggccattacagacagtcacctcccatgtcccgggcacgcagtcgacagccatcacagacagtcacctcccacctcccaggcacgcagtcgac

SEQ ID NO: 174693 - DNA, 122 bp, Homo sapiens
agctttggggggcaaagcaagcactcacctctctgaagttgccggtgcctgtggctgctgcgggaaagtgcgtggccaaagttttcagggctctgggctctgtctgaatccttgtggtttaa

SEQ ID NO: 174694 - DNA, 122 bp, Homo sapiens
gtgccccaaatagtgtatgctaaggaggttctgaaatgcagattcacagtggagatattacggtccagctgggtgtggctgttgtgaaaaactcttcctagagctcatagtgggctccttaa

SEQ ID NO: 174695 - DNA, 122 bp, Homo sapiens
cagcactgtggctccgacctggcacatggtaggtgctcggtgaatactggtttgaacagacgactgcggcagacggcaagggccactcctgtgccagggcctgccacgccaccgcagcttgt

SEQ ID NO: 174696 - DNA, 122 bp, Homo sapiens
gtcccctgggttttctggtggcactgcagtgacatctttcattattcatgaacaggaaggcgtgctcactttgccttggctatagcatcgtaatccctatttgctgggcagggcagtcttgg

SEQ ID NO: 174697 - DNA, 122 bp, Homo sapiens
ccggaggaggcaactgttgagggttatgtgcccatttaactggagggcagacagaggtcccgtggaggagcggcttggttctgccagggaggagcatgctgcagccgctgtagcttctgtgg

SEQ ID NO: 174698 - DNA, 122 bp, Homo sapiens
actctgggcgatctgattggttcgtttaggcatggaaggcgggaacaaccagaaaagctgcgctctggttggagttatgtcctaatattaaattcgaagaatttcttagtctcacaattggg

SEQ ID NO: 174699 - DNA, 122 bp, Homo sapiens
ccgctcgatgaggtctcgtgttgagatattgtgtgccacaacccccacagtcttcacctccgtgtgtgatgaaacttcccgtggacagccaataaaatgacgtcctctgttattttggatct

SEQ ID NO: 174700 - DNA, 122 bp, Homo sapiens
aatttaaaaaatggtatgctataacgcaacaaatgtctaaataacttaactgtaattagacgggcaaagggcaatctgagaaagtcctagtttccatttgagcacagttttcctcaacaatt

SEQ ID NO: 174701 - DNA, 122 bp, Homo sapiens
atgcatgtctgaccccaaggcagggctggtggcctctaaatcctcccgctagggtttcagcgcctggctgcgttgaaggtatcaccttttctacgaacacctgttctgaacagtgaaaatag

SEQ ID NO: 174702 - DNA, 122 bp, Homo sapiens
cgaggggacggtgggtgggatgcgggcacctgaccttcatcatcgcatctagggcggcgtcgaagaacagctcagacctgaattggctgagtagtcaaagaacaaaggcagctacaggattt

SEQ ID NO: 174703 - DNA, 122 bp, Homo sapiens
aatcgaaaaatggaggccggtccttgcgggagaagttggacaagattgggttgaatcttccggccgggaggcggaaagccgctcatgtgactctcctgacatccttagtagaaggtcagtgg

SEQ ID NO: 174704 - DNA, 122 bp, Homo sapiens
ttcccacgggtgggggcctgggagggggccgtggtgggcgctgagcaggcccagggaggccgcgcacccccggccccctcgccgcccgtcgtccaggcggccccggagccggctgcgggcag

SEQ ID NO: 174705 - DNA, 122 bp, Homo sapiens
ccagcccacctctgcctgcacctgcggtcagcggggtgcagagtctgtgaaggcacctcccggagtgggggctgcaaagatcatggccactgtgccacccacaggggcccaggccggacgcc

SEQ ID NO: 174706 - DNA, 122 bp, Homo sapiens
agtgctccttcagcgcagaggcgtgccggtgtgtccgagaaaacttccgagttaagccgccgctgaggccggaaggagctagacggcggtcgggtaggtgacggcttggttggggtcgctgc

SEQ ID NO: 174707 - DNA, 122 bp, Homo sapiens
cagttggcagcaatcaatagaaaatgctaatttctggtcctggcttgtcttttgcatgcacgagcttcctgctatttgtctgagaaagtgcatacccaggtaaaaaggctgtgctgatggct

SEQ ID NO: 174708 - DNA, 122 bp, Homo sapiens
gggttcccgggatgggttgggagttcccagaagtccggtgaggggctttcggaaagggaccgtgcaccctcctgtgcagaacccggcctcggccaagctgcaggctctgacgctggaattga

SEQ ID NO: 174709 - DNA, 122 bp, Homo sapiens
ctctgttttcacgatagaaataagggaggtctagagcttctattccttggccattgtcaacggagagctggccaagtcttcacaaacccttgcaacattgcctgaagtttatggaataagat

SEQ ID NO: 174710 - DNA, 122 bp, Homo sapiens
cgctgctcggagctggcggaattcatttcccccgaaacacacgccacctccgaccagggccgactccaattctgaactcagcttctgagttctcccatggcaagggtaaattagtgttagca

SEQ ID NO: 174711 - DNA, 122 bp, Homo sapiens
atttcagcccgagtttccttccgggggtttggctgtgagtgtgtgtgacctcccagatggcggcacggttcagatcccatgctccctctgtttcacagctgccagagacagactcagggatt

SEQ ID NO: 174712 - DNA, 122 bp, Homo sapiens
gcccaaactgagcctctgccatggaagcaccttgcctgccagttctcacctcagctgcctcgtcatttcccctggggcttagatgcagggttttgtagaaattcctagtttctatccaggcc

SEQ ID NO: 174713 - DNA, 122 bp, Homo sapiens
ggaaatccacccgtggaggagcgggcgggagaacggggaagaggcaggaggcggccggggcgttggaatcctttcagccctgccgaggttatggtgcctgtttccagcagctctgagcccac

SEQ ID NO: 174714 - DNA, 122 bp, Homo sapiens
attcccaggaagccaggcaggcagacagggagtcggagaagcctgtggacagcctccacccgggggccgggacagccaagcacccgccgccggcagcttcgctggaaggtaggagacggcgg

SEQ ID NO: 174715 - DNA, 122 bp, Homo sapiens
ataccttttcggggtgacgtgaacacagaaccccacataccctctcaggggtgacaggaacgtgggaccccacgtaccttctcggggtgatgggaacacgggacccgcgtaccctcttgggg

SEQ ID NO: 174716 - DNA, 122 bp, Homo sapiens
gaagtgacgcctggtgggtccctcgttcccacagatggcatcagcgtctgggtggccacccggcatcctcttcatctccatcttctgtgctcagatcccatggagctgccgtgggatgcttc

SEQ ID NO: 174717 - DNA, 122 bp, Homo sapiens
gtctgtcacctgcctgtgccctgattgtaccccatctgcaccgtgtctgcaccctgcctgcgccctgtctgtaccccatgtgcgccccatccgtaccctgcctgcgccatctgcgccctctc

SEQ ID NO: 174718 - DNA, 122 bp, Homo sapiens
tgagcatgtgcattaactatcggagatgtgggggagaggaggaagccatgcaaatgagcacggacagccagcagagacgtttaaccttggtgctgctagagtacccacaagtgctaacgagg

SEQ ID NO: 174719 - DNA, 122 bp, Homo sapiens
atattttctttatgatgccattgtataagatcaaaccagagaggagatcctaaatacaggcgagctttgataaagattttactttgacagcatcttcacttggttcgtgactgccttcgcta

SEQ ID NO: 174720 - DNA, 122 bp, Homo sapiens
ccgcgtcggagctttgcgggtcttgccttccagtcgcccccagaagacaaccaattcctgcgcattccgctccgctcaccctccttcccagcttctctcgctctctttccccccattttccc

SEQ ID NO: 174721 - DNA, 122 bp, Homo sapiens
cttctgctctaagccaagcctgtttcaggttccaaggaggttgctccttgcagaagggaacgtgctacagaacacatcagaagacctgaattctatttctggcactcactctgatattctgt

SEQ ID NO: 174722 - DNA, 122 bp, Homo sapiens
tctttcgaggagggaatggactcttggtgaggtgagaataaaaaccacactgtctgggaccgattctagtaccgtcaaaggtttgtttaaaaagctggttgaaaagaactaaaatgcagtac

SEQ ID NO: 174723 - DNA, 122 bp, Homo sapiens
tatctcggactgctgtgctaccagtgagcaagggtccgtgggcgtgggacccactgagcccggcgcgggatgtaatgtcctggtgtgctgtttgctaagaccattggaaaagcgcagtatta

SEQ ID NO: 174724 - DNA, 122 bp, Homo sapiens
taaaattcagggtgtctctctgcctcccatctttgctcaaaccagcataacctaacctcacgctgatgctgtatcaaacagcacttgactccagggttaccttacacataggctgtaggcta

SEQ ID NO: 174725 - DNA, 122 bp, Homo sapiens
gagcaagggcagagagctctgcatgccagctccagtgccaccagtgactgctagcgcattcgtgggcaggctgttatccctcaaggcaacctcctgtagggtgagagctccctagtggggat

SEQ ID NO: 174726 - DNA, 122 bp, Homo sapiens
gctggttggaaccggctgaaagtggctgtagcaggacccaaacttcctcgcagtcagctccggagtctgaggacccaaatcctccttggcccaggtgggctgttagtcccctcgagccataa

SEQ ID NO: 174727 - DNA, 122 bp, Homo sapiens
gcgggagtcctcgtgtcccctgcgcacaacacagacagaaggctgggtccacccagtgggcggtcgggtgccaggccagtgcttaccccgccatgttttcaagcccgaggccagctggctgc

SEQ ID NO: 174728 - DNA, 122 bp, Homo sapiens
ggacgcggcctgtagagggtcggggactcgggcttctaggagttaaactggacccctctccgcacagcggcccgtttactgtcccgcactgtgccagacgccttgggtgacactcagaggtg

SEQ ID NO: 174729 - DNA, 122 bp, Homo sapiens
aatgttctcaaaagtaattaagaaactttaagacacagcttctactttttccccgtttagcgtagctgtttctctctgctagtcagagtttggatctgcctctgggagcccaagtgcaattg

SEQ ID NO: 174730 - DNA, 122 bp, Homo sapiens
agctgagggagctcagggcaaaggccaggctagcgcggaccggaaggggccgaggctgcacgggcctctgccagaacgctcaggacatcccggcctgggtttacaacgctgttaggaaaatt

SEQ ID NO: 174731 - DNA, 122 bp, Homo sapiens
cagctctggcggcgcgctggaggggaccgggaggggcacccttgtagaaccagtccctggcgccctgggatcttctcagtgccctggcgctgtgttgtcggtcactccacagatattacagg

SEQ ID NO: 174732 - DNA, 122 bp, Homo sapiens
cgacccagcatcgccggggcaagggcctggcgctcgggccacggtgtcaggttccgccagcgcaggttcgccccggccctgtgctgagttaaatttagagactggaacctggtcctgtcccc

SEQ ID NO: 174733 - DNA, 122 bp, Homo sapiens
actttcctgccccactatccaacggcctcagtttttcctataataaaccaagtcctatgccgtggacttgatcattcctcacagcccacttccttgggccaaagcctaaaaaggttagcaac

SEQ ID NO: 174734 - DNA, 122 bp, Homo sapiens
agaggcaacgggaaacgtgggggctctgagctccaatgcccaaggctacgttcgttcgttcgtacagtaccaggagaccacttcatgtttgtgggagggggattcccagcctctccttccat

SEQ ID NO: 174735 - DNA, 122 bp, Homo sapiens
aatggagaaatggggcagacaccacctttagcaagcgatcaagcttcacattaccaaaaacgggacaaactgacattatccaagtgtgttctgcaggaaaaaagaaaaattaacctttatct

SEQ ID NO: 174736 - DNA, 122 bp, Homo sapiens
ctcggggtgtccccagtttgggagggagacacgcacagtcgctcccgtccacactcctctcgtgtcctggctccatgactgggagtctggggaaagaagaatgggtgtctgagacctacccc

SEQ ID NO: 174737 - DNA, 122 bp, Homo sapiens
tgtgcttgaaagggtgtggtgctattgggtcctactgtgttccccaggtcccgcagcccccggaagccaatagactccctcagggactctcggtccctcagctactcgcctgtggagcgtcg

SEQ ID NO: 174738 - DNA, 122 bp, Homo sapiens
atctcaagggaggaagtgaacaattacctaatgagcttgctgtgccttaagaagagggagcggtaactggcactgagatctggggcttgacgttgactcctagccctcccactcagtacatg

SEQ ID NO: 174739 - DNA, 122 bp, Homo sapiens
gttttttatgtgaatatgtttcttagtgaaattttacattcctttgttttggaagattggcgatatttgaagagttaaaaatagtacagaaatgtgaagtttggtatctctaaatgtgttgt

SEQ ID NO: 174740 - DNA, 122 bp, Homo sapiens
ttgtgagtcagcctgtgccacctctgaggctgtgaaatctgcttcaggctctaggctgtacgcatcatagttctccctgctggtccagtcttcatactggatgccaatccattactgagccg

SEQ ID NO: 174741 - DNA, 122 bp, Homo sapiens
ggcaccccttctcccattagaggatgtctttgtgggggtaagtgcccgacgaggaggcctcgccccaacacagtgtgtcaagctggctggtgccacccactacccgctagaccggtgctgct

SEQ ID NO: 174742 - DNA, 122 bp, Homo sapiens
ctgcctggccctggctgttccaacgatggacttccttcctctttggccataaaagtctcccggaaagccttcccacagaggccccgggggctttctcagggaatgtgtgagtgtgtgctcac

SEQ ID NO: 174743 - DNA, 122 bp, Homo sapiens
gtgacatcgtccccttctgagatctgaggacattgatacccagccacctgccggtgacatcgtctccttctgagatctgaggatatggacaccaaaccacctgccggtgacatcgtctcctt

SEQ ID NO: 174744 - DNA, 122 bp, Homo sapiens
cctccgcattccttggtgccactgaccacagctctttcttcagggacagacatggctcagcggatgacaacacagctgctgctccttctagtgtgggtggctgtagtaggggaggctcagac

SEQ ID NO: 174745 - DNA, 122 bp, Homo sapiens
cccaagtggacgctcggacaagggcaggaaggtatttgctgattctccttctccatgtgacgtgtctctcaacccacaccagctaggggagcctcccgcagcttcagttcccctttgacgcc

SEQ ID NO: 174746 - DNA, 122 bp, Homo sapiens
tcctttcgtcatcacctggtctaggagggacgcccggggagaccgtacgtcactgctctgcgccggaagaccctattttcaggttctcttccctccattcctaccccttccccggtaccata

SEQ ID NO: 174747 - DNA, 122 bp, Homo sapiens
ctctcttaactgatttcctctgcattctctcacctcccgggctacctcccacttcaccatcgcaaaacgaacccgatatttgcaaaacttaggaaaagacacaccggcgtgcggcccactgt

SEQ ID NO: 174748 - DNA, 122 bp, Homo sapiens
atccagccgtcggtgagcgagctgtcccgggccgtgcggaccaacatcctgtgcaccgtgcgcggctgcggcaagatcctgcccaacagccccgcgctcaacatgcacctagtcaagagcca

SEQ ID NO: 174749 - DNA, 122 bp, Homo sapiens
atcactccaactctgtggagctggtggtgctgcctggtggggctctctctttgcccgggacgtggaacaactttcagctggaggacgagagggaatagtgaagctaaaggttgcttttctct

SEQ ID NO: 174750 - DNA, 122 bp, Homo sapiens
agtcctggagtaggtcttatggaaggaaggggtctagggaacagaaccgtaaagaagcgacgtcacttcctggatgatgaccacacgaacagaacttagaactctggtaaccaggcacccat

SEQ ID NO: 174751 - DNA, 122 bp, Homo sapiens
ccaatacaggataactacatgtggttcagtcctggagaagcacaatttacaacagtgcttcgaggcagtataacacattggaaagagcaagcttttgatatggatagatttggattgaattc

SEQ ID NO: 174752 - DNA, 122 bp, Homo sapiens
cccctcaacgagagcctgcagcccctgggggactatggcgtgggctccaagaacagcaagcgtgcccgggagaagcgcgacagccgcaacatggaagtacaggtcacccaggagatgcgcaa

SEQ ID NO: 174753 - DNA, 122 bp, Homo sapiens
ggcgagcaagggagcaggcggtaggggttctgcggcgatgggcgggctaggggcggggcgcgggtgggctctaaaagtcggtgcccactcgctccgcgctgccgcggcaaccagcacacccc

SEQ ID NO: 174754 - DNA, 122 bp, Homo sapiens
atcgatgcccacagggaaatcacctgatgggcaccggtgccagcctccaagcagctaacgcggaaaagcccgagggagtcaggagctgctcagggccccggcggccagagtgagggtccttg

SEQ ID NO: 174755 - DNA, 122 bp, Homo sapiens
ccacgagctcctccagcgcccggggctccggcgtaccctacgcctctgcgctcgcggccccgccccgggcctcccgtggggctttaatgacataagcaactttcctcgcgcaccccccgccc

SEQ ID NO: 174756 - DNA, 122 bp, Homo sapiens
agacacagaaaacagaagccagaggaggctctcctagcgggccgttggcctccttgggcccgcggaaggcggccctttgggagcgcctctctgcaccgtcccagctccgctcccctctcggg

SEQ ID NO: 174757 - DNA, 122 bp, Homo sapiens
tggtaccaattctctgtattagtctgttatcacactactccaaaaatacaacctgagactcggtaattcattaagaaaggatgtttaattgactcacagttctgcatggttggggaggattc

SEQ ID NO: 174758 - DNA, 122 bp, Homo sapiens
tatgcacctgttcttttcacctatatccatcctgcgttagagagcttcatggaccaggaccggattgttgccatcatgtacactgtggtcactcctgtactaaacccactgatctatacttt

SEQ ID NO: 174759 - DNA, 122 bp, Homo sapiens
gaggaaataaaaaaaacaaaaccaaaacaaacaaacaaacaaaaaccaaaaaacaaaccacgagacccggatgtaggcaaaaactacatttcccagaatacctcaccccctctccactatat

SEQ ID NO: 174760 - DNA, 122 bp, Homo sapiens
cctatgaggtcagttcagagatccagacccaggtggtctggctctagagtctaaacaggccgagtgcagtggctcacacctataatcccagcaccttgggaggccagaggcgggaagatcac

SEQ ID NO: 174761 - DNA, 122 bp, Homo sapiens
tgtggcccatagaacccttcctaactcagaacagagagtacatgtctgaagtctaatcaacgtgacaattactccctatggtttagcattctcaaattcaagtacatttgtgaaaggaggct

SEQ ID NO: 174762 - DNA, 122 bp, Homo sapiens
tgcagcagcggtggcaaccgctgccctgcccactgccaccaccaatgaggatcccagggtcggccgcataattcacccggtgggccctgcagcttcaggagagtgagaaaggtccactcagc

SEQ ID NO: 174763 - DNA, 122 bp, Homo sapiens
agggggttagctgcgcctcggattgatctgcgtcgtgcctcgataggcagtaaccttcatcgctgcggttgcgtagcgtttacccatgcgccatttgaacttgtgcttaagggatttatctt

SEQ ID NO: 174764 - DNA, 122 bp, Homo sapiens
ggtgggtccaacgggcttcgagtgttcgggagataatgcacacttcgcagtggatcttctcggggccccgagcgttgcccgcccattaggtggcgccggtcccctcgaacaggtcgctcaac

SEQ ID NO: 174765 - DNA, 122 bp, Homo sapiens
gaccgcggcctcccgggcggccggcacgcgaagggtggagggggagggggaaggagcgggcgggggagggaagaggaaaaaagccagagctgcagcaacagcgtctcaacctgggatgtgca

SEQ ID NO: 174766 - DNA, 122 bp, Homo sapiens
ccaaacaatctgagctccaaaacacttttctggtcctgcgcgtctcggatgaggaacacgcgggcagggcgtgttgttttgtggaaaggatctcatgttcatagaaagctgcacccgcagca

SEQ ID NO: 174767 - DNA, 122 bp, Homo sapiens
gcttcctcagctgtctccacggcggcatcgtctgggccaagggagaatgactaagtgtcccgcctacacccggtgctaatccagccaaagcagcctgttccgacatccctccacttgccttc

SEQ ID NO: 174768 - DNA, 122 bp, Homo sapiens
gcaagagtcgtctctctaaagagggtgcctccaaggggcctgccacaactcagcatcagccgtccttgccatatgggaatgcacttgtggtgtaactagatcttccattttttcaagagaag

SEQ ID NO: 174769 - DNA, 122 bp, Homo sapiens
ctgggcttcttatgatcactgacatctgtaaaataagaatggtagctgtaaattttgaaacgatgaaaaataaccttgtagcaggaatcaaagggagagtttgatctaatgttggccagaat

SEQ ID NO: 174770 - DNA, 122 bp, Homo sapiens
gccagcggaagttgagtcaccatgtacgctggccggcccctcctggagctggcgtgggttcggcaccaggcagcacagagggcccctgaggacatcaggctctgcccagtggggagaaagtg

SEQ ID NO: 174771 - DNA, 122 bp, Homo sapiens
ccccgcacaccgacttgcatgcaattatcatagcccgagtgctcctccgttgagagacttcgcccccgagaccgctgactgtgaatgacaaatcaaaagtcagggttgcagaatcagccgga

SEQ ID NO: 174772 - DNA, 122 bp, Homo sapiens
tttaatgttctttaccagaaaggaaagaatcacttttattttggatcgttctttatggaacgagtatgtatttgcttagactgcatgtgtctaggtgaacgtatgtgaagagtatctttcca

SEQ ID NO: 174773 - DNA, 122 bp, Homo sapiens
tcacatgggagtctttaaatcaactttaaatcaactttttgactacatataggctgggtgcggtggcgcaagcctgtaatcccagcactttgggaggccgaggctggtggatcacttgaggt

SEQ ID NO: 174774 - DNA, 122 bp, Homo sapiens
aggggttctgcattcaggggagacaggaaggcaagaacccttctgcaagggagccaagggcgcctagggctcccagaggcagcagtgggaggttgtggctaaaacatggacatggagccaga

SEQ ID NO: 174775 - DNA, 122 bp, Homo sapiens
ttgaaccaacaccctgaattgacctgcctattttaaagctatagctcatggcaccacagacgtaaaaaccctgggaagcctggtgcagggtgactcaagactagctgtcagtttcacctctg

SEQ ID NO: 174776 - DNA, 122 bp, Homo sapiens
ggacttgcaaaatgttgccaaaatagtacgaagagttccccagtaccctcgaagtttcctcgactgtttcaaagctggctgcaggcccaggctcatgagactgggaagaggacaggctgtgg

SEQ ID NO: 174777 - DNA, 122 bp, Homo sapiens
aaacacgccgaggtcctccgtccccccactagactccagagattacgaggaaactgcttgcgttattttcccccctgtatgaattgtagccagcagagactgtggaattgatgtattgctgt

SEQ ID NO: 174778 - DNA, 122 bp, Homo sapiens
acagactgggtatggctgagaggatgctcaaaacatgcttattaaatgaataactgaccccgggcccttggccccaagcccctgtggcccctacactggctagctccttgggctcctatggg

SEQ ID NO: 174779 - DNA, 122 bp, Homo sapiens
cgcggccggagtgcagcagggccatggtggaccgtaggagggcagtgggcagccgcaggacggagcagagggcgagcggacacacacacagggaaccggctcctgctgaaggtaaggacagg

SEQ ID NO: 174780 - DNA, 122 bp, Homo sapiens
atggttttgtgatccttcccaccccacctccttttctgccctttacctgtttcatgacgccgaaacatgcatgagatttgggttgatgatcatctacgagaaaagaggcaccggggatgtga

SEQ ID NO: 174781 - DNA, 122 bp, Homo sapiens
gtgcgacgctgggcgacgcgccaagcccacccttctccggctcatcccagccagttactccgcgaaaactccggtgcggccagagccagcgcctccagccagctcaagacacgtaaggaaaa

SEQ ID NO: 174782 - DNA, 122 bp, Homo sapiens
aagcttctacttggaagtaacacgtatggaggctcccagggcccctacagtctggaatcccgcccgtgcgagcctgagcgcctttcctccctccttcccttccgcaggcgtcctcgccctcc

SEQ ID NO: 174783 - DNA, 122 bp, Homo sapiens
gcacatacacacacacagaagcaggcagtgacagtgaggtctgcatacatgcaatagtggcggtgaagcaacaggatctgcatacacattccagtaacacagtaggggatggccgtgggtga

SEQ ID NO: 174784 - DNA, 122 bp, Homo sapiens
tggatttgaaaccactttacgctagcgatctgggctactgcttataatttcaccactgcacgatgcaacgttgctgcaatagacaggccggggtgagccagaactggcacgattgtgtgcaa

SEQ ID NO: 174785 - DNA, 122 bp, Homo sapiens
agatgcttagtctacagggaggacagcctgtgaaacagctgcagctgctgccacgacccacggcgttctgcaggacggaggagcaacgcgtcagcacacgtcccgggagtgacgtgggaaga

SEQ ID NO: 174786 - DNA, 122 bp, Homo sapiens
cacatggaccgacagacgaaatccctcaggagtgtctctgcgccgacgccatggcacccacgaaaagtgccacacataaagtcagtctgcaaatgccaacgttacccagtcttcatgtcaca

SEQ ID NO: 174787 - DNA, 122 bp, Homo sapiens
gaaatctgttatgaggggtgccacgctcaggggtagggcccagagtaggaacatgggggccgagatctgcaccaccgcatagaccctggtggccttttgctgctgggagcagcacaggaatc

SEQ ID NO: 174788 - DNA, 122 bp, Homo sapiens
ctcttttctttaagctcagtttcctcatgtgtaagatgtagatcataatatccatgtcagcgtccttgtgaggattaggtgaaaggagtgtttaaagcacacagcaggatgaccgcatacta

SEQ ID NO: 174789 - DNA, 122 bp, Homo sapiens
cactcactcgcgagcctgagtgaaaggctcaatctgtctgtgtgacagaaataggcctggcgcgctcgggaggaatgctaatcgcccgggcctggcccggctttgtgggccggctgcgataa

SEQ ID NO: 174790 - DNA, 122 bp, Homo sapiens
gaaggaagtgcctggtgggaagggctgatgccgcatactcggattgctgggttctctggccgcccttgcgcccgccctcgcgcatgggatcacctcgccgggatgagtaaaccctgccctgg

SEQ ID NO: 174791 - DNA, 122 bp, Homo sapiens
tggagcgagtgtgcgagtgatcatgagtgtgagcgggtgcgagcgctcggcggggctgaccgtcacgttggcggggccggcggggccaggcagtcttctccgcgtccccctcctcccgctcc

SEQ ID NO: 174792 - DNA, 122 bp, Homo sapiens
ttcctgcctcttcagctggccacacctcacactttgctgaagtaggtggccacctccttacgcggaggccggggcccacccccagcccagccgttgcccatcagcggtggctcctcctggcc

SEQ ID NO: 174793 - DNA, 122 bp, Homo sapiens
cgcctgtagcctcagctactctggaggctgagatgggaggatcacttcagcccaggtggtcgaggctgcagtgaaccatgatggaggctccagtgagccatgattactccactgccctccag

SEQ ID NO: 174794 - DNA, 122 bp, Homo sapiens
gggcggggactggagggggccagccactgggactgcctgcccatggggcaggctcagggccgttgtaaatggccgggctgccaggtaggaggtacagaccaggccgtgctctgtcccctgca

SEQ ID NO: 174795 - DNA, 122 bp, Homo sapiens
acccaacgaatattaatgacctgcagcctccacccacccgcaaacataatattatgtgtacgtgcttaccggttagcttaacagacttgccatcataaattcctttttcactgcagcgccac

SEQ ID NO: 174796 - DNA, 122 bp, Homo sapiens
ccaaaacctcaggaagtgacttggcttctccccaggggccagctctgcataccaaacatccgggtcacttctgccaacactcggaaaccctgagaggtgtcattgcctcgtccccgcacatg

SEQ ID NO: 174797 - DNA, 122 bp, Homo sapiens
gacgcagcgccatggccttgtcttgctggcggcggggcggaccctcttcgacgggcactccgggacggcatcttggtccttggaattcagcctctgcctggcagacggagggagttgccagg

SEQ ID NO: 174798 - DNA, 122 bp, Homo sapiens
aacagagcacgtgggcaagaaaccgcatccctcaggcttctgccacacatgatggttctgcgggctgtgattgccaagtcctgtgttttccacactgagcagtgagtagcagctgccactgt

SEQ ID NO: 174799 - DNA, 122 bp, Homo sapiens
tgtacatgtttccagaaagaagacccataatcttcagtctaaatctgactacctaggctgcgtttcttagacttctttattagaatgcaagttttcagttaccacattttctgtttaaagac

SEQ ID NO: 174800 - DNA, 122 bp, Homo sapiens
gcattttaattcagactagccacgtttcagcgctcagtagccaccatagctaggggtcaccgtattgaacagtgcagggctgcagctactagcggagggctcctgcgacggacacaccgggt

SEQ ID NO: 174801 - DNA, 122 bp, Homo sapiens
gtccaagaggcacaaggacagaatgtagtcggagctcctcctccttctacggccagctaccgactgaaggctgctggccctggccgttgcctagtaaccacaaaacctcctatgtcacctgg

SEQ ID NO: 174802 - DNA, 122 bp, Homo sapiens
tgctatgcttctggcagcaggaatcagagaagcagtaactggatccagctgagggcctggcggccaccgagggtacgggcggcgatcaggttgcggccgagccgtgagcgttccactggacg

SEQ ID NO: 174803 - DNA, 122 bp, Homo sapiens
ggccggtaaagtgtggctgttagtgagggcacgataaactgtgattacaggccatgatgccggaagtcacctgatatcaatgctgacatcctaaccttccccgaagtatcagacacagtata

SEQ ID NO: 174804 - DNA, 122 bp, Homo sapiens
ctgtcactcgggggtaagggggcgggacctggagccctatccattcagcggcgccgttgtcgagcctgtccaatcaggcgcgcagccgaaaaagggggcgcacttcctgtgttctgggctgg

SEQ ID NO: 174805 - DNA, 122 bp, Homo sapiens
cacacagccgaggccgggaccaagggctgcagaagaaacagcacagccctgcgctgcttgcgaacaagctctagcgggggacggcagtagatacggatgctgcaattcatatataaagggag

SEQ ID NO: 174806 - DNA, 122 bp, Homo sapiens
gcttctgaacattgatgcttcgtgtctcttgcgggggtggggcattaggaggcctcttggcgaccgcggggggagggagcacgaagtccaggggcggcgggagctctgggtcgtccaagggt

SEQ ID NO: 174807 - DNA, 122 bp, Homo sapiens
ggctcaaattatcctcctgcctcggcctctcaatgtgctgggattacaggcgtgagccaccgccccctgccagtatttcatagggttttgtgtggttcaatgataccttacatgggatactt

SEQ ID NO: 174808 - DNA, 122 bp, Homo sapiens
gtaacaatattgagattctagagttcctaaaatctttagactcaaatttggagataacagcgtacaaactagtacaaaagcagatatgcaaacaataattaggtaaaaagggaactggctac

SEQ ID NO: 174809 - DNA, 122 bp, Homo sapiens
gcgccttctgagtcgagtagggctttaggtggcccagtgcgtggacgcttacttcagccccgtgggactttcctgacctcgcggacacaggggcggggccgccgagggggactggctgcggg

SEQ ID NO: 174810 - DNA, 122 bp, Homo sapiens
ctggcctcggggcccgcacgcagtcccggctcgaagcgccccatgcgcccggcggggatccgcaggcagggctggcggctccctctggctgctaccctcgcgccctcttcgcgcctccctcc

SEQ ID NO: 174811 - DNA, 122 bp, Homo sapiens
cagccccgggattggctcctgccgaacttcgccatccaatgggaaccttagtctcttttacgtcactgatcaccgggcaaatccccagacagccgcgggcggtggggcaccaggggcagcga

SEQ ID NO: 174812 - DNA, 122 bp, Homo sapiens
ctttgaactcaagcaagtggacactagctcattgaataaccatgagctaagtgcttcacacggattactgctttcatcctcactaccaccctaaggaaaaggagagagggaaggagaagaga

SEQ ID NO: 174813 - DNA, 122 bp, Homo sapiens
tggacgaaaccactccagttttcggttcgatgaaaaatttgccatgctcattcccgtcttcgatgctgtaggagatttctgcattggggccctcatccttgtcggtggctatgacgtgatag

SEQ ID NO: 174814 - DNA, 122 bp, Homo sapiens
accaggctcccacgcccaccacacagcctgtagccccggcggagctatgggctctgactccgcctctttccaaatccggagtagttcgtgccacagtcgtcctcggaaccctgtggcccctt

SEQ ID NO: 174815 - DNA, 122 bp, Homo sapiens
ctaacctcggaggccgtaggaacgggcctgtcgaagtgcgcctgacaggtgaagggggcgcggcgggccgggctgggcagccgcgaggtgggcgagctggcaggggtgcttgtggccttggg

SEQ ID NO: 174816 - DNA, 122 bp, Homo sapiens
gcttgcaccctgcacgtgctgccctctgactgcagggtgccggcagcctcctccgacctccgaagagtggtcattgatttgtccttcaggcctcatccactgccgcgacccccaccccgagt

SEQ ID NO: 174817 - DNA, 122 bp, Homo sapiens
ggtactcctgcatgaggacccagagggtcagggtcggggactccttctgctgcaggacagcgctgaccccaggcttcttacccgcccccgacctgttacccggcgacagtccccgccgcccc

SEQ ID NO: 174818 - DNA, 122 bp, Homo sapiens
atgactttactgagcttcgtttctcccatatggcctcctggatccttctctcaggctccacgctccccacacagttggtctaggtgtctcccacccctaacccaacctgggtcaggagccct

SEQ ID NO: 174819 - DNA, 122 bp, Homo sapiens
gttgtggttactgcaggatccagcatctttcccaggcagaggcagctgggcatgctccatcggctcccccggggatttcagggccacgtgactctccctccccaagctgtcacttaggatca

SEQ ID NO: 174820 - DNA, 122 bp, Homo sapiens
gcccacagattgaaaaatgcctgcacagccatactgtcggtggagaagaggtgagctttgcgccacgggaaccgtgctgacgtcccgagtgtcagcggaactctcacctcctaattgtgtcc

SEQ ID NO: 174821 - DNA, 122 bp, Homo sapiens
tgctgccacttgcatgttggccttgcacattccaccataagttggcaagcgtaggatcctcggtgacctcagactcagcgccctcacctgcaggctggggtggggttggcggccccctggag

SEQ ID NO: 174822 - DNA, 122 bp, Homo sapiens
tggtttgggcgatgaagaagtaacaggtcagcatgatggtgaagggcaccacaaagcccacggtggtggacgagaccccaaggcccacctcccaggcccactctgagctcacagtggccacc

SEQ ID NO: 174823 - DNA, 122 bp, Homo sapiens
gcgcacattggacccgggtgggaggtggtaccgcaggccgcgttgaccggaaagtaggtccgtgtcatcgtctgcgccggaacctgcgggaccggatcgagagctcctccggcaagctgatt

SEQ ID NO: 174824 - DNA, 122 bp, Homo sapiens
atccaacgtcacataggagattgcggctctgagaactcccgaggccccgaccaccctctgcgccgagcatctactgcgcgccgtgctctgtatgatcctgccaggaaggtgctcacaggagc

SEQ ID NO: 174825 - DNA, 122 bp, Homo sapiens
cctacctcacagggctgttgtgaggtgttgtgtgactgcgtgtcctgcaaacgcccagctcggtgcccagccagcggtgggcacccaataaacgctacaacataaatgtgtcttctgcaatt

SEQ ID NO: 174826 - DNA, 122 bp, Homo sapiens
ccccgcgcccaggcagtagggacgaaggccgccacgctggtttagccgaagttggggagccgcgtttctgtcccgatgattaaggctcccttctgacccccactgcaggagttgtaggtctg

SEQ ID NO: 174827 - DNA, 122 bp, Homo sapiens
gggaggaggcctcccggtgcgcacgccccttccctcctgggccgtggaaagcgccggggtcggccccagatgaccttggacgattccctgctcctcccttggcctcagccttttccgcagca

SEQ ID NO: 174828 - DNA, 122 bp, Homo sapiens
aaagattatgtgcgactgatgaagtatggcgactctctctaccgctgcaaacagctgaagcgtgcggccctgggacggatgtgcacagtgatcaagaggcagaagcagagtttggagtattt

SEQ ID NO: 174829 - DNA, 122 bp, Homo sapiens
tcgggacccagcagccgctccacgcggcgggagggcggggaaataagaggactggccgcccgtgcatccagccaagctcctggcggacggatatcggaggcccaggcattcgagggacgtgc

SEQ ID NO: 174830 - DNA, 122 bp, Homo sapiens
gtctactggattatttgtctcagatcttaggggaggaagtggaagagctggagaacagcacgtgttattttagagttataactggaagtatttggaatggcttctatgaaagtttatttcac

SEQ ID NO: 174831 - DNA, 122 bp, Homo sapiens
ccccagacacaggtatggggtccagggagagttttcgtcaccccagggcctatctggggccgggttggcgcagaccgggccccgggtcgggggtgtgggcgaccgcgctgaggggcccgaga

SEQ ID NO: 174832 - DNA, 122 bp, Homo sapiens
ccccaccctcccctggacgcgcgtaacccgctccccgcaccagccccctgcccacaactgcgcaggcccagcaagcccccacaattaaaagcccagcgccgacccttcctgtcaattaggcg

SEQ ID NO: 174833 - DNA, 122 bp, Homo sapiens
ccgaaaaccaaaccctgccttctttcctttggtctgttcttgtctggggcttgtggatcacgtctcctgcctggccatggacagagaaaggaaccactccagacggacgtgagggtgtgtgg

SEQ ID NO: 174834 - DNA, 122 bp, Homo sapiens
ttgggacagaaatctgcttcttccagaactctccaaaggaattcaacagtcaaaagagaccggtttttattctgcagcaaaacaatgatattctgaacctacgtcaactaactgaacatgtc

SEQ ID NO: 174835 - DNA, 122 bp, Homo sapiens
gagctccatccccgcctcccccgccagccgacccggctccttcaccttcccgggggacagcgactccctccagcggcagacaccccgccacgcggcccctggcaaggatactgaccgcatga

SEQ ID NO: 174836 - DNA, 122 bp, Homo sapiens
gaaaggagtaagaggaggagaaagaggaagggaggcagtgggaggagctggcctagcttgcggggatctagcaggactcagccaatgtagctccaggtccctccagtcaccctgtaggggcc

SEQ ID NO: 174837 - DNA, 122 bp, Homo sapiens
acctacaatgaaggataattatactaatttacctcttggggttatatgaggattaatgcacgtaaaatatataaaacaatgactgaagatagccttcagtttatgaggtcagaaagcttctc

SEQ ID NO: 174838 - DNA, 122 bp, Homo sapiens
tatggttgggagaagtgttctccaatagggtaagcggaggaagggggttggggtaggaagcgacagcccagcgctatggctgtttgtaattcagcatggagacacctttcaagagattctct

SEQ ID NO: 174839 - DNA, 122 bp, Homo sapiens
cgcttgtctttcccatccagttgcagcacagacggtggcggggtgtgtgtgtgtgtgtgtcggcggggggacctgtcttgtcctaccccgcagttcacaccctgcaacggggtagttgtttt

SEQ ID NO: 174840 - DNA, 122 bp, Homo sapiens
cctggccttgaacacaacaggtggagccctggcctggaggagccggtggccctgtgggctcgggctgtgcagggacagcgatacacgtgaagaagatgctgaagtgtcggggaggcccctgc

SEQ ID NO: 174841 - DNA, 122 bp, Homo sapiens
ctcggcctcccaaagtgctaggattacaggcgtgagccaccgcgcccggtacctaaaagccgattcttaaaaatatacgttggtaattgtttatgcctactgctgagatcaggatatctcta

SEQ ID NO: 174842 - DNA, 122 bp, Homo sapiens
ctccttccctccagggattcggtcagctggggcaacaggcatgtaaaaaacacatgaggccgcgaggtaacagctctgaaaaatggagtaagcagaagagaaagcaggggtcagggaaagga

SEQ ID NO: 174843 - DNA, 122 bp, Homo sapiens
atgaaagtcaaataagatgtttgaatgcatacgttttttgatccattttattattgatttcgtaggttgttaatctacaatcttgaacttagcaagcatagtattaccaggcaagagagttg

SEQ ID NO: 174844 - DNA, 122 bp, Homo sapiens
tcatagcctcacacgggcttcgctggacacgtccaggacgcagcgccggtgggcaccaggcgttgagcgcctgccccgcgtctgtgctaagacctccctttgcattattgcatttattccaa

SEQ ID NO: 174845 - DNA, 122 bp, Homo sapiens
gattaaatcagtggctatgaccatattatttgcctcttaacactacagacaatgtgtctgcggttactgtactaacagcagggtaccaagcatcctgtggagcattctgtacaggatgatgc

SEQ ID NO: 174846 - DNA, 122 bp, Homo sapiens
tccatgacaacgagggaagggctggggtggggccgagaaggggactgaagtgggaggcggcgccactgaagatggaaggcagctttctttatagacactttattaaaactgctacagcctgc

SEQ ID NO: 174847 - DNA, 122 bp, Homo sapiens
caggcatggcggcgtgtgcctgcaatcccaggcactcggcaggccgtggcaggagaatcacgggagccccaggcagggaggttgcagcgagccgagatcacggcagtacagtccagcctcgg

SEQ ID NO: 174848 - DNA, 122 bp, Homo sapiens
ctctgtcctcgctggagccctgcagctcctcctcgcgccccaaagactcgcgcgccttagcgcttcgccaggttatttgcaagcggctttgcctgtcatttgcataaatggtctacgctccc

SEQ ID NO: 174849 - DNA, 122 bp, Homo sapiens
ggcccacagaagcggaacgcgcgtcgagagcgccctgtccgctcgccccagacagatgcccggttattcattaccgcgaggcctagaggaaagagtggctgccgtcttcctgcccacagccc

SEQ ID NO: 174850 - DNA, 122 bp, Homo sapiens
tgaggtcaaaggctgagtcagtgagagagctgagaatagaacccctgagcacctgacgcccgcctgtgacctatctgttaaaccatacagaacaaggtgtgtgcacataaagcattttttat

SEQ ID NO: 174851 - DNA, 122 bp, Homo sapiens
agtaggcactcaataaatggcagcctgaaaaattcctcatcaaaacatatagagtctccacggctcctttgtcaaacagcaagatccctgtatttgagcaggagctatttgtagcaggtggg

SEQ ID NO: 174852 - DNA, 122 bp, Homo sapiens
acatttgtaataaacagagaaagcatttagaattcgagtgcttttaagatatagcaactccgccagtgactgtgttagcaaagcaatgcttaccaccataacactttctaaggacatgtttt

SEQ ID NO: 174853 - DNA, 122 bp, Homo sapiens
acagcttagtgtgtaagattgagcttgtactgtgtttgcttgttacagcagaagtcaaatcggtctcctgaaatgcagctggtgccgctcagcaatgcatcgccttgtcagggtcctgcagc

SEQ ID NO: 174854 - DNA, 122 bp, Homo sapiens
cccctctgcccggccaccacaccgtctgggaggtgtacccaacagctcattgagaacgggcggggatgacaatggcggttttgtggaatagaaagcggggaaaggtggggaaaagattgaga

SEQ ID NO: 174855 - DNA, 122 bp, Homo sapiens
cctcacctctggctgtaaagcgccggattcccaccagggagggaacgtggggcagatgcgcggctccaactccgccggacaggggtcgctggccgcccctctcacccaacccgggtttccct

SEQ ID NO: 174856 - DNA, 122 bp, Homo sapiens
gttgccccccaatcttctggcatgactttctaggagatgggatgcgttctcccttcagtacgatcttggccttcacctcctactgtctcagaattagaagagagggcattgttccttttgtc

SEQ ID NO: 174857 - DNA, 122 bp, Homo sapiens
gacggccagcagcgggtggagctcatcacaccgtcacactaggcccacgacggccagcagcggggggagctcgtcacactagggggactctggtcctccgccttgaccagcccccacctgcc

SEQ ID NO: 174858 - DNA, 122 bp, Homo sapiens
gacaggtggagctgctgagctaactacggacctggtgggggaagttttccttggctttcacgtggctttggctggggagccctgagaaggtggctgcctcctttttctgaagcctggcttcc

SEQ ID NO: 174859 - DNA, 122 bp, Homo sapiens
gagcggagcggggccagggcgagcgggcgagcgagccggagtgagcgtcaagtgaggggccgcgcgcaagtcgcaggcgttcgcagctattttgggccggtcggagggagcagttgggtggc

SEQ ID NO: 174860 - DNA, 122 bp, Homo sapiens
gcactgggtcccaacagggttcccagctccaggctgcgcccatgaacaagcccagcattgcggacgggcgcgcgcagacgccagcgtggtgaagacgcgggggcgcgcgcgcggcgacgaga

SEQ ID NO: 174861 - DNA, 122 bp, Homo sapiens
ccccggccaccccgccgcgcctctgctcggcgccattggctacgcgaggccccggcttcgcggcctaaatggccgcatcttcgctggcctcgtagaactgtgccggcgcccttccacagcca

SEQ ID NO: 174862 - DNA, 122 bp, Homo sapiens
aataatgtaaaggattttcttggcactattcacattctcttgcctgagtaaaacaagccgcgtttatctgcattggtagcagagggaaagctactggagcaaacgctaagtgaatgggttcc

SEQ ID NO: 174863 - DNA, 122 bp, Homo sapiens
cggtgtcatgctcccctcacttgcaagttaaaacagtgaaatatctctttgaatatattccgttctctcaccagttcatggtggcggcagggtcggggactcagcatttctccctttgttat

SEQ ID NO: 174864 - DNA, 122 bp, Homo sapiens
gttctggaagatgctgttaattttactttaaaatgagaatctggtgttactgtattttatcgttttcaataaaacttcttaagtgttttggacttttgagatatttgtattactccacttaa

SEQ ID NO: 174865 - DNA, 122 bp, Homo sapiens
gtcctaagactttgaagtcggaggcagcattgaaggatcatgtgccctggctaatgggcacgttgctggtcatgacactagcctattctatccttaacacctattaaaatgcaacactagct

SEQ ID NO: 174866 - DNA, 122 bp, Homo sapiens
gggctctgcagagttgtggggccccggcatcagtgggtggacgggtgttgtccctacgggcgcggggcgggcgggctggactggacttctctccccggaccgtagccgggtgtgccgcgcca

SEQ ID NO: 174867 - DNA, 122 bp, Homo sapiens
cttcctcaccccgtctacctttactgagctctgtatcctttaatacccagcctcaaaggccgtctctgctgcaaagccctgcctggttccctgtcagactcctctggctctctctgctgtgc

SEQ ID NO: 174868 - DNA, 122 bp, Homo sapiens
ggtggcatcctccaaccctcctaggacgtgtgggtggccgggcaggcagggcctgcacctcgtggccctggctggtgggaacctcagtgaagggacagacacccctccaccggggcgagcag

SEQ ID NO: 174869 - DNA, 122 bp, Homo sapiens
gctgtctgcctgtccaagaccctggttgggggtgggggtgcgcctatggagatccaggggcgtagtgagaaggcagtggggtctcgctcgcctacgtgcggctgccgaggcggggctgacag

SEQ ID NO: 174870 - DNA, 122 bp, Homo sapiens
tatggaaggaaggagttagtgagttgcagcagccttcggtacttgctgcctgaatattttcgaatgccggtggtgacctacccttgtgctttgtatggactctgggacggtgggagaggctg

SEQ ID NO: 174871 - DNA, 122 bp, Homo sapiens
tctttgttactttcttcctggattttagattccagttcagcattctctcgttctagcattcgcaccttttgcaggtagttagcaaggcgctcgttcaagatttgcatggtctccttctcatt

SEQ ID NO: 174872 - DNA, 122 bp, Homo sapiens
cggcgagggcgcgcggctggtgtccgccccgcccgaaaggtaggggttcggctgtgctcccgcctggtccccaacgcctcaccctccgggagacccgcagcctcccaccactttgcaccttc

SEQ ID NO: 174873 - DNA, 122 bp, Homo sapiens
cactgggaatggatcagatcacagatcctggtccatggctcacaaacagaggaacagggacgatgaagaaagcccacagctgagggacacaggtgagcgctggggaaagggggcagccggcg

SEQ ID NO: 174874 - DNA, 122 bp, Homo sapiens
cggtgtaggccgggctcgcccagggcccctcattcccaggagtcgggagtggcttgggagcggctttttcctgggggagcctccctgatcagctgcccctgcccccgccccccgcgccaccc

SEQ ID NO: 174875 - DNA, 122 bp, Homo sapiens
gtcactgtttcaattttcttttccttaagtttcctaaatgggtttcctttctgggcccttcgactggatgatccaccactgagaatgttccataaccattatgccacatggaagatcagagg

SEQ ID NO: 174876 - DNA, 122 bp, Homo sapiens
agagcaatggctctaagccgtcggcatagcgatccccgtggggtcctcagaataatctcccgagctaggctttactttagtccgtttcactgatacgaaaacagaggcagggatgagtgaaa

SEQ ID NO: 174877 - DNA, 122 bp, Homo sapiens
ggccaggtgaaccacgatgaaccacggcgacggcaggggccagcgtccccgtctccctcccgttctagaagacataaatggtgccttcattttgtgagtctgcgctgagtgaggccgtgagg

SEQ ID NO: 174878 - DNA, 122 bp, Homo sapiens
agcggtgagtattagaatgggcaatggagagggaataatctataaacgtggaactgaactcggggctaaactgccaatgacggagactcacttgcctgaacaaaagtgaactggaagtccag

SEQ ID NO: 174879 - DNA, 122 bp, Homo sapiens
gcccggttccggcccttcacattctcccagagcacccccattgggttggaccgtgtgggacgccggcggcagatgagagcatccaacggtgagtctcagagtccctttcctttcagagctgc

SEQ ID NO: 174880 - DNA, 122 bp, Homo sapiens
gcctcacctcggggaaggagccctggctgtacaccatgagcagcgaggtcttgccgcagccgccgtcgcccacgatcacgatcttcagctccttcctgcccggaccgggggcggcggtctgg

SEQ ID NO: 174881 - DNA, 122 bp, Homo sapiens
ttccagatatgctgcagataaagaaaaagagagagcaacaggaagagtgacagagtgaggcggtgactgaaatccacacagactgaaacgacagagagactcgccaagaggacgattgaggc

SEQ ID NO: 174882 - DNA, 122 bp, Homo sapiens
tccctttctataatttcgatatctttactcattcctacctcttcttctaactaagcacagcgaagacatgacatatacaaacaatactacttcttaagccaaatttgtaaagaatttattag

SEQ ID NO: 174883 - DNA, 122 bp, Homo sapiens
ggcgtcggagagcccagcagaagctagcacctttggagccttgggaacccatgaacatcccgacagtaccctcagtggaagcctttgagcacaagttcacgggaacgaggcaccagatgccg

SEQ ID NO: 174884 - DNA, 122 bp, Homo sapiens
ggggcacttggaaatgtgtgggcatttgttgttgttgtcaccaaaactgggggatgctaccgtcatttggtaggcagggccaaggatgtcctacagtgcagagatcattctaccccaaacac

SEQ ID NO: 174885 - DNA, 122 bp, Homo sapiens
ccgtatgggaagtcaaaagcaggagactcgggtttggatcctcacaccatccctctctgtcgaccttccttgcaagggctgtgtgaactggacaagccacttcacccctccaaggactcagt

SEQ ID NO: 174886 - DNA, 122 bp, Homo sapiens
tgatgcaattacaagatagaggagggttgtccaatccacaaaggaccttatgtgagcaagcgatcggccttttatttgtaaagccactgaaatttgaggtttgttttttttttttttttgtg

SEQ ID NO: 174887 - DNA, 122 bp, Homo sapiens
cacagagctcctaacaatggggcatcagtacccaggcacgatcgatgattatgaacccaacgcgatcagagactcccacatggtgtgtgtgactgcgcgcacaggcgggaggaaaggggcga

SEQ ID NO: 174888 - DNA, 122 bp, Homo sapiens
ttaggttctgtaataagcaagtgtccagtgaaattcaccatgtggaccccaggacgccaccgcgtgatgcttctccacctgcgctctgtcgttcgccgcctgagttaccagccgagcgttgc

SEQ ID NO: 174889 - DNA, 122 bp, Homo sapiens
ccggggagagtaccttgggggcagcgcccctccttccggagggcagcatcccggcgggggcgggggctcggctttgatgccagggcaccttttgtccctggagacgctctgccagccaggtg

SEQ ID NO: 174890 - DNA, 122 bp, Homo sapiens
acatcactatcaccgtcactgacttggggacacccaggctgaaaaccgagcacaacataacggtcctggtctccgacgtcaatgacaacgcccccgccttcacccaaacctcctacaccctg

SEQ ID NO: 174891 - DNA, 122 bp, Homo sapiens
gggtgaggcagttcccgtgatatggggcgtaatagtacccgctgtgcgtcctggtggctccggacccggcccaagcgcggcgggacctccatccgtagccctctcccccaacgtcgccctcc

SEQ ID NO: 174892 - DNA, 122 bp, Homo sapiens
acttctgcccacaacacaagtgtctctcaggtcctaacagagatcctggcccaggagagtcgcaggcaagacgttcaacaaactcctcccttcagtcttccttccgcagcaaccctctcata

SEQ ID NO: 174893 - DNA, 122 bp, Homo sapiens
gtcacccggacctggggctgggcactgccaggggcaaatgtgccatgtggagaggccaagcgggggacaggggcggcttgtccgccaggtggcaccgaggcggctgcgtgtggggcagtgtt

SEQ ID NO: 174894 - DNA, 122 bp, Homo sapiens
cgctccgcgttcccagcgccgggaagtgcgcaacccgagttcagcagttgatccagtcggcgccgaggtgctcagatggattagtgagacgaccaattagagttgcacactgcgccgaggag

SEQ ID NO: 174895 - DNA, 122 bp, Homo sapiens
gccggggctcctctcagtcggctggtggcggaatcccctccctctgcacctttcagaaagcggactcctgcggttaaactgccccccatgtaaagtgccagtagtatcccgaccagagaaag

SEQ ID NO: 174896 - DNA, 122 bp, Homo sapiens
gggaccaggtttaaggttgcgatcgggtcgggatctggggtcgccgtctgctttccccagcggaggagccgctttccggggccgctctgcgcggagggttccgggggcggctgacccttccc

SEQ ID NO: 174897 - DNA, 122 bp, Homo sapiens
tttgtttaaaaacctagccccaggctccagtaaaaatgctgaggttatcgcctgggccagcgggaacaaagccacgagtcctgagagaaagcctgaggagaggccctcctgacagagccaag

SEQ ID NO: 174898 - DNA, 122 bp, Homo sapiens
cacgccggtcctgtgtctaaggtgtctcgggtatgaccgagggggctttgcccgagtgggcgtgcgcctttcctcggaggccgggacgaggggttgtcggcatcgtacccgagtccgtgatc

SEQ ID NO: 174899 - DNA, 122 bp, Homo sapiens
ttatctggggatacagtggggtcctctccctgggaggtggggtcttccactggttttccccgccagggctccagggggcgccatgcgattcagcgctgggctccgctgggggccgggccttg

SEQ ID NO: 174900 - DNA, 122 bp, Homo sapiens
tttgcgttttcttaataaacccacagcaagacctagggcgggggtgaaccacagcgcatgcgccgtagggagcgacctcaacagctagggtgctgtttgggcggggcctgggcggggccaga

SEQ ID NO: 174901 - DNA, 122 bp, Homo sapiens
cacctcggccccccggggctcgggcccgacttattgtgccggggccggcaactcgcgggccggcgggggcctcaccaagtacaactctgctcacagcagctcccgggtgcccaggcccagac

SEQ ID NO: 174902 - DNA, 122 bp, Homo sapiens
ctaaatgtgcacttcaaagattgacgaattgtctatcccactgaagagcagaaacaacaccgagggcatagcaaagttaaatgaattcccattactaaaagcaaacatataaacatctgtaa

SEQ ID NO: 174903 - DNA, 122 bp, Homo sapiens
ggctcctttcccgggtggactgcattcctatcattcctgagagcatgctctgctctgatccgtaacttatctgacctcaggaaggcttgagaacatgtaaagaaagcaaatgagctgggtat

SEQ ID NO: 174904 - DNA, 122 bp, Homo sapiens
ccccgcgcccctgcaggcccagcacccatggctgcggccgcggcgtcgtcctccgggtcgcgctcagagccactgctttatgttcaaaactgaaacgcatagatcatacacattgcgttgat

SEQ ID NO: 174905 - DNA, 122 bp, Homo sapiens
cggcaccccggcccgggcttaggcatcgtcggggacgcataggaccctcgccctggcccccgggcctcccggctgcatctgctcaccgagtctaagatccagcggacaccagggctgcaggc

SEQ ID NO: 174906 - DNA, 122 bp, Homo sapiens
agtttccatgtctgaacagtattcagtcaacccaaggtttcttaaccttggcactactgacgttttctttgttgtgggtgctgtctgtgcattgtaagatgtttagtagcatccctctaccc

SEQ ID NO: 174907 - DNA, 122 bp, Homo sapiens
gtggccctcactgtgcgcactgtcactccccctgcgtggatcaggttaaagtgtgagaaccggatcaacctggattccagactgacagcttgagcaaataaagcaagatatgcgtcagcatc

SEQ ID NO: 174908 - DNA, 122 bp, Homo sapiens
gcgcgagagcgcgtgcgcgagcggtggggctttctcctgagccgtcggagggagccggagcgcttctcccgaggtaagcggcgctccggggcgtccccccagtccttcccatgctgggtccc

SEQ ID NO: 174909 - DNA, 122 bp, Homo sapiens
tttaatgcttgtcccctaaggtctctccagggctcttaggacggtgttagggttaggattcgggttcaggtgcgcctctcggtgccctgcgctggcgctgtgtgcctttgcgagggcggagc

SEQ ID NO: 174910 - DNA, 122 bp, Homo sapiens
ggcaggggtgggggtgcagtgctgatggggatgtgggccacacccgctagctttcctccccgagccagagaagatgttcctgtccttgaacaagagagcagacagttcccccaggcagctgt

SEQ ID NO: 174911 - DNA, 122 bp, Homo sapiens
cccttcggtccgggccccgcccccgcactcgccctcgccccgccgcgacttcccattcgccgccaacccatgtgcgttggtgacgtcaccgcgttcaccagcccggaagtgcgcgtggcggc

SEQ ID NO: 174912 - DNA, 122 bp, Homo sapiens
tgagctgggagtggtgtggctcatgcctgaaatcctagcacactgggacaccgagatgggcggatcacttgagatcaggagttccagaccagcctggccaacatggtgaaacctcgtctcta

SEQ ID NO: 174913 - DNA, 122 bp, Homo sapiens
ctcgcgtggggcgcggacggaggcattctcgctgcccggcacccgcacccaaaagaccctcgcaaggggctttctaaagggaaacttcttgtctgctttctttgtgaacattattttcctga

SEQ ID NO: 174914 - DNA, 122 bp, Homo sapiens
tactcacaaaggtggaggatccatctctcgtgcagcacactaagaatggcaggggcctagcgactcacacaccaccccttttgtaggcctttggttcaatgccggaaagggaagcaaagatc

SEQ ID NO: 174915 - DNA, 122 bp, Homo sapiens
ccccctgccccgttacagggactgggggcacagcagtgagcagaaaagaccgggtcctgccgcatcgacggcaagtctcgctcgcatgcgtgtgcgcagtgggggagcgggcaggccaactg

SEQ ID NO: 174916 - DNA, 122 bp, Homo sapiens
ggagccgaacgggcttcccggggcgcgggaggggcgctgcgaggaaggcgaggcggctaacggctcgcctcaagttgttgctcccgctggcgatccgcttctgtcagtctcgctgctggtgt

SEQ ID NO: 174917 - DNA, 122 bp, Homo sapiens
agaaaacattctcttcttacaaaaaccaataaaacagccaggagacaaggcgagaagcctcggctcccagccgccggatgggattcaggcgtggttcccctaatggtgacatttacagtctt

SEQ ID NO: 174918 - DNA, 122 bp, Homo sapiens
tggcccacccgtgagtgggtagggcctcctgccagggagccttgtgcatggctgggaggacggcaaggctgatgtggacgcagccccgacgtgaacaggaccccacgtggacgggcagtgac

SEQ ID NO: 174919 - DNA, 122 bp, Homo sapiens
cgcaggccttcccctcccccaaaaagtcaggtaaatgctcacctgagccccaaaggctcccgaatggtaaacttgatttcattgcctaagacctggctgatctgtggacagagggggtcaga

SEQ ID NO: 174920 - DNA, 122 bp, Homo sapiens
cttccgcatccttgctgacccaagctgagaacaagaactctggtcctggtccccaggttccgccaaactcctgacaacctgcagctctgcctgaccaggccccgccgccagaccccggctct

SEQ ID NO: 174921 - DNA, 122 bp, Homo sapiens
gcctggctccctcccaaagcttgcgtgcaggttggcggcgggagatcgggtctcgcgatgcgagtgagcgtgtgcgtgcgcggccctcgcgagctcgcgcacgccgcctctaacactacagg

SEQ ID NO: 174922 - DNA, 122 bp, Homo sapiens
gaatccatgtgtgagatggactgggaggaagatgagtaaagatcggccacaacggggaggcggtgagaagcatcaaaatgattaggtgacttcgtggatgtaaatccttttccagggcaaag

SEQ ID NO: 174923 - DNA, 122 bp, Homo sapiens
cagttccagtcacaggcacagtgagtgataacagctggggcagccacgtctccccaagcccggagaggcagatgcctccccatcccctcactagcaggaaccccagaggtatatgactgcct

SEQ ID NO: 174924 - DNA, 122 bp, Homo sapiens
aaagaagacagtcgagtggcgtgaggagacaaaaatgaataaggaagggacggcccatgccgggtcaaatgccaggatctgacgggtggttgctggtcctttgaaaactgcagtatgttttg

SEQ ID NO: 174925 - DNA, 122 bp, Homo sapiens
atttcagtcaagcccactctaccactttttacttatctggttaataatccgaaatgttaccggggttgactcacggaattaaatttttcctctatttttatatcctttcctgttgtggatgt

SEQ ID NO: 174926 - DNA, 122 bp, Homo sapiens
gccaccccttcctctccttcctcctgctgcttttctgagctcatctgatttttccaaagccgctcgcaacacacaaggaaggccggccttgcgtacttgcttttccgtcttggctgcttcca

SEQ ID NO: 174927 - DNA, 122 bp, Homo sapiens
tttcagaagaggaaggcgaggcccggagagggcgcagggtgccctgtggctgtggccacccgggaaggggctgtgacgccctcgtggtgcagggatgagggacgctgcctgcctttgctgtc

SEQ ID NO: 174928 - DNA, 122 bp, Homo sapiens
ctccgccctggaggcggggaaaacacgcccaccacgcgttgtgggcggtgccacggcgcacgcgcattcctcccacagctagtctatccgggtcctgatccgggactctgagatgaagagct

SEQ ID NO: 174929 - DNA, 122 bp, Homo sapiens
gtctgccagctcctgccggggggtaccctctttgaaggttcgggggcggattctgtcccccgggcccggccccccggcccgaagcagccaatccgtgcgcgggtcatcgtgccgcagccaat

SEQ ID NO: 174930 - DNA, 122 bp, Homo sapiens
caaggttatttaggaccctcaaggtttctgagggtttaagttttagggtttctgggggttcgtttctaaaggcttaggattcacctacttcaaggaggcagggttgtgggaattaagaccgc

SEQ ID NO: 174931 - DNA, 122 bp, Homo sapiens
attaagcgtgtgagtgctgcgtggcgtggcctggtcgcatggttaagtgtgtgagtgctgcgtggcctggcctggtcgcgtgttaggcatgtgagtgggctccacatgtgcacgtcctcctt

SEQ ID NO: 174932 - DNA, 122 bp, Homo sapiens
acacacgcacacacacgcacggatccacaaaggcacaggcagcgaggcacagatccccagcgcccggggaacacagccacgcaaacacacacggatcacaaccacggatacacagccgcaca

SEQ ID NO: 174933 - DNA, 122 bp, Homo sapiens
gccccggggcctcacctgctcctgcgggggccggagccggggccgcagccagcgaacccccgccagggttgtcaaggagcgaaacaagagtgtcttagcaaccagcaaggaagtcctgcccc

SEQ ID NO: 174934 - DNA, 122 bp, Homo sapiens
tgtcatctgggttgattttgtctttagcagcttcctgatccctggagaacttccttaaggcggcctcctgtaagctctgccagctgtcgccctctgatttctgatgaactgcattgcaacac

SEQ ID NO: 174935 - DNA, 122 bp, Homo sapiens
ctccatctcaatatagtaattgtcctcgggggcaaatgcgagtccctgtcacgcttttgacgccacagctttggagttgtcatggaaacagttgaacaaatgaagcccaggaaatccctcat

SEQ ID NO: 174936 - DNA, 122 bp, Homo sapiens
gctgcttggctagctgactgagtgacttctactgcaattttttttttttacatgttggcacgtttacagtgttgaggttgttctgagtctctaaagataaatggaatactatggaactgtta

SEQ ID NO: 174937 - DNA, 122 bp, Homo sapiens
cggagtccagacttccttatggccaggacagctccacgcatgctcagcacctaccagggtcgagctcacacacgtgcctacgacccgccgcggcgcctgcgcggtagcatcgcggagtcggt

SEQ ID NO: 174938 - DNA, 122 bp, Homo sapiens
cggcgggtcggcacacggggtgttcctgctaaacagcaatgccatgggtaagctgcccgccgcccagcgcccgggccggggtctcctccgtgctgcctgccctggagactggaggtccgcat

SEQ ID NO: 174939 - DNA, 122 bp, Homo sapiens
ggcatccactgtcaacactctcttctgtgcctctagccgtggcgtctgtagactgtggcacggtttcagctgaaactgtgtgctcaagtttgtagttctcagacctggagtgtgtggtaaag

SEQ ID NO: 174940 - DNA, 122 bp, Homo sapiens
gaaagttcctttcctagagttgaacaaatcaccggtccgggtccccagccaggcactgaccgtcgccttcctggagctcatggaacacgaagcccaggcagaggtagccggtgtcttcgtgg

SEQ ID NO: 174941 - DNA, 122 bp, Homo sapiens
aacccagaagacaaagaactctactctgccagacagccgcgaacactggtaactagaaaacggaacttcgataaagaatgacacgtttgatgctatgcccaggtgaattcagttgcttcgag

SEQ ID NO: 174942 - DNA, 122 bp, Homo sapiens
catagagccctccttcccagagccgcctgcggttcttgcagctggagtgggtgaggcatacgcacccgggcctaggcgtaatgaagacgcgagaggaaggctgagcgcagagcggcgcggcc

SEQ ID NO: 174943 - DNA, 122 bp, Homo sapiens
tccaaacccgagagccgaaacgcacaggtctcggggctgaactcgcgccaggaacacgcccgaggcaaaccacttgacaaccagcttaggttctcagcagaaaggccgacaggcgggggccg

SEQ ID NO: 174944 - DNA, 122 bp, Homo sapiens
ggtgccactgaaaccccagactctccgcataaacccacaccacacgcggcagaatcatatcgccattggctggtgttccgcagacacagggcataccgcagagtaataggaaacactggttc

SEQ ID NO: 174945 - DNA, 122 bp, Homo sapiens
cgctcgccctggagggggtgcttcctgggctggggcccccgctggggatggcagcagcagcggcggggcccgggcttgggggctccctcgggggcgcactggcggggccgcttgggggcgcg

SEQ ID NO: 174946 - DNA, 122 bp, Homo sapiens
agcaatatcacgttcactgctacctctgccacatgcatttttcctgtatgaaggaagactcgaagataagtctgatttccagacagaagctgaacactggagtttaggacagtctctggaac

SEQ ID NO: 174947 - DNA, 122 bp, Homo sapiens
ctctacatcccttgggtgaactgttggagaaaattgaacataaaattggaagctctcagccgatgcagtaacagagtactgggcatgagccagcatcatcccaacatcgattctttacctct

SEQ ID NO: 174948 - DNA, 122 bp, Homo sapiens
cgggcccggagggtgtgtcccccgctccggggctcgccgcgcctataaggggccgagcggcgggcagggacatgcagctctacagcagcgtctgcacccactaccccgccggggccccgggt

SEQ ID NO: 174949 - DNA, 122 bp, Homo sapiens
gtcagacctctgaagacttctcagatggatcctagtctctgggcttgccctgaaattactcgctgctcagggagagagttgaaatggttggcatcctcccactctgttgctccggctgtgtc

SEQ ID NO: 174950 - DNA, 122 bp, Homo sapiens
ccgggagcgatggccaccccggccccgcgaggcgcggcaggccccgctcgccctctcccgcgcccgcctggcgtgcgcttcacccggcaagtcccggggccacagacccacctcctcctcca

SEQ ID NO: 174951 - DNA, 122 bp, Homo sapiens
ctgaaggttgtcataggccaggcccatgcctgtcttgcagcattgtttgaagtatacttgcgcgtctgttttctgtctccctactacagtgagctcttggggcttagggcctggggttctaa

SEQ ID NO: 174952 - DNA, 122 bp, Homo sapiens
cttcaccatggcctacaaggcctggtctctgctaacatttattggcccaggcacactaagcgccttttaaaaattcattaatttaatcctctcaataatcctacggctatgtacttttaata

SEQ ID NO: 174953 - DNA, 122 bp, Homo sapiens
ggaagggaaagcggagggtaaggcaagggctgctgtaggcgccagacaacagggactctccgaaccggaagtgccccgcgtcgccatggctacaggcgctcccagcagaacccgtagcgttc

SEQ ID NO: 174954 - DNA, 122 bp, Homo sapiens
aattccacccccaaaaagcagctgcagggccagtggccgggccaaacttctagttggagacgagactcagctttccgctggtacaatgcggagcggagcacgagggtcgcaggtgcagaaca

SEQ ID NO: 174955 - DNA, 122 bp, Homo sapiens
ctccacagtcagccggatccaaaccgatttgaccgagatcggctcttcaatgcggtctcccggggtgtccccgaggatctggctggacttccagagtacctgagcaagaccagcaagtacct

SEQ ID NO: 174956 - DNA, 122 bp, Homo sapiens
acctcgtgatttgccagccttggcctctcaaagtgctgagattacaggtgagagccactgcgccaggctatgaaagtctttataaaagaacgatttcacttacagtgattttctttttaaat

SEQ ID NO: 174957 - DNA, 122 bp, Homo sapiens
tgagacctctcggtgcacctggtgaccctgggtggaggggacttgctgtgaagtcttcctcgccctctgccctcttgctgcttctccacattgccaggaaaagctgctgacgcctgccctcc

SEQ ID NO: 174958 - DNA, 122 bp, Homo sapiens
ccgagcctcggatgttgcttctggggaggcggaggcagcggcagcggcagcggcccggcccgtacggtcaccatcgtccgcggcagcaggcgctcgcgggccgagccccttagcagccggcg

SEQ ID NO: 174959 - DNA, 122 bp, Homo sapiens
tccacgtgagggctccaggagccacttccgggcccagtcaaccacgaccaggagaggcagcgctggagcctcaatcacgtcgacggaaaacaagtgcgctccctactgcagtcaccaggagg

SEQ ID NO: 174960 - DNA, 122 bp, Homo sapiens
gccctcctgaccctgtcccgcgcttgctccaggtccgggttgctctccggcggcctccctcggaagtgttccgtcttccacctgttcgtggcctgcctctcgctgggcttcttctccctact

SEQ ID NO: 174961 - DNA, 122 bp, Homo sapiens
tattattctacgtacaatatgcagaattaagcgagataacgtggtgccagcataaaccggcgaggacgtgaaattcgtcataaaatccaacaggagggcagtgaagcccttttttctcatgt

SEQ ID NO: 174962 - DNA, 122 bp, Homo sapiens
tcatcaattagcccaattctcaccacttttttctccatccccgcgtcagtgggtgcgtcccgcaggtcatgaccccaagttctagatgtaagattcctgccatgtctcctttcccccagaag

SEQ ID NO: 174963 - DNA, 122 bp, Homo sapiens
aatttcctcctacacaccacacacactttgtttaaaataagtatgctgttctccctacttcgcccccatccctagtctaccctaagcaacttcgttacctctctacgaacccatcagagcgc

SEQ ID NO: 174964 - DNA, 122 bp, Homo sapiens
gtttccagactagcatggttctggctgtgggacacaatcatgggaaatttgacatctccccgaggtgatgctaccaggcagttaggatgaatcactgaagatgcacactacagagatgcgac

SEQ ID NO: 174965 - DNA, 122 bp, Homo sapiens
gtaagccaagccctgaaggcagaatcggggctagccaggtgaatctgagatgaggggtgacgaggctccaggcagagggaacttaccatggctaagacacagacaggaccaagcaagcagct

SEQ ID NO: 174966 - DNA, 122 bp, Homo sapiens
ggagaggagagagacacagcaaagtggggtgccaggcagaggccaggggctttcaaagaccggggctcgagttccgtcacagccacccctgtgacatcggccgtctttctgaccctccgtgt

SEQ ID NO: 174967 - DNA, 122 bp, Homo sapiens
agaatttggaatgagggcggatccccaagaggggctgccgggtcttcgggatgagttcagcgtcctggttttgctgtaggactctggtgattctagatttctacttggaaggggcggggaag

SEQ ID NO: 174968 - DNA, 122 bp, Homo sapiens
accaccaagccttggtctacggccgagggacagtgattccgagctctgggtgttgggagccgctcacccgcccccacccctctgtcggggactcctgcccaccccgtcgcaagagaattaca

SEQ ID NO: 174969 - DNA, 122 bp, Homo sapiens
gaagtgcgagggtggggcaagaggttggggcacagccgggtggaagtacacgggtgcgatcgcaggcagaagcagtacgggggaacttaagagggggactgtcaaagcgagaaatagaaacc

SEQ ID NO: 174970 - DNA, 122 bp, Homo sapiens
atttccagcaatttcttctcaatgtgggattcttttccagggagggaggtttggctggttcgctgtgagaagttgccagggccttgttggcccagtctgctcaagacatttcagatcctttg

SEQ ID NO: 174971 - DNA, 122 bp, Homo sapiens
ctcatatgtaaaatcaggaggttggactacattgtaagtgtccttttgtttccacctcttcgtgaccgaatgtggggtgaggaaggggcaaaaaagcgatcccggtcttggctccttcttcc

SEQ ID NO: 174972 - DNA, 122 bp, Homo sapiens
ggtccaagcgactcgggctgtcctcgccgatgatcctggtgatggtgcccttgtacaggacgtcagctggcgtgccctgcaggtgcagaggggtgagcgcccaggaggctgcagcccaggac

SEQ ID NO: 174973 - DNA, 122 bp, Homo sapiens
tcgggtcagggccctgaggttgagttcaagtgatttctgcacaggactcgcccttcgggacgggcactgatcgggaactctccggtccagcgaacccaacgctagacttggggcaaatctct

SEQ ID NO: 174974 - DNA, 122 bp, Homo sapiens
cgggtataggttccgccttctcttactttggtgcttcccattgggtagggccgggaaacacgataaaggggacatgccgggagttgcagtaccctcaggaaggtagcgtcttgatctgcgtg

SEQ ID NO: 174975 - DNA, 122 bp, Homo sapiens
gagacttttcagagatggggcagcaggttctcccaggaggagcctgtcagtcccaatgggcgggcacgtggcaaatgaggtggcagggtgcagggtgagggcagattagagttcagtagttg

SEQ ID NO: 174976 - DNA, 122 bp, Homo sapiens
gagatctgaaagccaagtgttcagcaaaatgctgggcaggctccccagcctgcgcggccacgcacctttacaccacgccgcgctgccccagcctgcgtgctgcaaacgacgcatttgacctc

SEQ ID NO: 174977 - DNA, 122 bp, Homo sapiens
atgtcttcattcagctaacgtaatctcaaactaatctgctaaatgggttttacaataatgcgttacaaatgagatcactgctgtctgccagatcagccatatgtaccattacagtcaacaat

SEQ ID NO: 174978 - DNA, 122 bp, Homo sapiens
cttgagttttctgaccacagtttctttatgtcttttaaagatggagtctaaaaacactatcgcataaggtggtcagataagcctattacatctatttagagcaatattatctttagaccatg

SEQ ID NO: 174979 - DNA, 122 bp, Homo sapiens
gctgctgtgcactgaagaggcagtgctgccttcacctgtccgagggacggagcacgtggacgtgtcagctgcatcatctgctgtccctcccggcatcacctgcactttatcctctaaggggt

SEQ ID NO: 174980 - DNA, 122 bp, Homo sapiens
aggaagcagctgtcttgtctccttgctgcctgtcactctccatctccttggagaattctgcgttcacaaacacagacctgtgtttccacgtattaaagattggcgagcaggacttggggtcc

SEQ ID NO: 174981 - DNA, 122 bp, Homo sapiens
cgtgcgccacagcgctgtccagctgcagctgcgcctgaacctgaaaggacaagggcgtcacgttgcaatgactatcctagggtgacaacagaatagaaacagagcattaacggcgtccagct

SEQ ID NO: 174982 - DNA, 122 bp, Homo sapiens
gcactcaggccccttccctagtctttgtcagccaagcgctggggcgaggctgtccaagtccggtcagcacccagcatggggagcactctgggctcctgtaccatggttcaggggctacagag

SEQ ID NO: 174983 - DNA, 122 bp, Homo sapiens
tgaagttccctgtcctcaaagaacccaaactctaatagtagcgggtaacagctgtgaatgcgaacaccaagtaaaagtgggtgaaagagaaggtgattactctacttaagaggtatgagatg

SEQ ID NO: 174984 - DNA, 122 bp, Homo sapiens
gccacggaagggtcttcgtgcgacatgtctctgaagacccctcagtgccagccttgtttccgggtgcactcagagccggggcttcccgcaggccctgtgggttctgtccccgttctcacttg

SEQ ID NO: 174985 - DNA, 122 bp, Homo sapiens
gcgcccagatgcccggtcttccccgccgcctccgtggaatacaccagcccagcaacttggcggcctccctgcacacgcccctcgctttggtgtgaatgtgcaggttctgggcaggaggtctg

SEQ ID NO: 174986 - DNA, 122 bp, Homo sapiens
cctaccagagcttcaacagacattcccccagtcaggagaacctggtgctaacctggctgccgcatagataggacaccagaagaccagaaggtggacgaatccacccaggttcaaggacaaat

SEQ ID NO: 174987 - DNA, 122 bp, Homo sapiens
aggatgcatgcagacctatatatttatatccaaatctgacctaaccaaacacagatcagacgccacattctaccccactgaggctgtgcccacattttccaggcatcatcgccaacagagct

SEQ ID NO: 174988 - DNA, 122 bp, Homo sapiens
gtttttcactacctcacacatcatatatttgccttatttattgagtgtctgtctccccaccgtagtataaactccacgagggcagggattcgtgcgtgtggctcaccggcggctctccagcg

SEQ ID NO: 174989 - DNA, 122 bp, Homo sapiens
aggtctttcaaatgcatgaatgggatcactgctccgcataaaacccttcaaggggccaggcgcggtggctcacgcctgtaatcccaggacttggggaggccgaagcaggcggatcatttgag

SEQ ID NO: 174990 - DNA, 122 bp, Homo sapiens
tggtggacactagggaagcacgaggaggcggcagagggtgggaaaggggagtcagggacccgctccccaacagatgacacccttctgctgcttatacccctagcagtggtcaggacaagggg

SEQ ID NO: 174991 - DNA, 122 bp, Homo sapiens
ggatgccaggaaaaaactcttgaggagaggtcagagatgagagctggaacatcgccctggcgcagccccaagtttaactctgtagatgttgtcagaatgatggtagattgaggggaaaaagg

SEQ ID NO: 174992 - DNA, 122 bp, Homo sapiens
ttcagttgtttttagcatattcactgagttgtacaaccatcacaacagtcaatgttagaacgttctcagcccccaaaaaagaaaccatgtaccgtgtgataatcaacccccagttcatgcca

SEQ ID NO: 174993 - DNA, 122 bp, Homo sapiens
gggcagggtgtctggtgaacagaagagtccaacacaaaggtcgcaaaccggtgggcatggcggcatccagcccacagatgtgttttgtttggccttctctgtcgttttttgtttttgtgttt

SEQ ID NO: 174994 - DNA, 122 bp, Homo sapiens
cttcgggggaccaagtggagaggctgctggagttgtcgcctgagtcctcccttagttcttcgcgccggcctcgcccacggctccgggtcccagccgccactgcagtctccgcagcaccgagc

SEQ ID NO: 174995 - DNA, 122 bp, Homo sapiens
ccacagccttgccctcactgggtgcggcgatgtgtgcttctccttgtctctgccacgtcccgccctcccggccagctccacgtgcctcagtgaagcccccagctgccctgctttacctactt

SEQ ID NO: 174996 - DNA, 122 bp, Homo sapiens
ggcaacagatggcacttgggagtgagtagcagagaaagggtgcagttagtatttgtgaaacgctgcccgtcgcgagtaatgcaaacgtgttcaccttcagaaagagcagatcagcgtttagc

SEQ ID NO: 174997 - DNA, 122 bp, Homo sapiens
tccatgccacgtcaatttacagccagccccctaccagagttctgtcgctcagggcaccagcggtgctttgtctattccagttggctggatgataaaaagaggtgtccaaaaacggaaataaa

SEQ ID NO: 174998 - DNA, 122 bp, Homo sapiens
cagaacttgaagaattcagcatagaattccacacgctttttaacggctctgttgcctcgccgcaccccgctgtagcctatgtttgaccaattctctcattttataaagggtggacccacctt

SEQ ID NO: 174999 - DNA, 122 bp, Homo sapiens
taggatcataataaataacgtaatatactaatgtaataacagatcttctcatgcatttatcgtgtttataaatatagaagaaagctggcttacagggctgttgggacaaatttggaaaagtg

SEQ ID NO: 175000 - DNA, 122 bp, Homo sapiens
cgatgttccttaggatgacgcactttccattggtgtacagaaaattgttgcccttagggtcgccgccgatgatcttggagacgcccctctccacctgcgggaggctggcgaacaccttctct

SEQ ID NO: 175001 - DNA, 122 bp, Homo sapiens
ctctgagccacctggcctgtggccatccgtctcggcagcggcaggaagccatccaggacgcgtctggagcccaggcctgcaccgacattccgggtcatctctccacatcccacccaagtggt

SEQ ID NO: 175002 - DNA, 122 bp, Homo sapiens
gaccgccaggcaggggctggtgctgggcggggggcggcgggccctcccgcagtgcaaggccgggcctggcggggtgaggtagtaggttgtgtggtttcagggcagtgatgttgcccctcgga

SEQ ID NO: 175003 - DNA, 122 bp, Homo sapiens
ggtaaaactatatatgagtagaatcttgtagtgactcctcagaggaagcctaaataccatcggggtctggcgttcacacccacaagcaatgcccaaacctccaagagactgggcagatctgt

SEQ ID NO: 175004 - DNA, 122 bp, Homo sapiens
ggccatcatcttggtcatcaacacaacttgcttctctccagacttgggcttaaggtactgcgtttacatacagcaaaattgctatcattttacattatctaatctctttcttccactgttta

SEQ ID NO: 175005 - DNA, 122 bp, Homo sapiens
gcggccgcccggaggtagctaccacggcctgtgtcaacgactaaagctccagtacagcggcgccctcagacagctgggagggtggctctggccgggagcggcggccggtgagctaccgcgag

SEQ ID NO: 175006 - DNA, 122 bp, Homo sapiens
ccaccttcagggttcaagtgattcttctgtctcagcctcccgagtagctgggattacaggcgtgtgccaccacacaagccaggggtaatttcaagggttgtcacagtatatatcccacatat

SEQ ID NO: 175007 - DNA, 122 bp, Homo sapiens
atctgttgctatcacacgtgaccgcttgacattgctctgaggagcagaggtgtggctacgcggcgggcacgtgactggctgccacaacccccgctgcagggggggagcggtgagggggacaa

SEQ ID NO: 175008 - DNA, 122 bp, Homo sapiens
gctgaggcgccagctctcggtgacgacgctgatgaggcccacggggaaggtggcggggggcgcatcggtgctgcccagcgccaggttgggcaccagccacacgtggccgggccccaccagac

SEQ ID NO: 175009 - DNA, 122 bp, Homo sapiens
ccacgtgggtcgcttaccggccagtcccgcgagccagcccggggctccttccccggcaggcgtgagtacgcgcctcagtcctttgcaaaaacgcgttcccggttccttggaggtaacacgaa

SEQ ID NO: 175010 - DNA, 122 bp, Homo sapiens
cagatgtacacacgcttcaggaaccacccagactttggggcgctattgcgttgaaccccgcgccaccgcgtgtgctccttcagtactagttctgtgtttgagagcctcgccttcatttatga

SEQ ID NO: 175011 - DNA, 122 bp, Homo sapiens
agatagagcctttaagagacttttccctgactgataagagtggccagtggagtgcttcctcgaggtccctgctaattactgggaagtccctgaaagcagtggccacagctgtggtgtgtgca

SEQ ID NO: 175012 - DNA, 122 bp, Homo sapiens
gaatgacaaacggccgcagagggaagttggtggcctcctgaagcttggaatgaaactcctcgatcgtcaatgtcgagttctgcaggggagaaaacccacctcacatcagcaccgctcggcat

SEQ ID NO: 175013 - DNA, 122 bp, Homo sapiens
gcggagcaaaagcggagggcagctgccggttgctattggtaccgctagctagaatggctgcgggggccgtacgcggctgctcatacctttaatcccagcactttcggaggttgaggcgggaa

SEQ ID NO: 175014 - DNA, 122 bp, Homo sapiens
atgcctttctctacctacaactgtcttggtaaattcctttactgccaacaccaccagccccggatagttgctacccacaacactatgttgttttagtttaatttaggactcttattctaggt

SEQ ID NO: 175015 - DNA, 122 bp, Homo sapiens
ttttatctgccctcggtacgctgatttccaaaacccagcctcatattctatactccaaagcgcactgccaggtgggccaactccagcccccacaatccgatgccaaggccacttcttgccac

SEQ ID NO: 175016 - DNA, 122 bp, Homo sapiens
ggcaatccacccgcctcggcctcccaaagtggtgggattacaggcgtgagccaccgcgaccggccaagaaaaagaaacacatgagaacatcttaacaaaagggaaatactgcagtgtctccc

SEQ ID NO: 175017 - DNA, 122 bp, Homo sapiens
cgggaccccgggggtgccttcctgggttgggtggaccggtccctggttcgccgggtcctgcgcagcaatgcgtctgcttgctggtggaattcgccagccgccagcctcgctggcccaggtgc

SEQ ID NO: 175018 - DNA, 122 bp, Homo sapiens
ctactgccaggtgctgcgtcccgcgatcgttataacacatgcgtacaaatgagcacaacgcgccataaaagtgttattgttattactattgttgctgatttgcttttcaagcttcaccacag

SEQ ID NO: 175019 - DNA, 122 bp, Homo sapiens
ttcaacgtcggggagtatcgccgggaggctgtgaagcagtacagctcctacaacttcttccgccccgacaatgaggaagccatgaaagtccggaagtaaggctgggccgcgggcgtagggct

SEQ ID NO: 175020 - DNA, 122 bp, Homo sapiens
agaggctcgggcgctgggtgcgcgggagggagcgtgcgtgcttggcgcgaaggctcctggcgcaggcgacccggctgccccgccgagcggtggctttccggaggggtggggcggccgcctcg

SEQ ID NO: 175021 - DNA, 122 bp, Homo sapiens
tgcaggccagctctgttgttagaaagctcttcttcctctggaatcgagcctgccttcctccgtctgcccctcaccccagcacatgttaggacagtgaggagctgacactggggtgaagatgg

SEQ ID NO: 175022 - DNA, 122 bp, Homo sapiens
aacgtaaaaagcaaaatggagttgtaaagagtttctttcccatttcaactccgacagccacgcgcgctttcagcggccggctacactgcgcggtcgcggggcccggcccaaagcccccgccc

SEQ ID NO: 175023 - DNA, 122 bp, Homo sapiens
ccgtacgcgacaccttccaccgccgcgccccgccagggactcagccactagcagttgggacggaagatgggattaagacaccgaccaatcaggactatcggcaggacgttaccagggagacc

SEQ ID NO: 175024 - DNA, 122 bp, Homo sapiens
tgcactgcagatctttctgacccaactcctgtgtcctcagtgacatttaagtataaaaggcgagctttctctttaaaatggatgcagcagttgaaagcactgatgaggataaccatcgcttt

SEQ ID NO: 175025 - DNA, 122 bp, Homo sapiens
gagttcgtctacagctgattcggcaggtaccagggcgtccgcgatggtgagtgatagcaccgcgatggtgagtgacagtgctgccgtgactggttaatagggtggtagtcgttagtccatcg

SEQ ID NO: 175026 - DNA, 122 bp, Homo sapiens
aatgtagctcaaggtgatgttaaaaacagagaatgaagctttctgtaactggcattccaccgacagatatttcatatgtgcactgcacagtgatagctcatagtgatgtcctaagataacct

SEQ ID NO: 175027 - DNA, 122 bp, Homo sapiens
ctgggcatctcacctgcatccgcacaagtgcctcaggagggtggagtgtctggtgctcggcgctggaggctcagcccacactgtgccgggcagtcgcaggcctcccagatgaatgaagcatg

SEQ ID NO: 175028 - DNA, 122 bp, Homo sapiens
attaggtgtcaaaatttggcacaggctataaacccagcccaagacagaatgatctctgctcgtgtaaccattaataaataagacattgatactggtttaatgaaaatagctacatcttgatt

SEQ ID NO: 175029 - DNA, 122 bp, Homo sapiens
tgttggggttgacagttgtgagtccagctttgttgtgtgggttgtcagagtgtggtgtcccgtgtccaaggttgtctttctatcttctgccaggccagttaactcacctgggtctgagcctc

SEQ ID NO: 175030 - DNA, 122 bp, Homo sapiens
attactttcaacagtgtcatttttaatatatgtatatgtacttgcaagcccagggaaacacgagaactcactccttgcattgttttactcactgcaactggcgccatccggcgagggtctgg

SEQ ID NO: 175031 - DNA, 122 bp, Homo sapiens
tgcagggctggagtctcaaagcaggaatcctccgaaggacgttttgaacagccggttaggcgcacatgcgcgtacacacacgcacacacacacacacacacacgcacgcacgcacgcgcacg

SEQ ID NO: 175032 - DNA, 122 bp, Homo sapiens
acttcactttgcctcttctgtggcaaactccttagtcaaggcactcaggcatattattaacgaactcccttaccatatgctgagatgtcttctgagttttgtctactccatggaaaacttat

SEQ ID NO: 175033 - DNA, 122 bp, Homo sapiens
ttccatagaatgaggtttgattctctctggggtttcttgttttccattataagactctggcgaccttggtggcgccagattttttcagatgttgcttttgttccgggtgtagcggccaagat

SEQ ID NO: 175034 - DNA, 122 bp, Homo sapiens
ctaactgagatggtgcctggagggtgctgagtgtagagtttagcaaagagtgaagctcaacggtgccaaggctacctgcttttgggtcttgtgtggggcatctatctgggtgctgttttccc

SEQ ID NO: 175035 - DNA, 122 bp, Homo sapiens
tttctgcacacgccctgtttatccaggccctttgattctccccaagagggaggagaccagcgaggagaccagcattgggcagaacagagaaaagaggtggcaaattattacccattaagttc

SEQ ID NO: 175036 - DNA, 122 bp, Homo sapiens
ggagaaagatcctgagggaaccatggagtcaatggaccaatggaagaatgccgtgggctgcgtcaagccaatagggtcgcgcggcgaggggcggggccggcgggagcagggcggggcctgag

SEQ ID NO: 175037 - DNA, 122 bp, Homo sapiens
ttgctgtttgtaaagcttagcgtggcacaggcccgaatggacccttagagtacctgctcccggcaagaataggtgagaggtgcgagacctcgagggagtggggaaaacgagtaaaagtccaa

SEQ ID NO: 175038 - DNA, 122 bp, Homo sapiens
ccagaggagcaccggcggctggagaaggaggtgctgatggagaaggagatcctggagaagcgcaaggggccgctggaaggccacacagagaacgaccaccacaagttccaccctctgccccg

SEQ ID NO: 175039 - DNA, 122 bp, Homo sapiens
ggttgcgtcgcgcgcggagcactctgggacttgtagttctggagatggagcgagctgtgccgctcgcggtgcctctgggtcaggtgagacggacgtggtgcgcgttgccttctggggtttgt

SEQ ID NO: 175040 - DNA, 122 bp, Homo sapiens
atcaacctgagattcggggatcaaggaaggacaggtatgatatctaggtgtgggaggaaacggtagatgcagtttgggacatgctgtttgagttgcttccacacatctcggtatatagccag

SEQ ID NO: 175041 - DNA, 122 bp, Homo sapiens
gcttcgtctgtgagggggtcccgggaatccagcgaggccggaaagtgggtggggggcgcgcgctgcccgcggtggcccggggcatccgtcccgccgggggcgcggaggccgtgggggcccca

SEQ ID NO: 175042 - DNA, 122 bp, Homo sapiens
acaaaaaacacctctaacaccacttggggctgtgactgtatttacttcattcttgaatcccgcgtccccgtggctgggggctgacacatccctgggcaccactgtgacttcctgtgggtccc

SEQ ID NO: 175043 - DNA, 122 bp, Homo sapiens
tgagccacacccaggtcaacagggggtgccagtgcagagccaccggtcctcgcctcctgccggagcagtgctgggattctggaatccattatcctgagaagagagccttccgcattattcat

SEQ ID NO: 175044 - DNA, 122 bp, Homo sapiens
cccctcctagcggtgtgtgaggctttcatgacccttcttcctcctttcccgacagatcagcgggggaggtgggctgagccgcccctctcgtcgtcacccctgccttggccgcccagccgtgc

SEQ ID NO: 175045 - DNA, 122 bp, Homo sapiens
acagtacctggagctgggcagtcttctcatcagagtggggactaataacagtgacctccccgccaggtcctgtgtgttgccggctgaagaagggtagctgaaaaattcagacccagcacagt

SEQ ID NO: 175046 - DNA, 122 bp, Homo sapiens
gactgaagatgtttttctcaggagaaactgaacccatcaaagttcagaacttggagataccggacacattgatggtggcagaaagatggaagcaggaaaagcctatatagatctgcattctt

SEQ ID NO: 175047 - DNA, 122 bp, Homo sapiens
tgaaagacaggtgagatttgagcaccacttttgggtgatttaagggataaaaggtggagccgagtctgccaaaggaagggggcctgatttgccatcccaaacttagtttttttgttgttgtt

SEQ ID NO: 175048 - DNA, 122 bp, Homo sapiens
gcactgaagtgggttttctgtcatgggtcactggggagcttgccaggtttgtgctagggacggggcctatgcaagtgagcaatttgtttagagaaagcttaaaaggaaaacaaaggcttgac

SEQ ID NO: 175049 - DNA, 122 bp, Homo sapiens
aacggcggctcctcttgccctcctcagaagaaggctttcgtcgttcccgccgcccaccagcgcctggggcttcttcgatgtctccatcctccaatttcagggcgttctagcagaggcggacc

SEQ ID NO: 175050 - DNA, 122 bp, Homo sapiens
agagaagagtcacattgagtaaaataaaagactgcagtttgtgggaagaattatttttcacggtgctactaatcctgctgtatcccgggtttttaatataaaggtgttaagcttattttgct

SEQ ID NO: 175051 - DNA, 122 bp, Homo sapiens
caaaaaggcgctgtctcagtctctgcgcccgttgattttgtcaatcttagagacctcttccgaacacttccaaggaaggagctgatctgcacagataccaagagctgcccggaggcgccgac

SEQ ID NO: 175052 - DNA, 122 bp, Homo sapiens
tgcgacggcagtgccgagcctttgtatcccgcggctgatgcgttgcggtgtctctcttggcggctgattgccattcggtcacgtgtggtaggaggagagatttgtctaaaaaccggagaccg

SEQ ID NO: 175053 - DNA, 122 bp, Homo sapiens
gacatccgggtgggcctgggatcggccacctgctgggcacgtgcaggggcgggggtccctcggtcgcagctgacgacccttgccttcctcagcgccggcctcgagctacaacctggacgtgc

SEQ ID NO: 175054 - DNA, 122 bp, Homo sapiens
ttcttgctctgattgtcaggtcatcatggaatgcaaacttcaccgtggacgtgatttcaacgttggtgcggatttggagatgtccaactctgtcctcaattagccagaactcaagttgagat

SEQ ID NO: 175055 - DNA, 122 bp, Homo sapiens
agtctgctgaaacattagtctaggaggagatataaggttacttccttcagtaacacactccgctacatagtcaggtgaagattgtctctgtagaggcttctggatgtggttgtaggaagcat

SEQ ID NO: 175056 - DNA, 122 bp, Homo sapiens
agcggccacacagcgatccccgttctgcggattgcaatgccgggtgctgatgatggcgcccgcctctttgatcatcttcaggatggtcccgcctagacattgcgggccacattagcgtccgc

SEQ ID NO: 175057 - DNA, 122 bp, Homo sapiens
ctggtttcaggtttctggcgaggccggtgttcggctggcggctagctgggactagcggaacggcggagtctcgattggcagtgcctggacaggcgcaagggccggcgcgggctccgggcgct

SEQ ID NO: 175058 - DNA, 122 bp, Homo sapiens
gcggagctgaaagggcacaagacactccaggctcccacacgtatggagacggatcggctgcgtgtccacaccccgttcgtccctggtccattcgtgcccatctcagaagatagattaaacat

SEQ ID NO: 175059 - DNA, 122 bp, Homo sapiens
cattctatagaggcactgagaggagaagtgacttgttgaggtctcacagctcttgtatgacggagccagcattcagatgcaagatggcccaactgtgaacccttggtcctaactccagaata

SEQ ID NO: 175060 - DNA, 122 bp, Homo sapiens
ctacatcaccttcacttttgaattcggctctgatgttccaaatgttcttggccgttccttcgtgtttctcctgtacgaatttcagcttctttttgccaagtatctccccacccccgcccacc

SEQ ID NO: 175061 - DNA, 122 bp, Homo sapiens
agaggaacagcatagcagcagattgtaacccaacagataaagacattgtctgagtcaatgcgtacagacccattattctccgtgagggaagtgcgcgtcttccctagccgctactgtcctct

SEQ ID NO: 175062 - DNA, 122 bp, Homo sapiens
tcagtccgcagtgacccagtctcgtgtaggtgggaccagcatcttcaccggccgaggagacgcccctggaccacctgcgtgggcaggatccaggcaggcgacagggctcagggctgcagcca

SEQ ID NO: 175063 - DNA, 122 bp, Homo sapiens
gcgaggtcttggaccagctgccttgactctgacttccattttcctgcccctctgctagtacgacaggacagaaaccgcgatcaacaacctcaaccccgccttctccaagaagttcgtgcttg

SEQ ID NO: 175064 - DNA, 122 bp, Homo sapiens
cgtgatattcaggtaatattttcagaagggttatagcacttctatcagtcattctgacaccggatttgatggcctctgccctcttcttgctaccttcttgtgtgatacacagataagatatg

SEQ ID NO: 175065 - DNA, 122 bp, Homo sapiens
tttgctgctctagaaatttaaggaaattcattcaaaactatgttttcatcatcagatgttcgttttatgtttggatgaactgacatacttgttccactctagcagcacgtaaatattggcgt

SEQ ID NO: 175066 - DNA, 122 bp, Homo sapiens
cgctccaggtgggggcgcgcttccccggggtggcgtgttgacttgagacgccggcccgctcgctggctgctggctcgccagccgcttgtccctgccatgaattgagaccgcgggccagcccc

SEQ ID NO: 175067 - DNA, 122 bp, Homo sapiens
tcgctctcggacagaacagattggtgccgtgttgcacatccagaactccactcccacccgcgcctttggtataatgcctgctgcccaaactcaggatttgctgtgggtctggggatcaataa

SEQ ID NO: 175068 - DNA, 122 bp, Homo sapiens
acacaccaagcagcgggcaccagctaggtgtccttgaattcagttttgacactgtctacccgcggataatgtcagatcccacaggttgagggctcagtccccaagactgcccccccacccca

SEQ ID NO: 175069 - DNA, 122 bp, Homo sapiens
ccaggctgacgtgtctgaggccagggccgccaggtgcctgctggaacaagtgcaggtgaacgctaggccactttccccctctaaagctctgatattgcctccactgccccggctttttgtgg

SEQ ID NO: 175070 - DNA, 122 bp, Homo sapiens
cttacggacttcctattggcccagacagcccaacccctcccgttattgggcagtgttctccgtcactcctcgcccctaggctctggactcctccctgtgcccgcctgtccgtcacgtttaag

SEQ ID NO: 175071 - DNA, 122 bp, Homo sapiens
gtttggtggtaaggaggaaatgaaaatttcagtaacatttctttaagtgaagaaatgacacgggaattaaagagtaggatgacaggattataaggaatctgtgtagtgtctatttttaattt

SEQ ID NO: 175072 - DNA, 122 bp, Homo sapiens
tcgccttgccccagagctgcctggccagtgaatgtgttaaccccagaaggctgagtcctgcgtgaggaactggagtgtggggtgggacttcaggatggcaggcctgttctaaggaggggctg

SEQ ID NO: 175073 - DNA, 122 bp, Homo sapiens
agccttcccgttgcatttccatgttgttccttgttccggggaggcccctttgctgccctgcgccgcgctccgcccctcttcccgtcctgcgatgaggccctggcccccggcatcgccacgcg

SEQ ID NO: 175074 - DNA, 122 bp, Homo sapiens
ccaatgtctactcgttgtacttggaatacaatccaaactccttaccatgtcctagtagaccgggaatgatctcatcttctacttgccccacactgcataaaccagctgcatcctcctcttct

SEQ ID NO: 175075 - DNA, 122 bp, Homo sapiens
agagaatgcaaatgaaaaccacaatgaactatcacctcactgttacacgctgttgacagacgtgtaattggtacagccgttataaaaaacagtgtaatggttccttggaaaatcaaaataga

SEQ ID NO: 175076 - DNA, 122 bp, Homo sapiens
cgggcgaacaccgagcgagtcgattttctcgcttcaaaaattccagctgggcggagaaagcggggatggctccgagttagaatggaagagaaaacggtttacattcccggcgtcatctgaag

SEQ ID NO: 175077 - DNA, 122 bp, Homo sapiens
atacttggttacaatactggaactctgaacctatgtggaggagagaaaaacaatggtgaacgagataccagctgggctctttccacattcagggctcagcagtgttggggtttcacttgtct

SEQ ID NO: 175078 - DNA, 122 bp, Homo sapiens
gcgcctcgcggggagggtcctccgtgctgggggcgaggccacccgaggcagctccccgcccgcccccaaccccgccccgctctcggagcctataaagggaggcgacccgcggcccgcccggc

SEQ ID NO: 175079 - DNA, 122 bp, Homo sapiens
ccgcagagagcatccaggactcggagagcggcgggcacaggggctgggccatggcagcggcggcgcgtctgggggccggcggccggcggccgctttatgccgagcccgaggtgtgaagtggc

SEQ ID NO: 175080 - DNA, 122 bp, Homo sapiens
ttaattagcaggtcatatggccatttaaatgcgagttgcaatcgacctcataaaaatagccgcagtgttgttttattctgaatcgtcacatgatcatggagtatagtatgcatatggtgtgg

SEQ ID NO: 175081 - DNA, 122 bp, Homo sapiens
tggagaggccaggtcttctggaaccaggccagtgcaccctgcccgggcgtcaccccaccacggacattcacaatgacagtcagcacttctcagcacactgtggatcacacgcattagcctgg

SEQ ID NO: 175082 - DNA, 122 bp, Homo sapiens
caggtgttgaacagtgaggaagtcctctcacctgagcagcttctgatgcaagaggggtgtcgtgagtgcctggaatcctatgcctgtgggtggagcgtgaacttagcctcttccctgagggt

SEQ ID NO: 175083 - DNA, 122 bp, Homo sapiens
cgtccaatcaggagtgaagccggagagcaggggcggcttccgggatttggcgggggccttcgtcggctccagttagagctcgggtctcctcgccacagctccgagtctttcgttctgggagg

SEQ ID NO: 175084 - DNA, 122 bp, Homo sapiens
ccatgcctgagagaaaggtccttgcccgaaggcagattttcgccaagcaaattcgagccccgccccttccctgggtctccatttcccgcctccggcccggcctttgggctccgccttcagct

SEQ ID NO: 175085 - DNA, 122 bp, Homo sapiens
tctgtaattcgaatgtttgtttcctccaaaactcatgctgaaatttaattgccattgtaacgaattaggaggtggaacctttaataggtgattaggtcatgacagtttcaccctcgtgggtg

SEQ ID NO: 175086 - DNA, 122 bp, Homo sapiens
caggacctgaaggccctcaataccagctaccagtcccagctcatcaaacccagccgcatgcgcaagtaccccaaccggcccagcaagacgcccccccacgaacgcccttacgcttgcccagt

SEQ ID NO: 175087 - DNA, 122 bp, Homo sapiens
catgatccgcccacctcggcctcccaaagtgctgggattacaggcgtgagccaccgcgcccggcctctagaggataatttttaaatgtgcttttgcatttggaaaatgtgattggcattttt

SEQ ID NO: 175088 - DNA, 122 bp, Homo sapiens
gatgattacagagcccttagccttctgccttgagggatggacctcatctcttcaaattcacgttctgattaaaaggaagataaatgaaaactatgttcttttttctttcctgcccatttcta

SEQ ID NO: 175089 - DNA, 122 bp, Homo sapiens
acacttgctccggctcgcgtgttgcactgtgacacaccctggaccctccccccacacacacgcttacactcacacatgcacaccgccctgtgtgtgctacgggactgaagcgccaccagcct

SEQ ID NO: 175090 - DNA, 122 bp, Homo sapiens
tcctaccagagcttaagaagaggaattgcttgacagagtccacttaaaatagaggttatccggagatggtcagtctagaacatgtaatctttgagtcagcgtaggctctcgaagtattttga

SEQ ID NO: 175091 - DNA, 122 bp, Homo sapiens
tgagaaaggtctgttcctattcctattccaatagtgggcttccagagtgtgcagtcgacgcgctgcccctcactgccttctgtcttccttcacggcccctagtcaactccacagagaaagca

SEQ ID NO: 175092 - DNA, 122 bp, Homo sapiens
cagggtcatctgctggtctgtaatccccacactttgtaatctaatctaccacaggaggaccgtgttctgccaggtagatgtgcccttctcatgaatcttgctgcgcactttttctagaccaa

SEQ ID NO: 175093 - DNA, 122 bp, Homo sapiens
ctgtctctccccagatgggcaggtactcatcctgctgaatgtccagcatgatctccagcccgttgcctgtcccccccttgaccgtggtgagcagaggtttgccatcctcgcctgagttaaac

SEQ ID NO: 175094 - DNA, 122 bp, Homo sapiens
ggtttccataggcaaagtcctaacaccacaattgacatagttaaaaaggggagacggtaacgtgtttggtagaggttacatatcttgctatagttgtttattttagttgctgagtgatacac

SEQ ID NO: 175095 - DNA, 122 bp, Homo sapiens
ctgcggttgcaggcgcgcaccgccacacctgactggttttcgtattttttttggtggagacggggtttcacgtgttggctgggctgatctccagctcctaaccgcgagtgatctgccagcct

SEQ ID NO: 175096 - DNA, 122 bp, Homo sapiens
ggtgaccccgggaccgaccaactcgctgggccgcacgtcccgtcccgccgcgccgcacgccggctcctcagcccgccctacacagcgcagccgcgctcccgggcccacgtgggccgcgcccg

SEQ ID NO: 175097 - DNA, 122 bp, Homo sapiens
ataagcaggggaatgaggtgaaagcgaagcacgaaacatcgcgagaggctactggactctcgcgacgatttctgggattgcccctccccccttccccaagtgccgtttcggtttaatctagt

SEQ ID NO: 175098 - DNA, 122 bp, Homo sapiens
atgccccgctcaggagccccccccagagccccaccgggaactcatctctccgcctggtgacgtcacgttggcccgagcactgcagcccgagtccagctgttcatctccctcacattctgctg

SEQ ID NO: 175099 - DNA, 122 bp, Homo sapiens
gcagtttccagcttaaggccttgttattttctgttttcctacttggaacaatcctcctcacgcatatccttaggccttattctctggcatccttcaaatcttagcgagtgttttttttttgg

SEQ ID NO: 175100 - DNA, 122 bp, Homo sapiens
gctaatgtaatttggatgcagcattttctttggaagtccaaaggatgctacgtctgtttgcgcacgagcctaccatggcgagctgggactgtagctcgatctccaggttctgaaaggcgcga

SEQ ID NO: 175101 - DNA, 122 bp, Homo sapiens
agggagaatgactggcccaaagtcactcggctggtaggtttgggccaggactcctcgctccgcactggacacccctgcactgccttctgggtgtgccaggttggcatggggaggctgggctc

SEQ ID NO: 175102 - DNA, 122 bp, Homo sapiens
agacgtcatcggtgaaatgacagcaaaagagaccggaaatcgacacccccctgcccccgccgcccgcccaagcccccaacactaaggagccctccacagtccaagctaaaagcggggcgggg

SEQ ID NO: 175103 - DNA, 122 bp, Homo sapiens
acaccctccccaggcgcaccctccccaggatccccatgatcccaatttttcatctccactcggcaaactatgcttagaaggctgactgtgcacacagtgcccacaaaggagctgtgagctgc

SEQ ID NO: 175104 - DNA, 122 bp, Homo sapiens
gggcgtggccttctggggtgtgcgggctcctggccaatgggtgctgtgaagggcgtggcccgcgggggcaggagcgaggtggcgggggcttctcgcgtcttttcccccagccccgctccacc

SEQ ID NO: 175105 - DNA, 122 bp, Homo sapiens
tgcttcatgtggacgccgtaggcgggacagtgttcgggaggcagggatctcgtcttctcccgaaacctggtgccatcatgttggtctctgggcatcagccccaggcagggagggcgacagga

SEQ ID NO: 175106 - DNA, 122 bp, Homo sapiens
cctctccccttactcccagcccccagccccgttctagctcctgctgcttccctctgtagacgagtcccccaccaggctggctgagtctaggggaacaaagtgtcccacactaatgggcctct

SEQ ID NO: 175107 - DNA, 122 bp, Homo sapiens
agcggtgccatcctgtagcatttgaccactgcctccttttttggaggctgtcttccctttcgccacccccagtccttcttgtctctgaacctccgttctctctccctctttctcttccacac

SEQ ID NO: 175108 - DNA, 122 bp, Homo sapiens
gtgccattgttggcgatgaatccggccatgtccacatttttgccgtcgactgacaggttccgcatgcagcccacgaactgccggttgtgcactgggaagtcttctggcaggttggggacacc

SEQ ID NO: 175109 - DNA, 122 bp, Homo sapiens
gcgaacagctcggactggaaaggccgatacagcttcttgatggccaccttagcgccggtgcggccgtccacggccgagctgcggggcggaccgcttagcgggaaggccgggcaccccgcgca

SEQ ID NO: 175110 - DNA, 122 bp, Homo sapiens
tcttgataggtgggtgatggagggagaacattgctggataaggaattaggtgcaaacacccggaaacatatgaagtgtccaggtaattacacagttctcagccaccagggaacaagattggg

SEQ ID NO: 175111 - DNA, 122 bp, Homo sapiens
aagtgaggagcgcctcttcctggccgccatcccatctaggaagtgaggagtgtctctgcccggctgcccatcatctgagatgtggggagcacctcagccccgccgccccgtctgggatgtga

SEQ ID NO: 175112 - DNA, 122 bp, Homo sapiens
tctgccgaggctgcaggtaggcacttccccacccccgcggccccctccttcctccttcctcgcagctcgcacacccacacaaccctcgcccgtcgcggctggagagctgctctcggcgccag

SEQ ID NO: 175113 - DNA, 122 bp, Homo sapiens
tgcgggaacacatgtcggacccagggagcaaggaacacgccaccccgaggaacatgcaaacggagaagatccctgcagatccaaggatgccacaacccgacgggcgctgaggaagcacgatt

SEQ ID NO: 175114 - DNA, 122 bp, Homo sapiens
tccctgggacggcctccctgcagctccccaagataggtgacagagtggggcaggcgggggcgcgggacggtggcacggagctgaaggcgaaggtgaaggtgaagctggacggggtggggcca

SEQ ID NO: 175115 - DNA, 122 bp, Homo sapiens
ggcgctctccctctctctccggtaggctcaccgagcgatgcgagctctgggagacagcgacgccgcctcccgctagagacctgcccctcggcccggccccctgcccaaccctgcccagcgcg

SEQ ID NO: 175116 - DNA, 122 bp, Homo sapiens
gcacctgcaccctcgccgtcgccctgggctgacctcccatctcctccttctctacccaagcgcccgtggcctgaacaggacttggtttttcaggccttcatgcctcagcttgaggggctctt

SEQ ID NO: 175117 - DNA, 122 bp, Homo sapiens
ctcaagcagtcctccaacttcagcccccttagtagctgagattaaaggcacacgtaaccacgcccggctaatttttgtattttttgtagagacaggattttgtcatgttgcccaggctggtc

SEQ ID NO: 175118 - DNA, 122 bp, Homo sapiens
gactacttgaatgtaatcaaagggaagtcatactttatgacatcacagcagaaagtgtgtcggtgttattaaattacatgtacaatgcagctttggagatcaataatgccaatgtacagact

SEQ ID NO: 175119 - DNA, 122 bp, Homo sapiens
ccaacacggcgaaaccccgtctccaccaaaaaatacaaaaactggtgaggcgtggtggtgcgcgcctgcaatcccaggcactcggcaggctgaggcaggagaatcaggcagggaggttgcag

SEQ ID NO: 175120 - DNA, 122 bp, Homo sapiens
tccaggggacttgcgagtcggtcttttctgccttcgaactcttgagtagctagcagaacccggaggagctctcagaaccccaggccgttgtcatggagagagcgcgcgcccaactacgtggc

SEQ ID NO: 175121 - DNA, 122 bp, Homo sapiens
cggagttggaggggcgagccaagagcagagaagccccaagacgagagaccgaggtgagggcgtcctgagcccggggcccgcttttctttttccagacgaatgtttccaagcagaagccccaa

SEQ ID NO: 175122 - DNA, 122 bp, Homo sapiens
gtttcagattctgtggagaggagaaagcaacgctgttgtcatgatacctaaggaaatggccgcactctcaagttgtgtttttgctgcgcaccggctgtcgggctgtgttcgccgctgggtgg

SEQ ID NO: 175123 - DNA, 122 bp, Homo sapiens
ggtcgaggcattggtgtgttgtgtaaggaaaaaaaaaatggcggggcagaggtccctcaacgggcgaaagtgcctcccaaccacacatgcgtggggacctggggatcctgggcttccctggt

SEQ ID NO: 175124 - DNA, 122 bp, Homo sapiens
ttggaattttcctgtaaggaagaattgagcagctccatgtgtgattgaaagtgtaataagcgaatttaatattaagaacactgtgtgtagaattaaatgaaggactgctaggaagcaacaac

SEQ ID NO: 175125 - DNA, 122 bp, Homo sapiens
ggcgccgtttagggggatggagggcgctgggagctcacatagggtcgctgtcacgcctgccgccctctctggggacctgctctccggcccgcgggccagggcttaagagtcttggtgagtaa

SEQ ID NO: 175126 - DNA, 122 bp, Homo sapiens
tctcccactttcctccccctagatcggctggagctggaagcggcgcagaagttcctggagcgtgcggccgtggagaacctggtgcgtgctaccccgccgcgcccatcccgccgcgtccccat

SEQ ID NO: 175127 - DNA, 122 bp, Homo sapiens
ggcatggagtcgccgctcgcggacagtctttgctggagccccaggtcagaagtgtgtcctcgcctcggccacggctgtagcctgggcagccacagggcgctccaccgagggacactctctgt

SEQ ID NO: 175128 - DNA, 122 bp, Homo sapiens
ttatgaagtttatgaagaaataaatccagccctacatattacttccaaattatgtattttcgattaccggatcaacaattaatgaagttaacttcacatttgcatagacctttaacatttag

SEQ ID NO: 175129 - DNA, 122 bp, Homo sapiens
tctttgctaaaacatagcaagagttgcttttacttcatgtcccaacaagttccttatctccgcctaagatcacctcagcctggattatattgtccacatgattatcagcattttggtcaaag

SEQ ID NO: 175130 - DNA, 122 bp, Homo sapiens
gctccccacatctgcagcacgcgtgggccgggtgtttccaggctccccacatctgcagcacgcgtgggccgggtgtttccaggctccccacgtcacaggtcttaactctgcctcgcaggggt

SEQ ID NO: 175131 - DNA, 122 bp, Homo sapiens
ccttccaccctaaggtgcgttgctccgggtggccgctggccaagtcgcctggggtgggggcggggctcccctgtcaggaccccccttccccagcgtctctccactgcccgcgggcctccagc

SEQ ID NO: 175132 - DNA, 122 bp, Homo sapiens
attcgtgttcggaaagcaatgagatagttcttttctagttgctttgcgtattttcctagccggttttccagccctctttccaccttgctgcgtagaaagtgcagaagtgttaagcaacccca

SEQ ID NO: 175133 - DNA, 122 bp, Homo sapiens
ccctggggtcaccatggtgggtagctggacccaggccttcagcccacgctcctgagggaccgggagcaagggacacgggagccaggacttcggacccccttggggggagtccaggagggcag

SEQ ID NO: 175134 - DNA, 122 bp, Homo sapiens
tctttactccccgacttttaacttttcagaaatctttgtagctcctttcctgttttatctcgcccattgattgaggaagctgttggctcatttcatctggcatatttttcttgttttacatt

SEQ ID NO: 175135 - DNA, 122 bp, Homo sapiens
tccacagtgggggtcctcatccctcccctctcttgacagccccttgagatggagcaggctcggggcccagctgcctgcactcagatctccaggggccctcctgggaatccggtgctgcagag

SEQ ID NO: 175136 - DNA, 122 bp, Homo sapiens
cggcaggcgtcccagagccacgcggggttcgctcgtctcaggcgggtcttgcctgccaaccgctgagctcccttcaatgtcaaaaggaaaagcgttgtcgtccccggacgcggcgcgggagc

SEQ ID NO: 175137 - DNA, 122 bp, Homo sapiens
agttcaggaaatctgaaagcctgacacttgggaactgtcccatagtagctcccagctttgcgtgcccctacctcgcgctccttggaacggccaccaagacgtgaaattttggaagaagatac

SEQ ID NO: 175138 - DNA, 122 bp, Homo sapiens
gtggaaaaggcagtgagcacaagccaagcccgctccaccttcaccccgccccacctcccccggccctttcctgggccagtcttagggccctgagtacagacagcctggctacccgttaacca

SEQ ID NO: 175139 - DNA, 122 bp, Homo sapiens
taattccactaatgctctgagcgggccttcggcgtgagggttgtgtggcaataacctccccgcagcctctcttttctccgtggcgatttatgccgtcttttagtagatgaaaccggctggat

SEQ ID NO: 175140 - DNA, 122 bp, Homo sapiens
tctttactgcctggctggccggcagctccgaggtgtggggttgcagagattttgagttctcgggctaggcggtggcattgcaccccctgtggcaatgagggtggctgaagggctcggcttgt

SEQ ID NO: 175141 - DNA, 122 bp, Homo sapiens
ttcaaggttcaagttcaccagtccccacgtcccgctcccccgctgaagcatcaggatggacgtgaagctgttcttcagaacagaagaacctggagaacgatgttttcaaacaccaagatcct

SEQ ID NO: 175142 - DNA, 122 bp, Homo sapiens
gaggaagttcttactgtaattcaacaggttctgtttcctactcattagttttctaatattcgtcatgcagttagaatgactgaatttataatgacaaatatgcctgccctcaataaaagtca

SEQ ID NO: 175143 - DNA, 122 bp, Homo sapiens
cagacaatgagacttcattgcctctaaactcttctgtaagttttcataagttggcttgtgcgaagcccttttctttgtaatctgaacacaaaggattcaaactttcatcatcccaaaatgat

SEQ ID NO: 175144 - DNA, 122 bp, Homo sapiens
gcagacacccagcagtccctggttggggagttggggcgggggtgcagacacaccaaggggcggtttggtatccatccgctgctccctccagcgcggctcttcccaacctcctgatcctgtcc

SEQ ID NO: 175145 - DNA, 122 bp, Homo sapiens
cacgcacagccgtatcccagaatcaacggtgtctcaacgacaaaattgaaagcattctcacgtattccaccactgggagtccaatatgaagcagcaacacccttctgggtcattatggctca

SEQ ID NO: 175146 - DNA, 122 bp, Homo sapiens
ggaatgacccggaagaccttggcacggctgcagttttctgggaaatgtaatttcttggtccgggcgccatggcccttataagtagagggtgtcccttggtttcgagttgtatcgttcaccag

SEQ ID NO: 175147 - DNA, 122 bp, Homo sapiens
tgccgcgcgtctagccaggcagataagaaaacaactatacccgtcaggcccccaacccggcgccgccataaatggccccggcctcgccattttagttctttttgcgaagtgggctcgtgggt

SEQ ID NO: 175148 - DNA, 122 bp, Homo sapiens
atatagaaatagtacatatacatttgcatttgatgagttttcaaaaactaaatacaccagcgtaaccagcacccacatcaagaagcagaatgttatcaaggagatagtgttttcattaccta

SEQ ID NO: 175149 - DNA, 122 bp, Homo sapiens
tgcgcagagcgggtcacgtgggcgcgggaggggtgctgagaggtggagagcgggagccggcggatttcttaatgaagtgtctccgcatgcgtagagggaatgtagggagggaggtggaagca

SEQ ID NO: 175150 - DNA, 122 bp, Homo sapiens
gccacacctggggtagtctaccccctgtccaggaagctgactctactatattatccaaagcgtacatttcatatttggtgaaaatctgtccagccattttcttgtgatgcggcaatggacat

SEQ ID NO: 175151 - DNA, 122 bp, Homo sapiens
gaaggccccccctcttcccgcaaagctagtctttggctctgcttctaggacttctaggaacgtgcaattaaaataaaatcgaaacaacgaaaccctcgcagcatttagatttcttttttccc

SEQ ID NO: 175152 - DNA, 122 bp, Homo sapiens
gtggctgttgaagacagggggcggagggcgatccggagccgggtttctctctgggagtaccggagtgagtgggagggaaagggaaagcaacgccaggagttggcgttttcctgaggtactgg

SEQ ID NO: 175153 - DNA, 122 bp, Homo sapiens
tctaagtaaggatttactgtttattgtttggtaaatgtctcttccactaaactctaagttcgtttaatacagagactattcatttgtaatgcccaaaacaaatgatcattcaataagttcct

SEQ ID NO: 175154 - DNA, 122 bp, Homo sapiens
agaagaaagaagtgctgtcttccccgtgcagtctttatcctgctcccacatgctggtcttcggcgcaggatcctggagcctctgctccccgtgggggtgggcatgctgtgtcttcacactcg

SEQ ID NO: 175155 - DNA, 122 bp, Homo sapiens
ccgctcacccggttggcagggcaggctgcagatggagcggggcagctgctgcccgctccccggccagtgcatccgctctatctggcaatgacagcaccgtaaagcaggcctcagaacatgcc

SEQ ID NO: 175156 - DNA, 122 bp, Homo sapiens
ttcactgggtcactctcatcttgatgcactcccgggcaagagctaactgaaaggcagctgcgtaacacataccagacacaacagtttatcatgggagagtgaattaaaccaggaacttctca

SEQ ID NO: 175157 - DNA, 122 bp, Homo sapiens
gtctgcggcgcgtgagggcagcggtcccggagagccagaccccggccagggagagctgcccgcgagggagggggcgcggctggcggaggggggcgggatggggcggggggcggggggaggag

SEQ ID NO: 175158 - DNA, 122 bp, Homo sapiens
tttagtagaagtggcagctgacagggacaaacccaggggcccaaagagacggggcgtgaacgtaagcaaacaaacatccaccccgtcagcctctaaggcaaaaaacaccagccagggagaac

SEQ ID NO: 175159 - DNA, 122 bp, Homo sapiens
cttagaaattctttacatttatgtgaactgtgggcaaaaagaatggcattttgtttcaaccgcatttccctgataattagtgaagttggttatctttcagatatatagtgtatattttcatt

SEQ ID NO: 175160 - DNA, 122 bp, Homo sapiens
tggttctctccgccctacagaggtaggtggtagcccattcatctggttactgatactggccggcatcagtggactgtcggcaggtccttgagcaactggtgtgtgaaatgggacggacgtca

SEQ ID NO: 175161 - DNA, 122 bp, Homo sapiens
atatttccctcatgaggcgggtgcaccttggccatatgctttaaaaaatcaaaactctgccgaagtccgctgtggttcctattcctgtagggaggatattaacctggtaggtaggtgggaga

SEQ ID NO: 175162 - DNA, 122 bp, Homo sapiens
cctttctgctggcaacgagtccagatctataaatacttacaggttttgtcaaaatccttacgctgacagttacagtagttctccctgatccacagggaacatattccaaggcccctagtggg

SEQ ID NO: 175163 - DNA, 122 bp, Homo sapiens
ctgctgcttcgggggacccctggcatgctggggagtgggtctctgtggtacatcctgtaccgccctggccggcgccggacccccatggccccagaacctcccgcactgccacgggaagacag

SEQ ID NO: 175164 - DNA, 122 bp, Homo sapiens
gtgggttggaagggagggggctgagcattggtctgaactgtggctgcactgcctgggtgccgtgggagaggccagtgtgtgtgggctggggagggccgccgcagcccccaggcactacctgt

SEQ ID NO: 175165 - DNA, 122 bp, Homo sapiens
gccagcgtgtttgccttctaaggcgtattgttctgtagcgtcggcatcctcaggcgttcacgtaaatagagccattttttacaaggagtagggataaacctggtgataggatgagggactac

SEQ ID NO: 175166 - DNA, 122 bp, Homo sapiens
cagggtaaatttggggggtgttccaggctgcgctcctggcccctccccacaccccacccccgccaggcactgcggcccaagcttcaaagccgcctctcatctggacttcatttttactgcct

SEQ ID NO: 175167 - DNA, 122 bp, Homo sapiens
agaggtgctcacgtgctcaatgctgagttgtgactgaagcatctcatcctcagattcacacggcaaggccttctccacaaacacttacactaccccacataccagtcaaaggaaaacattac

SEQ ID NO: 175168 - DNA, 122 bp, Homo sapiens
aaaaaaaaaagaagtttccctgaacactttgaaaaccagtagtctagatactcttaataacggccagtactagctgggctccctgaaccaatgtaacattgaggtgtagcctcagtcaagtg

SEQ ID NO: 175169 - DNA, 122 bp, Homo sapiens
taggtgcaattacaggatgattttgtgtctcgtgggtgtcgctgctagggtggagggccacgcctcctcttttgaattctgactttcctgcctaggagtgtcccaaggttttccttgttaaa

SEQ ID NO: 175170 - DNA, 122 bp, Homo sapiens
ttttctattacaaaactaattaactggacattcacagagtgcccattatctgctatccatcggtaatagaaagcaatagtgaacagcatatttccttccctttgaggagcttttactctagt

SEQ ID NO: 175171 - DNA, 122 bp, Homo sapiens
ttataaatagaaatgttctctctccatcctcatgtgtcctaccctcgcgttcaccaacgccgaatgttgtttcccgcataaacccaaagctactgcatgtatccactgtcgctaagggcatt

SEQ ID NO: 175172 - DNA, 122 bp, Homo sapiens
cttattacattttcgctccaacttcacccttgtgaccatgctccttaatcattttagaggcgagacaaagaactcagggtgatacctcacaagagaaaccaatatatgaaggtgcattggtg

SEQ ID NO: 175173 - DNA, 122 bp, Homo sapiens
atcctccttctatagacctgatttcagcaacaaattgggaaacaacaattatgagacactcgggagactgtagcactacctggatacttgatatcaaggcatgattgttcacttatcaaggt

SEQ ID NO: 175174 - DNA, 122 bp, Homo sapiens
cctcggctggtgtgcagaaaagcccaacaggcccggccctcgggattagcctgagaggtccgggtcctgataaagtttgagtttggcgctcggcttctgcggaggaggcggggagggagaaa

SEQ ID NO: 175175 - DNA, 122 bp, Homo sapiens
gtgggcgcgccgggtgcgggtagggacgtggaaggactgggctagccacaggaactacagcgctgcggaccgggtgaggggtcccggcccgagtccccacttggggcgcagaggtgtttctg

SEQ ID NO: 175176 - DNA, 122 bp, Homo sapiens
cgatctgggggcgtggcctccgggctccggggagcctacaagaggcggtacgctgagccccggcacccactcgcatcccagggcgtctccggctgctcctattgagctgtctgctcgctgtg

SEQ ID NO: 175177 - DNA, 122 bp, Homo sapiens
ggcgcccgggatcctgtgtagcggctgcagagggtgccgccgccctaggcgaagtagggccgtcctgagcgaaagaaccgcccccagcaggagcaccaccacggcttagcaaagaatcccag

SEQ ID NO: 175178 - DNA, 122 bp, Homo sapiens
accatgtgtcaggcccactggacacggtgcccggcagcttcacacacacaattcgcccttcgtcgtgcacgaggcagtgttccagcatgttcagtcacataagcttcaccacagccatttcg

SEQ ID NO: 175179 - DNA, 122 bp, Homo sapiens
aacattggcattggtcttggggggaggggaggagtagaatcctggctctgccacatattacgtgtgactctgggcaggggacaactctgttttctaggctctgcttcacctctttgggcctc

SEQ ID NO: 175180 - DNA, 122 bp, Homo sapiens
tatgaaaggcctcagcttgggagcggcctgtcagcggccatattaacaactggcaaactacggcttgaatccctgagaaacggaggcgcgtggtttctgcaccctggttggaaaggcccgag

SEQ ID NO: 175181 - DNA, 122 bp, Homo sapiens
caccctgtgcccctacttgcctttcccccaaagctcctcctcctccgggcacacacatgccgctctgttttctgttctggagctgcctgaattgtgtgatttttgtggatgaatgtgaactc

SEQ ID NO: 175182 - DNA, 122 bp, Homo sapiens
tttgcttgctggcagcatggcactgtgctcctctgagactcttgcatactcttctgagatcggggtcccggtgggctcagtgagccctgccaacctacccagcctgtcttaccaagatttgg

SEQ ID NO: 175183 - DNA, 122 bp, Homo sapiens
gccgccacacgcacaactcgtgtattcactgctcacgattcagagtagaaagcgtgaacacgcacgaggaagcaacactcaccgtttctccgatgtcccaccccactcggccacacggccag

SEQ ID NO: 175184 - DNA, 122 bp, Homo sapiens
tcatgccgacaaagtctcctttttcctttctgctacagggcctgtcctgcagctccaaaacgaggacttagagctggctagggtgggagggaggatctcagctcagccatgaatggttcact

SEQ ID NO: 175185 - DNA, 122 bp, Homo sapiens
ggacttaacaggctcgcccacaggtaccttccgagcatgcgtggggaagtagcacgcaggcgcggcacgccccgcgcatgcctggtgcacagagtctgcaggtcgggcggtagcgacaggtc

SEQ ID NO: 175186 - DNA, 122 bp, Homo sapiens
cctgctggcgggccggccccagccgttttcatgcttgttgggattaggggcagtaaagggcgctcgggactgtgcggatcaacagtctgtgcggggcggcgcgtgggggcgggcttggcccc

SEQ ID NO: 175187 - DNA, 122 bp, Homo sapiens
tatcaggggattcatctgttcatacattcattcattttcccaacacatttactgaatgcccgcaagcaccaggaaaatagcaatgggcacaaccaggttcctatcttcatggagctattgct

SEQ ID NO: 175188 - DNA, 122 bp, Homo sapiens
tagctctgctgagttagggggcagggtggggtgcagcccagccaacagcatgccagggcgcgtcactgcccacgcgatgctggcttcagccgccttcctctcacctcatggccctgccagcc

SEQ ID NO: 175189 - DNA, 122 bp, Homo sapiens
cagcatccatcacttagaatagatccttaacaacgacaacaataacagtagcaaaatggtcgtaatagtaataaggaacgggagctgccaataggagccattacggtgtgccaagaacactg

SEQ ID NO: 175190 - DNA, 122 bp, Homo sapiens
gggggcaccataagactccctacaggtgggctacacttaggggttcaaatgctgcattaccgcgctcgggtgagcgactgcccggcctgcaactcaagggactcccaggccaagtggctccg

SEQ ID NO: 175191 - DNA, 122 bp, Homo sapiens
cgaggcgcttcttccaatcaagaagggctcggggcatattttagccaatcagaagggctccgggcgcatctaagccaatcagaaggagccaggtacggcgaccccaggagagagcgtgtgac

SEQ ID NO: 175192 - DNA, 122 bp, Homo sapiens
gagttgaggacttgggaacaggacaagttacggagccacgttgctttgctgggtctgagccggggtgtgacgtagtccctgcagctgccaacggttgccagggcaacggttgccaggggctg

SEQ ID NO: 175193 - DNA, 122 bp, Homo sapiens
ttataaaactggtaacagtgtgtacagatatgtttcaggggaaaagtctctttcctccagcgttacggagccctcaccagcatttgtttccacagccgatattatgtacacggggacagttg

SEQ ID NO: 175194 - DNA, 122 bp, Homo sapiens
ttccacttcagggacactggctgctcctccccagccctcggggccccatccttgctccaccggctgccacctgtcaagccccagagcagccggggtgcagactggaaaggacacggggtctg

SEQ ID NO: 175195 - DNA, 122 bp, Homo sapiens
ggaaagcccactaaagccttacgtgggactggacgaggagcagacaggctgtccttgacacggaggtgggcacagagcaggacttcaggggtcctgtgtgtaaaaagaaaatggaaatactt

SEQ ID NO: 175196 - DNA, 122 bp, Homo sapiens
cacgctgggcactctggacttctacatggcccggcttcacggagccatcgagcgcgaccccgcccagcacgagaagctcatcgtccgcatcaaggaaatcctggcccaggtcgccaggtgtg

SEQ ID NO: 175197 - DNA, 122 bp, Homo sapiens
acggagagcctctgaaaactgattagaaccatttgtgtggccaacaagaatgagggccgccgagaactggaagccggggacaatatctgctctgttctggcgcatagcagatgccagcgcgg

SEQ ID NO: 175198 - DNA, 122 bp, Homo sapiens
tgagctgagtcaatcattcctgctttatatttaaactgcaaagacagaacacagagcattcgatttgaaaattctggacccatttgcaccagtccctgctgaccccacacccttccttcctg

SEQ ID NO: 175199 - DNA, 122 bp, Homo sapiens
ctcggtcgtcccaggccagctcgacttgcagtccgccctcgtggggcgggagacgcccgacgcccgcccacctcacccccggggtgccctccgtggcctcacggggacgcagcgtcgcagcg

SEQ ID NO: 175200 - DNA, 122 bp, Homo sapiens
cgattatttgttcaataattttccgttgatcccttagtcttgtagtcgctactttataaccggtccctagaagggggcggttctttccggaaattatgactgcagctgttttcactccgctg

SEQ ID NO: 175201 - DNA, 122 bp, Homo sapiens
ccagtccccctagacgagaggtggaaggaggcgctggggaaatcctgcaaagcaggaatccgcactgaacagcaggatccttttccaggaattgtaaacccagaattgtaaataaaatgcta

SEQ ID NO: 175202 - DNA, 122 bp, Homo sapiens
ttcttaaatgctcactatggttaggatgtgctgttcttcaagcttaaaagttcttagagccgagtgggaggccatgatgcagaatagagtaactatcaaagggcatgtcccattgagatggc

SEQ ID NO: 175203 - DNA, 122 bp, Homo sapiens
gtttccaggcctggtgcctttgggacaggtcataggtcataggtgaagtcagtggacccacgcctccacatctcagctgctcgtgggcggggctggggacgcatttgctgtgcaactgatga

SEQ ID NO: 175204 - DNA, 122 bp, Homo sapiens
gctccccgggtgggtggaggcctgcaagccccaccgcgattagggagtgggcccagggcgcgggaggggccgggccggccttttgcgcacacacacacacacacacacacacccgccttttg

SEQ ID NO: 175205 - DNA, 122 bp, Homo sapiens
ggtgcacacacgcgtctcacacgcaaaccaggccgcaaaggaaaaacccggactgagctccgagtcctgcctgagagctgctcctggtttcccgggcaggcaggaatctccaagcctcctcc

SEQ ID NO: 175206 - DNA, 122 bp, Homo sapiens
tatattagaagaccaagtggtttcagatgggttgcaggtgggtttcatggcatgctgcttcgttgaagcagtgactctcagcctggctgtgcctcagaaacacctgggtagcctctgcctct

SEQ ID NO: 175207 - DNA, 122 bp, Homo sapiens
gcaggtccggccgctgctcgggccaagtaaacaccgggctgggaaagctcgctgcggagccgctcgggggcaagccagccccgccacgcgcgcctccgcggccccgggaagtcaggggcgac

SEQ ID NO: 175208 - DNA, 122 bp, Homo sapiens
ggtgatcagccacccacagcacctcgcaccccatccatccacctgagccaatgctgctgccgtgtggacactctggggctcacattcagagcagaacctgctttgcctagcaggtaaagcta

SEQ ID NO: 175209 - DNA, 122 bp, Homo sapiens
ctaaatgcaacccagggcctgaaggagagctgctctggccagcaggcacatttgtgagtgcgatatagatgattgctgctctaagccacggggattgtggagtttgttatccagtaggactc

SEQ ID NO: 175210 - DNA, 122 bp, Homo sapiens
ttgcgcgggatcctggcaaagactagcgcgggccgggggtccgggagagcccgctaggggcggggattccggggagccgtcttcaccggttattccgggatccagctgggcgctggggctgg

SEQ ID NO: 175211 - DNA, 122 bp, Homo sapiens
aggcctgtccttaatccttctcaagctctgtatcttgccaagatctggcctgtggcccggcgcagcaaaagctgggaaaatgccagtgactcaacccagttccattgatcagtgaaatggaa

SEQ ID NO: 175212 - DNA, 122 bp, Homo sapiens
aggataaatgtcaaaagaataaggaaaatggtcaatggtctaacacccgagtgcagcgttcggttgctagttgtcatgcttcaaaggcagatcctgatctgatcggcttagcgggggctgag

SEQ ID NO: 175213 - DNA, 122 bp, Homo sapiens
cctcggctcggcttttctcttgcagtgagctgagtgcgctcagccgaggaggggccgcgccgcgccgcgccggccgcggggcccagcccttcccgccgcgcccggggccgcccttcccgctg

SEQ ID NO: 175214 - DNA, 122 bp, Homo sapiens
aaaagcatcctgcagcctgcggcggcttccctcctctggcccggccccgctgctcgcgcccggcgcaacccccccgccaccgcgccccagcaaaccggctccccgggcccgcctcgccaagc

SEQ ID NO: 175215 - DNA, 122 bp, Homo sapiens
tgggacgaacttttcctcccgggtcctggggccagtcaggggtgacacaaagttcccagccgccgggcgcgcgagttctgagttggctgctccccctaaccctgctctgtccctgcccagct

SEQ ID NO: 175216 - DNA, 122 bp, Homo sapiens
agagtgaaaacaagggcccttcatgggtgaacattagaaagagccagggttcaaagctggcgaatggatgacgcaccctagccactggcccctctctgtttcatgtatttccaaaagttgta

SEQ ID NO: 175217 - DNA, 122 bp, Homo sapiens
ttacaggtgtgagccaccgtgcccggcagccatagtctttttataacctaatagcagaagcgacatcacagaatttatttaattatttttttcagacagggtcttactctgttgcccaggct

SEQ ID NO: 175218 - DNA, 122 bp, Homo sapiens
aggtccacttgctgcttgtacgggagccttgtttggggagaggggcttgtgaggctctgacgaatgccctcgaggccccgggcacacaccgcaaccatctgtccatggctctgcgagccact

SEQ ID NO: 175219 - DNA, 122 bp, Homo sapiens
acaaatgtttggagaatggaagcattatccctatagaacctgactgtgatgaagagcccacgccagtttgtgaacgagaagctgaagttgtcatgggcatcattgataaatggacctgctgt

SEQ ID NO: 175220 - DNA, 122 bp, Homo sapiens
taaccaaaaactccaacaagagggcgccatcctggccattcccgactggagcgctgcctgcggtggcacagtcgcccctgccaggggctggctgcctcatggtcccctccccttcccagagg

SEQ ID NO: 175221 - DNA, 122 bp, Homo sapiens
aagtgacagaaaattcagttttaaaatggcttaacaaggaaacagtttcgttcccattcacgtggaagtcatgtaatcattctaggatttgcatggtactctatggtatccagaaagggaat

SEQ ID NO: 175222 - DNA, 122 bp, Homo sapiens
acaagattaggaagctgaaagcctgctctccctagctgtgggagcatggggccagccctacgtggcattagttttgtcttctgtaaaatggggagatgatacaccagaaaagaccacccggg

SEQ ID NO: 175223 - DNA, 122 bp, Homo sapiens
gtcctggcttttggtcacccactgttaggctcatataacagacaaggaggtgccattgtccgttgtctgtcccttttacatcagctcatcttggctcctgatttcctgggtctgatatggaa

SEQ ID NO: 175224 - DNA, 122 bp, Homo sapiens
cctttcaccactgacacatggatgtcacaaatgctgtatacacagcctcacatagatgcccgcacacctacactggcccagaccccttctcatgcctttacaaacacattacaagaattaaa

SEQ ID NO: 175225 - DNA, 122 bp, Homo sapiens
gtcgccaacgtctccgcgtcggggtttgtaccgcagctcgcgtccagtcgtcaatggctgcgaggcccatgcgcgctccagcgtcctgaccaggggaacgttttccttagggacccggaggc

SEQ ID NO: 175226 - DNA, 122 bp, Homo sapiens
tccaccattgcgaacggcctggaaggacaggactcggctcggttcggctcggccaaggtgcgcacggaggcctcgcaggaagtgcgtgtccacggaggcgcttggtggccaggggcgggggg

SEQ ID NO: 175227 - DNA, 122 bp, Homo sapiens
tccacccccaggcttctctgtgcaggcagagcccggcccggcctggagagctcaggacagcgcggcttcgggccggccctgcaggagtgccgggtgggtgttttgtgtgtccccatctctgc

SEQ ID NO: 175228 - DNA, 122 bp, Homo sapiens
ctccttgatagttcagctaagagccgtgcggtgagtctcctgacgttttatggcacttgacgctggtaaccactcccttcccgaggacggagaccgcggccctgccagtatcgctcacgctt

SEQ ID NO: 175229 - DNA, 122 bp, Homo sapiens
gggactacaggtgtgcactaccacaccaggccaatttttgttttttttttttggtagaaacgggtctgttttgcccaggctggtcttcaactcctggactcaaatgatccacctgcctctgc

SEQ ID NO: 175230 - DNA, 122 bp, Homo sapiens
ctccaaacaaaacagaaacggtggccgcatctgcgtgtgtgtgtgtgtgtgtgtgtgtgacgggggagaggagttgatcttacctgaaacatagtttgcgcttctgtgtgtgtggccgaaga

SEQ ID NO: 175231 - DNA, 122 bp, Homo sapiens
tggaaagggacaccaaagatttccaattccggagagcgggcccgaggaagggtcactgctcgggcgcacgaaagctgtctaaggcttgggcgtatatggggaactctggcttttgccacgca

SEQ ID NO: 175232 - DNA, 122 bp, Homo sapiens
gccaggcgcggcggctcaccccagtaatctcagccctttgggaggcctaggcaggcaagtcgcttgagtccaggagtttgagaccagcctgggcgacatggcaaaaccgtgtctctacaaaa

SEQ ID NO: 175233 - DNA, 122 bp, Homo sapiens
gtgccgctgaattctgtccaggaaagacccttcagtgggccctggtcccaaggtaggcaacgccagtcaccctccacctgactcccgcaacaagacctttctccctctctgttgctggaacc

SEQ ID NO: 175234 - DNA, 122 bp, Homo sapiens
ggaggcgggctgggctcggctggagaccggacctcggtgttggcctacagcacagggagccggccgaatgcgcgtgattactggacggcgctgctctgggagagagtcggggccagatttgg

SEQ ID NO: 175235 - DNA, 122 bp, Homo sapiens
ggaggtcctggtgaggtccccaagctcaggctgcggaggcttcttgggaaagtcactcagcggaggctgggaggcctttttgggaaaggcgctggagtcgcgcttcggctcgctggactgag

SEQ ID NO: 175236 - DNA, 122 bp, Homo sapiens
ccagggcctgcagctcccgccgcagttccaggtccgacaggccggccatggccaggacgccgccccccgcccgcccctggcgcgcaccgcacccggaactgctccctcccgcaggcgcggcg

SEQ ID NO: 175237 - DNA, 122 bp, Homo sapiens
gtcctcccggggccgagtcagctctcattcccctcaggtgggctgcgagccagaggtggtcgttccatgagggtgggcgggaatactcaccctcggaatccgaaaagcgccgccgcgagcct

SEQ ID NO: 175238 - DNA, 122 bp, Homo sapiens
ttgaggcaacgcagctttcctccagtgtttgcagaaaaatcaaagccaggggggtgagcccgccggctgtcaaccttcccgccgcctcccccgccccactctgctcccgcaagccgagaacg

SEQ ID NO: 175239 - DNA, 122 bp, Homo sapiens
gggtgggccgcgcagcgacggaggcatgggcgtggcgagcgcctagcgaggggggcggggcgtggggggggcttgcaatggctccaaccggaagggcggtgctcgagctgtggtgcgtgccg

SEQ ID NO: 175240 - DNA, 122 bp, Homo sapiens
aggcccaggagccgttacccggtttcattttcagccaaaatccccgcaggttggtcctggcgagggcggggctcggtgggcggggctggccgcgggggcggggccagggtctcacacccatc

SEQ ID NO: 175241 - DNA, 122 bp, Homo sapiens
cgccggcagcgctgacggctgcacctcccctcccacgcggacactacctgcaggatcggacgacccccagaactgtttgccaacaaagacatgcagggggcggagcctgagcgtcagatacc

SEQ ID NO: 175242 - DNA, 122 bp, Homo sapiens
atctagtgatccacttgcctcggcctcccaaagtgctgggattacaggcgtgagccaccacgcccggccatgactggctaattttttaaattttttgtagagatgggattgcaccatgttgc

SEQ ID NO: 175243 - DNA, 122 bp, Homo sapiens
aacatgtgtatattcccagttgttttacttctgccagagcttcccagcagactaaaaccacggagcatgcccttcgggagtgatctcagtcctccatcgtgtccacaggcagtgcggattaa

SEQ ID NO: 175244 - DNA, 122 bp, Homo sapiens
cgaggccgccccgagtagtgcggcggagccggtgatcgtctccaggtcggatcccagagacgagaagctggccctatacctggccgaggtggagaagcaggacaagtatctgcggcagagga

SEQ ID NO: 175245 - DNA, 122 bp, Homo sapiens
catcttactagatgtgaaaccttgggatgatgagacagatatggcgaaattagaggagtgcgtcagaagcattcaagcagacggcttagtctggggctcatgtgagtttaggctttgccttt

SEQ ID NO: 175246 - DNA, 122 bp, Homo sapiens
cggggtctagagaagcactgagaggactcctcagcctggtgagtggcccgcaaaggacagcgctcgccccaggtgccttagcctcaggagtcaggtcccctacccgggcgtgcaggcgggtt

SEQ ID NO: 175247 - DNA, 122 bp, Homo sapiens
gccccagaggtcagcaacttttagtaacttgctctttctcggcgagtaactaatttcccccgctctgggcatcccgcagtccttccctaagaagtcactctgtgtgtagatgttgtctcttt

SEQ ID NO: 175248 - DNA, 122 bp, Homo sapiens
cctcccgctcccggtggcctgaactgaatttgctgctttaaaatcggcaggtgtgcccagcgttcccagcgctgcagccgggacctgatgagtaagagtaagagggctcaaccgcaggacat

SEQ ID NO: 175249 - DNA, 122 bp, Homo sapiens
cctgcggggcctcctgagggagcccttggggtcactccacagtctgggctttctgtagtccggtgggtcagggctccaagcaccaggagagatccagggatgcgcttatgtttgggccaccc

SEQ ID NO: 175250 - DNA, 122 bp, Homo sapiens
acgtcaccggcggcggcaggccccgcctccagccccgggcggcaggccgcatgacgtcaccgaggccccacccctccggagcgagttcggtcctggcgttcatttcattcctgtcctcattc

SEQ ID NO: 175251 - DNA, 122 bp, Homo sapiens
agcgacagccactcccctgggcccagagtgtaggcccaagctgcttggctacgagggctgcgtactgaggaccaacaatgagccaagctatctgcagacagcccgggtgcccaccacggcct

SEQ ID NO: 175252 - DNA, 122 bp, Homo sapiens
cgccgggctcccttctccccagggtccgcctgcggggacacctggggctggggtctccagcgcctcggcccgacggaggacctggtgggagcggaccgcagtgtcagcgctgggcggctccg

SEQ ID NO: 175253 - DNA, 122 bp, Homo sapiens
gctcatctgcaaatttttgggagacccacgggggcggggaaagcttggccctggagtgggcggctgctgtcgagtctgtgtaaacccggtctaatccttgggagctaccccggccaggcgaa

SEQ ID NO: 175254 - DNA, 122 bp, Homo sapiens
cccaggaaatatctggagctgtctggagacatttatggggggtgtgctcctggcacgtagcgggtagcagtgggggcacggctcatcagctcaaacccacaactcatccagctcaaagtgtc

SEQ ID NO: 175255 - DNA, 122 bp, Homo sapiens
ctgctcggtgttttaaagtttaaagcacaccactgcggaaaggataccccaccactcactcggagcagcttagacgcccctgtcttctagaactaggcgctgcctgggtgccacgaagatca

SEQ ID NO: 175256 - DNA, 122 bp, Homo sapiens
gcgaacggtcgaggtaaaactgcgaacagtggtgactgccgtcagcccgctgaccggtcccgtctatccgagctgtcttaccagcttggtggcccgataaggcccgggaggcacaccctgac

SEQ ID NO: 175257 - DNA, 122 bp, Homo sapiens
cggtggggtccgggcgcttggataacgttcttggtgggtaggggtcgcggggaatctctgcgggcccgggactgcggggacttggtccccggctccaccccatcatgtggctagccccggct

SEQ ID NO: 175258 - DNA, 122 bp, Homo sapiens
tgaggccccctctggagtttctggccattcacttacccactctcttctccccctgacccccgctccattgtttatgatggaaaaacggacatttggctaggtgtctctcacggctgctccat

SEQ ID NO: 175259 - DNA, 122 bp, Homo sapiens
gcgttgtctcaggtctgccccgtctgtcccggctccctctggagtcacttggtgcctccacggccacctgctggtttggagctgcccgagtcgttaattgctgtttgctaaatgaacacttt

SEQ ID NO: 175260 - DNA, 122 bp, Homo sapiens
gaactgcgggcgccaccggcgctccaggatcaaggatccgaggatttaaacctttcatttcgtcaacggttaagttccggggcggggtaggctttccgcaagcgcaatggaaagcccagcta

SEQ ID NO: 175261 - DNA, 122 bp, Homo sapiens
gggggtgctgggctggacgggggtcctggttgtccctcctggttctcctggttctccctccgcagagggagggaggcggtggcctcagcagttcctccagcagcgttcctgagcgggcggca

SEQ ID NO: 175262 - DNA, 122 bp, Homo sapiens
attttgaggtcctgggcattcgtcagcccggtgtctgctctcgcccctctgcgtgatgagcggcaatcctcagccagctcctgctgtgaggagtaagacaggtgctgtgtcttggcctgcat

SEQ ID NO: 175263 - DNA, 122 bp, Homo sapiens
acagcacctctggtcctggctggggctcctcagtccctgctcctctggagctgtccgagccggaaaagaccaagcgcctgccttaccttatcctgtgcgttcaggtgggcgccacactcgat

SEQ ID NO: 175264 - DNA, 122 bp, Homo sapiens
cgcgctcacaaggcaaatacaaatggccaggcactcattctttacaatacacatattaagcgcctattatgtactacacgccgggactacctcaagaggtgaaacaaacaaaatcctgcctg

SEQ ID NO: 175265 - DNA, 122 bp, Homo sapiens
ctggttcgggaagggaggccgttggcagggccatcaggatcctctctggacatggaaggacgggtctgccctggacccagggattgggaaatgtgggttctctcagaacctggggaagtggg

SEQ ID NO: 175266 - DNA, 122 bp, Homo sapiens
cgcccagtgatcgcaggctcagcatcagaatcacctgcgtggggcggagtgggaggggggcggtggctgttaaacacgcagttcccggtcccgcccccagaggttctgaccccgggactgaa

SEQ ID NO: 175267 - DNA, 122 bp, Homo sapiens
tctccctcacttgtcccctgcaacaggggctgagccacaaccgactgtggatctcggcagcgacagtgaggagggagtctgcagcgagcaggggaggagaaggggaggaccaggatgaggtc

SEQ ID NO: 175268 - DNA, 122 bp, Homo sapiens
ctagctgttccgccctgagttaattatagctataaaatttcgcgaccagcaagcagaaaccgggcgacttctccagacacctaagactacgcttcccagaaaggattgcgatactctcctac

SEQ ID NO: 175269 - DNA, 122 bp, Homo sapiens
gtggaagcgcagcggctgttggagctgcctcccacctctccccttcccaccatattgaagcgagtcccaggcaccgtgtcacctgttggtgttagcgatctctgactcatatgggctctttt

SEQ ID NO: 175270 - DNA, 122 bp, Homo sapiens
tacagtgaactgggccagtgcctagctggactggctgccagggcagcaggatgcagggctcggtggagaggctcctcttgggtgagtagaggggtgggggcgtggtggggggacgccaccca

SEQ ID NO: 175271 - DNA, 122 bp, Homo sapiens
taaaaaatgaccttagatcagtcctttcctctttggctggggagaggggggcttaaattccggtactgtgaaacagaagaatggactcagtgctatgtgacaaatctatgtatgtaaatgtg

SEQ ID NO: 175272 - DNA, 122 bp, Homo sapiens
caaaatattatttcacataattatgcaaattgtaagactctgtgttgtaaagtagtgtgtcgtgctgtgtagcttaggagggtgtctctttgaaagtggagacaagataaatgttggcttaa

SEQ ID NO: 175273 - DNA, 122 bp, Homo sapiens
ctggcacctttaacaatatttaaataacacaagaacactggtcttagatggtgagacctacggtgaaaagggactatatctaaccattctcatgtcccccccaaacagcctgtacttcataa

SEQ ID NO: 175274 - DNA, 122 bp, Homo sapiens
ccatagggttggagccacagataacagagccattaatctcggggtctcagcctctcttaacggaccttccaggcactgctgagaaaaccaggttaatggtttcctgcggcagcaatgagcag

SEQ ID NO: 175275 - DNA, 122 bp, Homo sapiens
ttggactcccaaagaataaaatatgacttattttaaagtcataggcagagcaggaggcaccgcccatgtctaatgagtggtgtgaccacagagggacagcttacagtggctgtggggctttt

SEQ ID NO: 175276 - DNA, 122 bp, Homo sapiens
ggccaaacaagcccgagtaatctaggctgagattagacatgaaatccacaagatcaaattcggctgggctgagacgcgcagcagccacattttcctgagcagagaggtgagagcgctgcagg

SEQ ID NO: 175277 - DNA, 122 bp, Homo sapiens
aggcctgcccccagccagcgagatgtcacgcatgcagccgggtgtcatccccaaaactcccgggaaactctcggggcaccagggcaggaagaggctgacgtcaactttaactccggggactt

SEQ ID NO: 175278 - DNA, 122 bp, Homo sapiens
taattcaatgaacttaattggtatttgctctgtcctcccataacaaacaagaatctctagcgcatctccaactttcagcctcctttatcccttaatcattaaaaactgctttctactcccct

SEQ ID NO: 175279 - DNA, 122 bp, Homo sapiens
ttttaataactaagctcttctatctttttagcctcatcacctgccacagtaacctaccaacgtctggcacccagccattgccaatgcttcctaaacccaaacctgtgggtttccagggagac

SEQ ID NO: 175280 - DNA, 122 bp, Homo sapiens
agggcaactgtcacttcacatttcactgagtaaggaaattgcagctctggctagtgcaggcggggagagacatctggtttccagggtgcctgaagaatttccttgagctccaattagagtca

SEQ ID NO: 175281 - DNA, 122 bp, Homo sapiens
ttgtttaccctgacccccagcccctgagcaagaatgaggccagagctgagagagactccccggaggtctctgggttgtcacggagacaccccaaacatcgagagctggtctgggcagccggc

SEQ ID NO: 175282 - DNA, 122 bp, Homo sapiens
tcggatgcctcggctacccagctgcgacgggacctccagctcagaaccggctggtgggctcggtgccacgagagctcccggacgtggatgaaacccaaggaatcccctgggatggccagggg

SEQ ID NO: 175283 - DNA, 122 bp, Homo sapiens
ctctgcaccgcccccaccccatccctgggcacagggcctggcatcagtagaggattcttgcgcgaattcggtgcacgccgaaacattctacagaacccatttccactttcagctgcgtgggc

SEQ ID NO: 175284 - DNA, 122 bp, Homo sapiens
gccaaaaagtagaaaaccgtgaccgtagaaggcaacggcacgtgactgtgctttctgggtcgtgcatctttgtggcgataaaaacagagtcctaactgagctgaacaccagaatgaaaacta

SEQ ID NO: 175285 - DNA, 122 bp, Homo sapiens
ttcccagccgaaaccgagactgagaccacgcgtgctgccccgaggcgcgggctgaggggccgccgggctgggagcttcatgctcgcctcggtttactgaggtcatccagccccagtgggctg

SEQ ID NO: 175286 - DNA, 122 bp, Homo sapiens
ggaggtgcgaccagagacatcacatgcgagtcagcgcacggctgtgttctcagtcggcagcgtgggtgccgtggtcacgcctgcgggtggggtgtgagggttgattcatgtgtcagcgctgc

SEQ ID NO: 175287 - DNA, 122 bp, Homo sapiens
tccagggcggccgcacaatggcacgtccacatttgtgggagaagagtcggtggccggatgcggctggtgacgtggtgccaagtgaaaagctcactctaacccgattgtttttaagaagctga

SEQ ID NO: 175288 - DNA, 122 bp, Homo sapiens
agtcattgtaggtgaggccgttggtgctggtgaagagctgctgcgcggtgagcccgtcctcgggcacgtagctggtgccgctgctgatcaggtagtctgccaggctgccgtgacaccccgcg

SEQ ID NO: 175289 - DNA, 122 bp, Homo sapiens
caggggtctcggggccgcatcccggaccagcgccagcggcgggagagcgttgtctgtgagcggcccagggtatattccttctgtgggaaagagttccttagagttcagcaggaattattagt

SEQ ID NO: 175290 - DNA, 122 bp, Homo sapiens
ggagagacccccagaccactgggcaggcccaggactgggccggcattggggcagacaggccgccatgggagggcacctgcatctgggctgtccgtgagcagtcagccccaaagtccagcgct

SEQ ID NO: 175291 - DNA, 122 bp, Homo sapiens
cactgggtttattggagcacctaggcttagaacctcggatttctagaaccccgaaacctccgcggttccccgaaccttaggatcctctcccacatgtcgtagaatcttggaatcatgacagc

SEQ ID NO: 175292 - DNA, 122 bp, Homo sapiens
ttctcttttcctaacccccgctccatgtcttcccttgggccctgaacacaggtccaagtccgtccaagattgtatagtgatccatttgttgttcatgagcgtgtgattgggtgttcaccagc

SEQ ID NO: 175293 - DNA, 122 bp, Homo sapiens
ctcttggggcggtgctttctatcctgctggctggagggtcccggaaggggactccaactgcgcgatgcctcggccagaggacaaaggagaagcgggttgggggccgctctctgcgctcggag

SEQ ID NO: 175294 - DNA, 122 bp, Homo sapiens
cctcgtcacctgggaggggtccgccagatgtgcccctcctcagccccattttggggagaacgatgggggcgggggcgtgggggtgagcacagccgggcacccccgcacacccgcaggcggga

SEQ ID NO: 175295 - DNA, 122 bp, Homo sapiens
tgaacctgggaggcagaggttgcagtgagctgtgattgctccactgtactcaaatctgggcgacagagtgagacctgatctcaaagaaaaaaaataaaaataaataaataaataaataaata

SEQ ID NO: 175296 - DNA, 122 bp, Homo sapiens
ccaagtagtcatgctttccagcactcacgagtcacgtgtgccgggctgtgtcctaacaaccggaagggaagagtcatgctgggatgcccactttactcgttagaaaaaggaggctggagtcc

SEQ ID NO: 175297 - DNA, 122 bp, Homo sapiens
ctgagaggaaacattttccagtgtcctccttcctttttctttgaaaatgagctcaacggccgtgttcccaggcactataacaaatgagttgcttcaggcacagagaggcattaataaatgat

SEQ ID NO: 175298 - DNA, 122 bp, Homo sapiens
attttactgttagttgtccaagcccttagttctatgggtcccaattcactttgaaaaaagcgggatgcgcagaagtaggttatttgttgagtcagtctgccccctggtggaacagggtgaaa

SEQ ID NO: 175299 - DNA, 122 bp, Homo sapiens
caaattgaattttcccaatggggcacgagagtgggaggtacccaatcgagggttggctggcgcgtcggggcagggcggggccagccgggctgctggcgcggctggacgggcagctctccgca

SEQ ID NO: 175300 - DNA, 122 bp, Homo sapiens
cgcggggggcgtcctgcagggcagcccggggcatgccgggaggtggggcaagccccaggccgtggagagcggaagtggattccaggagccttctagggttgcctaagaaagtcggacgggtg

SEQ ID NO: 175301 - DNA, 122 bp, Homo sapiens
agccccagagtgtcccgcttactgtacagctcgcacatggtggcggggtgcagggcgctgcgaaggtgcaaggtgcaaggtctgcgcgcctcctacgcgagcctgggactgccttggcggcc

SEQ ID NO: 175302 - DNA, 122 bp, Homo sapiens
ctgtagatactcgttgctattggatgcaatgtgggaggcacaggactaaatcctgtaggtcgttgaggaaagggccgctttgcttttggtcccgggaatccaggttccccttcttccccatc

SEQ ID NO: 175303 - DNA, 122 bp, Homo sapiens
tgtggggagagttgatgtctgtggactcttaaatcactttccgctaccaccacgaggtgccggagccttcctcacactgtcctgccagcccctcacccagtgacactcagggcaacgggcat

SEQ ID NO: 175304 - DNA, 122 bp, Homo sapiens
gcctcaatttaaagtcaacactgaaattttgactataggacttgcctttcaattgcaacacggtcattgtttcgttattagaggtgattattttcattttttagaaaacctaaatgtgacca

SEQ ID NO: 175305 - DNA, 122 bp, Homo sapiens
taccttggtgcggatgcggaggtgttggtagggacggaactcggggcgcgggcggtggcccgagtggagataggagttgaaggtgcagagggccacgctgggcagcgccagcacgaaggtca

SEQ ID NO: 175306 - DNA, 122 bp, Homo sapiens
ctgggaggccgtgggggagccctgtgggggaactgcagtggcagagggcgtgggccctggcgtgggcagctgaggggtccctggaggagctgaggagggagctggggtgaccccagtgggag

SEQ ID NO: 175307 - DNA, 122 bp, Homo sapiens
ggcctcaagcgatcctcctaccttggcctcccaaagcattgggaatccaggcatgaaccccgttcctaggcggcacttgattcctgttccaagatctggggaaatccgacccgaaggaagct

SEQ ID NO: 175308 - DNA, 122 bp, Homo sapiens
ccaggcatgaaccccgttcctaggcggcacttgattcctgttccaagatctggggaaatccgacccgaaggaagctttgctctaagacctccttggccgtgttgggctcagacgtggactga

SEQ ID NO: 175309 - DNA, 122 bp, Homo sapiens
tatatatataaaacacaagctacttcgagctccgttttccctgggttttatcatggctttcgtctccgtgatgtcactggcggctgcgtggtcttttcagtgaacagaggggcctggatggc

SEQ ID NO: 175310 - DNA, 122 bp, Homo sapiens
ccagtgagcgcccttgcggaggagctgtggcccggggaggacacccccagctcttttgagcgctaaacattttcacagagaccccgcgaatgggcttttggcttttctagggtccagatcga

SEQ ID NO: 175311 - DNA, 122 bp, Homo sapiens
tgcggaggagagggaagaaggttgtagggagcccggaagaaactacagcacccccgtagccgccgggcgctgcctgaggggcaaccggagctcgtggagcccgctgggaactgtagtcttcg

SEQ ID NO: 175312 - DNA, 122 bp, Homo sapiens
acttacgtcattccaagaactctagtataaaaatccagtgacttcttaggatccttcactcgtagcatggtctgctgcaatagaaaatcctatggaaaaatatttatattaaacatctttca

SEQ ID NO: 175313 - DNA, 122 bp, Homo sapiens
cttctgtaatggggaggatcctccagtcttcgtgtatgtgtgaactcggaatttcatagacggccttggctcacgatcggtttggcacttcgcgttcctaggccacaggacgtcgaacctcg

SEQ ID NO: 175314 - DNA, 122 bp, Homo sapiens
agcccgtgatatctgggacacctttaacaaaacgtggagcctgcggtggggaacaggacgcgggtaccaggagaggcggcccaggccacgggggccatggtcttgatgcctgctgcaagtcc

SEQ ID NO: 175315 - DNA, 122 bp, Homo sapiens
gagggtttcatcacatggcgggaaaaccagtacgagcaggcccccagcgcagccacgccccggccccgcaaccctggcaccgagtgaccagggagctgcctccacccaagcagctgaagggt

SEQ ID NO: 175316 - DNA, 122 bp, Homo sapiens
gagggcttcattggcaattcgtccagacaatacaaaaggagggtcaataaggggaagggacgaaggctccaggaaggtcactgggtccttctagtttacttcctggtccctactgcagtgtc

SEQ ID NO: 175317 - DNA, 122 bp, Homo sapiens
ggcttgctcacctcttcctccggctcctcctcctccttctcccgcagccgccgccacagccgccgggagcgtcacttccgctccagcaggcccatctcttccgcattgcgccgcggccgggg

SEQ ID NO: 175318 - DNA, 122 bp, Homo sapiens
cagatcagcgccgtgggccctcctgagtagtgggagccgcatttatcttctaagagacctcgagtccgataccaaaaggaaaacattcctcggacagcaaggtcttgcagcacaactctgac

SEQ ID NO: 175319 - DNA, 122 bp, Homo sapiens
tgagtagctgggactacaggcacctgccaccatgtctggataatttttgtgtgttttgttcgtttgtttgttttgttttgttttgttttttgaggcggagtctccctctgtcgcccagggtg

SEQ ID NO: 175320 - DNA, 122 bp, Homo sapiens
ctccgccagcggagagcctttggatttaccgtggcattacttttaattaactctgcggcgcggcgcggggagcgcagggtgggccctaatcccgggcccgcctgacgtcacctgggaacgcg

SEQ ID NO: 175321 - DNA, 122 bp, Homo sapiens
cggaggacagatgtgcttcttcctccttcccgcgtctccccatacaagtactaccccgcacgtcccatcaggcttgcctgtgggccaggattcagggtcctgagccgaaacctaccaggaga

SEQ ID NO: 175322 - DNA, 122 bp, Homo sapiens
ctgtgccaaaggggcagcacgcttttatggatgctgggtgaggagtgggcggggtaggggcggggtcggttgagtttcgcacttctctgtgtgacacgccctagtgggcatgcgcgttagtc

SEQ ID NO: 175323 - DNA, 122 bp, Homo sapiens
atctaatttctcctccattggaccatcaatctgttgaggtaggaacagtattttacatctcgtaatcctgcatgttgttgcctggcacattgtagttgcctcgtagatgttgaatgaatgaa

SEQ ID NO: 175324 - DNA, 122 bp, Homo sapiens
gtctgcgaggcgaggccgggaggcgagggctctgcgcacgcgcggcgcaggcgcactgggcgccggtgctgttgccttcaggtgaccacggattcgccatcgtgagttccaggtgggcgcgc

SEQ ID NO: 175325 - DNA, 122 bp, Homo sapiens
cgtccctccctaaccttgaggcttcttgaggtgaaaacctggcgtgtctgacactggtgacgaagttcgtgcgccaggcttctgctggcacttccagttcctctcagggacttacctttcga

SEQ ID NO: 175326 - DNA, 122 bp, Homo sapiens
ccccacacctgtgacgccctcctgtgagcttaccggccttcgatcacacgccatcgcacacgccccacacctgtgacgcactcctgtgagcttacaggccttcgatcacacgccatcgcaca

SEQ ID NO: 175327 - DNA, 122 bp, Homo sapiens
cccgtgccaggaggaaacatgatatcgccctctagtgagcataaggtagcactgcaagggcgtgtaagtgcagatgcacttgtggaactgcttggaggaccttcctgaatgtgcagccgatg

SEQ ID NO: 175328 - DNA, 122 bp, Homo sapiens
gcagggcgggcagaagccgcaaccgcttcagcagcttctgttccttggagccaaagctggcgttacccatcgttgggattcggaggggagatacgtgcacaagttctcccacacttagctgg

SEQ ID NO: 175329 - DNA, 122 bp, Homo sapiens
ttgtggagatgatgaagatagctggggggctggtttattcccagctgttttgcttagattcgccctaagcccctccctgccacagtctacagacctaggttcaacgtttgtgactgcaccag

SEQ ID NO: 175330 - DNA, 122 bp, Homo sapiens
ctcccgactgcgcccgcccggccgcggcccacgtcccagctgtgcgcggggggcggggggcgccagctgtgcacatgcgcgaggctcctcccggcccctctgaatccccgagggcggggcgg

SEQ ID NO: 175331 - DNA, 122 bp, Homo sapiens
cgggagggagggaggggagcgcctcctcggctatttattgaggaccagctgcagggcgcgcgctccaggcgcggccaggaggccgtgggcggggctttctgtttccgtgcccattagcttct

SEQ ID NO: 175332 - DNA, 122 bp, Homo sapiens
tgcaaagggggtcggcagagctgcagccaagcctagatgagccagagctgatgagggtgtcgggggagcagccgtgttgacccgggtgcgtggaagcccctggagaactttggcaggggcgc

SEQ ID NO: 175333 - DNA, 122 bp, Homo sapiens
cctcacgtggtttgccaccaactggaactttttattcttcccgttgtactacgtggggcacgtctgcaagtccacagagaagcagtctgtgaagcagcgatacaggtaggcgcgtcctgcat

SEQ ID NO: 175334 - DNA, 122 bp, Homo sapiens
ttgtttttcgtctcgttttttggtcttcagaaccactggtacttttcccattggataaaacgctgagagggtgagggagaggggcttcttccccagctttcctcgcagccaatcgccctgca

SEQ ID NO: 175335 - DNA, 122 bp, Homo sapiens
cgatgctgatgtagatattggtgtagaagatgaacccaaagagcttgcaggacccggggccgtggatccagttgtcgtggtgcaggaagtagtccacccacagcggcagcgtgcagatgtac

SEQ ID NO: 175336 - DNA, 122 bp, Homo sapiens
tggggtcagtggtccactcccctgtgtctgtcttaaccgagatgcagctggatgcttgcacgtggcagctttttcaaccacctgttgatagacgttcgtttccagtcttatcctgttaccaa

SEQ ID NO: 175337 - DNA, 122 bp, Homo sapiens
ctagactgagtgcccatcacagtcccacagctggtccttatcagggcggggctgggcatccgcccagacccaggggacttcctggctcagtgccacaacccagggaggtgcccacagtggga

SEQ ID NO: 175338 - DNA, 122 bp, Homo sapiens
gcagccgcctgcaagcgggcgggggcggggtgtgaggcgctgcggacggggttgcgggctcggtagcggcagcttcagggcgcgagcgcgggcggtgccgaccactgcaggtaacagaggcg

SEQ ID NO: 175339 - DNA, 122 bp, Homo sapiens
ttaataggggcatttccagaaacccttcctggttgagtaggccagtgtctgaaagtgaagcgctaggattggttactgactctggttcagggattgtcatctgggtgcgaggcaaccacagg

SEQ ID NO: 175340 - DNA, 122 bp, Homo sapiens
cgggggtcgagcggttgccgtggagccagcgaggggctcgggcatttgtttctctgatggcgcatttcctttttcataatttagcattttaacagtaaacaactactactaagcaccgtgtt

SEQ ID NO: 175341 - DNA, 122 bp, Homo sapiens
cttctgctccctgctcgggttcggactcttcttcttatcctctcctcccacttcaatcaccgaaggccctatagccctatagccttcgcatctggaaaggaggagagggaaaggaagggagg

SEQ ID NO: 175342 - DNA, 122 bp, Homo sapiens
cttgatcttccaaactcaaaaagtgctgggactataggtgtcagccacagcacccggcctcgctattttcattcaagttgtcctctcttcaggaagatatccacggacgggtcccctggccc

SEQ ID NO: 175343 - DNA, 122 bp, Homo sapiens
tctatgcaccctcaccatcccctgccctacccccagcccttgtaaggacacccagcaaatcgtctgaattgccagctcctgagagcctcattgaagaggaagccagggccttcaggctagta

SEQ ID NO: 175344 - DNA, 122 bp, Homo sapiens
ctccggcctgaggaggtgtggtagggaccccgctgcttggcggggtgggtggcggcgccccgggaggggccgaggtgactgcaggcggcggggtcggagtcgggcctggcccggaccctggc

SEQ ID NO: 175345 - DNA, 122 bp, Homo sapiens
ctttgataattgaagccaagcttgattccaatggctccgcacaaaaacgggcctcatcagcgagttctttcagagaactggaagcagcactcggagccagcagagggccatctgctgggccc

SEQ ID NO: 175346 - DNA, 122 bp, Homo sapiens
gctgaggtcctcccgctcatcctcccggccccctcgctgcggtcctcccgctcatcctcccggccccctcgctgcggtcctctctgccactgtggatgggcttcacacaaactgagatgggg

SEQ ID NO: 175347 - DNA, 122 bp, Homo sapiens
ttgcccctacgttttagcaaatacacagaaacctgctataactattcctgtgcgggttcacggaggattgcaaagcttgtcacaggcatcttttagaacctggctggaaggaatagcgtaga

SEQ ID NO: 175348 - DNA, 122 bp, Homo sapiens
tcacaggaaaataagcccacatggagctactgcattgtctgatggcctcgttcgaggaggcgtcaatttaactttaaacccatgagctcattgagagcaggggagagaaggggatgtctcca

SEQ ID NO: 175349 - DNA, 122 bp, Homo sapiens
acctgttgcctggacgccggggcatggcttcaaagggcagcactgtcctggggacccgggcggctctcgtgcccagtgcctgtgccctttgcagggacagccagggcactgccatgcacacc

SEQ ID NO: 175350 - DNA, 122 bp, Homo sapiens
cctcccaacgcagggcgtaatcgactttatgcggggccagttataatcccccctgttcgtcgaggtgaccttgggcgcgtccctccgtctcgccttgctcagttcctgcgttgaggaactga

SEQ ID NO: 175351 - DNA, 122 bp, Homo sapiens
tctcgcgagatctgggttgagcctgccgctgccttggctaccaggctcctcaggtggcagcgcttgcagtcgggctacggaggccgggttgccagattacgggtaagtttgcgttttgcttt

SEQ ID NO: 175352 - DNA, 122 bp, Homo sapiens
aaattagtcatttgacccagattgcagcttttcttcctgtctgcatggataaaaatgatccgtcaatttacataagcaggtgatttttcttacatgctaattttcttaatgtaccatggcag

SEQ ID NO: 175353 - DNA, 122 bp, Homo sapiens
acaaatacaacgacttcatcgaggccaaccgcattgaggacgcacgggagcgaatgaggacgctgcggaagctggtaaggagagagaggtgctgtcagacacgaggtggggcagctgcctga

SEQ ID NO: 175354 - DNA, 122 bp, Homo sapiens
ccaagctggatgaagatgagctgtaactggtgaaaaccatgggggtggtgctgactcagccgcctattccccaaggagcttcagggcagtccttctggcactgctccagaattcctccttct

SEQ ID NO: 175355 - DNA, 122 bp, Homo sapiens
ggctaatttttttgtatttttagtagagacagggtttcaccgtgttagctaggatggtctcgatctcctgaccttgtgatccgcccgcctcccaaggtgctgggattacaggcatgagccac

SEQ ID NO: 175356 - DNA, 122 bp, Homo sapiens
ggccgcaccacgaaaacaacagccacaggggagaacaacctcttgttttcctcatacagccgagctttgctgcaaacgatccctttccttttgtttccacattgcgttattcagaagtggtt

SEQ ID NO: 175357 - DNA, 122 bp, Homo sapiens
tattctcggccaaatggaaggggaggggttctcctatttgtaccctcccccaccccctcccgggaggctgaaaaaattccttttgtgatcagccattttcagagaattttaagacggatgaa

SEQ ID NO: 175358 - DNA, 122 bp, Homo sapiens
ggcttttctaacaaagtatgagaaggtaaagtcccagtgatcgtccagccatgcttcgaccgagtcctgatccctctgctgctgcttctgctgctggggctgctgctgctgtcgctgctgcc

SEQ ID NO: 175359 - DNA, 122 bp, Homo sapiens
taaatagatttttaaggctagtctaggtacctaacgaccacttattacaccatgggagaacgaatctggaggtccaagttgtttcatttctaaagtttcagaataaacgttttcataaatgc

SEQ ID NO: 175360 - DNA, 122 bp, Homo sapiens
cctcccttcctcccgctcatcctggcacccactgatctttccacacggcctccacagtttcgccttttcaccatgcccagttgatatcatgcagaatgtggcctctcaggttggcttcctgc

SEQ ID NO: 175361 - DNA, 122 bp, Homo sapiens
ttgcagtgacagtggcgcatggcctgaccttcgtaacaatgcatttttgttgttaacccccgagcatggaccgctgtgtgtattacctgagaattggttctgctgaggtgcaagattgacta

SEQ ID NO: 175362 - DNA, 122 bp, Homo sapiens
ctccgactcccgagcgcgaggccctcattttgggttctcagcgaacggcggcagcggcggcggctggaacaatcactcggccaagggcgacagccaactgctgtgagtgcacggggagaggc

SEQ ID NO: 175363 - DNA, 122 bp, Homo sapiens
ggtttgccacgaaggatccttccaaaggcctattaagtgaattcctgtagctcattcagccgatggaaggtagaagggactcagaacttcaggcctaattctgcgtttttgtatgccccaag

SEQ ID NO: 175364 - DNA, 122 bp, Homo sapiens
tctccagctgagctcaagcaatgcacctgccttagcctcctaaagtgctggtattacagtcgtgagtcactgtgcctggcttgtcattgtttcctgtggtgaccaagtcacatgggtccaga

SEQ ID NO: 175365 - DNA, 122 bp, Homo sapiens
aacgtcatcctgttcccctgggaacaacagcaggccttcatctcctggctcaggactccacgccagcagccccactgcatctcaaaataactccaaagcagcagtgaactccgcctccagtt

SEQ ID NO: 175366 - DNA, 122 bp, Homo sapiens
agaatgcagagaaccagctggctgcactagggagaaaatgtggctcccggctccccagcccgcagcgagtcggtaccttcaggatgtctgactcgtagctgttgttgttcagcacgccgtcc

SEQ ID NO: 175367 - DNA, 122 bp, Homo sapiens
cattgacaaaggactagtactcagaataagtagaactgctagagattaatttttaaaaagcgtagatcaatagaaatgggcaagggatataaatcaatttgtataaataaaattatgagact

SEQ ID NO: 175368 - DNA, 122 bp, Homo sapiens
ttgttcacttgcaagaggttattattaatgtatcgtagccccaggaatagaaggggaagccggtccttctccatcagagcagtgaaatgtgcactggactaggggcaaagagacctgcatgc

SEQ ID NO: 175369 - DNA, 122 bp, Homo sapiens
cagctccttaacacagatcccagctccgaggaaactcgtcccccccacgttaatcctgaccgactttgccacatggagccagcaaaccatttctggtgagagccaaatgcaccttctgcacc

SEQ ID NO: 175370 - DNA, 122 bp, Homo sapiens
ggtgccaatttctttctttcttttttctttatggacatttgctttgtcagacttgcattacgatggagttataaatatagaaatgaaatattgattacttgtcttaatccatccacaacttg

SEQ ID NO: 175371 - DNA, 122 bp, Homo sapiens
ggtgggcagaagccataaatagccacctcgggggggcccccctggtcgctgggagcgccacgctgctctgttaataaacatgcgctcgctggagtcctcatcctggggctcgcggaagcgct

SEQ ID NO: 175372 - DNA, 122 bp, Homo sapiens
tcctcacttcccagacggggtggctgccaggcggagggtctcctctcttctcagacggggcggccgggcagagacgctcctcacctcccagacggggtcgcagccgggtagaggcgctcctc

SEQ ID NO: 175373 - DNA, 122 bp, Homo sapiens
ggagagtcaggtttaagtacatcagtcaggtgaatcacaatgaggagacagcacagtaaacgacatgaaatcacagaagcattttgttactcattgatctatgagagaagcagggtggccac

SEQ ID NO: 175374 - DNA, 122 bp, Homo sapiens
gaaataatactagtacctaccacacagagttggaacgagaattaagagtcatgtcttggccgggcgcggtggctcacgcctgtaatcccagcactttgggaggccgaggcggacggatcacg

SEQ ID NO: 175375 - DNA, 122 bp, Homo sapiens
ctggagtggatttaagatgatattgttggaaatgcatccctcatggtggacttgtctactcgggttgctcagccagtccaccctgcacgtgaaaatactctcctcagaaccctggcttcccg

SEQ ID NO: 175376 - DNA, 122 bp, Homo sapiens
accactcctagtcccagcccacaggtctgcccgagtctccgcccaggaatgtggtcctgacgcagggtgctggaaccaggcttctgtatgcactagagaaatgcccttggctctatgacggt

SEQ ID NO: 175377 - DNA, 122 bp, Homo sapiens
tataaccgcaaaaccaccatccacctgaaaatgacattccagcagttcctgagtcttcctcgctcggtgctcacatctccctgacggtctcatcgtattttccgggcttgctggaatcagag

SEQ ID NO: 175378 - DNA, 122 bp, Homo sapiens
tcaatttatttgcatatatacattgtcaccccagggagccagctctatttcagaagtccccggctccccttacccagccaacacccaaaacccacccaagaggatgggtcctggataaataa

SEQ ID NO: 175379 - DNA, 122 bp, Homo sapiens
tccatccttgttcaggtgggagaacaggtgtgctctacctcccaagtgacacctgctctgcgccagccacctaaagaccggctgtttctcccctgggcctacctggctttatgatccttttg

SEQ ID NO: 175380 - DNA, 122 bp, Homo sapiens
ggaaaatcgggccactcccacccgaatactgcgcttttccgacgggcttaaaaaacggcgcgccaggaggttatatcccacacctggctcggagggtcccacgcccacagagtctcgctgat

SEQ ID NO: 175381 - DNA, 122 bp, Homo sapiens
catgaaatggaatgaacactcacaagaatgaatctcacagacatgatatggagcaaaagacgacacggaagagtatttcagttccattcacagaaggttttaaaaaggcaaaacttatggtg

SEQ ID NO: 175382 - DNA, 122 bp, Homo sapiens
ggcccagaaacgtgcgtggtgtgattctgatgcacgcgggatgcagacgacattcagggacgctgtccccgctcctggaacacttctgagtgatttgctaggcacctggagcgcctcttcag

SEQ ID NO: 175383 - DNA, 122 bp, Homo sapiens
ttccaggtcaaagggctgggaagaagggagggagctagacagctggaaccagccagggaacgcggcagcttgcaccccaggcactgaagtgcagcgaggacaggcgccatcacccactggca

SEQ ID NO: 175384 - DNA, 122 bp, Homo sapiens
tgtggtggtgtgtggccgggtgtggtggcgtgtggccgggcgtggtggcatgtggccgggcgtggtggcatgtggccgggcgtggtggcatgtggccgggcgtggtggcgtgtggccgggtg

SEQ ID NO: 175385 - DNA, 122 bp, Homo sapiens
ggtgaaaggggggacctggctttgagtcgaagggaggagaaggagattatatagctgaaacgtctaagagaatttgtgatctgagcgtttctactggggcaagtgcttctgaaaggcagagg

SEQ ID NO: 175386 - DNA, 122 bp, Homo sapiens
aaccaaccagtggtatcacaccggtctaagcttctacaaaaatctcagccttctgatcctcgggacacgactagcaatccaacaactttgaactagcaatttcatcttctggcttttttgga

SEQ ID NO: 175387 - DNA, 122 bp, Homo sapiens
aggagggggctgtggtcctaaccactacggtcgcgtcccggactgggctggaggagtctccggatttacctggctggccttgtcccttcaattggggtcatcccatccttgccccctggcct

SEQ ID NO: 175388 - DNA, 122 bp, Homo sapiens
ccatggtccaccacgttcaatatgagctggcccccgcaatctctctgacctcttttcaagcgcttgttcccttgctcacagtactccagccatactggccctctctcagttcctcgagccta

SEQ ID NO: 175389 - DNA, 122 bp, Homo sapiens
caaataaattaaaatcgcaagaaaagcagtaagcaaaagaacgcctggaaacatgaaggccgtggcaggtgaatgggaaagtcccgctgttcaataaaggagaagagaaagcctaggagggc

SEQ ID NO: 175390 - DNA, 122 bp, Homo sapiens
ctacgcaccccgaccaccccgtgcgtagcggcgcgcgggtccccggacaggcgcgcggagcgggcatcgccagatcgcccacgcttactcactcggtgttgcatcatgcaccacgccgcggt

SEQ ID NO: 175391 - DNA, 122 bp, Homo sapiens
ttctgaaccccacgtcctccaggcccacggccactgttttctacctgctgcatcacgtcacgcgtggtacaccttccgacacatgagaacacactgcagggtgttcctccgactctcaacac

SEQ ID NO: 175392 - DNA, 122 bp, Homo sapiens
ggggcacatcatagatgtcctgtggccccggggccagcaggtgtcgcgggatgtcgtactcgtcctgctccggctgggcggcctcgtatacatagccctgccccacgcgggtgggcaccacc

SEQ ID NO: 175393 - DNA, 122 bp, Homo sapiens
aaccaaggtcgaggaaggatgtgtgcgctctgccaccctggggtgccaccatccttgcagcgggcaggggaggagaacgtgcttccaacactgcctcctaggacccactacgggagtgggaa

SEQ ID NO: 175394 - DNA, 122 bp, Homo sapiens
tgtcgcagacgggagtcagttactggcaagcgccgcgggcacccggttatagggttgagtcggatggcggtcccggggccagcagaggaagggggaggggagagaggctgccagagcttgag

SEQ ID NO: 175395 - DNA, 122 bp, Homo sapiens
tcctctctgttagatgaaatctcattattttactgtgctgtgcacatcaggtctgtttcacgttgagctacctgagaggagctgggaacgtgctgtttctcatcattatcacccagcaagag

SEQ ID NO: 175396 - DNA, 122 bp, Homo sapiens
acctgctcagtctcagaaccacgctccgaaccctcagccagacccctccccaggtgaagtcgcagcagcaccagaaacacgtgcactttattgaatgccattgtagaaaagcgtgtgaggat

SEQ ID NO: 175397 - DNA, 122 bp, Homo sapiens
cctttgagcgcagctggtgcaataaacaggagctcgcagagtcccgtggccgcggaggggcgccagactccggggaagagccagagcgaggtccgacgaatcgggctctgctggcgaccagc

SEQ ID NO: 175398 - DNA, 122 bp, Homo sapiens
gcttcatcctgttacctgttctctctcacccgtccgcttcctcctcctaccgccaccagccgagtgctccatgcgtttagtactttgtactttttaaagtggagcccgaatgcgtttgtcaa

SEQ ID NO: 175399 - DNA, 122 bp, Homo sapiens
actaatcgtgttgttgcacgttagaaacgcttgcattgcctgactctgaaaccagaagggcggccgaatggccttcaccctccattaaccctcgcctccttcagaagccagtgcctctggaa

SEQ ID NO: 175400 - DNA, 122 bp, Homo sapiens
tcttcattttcagacttcctggtcacacttcagcacaaaactttttcttattttacaatgcggaataatcagtcctattggggtaattcctacaatgttacaacacttaaaatatttctaaa

SEQ ID NO: 175401 - DNA, 122 bp, Homo sapiens
ccggaggctgatgctgccagccaagggcaccctttgagttgagaggtgcaaggtccctcccggatctcacctggggctgtgcttcctccccagtggccaagcagagaaagaatctctcaccc

SEQ ID NO: 175402 - DNA, 122 bp, Homo sapiens
gcctggctgccggcttgttcttactggccctgagtctttgggggcagcctgcagaggctgcggtaagtccttcctcccctcccccgcgcccatcaccgctctttcacgctgaaattaccttt

SEQ ID NO: 175403 - DNA, 122 bp, Homo sapiens
gttttacctattagtactgacaaaacaagatgaaagagagagtgagagagaaaaccaccccgggggctattttgctaacatgctctctggcttctactctggtaaactaggttaccctttat

SEQ ID NO: 175404 - DNA, 122 bp, Homo sapiens
agagtcagcaacagaagaaggttcaagtacttcccatgctcacaaggcacaccagggcctcgtggtgtgggtctgagttcagctggagagagtcctgccccctgttgttctttcttttaggg

SEQ ID NO: 175405 - DNA, 122 bp, Homo sapiens
ccagagtgcctggctcgaaattaatcctggttcccactgtgtggccttcggcaggtcattcgccctctgcaagccacccttttctcctctgtaaaactggagttttagcacccgggactgag

SEQ ID NO: 175406 - DNA, 122 bp, Homo sapiens
acacctccggcagatgcgaaatatgctgctcctcaggaggaaagatgacccggaggaccgcgggaggaccttcccactcgcgatcttcccagtgccccaaagccagggaccccactgccgcc

SEQ ID NO: 175407 - DNA, 122 bp, Homo sapiens
ttgtttctcattcctagctctgtgtgtgtgtgtgtgtgtgtgtgtgtgtgtgtgtgtgtgcgcacatatgtattctagttttgctatgaggaggaagtaaattaatacccatactctactct

SEQ ID NO: 175408 - DNA, 122 bp, Homo sapiens
ggctgagttgcagggagaaaaggggaacatgcaggaacttccctctccctccagtgacctcgtatggtctgttgtaggctcactgtgtcccttcactctggactccctcaagggttccaagt

SEQ ID NO: 175409 - DNA, 122 bp, Homo sapiens
tggaggctcaatggaggctgggggcctggaggttagagaccctcagaggagcagggccagcgagctggcatcatcagggctgcagggaccagcagggggcactgcggtgagtgttgggatgg

SEQ ID NO: 175410 - DNA, 122 bp, Homo sapiens
ggtggaggcctgaggcctgaggcctggggcggggtggcggccgggctggccttggcctcgcgccttcccctgcggccgccgcgggctccgcgggcggtatcggagtgtcgtgcggcgcgtgg

SEQ ID NO: 175411 - DNA, 122 bp, Homo sapiens
gtctttcgggagcacatgccctctctgatggttacaggatggagctggaatcaagctctgcgaaggacagagcaaaaagcctggagtgctctgtgaagcacactcagtggagcatgggctga

SEQ ID NO: 175412 - DNA, 122 bp, Homo sapiens
cgcgtagacacgcccggaagcccttgtcatgtaaatagctgtcggggactggtgtattgtcgccgccccagccggcgggacctggggcgaatccacacccattgtctgctgcccaaggggcc

SEQ ID NO: 175413 - DNA, 122 bp, Homo sapiens
ggtttggagcccaggctagggacccagggtgggcgcagcaggggagattggcaccagaagcgtggaggaagggcacctcttcagcccggcttttccgcccctggagtctgggacagctccgg

SEQ ID NO: 175414 - DNA, 122 bp, Homo sapiens
gtgacggtgcggacgggtcaggagcgtagaggcggcggcaaaatggcggcgcctgaggagcgggatctaacccaggagcagacagagaagctgctgcagtttcaggtagcagcgagtactcg

SEQ ID NO: 175415 - DNA, 122 bp, Homo sapiens
tctgcttctcatcacccctgtctgtgcacctgtgtggtttgcatggtctggcatggagcacgctgggagggtgggcgctggcttgggcagggctggctaccttgcagctggctattaacctg

SEQ ID NO: 175416 - DNA, 122 bp, Homo sapiens
tccctgggagcccttcagccaagggcgtgtgtgggctgaggcgtggcatgcacgggtcggcgagacagcagccatctgaacctgtcctcctcctccatctctacctcacctccaccatctcc

SEQ ID NO: 175417 - DNA, 122 bp, Homo sapiens
catttttatgaatgatttcaaacatgcagaaaaatacaaaaacaatatacgaggtacacacgtgcccatggccttggacccacagacgtcaccattcccagcccacccttctccatggacac

SEQ ID NO: 175418 - DNA, 122 bp, Homo sapiens
tagagctaaagcgatatatctttgggggatcccaaacgtttcccagggtccaactgtgttcgcctccttccgtgctgcgtggccacatggatggtggatgcaggggtgcaaggatgcacggt

SEQ ID NO: 175419 - DNA, 122 bp, Homo sapiens
ctcgcggaggcagcagcagagctcacccctttctcgggaaatggtttatcgtggataaaacgcagtccccaaagcgaaggtccgacgggcggccagacgcaccccggggaccttcaggtgga

SEQ ID NO: 175420 - DNA, 122 bp, Homo sapiens
cacgtaggttctcatctgcaatgtggttcgcccgggttgaggcctaggctcgggtccgcacgccccaattcacaatggggcagagaagtctgtcagtccccgccaactcgcgcgccaccggc

SEQ ID NO: 175421 - DNA, 122 bp, Homo sapiens
agaaagttcacttgcttttgatgggaccctcaggctggagacacgctggtcaccaagtagcgccaggtgctcaggcagaagtcagccgactctgggttcgagtcccagccccactgctggtc

SEQ ID NO: 175422 - DNA, 122 bp, Homo sapiens
gcgcatgcgcgaacacgcacacagagaggggtgcacatgcgcaggaatgcaccggaagtccgcctcccgggacccgccgccggtcccaggacaaataccgtgactctatttcccatgagcct

SEQ ID NO: 175423 - DNA, 122 bp, Homo sapiens
atctaattggactattaacaaacagtcctctgagtgcggcggtctggcgtggctcctgggcgggggaagggccgtgttccctgccctcattcacaaagagtgcaggggccggggaggaaagg

SEQ ID NO: 175424 - DNA, 122 bp, Homo sapiens
cctccgcccggcccgagtggaccgtcccggccattgtttacggggggatgcccgtccggacgcattgttttggccgcttccaacttgccccggcccttccccgggcatcgcggggggaccct

SEQ ID NO: 175425 - DNA, 122 bp, Homo sapiens
ccgctcgcaaggccggtcctcggcgccagcccgcgctccgcccgaggcgtccaatacacacgcctgtttgggaaaccccatttcatgcttagggaaaggaatactgcctgcttccgctagaa

SEQ ID NO: 175426 - DNA, 122 bp, Homo sapiens
cttgagctcctgacctcgtgatccacccgccccgccctcccaaagtgctgggattacaggcgtgaaccactgcacctggccactttcttaaacctacacattggttgctgtgatattaattc

SEQ ID NO: 175427 - DNA, 122 bp, Homo sapiens
cctgagaaaacacaagaccaatccgaagccgcgcacagcctttaccacgtcccagctcctcgctctggagggcaagttgctccagaaacagtacctctccattgcagagggtgcggacttct

SEQ ID NO: 175428 - DNA, 122 bp, Homo sapiens
caccccaggtccacgcctagacggcgagtggcaagggtcaaaatagattcgcccagtagacgccctcgacctgttcggtcctcgccttcagtgcgatagacctttaagcgtcacgtgactcc

SEQ ID NO: 175429 - DNA, 122 bp, Homo sapiens
tggatggcccttgtcattctggatttcttcatggaactatgagaattgccataattaatgcgcgctttagtttttgtattcctcctttcattttaattaccatcggggatctgacaggaagt

SEQ ID NO: 175430 - DNA, 122 bp, Homo sapiens
tggcatctctctcaccgtggggatgaactgaatttcataggcatccacggggccaggagccggggtccactctgtccgaactgttgtctcctccaagagatgcatcctcatgccctcaatgg

SEQ ID NO: 175431 - DNA, 122 bp, Homo sapiens
agaggctccttgcagaggctgattcccattcttgagctaggaagtggccgttctgaacatcggatacagccacacggagagagcccacgttctctttgataatactgtttattgtccacgga

SEQ ID NO: 175432 - DNA, 122 bp, Homo sapiens
accagcacgccctcccccgaggtgtccccgcccggcactcccggagccttctgcaggctgcggatggggtggtttcagaacaagtcttgtggaatgtgttagcgacccctgccccagccaga

SEQ ID NO: 175433 - DNA, 122 bp, Homo sapiens
ggaatccagctctggccaattctgcagaagtcccagcgggactagcgcagaggccctgtccgtgtccctcactgctcactgcagtgcttggcccccagcaggtcctcaacggctgcaggata

SEQ ID NO: 175434 - DNA, 122 bp, Homo sapiens
ttgattattactatggcaaagagccttgggagatggcccagctaagcatgctagaggacgcggcggtatagtcattaatcatgatctagaacctcccgtgcccaccccactgcatctgagga

SEQ ID NO: 175435 - DNA, 122 bp, Homo sapiens
tcaggtgggtgggccctggctgggcatggacagggtctggttgaaggcctcctggaggaccggtgggcagcttcctggacacgaggacttggtgcggggggccgatgccctgggaaggtggt

SEQ ID NO: 175436 - DNA, 122 bp, Homo sapiens
tcgccaccacagcccacagggctcagatgtggtttcacagacccagatgggctgagcaggcggcacactagtgggtatttcaagccccttcttgtttttttctgaacattgtaaggggttat

SEQ ID NO: 175437 - DNA, 122 bp, Homo sapiens
tagctgtgcgggtctccaaaggcggcagtaggtgcgggggctactcggctaccgttgctgcgcccgtgcaccgcgcattcaacggatcctggcacgtggcgctctggcccgcgagaagctag

SEQ ID NO: 175438 - DNA, 122 bp, Homo sapiens
cagaccccagaggtccctgtcttggccacgtgcctgactgtttccacagacctggcaccacgcagagcttggtggaccatctataagccttgcttttgacctgtgtggctcttcctgtcgcc

SEQ ID NO: 175439 - DNA, 122 bp, Homo sapiens
cacgacttcctccgctcatgattcagtaggtggaatcttaacatgcagtttcttagcacgcgcaggcacacacacacacacacacacacacacacacacaccaccactaccaccaccaccac

SEQ ID NO: 175440 - DNA, 122 bp, Homo sapiens
atacgagactgaactgtgtgtgtacattttaaaataaaacaaaacgtgcttcctgttctgcggcctctgcccctcccctcggcagccctgaggcttggccagggtccaggaggaaggcgcgg

SEQ ID NO: 175441 - DNA, 122 bp, Homo sapiens
aaggggtgacagacggcacctggaaaatcgggtcactcccaccagcatattgcgcttttccgacgggcttaaaaaatggcacaccacgagattataatccgcacctggctcggagggtccta

SEQ ID NO: 175442 - DNA, 122 bp, Homo sapiens
cttaggccagctgccatttaagaagggctccggggcctccagactcggtgtgaccgtagccgtgcccggtgctcccctcgcggaggcgttagggcggcaggtttatctcacttgagaccatt

SEQ ID NO: 175443 - DNA, 122 bp, Homo sapiens
tccacgccttccttctctgaccaatcatggaggagtcgtgggtggagttttgcttttgagcggagagcggggccttcaatctttgctatctggcgctgggaatgggcggagctgaagtgggc

SEQ ID NO: 175444 - DNA, 122 bp, Homo sapiens
cctctaacgggcggcgggggcgctggccccctccctgcgccacatctgtcccgcaccgggcgcagcagctgattcatctgcagccaggtccgggaaggaactgtgctcccggcagttgcagg

SEQ ID NO: 175445 - DNA, 122 bp, Homo sapiens
aggtggtgccgcgtgatcagcccttggtctatcacagccccgaccacccggtgcctcagacgccgctcccgattcaacacccgccggcgtttgaacagcttcttcttcagctcctgccgggg

SEQ ID NO: 175446 - DNA, 122 bp, Homo sapiens
ggggagggggcggaggaggctgagccaggcagagtcgccagcggagactcgcgagtggcgcgcgggaggagcggccgccggcgctgggcttgccttgctgctgctgctgctgctgcctcccc

SEQ ID NO: 175447 - DNA, 122 bp, Homo sapiens
acctggcaccttgtcacactggtgtcagttgcggggtcaacacaccatggctgggtgacacggtcttcttgcccctgtaattcagcttcttgacatctgctcttttgaaagtcaccggcgaa

SEQ ID NO: 175448 - DNA, 122 bp, Homo sapiens
gctacagagagaggctgaaggcctcctggggctgggaagtcggtggagtccaggagcctccgtttcctggaaaacagctccacctgctggctgttgtgcgcctgcagtcctgaccttggcgg

SEQ ID NO: 175449 - DNA, 122 bp, Homo sapiens
tcgttccttctgacgttcggatgtgtttggagtttattcctcctggtgggttcgtggtctcgctggctcaggagtgaagctgcagacctttgcggtgagtgttacagctcttaaggcagcct

SEQ ID NO: 175450 - DNA, 122 bp, Homo sapiens
attgtttcaatttttccagatgctgttgagatatatttcataagaagtatcaatgcatatcgagcaacattgggctcagaggattttgaaacactgagcaccactgaagaattttgcaaatg

SEQ ID NO: 175451 - DNA, 122 bp, Homo sapiens
gagaaagaggatggctgactttgcatttctccatagtaggcttggtgagttgtcagcatacgccggtagtagctggagggggccaccacgcaagacaatattaatggggtggaaagagccag

SEQ ID NO: 175452 - DNA, 122 bp, Homo sapiens
gcacttcacctacaagggcctttagcggcttcagggcccagccacacccttctccacgtacgtgttccagacccagtcaccccgagcagggagaaccaaccctcataataagaactgtggag

SEQ ID NO: 175453 - DNA, 122 bp, Homo sapiens
ataaggcaggaaaactaggcaacaaaatcaggggagatggaagatgtttttgttacgacccgggagaccgtattagggagagacttgtgagcaaatcagtatcgctgatgattcatagtcac

SEQ ID NO: 175454 - DNA, 122 bp, Homo sapiens
tacaaagctgaaggcagcccagtgccacaccactgtctccactcccacccccggagagcacggtgccgagacccagaagagcagccagctcttggctgacaccagcaagtgctaaaccagat

SEQ ID NO: 175455 - DNA, 122 bp, Homo sapiens
aggcactccgggttttcaagttgagttcaaacaggaccaccggaggccaatcagagtgcgcggccccgccccgaacgcccggccgtgaccaaccacgaggccggatgagccaaaacacagcg

SEQ ID NO: 175456 - DNA, 122 bp, Homo sapiens
aactgaaggaaagatcataaagttaacaactgcaacaacaaaagcgtggtaagtaggcagcgccctggcagtgaaagcgttaacagggctgggtaaggcgatcccttgaaatgagtaagact

SEQ ID NO: 175457 - DNA, 122 bp, Homo sapiens
tgccaccaccaggcatcccagcagatggcacacccttgggcattcctccagtggccgggtcgccagcaacgtgcccagtcactgggcccaccggacggagtctgagctcagtagctccgagg

SEQ ID NO: 175458 - DNA, 122 bp, Homo sapiens
gaatgaaggaggagatgaaaggtgagggaaatgagtgttatgcacttaattgtgtccccccgaatttatatgttgaagcctcaactcctaatgagttatctctaaaaggtaaggcttttatg

SEQ ID NO: 175459 - DNA, 122 bp, Homo sapiens
ttgcagggtgcccaaacggcccggaggaggccgggaccccagcccccaggccagggctcccgtgagtagggagacgcatcactctctggccccggaggctgtgcttcccaggccatcacaat

SEQ ID NO: 175460 - DNA, 122 bp, Homo sapiens
ccaggggccgtcccctctcgcgcctcagacccaggctgggccgccctccgtcccgccccacgcttggagcccgccagcctgctctcccacgtggcgctccacagcccccttgccctcccacc

SEQ ID NO: 175461 - DNA, 122 bp, Homo sapiens
gattcctccccctcccccacgctcttctcctgccccccacccccttgcttgcctaagctccggcacgggaccctcattcctggctgcctcccaccctgcagcatggactcggaagggggaag

SEQ ID NO: 175462 - DNA, 122 bp, Homo sapiens
gtgtgctggagtccccaccctggccagcccttggcttgtttctgtgtgtggctgtgaccccggactctggatttctaggaagctgaaaaggtttgatgacctctttctgtcttaaaagggga

SEQ ID NO: 175463 - DNA, 122 bp, Homo sapiens
gtcccctgggaccctcacagcagtcggtagcagaatcagcttttggaattggtgagaaaccgaggcccagaaaggttcagcgaattgcccgaggacacatagcggtgccggcgtctctgcat

SEQ ID NO: 175464 - DNA, 122 bp, Homo sapiens
ggttcggctttagagtgtggtgaagggtacttttcatggtgcatggaaggaaagccaatgcgcaggtaggcatttaggaagaaaacctttggtttcactgattaaaattcagcatgtaataa

SEQ ID NO: 175465 - DNA, 122 bp, Homo sapiens
cgcaggcctccttcttcacgtgccggtcgcttgtcacgatcatgggcttcttgatggactcgctgctccaggccagcatgttggcgatggacaccttccgccggaagaggccctgcgtgtgc

SEQ ID NO: 175466 - DNA, 122 bp, Homo sapiens
agtccatccatcactgcaagcctctgcggtgttttgcattttaaatcatttacgggaacacggacagcctcccccctccgctcccccggagcagctttgaaacttacagactccgggtagcg

SEQ ID NO: 175467 - DNA, 122 bp, Homo sapiens
tccgaagggcggctgtcggctcccttcctgccagccccagcgggcaccccgtcaagttctcgctctgtaggcagctggagtctcaggctcctcagaacgatcactgggctctggcacctctc

SEQ ID NO: 175468 - DNA, 122 bp, Homo sapiens
gagatgtggggagttgccccttccaaatactcaagcctctgggcacagggtctgccccatcggagcatcagggctcaaacgcagaaaaccaacctgaattggccagagccaattgagttaca

SEQ ID NO: 175469 - DNA, 122 bp, Homo sapiens
ttttagtatcatggcttcagaatagcagagtgacaacagttgtacccatattggtgacaacggaacttaccggtcacaactgaaagcagcttttgcagagaaactcaatatgggaaaattaa

SEQ ID NO: 175470 - DNA, 122 bp, Homo sapiens
tgtcagggtggcttccaggtgcaggttctcgcgcaggcctcagccttcataggtgcattccgctctagaacattcctgttcatgcgtggtcgtcgctcactggtggccgcttaggtgcactt

SEQ ID NO: 175471 - DNA, 122 bp, Homo sapiens
aggtgctctgctcttttgtgttctgtttttcattggaacaggggccctgcagggaggcggcggcaaggcaaggcagctgcagctgtcagggtctagggggcgacggtgggctcggcgccctc

SEQ ID NO: 175472 - DNA, 122 bp, Homo sapiens
gacatttctaccactctggccgagctgcagtgtcccacgtcaccaccaaacacagcaaggcgagccccaggggctcaggctccagcctccagcatgccgctcccttctactcgtcttcctgc

SEQ ID NO: 175473 - DNA, 122 bp, Homo sapiens
aaggttgttttcttttgggcacagaatgtacacataaagaacagttaaaagggagagattcgggctaggatgatacagttttaggtctccctcaaaaacgattctcatttatttcccctgca

SEQ ID NO: 175474 - DNA, 122 bp, Homo sapiens
tgccgctaatgggatctcttcattttctctccatgattatgtcagatgggaaagttaatgcgaagcgctctccggagagcaggcacctgctgccaagccctgcgaagggggtgcgcgcgggg

SEQ ID NO: 175475 - DNA, 122 bp, Homo sapiens
gagccttgtgagcggggcgggccgcgtgtgcggggtgggggcggagccttatgagcggggcggggcaggggcgtggtcggggcggggcgcgcgggcgcccgcggcggccctcacttcctctg

SEQ ID NO: 175476 - DNA, 122 bp, Homo sapiens
aagccccgacagagagttctgaagcccggatgccccttcagagctgtcctgagcgggggtcgggggctggtcctttatgtacatcggccggttattgggcgtaggccggctctgggaggggc

SEQ ID NO: 175477 - DNA, 122 bp, Homo sapiens
tcccctgctcttccaaagagcaccagtgtttccgctgagctgtaacaagtacagcaaggccggctgcaaggctgtattgctcagcgccatcaccaaacattggagacacaacagtgcacccc

SEQ ID NO: 175478 - DNA, 122 bp, Homo sapiens
tccagaaagccccagaagcaagtagcagaaggccactccaatcttgccgccaggccacaccgtgctcacgcaggtccccatgcaggacgtgctttgctgccctctgctggccacgtcccact

SEQ ID NO: 175479 - DNA, 122 bp, Homo sapiens
cacatccacccccagatgcctgtggataaagaacccaggaggactgaggctggaacacaccgcgcacctggattgttcactcccgagccgccttggcctgtggctccgtggcagtgcgacag

SEQ ID NO: 175480 - DNA, 122 bp, Homo sapiens
cagcttgttttctcagcccggggtgaaatgcgcagccaaaaggcccaatgagcgtcaaagcgaaagggcaggggtggtctcttctgcggatataccttggctcctcccaagtcctacgagtt

SEQ ID NO: 175481 - DNA, 122 bp, Homo sapiens
cggagagcggggagagccctggatgcggctggcacagcagcgcaagcccaggggccaatccggggccagagtctgggagtctgacgcccggctggaaagggcgtgtgatgatgccaaagtgc

SEQ ID NO: 175482 - DNA, 122 bp, Homo sapiens
acttgaatgggagctggaaaggttacgttacgagcagcagggggcaggtgtgagcagccccgtggcagagaggtctgcctcaaagtgaggggagagagaaactctcctgagtcctgacagca

SEQ ID NO: 175483 - DNA, 122 bp, Homo sapiens
ctctgctctggctctttgtgctgttcaaggtaggggagctcctccacccctttttcccagcggtccgggcggcagccgcgctccggcgccctcgctctgccgttgggagcggcgcgccccag

SEQ ID NO: 175484 - DNA, 122 bp, Homo sapiens
gagctttattccttttgcatcctgtggatcttggttggttaacacattactgaatggtgacgtgggtaggtctgtctgcctgcatcaaatcctgccctaaccacattctcaagatagttttc

SEQ ID NO: 175485 - DNA, 122 bp, Homo sapiens
gatatttgcggggtcacagtaaattggggacttaagataacacggccagttcccagatcccgaaatgttggtggaacgtgatgttttggacttccgacatgtcacagaggatcccagggtca

SEQ ID NO: 175486 - DNA, 122 bp, Homo sapiens
aattgaggaatgatcttaaataaaatctctcattttttgagaaatttggattaagatgttcgctaggtgcttgctgaaacttctaaggcatgtggaaaagctaaccaattattcatgacgat

SEQ ID NO: 175487 - DNA, 122 bp, Homo sapiens
tcatccttccatgatgactattaataacctagatggatctcaaatcatattaaagggcagcgggcagcaagccccatcaaatgtgagtggagggctcctggttcatagacagactcctaatg

SEQ ID NO: 175488 - DNA, 122 bp, Homo sapiens
ttagaaatggaggcgcacggaaggaaaaggagtggggaggaggcagagaggggcagtgggcggagtgacagcaaatggcctcagcaagggtaggaggaacccggcctggcctggaggctaag

SEQ ID NO: 175489 - DNA, 122 bp, Homo sapiens
gtgaagccttttaaaattcagcaggagacctcccgaatggcagctagttctacagagtggcgtgaatgggttgtcctttctctcatgataaatgctcattgcagagcagggcaattcttcat

SEQ ID NO: 175490 - DNA, 122 bp, Homo sapiens
gcaggctgcagggttccccggagcgatgaccagggctgtccccgcagcaggaagaacgagcgtggtctcttgttccccgcttttctcataggagccgcatccggctggctccacctgcttgc

SEQ ID NO: 175491 - DNA, 122 bp, Homo sapiens
ctccatctctctgcaccttgttgcggccaggcttcgtagcagccaaggccccagctggcgcgggggagctgcagcaagcacactgtttgtgtgcccagcagatgtaaaaagcttggtgcagt

SEQ ID NO: 175492 - DNA, 122 bp, Homo sapiens
gaaccgcatcgaggagcgctcccagacggtgaaatgctcctgtttttctggccaggtggccggcaccacgcgggcaaagccctcctgcgtggacggtgagtgagaggccaggacccgggcag

SEQ ID NO: 175493 - DNA, 122 bp, Homo sapiens
ccatggtgcagatctgctccagctcactctggtgggatcacgccagccacggccgggccacggcacatcatggcaacgtgctgcccacctgctacgccacctgtttttctagaggcggacgt

SEQ ID NO: 175494 - DNA, 122 bp, Homo sapiens
gcacctgtagtcccagctactctggaggctgaggcaggagaatggcatgaacctgggaggcggagcttgcagtgagccaagatagcgcccctgcagtccggcctgggtgaaagagtgagact

SEQ ID NO: 175495 - DNA, 122 bp, Homo sapiens
caagttccgagccctgccccgtggggaagcggctcaggcccggcgagaattcgagcgcagcgcggacgggccagcagtgatggggaacccagctcaccctccacagctgctggcccgggtgc

SEQ ID NO: 175496 - DNA, 122 bp, Homo sapiens
ccggtaggggacatagtcagggtgatcaggaacaacttccctcgcaaggtgacattcgagcgaagacttacaggaggagaaaggcgccaggcctcggaaatggggtcacgttcatgtaagtc

SEQ ID NO: 175497 - DNA, 122 bp, Homo sapiens
ttctattacgtaaaatgtattttatgcttatgtcccccttttttcccctgggtttactagcgagcatctctccagcctcttacttggctgcattgctgtcctgtccactgtggagccccgtg

SEQ ID NO: 175498 - DNA, 122 bp, Homo sapiens
aacagaaggggagggcctcagtagctcccacttcttttccagcccacatttggaagcaaccggcacccacgcaggttctggaacttgccaaggtcagtgtcttttccacctccagaattatc

SEQ ID NO: 175499 - DNA, 122 bp, Homo sapiens
tgagtaaaaatcatttttcctgggtagctgattcctagaaactcgcagggcggcacagcacggcggctcgtggcagcagaagaggaagatgccgcggtggaaggcgtcttcgcggccgggca

SEQ ID NO: 175500 - DNA, 122 bp, Homo sapiens
aaatgcacgaatcagcaggattctaaaagtagccaatcgcggggaggactgaaaagagcgcgctttgataggacagaaacgaaacatgggaggggacaataaaggaataaaagctggccacc

SEQ ID NO: 175501 - DNA, 122 bp, Homo sapiens
cctgtaatgttcatgctgacctagaaatcctggcagttccaacatttgggttgactcaggcggggaagaaaaatcccaggtgaatgataattggattacccagttatgctccagagccaaat

SEQ ID NO: 175502 - DNA, 122 bp, Homo sapiens
tggtgctgcacagtatggcatcactggcctcatctcatgctactctccttgctctctacacgctcacacagtttctttaattccttgaatgtcccatgttcctttcagcctctggctcatta

SEQ ID NO: 175503 - DNA, 122 bp, Homo sapiens
tcaatccagagccctttttcagtgttgactgaagcattcctctcttttgtgtggagtttgcgtttattttatttttgcccagctgactgcttcacacgagacactcataaaccatagacctt

SEQ ID NO: 175504 - DNA, 122 bp, Homo sapiens
agtgatccacccaccttggcctcccaaagtgctgggataataggcatgagccaccatgcccggccatgctggggcttttctaagaacacaagcacaccggagggtaagacaagattctggag

SEQ ID NO: 175505 - DNA, 122 bp, Homo sapiens
ctcgtacccgaaaattcaagccccatccgagacagggaacccagcaggcttgcactgccacggtggggagcgggacgcacggagcacgacactgactgggggaagggggcagcagttcgcgg

SEQ ID NO: 175506 - DNA, 122 bp, Homo sapiens
tccatcaggcttgctgcctgggcccctggcgggaaccagcctgatctattactcagcaaacgtaaacagtgcttacgttcagctccggcctccagcgcttggtgtctgtgtcccacgggaga

SEQ ID NO: 175507 - DNA, 122 bp, Homo sapiens
caccacattctgctcgccccggagtcctgcctctccactcttgtgtctttccttgagcagcgccaaccctcccagggcctggcccggctgtgcctttgacagcccctagcagcagtgcccat

SEQ ID NO: 175508 - DNA, 122 bp, Homo sapiens
taggtctttcgtatcccctccggcctctcggggctgtgcgttcggaaacagcgaaaggaacggcctcaggaatctggcctcagccggagcactggtgaacacaggctcccgtcgcgccaagg

SEQ ID NO: 175509 - DNA, 122 bp, Homo sapiens
gcagataaactgaggctcagaaagggaaaagaaattgcttaggatcatacaggcatgcagcggtagaaccaaggttaaaaccctggtctcctgatgccagtgatttagccgttataaagtat

SEQ ID NO: 175510 - DNA, 122 bp, Homo sapiens
atatttcgacggagaggctgccatggaaataaacataaagtccctcttggaaaccccttccgaggagatagaaggtgtggaatagtcgtggctgtggagaatggtcaaggccagggcgtctt

SEQ ID NO: 175511 - DNA, 122 bp, Homo sapiens
ggtggcagctgcgagagtgacacatggtgagccgagcggagtgtaaggccaagtgagggtcggctgccggcagaggtaatttatgtgctcctgaaaattgggcgggtccttctaactcctcc

SEQ ID NO: 175512 - DNA, 122 bp, Homo sapiens
ggggtggggggttgggagggcatgtgttccggccccgccgaggcttaagttccatgcgttcgattcctcgcttgccgctgccgcccgcagccctcatctcttgggcgctggggaagaaactc

SEQ ID NO: 175513 - DNA, 122 bp, Homo sapiens
catcctcccctgcctcgctggggccacagccgggctcccagggctccctccgtccactcccggtcttgcagttgggagggcgtcccggaagcccatgcagcccaaaccctagaggactccct

SEQ ID NO: 175514 - DNA, 122 bp, Homo sapiens
tttgtaacaagtcttttatcatcttgaagtctgaattaacatttctgtctccaccagtttcgttgtttttccatttggcaaactctaggtttttcctgttgtcttccctttgggtcatgaat

SEQ ID NO: 175515 - DNA, 122 bp, Homo sapiens
ccacacttactcactgaggagctctcggattccatggggctggacgggtcagtgtgataccgtgcacccacacttactcaccgaggagctctcggattccgtggggctggaagggtcagtgt

SEQ ID NO: 175516 - DNA, 122 bp, Homo sapiens
cagctcctaagcagggccctctgtgtcctgtgggatctgtcctgcagttcctcatccccacgtgaaccatctctcagtcactgcacacccccacgctgtgccccgccgccacacccccgcca

SEQ ID NO: 175517 - DNA, 122 bp, Homo sapiens
tttgaaaaagagcacttcattatataacagcaaaggcaggaaaccctgaaataactgggccggtagtgggatccagatttctggagttcatgggcccctctccccattcaatcaattctgga

SEQ ID NO: 175518 - DNA, 122 bp, Homo sapiens
gcctgtggagcctctaacccatttcctctgcagccctcggctggtctcctgctggggtcccggagggccgggctggcccaacagcacacatggagaagccatttcctccaggagcatctgct

SEQ ID NO: 175519 - DNA, 122 bp, Homo sapiens
cgcccgctcgccccggccccggcccccgagcgccaatccgagcctcccgaccgtagccgccggcgaatcggtgcaggcaccgccctccactcccgcctctacggcagagttgggggaaaagt

SEQ ID NO: 175520 - DNA, 122 bp, Homo sapiens
acacaaccgaggcatccggatctgagccatctgtgaatttgccactgggcatggttgtagcgaacacatgcatgccagggccgtgtcttccagctgtctgtcaagacactgcctcagtttga

SEQ ID NO: 175521 - DNA, 122 bp, Homo sapiens
cactgacagcagggccctggcggggagtccaaggagtattggcagcctattggcctcctgcgcaggctcactgacagttgagcccttcgggcagggcagcctagcggctcttgccttgggct

SEQ ID NO: 175522 - DNA, 122 bp, Homo sapiens
ggggattaaataagatcacccctaggaggcacttagcactgtctctgcaacatgagaaaacgtcaacattgtcacctcttctatttttctccaaaaatagggagactgatgtgatgattaac

SEQ ID NO: 175523 - DNA, 122 bp, Homo sapiens
agggctggtccaccgggcagcactggccactgttgcctcagcgttctgtgcaagcaggtgcgtcagaaccggctcatggagatataattgaacgattgcctcagcgcgtgccagactctcca

SEQ ID NO: 175524 - DNA, 122 bp, Homo sapiens
gtcagagtggaagaaagtttctaaaggtttgtcccgacatgactccctccgccgcagcctcgtactctgctctcgtgcagcgccgcaaggagagacctctttcccttttttgtataaactca

SEQ ID NO: 175525 - DNA, 122 bp, Homo sapiens
actgtcagatggtctcactgtgaagcaataagcttccctaaaacaaggaggcaggccaagcgccagaaagctgcagtctggacaaaacacacagcctggaaagaattaaaagttcatgtgca

SEQ ID NO: 175526 - DNA, 122 bp, Homo sapiens
tgagcggcccacctgccggtcccccgctgcctccggcctagtcccagtcgcgtcatgcgccgccccggaactgcacatttaccttggtccggacccgccagggcgcgcacttggatctctga

SEQ ID NO: 175527 - DNA, 122 bp, Homo sapiens
gctctttctgtacctcaccgccatcctgcagagcttttcgctgcagccgctgggtgcgcccgaggacatcgacctgaccccactcagctcaggtcttggcaatttgccgcggcctttccagc

SEQ ID NO: 175528 - DNA, 122 bp, Homo sapiens
ccgagagcatcggcactggccccgaatgctggtcaaaggaagctaggttgggacacaggccggcagcgggtgcaagatgccagggagcaggcggccaggcgggccagcacatgcggctgcag

SEQ ID NO: 175529 - DNA, 122 bp, Homo sapiens
cttctcgtgcgcaccagcgagcacccgggccaagcgtggaggctctgcgggctgggggtccggcccacaccatcagcctctgtgcagccgttgctttttccgttgaccaaagccatgacctt

SEQ ID NO: 175530 - DNA, 122 bp, Homo sapiens
tcgaggccttcaggaaatcccggggaagcttactgcggggatggctgtgagcttgccaggcggcgattgtgcacatcgtttccttacagcctccttcctgccgctctgccttccgtgcctct

SEQ ID NO: 175531 - DNA, 122 bp, Homo sapiens
ttcacacgtcaaatacacactgccagactcgcgggcctctacacgcaggcaaacacacaccgacacagaatttcacagtttaggaaacagctgaactccttggagaaagggtgagaaggtgt

SEQ ID NO: 175532 - DNA, 122 bp, Homo sapiens
gatggttgctgggagggggcagccaggacatggggagacgcgcgtgggtttgcaggcgcccgggaagagccggggaggaaacagtggagaagcaagaaggagggcacgtcgtgggcgtgcac

SEQ ID NO: 175533 - DNA, 122 bp, Homo sapiens
tatccgcgggttgcgaagcgtgggtcagccaaggcatgttaatctgtttagcatgtgcgccgcgcggaggagccagaccaccggggcgcaggaggcgcggccgcagccggcgctcctctggg

SEQ ID NO: 175534 - DNA, 122 bp, Homo sapiens
atggagtagctactcccaccagggctgacttcaagccaccagtagtttaatagcccgctccggcctgattcctgagtagttaacaaccagctctcagtgactgctactacagtgtcactggc

SEQ ID NO: 175535 - DNA, 122 bp, Homo sapiens
cgccagtcgtccgggctgaaaaccgtgttgtacacccggagatctgaccccatcattcaccgtagctgctttaaaaccgcatctagaaggcagtgtctgcctctgcctgttccaaatgtcca

SEQ ID NO: 175536 - DNA, 122 bp, Homo sapiens
gctcctggggctcccttacaagtgctgttctgaactgttaggtcattcagagtccatctgcgtcctgtccccagggatctcctcaaaccctgtttagactgctcatagcctttcccttttta

SEQ ID NO: 175537 - DNA, 122 bp, Homo sapiens
tggccaagagaacctgagacacgggattcccggccatggtgggaagcggcggacacctctcgttacgccccctcccctttggcgtccgggcaccaccaaccagcattgacgttgcaatagag

SEQ ID NO: 175538 - DNA, 122 bp, Homo sapiens
cgcggggaaggagggcttcccggctgccgccccgccctgccgcgccgcgccccccgtccccgcccccgcctcctcgcagggtgggtcccccagtgcccacctcatttgccggccaccgctgc

SEQ ID NO: 175539 - DNA, 122 bp, Homo sapiens
ctgtggaatcgaaccaagtggaccaccggggccacggagcatgcaagagacacaagtgggcggtgtggggctgttgggttttcctgcccgtggaatgttcccgcacgtcttcccgctggtcg

SEQ ID NO: 175540 - DNA, 122 bp, Homo sapiens
actcgactacttttgtctcctgcgggccactgttgagccttcacgagacgtcactgtcttcggtcgcggggcatcgtgggtaggagggagatttgctctcactgctcccaaaaatggcggac

SEQ ID NO: 175541 - DNA, 122 bp, Homo sapiens
tgtaggcagtagtgagtgctgaagcccagatggtgcagaggacattgggcagccacctcacggaacctgtgcagactcggctggttaacagcggggctcacagggactctcacagccaggct

SEQ ID NO: 175542 - DNA, 122 bp, Homo sapiens
ctggtaaagtaaacgaagcccctaagcatccagaaaagaggccctgcaggaaagaactggcgcatggctcctggaaagaccgtcagagccgggtaaaaataagtgcagcgccaaacgtgctg

SEQ ID NO: 175543 - DNA, 122 bp, Homo sapiens
tccaaggaatccggggctgggaggatccccactacccctgcccaggaactagcatccagccgggcaccccgggtgacccagtgccccacacaagatcgagagttgagcccaagaggtcacct

SEQ ID NO: 175544 - DNA, 122 bp, Homo sapiens
tcccgcccccacccaggctagggacccgccaacgaggggtgggggcgggaggcgcccacccgtcgcactagtgggcatttgctaaactacgttttatttttttgtaaagtgagcgcccgctg

SEQ ID NO: 175545 - DNA, 122 bp, Homo sapiens
ggcagctggtggcttgggggtgggcaggacactcacgggcggccagccaggtctcctgcacgctctggtaggcactgaggttggtggtgaaacccagctgggagatggaggcgcccttgtcc

SEQ ID NO: 175546 - DNA, 122 bp, Homo sapiens
tcgcaggggcgcccggggcgcgcggggcagctggaatcggcggctgcttctgcccagcgccgcatccaccgccgcctcccgggccgggagcccatctacctccaacaccccatgtgcactgc

SEQ ID NO: 175547 - DNA, 122 bp, Homo sapiens
aggcacagactagaccagtggcagggagaggaggtgaatgccaaaggggcttggtctctccggattccaggaggggatgaatctagacaccagtgggaggcagaactggcagctcttgctct

SEQ ID NO: 175548 - DNA, 122 bp, Homo sapiens
ccaggtagtgaggcaacatgtacaaaggcacaggtgtgtgagaccacggggaccagggaacggtcagacagagggcgctctgcagcctccccctttactcctaccctgagtcagttacgggg

SEQ ID NO: 175549 - DNA, 122 bp, Homo sapiens
aagggggcagtgggaggctcctggcgttcccctttaacgggaacaacgccctgtttgcgtcgctgcagtagggtgtgtccctgggtcagcgtgtgcgggagggcgggactcagggaggagag

SEQ ID NO: 175550 - DNA, 122 bp, Homo sapiens
agacgtgtagaggtcacgtgcgcaggcgcagactgagactcaaaagttggcatatgcatccgcgtttcccagatctgaggcttttacggaggaggtttctgatttgtaacagtagagaggaa

SEQ ID NO: 175551 - DNA, 122 bp, Homo sapiens
atttgtgaagaagccgtgacatttgacaaggccgccagagtgcctcttcctgagcatccccgcaagggagctgctttgtggccgacacgacgttccggagcccaggctgctgcagaccctgg

SEQ ID NO: 175552 - DNA, 122 bp, Homo sapiens
tagataatccaaggtcaacctgaagcgtcgctcgtatcccttgctcaactgtctctgattcgcagtttgagaagcgcgaggggtgcaatgatatttccaattctacttccttgggtcacttt

SEQ ID NO: 175553 - DNA, 122 bp, Homo sapiens
ttggcgcagggcggggagccaagctggggcgactgggggggcctgggggagctagcggggcgggacccgagcggggcggagagtggcaggaggaggcgaatctccgcgctccggcgaacttt

SEQ ID NO: 175554 - DNA, 122 bp, Homo sapiens
ccatagagcgaccagggccttctcaaatccggctgtgagcagaaacttctcccgcccccccgggcccaccatggtgacctgtggagtgcctccatgcgccgagatcgcttatcagcccatca

SEQ ID NO: 175555 - DNA, 122 bp, Homo sapiens
cttgaattctttccttccttcccctgcagtgttggagcaacagcttagagggaaacacttcgagggcagctcaaggctttatcatccttgcctgccctcttccccctctaaacaaagccctg

SEQ ID NO: 175556 - DNA, 122 bp, Homo sapiens
gtttaaagaaggttatgatgaaaccaacaagccaatccgagtgtctttaaactggggccacgaatgaaattcactcctgtaagagggcaggggagctggggcactctctcatcccaaaatgg

SEQ ID NO: 175557 - DNA, 122 bp, Homo sapiens
ggtagatagaatccagtctaagaaagcacagatgatacaaaactgggaagaactgagtgtcgctcaattcttattgttttaaaaaggaaagaactgtaggccactggccagtgtagctctgg

SEQ ID NO: 175558 - DNA, 122 bp, Homo sapiens
gtccgctgcgaatactgggggtgggcagttgggactcagggccccaggccctcggggctgcggggccgcctcttccaaacgcgccttaagcggttttgcagtggctttccgccggagggctg

SEQ ID NO: 175559 - DNA, 122 bp, Homo sapiens
acctcgtgatccacccgcctcggcctcccaaagtgcggggattacaggcatgagccaccgcgccggccagtctgaaacattttcaacctggctatattgaagtttgatgaaccatcttttct

SEQ ID NO: 175560 - DNA, 122 bp, Homo sapiens
gcccaggagacgcggcttctagcgcccggttcccgggaagctctgtgacgcgctaagccccgcccccacccgtcacctgacccagcgcagcctcgcctccccgctgggggctcggcggccct

SEQ ID NO: 175561 - DNA, 122 bp, Homo sapiens
tgatgttactcccatatcacgggcaggtacaccccctccgtgatatggttcataatatctcggagtggagagggtgttattactctctatattgcgggaggcgtgcacctctttgtgatatg

SEQ ID NO: 175562 - DNA, 122 bp, Homo sapiens
agcatcccgataaccgttttgtttttctcatattatgaccttctcatgttagcaccacttcgcaacgctccaggtcgtgaaggagcaacttcaccatcgccgcctacagacgccactgggag

SEQ ID NO: 175563 - DNA, 122 bp, Homo sapiens
cagtaagacaggctgcacaaaacccagccttgccagcttcttctgcagctgcaagattcccgcagaacagcagcagctaacaacaacaaatacttgtcatataccaacattttcagggcagt

SEQ ID NO: 175564 - DNA, 122 bp, Homo sapiens
taaacagtggtgccaacatgttcttcggtagatggatagatagataaacagtggtgccgacgtgtccttcagtagatggatagataaataaacagtggtagatctagacagtggagtatcac

SEQ ID NO: 175565 - DNA, 122 bp, Homo sapiens
tatcagtcttgagccaatcaggactgcaacttttacttttcaggcaatgctctacacagccgacccagtcaatgcagactggcattacccacattttcctattgctcaactacagaatgagg

SEQ ID NO: 175566 - DNA, 122 bp, Homo sapiens
agagaaagagagagagagagagtcttgctttcgaacaaagaaaaaggaaataaaaagacccgataatctcaaaaggttatttgctgcttgaaatttgtgattcggtgtattctacccagcaa

SEQ ID NO: 175567 - DNA, 122 bp, Homo sapiens
attttccatggttttctctatgaacaatactgaataacatgagttattcaaaggatttgccgggcttttaaaaatagcccatttgtgtgttattttattgttatgttatattattttaatta

SEQ ID NO: 175568 - DNA, 122 bp, Homo sapiens
ttgggaactcatggacataaagatggcaacaatagcaacttgagaccagtagaagaaggacggagggagtaaggcaaaggttgaaacactaactattgggtactatgctcagtacctgggtg

SEQ ID NO: 175569 - DNA, 122 bp, Homo sapiens
tggcccttcgcagctctcgcctttcgcagctctcgcctaacaggaaagggaagaaacaggcggaagtgggaactgcacctgagcgacagtactgcaaaccaataggcagccggccacggcgg

SEQ ID NO: 175570 - DNA, 122 bp, Homo sapiens
caggagatggtaggcgtgggggcgatgctgagaccacctccctcccgggctttcctagcccggagttcccaccgcggatctgggcactgactccctcccgaggcacccgggaccgccgagtc

SEQ ID NO: 175571 - DNA, 122 bp, Homo sapiens
ccggaccggcgcaaggggaggagagcgggtggaagcccaccccagcgaacgcccgagggccgggccccgcccacccagaacgtcacccaatggaaacctgccggcggtgcggcaccgcccat

SEQ ID NO: 175572 - DNA, 122 bp, Homo sapiens
cttatttctttctctatactttgtctacgtgtctttttccaagtctctcattccacctaacgagaaacacccacaggtgtgaaggggcaacccaccccttcataccaccactctgttgtcct

SEQ ID NO: 175573 - DNA, 122 bp, Homo sapiens
acttctgtgtctatacccaaaagaattgaatgggagaacttggaaatatttgaacacctgcgtgcatagctgcattattcatgatatccaaaggtggaagcagacacataaaaggataaaca

SEQ ID NO: 175574 - DNA, 122 bp, Homo sapiens
acagctgaagagccaccctgactccctaggggatattctcagactataaacaacctcattcgccacctccatttgcttccaacctctgtacatacttgtctcaattcataattagtgtgaaa

SEQ ID NO: 175575 - DNA, 122 bp, Homo sapiens
ccatgcaaggtatgtttcacgcttgacctcagacacacctgatttgaatcccagccccaccgttctttgccaagaatgaaaacgtggtgggaccaggactcccatggagaagtgaggagagc

SEQ ID NO: 175576 - DNA, 122 bp, Homo sapiens
agttgacattattttattttgggagttttgtttgtttcttaggttttcattgctcagtcccgatcatctggaagtcaccgagatgttgaagatgaagaacttacaagaatctttgttatgat

SEQ ID NO: 175577 - DNA, 122 bp, Homo sapiens
atcttggctcactgcaacctccgcctcctgggttcaagcgattctcgtgcctcagcctcccgaaacatacttttaaataaagtagggagcacaacaatggagttttaaaaggtctcaagacg

SEQ ID NO: 175578 - DNA, 122 bp, Homo sapiens
tcactgggtgccacctggtttgcatctgtgccttcgtcctgcccagttcctgagtgggaccgcaggcccggaatgtcaaggcaaacagtcctgcttcagccactgggctccagtcccacccc

SEQ ID NO: 175579 - DNA, 122 bp, Homo sapiens
cccacccgtgctgtatccccagagagacctgtgagctgccaacgtgcatccttactcccccgcgcgcgaggcagcccccgccaacgtttaggttgagcccagtgtgcaggcaagagggttcc

SEQ ID NO: 175580 - DNA, 122 bp, Homo sapiens
ttaacgcccttcttctcatccccattttccggtgcccaccagtcccctcgtgctgacagacgactcagcgtgtctccccagagctgctctgcgaactgcacccgtggaggagcccatacttt

SEQ ID NO: 175581 - DNA, 122 bp, Homo sapiens
aggggcatttggcaatgactggaaaagtgtgtggttgccacaactgggggaggggagtgccgttggcatctagcaggcagaggccagggatactgctaaaaatcctacagtgcacaggatgg

SEQ ID NO: 175582 - DNA, 122 bp, Homo sapiens
ccccaccctcaggctgaaagaacctacgttcggggtttgggggacggttcccccgggactcgttgaggagtatccgaatacggccccgccaaatcccctgtccccggcacttcttccctgac

SEQ ID NO: 175583 - DNA, 122 bp, Homo sapiens
cctccttttgattaggctggttcttgagccctggctaagccagcctgagcaaagatcctgcgaagtcatccctcccaccttgatatctgatcaagttcctcatccccacctttgatggggac

SEQ ID NO: 175584 - DNA, 122 bp, Homo sapiens
ggatctcacttactaaaactggctttttttcccctatcttcccctccttaaggtcttgtacgtgcctaagttctagagcctcctgacgtgagcatggctgagagtgaggaccgctccctgag

SEQ ID NO: 175585 - DNA, 122 bp, Homo sapiens
tggtgaaaccccgtctctactaaaaacacagaaaattagctggctggccatggtggctcacgcctatgatcccagcactttgggaggccaaggcaggcggatcacgaggtcaggagttcgag

SEQ ID NO: 175586 - DNA, 122 bp, Homo sapiens
gtgggcgggcagagcgggggtctagactgtgggcaacaagttcttaaggcgaagtcagttcggacatagtggcttggaggacacaggtgcgtctccaggcctttctgggtacccccacctgc

SEQ ID NO: 175587 - DNA, 122 bp, Homo sapiens
cccgggagggtggactctcccttcattaagacccccaggtcccaggcatggaggaggcctcggcgcttccccgtggaggccttcgaccaggcagcctcagtttccccacgggcgaaagccga

SEQ ID NO: 175588 - DNA, 122 bp, Homo sapiens
ttcacacatcactttcacttttttacaaattttggaccaccacctgtgtgaaactgcagtcggagttgtttagatgtgatctggcaatgctatccagcatctttggagaccaatggtcagtc

SEQ ID NO: 175589 - DNA, 122 bp, Homo sapiens
cccgcgccttccggagctggcggctgcgctcccggttgggccactctagctgcgggaggtcgcttctcggtggcgtagagaagggggcggggcaggagcgggacgcggcggccactgcgggt

SEQ ID NO: 175590 - DNA, 122 bp, Homo sapiens
cttctattgtactgcttgctctataaaaatcaatgggcatataaaatttctagagacacacgccatcacacagttagcaggtactccaagcccctgaatcttctaaactaattccccacatc

SEQ ID NO: 175591 - DNA, 122 bp, Homo sapiens
gagtccccatgagcctgtcctgtcccagcacccttcagaactgttgttagctgagggggtcgtgaggaacaggataatctgcatccctttcagggtaaacctgaactcaggaggcaaatttc

SEQ ID NO: 175592 - DNA, 122 bp, Homo sapiens
cgtttcgcgccggcggaaatacagacgagagcgcgagctgcggcctagagcggtaggaaccgacgcgagcagtcctgcagcgtcccctggcggagcggaggctcaacgccagactctggagg

SEQ ID NO: 175593 - DNA, 122 bp, Homo sapiens
tgcgtgaggttttcccgtccctgcctgccagacagtgaggcagcctgtcgtctgccaccccggagcagcaggagatgagtgttgcaacgctcagccagggaagctgtctctcatgtgagagc

SEQ ID NO: 175594 - DNA, 122 bp, Homo sapiens
ggtggctctccagcaaacaatgagcagaggagttactagagaggagaggatacttaaaaccggagacatgcaatttggagcctgacagatccagatgagccttctagatctgcacttttcta

SEQ ID NO: 175595 - DNA, 122 bp, Homo sapiens
cttcctgagctggtgccggcgggtggggctggagctgagtcccaaggtgagcgagcgagccggcgggcggaggacccgcggcggggcgcgggctgccctgaccagccctcctgctcaggtgg

SEQ ID NO: 175596 - DNA, 122 bp, Homo sapiens
gataagggaacagttagggatcccttctttcccctatacatacacagacatacaaacacacgcacccgagtgaatgacagggaccatcaggcgacagattgaagggcagagggaggcagcac

SEQ ID NO: 175597 - DNA, 122 bp, Homo sapiens
gtaacactcaccgtgaaaatctgcagcttctcttctgaagctagcgagaccgcgagcccacgaagaggaactaacaactccagacgtgctcccttaaaagctgtaacactcaccgtgaaggt

SEQ ID NO: 175598 - DNA, 122 bp, Homo sapiens
aacgtggcatgacgctgtgtctgaccagcaaatgcgaaggttttatgtggcttgtggacccgtttcaggctctcctgagagacggtacctgggagcagtggcctgaagcacctcctggggcc

SEQ ID NO: 175599 - DNA, 122 bp, Homo sapiens
ttcctttaaaggcgcgctggtgtggggcggccccttctctcggggctggctcgggagtagcgcagtcgccaaagccgccgctgccaaagctgccgccactagccgggcatggccatggcgtc

SEQ ID NO: 175600 - DNA, 122 bp, Homo sapiens
tcactaacatcgcgctccagggccagccggatctgcgtggccgcatccaccagatagtcacgttttgtcatgtcaggcactcccagagccaccctgttgcgaatctgctccaggtacacgtg

SEQ ID NO: 175601 - DNA, 122 bp, Homo sapiens
gccccgggcgggctgcggacgcgagaggcggcggggacaggcagcgcgccgcccttcccacgctgccattctgacccgcgctgcctcgccccagccccgtccgctgacttccgcaatcaaaa

SEQ ID NO: 175602 - DNA, 122 bp, Homo sapiens
gtgcgccccccgcgcccggccttccccggggtccctgcggccccgactgtgcgcccgccgcgcccagcctcccccaggacccctgcggccccgactgtgcgccccccgcgcccggcctcccc

SEQ ID NO: 175603 - DNA, 122 bp, Homo sapiens
tttgggggctgcgagtacactacaggcatgaatgttcagtcacctgatcttcattccagacgctaggaaaagcaggccggtgtaaggaagaaagcctttcaaatttgtattggctcctattt

SEQ ID NO: 175604 - DNA, 122 bp, Homo sapiens
acacatacatggtaaaaactacaaagcaaaacaaggcaacaagtaacacaatattcagggcggtggttatctttgaggagggaagaaaggattcagtggagggtctggcaatctgaaaatgt

SEQ ID NO: 175605 - DNA, 122 bp, Homo sapiens
tgaagcccactccgtggacgcgctggtgaatgttgatggtgtcttctcgggtcaccacctcgctgattgcagaatggccgtttttcttctcgccatccttttctgcgggagccattctgccg

SEQ ID NO: 175606 - DNA, 122 bp, Homo sapiens
tgggctggaaacccgccgcccggggcgcaggcagcccagctgggccccgcctcaccccgacgagctgctcacgacctccaaagggaagaaagcgacgctctgagaactccgagaggccgccg

SEQ ID NO: 175607 - DNA, 122 bp, Homo sapiens
cctctgcgggctggtgaggtgtgaagccgctggacaggaaacgcggggctgcctggagcccgcaagccgtgcaccctgcccctgtgcaacaagaggccgctggacaccctccccacccacag

SEQ ID NO: 175608 - DNA, 122 bp, Homo sapiens
gcgctcccacagaccccaccactcctacagtctgtaattacccccagctgcacccatatgcgtagcttccctggtccagagggacgtgcgtgtgtgaccctgcaggatagtggggtggccct

SEQ ID NO: 175609 - DNA, 122 bp, Homo sapiens
gaagcggtgagggtaggcggttgagcggggttttggagtgggaacggggggttgggtgctcgagggaaatgagtaagcaagaaaaatctaactaagtaaatgccccggcctccggttctagg

SEQ ID NO: 175610 - DNA, 122 bp, Homo sapiens
ttctcgcccgacaccgagctccccccctcggggtcgccgggcggctcctcggcacctcctcgggaagtcaccaccttcaaggaactccggtcccgaagccgggccccagccccgccagtccc

SEQ ID NO: 175611 - DNA, 122 bp, Homo sapiens
gtgcagagacaggaagctggagatgtctttataaagtcacacctttacagactgtaatcacgtgcgagtggagtggggttcacaggatggtgggagtggggccgggcgtgggctcataggat

SEQ ID NO: 175612 - DNA, 122 bp, Homo sapiens
ggacacacccagcgtcaacaacctctgtcctcaagactctcccagaatcctgggtcaccacggcctttccatgtgcctcacaccagaaggactctcgaaggtgcccccagccgccctgtgca

SEQ ID NO: 175613 - DNA, 122 bp, Homo sapiens
ctgagttgggacatgagttggctgccagtttcctccctgtccagttcaccccttaaccttcgagatgggcaaacaaaggtccagagagggcccaagatagggcctgattcccttctcaccag

SEQ ID NO: 175614 - DNA, 122 bp, Homo sapiens
ggggcccccttacctggaggcggctgcgaaggcaaaggcggaggcggcaaaaccggcgagcggctcctcccgcccggcccggcccggcccctcccctccccgccgcgtcccggccccggtcc

SEQ ID NO: 175615 - DNA, 122 bp, Homo sapiens
caaagtgaagaagcctggttccgcagcgtccaatggcccagcgtcagaagctgccgttcccggcagctcagcacttagggccagagagcggcagaggcccagaacccaaagcccggcagcgc

SEQ ID NO: 175616 - DNA, 122 bp, Homo sapiens
tcctgcactaggtcgcaggagatgagaccaaaccacaatggggtcactcatgctaggtaccgcctaatcgaactgaattctgaaacagactagttttcaaacaaacaaacaaacaaacaaca

SEQ ID NO: 175617 - DNA, 122 bp, Homo sapiens
aggatggagaaaggtacgtaacttatgtaagatcacacatttgtgtgggaggcagagctgcggtgcagagccggctgtgtgtgcccaaagcccctgctgctttaaaatattgtacactcacc

SEQ ID NO: 175618 - DNA, 122 bp, Homo sapiens
atgatctgtggtataagataccaggtatggctataaagtaactgagacggatcccacaaacgacatatgacaatcagtctcattgctttataatcacaccaggtacaaacggttttagaaat

SEQ ID NO: 175619 - DNA, 122 bp, Homo sapiens
agcacctcacaccacagacgaacgaaggcactgcaagacgccagcgacccaagcagaaagcgctgagggaaggggcagccccgcagggtggtctccctggctccctgtttgttgtgaaacac

SEQ ID NO: 175620 - DNA, 122 bp, Homo sapiens
gaactgagggtggggggcgcccagaggcgggactcggggcggggcaggcgaggcggagggcgagggctgcgggagcaagtacggagccgggggtgtgggggacgattgccgctgcagccgcc

SEQ ID NO: 175621 - DNA, 122 bp, Homo sapiens
ggccgtgctggttccctctccacggagtttagcacagttcccttcctgatcagcagcagccgacccgggcacaagtcaattctgtgtgccaggtatgcttctcgcatggttaggaaaggtgg

SEQ ID NO: 175622 - DNA, 122 bp, Homo sapiens
gcagagggcgtgcgggtgtggttggactgagtgcggggaaaccacctgcgtagttggaagcggtggctcgaatacttacttagttggctctaactgtgcctcagcgttgctgtgactttggc

SEQ ID NO: 175623 - DNA, 122 bp, Homo sapiens
gaaatcaattgtattgagcattagcataagcgctttgctaattttatttccattgtaattcgtatgcatacatgttagaacttgatcatttttacgtggtgtcccgagcttgtagtcccagc

SEQ ID NO: 175624 - DNA, 122 bp, Homo sapiens
acggagcagggaccggcgcccggagcgagccagggagcggctaaccggggacccaccgcgcggagccagcctagctgccagcgagcccaacccgcgacgacccacgcccctgagccccgcag

SEQ ID NO: 175625 - DNA, 122 bp, Homo sapiens
tgggagcccttccttgacagcccgggccgagaaggtgagcgtcgacgctggtcgtgggggcggaggtaaggggcccggggcggggacgtagaggaggcgcgagggcggacttcgggtcgggg

SEQ ID NO: 175626 - DNA, 122 bp, Homo sapiens
ttcctgtccctcttcttgttcttctcagcaaaacttttcattgactacttactcaaatttcgttatctccttctccacttcagacaggcttcttccccacagtctcctgaagctgtttcttg

SEQ ID NO: 175627 - DNA, 122 bp, Homo sapiens
ttcctcctgtttccctcaagagcaaactgtccctgctagagaagccgaaggatagacggtcgggataaaggaggactcggccgagaaggtgcaggtttaaagggctgaccgcggacggggaa

SEQ ID NO: 175628 - DNA, 122 bp, Homo sapiens
atcagagataaagccccctttcccctctctcctacgggagccctcaacaagacagatacacgggttgggtggagtgagaccacatccagcagaggcaaagcttgctaaaagagagaggagga

SEQ ID NO: 175629 - DNA, 122 bp, Homo sapiens
cctgaggccaagccaaggaacccaggcaccagggacccagaggggctgggctgggtgggccgctgacctgggcgttgacgtccacctgtcctgtgctcagcagcaggctgaccatctccaag

SEQ ID NO: 175630 - DNA, 122 bp, Homo sapiens
tatggaagtccagcagggggagacattagcacgtgggtacgtcctctggggtccgaccagcgagagtgggtcggacctggaaggtctgagctatgggatcgagccaagttataagcaaagag

SEQ ID NO: 175631 - DNA, 122 bp, Homo sapiens
ttgtgatgaaagtacagggtggagcagttacaagggcagctgcactgagaagggccctagcgtcagcaccaggaacaggggtgaccaagcaactcagcatatccggggctcacggcttgttg

SEQ ID NO: 175632 - DNA, 122 bp, Homo sapiens
ttaaaatcggggacgagggagcaaagcgcttccatcttgactgcctgtcactcagctctgcgccgggccgccctctgccaccccaggggcttctaatggcggccccagagagagctgggagc

SEQ ID NO: 175633 - DNA, 122 bp, Homo sapiens
gtcggccccgtagaaggcagccatggacgcatcggccaccagcagcgtctccacgaagcgcgcctcagacacaaaccgcttggtcctactcgtggcccccaggggcggtggcggctcgctag

SEQ ID NO: 175634 - DNA, 122 bp, Homo sapiens
ttagtagaagaggagagggaaagggatttggggggcggggcttggtaggagatgggccaccggaatttaaggtgtttgagtctcacacctcatcccggggacccgcctgcatgcacgtcctt

SEQ ID NO: 175635 - DNA, 122 bp, Homo sapiens
tggctgcagtcgaagataatgcggaattcccggcctcgcttcatctccttgagcaaggggcgcgagtcgtcagagtcgatggggagctgacggatcttcaggcggatgttgtatcttgatgg

SEQ ID NO: 175636 - DNA, 122 bp, Homo sapiens
ctttgggcaagttcccttctagaagtactgggaaggagaacttgaagtctgggggaagggcggcaagagctcagggaatcagggaaatcctggtttttagaaaagcattcatgacatggtca

SEQ ID NO: 175637 - DNA, 122 bp, Homo sapiens
ctggcagaaccaggagcgaccacactcactcgcggtcccgcagccccgccgacacccaggcgcgtgactccctgagccgtaccaccacccaacactgcggtgggggtgcgggagccgtccga

SEQ ID NO: 175638 - DNA, 122 bp, Homo sapiens
cccccagccctgccctggcgtccgtgctgctggccttgctgctgagcggtgagtgagccacgtgcccatccatccagcctccaggccccggtggattgtggggaaatatccaccacgaggtc

SEQ ID NO: 175639 - DNA, 122 bp, Homo sapiens
ctctctcattacacatggtaactaagcacaccccttaaagaattttgggaagtcgccccgcgattaccggctcccccaagaaccaagcagtcagtgcagggttttgcaagtgagagtgcgag

SEQ ID NO: 175640 - DNA, 122 bp, Homo sapiens
gcgttctggggctccagggctttgaaatgctttccagtgttgtcacttgaatgtcgaacacgttattctcagtggacactaaagagaagtacaggtaccgtgggctccagggggattcatta

SEQ ID NO: 175641 - DNA, 122 bp, Homo sapiens
aactgcattccatgcgggtctgcggctgggaaccgccattagaagtggactgtttgaccccgagctggcagcggatccccgctgcccccaaaccctcaactattttgcgggggtcatttgcc

SEQ ID NO: 175642 - DNA, 122 bp, Homo sapiens
cggctctggtgcccacgtgagccctgcagccgcctgtcctccccagcagggagagctctgcgctttgatcatgaaccctggctctcaaaacggttctttcatatggaagctctccttcttca

SEQ ID NO: 175643 - DNA, 122 bp, Homo sapiens
gaggcggggcttgggtgggctgaccactcctctggcctccaatactgtcgctgacattctcgtctatgctccagcagccgtacctcactccggtggaggcgggacttcctacagcacttccg

SEQ ID NO: 175644 - DNA, 122 bp, Homo sapiens
cctagccatggaataaaatctctctcgtgtagcagatggcaggtgaccagaggacagagccgagtactgttcatgcattcattcaacccgcatcgtgccacgcatcacagtgggtaccccaa

SEQ ID NO: 175645 - DNA, 122 bp, Homo sapiens
gatgtctgtttctcgatttgcaaggaagctcgcgtgtgtgtgtgcacagagctgcgtgtccgtgatctttggatgctctgtgtgttgtgtgttcctggatctgcatttacagacatgttctt

SEQ ID NO: 175646 - DNA, 122 bp, Homo sapiens
cgcagaagggcctcgaagggtccacatctacacaccccaaccgcgcaggcacaccacactcggacacagagcctgtcgccaagaagaccacacttagaagcagccaacgccgcccacagttc

SEQ ID NO: 175647 - DNA, 122 bp, Homo sapiens
ggagccccgcgacccggctggtgcggccggacctgctggcagctgggaccgggagggatgcgggcctcagaggatcctcaccctgaggcaggtggggccctggatgccggcgctgctctgat

SEQ ID NO: 175648 - DNA, 122 bp, Homo sapiens
actgggtgcagggcatgtggcggaaactggagcagcgcctgccgcctgccagcgggacctcggtttggagccagagtaaaggcttcacatcctgaggactccctgctgcaccacggacgtgg

SEQ ID NO: 175649 - DNA, 122 bp, Homo sapiens
aggctccaacccatccctgcgaggcttcgtctggacaagctcaacaggccaggactgccgcgcagacacgtcccgcaaacgcggctgtaactccaggaaccgccctctggcgaccaaacggt

SEQ ID NO: 175650 - DNA, 122 bp, Homo sapiens
tcttccttatggcgttgtgagaagcaaacaagtagatatggaaaggacgcgagtgcacagcgtggcacagagactctaccattgctctttgggcctccccaccgagtaggacctggctgaag

SEQ ID NO: 175651 - DNA, 122 bp, Homo sapiens
tctttatccccctccccggaggaagcggcgcccttctcggtagcggggctcaggcgatgccggtggattttcttcactcaacgagcagagcatccaacatggcgctgtggccgcctccagca

SEQ ID NO: 175652 - DNA, 122 bp, Homo sapiens
gtcccaagaacgcctcttccctccagggcgcaccagcattggcccctggcaaagctttcccgtatgtctggagacgaggcttctcaaccgtcacccgtggacatcctgggcactgcagggca

SEQ ID NO: 175653 - DNA, 122 bp, Homo sapiens
catcccacagccactgctctatttctttctatgtccctaaaagaaaactcttccaagagtcggctatacgcattgcctttaatgcctctctttaagtttcttcttaaacccactctaattag

SEQ ID NO: 175654 - DNA, 122 bp, Homo sapiens
ctaggcacctctcgagaaggaagtgcatggcataactctgccccgtcatccgggatttgtcgggctttcccaccccacctcctctcacagttgaagtggcaaaacctgtgacctttgaacag

SEQ ID NO: 175655 - DNA, 122 bp, Homo sapiens
catcctcaggtggagtttaaatcactgtgtcccagtttccacgtctgtgggcaggtgatccggcacccgcaaattcagagctgctggcatgaaaaccctataaggtgattagacacactggc

SEQ ID NO: 175656 - DNA, 122 bp, Homo sapiens
ggaattgggggtgggaggatgggaggtgagccacctccatcagacttcccctgccaagcccgaggaaatagagaaagaaaggagcctgagggatctgaagcaccccagggccctcccactcc

SEQ ID NO: 175657 - DNA, 122 bp, Homo sapiens
ccattcacaaagtgataagaaggcggagcacacctcctcatctgccagcagcagcctgctcgccatatagtcaatacgaactaacatttggtagggaattttaatcaaaatccagaattctc

SEQ ID NO: 175658 - DNA, 122 bp, Homo sapiens
ttaagcatttatccccactgctgtgagtcactgttgattactttgtgctccaccactacccgggctgttagattcctgaaagtgaagctcactttaaatgtttattagaaggtagagtaata

SEQ ID NO: 175659 - DNA, 122 bp, Homo sapiens
cgagtggccagggcgttaaggaagaccagtccctccatgctggccggagcactctgcctacgtccccttgcctgcgcccccaggaccctgccgggcgtgcccggagcccaccggtgagcagg

SEQ ID NO: 175660 - DNA, 122 bp, Homo sapiens
ggcgccccctggtggcacgcggtaggatgggcggcaaagaagcactcggcgtgggcggggcgggtgggggtcgcaaggccacttctctccttcctgcaggttctcagagatggaaggtgtct

SEQ ID NO: 175661 - DNA, 122 bp, Homo sapiens
ggtggacggtggctctccaccccgatctggcaccgtccagatcctcatcttggtcttggacgccaatgacaatgccccggagtttgtgcaggcgctctacgaggtgcaggtcccagagaaca

SEQ ID NO: 175662 - DNA, 122 bp, Homo sapiens
ggcggggccgaggcttgaagttgaagtgagggatccagctgtggtgtgcgcggggctcctcgccgccgctttcgctcgctcgctccgcgtctcggccggaggaggaggctgtggcgccggcg

SEQ ID NO: 175663 - DNA, 122 bp, Homo sapiens
cttccctgcctgtgactggcacagacattagccaatgggtgcttggatagggtgcgccggcgccccgccccccttagcgccccgccgccccgaggcaccctctggcagactcggcggcggcg

SEQ ID NO: 175664 - DNA, 122 bp, Homo sapiens
ccacgcggtgggcggtgagccacggctcctgtcctcgccaggtcacccccagggtctggccgccctgtctcaggaacccgccgggccaagggagagtgccagagcccctcagtcatcccatc

SEQ ID NO: 175665 - DNA, 122 bp, Homo sapiens
atctgcgcgtctctcagcctcgctcccagcgtctctgttttcaggttttggaggcgagagcgccagaaagtctgaggcatgatacaaaagccctgttgagagaagagagagaccctctgaca

SEQ ID NO: 175666 - DNA, 122 bp, Homo sapiens
gggggcccctctctcttggctcctcaggggccagcatggccacctcaatcccaccagcttcgagacctcaacttctctgtgggcctcagtgtcctcatctgcaacttggaacaaaaactctg

SEQ ID NO: 175667 - DNA, 122 bp, Homo sapiens
tttccaaccggccttgccagttatcccctgacctggtgcaatgacgagaaaatatctgtgcgaccttggcctctggattgtggactggggacggggtgtccgtggcttcggtagcgagaagc

SEQ ID NO: 175668 - DNA, 122 bp, Homo sapiens
ctgcatcgccaatgcggaagaggtggatgtacccatcaagctctactgtaacggggacggcgagtggctggtgcccatcgggcgctgcatgtgcaaagcaggcttcgaggccgttgagaatg

SEQ ID NO: 175669 - DNA, 122 bp, Homo sapiens
cgtggctgacaaaggctccgggctgcggggagcggagggaggggcggggcgggtccgcggcgcctggggacccaggctgcggtttgcagctggccctgtacagaggcctggagacgcctccc

SEQ ID NO: 175670 - DNA, 122 bp, Homo sapiens
ctcggcgttcttcttcatctggaaggtcaggccctcaagctggtggttgagcttctcctgcgtgtcctgagcatagggagccaggctgcggcgcagctcctccacggtctggtcaatcttga

SEQ ID NO: 175671 - DNA, 122 bp, Homo sapiens
ttccacagcttccaatttagcacgatcattatcgctgttctttgttcggggttgctgggccgcagagctctctgatgagatggcccatcattccctcgcgggtggacccgaaggctccgggc

SEQ ID NO: 175672 - DNA, 122 bp, Homo sapiens
ggacctgtagtttttgggagagcagctgcgaggggacagaatgcttcgctgtggtggttccgccgcgggctccgctgccaggaggccggcgtgcgcgcagctctgcggcggggcaggctgcc

SEQ ID NO: 175673 - DNA, 122 bp, Homo sapiens
ccgacttccgcccttccccagccgcgactccggccgcctcagcccggacctcagcgtgtgcggccagcccagggacggcgacgagctgggcatcagtgcctccctgttcagctctctggcct

SEQ ID NO: 175674 - DNA, 122 bp, Homo sapiens
accaggccgcctcggatgtacattcgtaaacaggcaggcagagcctccaagtcgacttaacgagctgtgcacttgagcccctccgccaggccccccaccaacctctgcgctgccagcgtcgg

SEQ ID NO: 175675 - DNA, 122 bp, Homo sapiens
ttttataagtagtgccaatttttaaaggatcacctggtgagacttgggattcctttgactcgagcttttccttcactttgcctcatattttcttggtagctcactttctttttcattgctaa

SEQ ID NO: 175676 - DNA, 122 bp, Homo sapiens
ggggctggtgtttcccgaaagtgggggcaggggcggcggcctcctcgggccctggccacgcgcaccccggcactccccacccagctgacccctgccccgtgtggccacagcggacatggtat

SEQ ID NO: 175677 - DNA, 122 bp, Homo sapiens
acttgagaaccagagctgggccgtgacgctgctgcgggggactctgggtcccgtcttccccgctttcgagacctgtggtcttcaaatgtgctcgatagtacactccctaaaagaatttttgc

SEQ ID NO: 175678 - DNA, 122 bp, Homo sapiens
ccaagccatctgtctcaactctgacacccgcggtaccttacacaagacatttccctactgcggacctcagtttctgtatctgctaaattggaaggactgcccttcagagagggctccagatc

SEQ ID NO: 175679 - DNA, 122 bp, Homo sapiens
aaccaccttcgtttgataatagtatctcccctgccaggtaagtatgagcttttgcacctccgccccgccacagcctcacacgcttcaccctttacacgcacggtcacttgccccgcgcaccc

SEQ ID NO: 175680 - DNA, 122 bp, Homo sapiens
ctgggcctctgaggctcaggccagtttatacctgtggaagtgccacgtgtcttcatggaccgtggaagtgccacatgccttcaccgaccgtggaggtgccatgtgccttcagggaccgtgga

SEQ ID NO: 175681 - DNA, 122 bp, Homo sapiens
cctggaatgaaccacggttcatcttcacggtgtcctcagtgcagagcgccgtgcatcagacgatcgatgcgtattcgcagcaaattggccattcagcagtgccgtgcaggaacctcggaggc

SEQ ID NO: 175682 - DNA, 122 bp, Homo sapiens
agggcccatctctactagtttgtcctacaagacacacaaatagagagcttttgccgggtgcggtggctcacgcctgtaatcccagcactttgggaggccgaggcgggcggatcacgaggtca

SEQ ID NO: 175683 - DNA, 122 bp, Homo sapiens
gaggataaagtagcacctaactcagtgtttctcaaactgtacagtgcgcctgaagcactccgggatctggatagactgcagattaggactcagcaggtctggggtggggccagagagtctgt

SEQ ID NO: 175684 - DNA, 122 bp, Homo sapiens
gttccaagggctgatgctgggaaccttgctctggatgcgaggcctgcccctggagggagccgcggaggactggcagctgcagatgctggagcaggccagcctgtggctgggccgtagcttcc

SEQ ID NO: 175685 - DNA, 122 bp, Homo sapiens
gccttttcctaatctttcccaagttgactcctaacaccttttaagactgcctagaatcaccgggaaggcttcgctggcccacccctgcccgcccagcttccccaggctgggggaagtccttc

SEQ ID NO: 175686 - DNA, 122 bp, Homo sapiens
tccacttccgcagcttcctcccctcagcatggcaggtcggatcacgtgcgggttctgtcacgtgacatcaggtcacgtgaggccggtcacgccccgggcagcttggctggggctaggcttcc

SEQ ID NO: 175687 - DNA, 122 bp, Homo sapiens
cttggtcctaaagagccattaggagggaggtggagcccgaggggtgctgagttcaaagtccggaacagacagcctgagaggagtttgttggctattctggagaattttattctttttggctt

SEQ ID NO: 175688 - DNA, 122 bp, Homo sapiens
atttgggccggttcagtgaaaggcccttgtgtgaaagctgctgtttacggtggtgtaaaacgaaaaacaattcgtaactttttgtggtaaaatgcccctttataggtgcctcacacaggccc

SEQ ID NO: 175689 - DNA, 122 bp, Homo sapiens
taccttatttcaggccctgacaaagcaaagaccacttagattccaggaagagagaaaaaccgtgtcaacagtgataaatctggagacagaggcaccatgtgacttcctggtatattgatcct

SEQ ID NO: 175690 - DNA, 122 bp, Homo sapiens
tcctctgatctctgttgttaggcatgtgtaagtaacagtaaggctgtgaaatttgtcttacgcacaagccatttagccatttagcagccaagccatgaaaaatcctgagatgtgaagggctg

SEQ ID NO: 175691 - DNA, 122 bp, Homo sapiens
ccccaaagcggggagggggtggtcccgtggtccgcacccaggggagctcagtggactgtgcgccttgcctttctgctgcgcaaagcccagtccaggtcatcacctcgggcggggcggactcg

SEQ ID NO: 175692 - DNA, 122 bp, Homo sapiens
tttctttacgcagatttccatctcttcaggtctgcatggaacccgtgtaggatggaaggacgatttattgggcagcggggagagcatgtggagccatttgtaacaggaaaagcgagggctgc

SEQ ID NO: 175693 - DNA, 122 bp, Homo sapiens
gtctacagggccccacaccctgaggggccctatgtttcgtttgctctgatgtcactgtctcgaaattcttaataattttatctttgatcttgtgttttgtaagggaagtttaatgagaccgc

SEQ ID NO: 175694 - DNA, 122 bp, Homo sapiens
cactgctggagttcctgtccagtgagtccccgccctgcctgcgcatgcacccgagaggttcgggctgtgtaacctgtgcgggcttctctggtgccctctctcaggactccttggggaacctg

SEQ ID NO: 175695 - DNA, 122 bp, Homo sapiens
tgtttgtggcagagcccaggtctgttacgccattgcctccctgcctgacgttgcccatttcgctccagagaaaccataatgcttttgagatgggcagagtccctgaaagatggggcagtcac

SEQ ID NO: 175696 - DNA, 122 bp, Homo sapiens
tttccccagttgcgcgctgcaccggggactccccagcccgtgaggcagccaagaggagagcgctcagtgaccctctgggggcagagccgtcaggccaagttcatgggcaggaagactttgtg

SEQ ID NO: 175697 - DNA, 122 bp, Homo sapiens
attggcaaattatttttctctgtcatgtggtagttttttcagcttgccccaagcctgtcccgaccagtgcattcatagacagcctccttgactgcttctttttccctcaaaggaacagtgca

SEQ ID NO: 175698 - DNA, 122 bp, Homo sapiens
gaggcctgcagatatgggcattgagagcactaggctctcctttacatatctatgttcacgcggtctcttgtaaagttatctttgacatattttaaacttattagttgttttctgaaaatgtg

SEQ ID NO: 175699 - DNA, 122 bp, Homo sapiens
tttaccatatttctccagggttgctccggccgcagaagttggcaaggttgtgtgtaaggtcgggtggggtggggtcagctctcccgattaatgcagctatttgataagagcaacgtcgcggg

SEQ ID NO: 175700 - DNA, 122 bp, Homo sapiens
gggagcttgtgcgatacgcacactgatactcagcaatgaaaataccttcctccttccccgcggcgactctaaacagcgtcccaccgggaattgttgtttgagtgataaagaactggtggggc

SEQ ID NO: 175701 - DNA, 122 bp, Homo sapiens
cctaccatttccgcttcctgccgtggggcggggtttccggttgtcggaggcgaggcttgtcggctgtcaaaggggcggcccggcccggcccggaagctacagcagcggcgcggagactgcgg

SEQ ID NO: 175702 - DNA, 122 bp, Homo sapiens
ttggggtccttctcatagtagtgctgctgcgtgcggatccagcgccccacgaggtggtcgcgcacggtatgggccagagcaaagtagtagtctcgtggggtggccacattgcggtcctttac

SEQ ID NO: 175703 - DNA, 122 bp, Homo sapiens
cgctccagagtctgcgtcacgtgaggaggtggtgtcacgtgacctgtctgtaccctagcgcggggcttctgtacgctgctaggaagccgaattacaaaaaggtcgggtgggcagggaatggt

SEQ ID NO: 175704 - DNA, 122 bp, Homo sapiens
cagtggaacacgcggatgcggtggtcccagcctgcggtggccaggatcttgcgatctggccggatcgtgacctcggcgatcccgggattggtgagttcatgagtcccacgcacctgtgagag

SEQ ID NO: 175705 - DNA, 122 bp, Homo sapiens
caaggcaggagggttgtggggtgggcagtgtcaggccggcttgctcggagctggagggctcgccttcctctgcttgcttctccgcgccagacacccgcccagtctcggggtggcccggtaac

SEQ ID NO: 175706 - DNA, 122 bp, Homo sapiens
agcctggtttttctccagaggctccccaagccctcctggaattctctgtttgagagtctgcggggggacagggagacaggaggcgggggagtcctagaggccttcctgacgggggcgtggag

SEQ ID NO: 175707 - DNA, 122 bp, Homo sapiens
cgcatcccctcggacgcggcgcagagggacctcgccgccctctagcccttgccttctgcccggccaggcctcccctgacaccaccgaatgtggggctcaagtcctgatcggggttaaaacaa

SEQ ID NO: 175708 - DNA, 122 bp, Homo sapiens
tcgcttattagcttttgtggcttcagggtgagccgtggcgtctgagacacccagccacatcgttccgctgtgggcggggcattgaagacaggtctgaaaacgttccagctcttgctggaagg

SEQ ID NO: 175709 - DNA, 122 bp, Homo sapiens
cctgcgcaaagggcacggggcctggcgtgtggcactggcagctggagctttccatgctgccgtcaagttttccagagcacaaagacaggagagccaggaataactggctgggcccccagagg

SEQ ID NO: 175710 - DNA, 122 bp, Homo sapiens
cctcctctccccagcggcccatcgtgctggctgacccagggtccgcgtcaccggctgtggcgtcgggttcctgtctgaagtcactcttgcctccggccccgctcggcgccctgtgtgcatga

SEQ ID NO: 175711 - DNA, 122 bp, Homo sapiens
aatgactgcaaagaataaatgaatgcaaagttactcaatgcttccatctgacaaagagtgcgtgaaatagccaatcagttgcttcactatccaaatggagaatatagcccactatacataag

SEQ ID NO: 175712 - DNA, 122 bp, Homo sapiens
tgttccagtactcagcgtcaggccgccccagctccgtcaccgcccggaactcccccacgtcgctgtcgaagcgcacggactcctcctggttatagaagtatctgtccaggaaccgcacccgc

SEQ ID NO: 175713 - DNA, 122 bp, Homo sapiens
ggtttccagctccctcagctctcccccagcacaggccagagggtttaaaaaatgtacacacgaggcacattaaaaaattcatgcacatgaggcaaaattaaaagggcacaaaaggacctaca

SEQ ID NO: 175714 - DNA, 122 bp, Homo sapiens
ggggaatgtgtggttgttgggggtggagccaggaacccgacgccgttggagagcaggaagcgccccgctgcccgcctccaccccgcggcgagggctgggagggggccgggaaggaggcgggg

SEQ ID NO: 175715 - DNA, 122 bp, Homo sapiens
tctaacgtaagcaagaaaaacggtgcgcgctgcagctctttaactggaacagcctctgctcggtctacctcgcccccaacagctgcgcaacccaccaccgcgcaggcgcgctgcgtgccgcc

SEQ ID NO: 175716 - DNA, 122 bp, Homo sapiens
tgacctgtcattgtgaacaattattgctcttggacgacccaggacataggccagccagtacgtaccccagtgtgttggagaatcgcgctcggcttcttcctctgtgctgagtcatgaaagtt

SEQ ID NO: 175717 - DNA, 122 bp, Homo sapiens
ttcctgttttcttggctgtcttacaagggagccttttcaggcagcaactccagagagaaccgccagagcgtgcaacagcaaacactaaccagcccagccgtcagccacgcaatcatcactcc

SEQ ID NO: 175718 - DNA, 122 bp, Homo sapiens
cctcagggtctgggccgggtccagaagtcagcattcccctcagtgccaggaaggccatgccgtagctttagctcaaagtcctgagctggctagggtggcaggaactgccagggtcaggcaag

SEQ ID NO: 175719 - DNA, 122 bp, Homo sapiens
aaatgggtcaacacaggagaggacgggctgagccttgttgtgcctgacggaagagcaagacggccacaattcagacgcacgtgagggaaatcagatgactggacttgtagatactaacggtt

SEQ ID NO: 175720 - DNA, 122 bp, Homo sapiens
agtggaggatgagcttccatagcttgtgtactgttgcctatgcaagctgatcccactttccgtaagtgggagcatagggatgaatttccatgtcatcatcatatatctgaaatatttttatt

SEQ ID NO: 175721 - DNA, 122 bp, Homo sapiens
tgacgccagctcttctggaagtcatagtaaggcaccgaggggtggctcctctccctgcagcggctgtcgcttaccatcctgtagaccgtgacctcctcacacagcgccaggacgaggatcgc

SEQ ID NO: 175722 - DNA, 122 bp, Homo sapiens
tcacagcccgggcccctcaatccctggccagacgttcaggggttcttggtcaccaggatacggaagtgagcagagcacagaagtgccgtccttaggggcagcccggtgctcccggcagcgcc

SEQ ID NO: 175723 - DNA, 122 bp, Homo sapiens
cgctgatggagtgcgtgcagatggtgagtgggcagcccatggccaagggcagggcggagacggctgggacagaagctgcttgtcaggccagcctgggcaccttgggtgtctcgtcggtgcac

SEQ ID NO: 175724 - DNA, 122 bp, Homo sapiens
cttggaaccagactgcttgagtttgaatcacagctctgcctcttaccagccacgtggcctcgggcaggctgcatgatctctctgagctccagtgtcctccactccacagtgggagccgcaca

SEQ ID NO: 175725 - DNA, 122 bp, Homo sapiens
cagcggtctggtgctggtgctgacgaggaatctgccacaggagcccaggtacttgggcagcggccatccctcagccccagggaagatctgccaagccagaaggaggaggattagagagaaaa

SEQ ID NO: 175726 - DNA, 122 bp, Homo sapiens
ccattaggtgggaccttctgaggggcaagtgggtggcacccatccgcaggacctgcgcaccggggcctcccctcaccaagccagggaagagtcctgcagaaagcagccctttctccctaggg

SEQ ID NO: 175727 - DNA, 122 bp, Homo sapiens
cgccctcgtctcccgatccaattcacggcgggcaaaccaggcctggttcctaatgctcagcgaagggtttcaggtagtaatggaactcctcccgtgcttccagaagctgctgcagccggcgg

SEQ ID NO: 175728 - DNA, 122 bp, Homo sapiens
agtttccaccgtgcaatccagagcggggtaaaaagaacgcaactttttcctttccaccctcgtgctttccagccgtagaatttgcatcgtaggtgatggaagatccgggtgtctctttgagg

SEQ ID NO: 175729 - DNA, 122 bp, Homo sapiens
gagcagaggaagcgcaaggacactggcagcctggtgtgttccctcgggctgcccccctttcggcctcgggccccttagagcagagcagagatctgtgcagcccccgtccatgcggtggaagg

SEQ ID NO: 175730 - DNA, 122 bp, Homo sapiens
ggaaatgggaaccttgatctgaaaaacagtccctggagagaagagggagggagtggaggccgtatcaggaataataggttgaggaagactgagggtccctcccatgccatttcagacggagg

SEQ ID NO: 175731 - DNA, 122 bp, Homo sapiens
gataaagggaaaggttccgcgcgtgcgtatgctcgtctcttggcagtggttttgcgcatgcgtgagggcaggcccttacggcgggctgctgtgcgctttagcggttcttggcgtcgcgttgg

SEQ ID NO: 175732 - DNA, 122 bp, Homo sapiens
gcactcagcgtccgggatctcagcgtgcggggggcctccgggatctcagcgtgcggggggcgtccaggatctcagcgtgcggggggcatccgggatctcagcgtgtgggggctgctgttcca

SEQ ID NO: 175733 - DNA, 122 bp, Homo sapiens
aggggccctctggaagaaaaatcatataaaagtaagttattttacaaaaatactcggcctcgtgtatgcatttctagggccctgaaacatgacctctgctggccccgcagaaccctgccgct

SEQ ID NO: 175734 - DNA, 122 bp, Homo sapiens
gagtgttccggaggccacattcggtgtggtgatgtcagggctctgatggcttagggaatgcgtgtgcatattgcagtgttttacaaatgttttggttttgtattttaccacaataaaaatgc

SEQ ID NO: 175735 - DNA, 122 bp, Homo sapiens
cgcgccccagcgctaaggttgatctggcggctgagcgggcggggcgctcacctggacactcgcagctcccggcgtttccagaacctcccgcggcgtcgcccggtcagctcggcgcctcctcc

SEQ ID NO: 175736 - DNA, 122 bp, Homo sapiens
accgggccgctggggaacttacggggtcgggtcggggccgggtggggggtggcggcggggcgctcctgcccggggggcggcatgagcccaggccgcggggcggaggtggcggggccgcgagg

SEQ ID NO: 175737 - DNA, 122 bp, Homo sapiens
cagagaaccagaagctattgaaactttaaacatcatttctggacagtataatatgttctgcggggcagcttggaaaaacaggaaaaccctccttggccaatccttggagaattagaaatctt

SEQ ID NO: 175738 - DNA, 122 bp, Homo sapiens
ttatttcttctctgctacttctctgccatactgtggttggtagtggctgcatccctctaccgatggccagacttctcactgggcaagtctgggcaagcctcccatgaccacagcattcactg

SEQ ID NO: 175739 - DNA, 122 bp, Homo sapiens
atgggccctccttggggctgcccctctgtgttctccagcttggaccccggccggcctcaccgatgaccttgactgtgaggttgacctggtcctcgcccacagggttcttcactgtgaccgtg

SEQ ID NO: 175740 - DNA, 122 bp, Homo sapiens
tgactgcactgaaactcacctccaccacagataggttcaggaggaacaggtacatgggaacgtggaggctctggtttaaggagatgatgactgtaatgatggcatttcccatcagggtcacc

SEQ ID NO: 175741 - DNA, 122 bp, Homo sapiens
gcgccacaccacagcctcacggcttgttctgttagaccgatgcctccgcccggctctctccgtgtcctgcacacagtacgccactacccggggtatgaaatataatacgtccaaggtcactc

SEQ ID NO: 175742 - DNA, 122 bp, Homo sapiens
gctcagcccttgtaggatgccgttaggtcatctggaagttctgtatgccttcactgggagcgtagtgaagatgagagcctttcctttggctcttggagtaaactagctgacaggactttgag

SEQ ID NO: 175743 - DNA, 122 bp, Homo sapiens
ggatgcagtgtgacatttcacaacatacgacgcctctcctgggaagggagagctcgcgagcgcctctactgggtgggcgcagcgccatccccattgcacgaaccgagacggaggtgcggagg

SEQ ID NO: 175744 - DNA, 122 bp, Homo sapiens
ggtgtttactgtttattacatctctcccaatacacaaaatctggggttcaccaaagcaggcggttttcttccacatgctcctctaggatggaaaatgccctccagtggaaatgcctttccac

SEQ ID NO: 175745 - DNA, 122 bp, Homo sapiens
cactgggagacagcctgggagtgacagccacagcaagacagcgagagacacacagagtcacggagagagggcggacacagcggggacagagacgcagggtcagagagggggagacccgacag

SEQ ID NO: 175746 - DNA, 122 bp, Homo sapiens
gccgctagatggcctcctcactctgccttcggctcgggcttggccggtttgggaaatccccgcagtcccaggtcgggaggcccggaagccaggcagcctccttcgttcatcctcccctggtc

SEQ ID NO: 175747 - DNA, 122 bp, Homo sapiens
ccgcggtctcggtcactcgaataacccgacatggcgtcaatggttgcggttggcggggaacgaagtatatagaaaagcgtgcgacaagtcgctggaaatggcctcgatgacggcgaagcctt

SEQ ID NO: 175748 - DNA, 122 bp, Homo sapiens
ggtgcagatgcggaaactcatcctgcttcatgctcgctcatgctcatgagctcagggaggcggtggaccccagccctgtgccggctctcggggagatggaacatttggggaaccagagtacc

SEQ ID NO: 175749 - DNA, 122 bp, Homo sapiens
ttattaggcgatttggggaactgcaataaaggtagaagcagcagagagaacaaaacacctcgtatgccactgtcacagctccaacctctgaccatcagaactcagactgactacaggagagg

SEQ ID NO: 175750 - DNA, 122 bp, Homo sapiens
tgaggggcttagcaccctggccagcggctgcagagggcgtgctgggtcccccagcagtgccggcccaccgacgctgcgctggatatctcgccaggccttagctgcctccccgcggggcaggg

SEQ ID NO: 175751 - DNA, 122 bp, Homo sapiens
ttctcatttcatgtttgtgtcttccttttctctgtatttcctcttgtgtgtgttaagacgcgcgcaccccttacctgtttttcactcctgtaagcaagtgccaatcttaatcaccgcttttc

SEQ ID NO: 175752 - DNA, 122 bp, Homo sapiens
gctggctgggaagcaacttgactgatccaacccagggttcctgaggtcaaagatgccaaacgtcgtaaatggatctgaccatttctccttggcttgggaaccggaatataagatgaaagtgg

SEQ ID NO: 175753 - DNA, 122 bp, Homo sapiens
ggaagtggcgggaggtgccgagccttgcggaggggcggtgggggccgcggtgggagacggcggatggcgctcagcgcgaggccgcggaaccactgtggcagcaagcagttcggccagactcc

SEQ ID NO: 175754 - DNA, 122 bp, Homo sapiens
tgccgcgcgaggcgccccctggcccggcccgcgctgctgcagcggccgcggccccgcccccgcccccgcccccggccggccccgcccccgggcctccgagccccacccccggtcccgccggc

SEQ ID NO: 175755 - DNA, 122 bp, Homo sapiens
tttgcagacgcaagtgccagtaaagacagtgccacagctgctcatccaagtgaaatagcccggggagacgaagacagttcagccactcctcaccagcatggctttaccccgagtactcctgg

SEQ ID NO: 175756 - DNA, 122 bp, Homo sapiens
gtgtttcaaacctgaattatcagagaaaggatcaacactgtgagttgaatgcaaacatcacgaagaaggttctgagaatgcttctgtttagataggtgaggtttatcccgtttccaacgata

SEQ ID NO: 175757 - DNA, 122 bp, Homo sapiens
cctatgaggtaggggctattagtataattaccactttgcagttgagaaaacagaggcacacggagtttaagtaccttgcccaagtacatgtagcacatcctgtggagctgagatttgaatgc

SEQ ID NO: 175758 - DNA, 122 bp, Homo sapiens
tctaacagcaactgaggaagcctttttcagtgaattatggatctaaacaaggcaaatgaacgcagagagggaactgtgcctccaaaggccacgaaaagcaattttgccaaacctaggtaatt

SEQ ID NO: 175759 - DNA, 122 bp, Homo sapiens
gttgggtcaggcactgagacagatactttacactcatcgtgtcctctcattctctgactccggcaggaaggtatgatgattattatccccactttgtggactaggaaactgaggttagagtg

SEQ ID NO: 175760 - DNA, 122 bp, Homo sapiens
ttctgaggacgcggaaacttgagatttggcgaggcaagaagccaggcgcacacagctaggcgggccgcgggccgcgaccccctggctggtccgtgctctccccctggggaggggtgcaggct

SEQ ID NO: 175761 - DNA, 122 bp, Homo sapiens
gcgagaatctcgctgttctctgacctccaacgcgcaagtcagtggcgtcacatccggccccgtgacttccctgggttcacagcaggggtggaactggattcttcctggatggggatccagat

SEQ ID NO: 175762 - DNA, 122 bp, Homo sapiens
tgccgttactttttggtcttctgttccagatgccataagttctgctaacccgagggtcatcgatgacgccagggcgaggaagctctccaacgacctgaaacggtgcacgtactacgagacgt

SEQ ID NO: 175763 - DNA, 122 bp, Homo sapiens
aattaggatcctgtcagctgccatttcctgagccgtacatccgcggtgccgggggacttgcggctgcagctccctcatttgaagttgcttcctcggcggcacctgggacgccccccatatgc

SEQ ID NO: 175764 - DNA, 122 bp, Homo sapiens
aattctgagagctaagcctccgcatcttcaactgtgagggatggtaaaattagacctggacgctgcatgttttcaccttcactagacccacgtatggggttgtcaaagctttcgactctaaa

SEQ ID NO: 175765 - DNA, 122 bp, Homo sapiens
ccaccatctcatcagtggggcatgctcgccctggttaatgtcatctccctgaactgccaacgaggctagcagctttgctgcttaaaaccggtaacatcaaccaacatatggagatgtcatca

SEQ ID NO: 175766 - DNA, 122 bp, Homo sapiens
gaataaatactgatttcccacccaggtgaggcgcatggtagatgtttgttctgtgcattgcgttggtcggcctccacagtcgcacaatctctcagtggagtgagagtgtcttccatatgtgg

SEQ ID NO: 175767 - DNA, 122 bp, Homo sapiens
cacaagaatacatttctgttattttaagccgcccagtttctgacaattggttacaggagacgaatacaggtagtaccacaatcaatgcagaatatcttcttcaagggggattatggtctcca

SEQ ID NO: 175768 - DNA, 122 bp, Homo sapiens
cccgcgaggaagtgcgaggctggacgctgggaggcgcgcgtgggccgggagattccttctcgcctgccggctaccagccggcccgcccacgccgccgagatcccgactccacgttccctccc

SEQ ID NO: 175769 - DNA, 122 bp, Homo sapiens
gcccgggcgggggaaggggcaggcggaaggcgggccccggaggtctccggctgggccgggcgcgcgcgcctgggccctttgtctcgcgcggccgtcgggcccggggccccagccctgtgcgc

SEQ ID NO: 175770 - DNA, 122 bp, Homo sapiens
aggtgggcacccctaacacttaacgttgttcaagagtcagctgcacatgcatgttcatagcgtgattcacagtagccaaaagtggaaataatccaatgtcctcagtggatcaatggataaac

SEQ ID NO: 175771 - DNA, 122 bp, Homo sapiens
tgggacactggcgagtcgcagaggctcctggagccagccgcttggaaacaaacaacaacgcggcgggcgaactcccgggcagcctcccccgtgccggggcgcgggggccgccgcgagaaccc

SEQ ID NO: 175772 - DNA, 122 bp, Homo sapiens
actgagagtgggaaaagcagcactgtttctataaaaactaagttggatccttagaagactcgactaaggtaagttactttttctttattattcttatgctttatcttccagtgatggaggaa

SEQ ID NO: 175773 - DNA, 122 bp, Homo sapiens
aaggctgtggaggggcagactcggctgctggtggtggaccaggagacagatgaggagctccgccggcggcagctgacctgtaccgaggagatggcccagcgagggctcccacccgcccacga

SEQ ID NO: 175774 - DNA, 122 bp, Homo sapiens
gcggctctttccagcgctgcagttgaaactcggagaaagactgcctgctgcccgtggggtcgcagccctgaggctgtgcgtcccctgtggaatggcttgctcagcctcccggcctcctgagc

SEQ ID NO: 175775 - DNA, 122 bp, Homo sapiens
gagagtgagcccagacctgagctcagggaggggagcacagcttctggatgaaagtttggccgggattttctggccacctccacctggtgaatccagcagctggtggccgatggagtttgggg

SEQ ID NO: 175776 - DNA, 122 bp, Homo sapiens
gagccattgcctctctctcctccacggtcttagggatcccaaggaagagaagtgagtgtgcgaccgagctcagggcccaggctggttcatgctattcttgcttttcagaatggtatcctcgt

SEQ ID NO: 175777 - DNA, 122 bp, Homo sapiens
tccagggcaacctcagatgtctaatgttttcttttcagtggtttaacccacaagatatcacgcatttgaaacttttaagaagaaacttaatttcatctgtgaatgcagaagcaaatatgagg

SEQ ID NO: 175778 - DNA, 122 bp, Homo sapiens
ggagaggccagaggcctggtgtccctggcatcctctctgccccaggtacaggcacagctacgtcacaaaccttctgcaggaatgaggctgtggggatagcaggggccactgggcccaacaga

SEQ ID NO: 175779 - DNA, 122 bp, Homo sapiens
ggtgcgagaccccgggcctgctgggaggcgtgggcagggcagggcagggctgaaccccagcgactgaatctcgaaggcaggaggcctcggaggtcatcggcccagctcgcctgaaactgtcc

SEQ ID NO: 175780 - DNA, 122 bp, Homo sapiens
tggtatcacagtgcttgtgttcaagtaactcttattttacttaataatggccccaaagtacgggagtaatgatgctggcgatttggatctgccaacagtaagttttaaagtgcttttttgaa

SEQ ID NO: 175781 - DNA, 122 bp, Homo sapiens
gaaggaaggaaggaggctgcttaggggtaaaacgtctgtagggaggatgcagccgggccacgagctaatagaaggtgcagaatgtcaagctgctgagatggaccatggaaggcaagaagaat

SEQ ID NO: 175782 - DNA, 122 bp, Homo sapiens
cgcatttcagagacgggattaagctgtctctggcgaaccagggagcagctgggtaggccgcggggggcgcctgtcatcgacgtcatttccttcagcaagagcgccgcaggaaaccacttcca

SEQ ID NO: 175783 - DNA, 122 bp, Homo sapiens
agtggggcaccccccgaacgcgccatggttacggcgatgagacgtgctgtttgctccccgcgcaggccagatcgataaggaggccgtgcagaagtacgcctacctcaacgtggtgggcatgg

SEQ ID NO: 175784 - DNA, 122 bp, Homo sapiens
agcacacccagggcgggtcttggtgctcaggggccctcgcctcacttgcaggtttcgaggcggctggcagccgcccccccaccccatgccctttgggtggcacctgtgctggtggagtgggg

SEQ ID NO: 175785 - DNA, 122 bp, Homo sapiens
tggaaggagggcactggaaaggcagagctggaggtggtggtttggagtgaccacagggaccgcaggccttccagatactctcctggaagagaaagcagagtctagaaggccttatctccaag

SEQ ID NO: 175786 - DNA, 122 bp, Homo sapiens
ccatcgtcatcatggcccgttctcaacgagctgttgggtactcctcccagacggggtggccgccgggcagaggggctcctcacttcccagacggggcggccggtcagaggcacccccaacct

SEQ ID NO: 175787 - DNA, 122 bp, Homo sapiens
ttgtgcccgtcccgccgcccccgcggcccaggcgattttaattagcgtctgggtctgcgccgggagatgggaatcaaagcccccgttcttccagcgcccccaccgcggcccccaccgcggcc

SEQ ID NO: 175788 - DNA, 122 bp, Homo sapiens
tttttaattggtacaggtggccttgttgtcacttttgtagaccacatttgcatggtgagtcgagtcacttacgttcttaactgcttatgttcttaactactctcctacctctggcgacacat

SEQ ID NO: 175789 - DNA, 122 bp, Homo sapiens
taagaaagatctgaaacagattttctgaagaaagcagaagctctcttcccattatgacttcggaaatcacttatgctgaagtgaggttcaaaaatgaattcaagtcctcaggcatcaacaca

SEQ ID NO: 175790 - DNA, 122 bp, Homo sapiens
taggattgattgtttactaggtgatcttaactgactgtcatagtaatctaagtacattctcgctgtttctaggatttctgaaatctcaatggaggtagctgaacaaggacgtggaacaacaa

SEQ ID NO: 175791 - DNA, 122 bp, Homo sapiens
tgtaaaaataaaggaggacagagggcactgggtggatggtgggcggcctcctcttcacggcgtcgctcctgggtggacggtggtgccctgctcttcacggcgtcgctcccgggcagacagtg

SEQ ID NO: 175792 - DNA, 122 bp, Homo sapiens
ggaggagccgggcagggctgggtgcagctgtgtggcctgggctcaagggacgctgccacccggttgctaggcgatggggccgcccacggcaggccctaggaggagccggtcgcccgggcaat

SEQ ID NO: 175793 - DNA, 122 bp, Homo sapiens
cggaccgcggcgagagcagagcttctggcactcactacattcagaactttccttaaaagccgaggaaagagcccccagggactgcccgggggtctgagccaggtcgagggccacacaggtag

SEQ ID NO: 175794 - DNA, 122 bp, Homo sapiens
aatactcctattaaggtaaactcatgaattcaatattctttcaacagacatttattgacacgtgtccattctgttcatgtactgcactaggtaccatggatacaacagagaatgaggcagac

SEQ ID NO: 175795 - DNA, 122 bp, Homo sapiens
ggcagagagcaaggagaaaggtcaggtgagtcactcaagggggcggcccccactcccacacgccgccccaagcagcgagcccttgcacacaggcacaacccaagccccgtgccgagcgccgc

SEQ ID NO: 175796 - DNA, 122 bp, Homo sapiens
tctcgcgatatctggagcgtctgcgcctgccttcctgacctgggacttgtttccagctctcgcgagactttcaggggtcggagcgcgggggccggccgagaggaaagctggaggcgcgggtg

SEQ ID NO: 175797 - DNA, 122 bp, Homo sapiens
tatcttattatttcctaatcgaagctcattcttctctatgaggcgctggcttggtattttcgcctgacaaatctcccggagcagatggtcccttcagggaagcttcaggaaagtgctgggtg

SEQ ID NO: 175798 - DNA, 122 bp, Homo sapiens
agaaagccagtgattcagatatgatatgtcaagtggtacatataggaagaaaaatacagccgagtaagaaggatcaagagaaaggggctgggagatgctgctgatacagtgtagttgaggaa

SEQ ID NO: 175799 - DNA, 122 bp, Homo sapiens
aacactgttatagaagggggagctttcttccccaggggacctgatggctttgtgcttgtgcgaataacaagactaagaatatatgcttcattctttctttccctggtggctcttggatctgc

SEQ ID NO: 175800 - DNA, 122 bp, Homo sapiens
aaacatcagcctttcctgctcctggcccgtttctgggaggtctgcatgtagggaggcgctcgttcttggattctcatgaaattttccttcttctttcttggcatctttatcatgacccaccc

SEQ ID NO: 175801 - DNA, 122 bp, Homo sapiens
catcttctctgccaaggcccgctgctgtgccaggtcctcctctgccagctgccgcagtcgcgcagcctcttgggccgccacactcagccgcgcggcctcctccgccacctgcttcatcttct

SEQ ID NO: 175802 - DNA, 122 bp, Homo sapiens
ctggccccggaggtaaggagcccgctggactccctgagtcatcccggggccctggagtggcggatagtcccgggttaccactgttacccccagggggacggtcattgactggtcattcctgc

SEQ ID NO: 175803 - DNA, 122 bp, Homo sapiens
agtctccgcactgtcggcggggtacgcatagccgggcactaggttcgtgggctgtggaggcgacggagcagggggccagtggggccagctcagggaggacctgcctgggtgaggagggcgcg

SEQ ID NO: 175804 - DNA, 122 bp, Homo sapiens
tgataacctgcctcttttccttagggtgactgggggttccagtctcttcagggacagtcccgcccacatttgtgaggacagtcattcaggcacaaggggctcgtacagtcattcagcaatcg

SEQ ID NO: 175805 - DNA, 122 bp, Homo sapiens
agtctttaaaatcaactggagaagtaagagaacagttcatcgttgtgtgggtgaaacccacgttgctggtacaggtggccatcatagaaaagaacatgagggaattgtcctgatgtctgaat

SEQ ID NO: 175806 - DNA, 122 bp, Homo sapiens
ccttaataataaaggagatatccgtggcatcaaacagaccttccagggataacctttccacgttcagcctattgactctctatccgagtgaaattactggccagtggagaacaagacaagtc

SEQ ID NO: 175807 - DNA, 122 bp, Homo sapiens
tgacagccagtgctttggttctccagaggtgttaaatggcttgggaacataatttcaaaacggacagttggataaacaccagaataagcaccagaagatgacagcggaaccaaggctcgaga

SEQ ID NO: 175808 - DNA, 122 bp, Homo sapiens
gcctatcgccgaggcggtgacgtctggcaaacgagccacatccgattcaattaaatgtctcgctgaaaagagctcggaacgagggtcctgggagcgctgttaagtgaatctgctggccaggc

SEQ ID NO: 175809 - DNA, 122 bp, Homo sapiens
aggtcttcagatagtttgctagagaggagaagtgcttccaagttgagtgaaagcagaaagcgagccagagttgcattagcaagtgattcaaacaatgaaatctcaagcagcaaggcagctga

SEQ ID NO: 175810 - DNA, 122 bp, Homo sapiens
cggcctggcgggaggagggcccgacgaggggaggcttcagggacaactggggcttctcgacgtccacccttttcagggcgcggccccggtagccctcgggccggcccaggtacaggaggtgc

SEQ ID NO: 175811 - DNA, 122 bp, Homo sapiens
tagtctttaccaccacctcgctatgagactctggaaaaatcgtttaccctctctggatctcgattgtctcatgtgtaaaagaggggcttcagtgaactttctttgctgaagggcaggggact

SEQ ID NO: 175812 - DNA, 122 bp, Homo sapiens
ctattagtgctacctaatttcctactgaggtggtctagagctcctccgccattgccctgccgccagcaaatttttatccctagggtaagatgacagaggccagccttggccctggcctgcca

SEQ ID NO: 175813 - DNA, 122 bp, Homo sapiens
actttctccttattacatgtcccatcttccagggaggtttccttccacccactgtagcagcggattctggtgtctcgggtgttcccaggcttccgtcagcccctggggggtttacagttctg

SEQ ID NO: 175814 - DNA, 122 bp, Homo sapiens
gatggggtactaattataaatgaatgcaaagacatttttcttacactaagagttaccaaacggtcctgagttcgaccttctttacattcattcgtgcagtaaatcctcaatgagcgattact

SEQ ID NO: 175815 - DNA, 122 bp, Homo sapiens
tcggggctaactctggaatgccgggtgctcggaggagcctccccagctggggccaagcagcgtccaagcaggtgaaaaggatgcgcccctgtggcttggagacgcttgccctcgaaaaagtt

SEQ ID NO: 175816 - DNA, 122 bp, Homo sapiens
tatctttgtgcgggcatccggacaggctgcggtgatgtgggtacagcccagttacgtggccggttccatcacacccgggggttggacacttgctctctttcttttctgttcttgagggatct

SEQ ID NO: 175817 - DNA, 122 bp, Homo sapiens
tcgtcctgggatgcggaagctgcagagtggactacatttcccgaaatccctgggcccagtcgtagttggttcgctgactgcttttgaatgctggttaactcaaccaatagggtgacgagaat

SEQ ID NO: 175818 - DNA, 122 bp, Homo sapiens
catgtagttctttgtctttaatttgtacaactcaccaaggttattttcattcttagcacccggggttcaccagggtgtgatccaaagcaaaccagcataggtttttaacagaaaatctttgc

SEQ ID NO: 175819 - DNA, 122 bp, Homo sapiens
gaaggacgtcttctgggagtggttgaagcctgcagtgtgaagaatcagccaggctaggagcggggtgtccacccaagccgagagagaaacacgtagaatactgacttgttgaaaaggaggga

SEQ ID NO: 175820 - DNA, 122 bp, Homo sapiens
ggcaccagcaccttcccagtctagctcttcggattccccggagcccgaactccctcgccccggaatcgcgggagaacctggaatccccatctccactgacattttctcagaatgacatctcc

SEQ ID NO: 175821 - DNA, 122 bp, Homo sapiens
acccactccgcgctccacccccctcctgcctcctgccaccgcccccttcctccctccgcccgtgggtagtgctagcccctaggacagcgccgggtctggcttccaaagctccctcaaccctc

SEQ ID NO: 175822 - DNA, 122 bp, Homo sapiens
aaagtccagcctttgaggcgtggccacctgaggggacgtgtgcttggtctgtgtgtggcccgcttgcccctcctgctctcagggcacagtggccacctcccttgcttctactttgcctcttc

SEQ ID NO: 175823 - DNA, 122 bp, Homo sapiens
agagccgttgaagcagcggcaggaggtagctgagagtcttgccactgccggtttctgcggcgcaaacgacatggcggccgcgaagtagtgaggggatggtgctagactgcacggttgtgggc

SEQ ID NO: 175824 - DNA, 122 bp, Homo sapiens
ccacgaggcggaagccccacggccccgggccctggaggtctatctgctgggtggtcatggcgcggctgtggcgggcgacgacccgcggggacagacgggcaggacgcgcggaacagcttgca

SEQ ID NO: 175825 - DNA, 122 bp, Homo sapiens
tcttaaaatatcattttatttctttttttattatactttaagttctagggtacatgtgcacgacatgcaggtttgttacatattttatttcttatgattcgagtttggatatcacagctggt

SEQ ID NO: 175826 - DNA, 122 bp, Homo sapiens
ttcaggggagcctggataccagagcctcgggggccagggggtgccaagccagagtccccacgagatgcagaggaaaaggcagtgccaggaggcgtccctgatgaacgggcagcttagttttg

SEQ ID NO: 175827 - DNA, 122 bp, Homo sapiens
cttctctgatggctccggtcaaactgtggttagggtcaaactctgcatcattccaccagtcgatggcctgccgacatgccggtgcctgtaggagtgctcttccgctggtgtgctcttcacga

SEQ ID NO: 175828 - DNA, 122 bp, Homo sapiens
tgaacccacagaggccgtggaggcccttcccaggcgccgcagcagcactgttggggtgaacgtggctcctctcggggggacaggtggaagggaccagcacccattggggcgtgtaactcctg

SEQ ID NO: 175829 - DNA, 122 bp, Homo sapiens
gctgctgtggtcgccctttgagtctgcggggcccggccagtgggtgttgggcagctcgatcggagcctggccctttgcgtgtgggtcagccttcacccaactccgaccccacctccggagct

SEQ ID NO: 175830 - DNA, 122 bp, Homo sapiens
acggccggtgtcaggttgctccggtaacggtgacgtttcgcggcgtgggcggggccagcacgcaggttgcatattttaggaagtgaggaggaggcgcgggctggagctgcggcggggtctgg

SEQ ID NO: 175831 - DNA, 122 bp, Homo sapiens
aggaattctacttcccataaaaggacctctcctgagaggcaaaacctgttgcctccaccacggcttccctcttggctcattccaagcttggccaaattggggaagtgggatggaggttgccc

SEQ ID NO: 175832 - DNA, 122 bp, Homo sapiens
gggacattccgggcttggatagtaagacatcgtaaatatacgccaaaatgtccacaccaacgtttcccgagagtatttctttacaagtaaaagaccgactcaaaatcacccctctcaaaacg

SEQ ID NO: 175833 - DNA, 122 bp, Homo sapiens
cagccttcaatagctttctgagaaaggagacctgcaggagaggcacactttgagatcctgcgtatttgaaaatgtcattgttctgcccttacataagattcatagttggactggctataaaa

SEQ ID NO: 175834 - DNA, 122 bp, Homo sapiens
cctggtaggggtagccaccgtagatcgccgagctgtcgtagtaggtcgctttttgcatcgcgttgtttcacgatcttgatcgcacactctgacaggggtttgacacccgtgagggcgcacat

SEQ ID NO: 175835 - DNA, 122 bp, Homo sapiens
aggggcttgtccaagaggcagcatggcgagcgctggcacactagcagaggctaggagagccgtgctgccccgggacaaggtgcgtcgcaggcaccgtgcaaggcgcccccgtgggttagttc

SEQ ID NO: 175836 - DNA, 122 bp, Homo sapiens
gaaccagcgccgtgtggatttctaccttgcctccatcgaagacatgctggtggccatcggcggccggaatgagaacggagcgctctcttcagtagagacgtacagtcccaagactgactcct

SEQ ID NO: 175837 - DNA, 122 bp, Homo sapiens
cccaaacttcctcaactgggatcgaactcaatcctacagcgtgttctgagattctatactcgcctcacttctcccaagatcgtaaattctggaggagccattccttcatcatccatgtttgc

SEQ ID NO: 175838 - DNA, 122 bp, Homo sapiens
ctgcagccgcgggattcaaactcccggaagcggcatccacacctgatggtgtgactcggccgacgcgagcgccgcgcttcgcttcagctgctagctggcccaagggaggcgaccgcggaggg

SEQ ID NO: 175839 - DNA, 122 bp, Homo sapiens
caaatattaccattccatgacaatgcagtttcatcaaggtacgtctcaatccacgggatacgagtcccacacaacagacggagaatttggcgcagctctgcgcacgctgcgtgtgttactta

SEQ ID NO: 175840 - DNA, 122 bp, Homo sapiens
acagcaaaaaaaggaatatcgactcagttccgagggcgggggccggggctcgttctcacccgcgcgcggcccctcgacctctcggacccgggccaccagctctgcgcccctcacgcctccct

SEQ ID NO: 175841 - DNA, 122 bp, Homo sapiens
gttgagactgtggatgggctccaatgcgtgggtctgcccctgccacccaacaatggcccacgtggcactcacatggaagaagctgtagaagatggcttggaagaccaggagatagggcgcgt

SEQ ID NO: 175842 - DNA, 122 bp, Homo sapiens
gggaagccgcagactaataagcctcttccaaaaaagaggtaaagggaggtagacaaggggcggcagcggaggctggctactgcattccgtaggaggagccaacagttactttttacctgctg

SEQ ID NO: 175843 - DNA, 122 bp, Homo sapiens
ggcaatcctcccaccttggcctcccaaagttctgggattacacgcatgagccaatacacccggccgtaatttgttctttcaaacatattacacttatgtttttatttcattttttttttttt

SEQ ID NO: 175844 - DNA, 122 bp, Homo sapiens
tcctaaggcccgaaacccggtatctcttactagtggagcaggagcacttggggtacatttcgagccgaggtgaggctggggtttctaagggaggggcgtagaagcagtggggcaggtgggag

SEQ ID NO: 175845 - DNA, 122 bp, Homo sapiens
tttttgtaaatctattttacataacatacagggtcctaactgcccccacctcaccacccccgttctctctagtaaaaaatgatatgtattcaaggatgggaatctgttatcacaggggtgta

SEQ ID NO: 175846 - DNA, 122 bp, Homo sapiens
gatgcctctgttctgtcttcaacattgtacagagacatcttggcaggcactaggctaagacgtatgtgggatagctgggcaagtgagatggacctgtcctaggaaatttacatttgattgtg

SEQ ID NO: 175847 - DNA, 122 bp, Homo sapiens
cctttggacagtccaatgtcaacgttgtcccgcaagtggtaaccggtacgcctcagagaccggcagcgtcaaacaccctcgtgataggtagcccacacaccgccagcactcactttgcctct

SEQ ID NO: 175848 - DNA, 122 bp, Homo sapiens
cttcgccaccaaaatgtaagtagctccctgttcagtgtcctggaagtcggcctgttcctgcggggattggagtcctctccaaagaggcccgtggctgtggccgtggcgccctggtccgggcg

SEQ ID NO: 175849 - DNA, 122 bp, Homo sapiens
gtgagaagggtgggaagctgagattacattcctattctgaaaatgtcacactgtggagggcggtggttcaagcgcagtaatggccatggagggagaacaccgcccggggacacccggggtgg

SEQ ID NO: 175850 - DNA, 122 bp, Homo sapiens
gggtcacagagctgttactggtgaagctaagtttctaaagcatgtctccagattccaagtcgcaagctttctccctaggaatgcaataagaattccaaacacaaatgagtcatcctcatcac

SEQ ID NO: 175851 - DNA, 122 bp, Homo sapiens
acagggccggagaaagatggagcagcccggggcggcggcgtcgggagcgggaggcggcagcgaggaacccggtgggggccggagcaacaagcggagcgcggggaaccgggccgccaatgaag

SEQ ID NO: 175852 - DNA, 122 bp, Homo sapiens
atcaagtccacccaccacctcggcggctaaggcggtgaaagaggaacaccgcgggtggagcgggggggcccgtccccagtcccctggacctcagtttcctcatgcccgcagatcaagcgaga

SEQ ID NO: 175853 - DNA, 122 bp, Homo sapiens
ttaaacccggccagacctggctttagaaaatttataagctgacctccattttggctgtttcgagagtaaattaacaacaacaaaaaaagcctaacatgtacacagcccttcgccccaacccc

SEQ ID NO: 175854 - DNA, 122 bp, Homo sapiens
ccccttgccttattgctagacagcttgaccgcccccggaacatcacgtgggaagggcgctcggtaaatcctgttctggaggcaatctgtcactccaccagtttcccaatcaacatttgccga

SEQ ID NO: 175855 - DNA, 122 bp, Homo sapiens
ttcgctctccagacaaagagaccggtacttggcaggtccctcaagtgggactcaaaagaccgaaccgagctgcagcctttcgctagcactggtcctcgccccttttggcatcttggtacttg

SEQ ID NO: 175856 - DNA, 122 bp, Homo sapiens
aggtggagtcggggtggcagcggcggcggttgccaggagcccgcgttgcagcctgagatccgtaatatggcggggaggaggaggagaaggcggcggcggaccgagctgcgctctgtcagtac

SEQ ID NO: 175857 - DNA, 122 bp, Homo sapiens
gcgcctggtctctgctgtcactctgctgggcgccggggactagcttggtgccaggtccaccgtggccgcctgttctcacccgaactctgagctgtttccctgaagttaataatcgcctttgc

SEQ ID NO: 175858 - DNA, 122 bp, Homo sapiens
ggaccggccggccggcctaggagggcgcgagcgaggcagggagcggcgtggagcgggcagcgggcggacgggcgggagcggagcggcgcggggcgaggggagcggagcggagcgcggcggcg

SEQ ID NO: 175859 - DNA, 122 bp, Homo sapiens
cataagtaacatttttgtgaaaaaagtacccatgcacggggaggtctccttccgccagggcgtgatctgggagccgcacacacaggtcccgggaaatcccagccacccagggtgtgggagtc

SEQ ID NO: 175860 - DNA, 122 bp, Homo sapiens
agcgaccagctggctcttcagagcagtgccacctcctggcagaatgctgcaatggggaaccgcatcttccccaagtaaacccccagggctcttcggaccctgccttctcctccctcctggct

SEQ ID NO: 175861 - DNA, 122 bp, Homo sapiens
aaaaaaaaggaactggatgattcatttggttctccgaaggcgggtatgggggacggggctcggactttggcccagtcaccgagtgaggcacagtcccaaagtcctgcaggtccgcctccagt

SEQ ID NO: 175862 - DNA, 122 bp, Homo sapiens
caggccgtcccaggacaaggcagatggggtctgctagcctctcacgttaagactgggaaacgcaaagcggcgggtatgatgcagaagagccgggggtcacggtggtctcctggagaagacgg

SEQ ID NO: 175863 - DNA, 122 bp, Homo sapiens
gaatgaaccctgatgctccaagttgttgggccatactgcctcctggtggtagtcatgaaacgtgcagagtctttgctgcttggggtgctcctggggttggttgggtaagatcaggagctggc

SEQ ID NO: 175864 - DNA, 122 bp, Homo sapiens
actgtgttggccaggctggtcttgaactcctgaccttgtgatccacccgcctaggcctcccgaagtggtgggattataagcatgagccaccacgcccagcctatgggccattttaaaaggga

SEQ ID NO: 175865 - DNA, 122 bp, Homo sapiens
tctgggcagaagggccccgtttgccccaaaagaaggtgcaaggatcagaagataacgaaacgtccacttcctgaagggtgggaaaaaaagaaaaagaaaaaggagccacccacgctggagat

SEQ ID NO: 175866 - DNA, 122 bp, Homo sapiens
tcccagtcttctagggacaccagccggctcactctccactcactattgtgcctgcacacccgcaattcagtctgctgccccacccctgcctgaacacaaggttgtagacagaaatgatctgg

SEQ ID NO: 175867 - DNA, 122 bp, Homo sapiens
taatttggtctcacatttaggtttttaatcaattttgagttaatttttatgtatggtgtacggtcagggtacaggctcatcttttgcacgtggaaatccagctttgtcaacatcttttgcag

SEQ ID NO: 175868 - DNA, 122 bp, Homo sapiens
tagcactggtgtctacaggctcgattcccagctctcccacaaggacgtggctcagacgcacgtcaccatctcaacccaatgtaggccacccgctgcaggcgagcttccctacccaatccgac

SEQ ID NO: 175869 - DNA, 122 bp, Homo sapiens
acatcgcttctgcgccgctgcaacatgcctggatgctctgcgctgtgggcgctggctcatcgcccctctgattcacaccgttattaaaccagcactcgggcaagaagcaaaatcgtccaggg

SEQ ID NO: 175870 - DNA, 122 bp, Homo sapiens
gtcccttcctgtgcggttgactcatgattaaagccagcacgggccgaccacgggggtgcccggtgcggttctgatggggtggctcccccttgtctcctaagtggccagggcagcacgaggct

SEQ ID NO: 175871 - DNA, 122 bp, Homo sapiens
ctcctgctttgatcgccggagatctgcaaattctgcccatgtcggggctgcagagcactccgacgtgtcccatagtgtttccaaacttggaaagggcgggggagggcgggaggatgcggagg

SEQ ID NO: 175872 - DNA, 122 bp, Homo sapiens
ccgattactttttcttgtaagaacaggcgtggatgcatttccacatggctgtcctccccacgtctctgtggacttacaatgcacggctgtcatgtttactttcagctcatggggcacgttcc

SEQ ID NO: 175873 - DNA, 122 bp, Homo sapiens
tgggaggtgaaggctgggacccagaacagcagagactctgtcgatgatgtggaaagaccgcggctgcagtttgggcaggctgagccagggttgggtcttgcatgttgagaggctggcctgcg

SEQ ID NO: 175874 - DNA, 122 bp, Homo sapiens
cctggccaggaaagcccttctcctcctgattttctcagggctgaaaatatgaggtctccccgcaaggggccttccctgaagcccagctcatgtcccacccagtttctcagtccctcttgagg

SEQ ID NO: 175875 - DNA, 122 bp, Homo sapiens
catggcggccacaaggcagatggacacaggtagttgtgatggtgattcagaccccacaggcggtgctgttgccagtgacatgaaatgggcaacgagtcttggccaaattccaagcaaaacaa

SEQ ID NO: 175876 - DNA, 122 bp, Homo sapiens
cggggattgcgccgaggaggggcctctcctggcgagggtggagttttgggttccccccttcgccccgcacctcccgccttcctgcctcctcccggtcttcaccttcccccccgggtccccac

SEQ ID NO: 175877 - DNA, 122 bp, Homo sapiens
cgggtttcctgatcacaaatcagcctgtcattcagcatgtgttcccttggtgactcagggcgatatctgcccttctccggaggtcaagggctcatcgtgtcaattgtggtcttgagtttgtt

SEQ ID NO: 175878 - DNA, 122 bp, Homo sapiens
cttctccttaaaggccaaagcacaggagacagcccgagaggagctcgaacaaggaagcggcgggaggaggagatttccttgcaacaaatgtgccaaacctgagtgaatcattcgtagcaaaa

SEQ ID NO: 175879 - DNA, 122 bp, Homo sapiens
tagaaatgaggttttatgttgccgaagctggtctccaattcctgagtcattagccacgcccggctaatttttgtatttttagtggagacggggtttcaccacgttggccaggctggtcttga

SEQ ID NO: 175880 - DNA, 122 bp, Homo sapiens
tggacgtgggttgtttgcgtatggtgaaacagactgtgaacaggaggggagccactggagcggggtaacctgtatcatgggctttctggaggagctgatttatttccatgttcttatgcagc

SEQ ID NO: 175881 - DNA, 122 bp, Homo sapiens
gcctgcagcggccaccagcttcgtgttctccagcacgaggggccaccccactacaactcacgcctcccactgcctacaggggaaagctcccgaaaagcacacaaaaacagctccctgaggaa

SEQ ID NO: 175882 - DNA, 122 bp, Homo sapiens
tgatggctgaagatatgcttcactccaataaaaagaaaatgaagatttttcaagagcattcgtaggcttcgaatcaaaaggacagtacttatttcctgaggtctgataaccgttgttttatg

SEQ ID NO: 175883 - DNA, 122 bp, Homo sapiens
gaagaaccctgcaattgctgcccaccaagacccccagcctaggcatgtctgcaaagtcctcgtgaaccgggaaacgtgacaccgccacaggctccggggttgggatgtggcatctttggggg

SEQ ID NO: 175884 - DNA, 122 bp, Homo sapiens
ctgagtccagcctgtctccagtaggccaccatgctgtagcgaaagcggagctcgtcgggccgaatcgccaagacgccggcaatgtcggctcagccgggcggttcagccgcaggaagatcaga

SEQ ID NO: 175885 - DNA, 122 bp, Homo sapiens
ttcccttgtcaggctctccagattcccgggctgtttgctggtgagaaatctttgctgcagcgaggaccggagtcccccgcgcgcagcccagtggcagaagagggctaggctgagagggaagc

SEQ ID NO: 175886 - DNA, 122 bp, Homo sapiens
gggaggctttgtcaggatagctgagtaaacacagaaatgctgcaaattaactttgctctgcgttcaattctatgaagtctttttttaataccaaaatgtggctggagttgcatcaatgtggt

SEQ ID NO: 175887 - DNA, 122 bp, Homo sapiens
ctgtcttctgttactgagtggaattgcagaacttgttgagccagattatggtctgagtggcgccagctagtgcatcggaatgcgcggtctgaaaagtatctccagcaccaatcttaggtttt

SEQ ID NO: 175888 - DNA, 122 bp, Homo sapiens
gccttgaaggagaacagagcgggggtgagggtgggggcctagagcgtccagggcggtgcccggcacccccaatatagcaactgctgtcagaagcgccggattccagggaggagaatgccagg

SEQ ID NO: 175889 - DNA, 122 bp, Homo sapiens
tgcaaggacgaggcggggcctctgcgcccggccctcttcccggactataaagagagccgccggcttctgggctccaccacgcttttcatctgtcccgctgcgtgttttcctcttgatcggga

SEQ ID NO: 175890 - DNA, 122 bp, Homo sapiens
attgcttgccggagagacatgtgttgggtttgagggcaaggtccggctgcaccgaacaggcgctgcatgggaagatctgggaggacaaggcttacggaagcgtggagggtgtcaccaccctc

SEQ ID NO: 175891 - DNA, 122 bp, Homo sapiens
gcctcactgcttttttatccaggcctgtctcaacgtccctctgaaagcctgcaagcttggcgtcctgtccttgtcatccgttgaggcattttgccggttttgggtgcccctcacacaccctc

SEQ ID NO: 175892 - DNA, 122 bp, Homo sapiens
catccttccggccggccccttcgccaaagatctgattagatttctcatcacaacccagtgcgcaattgaatttttgatttcagccacccggccagccaccttcccctctcccctccaaactc

SEQ ID NO: 175893 - DNA, 122 bp, Homo sapiens
gtgccgggcggctgtcacgtgacgcggttccggggccgccgctgccgctgtcgctgtcgccgagcccagtcgagccgcgctcacctcgggctcccgctccgtctccacctccgcctttgccc

SEQ ID NO: 175894 - DNA, 122 bp, Homo sapiens
ccaagtgcggtgcagtatttttagggatgtccctggtcagttttgtgttcaggcaggtttcgtgttcttcccggcatctcccgtggtagcacctcaggaatgccaagctggtctcaggcgcc

SEQ ID NO: 175895 - DNA, 122 bp, Homo sapiens
aaccccaagagctgctgtttatcctcttttgggggaagcctccaccacgtggggctcctgcgtcaacctgactccaaccccgcccccagcaacactctcctcccttttcttgttacatactt

SEQ ID NO: 175896 - DNA, 122 bp, Homo sapiens
gagtctagttactaggcagtgtagttagctgattgctaatagtaccaatcactaaccacacggccaggtaaaaagatttgggaattcgtccaaatgagctgcctgtgcatcatcaatgtgcg

SEQ ID NO: 175897 - DNA, 122 bp, Homo sapiens
taggaaagacccaactggatgatgattcaaggatcctccctatgggtcaagaggtttaatcgcactgcctgctttgaggtgatacagttttcattgtctgctacatctctgatgttatcagg

SEQ ID NO: 175898 - DNA, 122 bp, Homo sapiens
agcaatgactcacaagccccgtggaaagagtggaagggcacaggcggacactaacctgggcgccgtctcgtttaaaggctgtggcttggcccaagacaagcgtggacaggctggtagaggcc

SEQ ID NO: 175899 - DNA, 122 bp, Homo sapiens
ccagggcgtctgccagtcaccacggagaccttcccggaggtttattcgcacagcccacagcgcaaccgccatgcgcaggggctggggcatacgctaacgtctgcaagccaagcttttgggga

SEQ ID NO: 175900 - DNA, 122 bp, Homo sapiens
acggcggctggagattggatgcccacataaataacctcctcacacagtgacatacgggatcgatccggggtcttgatttgatgggtgcccacacaaagaaaaagagagagagtgcgggagag

SEQ ID NO: 175901 - DNA, 122 bp, Homo sapiens
gtagtccccacttacccatggaggatacatttcagtgtcctctgtggatgcctgaaaccgcggatatagtaccaaaccttatatgtactgtattttttcctgtacatacctataataaagtt

SEQ ID NO: 175902 - DNA, 122 bp, Homo sapiens
ggctcaagctttaatctctgcgaagttgggcggctccacgggctcgcccccgcccccccccgccccccaatatataaaggcatatccatagttctggtatctaccagagggggcaaatcccc

SEQ ID NO: 175903 - DNA, 122 bp, Homo sapiens
tgggaatcctctaggatctgtttcagggagtctctggttagccctgagacataagtggtgcgggtgagactcctggggcctatctcagaggtcctcacacccctgagattaaatcagtcagg

SEQ ID NO: 175904 - DNA, 122 bp, Homo sapiens
acagaatttgtcattgatatcaatctttattaagtttactgctgagagctcagaaaatggcggttctggagcaaggaacagggtgaaagcaggaagaacatcaggcactaagaaaagctgtg

SEQ ID NO: 175905 - DNA, 122 bp, Homo sapiens
aagagaaaccctgaacctccctgcagccttccaggcaggcctggcaggcagaggaaaccacgagatctctgggtggagcccagccaagctgtgacttcactggcactcctggctcagagaca

SEQ ID NO: 175906 - DNA, 122 bp, Homo sapiens
gggcttatagtcttccgcgtcggtggcgcctcgcctgctgctcactgggaattagctcggcgccccgttgcattgtggtcttggtagtctttgcgagaacggcaaatggcggttgcagaggc

SEQ ID NO: 175907 - DNA, 122 bp, Homo sapiens
aaaggtcatgttccacgctagggctccgggcggagaggccggaagaggcggggatgccggcgactcagtagtaaggcaagtcctgccacctcctggccggcccttccgctggcgtggccctc

SEQ ID NO: 175908 - DNA, 122 bp, Homo sapiens
tggctaaaagagatttgaaaactccctgggacagagctcccagagggaagggcaggctgtcgactttgctgtttgggcaacttatccattccagcctccaggctttggagagcccaagctga

SEQ ID NO: 175909 - DNA, 122 bp, Homo sapiens
agggacgggaaatagaggggcggagccgaccgctggctcatggtggggctgtggctgccgcgccgcccctttggcatcgtttgaatgagggtctgcgtgggaggaaccccgcgccgggagac

SEQ ID NO: 175910 - DNA, 122 bp, Homo sapiens
tcgctctctcccgggcagggaggctgccggcgtggaccgcgggaaggcggggctggggctcggcgggaggccacccccacagccgccccgggaggagcgcgcccagcagctgctggacgcgg

SEQ ID NO: 175911 - DNA, 122 bp, Homo sapiens
tatcatagacatcatagaaactattctaataaattgatacatttatataatagaataatccgcaaccttgaagggaatgaaggaaggaataaagagagagggaaaggaagaaaagaacggag

SEQ ID NO: 175912 - DNA, 122 bp, Homo sapiens
tgatgccagatatgactgcatggagctctattaaatagggcgtggtttggttgggagttacgtctttattttgaatttgtggatttttaagataagtgtcagaaagcaggattctttgtaac

SEQ ID NO: 175913 - DNA, 122 bp, Homo sapiens
gccacgaccaggatcccacccacgggatcctggggaggctcagggcacagaggaagccagcgggacagccgggggtgaggagcccggtggaaacagaactctttgctgattttcacccagca

SEQ ID NO: 175914 - DNA, 122 bp, Homo sapiens
tttccctttaagccggagatgctgctcggacacccccccgcgtccaacaggaggcgatgacgtctgtagcctcgttgccagaacagtccccaggctaccgctgccgttcattgacaggagcg

SEQ ID NO: 175915 - DNA, 122 bp, Homo sapiens
ctgccggctcagcctgagtccccaccgccggccagcatctggcctggtctgggtcaggagcgtcttggacttggttgctctataagggcctcaacttccccgacagacaaatgcttctggac

SEQ ID NO: 175916 - DNA, 122 bp, Homo sapiens
gttcatcagcacttttgccacgctgttaatttctgttattttataatttgctttaatatccgatagccctactttcttgttgcttgttctttgtaaaaaatgtttttactattcttatgcat

SEQ ID NO: 175917 - DNA, 122 bp, Homo sapiens
ccggagcctcccgattggccaacactccctgatcacgcacggccttcctgcgcccacccacgcgtgggagcgccaatgaaatgactcagtgaccatctacaacaaatcagcaagaagcaggg

SEQ ID NO: 175918 - DNA, 122 bp, Homo sapiens
gccgtgaaagtgaaccttctggggttgaagcagttggtcatggttggggtgatgggcacacgagtacatgtttagcggaactcatggaattgtacacttaaagtatgtgcagaggctggtag

SEQ ID NO: 175919 - DNA, 122 bp, Homo sapiens
gtagacactgttattatcatcctcgttttacagatgaggaaacaggagctcagggggttccgtgtcttgaccttggacagcaataagtagagatgttagaattaaacaaaaatactacaatt

SEQ ID NO: 175920 - DNA, 122 bp, Homo sapiens
tgcacagtactatgctcggttaatattttcagatttttgtaggctgggtgtggtggctcacgcttgtaatcccagcactttaggaggacgaggtgggcggatcacctgaggtcaggagttca

SEQ ID NO: 175921 - DNA, 122 bp, Homo sapiens
tctctgagggcagggggagccggccgcagggccccttccttatcgccgacaagtggcccgcgctgccccgcaagctggactcggtctttgaggagcggctctccaagaagcttttcttcttc

SEQ ID NO: 175922 - DNA, 122 bp, Homo sapiens
agcaatgaagagttgtcagacctagagttgttatttcgtttctacctctttggattaactcgggagattcaagaccatgcaagtcaagattactcgaaatgtaagttcaatcatctaaatta

SEQ ID NO: 175923 - DNA, 122 bp, Homo sapiens
ctccctcctcttctcatgggtggatggagtggcctggagtgcttacaccaacaccctctgcgcagggaggtgggtgtgggtgcccccaggcagaagctgggacccagtagggagtctgaagg

SEQ ID NO: 175924 - DNA, 122 bp, Homo sapiens
gcgctgtcccttcccccaatcccagctttaggaaagagctcgtgagtgtgggcttagactcgcgcgggctggggtgtgcgccgtggagggcgtgaggcagagggcgacctcccggggtgctc

SEQ ID NO: 175925 - DNA, 122 bp, Homo sapiens
cgtggggctctgcctggatgacgcgggcgcaggcctggccctgtcgacaggtgagtgtgccgggaccagctgcccagccctgtgcttgcagcccctctgtggtcctggagctctctgagagg

SEQ ID NO: 175926 - DNA, 122 bp, Homo sapiens
gagggaacgcatcaagctccctccccccgccatcaattcgcttttctgcaaccccggcgccgccatcctgatcctcaataattaaacggcctggagagggagtgaggtggccagaagggcag

SEQ ID NO: 175927 - DNA, 122 bp, Homo sapiens
aagccagtacccggcagcaggagcctagtttgggtttgtccaagccatggccacggattacgatcttcttgacaaagctcccatcggggcagtaccagagatcagaagcttgaagggcctct

SEQ ID NO: 175928 - DNA, 122 bp, Homo sapiens
ggtcctcccaaggctcgggtgcctgatctgcaattctgcgctccgccgcagggcgacgctcggagaccagccacactgtcccaagtcccggcgaagacccgcccgcggctccgtaggtgccc

SEQ ID NO: 175929 - DNA, 122 bp, Homo sapiens
gttttctcagtcacttcacttaattattttggctttttttgttaatgttaaaaactagagcgtctctaatgaaaagggctagtttttaaaagatcgttgtaaaagtactcagactattttta

SEQ ID NO: 175930 - DNA, 122 bp, Homo sapiens
tggagaccagaatccccaccgcggaggaagcttagcttgagtctggcgccttagaccactcggccatcctgacacactgcataacagccctgatttttgcactaaaatagagatcaacaagc

SEQ ID NO: 175931 - DNA, 122 bp, Homo sapiens
gctcccggcggctttccctgtaagacataatgggactgggacgtccacttccggctcaaacgaagttcagacggcgcgcaagccgcgcggtgcccgggtgctgaggccgtcccgagccagga

SEQ ID NO: 175932 - DNA, 122 bp, Homo sapiens
ggggagtcacccaggctgctcagggcggaattagacctcccttcagaaatacccctgccccgtatttattaaaacccctgagcaatgactccctctccctttactcctcccatttcaccgac

SEQ ID NO: 175933 - DNA, 122 bp, Homo sapiens
gagcaaggaggagaggagagaggcgggctgggcccaggctgtgcaggtccttgtacatcacgggacacttgggggatttattctaaaggcagcgggaagtcttggaggtagttacacagagg

SEQ ID NO: 175934 - DNA, 122 bp, Homo sapiens
gatacatgcgtcatatcttcgaaaatcaggattagggggtcgggcgccgtggctcacgctcgtaatcccagcactttgggagaccgaggtgggcggatcacaaggtcaggagttcacagacc

SEQ ID NO: 175935 - DNA, 122 bp, Homo sapiens
agcagcagctgggaaccagggaagcgggtcaatcccggccgcagggagaaagccccagggcgcagtcagccggcgtccacagccgcccaggagtagggtgagcggctgtctccgggccggtc

SEQ ID NO: 175936 - DNA, 122 bp, Homo sapiens
ggtagctgaagactcgggcaaagttggcgattcctgagacggatggtgcatagctgcggacgtctggaacggagcttggaagtcgccggatcggatgctggggacccttctgtcaaacactc

SEQ ID NO: 175937 - DNA, 122 bp, Homo sapiens
tgttaacagtcctagatgaaataaacatgtggttcacttagtgagctgctcagatatcaccggcttttaatggaactgagtagatgatatcaggcacattttaattaaagcaagactgcagt

SEQ ID NO: 175938 - DNA, 122 bp, Homo sapiens
ccagcacctggggaggccgaggcgggcacatcactcgaggtcaggagctggagaccagcccgcccaacacggcaaaaccccgtctccaccaaaaatacaaaaaccagtcaggcgtggcggcg

SEQ ID NO: 175939 - DNA, 122 bp, Homo sapiens
agagtcagtgactccccacaattcaagcatctggttcttggtgtgcttttgaatctgccacgtccacccccagggccaacaccatattcatgtgacatccaacatctttttacctttcccag

SEQ ID NO: 175940 - DNA, 122 bp, Homo sapiens
tttccccaggggctccagggaggccaggatcacccttgggccctcgaggaccctcttgtccgcggtccccaggctctccctgtggcagagataagcttgctgaggaacagccttgaagccaa

SEQ ID NO: 175941 - DNA, 122 bp, Homo sapiens
ggttttcatggagaaagaggcaacgttgactatacgtgtttactcaaagcttttttataccggactatatgccatccaggtttaagagaattccaggcaggctctagcattatgtttttcac

SEQ ID NO: 175942 - DNA, 122 bp, Homo sapiens
ggtaattcacagccccgagaactcgccggcagcgccaagtcccccagtccaggcgcaccgcgcagagaaccagtttgactaaaagagctttgaatcaggaacctggtggacatgtccagcca

SEQ ID NO: 175943 - DNA, 122 bp, Homo sapiens
gggaggatggatggcttgggctcaggagtttgagaccagcctgggcaacatgatgaaacccggtctctacaaaaggtacaaaaattagccaggcgcggtgcgcacctggccaaatttttgta

SEQ ID NO: 175944 - DNA, 122 bp, Homo sapiens
tcgccagttggacgcacagccaaactcttagcgcactcccgcgcgagatcccccatcacccggggctgccgtcctcatttcgagctctttctagagcttggctcccgctgaagcgcaacttc

SEQ ID NO: 175945 - DNA, 122 bp, Homo sapiens
cactgtccctctgcagccacgaggccccctggtggctgccacactgatgagttccagtgccggctggatggactatgcatccccctgcggtggcgctgcgatggggacactgactgcatgga

SEQ ID NO: 175946 - DNA, 122 bp, Homo sapiens
tgaagtttgttgaggaaggtgtgaaacatattttctttgtctgttttggtgttcttatcccgatgtttctggaaaagtaaaatctcctgttactttggtgatcccagatgtcagcaacattt

SEQ ID NO: 175947 - DNA, 122 bp, Homo sapiens
gttcccgtacgtcacggcgagggcagttcccctaaagtcctgtgcacataacgggcagaacgcactgcgaagcggcttcttcagagcacgggctggaactggcaggcaccgcgagcccctag

SEQ ID NO: 175948 - DNA, 122 bp, Homo sapiens
tgggagcgagctgtgtgacacccagattttacgagttgccagcggtggagaggagagagccgggcatgcagattcttcatggaccctactagagaggacagagaaaaagagcactggtgtag

SEQ ID NO: 175949 - DNA, 122 bp, Homo sapiens
tttttaagtggaaatacagtacaaacgtagctaaagctaattcccttttttcagttcagacgcttggaaatgaagacaaagggatagacaattatcgctggctgtgagctgttgtgggcact

SEQ ID NO: 175950 - DNA, 122 bp, Homo sapiens
aatgtggtccctggcgtgtgccgctgcccgttctctaggcgcagggctgtgggccatgtgcgtttcattttgtgctgggcttggtccaggtgcttttcagggtgattgtgcgaagcagctcc

SEQ ID NO: 175951 - DNA, 122 bp, Homo sapiens
aagccgacgccggaagccccgccccacgcagggcccgcccgaacgttcccgttcctgggccgccattggccaagtctgaacggccccacgtcgaggctccttatgggaaatgtagttcacgt

SEQ ID NO: 175952 - DNA, 122 bp, Homo sapiens
cagcctggggccgagaagcgaaacttgggtcttctccaccctcgtcgcactccttttccccgagacttggtactgggagataggacgggagtctcctacacgcagtcaacacttgccacgag

SEQ ID NO: 175953 - DNA, 122 bp, Homo sapiens
gctgtctgtgaatccgcctctgccgccctgcctggcacccacgctggctctctcctgccgcgggagaaagcaccagcaggttctgagccctggctgcttgtcctcctcgcaacccccccagg

SEQ ID NO: 175954 - DNA, 122 bp, Homo sapiens
gcacagactgtctagtgagcccaagccgagggcctctgagcaggtgggcatgtgtgaggccgttctttgtacagtggcactgtctgcttcaaggaggtccctggggtacagtgaaggacagc

SEQ ID NO: 175955 - DNA, 122 bp, Homo sapiens
ctatctagttatctgaatatgtgtgcatgtatcagagagagacatgaagattttgttactcggtaggtgtgcacaagccagagcagagtcccattccttgcatccgccacagcaccaacact

SEQ ID NO: 175956 - DNA, 122 bp, Homo sapiens
tcttggcagctactacaggatggagaagggaagacactgaggggaactagcactttcagacgtcctattccttgtcattgagagtgcagagcaccttgatgtggattatctacttaatttaa

SEQ ID NO: 175957 - DNA, 122 bp, Homo sapiens
ggggggagtcacggcacggggggagtcacggcacgggggagtcacggcgcggggaagtcacggcacagggggcaccaggagctgctctccagggactctctgctgcccttgctcagggaagg

SEQ ID NO: 175958 - DNA, 122 bp, Homo sapiens
acactgcatggaagagaatcctaaaattaaatgccattgaatgatcattcattttacaaccgaaaaacactaaaaatatcatgtgtttgaaagctactttttatgtaaaaatgtccaaacag

SEQ ID NO: 175959 - DNA, 122 bp, Homo sapiens
tcctgtggtggaacacctccttgagggagatgccggctctgattggctgaaaggacgctacgctagcctgggataggcattgggccaaggatgcgcccggcccactcgtgggggaggagacc

SEQ ID NO: 175960 - DNA, 122 bp, Homo sapiens
ccggcctcccatccttcccgcctcccctcttccacgcgccccgcacacctggcccaggtgcggcttcgcccctcgccctgggcccgcagacactcacctgtccagcgcctctctggggtcgg

SEQ ID NO: 175961 - DNA, 122 bp, Homo sapiens
cggacgagctatttttaggtctgtaacggatgggggaaggcgggaatgccacgtttaatccgttagtaaaatccaggatccaagtgaatggcttcctggccttgctgagaggctggacttgc

SEQ ID NO: 175962 - DNA, 122 bp, Homo sapiens
gcactcgcacacatgcatacacatgcacgcagctcacgcacacaggcacttgtgtgcatgcgtacacatgcatgtggctcacacacacttgcatgcgtgtgtacacatgcacgcagctcacg

SEQ ID NO: 175963 - DNA, 122 bp, Homo sapiens
ataggggattttaaggtagtgaaactcttgcagggcaggggagccccaaaactgggacaccgtccgggaaggctcttggcttcgtccaggaaggaattcaagggtgagctagaggaggaaga

SEQ ID NO: 175964 - DNA, 122 bp, Homo sapiens
gagagaaagacagaaatacagcagagagatgtgacttacatgtcctaatctccccactcccgaggtgaaccccaagatcagaaggaggcatagtgaacatttccaactagatatggaaggaa

SEQ ID NO: 175965 - DNA, 122 bp, Homo sapiens
gctcagaaggaaattagctcggcttccatacctataaggactgcctaacttttaaactcccggcactcaaagatgtggacacacacacgtacaggaaatacagccagaccagagcctttgca

SEQ ID NO: 175966 - DNA, 122 bp, Homo sapiens
tgcgtgcgccgaaagggcctcaaagctgtagggctggacggcacaaaggggcgcaaggcacggaggccaggcagaggggacagctagcggcgcggcgggacgggcgggccccgacgcccagc

SEQ ID NO: 175967 - DNA, 122 bp, Homo sapiens
ccttcctgatttaaaatttaatgctccaagtccaggagtcatctgcacatttccctgcttcgtcctcaaagagttgcgggtcatcaaaccacggggccgaaattcggagcagagtgggtttg

SEQ ID NO: 175968 - DNA, 122 bp, Homo sapiens
gtacgggatcacgtagtggatatggtgcctgggggcggcagggcgggctggcacctctcccgccacccccggcctggccttcccccggggcgcctaccccgtggtgggggtgtgaccgcgtc

SEQ ID NO: 175969 - DNA, 122 bp, Homo sapiens
cctccaagaggggcggggtcccccggccttaggcgagtggtcgccgcagccccacccgaacgcccgtggccgagcctgcccatgagagccccgttctgcaccagctgggtcagggtccagcg

SEQ ID NO: 175970 - DNA, 122 bp, Homo sapiens
gataacgcgttctcctctgtaacccgtccttccacgtcccggtggtgggggggggggtcccggttctcattctttcggggacctgcaaggagccccgcccgcaggctttgaaccgatttcgg

SEQ ID NO: 175971 - DNA, 122 bp, Homo sapiens
cttctaggcctcagtgtctccaccatcccccagccctaaccagagttaccagggcagcagcggctacaacttccggcccacagatgcccgctgcctgcccaggtcagtgctcctctgcccct

SEQ ID NO: 175972 - DNA, 122 bp, Homo sapiens
tcctgctggagatcgcggacccagagacccgccctctccgcgtcagtctctttgaccgagcggctctaccgttgagacggcactcaccccacgaatatcccagtacccgagaaccatagacg

SEQ ID NO: 175973 - DNA, 122 bp, Homo sapiens
tgaccacagggtagatgggcactcaccagccagggatcccacagtcaagatggtcagcagcgtcctcatcggggctggcacagagccctcccttggcctctactctgccgtgcacagagaga

SEQ ID NO: 175974 - DNA, 122 bp, Homo sapiens
ctcccctctccccaggccaaggtagacaagacagcttcaaaaccagactcccagcacctgcgatggaaactttatttcctcccatggaagggtccatctgggagggagaggagggcaggggg

SEQ ID NO: 175975 - DNA, 122 bp, Homo sapiens
cctcgtagttctcctcgtagaactcgctgaagttgacgatgctggcgaagatcacccctccgctgtcatggttcttggagtaggtctgggacaccttcagctgctcagccacgtggtagggg

SEQ ID NO: 175976 - DNA, 122 bp, Homo sapiens
aagagacctttttgcttgtctgtctgtatcacctggtataggcaacttaggagcaaagaacgagcctcattcattatattcccagggcccagcatgatgccagccacatcacaagggctcaa

SEQ ID NO: 175977 - DNA, 122 bp, Homo sapiens
tgatcagccttgaggacagcagagtgtctgccaagagagatctgtgaagtttcccatcaccgtggcagtccacaatgtgaagcccctgaggccacccttctccatgtgtcccccacactgtc

SEQ ID NO: 175978 - DNA, 122 bp, Homo sapiens
caagcgggaacccctgtgtggggacggggccggcctaggaaggttgtgcctgcggtggaacggcgcggtgcgcaggagtcggcattaacagcagccgcgtgtctgggtcttagatttggcct

SEQ ID NO: 175979 - DNA, 122 bp, Homo sapiens
cctgtctcccaccctgcccctctccacccccactcgcctttctcctggaagaggtcacagcgcccagaatgccacagccttgagtggggcgagtgttgagtccatggcagcagttggcaacc

SEQ ID NO: 175980 - DNA, 122 bp, Homo sapiens
gggctccacgtccaccatctgctcggacaagacgggcaccctcacccagaaccgcatgaccgtcgcccacatgtggttcgacaaccaaatccatgaggctgacaccaccgaagatcagtctg

SEQ ID NO: 175981 - DNA, 122 bp, Homo sapiens
ttaaccgcgccgaggactgcagcaggcggcggcgctgccctttctctgcgtgtctctgggcgcgtcctgcccgctccccgcgccgcccgcgctcctctcgccgcagctgccgctggggctgc

SEQ ID NO: 175982 - DNA, 122 bp, Homo sapiens
ggattcgcccctgacgaccctcccgtggtccctgcacaatctgggagagacccggcgctgcggatgcagagccacccagagagagctgcaggccaggacacagtcactgagcagggaggaga

SEQ ID NO: 175983 - DNA, 122 bp, Homo sapiens
tgagccgtgtagatgtacagctgaaaaaacgctttctaaaatcattaccagtccaggcaccggtggcttatgcctgtaatcccagtgcaggaggatcagttgaggccaggagcctgaggcca

SEQ ID NO: 175984 - DNA, 122 bp, Homo sapiens
gcccggccaacgccgaagtgcggagagcagccgcgggccctttaagggccgcgaggtgcgcggtctctttaaggcgggtcctggtggtttctgttttctgaaggaagtgacggggggtggga

SEQ ID NO: 175985 - DNA, 122 bp, Homo sapiens
aatgcactgtatttccttgtactccagatccctattagtgaaatgcctattaaaacatttcgtaaggccagcatggcagtgtgcatcagtagtcccatctatttgggaggatggcttgaggc

SEQ ID NO: 175986 - DNA, 122 bp, Homo sapiens
ttttggcatgtgcagtcaacctttcaaaaaaccaagagttctcaagttaagctaccttcacgaacctcttattaaatttaagtatcactctctgtccctcctactttgctatgttcctccac

SEQ ID NO: 175987 - DNA, 122 bp, Homo sapiens
ggaacccagctgggttccagcctgctctgggagaggagcacgcctcccttgagctgcaggcgggtccggctctgacgaaacgctgcgagaatgccagacagtgtagcctccaccgtttgctc

SEQ ID NO: 175988 - DNA, 122 bp, Homo sapiens
agagatgtgggtgggaagggagagcttagccaatggaaataaagtcctcccccctacacacgccactagagacaagattaaaagcgagagcgagagagaaaatgcttaaaacaagtcgctga

SEQ ID NO: 175989 - DNA, 122 bp, Homo sapiens
aaataaagccgtgggtcattcacgttgtgctgtttgttctgaacttgcctctggtgttggcggaagctgacctcgctcacctgctgtgtttgttctttgctccgcaggccgccttccaggag

SEQ ID NO: 175990 - DNA, 122 bp, Homo sapiens
cgctaaggcagctgcagtaccggcggccatgctgtaagagccttcttcaaactccgcccccgacacgcacaaagccggggaccctcggccagttccggccccgcccattaaaggagacgcac

SEQ ID NO: 175991 - DNA, 122 bp, Homo sapiens
accacaagcagaacaagcaggcgtgagacactcacaggttgggtttgatcgcatgcgtgtcggagaggagagagcagagagagacacaggaacaagaacagcaaagggtagagcagacctgc

SEQ ID NO: 175992 - DNA, 122 bp, Homo sapiens
gacagccgtattcgccataagaattctagagccagaccttgttacttcacaattgcctcacgttgcaggacaagcaaatctagcctgagtcctgtggattccagggctgctcaggagacgcc

SEQ ID NO: 175993 - DNA, 122 bp, Homo sapiens
tttaggaattatttcatttgaggtacctcttagacatggaataaatgagaaaaaggcaatcggttatataaacataccctacagtagagaggtcaactatagtgatacaaatttgaaagtca

SEQ ID NO: 175994 - DNA, 122 bp, Homo sapiens
tgagatcagctggggaactctctcccaggaaagacaaaccagaagaaacacaaatgacatcgaagtggccaggcgcagtggctcacgcctgtaatcccagcactttgggagcccgaggcagg

SEQ ID NO: 175995 - DNA, 122 bp, Homo sapiens
ctgtgtcctgcaccacggtgtgggactggtggtttcttactgtttttctcagttctctgacgctttgaggaattgtttttaaagcgagttatccatcattttagttgttttctctggggtcg

SEQ ID NO: 175996 - DNA, 122 bp, Homo sapiens
gggcctctccaggccagatccttgctctggccaaacagggacgcaaggcccgggttcagccgcactctaaagcagcaggtcctgcctctccaacaggttcctgggagggactgcatctctgg

SEQ ID NO: 175997 - DNA, 122 bp, Homo sapiens
tgaggaataaaattactatccaagaataagtgggttcaactctggttttgcacacaaacacgattactacagcagtgatccatctatccctgagcttccagtggcacttactgtgtctctct

SEQ ID NO: 175998 - DNA, 122 bp, Homo sapiens
cgggagcaccgggaggtgtgaggccagagtttctgctactgggggctcttccagggaagacgctggcgggaataggatggggctggcagctggggagcctcgcggtggctattgcacgtctc

SEQ ID NO: 175999 - DNA, 122 bp, Homo sapiens
aagatggcaagagcagagcactaaactaagtctagggcccgactgagcacagcacacccacgaagccagccttgggtgggagatcagaggagggagccacaaagcggggggggagcagccta

SEQ ID NO: 176000 - DNA, 122 bp, Homo sapiens
gagcccgcggtgaagtccacggcagaagacctccgtttcttctgcacgaaaatggatttccgtcgcttcctccgcctggcgggtttggggtgtccgctgtcggggttgctttccccgatggg

SEQ ID NO: 176001 - DNA, 122 bp, Homo sapiens
tgtaaaaccccctttttttgttgttaaatccaggaggcagcccctctcctcctcctccctcgttaatcttccccccagacggagtcacgggagcagcgatctccgagggtgatttcgcctca

SEQ ID NO: 176002 - DNA, 122 bp, Homo sapiens
aagataaatagatgaaggagggggaagagcacgcaggccaggaggaagcctgcacaaaggcgtgtctaacatgtaagagaaattggtggctgaggaactggattgatttaggaggcatcatc

SEQ ID NO: 176003 - DNA, 122 bp, Homo sapiens
tcctcaatagcacagcaaaaatacagactagcatatcttttgtaaacaatcttcagatctcgccactcaaggaagctgcacattttaggtttccgtgctaaaacggtctgaacaagttctct

SEQ ID NO: 176004 - DNA, 122 bp, Homo sapiens
cccggggccgaggcgttagccctttcttgcaccaggtgccgcaacaacaccagcagctggcgcaggctgtgctgctggtcctgcaggaggctggagttgtgcctgacaccgcgcaggccgcg

SEQ ID NO: 176005 - DNA, 122 bp, Homo sapiens
ttgacagaagccagaaataagacaggcactgggcctgagcgctctggacagggaagcacccgcgtggcgctgggcaaaatcttctcagtggagagaacgcactccgggttcgagacctcccc

SEQ ID NO: 176006 - DNA, 122 bp, Homo sapiens
cgcccaggctggaatgcagatgcgcgatctctgctcactgcaagtgcagtggcgcaatctcggctcattgcaacctccgcctcccaggttcaagcaattctcctgccttggcctccccagta

SEQ ID NO: 176007 - DNA, 122 bp, Homo sapiens
gaattaagacaaaggaagtagaaactaggaaggagaagagagtggaaaacctcagggaaccgtaagaacaaatcagagtggtgattcattacacttagaatttggggaaaaaactaggtgtc

SEQ ID NO: 176008 - DNA, 122 bp, Homo sapiens
cccagggtgtaccaatgatgcttctcccatgcagtgaattcttcccacatctgatcaccccgttttctgtccatttcatagggttcttctcagccaccgtcaacaaccccagctgctaccaa

SEQ ID NO: 176009 - DNA, 122 bp, Homo sapiens
ggttttaagttggatggagaacccagccaccttttaaacaaacgtgtttctaggacaaagcgtgtcccaggttccaaataagtgacatacaagggaaccttcagaagacagcactgtcggca

SEQ ID NO: 176010 - DNA, 122 bp, Homo sapiens
ggtgtgtgtctgtgtgcgtgtggggtttgctttgtcattcgtacccccggtgcgcgctgacgcggtcggcctggccgagctctccagcatccgcagaagggtccccggcgctgttcctggga

SEQ ID NO: 176011 - DNA, 122 bp, Homo sapiens
cccatcttacccgaaaagtcttgccagctacttaatctatctcaaccaccactgaccaagcggttaccatactccctcctgacacctacctcaacacccatccctgtgacatagggattctt

SEQ ID NO: 176012 - DNA, 122 bp, Homo sapiens
tgcgcctggccatgttaagcatttcttaatgtgctgaaataatcactgcctgcttcaaaacgtagctcaaaaaaaatccacatttttcttcagatcctcaaaaaaaagctttaaccctttct

SEQ ID NO: 176013 - DNA, 122 bp, Homo sapiens
tgttaagaaggaaatttgaaggaaagactattaagtagaacatttcagacatcccctttacggccactggagattctaccggagcagctccctccagctgacctgatgggttacagctcagc

SEQ ID NO: 176014 - DNA, 122 bp, Homo sapiens
gcgctccttggctttatagaaatcgtctgtttttcaaaaacgaatggctgaatgccctggcgagcctggaaccccttgttcttgcccctgctggctctgcgattccatgtcggtgaggcctg

SEQ ID NO: 176015 - DNA, 122 bp, Homo sapiens
aaaacaactgatgaaaggcagattaattggagacaaggcatataaatttatcaacatgcacgcgggggagtactgcagagttaccctaacctcccagtggggtataggagcttacataccat

SEQ ID NO: 176016 - DNA, 122 bp, Homo sapiens
cctatccgttcatccgtcccactgcgggcgcagcaccctatccattcatctgtcccactgcgggcacagcaccatatccattcatccgtcccactggggaggcagcaccctatccattcatc

SEQ ID NO: 176017 - DNA, 122 bp, Homo sapiens
tggttcgctgcctacctccagcagctcttgctccaataccactttctgagtgaggccttccgtgaccaccctactaaaaattcaatccattctcagaatagttctctctgaacactcacttt

SEQ ID NO: 176018 - DNA, 122 bp, Homo sapiens
atctttccttagcatctgtcctggaggggactttgatgcctctagggtacaatgcctgcacgttacacatggggaaatttaggcttagtgagggaggtggcttgtctgaaatcgcacaggaa

SEQ ID NO: 176019 - DNA, 122 bp, Homo sapiens
gaaatccttacaaaaaaaaaaaaaaaaaaaagcagtgggagtggaaatttgaaagaggaccgcctaattcagcactaaaaccagtgtgagaagcagtatgtgtgagcatgtgtgtgtgtgta

SEQ ID NO: 176020 - DNA, 122 bp, Homo sapiens
gaaaattacctggagaaaatggtggcgagtggtgtatttaagcacgtagatcattccagacgcccaggtctggccaagccccaggattagaataaccgatgcttgacattgatttcaaataa

SEQ ID NO: 176021 - DNA, 122 bp, Homo sapiens
gcaaacagggagaggccagggcgggaaacccgcggccgacctcgccttgttcggaggcagcgttagagcagcttctcggaggttggccttggacgtgaattggaagcaatcagaatctttta

SEQ ID NO: 176022 - DNA, 122 bp, Homo sapiens
cagctttctatagattgttttcctacacattgccttactcatcaattctcagaaccaccccgtgacatgagtactaccagtatcatcagatgagaaaaaccaagggccacagccttcaagat

SEQ ID NO: 176023 - DNA, 122 bp, Homo sapiens
cagatatactctccataacgaccacagacaacacagatgggttcccctggttctgcccagcgctgtgttttggaaaatgacttaacgggctcttcagaaggatggctgtccttcgcaccctg

SEQ ID NO: 176024 - DNA, 122 bp, Homo sapiens
ggccctggcgcccggggagacggtgatcggccgcgggccgctgctgggagtaagtgtgggcgggggcttagcggaccccgagagccgtggagttccgcgccggctcctgaagaccggcccta

SEQ ID NO: 176025 - DNA, 122 bp, Homo sapiens
tacctctcctcactgcccacgagtcagtacctagagcctcaggcagagccctcattgctgcggttctcaaaaagcctttctctatcctcccctctctccaggctctagttcctcttcaactc

SEQ ID NO: 176026 - DNA, 122 bp, Homo sapiens
cactgctggctctgctaacaaccccaaggacaccaacgtttcccattctgagtacttctccgcaaaccctttgtttcattaaggactgttttacatgaagggtgcaaaagtaggataaaaat

SEQ ID NO: 176027 - DNA, 122 bp, Homo sapiens
cagagctctttcatcttcccaaactgaaatgctatacccattaaacactaactcccgattcggcactcccacagcccacacccaccactctactttctctatgaatttcactactctaggga

SEQ ID NO: 176028 - DNA, 122 bp, Homo sapiens
catgtagcatgcttaaaacttttcccccaagtggctgcttgccagcttgtttagctgaaccgaccttgtctgctgacacagcctgaagagtgtcacacatacggaatttatattaagcaatc

SEQ ID NO: 176029 - DNA, 122 bp, Homo sapiens
tcccaagggcgataaccccgagggcaacggccgcgggcggcgctgcggtggcaatggcggcgccccctgcaccagccgccaaggggtccccgcagccggagccgcacgccccagagcccggc

SEQ ID NO: 176030 - DNA, 122 bp, Homo sapiens
gatgcccgcgctgtaggctgcattgtagcccggcaggcaggggcagttgaagtcgaaggccgagtacatctgggcactggccagggccatgatgccacagatgccattcatgaaggactcct

SEQ ID NO: 176031 - DNA, 122 bp, Homo sapiens
ggaaggatgagaaggcatcagtgagctcctctgttggttttaaatccactaagacctctccgggctgataagacagagctttctcagaaggaaaaacacatggagggttgtcttacgtgtaa

SEQ ID NO: 176032 - DNA, 122 bp, Homo sapiens
gtcgggtggggctgttacctttccacacggcccgttggcgcagtgcacacggtccgccagcgtatttaacaggccgcccagagcctcttgatccagagcgccctggccagaggtgagcaggc

SEQ ID NO: 176033 - DNA, 122 bp, Homo sapiens
gttgtaagaattgcagcatccgggacctagagaccagcggatcaggggatccagcgaatacggcgatccgattcgggaaccaagcatttcccctgaaactatttcaggcaccattcgggctg

SEQ ID NO: 176034 - DNA, 122 bp, Homo sapiens
ggctctatgtaaagagcgccgttaatttgcatcccctccttggtgtgtttgaattcgccacgcctgaataaccgagcgcgccggccctgccggcctcccggcgccttcccagcccttctctg

SEQ ID NO: 176035 - DNA, 122 bp, Homo sapiens
ggcggcgggcgcgggcagggggccgggggtgccgcgcggtaggagcctggcttggacagccgaggagcaggaagtggcctctgacccaggacaccgagcagggctctcttgcctggattcgc

SEQ ID NO: 176036 - DNA, 122 bp, Homo sapiens
aaatggcgtccggcgtctgcctcagatgcagtggaggccgctgaggtctgggagcctccacgttttccgatgtttgctttctaaagggtgaggagaggagcgtgcggggaggagcgagcacc

SEQ ID NO: 176037 - DNA, 122 bp, Homo sapiens
caaccagtctctcgctacgtgtccccagcttccctgtttccgagcgcctctcaaggcgcacgctctggacttgttcagatgggggaagggaactggtctggaactccccactattcccgagg

SEQ ID NO: 176038 - DNA, 122 bp, Homo sapiens
accttgtgttccacccgcctcggcctcccaaagtgctgggattacatgcatgagccactacgcccggcctgactcttttgctcttgatgtgtataggaggaataagctacagaaaggtgtag

SEQ ID NO: 176039 - DNA, 122 bp, Homo sapiens
tagcttcattaaatataataaccccttctttctcctcctacttctttatgcaaagtctgacgctttttcgatgcgatgatttcaaatagttgactctgcctgtcatctgttctcagtgaagc

SEQ ID NO: 176040 - DNA, 122 bp, Homo sapiens
tttttcctgggctccgttcccggcctcttcggggacgcacggttggaagttgtaccgtgacgtgatggtcagatcggatgatagaattttggtgcgtaacaattccaacttttgcttctgtg

SEQ ID NO: 176041 - DNA, 122 bp, Homo sapiens
aagagtgggacagggattactactttttaaaacttgaagcctttgctatttgatttatcacgggcactaattataatactttcttttcttttctttttttacttttttttttttttgagaca

SEQ ID NO: 176042 - DNA, 122 bp, Homo sapiens
gaggctggagggccttctagcctcggccacaagcccttagcctttgtgtggagccatgtgcgtgctccccctccagacctcagggagcacaggtgcatctctgtccccaaatgggaaagtgg

SEQ ID NO: 176043 - DNA, 122 bp, Homo sapiens
tgtggggcttgtagtgcgggactgggtctgggtgggtgggcgcggccgcagcagtcgcagcggggccatcttcggcgggcgagtgggctcggcctgtgcaacccgcacctgcgtccctcgcc

SEQ ID NO: 176044 - DNA, 122 bp, Homo sapiens
agggctctcatgatggggttggtgtccttctaagaagagacatcaggaagcttgcacgcacgcacacacacacacacacacacacacacgaaaggctatgtgagcacacggtgagaaggcag

SEQ ID NO: 176045 - DNA, 122 bp, Homo sapiens
gccctcccttgccccatctgggctggtgccaggccgcagctcgagacctggtttccaccccgggctcccacagagcccatgaagcgctggtcacagcccctggaagctgcagacccggcttt

SEQ ID NO: 176046 - DNA, 122 bp, Homo sapiens
ccccgcctgtgtgtgccagatcgcctggcacactgtatatcaaccttcatcaaaggctgccgggcagaggggcggggcccaggccaactcttgtgcattaaagagacttttaaagagacctt

SEQ ID NO: 176047 - DNA, 122 bp, Homo sapiens
tgccttgagcaggaatcagtgttaggcttctccatcgaatcttctttctccccatttccacggagaaaagcccttagttcgtccagaaatgagtgatgaggcagctcagcctctctgagaaa

SEQ ID NO: 176048 - DNA, 122 bp, Homo sapiens
aagctagagaatcccagtgtctcccgctcaggcaaagcagcaactaccataatgaggtctcgtgtccagttgaggggatgatggagctcagccaaggaaaaagtcacaggtggttttaggtg

SEQ ID NO: 176049 - DNA, 122 bp, Homo sapiens
gagcaagggaaagacagacaatgaaaaggaatcgcagaaatcacatcattacagattatacgacaggtgtcaagaagcagcaaagcatccagagggcacctgcgtctatttttcaaaagttt

SEQ ID NO: 176050 - DNA, 122 bp, Homo sapiens
acccaaggcagtgttgccagactgggccaagccaggagcaaggctgagcggctccacccgcgggctcccgggctgggacccggggtgtcacccgcagtgctgagcgtttgtgctctgagacc

SEQ ID NO: 176051 - DNA, 122 bp, Homo sapiens
caggcccggctggtgcttctctgggcgccgctgaaagcccagctccgcaggagctacaggcgtgagacccaccgggacccgcgagcgggatcagggctgggggattagcagagccgcttgcg

SEQ ID NO: 176052 - DNA, 122 bp, Homo sapiens
gcgcctgtccacacacacaccagtaccctgacatctcctcaatgctgtgcatcctccacccgtttttactccagccagaactgcatcctgaatgcccaggagacgtttaagttatttatgaa

SEQ ID NO: 176053 - DNA, 122 bp, Homo sapiens
tgggccccaagttccaataggacgatctggagcctcccacgggaagaaggccggcggggacgggctgctacgtggctccaccgcatccgcgactgccgaatgtggaatctcccacagggaag

SEQ ID NO: 176054 - DNA, 122 bp, Homo sapiens
cgcgcccgggcaagaagtgcagggacactacctgcgcggccccagccgcctcaggccggacgcgaaacagcccgggacgaacccgtccaggtaccgcctgctcctcctgcggcggcgcagac

SEQ ID NO: 176055 - DNA, 122 bp, Homo sapiens
cagcgccaactgtaaccactaagagaaagcgcaaaccgcacaagaccagttcaaaaccagcgccctcagggagccgcttcagagctccgcaacagggaagacaggaagtcccgcccctccac

SEQ ID NO: 176056 - DNA, 122 bp, Homo sapiens
gataagagcccttaagctctttataagaaagtggtacttttcacttctgtgaagcaggaacgtctttataggtgatacacccctactttatggtaattgcttatttaatgcctgccttattt

SEQ ID NO: 176057 - DNA, 122 bp, Homo sapiens
tataacatcagaaaagatagcgcttgtacaccacaactctaaagttggtggcgggggaaacggggagacctagcacccttctagaagattaatccaccaacatttcaaaatcttgtaaggag

SEQ ID NO: 176058 - DNA, 122 bp, Homo sapiens
tcgcggaatccgggaaatgggagggagcccggcggggcgggggcccagggccagcccaggcgggacccgcaggcacccacctgccccggacgcctcccgagacccagccttgccgtggggga

SEQ ID NO: 176059 - DNA, 122 bp, Homo sapiens
tccacacagcctcccctccagctccgtgacccggggccgtttctcaccctctctggccctcgttataaagcgggcacgtcttcgcccattctagggtggctgtgctgttggcagaggtggtg

SEQ ID NO: 176060 - DNA, 122 bp, Homo sapiens
ctttggaaaggctcatcagaaactcaaaagaatgcaaccatttgtctctcagctgtaatacgtgcgacctggaagccccctcctcactttgagttggcccgcctctgcttcaatttgtccct

SEQ ID NO: 176061 - DNA, 122 bp, Homo sapiens
aactgggtaggcaggaggttgtgaggcagggcgcttataccgatggctgccgctcctttccgtgctgggccctccttcttccttcttctaaaacgtagactgatgcgcctcgtatcacgggg

SEQ ID NO: 176062 - DNA, 122 bp, Homo sapiens
ggtgaccgttttcccggggagctgcgcgggtcggtggtgacagcgcttctgtgctcccggcggctttccctgtaagacataatgggactgggacgtccacttccggctcaaacgaagttcag

SEQ ID NO: 176063 - DNA, 122 bp, Homo sapiens
agcagatagtcgttgtcctttagccagtcagggagcacatcatatgggatgaccctccaacgtccctcccagacctagaacatatacactttctctgggtagggcactagatagtaccttcc

SEQ ID NO: 176064 - DNA, 122 bp, Homo sapiens
agaagtggaaaccattcctacattcctataggagctgctatctggaaggcctagtatacacgtggcttttcagctgtgattttgtttgattttagggattattctttttctgaatctgagca

SEQ ID NO: 176065 - DNA, 122 bp, Homo sapiens
cttcctgtgtcgtatttccaaggactccaaagcgaggccggggactgaaggtgtgggtgtcgagccctctggcagagggttaacctgggtcaaatgcacggattctcacctcgtacagttac

SEQ ID NO: 176066 - DNA, 122 bp, Homo sapiens
gtcacttatcttctctgaaccctggtttccttcgtcgaaaagtaaggaagctactttcctcgttgatagcttctgatacttttaggagataaagtgcaaaacatctagcactggtgcctggg

SEQ ID NO: 176067 - DNA, 122 bp, Homo sapiens
aaagcttatcagctggcaacatgcttaatgtgtgcacgactgtttcagatgcgggctccccggcacccggacagtcttgctatttgggatctccatcccacagaagccatcgtccaggctct

SEQ ID NO: 176068 - DNA, 122 bp, Homo sapiens
cttctcacattctaggggagtggtccacatctaaaggacagccagttcccatttctaagtcgtgctttggaggctccagagcagaggcccctggccccaggcactctgggtgcctaaccagc

SEQ ID NO: 176069 - DNA, 122 bp, Homo sapiens
tttggagaactgttgtatacacacgcaggtgacacgaggcagagcaggatgtgaaacgagcgcagtggtttgccaaacccgcagcaggcttaggacggagtggtgagaacagcccccttcct

SEQ ID NO: 176070 - DNA, 122 bp, Homo sapiens
ctggaagaattctgatatgacatagaaactgctagatgctggcaaataactcctgggtttcgggccatctagacaataaacaactccataatattcaatgcagcagcctctgtagcgcccat

SEQ ID NO: 176071 - DNA, 122 bp, Homo sapiens
cattacggctgcagccaatttcatgccagcgccgagcactggctgggccgggagtggggtcgggggtgcgtgcgggtgcgatccgggcctgcagggtgcggagcgggggcgtcccggggcga

SEQ ID NO: 176072 - DNA, 122 bp, Homo sapiens
cggtgacgtcagggcgttggggcagctcctgtgacagacggagctggagcggcggggcggcggcggagtccggcggccgggagagcgagtgagcgagcggaggagcagcgacacgggagtct

SEQ ID NO: 176073 - DNA, 122 bp, Homo sapiens
gtggccgccctgagcgcgtgggaatttaatttgaatcactttttttctcccctcgctggccggttttgcctgcacacttctattaggacacccattctccaccccgggttattcccctgggt

SEQ ID NO: 176074 - DNA, 122 bp, Homo sapiens
agggggcggcgcgcgcgcgcctggccaggccaaccccggctgctgccttataaggcgcgccgtcgccatggcaacgtgcgctaagttgcagcagtcgtgtcaaagttcactatatagagagc

SEQ ID NO: 176075 - DNA, 122 bp, Homo sapiens
tgggttcaagcgattcttccgcctcagcctctctagtaactgggtgttactagattcttccgcctcagcctctctagtacaggggtgtgccaccacgcctggctaattttttctatttttag

SEQ ID NO: 176076 - DNA, 122 bp, Homo sapiens
aaaatagttagcttttgggagaccccctccactctgccttcttctttcccttgaatataacgttctcaaaggacagccataaacaacagaaaaactgaagccactcaccagccatggcttct

SEQ ID NO: 176077 - DNA, 122 bp, Homo sapiens
ccgggaattgaacccgggtctcccgcatgggaggcgagaattctaccactaaaccaccaacgcctctctggaactaccccctggaggataacagaaaagagtaaccacaaagatttagaaac

SEQ ID NO: 176078 - DNA, 122 bp, Homo sapiens
tggccataactcagcttcagaacaaaaaactgtagggggtgcctccttcattgaggataccgggctgctaagtcggtgtccggcacagagctgagcttttttttttttttctgagacggagt

SEQ ID NO: 176079 - DNA, 122 bp, Homo sapiens
tggctttgcaagttctcttgtaaatcgcctctggcttctaaaaaacagtagcaaatgtgccgaagactgaattagctagaacagaagtttcactttttcactacaagaattatctgggactg

SEQ ID NO: 176080 - DNA, 122 bp, Homo sapiens
ggttgagttctaagacctcggtacaaaagccactaatgccactgtctagctgtgggtcctcgcatcactacagtagtgaccttctgtaagtgccaatctcatttctaaaacaaggataatac

SEQ ID NO: 176081 - DNA, 122 bp, Homo sapiens
aaaggagaaaattcaggataactctcctgaggggtgagccaagccctgccatgtagtgcacgcaggacatcaacaaacacagataacaggaaatgatccattccctgtggtcacttattcta

SEQ ID NO: 176082 - DNA, 122 bp, Homo sapiens
ctcacagcccgcgaggaagcccgtcggggccggcggggctgatggaaggcctgaggaattcgcagccggcggcgcggccgggcgcgttcccttcccctctctccgttgcccggcgagggagc

SEQ ID NO: 176083 - DNA, 122 bp, Homo sapiens
cttttttctccgcccactacgcatgcgcaaagctaggacaaactcccgccaacacgcaggcgccgtaggttcactgcctactcctgcccgccatttcacgtgttctcagaggcaggtggaac

SEQ ID NO: 176084 - DNA, 122 bp, Homo sapiens
taaattcgtatattaaagaaatgcaagacagaaggatattaaagaaacgcaagtttgcagcggtcagatgtggagggtcttatgtgttcttggttgaattgaacaaattttcttaaaaacaa

SEQ ID NO: 176085 - DNA, 122 bp, Homo sapiens
cagcctgtacacgcattcacctgcgtggacgtgtgtgtagttctttgcaaacttaccccccgtatatagatttcagtaaccaccgccccagtcgagattcagaactcttccgtcaccacagg

SEQ ID NO: 176086 - DNA, 122 bp, Homo sapiens
tctggggaagagggaagtagtgggggagtgaggtgcctgcccaagcgaaattttgatgcccgcctgcctctggctccagctccgccctcacggaagggggagaacttcgaattccagaaccg

SEQ ID NO: 176087 - DNA, 122 bp, Homo sapiens
cctccgccggcggtgccaaatggtgctgcagcgtgggcacgggcagtggctcgttgcccccggtctcccgccgcctggtggtgaggatcttctgcagcatgctgggctccgagacttccaca

SEQ ID NO: 176088 - DNA, 122 bp, Homo sapiens
ctgcagcataaacaggccggactgtgtgaccttcccagaggggaaaacagcagctgcaggcggcccctcccctggcattctggccatagagcatgaccaccggacaggagtgcctgcagggc

SEQ ID NO: 176089 - DNA, 122 bp, Homo sapiens
tcccaggtacaagcccggccgaacgtatctgaagccccaggaaacacgtggcacaaattccgggagaaactgttagcccggaagatatgggaacattaactggcgagtagtgtgaagccttg

SEQ ID NO: 176090 - DNA, 122 bp, Homo sapiens
tgtacatttgaactggtgccccagtgattctcacgcatgttggctagataagaactcagccgcagcccgtagctgcgcggcccggcctaggtccacccgccgcccgtcccggagcctcctaa

SEQ ID NO: 176091 - DNA, 122 bp, Homo sapiens
ccgggcagggggcgggggtgagccccgacggccaacccgtcagctctcggctcagacgggcgggaaccacagccccgctcgctgcccattgtctgcgcccctaaccggtgcgccctggtgcc

SEQ ID NO: 176092 - DNA, 122 bp, Homo sapiens
aggcggaggcaccctggcttcttctcggtctcctttctctgaatgaagaattccagtggacggcgggcccgcgcgacccctcccagggagccctcgcttcctgctgatttatttgttattta

SEQ ID NO: 176093 - DNA, 122 bp, Homo sapiens
caatagcgcagtgagagctacgtccgagcgtcctggaccccctccgcgcgcacacacttgcgcacagcacctctccagctccatgcacgccaggggcctgggaccctgggctccacttctcg

SEQ ID NO: 176094 - DNA, 122 bp, Homo sapiens
gggcactggagccagcggcattgtcgaggtcctcacggaggtgccaaacatcgatgttaccgccaccaacagccagggtttcaccctgctgcaccatgcctccctcaagggtcacgcgctgt

SEQ ID NO: 176095 - DNA, 122 bp, Homo sapiens
gatgggattcttgcggggagcggcctggggggtgagagctgggatcccgtcaggcagcctcgcccgggggaggagtccaccccgcggccctcacgcgcccgcccacccacagcggcgccgcc

SEQ ID NO: 176096 - DNA, 122 bp, Homo sapiens
tgagcatgtgttcgcgaccacgatgagtgtgccgcacttccggccagatcgccggatttccgctgagtgacccttacaagtccttcttgatcctgaactgggttaggtgccgctgttgctgc

SEQ ID NO: 176097 - DNA, 122 bp, Homo sapiens
tagcctgaagccttattggccacacggaacctctgttttagatgctgtttgtggacctgccgaaatcgaatgccactcaggctttctgaaacccttttggggtgggaagaggcagtagctga

SEQ ID NO: 176098 - DNA, 122 bp, Homo sapiens
gctcacactggactttgagagctcatatggtattttatgctgagcctttcttcccactaacgcccttagattgaatcttggctgcagtgggagatggaggttgccctaaagtggtgggattt

SEQ ID NO: 176099 - DNA, 122 bp, Homo sapiens
ggcctttgagaacgcattcctgaggaaggcgcccgcccacgtgggtcccagagcaggccacgcgcatgggagctggctatcatttcctggttccagcgaggtctagggccgcgtagcgtttc

SEQ ID NO: 176100 - DNA, 122 bp, Homo sapiens
gactggagcccattccctttggctctggcctcgggactctccttgtgctccggagggttccgtaggtggagaatgtaggtttcacccaggtgccgcttcagtgtccgcctcagctcagcggg

SEQ ID NO: 176101 - DNA, 122 bp, Homo sapiens
acgcagcctccagcgccaggagggggcgccaggcagggcctgtcccgcctggggagactgcgcccgggataataggagcgcttggcctctgagactacccggcagaagggacgtccccaaat

SEQ ID NO: 176102 - DNA, 122 bp, Homo sapiens
tttctaaacgggaggggaggagccgtggccaccgtgacaaccacaaaacaggatgagccccgcctcccagaacgcggagtcgcggtggaagagggtgacgccgccgagagttcacgagcgtg

SEQ ID NO: 176103 - DNA, 122 bp, Homo sapiens
ctctgccaggagggcgaggcaggcgatgatgttttcctgctttccgagtttgtcgttttccgggcagtatcaaacgctggcatctctccaccaccctgtctccgtcctctcttcttccctcc

SEQ ID NO: 176104 - DNA, 122 bp, Homo sapiens
ggccatcgcttgctctcgcctggcaaggggctctcggccgtggattagcgcagctggagacgtgggaggccgcgggccccgcccccgaccggcggcggctgcggcggcccagcgcggcagtc

SEQ ID NO: 176105 - DNA, 122 bp, Homo sapiens
cccctccccgcccgcctagcgcccgcgccctgggacgtccgggggcctgtgacccggaggcgctggggctgtcctgggtcgtcacatgcgagaaatcgtctcaccccagccagtgtgacgga

SEQ ID NO: 176106 - DNA, 122 bp, Homo sapiens
acattaaggagagagttgaaggtaaagatctgaaggtaagaaggagttccacctgatgctcgggtcaggatgagaattccaaacacactgccagccccttcactggggatgcttggtctctt

SEQ ID NO: 176107 - DNA, 122 bp, Homo sapiens
atgattttaagtaaacactctcccggctcagaaacggtgcaggtgcatttacatgtcaatcggttccaggctcagaggtttgcagtcaggaaaggtggctgggttgttgctggttttgtggt

SEQ ID NO: 176108 - DNA, 122 bp, Homo sapiens
gactaacactttagaatgggctatgtcccctagtatatctacattctcagcctataacttcgattcgtagcatttgtcacaaatttaatttaagcaaatatttgtgtaataatttgtatgat

SEQ ID NO: 176109 - DNA, 122 bp, Homo sapiens
ccggacccgactcagcgctgggcagggagccggcgccatcagagagcggacaaaggagcccggccccacaagtgcaccggggctgggggtgcagggcggagaggccctggggacgagggatg

SEQ ID NO: 176110 - DNA, 122 bp, Homo sapiens
tattcctgcatagccctcctcccccgaatcagcaacaatttttgctccaccgttttctttcgggaaccagatgcgttttcagaagacagtactccagtgataaggtatctacaccacttaat

SEQ ID NO: 176111 - DNA, 122 bp, Homo sapiens
agatgcgtgcgttacagaaggctaccaggcgcgccagcagtgtctgtgccgtttggattccgcctgccaacccctctccacccggggcggcgcgtggagtccggacgttctcgggttcaatg

SEQ ID NO: 176112 - DNA, 122 bp, Homo sapiens
ctaccgcccgcgcgtcaatccatcagttcgtcaatccgtccttctcacgtccgcccctcccggcccagcgactcctcagctcagcctcttgcagactgcggttgtcaagtgccggggagccg

SEQ ID NO: 176113 - DNA, 122 bp, Homo sapiens
gaggtttcaccatgatggccaggctggtctcgaactcctggcctcaagtgatctgccctccgtggcctcccaaaatgccagattacaggcgtgagccaccatgcgcggcccttagataccct

SEQ ID NO: 176114 - DNA, 122 bp, Homo sapiens
agggctcctaaagatcctctttactaatgtggaagttgagacccagtgggggtaatggcccgtcctgggcactcagtgcatgaatgctggaagccaagagtcccctgcccagctcggggctg

SEQ ID NO: 176115 - DNA, 122 bp, Homo sapiens
ctctaatgccgctctcgtgtacagcagcccgtgtgccgaccttgtgcgtacgaatgtgttcgtgaccctgtaaatcctaggccggcatcctgtgctaccccaaagcctgtggccttccctgg

SEQ ID NO: 176116 - DNA, 122 bp, Homo sapiens
ggcaacagattgggggacacacatgtgactccagagtgagcagggggaaggcccggcctccgcacagcctaaggtttgctggctgaggataatttgaaaaattgttttggaaaaacctcctt

SEQ ID NO: 176117 - DNA, 122 bp, Homo sapiens
tgccttttcccgttctctgtcgtggcttttgttgttgttgtttttcctcctttccttccccgctcttcttttccctgaattgtaagtgaggagggtgtacagccactatttatggacaggct

SEQ ID NO: 176118 - DNA, 122 bp, Homo sapiens
ggaatgtcctctggctgccccagctgtcggacgcccgcctgctgtgaggcagtaattagacgctcctgtgtgtaacacatgtgtgcacgtctgtgtgtgcacgtcgggaaagggtggggcgg

SEQ ID NO: 176119 - DNA, 122 bp, Homo sapiens
aaagtcgccatggggcatgagcttggcctgaagaggccactgcaaggcaggagctggccccgtagaggctgccgaaaggcaggagctttgcctgaggatgccacagtgagacaccatctggg

SEQ ID NO: 176120 - DNA, 122 bp, Homo sapiens
cccgcctcctctggtgccggcgccgagtccttcgagcagtgccgggacaccatcatcgcgcgcaccaaggggctctccatcctcacccacgacgtgcagagccagctcaacatgggccgctt

SEQ ID NO: 176121 - DNA, 122 bp, Homo sapiens
ttcatggggtgttagtcctctgtcctgacattcccacctcctactccaggctgacttgagcgaagggttcatagagtgctgggtaccacctcctcagctggcctgtggacactcaattccac

SEQ ID NO: 176122 - DNA, 122 bp, Homo sapiens
cctttgaccaagtttccttactgagaggttctacttaatttacccaagtaacagcaatagcgctatgacgggaggtcacactctcctcagtaaatctctgttccctctcgttcctcagaccc

SEQ ID NO: 176123 - DNA, 122 bp, Homo sapiens
cggccccagtccaacgtgtgggcgtggtctgtaagttgcatggaaccgcccctgggcgggcgtggagggcggggcctccccgcccctcacccaggcccaggcccaggccccgcccccacaag

SEQ ID NO: 176124 - DNA, 122 bp, Homo sapiens
tgggggccgcccacacacgcacagcctaaatgcatgtcccccagcacacacctgtgcgcacggctgccagtcagcctgtgtagttctgccccgggtcccactgtatggatgtaccataattg

SEQ ID NO: 176125 - DNA, 122 bp, Homo sapiens
atgaccccgggaacccctgacatctgcttctggctttgttgaaacttccagcaaagggaacgacagggcaccctgggggtctggagtgacctacatccgggttgaacgtcgaggactcgccg

SEQ ID NO: 176126 - DNA, 122 bp, Homo sapiens
caatcagattagaatcaaatctctagaatctaatctatataaaacaaaacataagttggtcgttaagcaccaaaactgaccactaagcagttttcgattgtcaatacctggttatagtcagg

SEQ ID NO: 176127 - DNA, 122 bp, Homo sapiens
gcggctgtgccccattgcagtgacaccaggggacccttcccacggtgctgctctctgtgccgagggtctgagtgtcgctggatgactcggcgtttcctttctttcttagggcatggatttca

SEQ ID NO: 176128 - DNA, 122 bp, Homo sapiens
cgggcgggcgcggcctcagggagccctcagggcttggggccaggaccatggccatccacgcgcttcggcctcgcactccccgggtatgctgcgggccctctccatccggggaggcggggtcc

SEQ ID NO: 176129 - DNA, 122 bp, Homo sapiens
atgaggggcgagaggccgtcgttgttgagcacggcctccaggttgctgtcggggaagaggcgggcacacttgagcagcagcaggtcgtacatcttggtaacaaacttggtgttctcacgggt

SEQ ID NO: 176130 - DNA, 122 bp, Homo sapiens
ccctgacgcatgaccttggcctccggagggccgtgaggcaggagctgggcctgcgggggccgccccaaggcgggagcctggtccgaggaggccacggcgaggcaagaggtgggcgtggaggg

SEQ ID NO: 176131 - DNA, 122 bp, Homo sapiens
tacaattagggccatgctctctgagccgccaggatattgtggcttttgctaattaaggagcggatgtgtcctgccagcgcaattagaggctggcccaggcagcaggggctttgcctctcctc

SEQ ID NO: 176132 - DNA, 122 bp, Homo sapiens
cgcacaaggtcacactacactagaaagacggggcctggaagagaaccccaccgccacatccggggtcctctctaggccaagtccttagatggcagctcaggggcacacataagagtcatcca

SEQ ID NO: 176133 - DNA, 122 bp, Homo sapiens
cacctcggctgtggatttatttcccctttgttgactcggccatcggcctgccgggcctggcgtttcccagaaggcccagcgccgggaaggggtttgcagctgctccgtcatcgtgcggcccg

SEQ ID NO: 176134 - DNA, 122 bp, Homo sapiens
agtgctctgaagggggtgtcccaggatctgctggagcgggtgagtcgtccccagtgatggcgggtgggcgcctggtgacctgctgcccactaaccaggtcccggtacctgctgcagatccga

SEQ ID NO: 176135 - DNA, 122 bp, Homo sapiens
cgtcccatgtgcccccaggtctggagtatggacaacatgatctgcacgcagaccctgctgcgtcaccagggcagtgtcaccgcgctggctgtgtcccggggccgactcttctcaggggctgt

SEQ ID NO: 176136 - DNA, 122 bp, Homo sapiens
tgcaggttcctcccctggttcctcataggcagagtactatagggtcgcagtcttcctggacgttccctattggttgttgggcaggggctgtaggtattttctttagggttgtcctgctttat

SEQ ID NO: 176137 - DNA, 122 bp, Homo sapiens
ttgcctgctgctcacctcctgctgtgcagcccagttcctaacaggccacggactggtatccgtgtatagcctgggagttgagggcccttgctgtatatcagatgttgtaatttactccagat

SEQ ID NO: 176138 - DNA, 122 bp, Homo sapiens
ccagctctgccctcgcgatcgctggagccccctgaggaactcacgcagacgcggctgcaccgcctcatcaatcccaacttctacggctatcaggacgccccctggaagatcttcctgcgcaa

SEQ ID NO: 176139 - DNA, 122 bp, Homo sapiens
aaggcataggggatagaagttcacttcactgcatgtgttcacatgcctggcaatgtgctacgcacttttcatacaacattctcaatctcatcttcacaaacctctttgggcatctgtattaa

SEQ ID NO: 176140 - DNA, 122 bp, Homo sapiens
cgaattcccaggagagtgtgcatttccttgagccgccgtcacggggcagcacggaaaacccgttgctgctccataaacagcacgtggctcccattaccctttgattcctacacaaaaagatt

SEQ ID NO: 176141 - DNA, 122 bp, Homo sapiens
gaggattccccagtgagatccgaacgattctcccagcccctccttccctgaaccccatcgcgccactcttctcagattccctcgcgcctgcaggaactagaggagggggaagacaagagggg

SEQ ID NO: 176142 - DNA, 122 bp, Homo sapiens
tgctaagcccctcattgcccagggccggcagggccggccaggctctccgagtgcggggcccgccgagcccacacccacctggaattcgcgctggcccgcaaagcaccgcgcgcagccccggt

SEQ ID NO: 176143 - DNA, 122 bp, Homo sapiens
tgggctgttcctaggcacagcagaatgagtcaagataattagagtttgggcacatggaatcgaaatatccagccttgaagtgaggcgctgtgtgggaacacttgctaagctagtgcagcagg

SEQ ID NO: 176144 - DNA, 122 bp, Homo sapiens
agttcgagggggaaatacgagttcctttctgaagggacaggacggctgcttttccacagccgcgacgtgattgagaaatggtggctggcaagggtaggcctgccttcgcccctccaaagtaa

SEQ ID NO: 176145 - DNA, 122 bp, Homo sapiens
gggcggattcaaggggctgttgcagaatcatggtggagggcaggtgtgagcgatggtttccgccataaacagtggcctcatggacagagatgggcaagtcgatgtcagaggcccagggcgaa

SEQ ID NO: 176146 - DNA, 122 bp, Homo sapiens
ctgtgagcccctggtcctgagggtccccacctgggacccttgagagtatcaggtctcccacgtgggagacaagaaatccctgtttaatatttaaacagcagtgttccccatctgggtccttg

SEQ ID NO: 176147 - DNA, 122 bp, Homo sapiens
cccctgatccccaggccgcgcgacttcaaacgcggcttcctcgcctcccagactggtccccgccactgagcatgcccagtcctgcccgccaccgccaccgacgagtttcaacatggggaatc

SEQ ID NO: 176148 - DNA, 122 bp, Homo sapiens
tgaatggctaaggctgagtctgctatcgaaaatagacgtcaatccctgtcacagtcaaagcgatcatttttgtttggtggctgtgcgctctcagagcatcttgactaacaggaccccacggt

SEQ ID NO: 176149 - DNA, 122 bp, Homo sapiens
ccccgccagatttaaaaatacttagtcgggagactgggggttggtctcctggcttggcgacggcggcggctcggtttgctggcgctaaggtaacagaagaggtctgccttgcccttcctccg

SEQ ID NO: 176150 - DNA, 122 bp, Homo sapiens
gaagaagctgtaaatgttttgtagcagccagcagctgtttcctgtggaaacctggggtgccggcctgtacagattctgtcctggggggctacacagtcctcttgctttgtgttaatggggac

SEQ ID NO: 176151 - DNA, 122 bp, Homo sapiens
agacacttctgtggatcgcctttttcctccctcttccaggggttagggcctggggaagggcgccacacgtctgaatgaagaatgaactacctcaaaaccagccatctactctgcccctctgc

SEQ ID NO: 176152 - DNA, 122 bp, Homo sapiens
ttggcctgctcccatcagctgagtctctggcctctccctcctgcagtcggtgctgggtttcgtgttgtacgcactggctggggccgtgggcttcttcacacattacctgctgccacaactcc

SEQ ID NO: 176153 - DNA, 122 bp, Homo sapiens
gacggcccacggcccacgccgccgccgcccgcccgccgccgccgccgccgccgcggctgccgcattcctgcactgataagacagaaatagtccggcggcccggggtctgcctgttgactcgg

SEQ ID NO: 176154 - DNA, 122 bp, Homo sapiens
gctctgaggccgcgtggggctggtggaggagccaccggtcgggcccccaagaccggctgacgtgggcctcgcctcgggcgactcccgccgggctagtggctggccgtgtggtgaccttgggc

SEQ ID NO: 176155 - DNA, 122 bp, Homo sapiens
cgagctggcagcaaccccagccccctaggttctggccacagcgaagagaacattcaggttcgagcccccttcatcctcaggccgggaggagattgaagtctctgacatgtcttttcaactcc

SEQ ID NO: 176156 - DNA, 122 bp, Homo sapiens
gcagggagacctttggagcagggcccatgtatgctgagaacactgctgctgccccctaggcggcctcggcaggcggccctgagtgctgtcttggcccctgcgccagccccacccccgcgtct

SEQ ID NO: 176157 - DNA, 122 bp, Homo sapiens
cagtcatctgtcaaattctgccaaccaagggccgcttcttgggggcgagagagccgcctccgttgtttcctcccagctcctggaacgtaattcttgctcttggtgacatcaagcaaatatgt

SEQ ID NO: 176158 - DNA, 122 bp, Homo sapiens
aagccacttgtccctgtgtttgttaatcatacttaaggaaggctctaacattctgaagaacgttctgtggttacttcctggcctataaaggatttaatgttccattgctgagtctactaatc

SEQ ID NO: 176159 - DNA, 122 bp, Homo sapiens
acccgccaagactccaactcacagaactggaaggcaatgcatccgtgcagttttcagccccgagtgtgtcgcaatgtgttacagcagcaataggaagctaatacgagcattatccaagggaa

SEQ ID NO: 176160 - DNA, 122 bp, Homo sapiens
atgccaaattatattgcagactgaacagacgtttatctatcccatttggcgacgaggactcgtggctggagagagccacacagcgtgtaacctgaagtcatctagattatggggaaactgct

SEQ ID NO: 176161 - DNA, 122 bp, Homo sapiens
attctcagatgcatactgtgctgagggtatgctcttaaaatttccaatttctgaaaggaccgcaggatggaaggctattttgtgtcttgtaaaaagcactggatcaggaatcaggagaactg

SEQ ID NO: 176162 - DNA, 122 bp, Homo sapiens
gcctgtatataggcaggtgtcaagctggggctcttcttattggacgtgagggccgaggcgcggggggctggtccatcctacctaggacgcccggcgcagcctccatttacataaagcccgcg

SEQ ID NO: 176163 - DNA, 122 bp, Homo sapiens
gtacaagaaacagggcataaaacaacaaataaggcagaattcctctctctgagggatttacgaggaaattggccacataaacagctaactggaatgaaatgtgataagtactgacatagaag

SEQ ID NO: 176164 - DNA, 122 bp, Homo sapiens
aacctacctgagtagtacggtgtattatatgagaacatccacttagcatagcaacgtctacggacaacccctgtagctcttcttctggattgttttctgtttccaaccatgttttcttattt

SEQ ID NO: 176165 - DNA, 122 bp, Homo sapiens
tgcagctgtcgctgccagttggggccacatggcctctgaggaatgtcagcagcaaggtcacgtgggcctctgctgcacccacccgcgagctgggacgtggcttccctgagcatacaggcacc

SEQ ID NO: 176166 - DNA, 122 bp, Homo sapiens
tgcgctacaaggaggagtttgagaagaacaagggcaaaggtttcagcgtagtggcagacacgcccgagctccagagaatcaagaagacccaggaccagatcagtaacgtgagctcttgccct

SEQ ID NO: 176167 - DNA, 122 bp, Homo sapiens
ggccgcccagcagcagcccagccgtccgcgctcctcgcggcttccggcccgccgcggtcccgccccttttatagccgcttatttgcatctcaatgcgccgattggccgcgcgggcccggggc

SEQ ID NO: 176168 - DNA, 122 bp, Homo sapiens
ccccgtgccacacggccaacacacgccacacgcccccgcgccacacgcccccgcgccacacggcccccacgcgcctgctgctgcttcctgccctggcacctgtcctccgctctcttctctct

SEQ ID NO: 176169 - DNA, 122 bp, Homo sapiens
gttctgagcttgtaggcaaggatgggcaaataagggctttgggaggaggtagggcgggggcgcgctaaaactcaagtcaagtttgaatgttaggatgaagataaaggaaacaacccctggaa

SEQ ID NO: 176170 - DNA, 122 bp, Homo sapiens
taaatgttggttgatatttttattgcagtatactgtaaagtcactgcattcgactatctccgctactacacatttacgcagactgatttccataaccaaaacacaagcacaaagctcatgcc

SEQ ID NO: 176171 - DNA, 122 bp, Homo sapiens
cgtccatgtgggaaccctaccgtccacgtgggaaccctactgtccacgtgggaaccctaccgtccacgtgagaaccctaccgtccatgtgggaaccctaccgtccacgtgggaaccctactg

SEQ ID NO: 176172 - DNA, 122 bp, Homo sapiens
ctttgactttggctgtcattcacggtaatgaatgccgctgtaattgaggcctttgtcaaacgctaggtttggttacgggagtggtcataatgtacacacagctccccacttacccacaagga

SEQ ID NO: 176173 - DNA, 122 bp, Homo sapiens
aaataaagaaggcactttggggtccaaggtagggtacttagatgtggaagcaaggggccccggggaggggcggggaggcggcggagagagcccggcgctgaaatggaggcggcccaggtggg

SEQ ID NO: 176174 - DNA, 122 bp, Homo sapiens
gtcatgtccgtgactgtgggccacagaagcctcctgggggagaggctggcagggaagggacgcagctgtcccaggcccacacaggagcccacgtggttccctgtaaaacgctcttcctgacc

SEQ ID NO: 176175 - DNA, 122 bp, Homo sapiens
gccaaacctaggctccagaaaccacgtccatcagctgcatacttactaccagctaggtcgcggcagcagtgatggatttatagttcctccaaacaaagatgggacccctcccgagggaagtt

SEQ ID NO: 176176 - DNA, 122 bp, Homo sapiens
ttgaagagaagcttcagggggcgtttattcaatttgcgaggagcccgcgaggagcaggtgcgcggtgactctgtggatcccaccgcacccgctgccctctttggtcctctcgctgtcaccgg

SEQ ID NO: 176177 - DNA, 122 bp, Homo sapiens
acctgagctggcgggcggggcttggacgctgccggggtggcgtgagcaagggagctggggcgctggggcgcacgggcccgggggaccagggtctggctctctcccgaggaatgctgagcagg

SEQ ID NO: 176178 - DNA, 122 bp, Homo sapiens
gcgccggaaatgacgttagtcgacagcggatgtcctgctggctgccagggcagcgtgggacgctacggcggatatggctgcagagcggccggctgggatcttagataggaggggtggatttg

SEQ ID NO: 176179 - DNA, 122 bp, Homo sapiens
cggagctggagctagtttttcatcatctgtcggcttctgcagaccaatgtcatcattccccgtcccctgggtggcccctcccccgccatcgttacgctgtcatcagcaagatcactgtcact

SEQ ID NO: 176180 - DNA, 122 bp, Homo sapiens
aaaagcctgtacaaatcttgtccctgggcagatgggtcagagcctgatgcttacaaaccacgcttccccccacaaccctggcaactgggattctgttgctttcctattgtgacacataagcc

SEQ ID NO: 176181 - DNA, 122 bp, Homo sapiens
gcaggttaactacagctcccagcatgcctgaggggcgggctcagcggctgcgcagactggcgcgcgcggacggtcatgggacttcagcatggcggtgtttgcagatttggacctgcgagcgg

SEQ ID NO: 176182 - DNA, 122 bp, Homo sapiens
gcggcagcgcgcatgcccgaacacgcacgccgggagaggtgcacacgcgcaggagtgcaccggaagtccgcctcccagggcccactgctggtctccggacaagtactggactctatttccca

SEQ ID NO: 176183 - DNA, 122 bp, Homo sapiens
gagtgacctgcggccgctctggcgctctgcctcctagtgagatgagtgtcatggcttgcccgggtcctggagttgtgctgagagagcacctgacctgtgatcccacccctgaaaacgggctc

SEQ ID NO: 176184 - DNA, 122 bp, Homo sapiens
gttgtagagtcccgagcccgggacccgcccctctttgttgcggtggccaatagacgcattcggaacatcggcggctgcccgggtgacttggttatatgtcacagaataacattcgagaatgg

SEQ ID NO: 176185 - DNA, 122 bp, Homo sapiens
cgcccgcagtaggcccgattcaaatctggccaatgatagtgtgtaaacaaacccaggccccgcctcccgacgaataatcccccgaccggcgagaggcccatttaacccgatggggtttgggg

SEQ ID NO: 176186 - DNA, 122 bp, Homo sapiens
aataggaatagatatcgctctgtctatcacaatagatattcctatctgcatcacccagagcgaagctgaatccttgccttcaaggccccgcaccacctgccctggcacctccctgacctcac

SEQ ID NO: 176187 - DNA, 122 bp, Homo sapiens
atgatccagtagaagcgctaaaatctcaggtaatctagtccccgaaatccctggataatgcggcccggagagtggggagaagtaaacatcaattcttccccaggagggaggagaaagccaag

SEQ ID NO: 176188 - DNA, 122 bp, Homo sapiens
cctgcctgtgggccttctaggtttgttcaccatcacagccaggcctcccgggtgcactcacgagaggaatgggggacacacctacacacccacacccaaagccactgtccccccatcatgtc

SEQ ID NO: 176189 - DNA, 122 bp, Homo sapiens
gctgtcctcaacacttcctcgtttggcagaattcaggagtggaatttctccagacacggtcggttcctgtggccccgctgcgccgcggcggcaccacctccacttgcgcctgtggctccact

SEQ ID NO: 176190 - DNA, 122 bp, Homo sapiens
acactgctcagggtgatgggaacggtgagagggatgtggtcgtgaccattactaggtgcacggtgcagctcatcggcaacagtgaagacagcaaagccagtggtggcccgggctggggccca

SEQ ID NO: 176191 - DNA, 122 bp, Homo sapiens
gacggaaagggcactgggccagtgtctggaactggcccgcacgcctcaggtcatctgtcacgatgccgtttgagagggaaagggcactgggccggcgtctggaactggcccccacgcctcag

SEQ ID NO: 176192 - DNA, 122 bp, Homo sapiens
tccagattgtcctccttgaagctgcagcaggaagcgggttttatatgtttgttgtgtctgcgtcatgggatagacttttctactgtaaaatgagattttttatgctatgctaaacacagatg

SEQ ID NO: 176193 - DNA, 122 bp, Homo sapiens
gccgatattaaacatttatataaatccatcctcacagggtcaatctggagataaactcaccgctgcagggggcggggaaggaggtgggaacacgctcattgacaacttcatttccatgagaa

SEQ ID NO: 176194 - DNA, 122 bp, Homo sapiens
catggggaccaaagttatgagatctatgggctacaaatacaggaccagacatttcggtttcgcctgaaattaagaagcagggtatgttttcatttttgttaagtgtctcgggagcaggtgta

SEQ ID NO: 176195 - DNA, 122 bp, Homo sapiens
ccgccccgggaggaaaagggcggggagtgggggcaggtcggccgggcagtccagcttgcccggcccagggcctgaccaccccggctccccatctggctggtgcatggcgcggggaagggggc

SEQ ID NO: 176196 - DNA, 122 bp, Homo sapiens
caaacataggtgtgcgtaggtacatctgtgtgtggtggccgcagccctggctcttgtcaccgcgtcaccacatgtccaaaatattcattgcatcaattcaagggcagtgagaggggggtggg

SEQ ID NO: 176197 - DNA, 122 bp, Homo sapiens
atgggtatgtcgggaggtcgggatcagagagcccgatgtttatgctgctgggccctgggacgcgcccatgttggttgactccaccatatgaagtctgttctgttttgcttcacaggaagctt

SEQ ID NO: 176198 - DNA, 122 bp, Homo sapiens
ctgcagcgccctccagacctgcagttccagtttcagccacgagatggcaatgttgctcttcgccggtagcccggcgggcgcgtgggctgagctgcagcagaactggggtgcggggacggacc

SEQ ID NO: 176199 - DNA, 122 bp, Homo sapiens
gatgaaatggttttgtctgtctaaacattggccctcggagctatttcatcagatagtatccgcagaatcgagaggcggatcccacctgtgggatcccatctgtgattagaatggcctctagt

SEQ ID NO: 176200 - DNA, 122 bp, Homo sapiens
tagaaagtgactaacatttgttgagcacctgctgtgtgcccggccctggccgggagccttcgtgcccacagtgaccccgtctgcaaatgtagttccttgccctactcgcactggggagcagg

SEQ ID NO: 176201 - DNA, 122 bp, Homo sapiens
ccacacccagccacgccctgcaggctcagaagcaccaccttcccggacgtgaggaacacccgggcgaggggagcccctgcaccctgaaaagtcctgctactgctctccttcgtaggccaagt

SEQ ID NO: 176202 - DNA, 122 bp, Homo sapiens
tccgcttcccgcccccggcaagggcgtgtcagctacaaggggcgtgtcatctctaggccccgccccgcgctgcgtgcccacgttgcgccggcctcgcgccagtccgctgggctgcagggact

SEQ ID NO: 176203 - DNA, 122 bp, Homo sapiens
aaggccaagagcctccactactccgggggccagctgacggaagtgcgtcactccaccctgcggggagtgccgggagttgtagtcaagtggctactaatcttccaccccgattcatcttttct

SEQ ID NO: 176204 - DNA, 122 bp, Homo sapiens
gctgtgtgcggggagccgcggcgaagctgcttccgcccgcgtgtcccgagctcgcggaggcgggcttccacgggcggccctgacccggtggtcctgacgctctcccagccagcggcgggagg

SEQ ID NO: 176205 - DNA, 122 bp, Homo sapiens
cgtcatagagtgatctgacgatgtccagtctcctgtaattcttgggcttgactaggcttccgacaacctggaggcattgctctttcagggtatacactgcagtgtgatgttggcaaaaacag

SEQ ID NO: 176206 - DNA, 122 bp, Homo sapiens
gatggggcactaaggaagcaccaagcaagctccaggagggaaagcaggcaaggctggagccgcagggaaagtaggctgcaaagggatgtgatcttggcctttaggatgtcattttactgtca

SEQ ID NO: 176207 - DNA, 122 bp, Homo sapiens
gcctcgcccacgaccagctgcctgggctgggaggcggtggggcgcacacttgggggcacacgtgtagcgtgcacgtgcatgtggggagtgggtgcagtgctgcgggatggacgaacggaaca

SEQ ID NO: 176208 - DNA, 122 bp, Homo sapiens
gggaaattaagacacagagaggttaagtaacttttgcaggcacacagcaggcagaggtggcgctttggacccaggtagcagggctcttcaccagtactctcctctacctctcaagtaattga

SEQ ID NO: 176209 - DNA, 122 bp, Homo sapiens
ctgccctagtgtgggtccagtgcagagcctctgggggcggggccgtgccctgcaggtgagcgaggagctgctcgtgcggagcaggcagggctgtgtggcagccgcgcttgttcctgaggatg

SEQ ID NO: 176210 - DNA, 122 bp, Homo sapiens
gagggacgggcgcccgccaaggggactcaacggcgcacagtgccagggtcgctgggcgggcgagggcccggaccccaggttgggccgtggtccccccagctcaacaaaagcagcgtgcccgg

SEQ ID NO: 176211 - DNA, 122 bp, Homo sapiens
tccaagcgccgattccttcccgctgttcagccgctgcgttaatcctccgcgggggcctaccgtgcgctgctctggcgaggcgttccaccagggcaattacccagctgaaagcactctcagga

SEQ ID NO: 176212 - DNA, 122 bp, Homo sapiens
gggtgcgaaccggggccggaccccggggaggagccgggaggcgagcggcgaggggcactgcgcggctgggtctgccccggggtttcgcactgcgccgcgggtcgaagtaccgcgagttggcc

SEQ ID NO: 176213 - DNA, 122 bp, Homo sapiens
aaattaaggatacagatcagctgaggaaagaaaaagatttatgtcgagatgaaacttcctcgtggggatccacaactgcaatactgccaggccacagcatcccacctctttcgcctggctgc

SEQ ID NO: 176214 - DNA, 122 bp, Homo sapiens
cgtttctaggcaaccgcagactccgggtccttagccgggcctgatggccctgaggcagttcggatgtgtcccaggaagtgcccatgtgtggtccgccgtccattccacacctctgagcgcct

SEQ ID NO: 176215 - DNA, 122 bp, Homo sapiens
ctgccccaaacggggcagagaatgagtaggtgcctgcagccaggggcgcgcccatcctttcgcacacaacaggctcctgttctctaggcagtgattaagtgagaaaaagagaagcctggctt

SEQ ID NO: 176216 - DNA, 122 bp, Homo sapiens
ccgtggatggcctgggccagtgcctcgttggcccgtccatctggtctccttcgctgcactcggtgttcagcatggatgacagcagcagcctcccgtctccacggaaacagcccccgcccaag

SEQ ID NO: 176217 - DNA, 122 bp, Homo sapiens
ggaggagcagccttaggagcagagcggaagtctcgcgagagtgactgctgcaggcagtggcggcgcgggcgcgcgcagagacggcctcgggcgcgcgcgcgcgcgcgcgcgctccccgcccc

SEQ ID NO: 176218 - DNA, 122 bp, Homo sapiens
aggcgcggggagagggctgaagatggaccgggctggcggggcgggggcgtcggggagcggcgggagctggccgggggcgggagaaggcggagacaaagtcttgcttcccgaggggagatggc

SEQ ID NO: 176219 - DNA, 122 bp, Homo sapiens
aagggagaaggggtggagattgggggtggaagtgtttgggagccggcgcgggagagatcgcggtctaaaggattggagctgaatgaagggctgaaaatccttctcctgagactgtgatgtgt

SEQ ID NO: 176220 - DNA, 122 bp, Homo sapiens
gaactgtggtttcaaatatccttaatgggaattctccacagtcgtttttcatcagggctgcgtgctgtcagagctttgattagcgcctcttccctgggaatccttttgtttggtcagtctag

SEQ ID NO: 176221 - DNA, 122 bp, Homo sapiens
gcccgctgccgacccctttgaccaatgggctgcagtcaggcggggcttcttctccccaaacgctcgctctcccgccgacatgcgcgctaaggtatgtcaagatggtgactcccggccgccgg

SEQ ID NO: 176222 - DNA, 122 bp, Homo sapiens
gctgtctcatgagattgtggtcaagatgccaagtgaggctgcagtcacctgaaatcttggcgtcccagatgattcactttgctgggaagttgataccagatgttataggaagatgactcact

SEQ ID NO: 176223 - DNA, 122 bp, Homo sapiens
aaggctcagggcaaggatcacatttagcttgactcaaagaaagcagatgccggagaagcccgtgcccgctttggctggggactctgaggaagtggagggagcgtttcacgggaatccggcaa

SEQ ID NO: 176224 - DNA, 122 bp, Homo sapiens
acacacgactgacctcagtcacttcggtaaactgcccttgctttccggaggcggcaggaacgtttcaggagctccaaggctctaggcgcctgcattcctcgccccagccggtagtctcctag

SEQ ID NO: 176225 - DNA, 122 bp, Homo sapiens
aagtatctgcccgccaggtcccccagggccccctggaatgccagggttcaaggtgagtcacgggtgactgggacccaagcaccaccctgtgctgggcaggaggcagctgggctcccatgggg

SEQ ID NO: 176226 - DNA, 122 bp, Homo sapiens
tgttgcagtaatctcctaggcgttggttgcaatttaatattcaagtgctccttacagtaacgtcatcaaccaactcgcagctgcccctaacaactaagccaagagctgcagaaggtcagtta

SEQ ID NO: 176227 - DNA, 122 bp, Homo sapiens
cccagcagatccctgcggcgttcgcgagggtgggacgggaagcgggctgggaagtcgggccgaggtgggtgtggggttcggggtgtatttcgtccacgagccggggagggggtactggccct

SEQ ID NO: 176228 - DNA, 122 bp, Homo sapiens
aagaactgaacctaagaggacctgccgagccaccgtagggactgtcggccaacccgcgcgcgcacatcttccacccgtggactcgtcagggcgtgaggacccacctcacgtgaccattagca

SEQ ID NO: 176229 - DNA, 122 bp, Homo sapiens
ccctgggcccagccccaccaccccggcctccacagctggagcggcacgtggtgcggcccccgcctcgaagccctgagcccgacacactccccttggctgctggatccgaccaccccctgccc

SEQ ID NO: 176230 - DNA, 122 bp, Homo sapiens
cttttgactaccccaaaatttaactattaatagcctgctgttgctgggctccgtggctcacgcctgtaatcccagcactttgggaggccgaggtgggtggatcacctgaggtcaggagttcg

SEQ ID NO: 176231 - DNA, 122 bp, Homo sapiens
tcaggggcgggaagagccaggcccctcccccacctcctgagccccaaaccgggttgtgcccgtgactgacaggcaaggctccgccctactccccgcccatttagcgcctcctgactgctgaa

SEQ ID NO: 176232 - DNA, 122 bp, Homo sapiens
tccagaactacgcttcccagaaggcccggctgcgactccatcttggatgacgtcgtgaggcgcggccgcctccagcggcctgagtgattgctgtcgggtttccgggagagggcgctgtcctt

SEQ ID NO: 176233 - DNA, 122 bp, Homo sapiens
ggctattgtaaggactcagtgttagcaagggaagacaccgcaaggtgaacccacagaacccggcagccagcgcccttcagctgcaagctgggtccgagtctcctcctcctagctggttgcct

SEQ ID NO: 176234 - DNA, 122 bp, Homo sapiens
tttaaatatataaatttcagcccaggtcagcctcggcggcccccctcaccgcgctcccggcgcccctcccgtcagttcgccagctgccagccccgggaccttttcatctcttcccttttggc

SEQ ID NO: 176235 - DNA, 122 bp, Homo sapiens
accacaacctgtagcccaggtgcctgcctcctgcctgcgtggccacctccccggactccccgaccctgcagggcaggccccaccaccccactgcctggcccctccggtcagcggcgtgggag

SEQ ID NO: 176236 - DNA, 122 bp, Homo sapiens
ggaagccagagtagctgaattgccagtgttttaccatttattgttaactcactagatactcgtgaaactccattaaaaaatgcccttgtattatacaaacaatccacacttgagcaaccttt

SEQ ID NO: 176237 - DNA, 122 bp, Homo sapiens
cgctggggttgggaaaatgcctacggaatcccctcccccaatgcaggacccagtccatgccgcctgggaatgtgctctgttccctccgggcaggaaatgtgccccagtctggaaggaaatgg

SEQ ID NO: 176238 - DNA, 122 bp, Homo sapiens
ccggccgggggcgggggtggcagggcgggaggcttcggcgctcgcggggagctgcttgtgcggtggccgagggaggcggcgaagatgtggtaggttgcagagcatttggaaatggggtgcta

SEQ ID NO: 176239 - DNA, 122 bp, Homo sapiens
aagaatcagtcctgctgaggttcaggagacagtgccgggcctggctgtggcgggaagctccgggagaggaaagtggacaggctgctgatacagtcttgcattgcagcagtgcttgcccttca

SEQ ID NO: 176240 - DNA, 122 bp, Homo sapiens
acgcaattagaaagggcacgtggtgtctgtctccttcaaggcagccaagtctgaggaggtcgcagtgcttgcctccaccctcttttgccacctcgtttcttggctccctgggtttggcatgt

SEQ ID NO: 176241 - DNA, 122 bp, Homo sapiens
acggccgcccccgaggcacctcagggatgggggcccgggtgtccctgcaggcgctggaggcggaggcggaggctggcgctgagacagaggccatgctgcagcgccacattgaccgtgtctac

SEQ ID NO: 176242 - DNA, 122 bp, Homo sapiens
gtattactacagaggattgcaaaacagaccattatctcaattcttattatcatgctcctacgtgctccccataccttaaaggaattttctgattctaaagagatgagcccgacaaacactcc

SEQ ID NO: 176243 - DNA, 122 bp, Homo sapiens
accctgactcagcatttccgggttcatcttccccccattcccgccatcccggctagcacgcgtgcccactaaggcgcgtcactctcaggaaaacgaaacctaactaacgccgcccttgcccc

SEQ ID NO: 176244 - DNA, 122 bp, Homo sapiens
gggtaaagcattttaaatttattttctcaacaacccaagagaatcaacaggcagggatttcgtattcatttaatacaggcaaaacctgagattcagagaggtgaaataaaatcccgaacata

SEQ ID NO: 176245 - DNA, 122 bp, Homo sapiens
aaaaaaaaggctcaactaataaatctattctaaacgactgagtcatttgttttgattacccgggtgattgccaaatgttaatttaaaactgaaataggccatgagctcactcccctaacaat

SEQ ID NO: 176246 - DNA, 122 bp, Homo sapiens
ggagaaagttagaagggtctctcggggtttctttcttggagcaggttataagggtcttctcgagtactttttaagtaacaagaaagctaaatagattttttggtagatacttgccaatattt

SEQ ID NO: 176247 - DNA, 122 bp, Homo sapiens
tcagtgtacaataggtttaataagcataataaacacttttaagaaaatacttaagaccctcggtctgccctcgatcttgctccctattatctcagatttccctgagaacagaatgagtggta

SEQ ID NO: 176248 - DNA, 122 bp, Homo sapiens
gaactgtgccatgctcagctatcattttctgcttataagaagtaagtgagagatcaggatcgttagagtctgtaaacacttgaatgcttagaaatgcaaagcaatgagctattctgcagggc

SEQ ID NO: 176249 - DNA, 122 bp, Homo sapiens
gcacatttggttaaacaagttttacttagttttcaggaatctattttatagacacaaagacgttcgcttaaataccatgtggttctgattagctggcttttggttaacccaaacatgcagtt

SEQ ID NO: 176250 - DNA, 122 bp, Homo sapiens
tacaatgccctatgtgatccaccttattacctctccgatctgctctaatcctcttccccccgcccccccaagaaagacatgaaaagggcagattgaaaagaagaggggacgagtaacagacg

SEQ ID NO: 176251 - DNA, 122 bp, Homo sapiens
gcagtaagcagaaggcagtacaagtggcacattctccttctaatgagcacagcacactaacgtctctcggagggggcccagctctcctcacgttcctctgggcccaggctccctgccagcct

SEQ ID NO: 176252 - DNA, 122 bp, Homo sapiens
gatgctttattaaccactctaggtattattctaacactttatgtgcctattaaattatcccgacatattagatttgctgaattgcagtccatatttcgtagatatgatagctgaagcacgga

SEQ ID NO: 176253 - DNA, 122 bp, Homo sapiens
tttttaagcctgtcggaaaagcgccgtattcgggtgggagttacccgattttccaggtgccgtccgtcacccctttctttgactaggaaagggaactccctgaccccttgcgcttcccgagt

SEQ ID NO: 176254 - DNA, 122 bp, Homo sapiens
aaccagctcttgcttcggtcttcagcttaacttgttgcaggcttccctttgtttgcagcccgagaagaaaatcatgtgaccagaaactgaccaatgaaaagtcaacttccccaagggggcgg

SEQ ID NO: 176255 - DNA, 122 bp, Homo sapiens
ggtgaaggagaaatgaacagaaccaggagaggatatttgtatgagaagaccctggtcagacgtatgaccttttgttaaaggatatggtcagctcatggcatttccacagagaaggtgccaag

SEQ ID NO: 176256 - DNA, 122 bp, Homo sapiens
cggtgccgcgcgggcggcgggggagggggcggtgactcagccgccctccgcccgcctccccggaactttgcagcagctggagccgccgttgctacaggaaccgaatgcttttgttccccaat

SEQ ID NO: 176257 - DNA, 122 bp, Homo sapiens
ggcagcgcgctcagccgggagtcgggcaagaggctcggactctgaagcccaattcatggccggaaaccagcgcagccgtgaccgcggcgcctggacgtgaggagccttccaagcggccggcg

SEQ ID NO: 176258 - DNA, 122 bp, Homo sapiens
gtccgagggcttgcagccttacccagctttcccttttccttacttggatacttttatgaccgttttcctgcctgacccccctgtctgtcctctgttgtcgccatcgtttttgccatgtccat

SEQ ID NO: 176259 - DNA, 122 bp, Homo sapiens
gtagtctcacattaggaggtcccttcaccattgtcctggtgagtccctgcactcctaaatcgaatagaatgttaactatacctcatgtctctttcactgattacttttgatgaggacatcct

SEQ ID NO: 176260 - DNA, 122 bp, Homo sapiens
tcacacctgcaggaggccacacgtgagcgtgtgtacatgtgcgtgtgtgcttgtgcagggcgctcccagcctccaggtgatctgctgccccagcacagcccatgcagagcagagctgggcag

SEQ ID NO: 176261 - DNA, 122 bp, Homo sapiens
ggctctttcttctctggttgaacaccctgcaccaatcagaagccagtgttactctaccaccgggagctgagaacgagcaaaggcaggaaaggaggggagaggtacagggagcaaatgagttt

SEQ ID NO: 176262 - DNA, 122 bp, Homo sapiens
tggaaatgggaggggagcttgcggattttacttaaaaatgtctagatttgtttttggctccgcgggtggactgagagggagttctgcccctcacactgtcctcctccctcaattgcctattt

SEQ ID NO: 176263 - DNA, 122 bp, Homo sapiens
agtaatcaggccactgtgctcggggacataaaacctgtggctgctgccattgcagagtcccgtcatggatcagagttcgtccctgggaaacaacttgtgccgacggaaggagttcttccttt

SEQ ID NO: 176264 - DNA, 122 bp, Homo sapiens
tgcgcccaggaggctagagatgcaggagccccagaacctgcggtgcagcgagtgcacatgcgcatagacggggcccaggagctgaccctggccctcccgttcgcttccggtgtagcatgcag

SEQ ID NO: 176265 - DNA, 122 bp, Homo sapiens
taatagaaggaacagagtggtctatgtttctttctttctctgggagattggatgtagactcgggagacctgagttctggctctgtcttatcaattcaaattgtttaatctctctgagcctca

SEQ ID NO: 176266 - DNA, 122 bp, Homo sapiens
agagaggagagggcaggtgtgtgtgaggcgcacgggacaggtcactgcagagaggggctccgccccgaggcaggtgggtgtgaggtgcccgggacaggtcactgcagagaggggccccgccc

SEQ ID NO: 176267 - DNA, 122 bp, Homo sapiens
ctttgttctagtatttaattaatatgctaactcacacagatagaattgccatcagccagtcgtcagggttccgggtcagctggttgacaagcagcctagtacctcccctcctttcccatccc

SEQ ID NO: 176268 - DNA, 122 bp, Homo sapiens
gaggagtaaggagtgcagacaggtgcagatgccgccccactgcctctccagggagttacacgaacgtgggtactctggtcactgacagtttagagaaaacgccacactgcagccattgatgg

SEQ ID NO: 176269 - DNA, 122 bp, Homo sapiens
agaggaggcgtgggtagggatgcttagcccgagatccgacagcagggaaccggagcgctccgggggaggggcttaatgctggggaagggatgtcttaaaagaggagaagctttaaattagac

SEQ ID NO: 176270 - DNA, 122 bp, Homo sapiens
tagggctggaactgggaggaaattcgagcatgcgtcccagccggaggctgagcttgcgggcgaagaacacggcagcgctgggaaccgggctagggctttccgtgtgggccgcgcctgccggc

SEQ ID NO: 176271 - DNA, 122 bp, Homo sapiens
agaccagcgcgggacgagcgcgacttggccttagcgcgggccttgcctccctgctttccgcgtcctgacattacggctaaaattgcagttacagcttcttttacaaggagaagaatgtggaa

SEQ ID NO: 176272 - DNA, 122 bp, Homo sapiens
caaataagtgtctttcctcgattttcctgtggcccggggtcagggactgaactaagataacgccaccatccgagggctgggggaccgagccagaagtccccttggacgaccagggctgggaa

SEQ ID NO: 176273 - DNA, 122 bp, Homo sapiens
gcagtcgccaggctccacgaagcggcgctgatactttgggggcttccgcctagtgcagggcggggcccgtgggcaggaccctcccccccccaggctcctcccagaaagagcgcgaggcggag

SEQ ID NO: 176274 - DNA, 122 bp, Homo sapiens
acaggatcatcgctgtggccccttacctgaagtcactgtaggggtggataatccaaaatccggccgacttgaccctctcctgttcgcgctccacggctttctggctgccgaacatccttagg

SEQ ID NO: 176275 - DNA, 122 bp, Homo sapiens
aagctgggcttgaatctcagccttgccacacactgtgtgttttagacatgcagtaacccccggatcaaataagagcatgtgtttgaaagacactggcaaactgcaaaagtctgtacaacgta

SEQ ID NO: 176276 - DNA, 122 bp, Homo sapiens
ggggttgggggacaaatgcataattgaggttaaaatagggaactacagtctctctggtctcgtagagttattcaaattatggctgctggataaggcttaaaataattatgttaatgacacca

SEQ ID NO: 176277 - DNA, 122 bp, Homo sapiens
cacggcttctaatagagctataacactcaccgcatggcccaacgttccattccttggaatcggtgacgccaagaacctcaggtcggagaacaaaaggcttgccgccatctcgggagctgcct

SEQ ID NO: 176278 - DNA, 122 bp, Homo sapiens
cagcactgacttccacacgtcatagaagcttccacgtgctccagcttcaagtatgctccacgccccattctccccttctaattttctatggcaatgacctaatctaacatttttgcaacttg

SEQ ID NO: 176279 - DNA, 122 bp, Homo sapiens
ctactccatcgggggcagcgatgacaacatcgagtccatggagcgcttcgacgtgctgggcgtggaggcctacagcccgcagtgcaaccagtggacccgcgtggcgccgctgctgcacgcca

SEQ ID NO: 176280 - DNA, 122 bp, Homo sapiens
agcggtcggctccaatccccactgagttgctcgtcctctccagaccccgcggaggggcagcgtctggtgtacttacatttgagaagaggaaaagcaatcccttagtccctaggcttggcatc

SEQ ID NO: 176281 - DNA, 122 bp, Homo sapiens
gaatatttgcttagctgatagatactgggcagagtctgacattggcattctgttcttcagcgtggcgttagtattctttctgattttttctaatccctagacaggtgttgatactaatcgtg

SEQ ID NO: 176282 - DNA, 122 bp, Homo sapiens
ataatacttacccctgagtttgcaggcattgaccgcattgtgccacctgatgaccctgttcgagcttgaaattttttcttctacctctttctttctctcataaaaccccagattttacctgt

SEQ ID NO: 176283 - DNA, 122 bp, Homo sapiens
tatgtatatgtcttagagacgtgagtctatctctgccttcaagctttcctgggctctcgtcgctcctcctcccgacccgcccatcccatctggggatgagaagattgagggtgcagagccct

SEQ ID NO: 176284 - DNA, 122 bp, Homo sapiens
aatggctttaaccatacacctgctggcttgttgtgctctgtgacataatttggcagaacacggcgtgtagcacacagtgggcgcaaagtaaatggcggctctggcggttctagcaccggagg

SEQ ID NO: 176285 - DNA, 122 bp, Homo sapiens
aggagccttccttcccaatagtcaggttttgtagaaaccctcagctaaaaacagtgatggcgaaaagaaggaaggaagaaaaaatgtcaatggcaatgagtattgtcactctgttctcctga

SEQ ID NO: 176286 - DNA, 122 bp, Homo sapiens
cagcgccccgggccacttggatcccggtctcaatttactaagcgaacccagaggatgccccgagtcctggaccgcagagccgctcgcgagaggcaccggggctgtaaccgcgcaacctcgtg

SEQ ID NO: 176287 - DNA, 122 bp, Homo sapiens
tcccctcgtctctgggttttggggttgttgtggggtggttttttttcttttttgcctgttcggctacttctggggcccggactgaaaagctaaccatgaccaaccattaaactgtggaatag

SEQ ID NO: 176288 - DNA, 122 bp, Homo sapiens
gttgggtgtctggagcctgaaggatccttccagaagctagggctgctggcctggctcagccgaggggaagaggctgtgcttttcctctgagaaagatgacgttgcactttcatattgaggaa

SEQ ID NO: 176289 - DNA, 122 bp, Homo sapiens
gactagccctgcggctcacctgccccttctttgaggggaggaccacacccatgagatcttcgagtcccccagggcctggaaaacactgggcatttccactagtggctgaatgaaaaaggaag

SEQ ID NO: 176290 - DNA, 122 bp, Homo sapiens
gaagacaaaggataaaaattaaaagctgacttgggtacagctacagaggacttgcaatgacgttcagtgagattgatcagaaagcatcagggatgcataagaagctcattcattcagagatt

SEQ ID NO: 176291 - DNA, 122 bp, Homo sapiens
ccccgtttcttttcgccccgcggccaccgcgccgcctccctcactcgcgccccgattctacggcacctccctggtgatcccaggtcctaacagggcggctgtgcctcctcctcagctgcact

SEQ ID NO: 176292 - DNA, 122 bp, Homo sapiens
tctaaaggatggacggatgtccgtccggaagggcagtccacgcagacccccgcccttggccggacagagagtctttcgctgccacccacccacggcgtccccagtgtccctctcccgacagt

SEQ ID NO: 176293 - DNA, 122 bp, Homo sapiens
ataatttgatagaactggctaggatttgtcaggcattgtaatgtactgaccctgaagtcccggatgcttccagggcgctaacggccggggacgcccaccaggtgggcggggcgagagtgggg

SEQ ID NO: 176294 - DNA, 122 bp, Homo sapiens
ctccagcgggctcagtgctgactaccaggatgcaggaggcctgcccgctcgccatagctgcgaagccggctgattacatttcaggcttttgtttattccccatcccaacccgctccttcatc

SEQ ID NO: 176295 - DNA, 122 bp, Homo sapiens
tatttatttcttgttcgcagtagtgtagaattaaaacaaacaaagcaaaacaagctctaccgagtctttaggcctggttcagggaagcctgcctgtgtattgaagaggtgtgagagccatca

SEQ ID NO: 176296 - DNA, 122 bp, Homo sapiens
ccggccgcgcggcagcgcccccggcccgatggagaccccgccgtgggacccagcccgcaacgactcgctgccgcccacgctgaccccggccgtgcccccctacgtgaagcttggcctcaccg

SEQ ID NO: 176297 - DNA, 122 bp, Homo sapiens
ccacaggcaagccgggagaggtgggtctcgaggggctccaccgggtgggtagaagagccgcggttgctttaaagacaagaaaagaaggtccagggctccctaggccccttcgatctcagcgc

SEQ ID NO: 176298 - DNA, 122 bp, Homo sapiens
ggcgccggcagcagcatctcgggttagaagcggggctgttcgctggatcgtccgcccgggcgcggcgagaatgcacaaccccgtccagagcgcaccacctcgatcctcggggggaaacggat

SEQ ID NO: 176299 - DNA, 122 bp, Homo sapiens
tcatagctttaaagacactgttgacatcctatggtgttggctacgtggaggagtcgggtccgagactgtgaggatgagggggtccaagtgccatgtcctgggagcagctacctgggggctca

SEQ ID NO: 176300 - DNA, 122 bp, Homo sapiens
gttcaagaactccccagtaataggccttggcagagggtcagtagaatcgcggaggtttctcgggttggggtcttgaggctacctcagtcttctcgtacagtccaaagaggctttgctttcaa

SEQ ID NO: 176301 - DNA, 122 bp, Homo sapiens
ggttctggggattacaacatggacatcattgcatgtcattatactgcctattatatctggcgactcacacataaataaacaaatgtctggaatacaaaccttatatgttttttctctcatgg

SEQ ID NO: 176302 - DNA, 122 bp, Homo sapiens
attaaactgaagttacttgctgtgatttattttttcgattctctacaaaatattaaaccccgtaggcagatttttgaacagggaaaaagaggtctatgcaattattttcttatccctgaaat

SEQ ID NO: 176303 - DNA, 122 bp, Homo sapiens
ggaggagcagagggtctggtgagtagaatagcggcctcctgtcagtcatatctgcctcaccgtaactggcctgcaggtaccagagccctttccaggagaaactgcaatggtatatacaaata

SEQ ID NO: 176304 - DNA, 122 bp, Homo sapiens
ccacctggtgaaaccctgtctttaccaaaaatacaaaaattagccgtgtctggtggcccacgtctgttaatcccagctactccagaagctgaggcaggagaatcgcttgaacctgggaggca

SEQ ID NO: 176305 - DNA, 122 bp, Homo sapiens
ggggttcatcttccataagggctcttacctccgcaatggctggaatgtcatggacttcatcgtggtcctcagtgggtaagtccattttctctctctgtctgtgtgtgtgtatgaagggggtt

SEQ ID NO: 176306 - DNA, 122 bp, Homo sapiens
caagcaaggctgcgaagcccgggggttcaggcagctgcagcgcttgggccaaggtagctccgctctctggtctgaagccacgtggccccaccccggggcggcctggcttttttatattgctt

SEQ ID NO: 176307 - DNA, 122 bp, Homo sapiens
gggctgtcccattaattagtccccatttgctcacatgaactctatgttttgatagggcctcgatcttattccgaacagggtaaagtagggactcgacgaccggaccacagctcctcccaggc

SEQ ID NO: 176308 - DNA, 122 bp, Homo sapiens
gctgtccccaccactgcagccatgatctccttaacggacacgcagagtaagcacctgctccggggcccccgcctcgagccgcgcacacccatcgcccggctgggtctcgcccctccgccggg

SEQ ID NO: 176309 - DNA, 122 bp, Homo sapiens
ccctgagcctaccctataggtagagaggacgccaatctggattcagaggtcccttttccgcggtaattggaccatttgtccgccagtgcaaaccaaccgacctttccttactttcgggttcg

SEQ ID NO: 176310 - DNA, 122 bp, Homo sapiens
tgtatagattatccactttcaattacgacattgaattctctgtggcgaattatgtatacacgaactcagcctattctgcagggttttcccacccccaacccacgaagaaactaagcctatct

SEQ ID NO: 176311 - DNA, 122 bp, Homo sapiens
gcggccgaggaacagagtttctcgaggagccgcatccttggaggctggggctaggagtggcgggaagaggtgcgcctgcgggggagagaagctgctgagtttgggcgcctggagctgctgca

SEQ ID NO: 176312 - DNA, 122 bp, Homo sapiens
gctcgaccagccactcctttggttccttgcagaagtaccactccacctccacctcctccccggcctccatcccggccaaagctacctccaggaaaacctggagttggagatgtggtatgttc

SEQ ID NO: 176313 - DNA, 122 bp, Homo sapiens
agagttgttaatgatttttctgaaaattagagcagattagagcagatttgtagttttcaacggctgaagaaataaatccttctaaatgagccagattaatcgtaagttactgatttttttat

SEQ ID NO: 176314 - DNA, 122 bp, Homo sapiens
ttgttactatttttttccaaatctattaaattaaacagcaagaaaattaatttactgtatcgagttcttctatttaggctgattgtttagttaacattaaacttttgcaaaagagattgtgc

SEQ ID NO: 176315 - DNA, 122 bp, Homo sapiens
gggtccgcgccccggaccatgctgggcggggaggtcgtcccagcggcggatgtggggctccggggcccccctggtgggttcgcccgcgcctggctctttgttggcccccagtctctaaggat

SEQ ID NO: 176316 - DNA, 122 bp, Homo sapiens
ggtggctgcgcctccctcctccacctgaccaacgcgacattcctcccctcacgcctggcccggtcccttccagggcaactcccagggatgtggtgacatgcagggttcaagtgttcttggtt

SEQ ID NO: 176317 - DNA, 122 bp, Homo sapiens
agaggggccctgtgtgtgtccctttaagagccggagcgctgcctccgcctcgcaggcgcccggagcctcacaaaagaacaggatgttgttgatttgtcaccaaaccacagagaggaaatgat

SEQ ID NO: 176318 - DNA, 122 bp, Homo sapiens
gcgtcctgaagaggtcgttgggtggggcgaggcggatgagtgaggcaggcccctcccactcgataagagatgccgccttgtctgtcaagtgtatgtcccatgctccactctgccaagtgcgc

SEQ ID NO: 176319 - DNA, 122 bp, Homo sapiens
aagagactaatatacgggcgaggttggtttggagtaaaccctggcctgggaaaatcgagacgataactgaaaagcagtcactgacggcaaatgagcccctgggacttctctccgcgagcttt

SEQ ID NO: 176320 - DNA, 122 bp, Homo sapiens
cagcgccagccccgcccgtcaccgttccgcgcgggaggggcagaagcccggcgcggcgaccgcccccccagcccctagggccggccaccggcagatccaacggtggcccctttaaggccggc

SEQ ID NO: 176321 - DNA, 122 bp, Homo sapiens
ggcctgctggagaaggatggccctccctcctgccttgtccctcaggctgcctgagggtttcgttttcttgtggctggcatggcctttcagggtactgtccccaagcactttatgaatcataa

SEQ ID NO: 176322 - DNA, 122 bp, Homo sapiens
ttggatgcagcaagcagagactctaggggactgatgtgcagtcatttgcttatttgcaggcgaatacacaatcatgacagctcacttccacctgaaaaggaagattggctactttgtcatcc

SEQ ID NO: 176323 - DNA, 122 bp, Homo sapiens
agggccagaccccaggcgcagtccgtgcccttctctcccaaggggcgaggactccccgcccgccagcccgcacacactcagacacactgcaagagtgaaaacttcacagttactttaatctg

SEQ ID NO: 176324 - DNA, 122 bp, Homo sapiens
tctgcacgaataactcacctaactcacaatcctcctccacccaacgtatcaccagatcctcggctgagaggaaaatgcaacttagctccctgcaaccctggcgttaccagcaccgctcgtgg

SEQ ID NO: 176325 - DNA, 122 bp, Homo sapiens
ggggtaaaagggtgtgcggtgaggctggtgggtgcaggaaggccaggtctgccccctggacgcggacgaaaagggattcccagtgacatccccgccccctcccgctgcctcggtccccacag

SEQ ID NO: 176326 - DNA, 122 bp, Homo sapiens
aagtgcccatctttcttaggacgcatgcgttaggggtttacacttgagcggaagaaggggcggaaactggaggcgggtccaaggcgcagaaagacacatgtgttactcaatcccaatctacc

SEQ ID NO: 176327 - DNA, 122 bp, Homo sapiens
gtaaaagctgtttccacccgccagggtagttctggctggggagccagaatggagctcacacgagcctgaagccaaatttctactcctcctacccccgaggaccttccaagcctgaccctctt

SEQ ID NO: 176328 - DNA, 122 bp, Homo sapiens
tggaaaccaccctctgagaaggctaggcatctcccttaccatctcagcaaaactttcttccggagaaaccccagcacacaaccctggggaagctggcagcgcccaggaagcctgactggtcc

SEQ ID NO: 176329 - DNA, 122 bp, Homo sapiens
ttgtccccaggtctctctttgcagagtctaggcagtgcctccccccggaggaggaggggacggacactctgactgctcaccggggtccaggtggccagctccttctgcagcagctccttgag

SEQ ID NO: 176330 - DNA, 122 bp, Homo sapiens
accactgaaaagacagggttaagaacacaaagtgagctgcacaccatatatggagaaacccgtttcttaaaactagtgatgaactcatgctctgttctgttttctcaaagctgaagtcggct

SEQ ID NO: 176331 - DNA, 122 bp, Homo sapiens
gatttgagtgaagttgcccttcatttctagtagccaagctttcttgagaggccgcttctgcgtattgagctgttaacccgccactcctttatttacatatcagttagatgaagttcacccac

SEQ ID NO: 176332 - DNA, 122 bp, Homo sapiens
ttcctgctgggtgccgaggtagcgaggtcaggggtcaagagtggaacaccctcactggcccgggccggcgcgggagggctgtgtgatggcctcggagcgcccggagccggaggtgaggggcg

SEQ ID NO: 176333 - DNA, 122 bp, Homo sapiens
cgacttctgaagagtcttgtgtaacactctttcatcagctaagctgggcagaggggaaaacgccaggccctggcctatgcctgtgaattgtcagcttggacgccagtccccacagtcttccc

SEQ ID NO: 176334 - DNA, 122 bp, Homo sapiens
gacagcgcccacccggaggaaagcctgacagatgagacttcgcaaggtgagaactcccttcgctccacacgcagcggaggcagctgcagggcgccgaccttccctgcctcattgcgccccct

SEQ ID NO: 176335 - DNA, 122 bp, Homo sapiens
ggagcactatgataatggaatgtgaagggagaaagagaaaagaaatgcagctgctattcccgccgctgctttagctacaaataaaatgacagagtgaagtgagctcgtccggagacaccttc

SEQ ID NO: 176336 - DNA, 122 bp, Homo sapiens
ggctgtgtgggcaccggccttgctgggcgtgggggcccgggtgtcctcgcggggatacgccgtgtccatgggttccagcgccgtctcttccacactcagactggtgctgggagggtgggcac

SEQ ID NO: 176337 - DNA, 122 bp, Homo sapiens
gaagaaagccgaggggaagcggaagtgccggatctgtttgggtcacgtgggggcggatgtcgacgggtgccgctgagaaccataaaacttctggccctgctgccaggactttccgtgggtgg

SEQ ID NO: 176338 - DNA, 122 bp, Homo sapiens
tcaaccttcctccacgttaccttgggcgtgtaggcttcccgtggacctgcccgcgccgcccgctcggctctcagctgtcaagcagccgcctgctccgcccgactctttccgctccgagccgc

SEQ ID NO: 176339 - DNA, 122 bp, Homo sapiens
tcggcagtttggaaggctggagatttttgttaaggacactttacactaatctcagttaaccggcaggccaagctaacctggcaaagaataagaaggaaagacacacacacacacacacacac

SEQ ID NO: 176340 - DNA, 122 bp, Homo sapiens
gatccctgccccgctcaactcgcactcccaggtgaggggagggggtgaaagggcgtaccccgccgccattttgtcccctggtccccgcaaggcattcagacggcccgcgccccaacccggac

SEQ ID NO: 176341 - DNA, 122 bp, Homo sapiens
gggtccgcggcccgggcgtggcgggttggggtcgcggcaggggttgctcgtgggaggagccgcactgacgcccggaagccggcgcggcctctcctccacccggccaagggcgtagcggactc

SEQ ID NO: 176342 - DNA, 122 bp, Homo sapiens
gttcacttacatttcccggctggccgctgcccgtggaggaaggactcgtgaggtggaggtcgtgacagccccattcattcaccatccccaggctctctgcaaggacaggggagcagcagact

SEQ ID NO: 176343 - DNA, 122 bp, Homo sapiens
cgtctcgggtgtcagctgcacccccaggtccaatgcggccgtgcagggttctgtccggcccggggaatccacgcatgcttcaggcccctccgcaaagtctgggcactcagagggctcggtgc

SEQ ID NO: 176344 - DNA, 122 bp, Homo sapiens
cccggtgctgttggcacggacccaggtgcgtgcgggcaggagcgatgcgtcagccgcaaacggagagttgtaggttcatagtagcggggcttcctgccttctacgacatttcagtgtgccac

SEQ ID NO: 176345 - DNA, 122 bp, Homo sapiens
ttcagattctttctcgtcattataaatagtatatcatagtgattaacatcacagtgtctgcggccagactccttgggtttgtgtcatggctcagccacttagcagctgtgaaatctggcaag

SEQ ID NO: 176346 - DNA, 122 bp, Homo sapiens
tgggcagtgcgggcggacctatcgccacgccggcagcctcctgaaccaccggcgcagccacgagacgggccagtacagctgccccacctgccccaagacctactccaaccgcatggccctga

SEQ ID NO: 176347 - DNA, 122 bp, Homo sapiens
tcatgagtgagtgacaacatgacacagtgacatgagcaccgcacaggccgccggccaagccggtcaaaccccccgacagaggctctgctgtcttgtccctagcccagcggggggccgggcac

SEQ ID NO: 176348 - DNA, 122 bp, Homo sapiens
gtggactagaaaggctcctggttccggccatactgataaatacggaaactccatctttatcggctgtataaacatctctggtctgtacatacatttcatacatcgtagggtgggaagcgagg

SEQ ID NO: 176349 - DNA, 122 bp, Homo sapiens
cactcccggccaatcttcacactccacgaagaatagccgtagggggcgtatgggacggtgcgtagagcgatgcccacgccggccaaccggatgtcggggcttgcgcgggagggcgggacttg

SEQ ID NO: 176350 - DNA, 122 bp, Homo sapiens
cccagctctccctcctctgagtgccatgtctagggcactagactgaagcaaaaccccaggcgacccactttctgtacctaccagctgtgtagtacagacagggctcaccgatcctctctgag

SEQ ID NO: 176351 - DNA, 122 bp, Homo sapiens
cacaaattctgtgaatgagtgtaaacatctttggctgacctctgaaccaagaatccatggcgaagcataaaaacaatctgagctgacatttgtgaagcactaccaacctcaatggtgatgga

SEQ ID NO: 176352 - DNA, 122 bp, Homo sapiens
cgcgcatggcccaaaaacttctttactagactatgagatcctcaagaacatgaactagatcgtattgcaagtagatacctgtacatggttgcagggcaaatcgatggagccctttaccttct

SEQ ID NO: 176353 - DNA, 122 bp, Homo sapiens
ctccgacagccggggagcttctgggattcagagtcagccagagctctgagtaaatttccccgccgtgtatgctatttggaaagctgtggccattgggctctgaacaataacttctaaaacca

SEQ ID NO: 176354 - DNA, 122 bp, Homo sapiens
aaatttctggttgccaaagttccagaaattgcttcctcattcctgagcctttcattttctcgatttctccattatgtaacggggagctggagctttgggccgaatttccaattaaagatgat

SEQ ID NO: 176355 - DNA, 122 bp, Homo sapiens
cgtttgttcttgtgtagggtggattttagccgtttggattggagtcttgtgtaggcttgacgcccacgcgtctctcactgcacgagggaggtggcagaggcacatcatccctttgggcacgc

SEQ ID NO: 176356 - DNA, 122 bp, Homo sapiens
tacacagggtagtgtacatacgtatgcacaccccggttgatatgcacccatgttttacgtcgctgtatctgctgagaggcccagcggggacgccccagtggccatgcacacgccctgcaccc

SEQ ID NO: 176357 - DNA, 122 bp, Homo sapiens
gagctcgctgaaggtctcagagggcacacactttaactgccgtcagcatcaacctaccaacgtgccttcctccctgctgagttggctaagcagatggatttcagctgggaagtgacaccacc

SEQ ID NO: 176358 - DNA, 122 bp, Homo sapiens
aggttcctttcctcccccttagcccctcccctcatccatcttctcccgccctcttgtccccgccctacccgctctgacaagaccgtcctaatgaccccctgaccggcttgtcctaccctagg

SEQ ID NO: 176359 - DNA, 122 bp, Homo sapiens
tgcccaaacaggggccaagtgcgccccaattccaagaatgaaggcagagcgacaacagtgcggacaccccggctgctagcccacggtgaagcccggcggggttgcccaccagttgcgaaagc

SEQ ID NO: 176360 - DNA, 122 bp, Homo sapiens
gggaggagagactggggacccccaaaccccgggatggagggtcctatgtgtactctgcaacgcgcgcccttgcctcttggggagggaatggggggtggggcggacttttcttctcccctgcc

SEQ ID NO: 176361 - DNA, 122 bp, Homo sapiens
aagggccttgctgactgacgagctgaacagtacgaacttgtccccaaggtccaaaaaaatcgccccaatcccccttccatctcgtcccattcttaacagaaccaagtgcaagggactcagcg

SEQ ID NO: 176362 - DNA, 122 bp, Homo sapiens
ggccggcagcgccttcacccggaagaggccttgtatcttctggagtgtgtaagtggggcccgggaggtggggaaggagttgggaccaaagaacgggaaggacacgttttatcggagaaaaag

SEQ ID NO: 176363 - DNA, 122 bp, Homo sapiens
tcgcgcaaaaggagataacaggccgatactaactagactaactcgacttccggacagcgtcggaaacggcgagccaacgagaggaagtcccgccctcacggcggggacgaagctagacgccg

SEQ ID NO: 176364 - DNA, 122 bp, Homo sapiens
tcattttggatttttggcctccagaactgtaagagatacatttgtgctggtttagttaaccgagcttgtggtactccaatgtgactttatctgaactttattacatctgcaaagacccgatt

SEQ ID NO: 176365 - DNA, 122 bp, Homo sapiens
ttcttctgagcctgctgaagtccccgtcttcctggctggacgccccagggtctcaccccacgctgtgcagcaacagctcagcctcctgatgttcagaactggccactgtgcggaccctcccc

SEQ ID NO: 176366 - DNA, 122 bp, Homo sapiens
tgcaggttatcaaagggacatcggtgctcacgcctccgccaagcccctcctcatccacagcgtctgtcggatgaggtgagtacagggtaagtacagggctgcctgcctgcaactgcctcagc

SEQ ID NO: 176367 - DNA, 122 bp, Homo sapiens
gaggaggagcacacacaccgagcgtccactgtgcccgcccctcgctccccccacaccatgcggtctgtgtgatcgtcccacagatgaagactagaggggctcgggaagccaggcctcagagc

SEQ ID NO: 176368 - DNA, 122 bp, Homo sapiens
aacttggacatgctctttgtctcacaattgagcaggaaaaattcccgtaggtgaagatgccgcctctcaagggccctttgtctgtagcttccactggtgaaataatgcggttatagtctttt

SEQ ID NO: 176369 - DNA, 122 bp, Homo sapiens
tgttgcgatccatccgaaggacgggcgcggccggtggtggcggcacagctttctgtcgcgcgggctgcagggaccgtcctatctctccatggtcagaagagccaaaagacgtgcctgctccc

SEQ ID NO: 176370 - DNA, 122 bp, Homo sapiens
ctgcggcgcagagacgccaggctcaaagggcaggagggccgtctgcaggcagcgccgccgcggctacctggaagcccagcaagtcacctgagtcctgcgggtgcctgggctgccaatctgca

SEQ ID NO: 176371 - DNA, 122 bp, Homo sapiens
cagaaagcctgatgcatcgagcagggccagacgccacaccaccctgggaggcagcatgcacgtgaggcccacgtttgtttcctgaagcctggtgtttatgcatgcctatcctcactgagata

SEQ ID NO: 176372 - DNA, 122 bp, Homo sapiens
cggcggcggcgcggggacaaaggggccgggggcgggggcggggggctcaccagtcggccgcgctctcctctcggatcacctcctcgtaagccgccagcagctccaggcggtggccgctgaag

SEQ ID NO: 176373 - DNA, 122 bp, Homo sapiens
ctggcccatagtgatctttgcagtgacccaggtaacagattgtactcttttctgacggttcgggcgaaggccaccactgcactgaggcctgggggcaatggtggggaagagactaggaattg

SEQ ID NO: 176374 - DNA, 122 bp, Homo sapiens
cagccccgtcctgccctctccccaggcactggcgcgctgatcctgcaaaagggtgagatccgcgtcatcaaccagaccacctgcgagaacctcctgccgcagcagatcacgccgcgcatgat

SEQ ID NO: 176375 - DNA, 122 bp, Homo sapiens
tcctccatggcttctgtcagagtttcaaagggtccaaagaccgcaaaagggttgagaacacgtgtcctggctgatggcttttagtcatgagaactattgttctcattactaaaaactaaaac

SEQ ID NO: 176376 - DNA, 122 bp, Homo sapiens
tgcaaatcccaaggccagctcaaatccaagtggagtgaacataattagattccatgattccgtatctggatggggtaaatggaatgcacaaatatgggtgggagaaatagttggcatatcta

SEQ ID NO: 176377 - DNA, 122 bp, Homo sapiens
ccgcgggacccggcgccagcacagctcctcccgggaggtgtgagtttgaaggaccagaggcgactggagcggaggcggcggtggcggcggcagcagcggcgtcctgctctgcctacctcccc

SEQ ID NO: 176378 - DNA, 122 bp, Homo sapiens
acacacacacacacacaccagcaacgcgcccagaccccaatccctggcagcccaactcctcgttctacagagaaggggtgaggatctccaggggtgactgctcacatctcggcacatgtaga

SEQ ID NO: 176379 - DNA, 122 bp, Homo sapiens
tcagagcagcgtcttgctgaaggcagcggcagcaactaagatggcggcggcgctctctctcgggtccggcgagggtacccggccgggggcggggtggcggcgggaggggcggggatggggag

SEQ ID NO: 176380 - DNA, 122 bp, Homo sapiens
tgggtctgcagtgccttcctccagcagccctgggagatgctccggccggggggcaggagacgaagctggcgtgacacacgtgcccttttcagcccccgaccagctcccttgtgaacccttgg

SEQ ID NO: 176381 - DNA, 122 bp, Homo sapiens
gcgactcaacctagacgtgcagtgtgacagctgccaggagctggccgtggtgccggtgttcgtggacccaggcgaagagtcgcaccggccctttgtggtggtgcaggctcggctgggcgaca

SEQ ID NO: 176382 - DNA, 122 bp, Homo sapiens
cagtttactgaatcctcatcgcttccgtctaggcagtcatcgtcgccatcacatttccaccgagcttggatacagtgtctgtttttgcagcgaaactctccagctttacatatgtgaggtag

SEQ ID NO: 176383 - DNA, 122 bp, Homo sapiens
gaagctgcggaccttcgccatgagtgttacagcttttaaggcggcgcgtctggagttgttcgttcctcccagtgtgtccgtagtctcgctggcttcagaagtgaagctgcagaccttcgcag

SEQ ID NO: 176384 - DNA, 122 bp, Homo sapiens
tgcctaattcggccggaagactttgtttggaaaaaccgagtctgggaagcactccagctgcgcccacctggcacggtgaggcctttgccaggacacggattcgcattgcgtttctccgggac

SEQ ID NO: 176385 - DNA, 122 bp, Homo sapiens
aatgagctcctccccaatccgcccgccccccttgcccctgcagatacagtcccctttccgcggatctcactggggaattgcttgggtgtgcccgcgcccctatagactctgaccccattcag

SEQ ID NO: 176386 - DNA, 122 bp, Homo sapiens
gcgccgaggccgccgcagaggccgctgggaggagcccgttgaggccctgcgcggccggcgcgctcattcacctatagtaaaagacatccctgtggccggccgacagccccgaccttctgggc

SEQ ID NO: 176387 - DNA, 122 bp, Homo sapiens
aattagaaagcaagagcgctggttatttttccttccatattcctattactctatgttacacgggtctgtgtttggccctgtttaatcactttctgtctttgaaccctcacagcaaccctaaa

SEQ ID NO: 176388 - DNA, 122 bp, Homo sapiens
tagtgggaggaatgggagtcgggggcggggggcggctgcgtcagcgaatggtgtggacggcgcataaacgtggatgtagcgaatgataaggcagtgaatgaatgtcagtggtgggcagccgc

SEQ ID NO: 176389 - DNA, 122 bp, Homo sapiens
tcggggttctcggagttggcaaagtcgatgagctgcttgaccagctggtccgccttgtcccgcagccgggccgtcttgcgcgtgtaggcggccagcagcgagcagaactgcccaaagtactt

SEQ ID NO: 176390 - DNA, 122 bp, Homo sapiens
agccattcccccctctaaatgattcaatccaatagggaaggggaccacaggacaggcttacgctcatcaggactgtcctgattcacgaagaaaggggtggccaggttctgccagtgtggatg

SEQ ID NO: 176391 - DNA, 122 bp, Homo sapiens
aattgcatcttctttatgtgttgctgcaagcttctctgtctgcaagataatggatcattacggcctgctgtgtacaaacaccaatatgcttttaaatctggttctcaagcttatgaaaaagc

SEQ ID NO: 176392 - DNA, 122 bp, Homo sapiens
ggagcccagtgtggttgaggtcatctgcgagcgcggctaggcgcagccgctgccatgcaccggtctgtccctgcaccccatggcacccaggatctggtctcggtggtccttccccgcaggca

SEQ ID NO: 176393 - DNA, 122 bp, Homo sapiens
gaaacatgtttcctctcctcatccgggaaagtgacacttcccggccggctgtgcagagctcgtcaccaggccctgctgaggcctgtggcagtaaccgcaggtctggactagaagagagcagc

SEQ ID NO: 176394 - DNA, 122 bp, Homo sapiens
aactggcttgacccaggcaaatagaatcagtgaaaagcctggattggcacctagaaatatcgacttccagataaacacaccttgattttatcatgcggtctctctgatatatctttatgggt

SEQ ID NO: 176395 - DNA, 122 bp, Homo sapiens
agtctcccaggcagcactctggactggcaggccaatcactgcaatggacagcaaagagaacggaatcagtgttgctgccagccctgcagttctcctcagcataaccactaaagaggaaattt

SEQ ID NO: 176396 - DNA, 122 bp, Homo sapiens
ttccccaactaaaggtaaaagtccatagcaacaatcctccctttctctctgcacccgggccgctttcccgcggagactacatttcccagaatgccccgcgggctgggacggcgcgcgcagcg

SEQ ID NO: 176397 - DNA, 122 bp, Homo sapiens
tgaaaactccaaaagggaaatatttactcagaggtctattcaaatttgcttagtctctgacgttttcctgtgtcgtacaaatccctcgtgcggcaaaagtagtttgtctttactaggccacc

SEQ ID NO: 176398 - DNA, 122 bp, Homo sapiens
gcctgtcccactgctgagtaaaccaaggccctggaatcttgagggacaggtccaaggacccggaccaagggaggagaggtgtctacctccagaaatgagctcaggagttcttgcacctgcct

SEQ ID NO: 176399 - DNA, 122 bp, Homo sapiens
gtctcggcggtctggaatcctcctaggccagcgaaccttactgaacactggcgaggactccgcctctaggaatagaatcgcggggtaggtggggtcgtctggaggtagctggctccgcccgg

SEQ ID NO: 176400 - DNA, 122 bp, Homo sapiens
accgtcagtgacgaagaagcccttgcgccttccttccgctaggtggcggtaggagttcggcggaccgagaggttccgcgcccacttcgcggcccagaggactgagcccggcctccggtgcaa

SEQ ID NO: 176401 - DNA, 122 bp, Homo sapiens
cggggctgggggccgtatttttagccgatagtgagttgttctcctatctttagctgcggccgcgaatgtcctgaaacggatccgggctgggctgggctccgcccgggtaggagtggggaggg

SEQ ID NO: 176402 - DNA, 122 bp, Homo sapiens
gaatgctaacaagcccagcatcccctggggctgtgatcatggtggatgaggaagcctcaacgtagattcctgaactcaaggtaccagcaagaatgccttctcccagtgtgctctccccaaca

SEQ ID NO: 176403 - DNA, 122 bp, Homo sapiens
acggaagcgagcgggcgcgggcgccgcgcagatggcctgggcgagccaggtctgaggccccgctccccgaaacgtgaccatgtggattcaacagcttttaggactcaggtgagcgacccggc

SEQ ID NO: 176404 - DNA, 122 bp, Homo sapiens
gggggcctccccagagccgcccccaccggacgccctggccgctccctatgtgctgtaccccggcttccagccagtgcccgtgacggccttgatgccgctgcgctgctcctctcagctctccg

SEQ ID NO: 176405 - DNA, 122 bp, Homo sapiens
cctcccaaagggctgggagtacaggtgtgagccactgtgcctggccacgtctaagtacttcgacatctacttctgaactgtatggagattaagtgtcaaaggtgcagccaacattcttgggc

SEQ ID NO: 176406 - DNA, 122 bp, Homo sapiens
gaaccgaggggcagctcctgcagacaggccctgagggctggctgccacggaaacaacaaccgggctgagctgagacctgagacacgaggtccccttgctccacgagcacctggggacccgcc

SEQ ID NO: 176407 - DNA, 122 bp, Homo sapiens
gggttgcctcaaaactgaggcagccagctgttgggtcaaagcctgtgcatactgctcttccgataccaaatcttggcactactgggtcacagcactgttcttcaagacctttggaacttact

SEQ ID NO: 176408 - DNA, 122 bp, Homo sapiens
aatttctcgttggcgacgaatgctaaccacgtgtcgccattttgtgttcaggaaacatggcggccgccccaagggtaaggaacaggggaggcggagtagcgccacgttagccgctttccctg

SEQ ID NO: 176409 - DNA, 122 bp, Homo sapiens
tcccccttccctctaagactcgactgtggggtcaagagagtctgtaattactgtggctcccgggaccccagccacctcccctgttatcgactcaacagggctcgcgttcattacccagtgcc

SEQ ID NO: 176410 - DNA, 122 bp, Homo sapiens
cccgccccgcgtgctggccgcggtaaaagtggtagcagcggaggcgagcggagggtttcccgcggcgggtgaggcgctgggtatgctgggaaggtggggtcgctttggggttctgtgtgcag

SEQ ID NO: 176411 - DNA, 122 bp, Homo sapiens
gagagcttctcttggtggcccctgagctgggcacctgaatttggtttgcaattcacttggcggggctgggtgtagcctcaactatgaaaagttaggcctgatccataagctgaaggaaatca

SEQ ID NO: 176412 - DNA, 122 bp, Homo sapiens
taaatgttgaaatgcgatgatttgagtgcttttcccctttactctcctctttccacccgtcgtggacagcctgggacagttagttgtggaatactggggaaatcaccagaactggtgtccaa

SEQ ID NO: 176413 - DNA, 122 bp, Homo sapiens
cctccttcttcaggctctctgggcagtccccgtttaagagcatgactgatggcagctctgcgggtgacaagaacgggtcagaatcaggcagcctcgctggtcggcggggctgtccgcctgac

SEQ ID NO: 176414 - DNA, 122 bp, Homo sapiens
cataagccgtctgcagagagcagagctaaaaggtcactgtaacactccctctggggctttcgtggtcacaggcactcccagcccccagatgcagctgcaggcaagcacagagttggctcctg

SEQ ID NO: 176415 - DNA, 122 bp, Homo sapiens
gccagtgagctctcagcctcagtttccccctctgtaaaagcagaggtgggtggtgtcaggcgtccttggggttgggtaagagggtgagagtgcttcacgaggtgctttctgagtggggcaaa

SEQ ID NO: 176416 - DNA, 122 bp, Homo sapiens
tccagacccctcggccctcccacgacccccagttcccgggtccgaggttctgggcgccagcggcggccaccgcgccgcgcgagcagcttttattcgcactctctttaactcgccctttctgg

SEQ ID NO: 176417 - DNA, 122 bp, Homo sapiens
ctcggcttccaggatgagcaccgaggccaattgcgcctcgcttttggcggtcttccacagcgactcactgctggacccggccatctttgcagaagtcagcaaactggacggtgcggtgcagg

SEQ ID NO: 176418 - DNA, 122 bp, Homo sapiens
tgggcggggaccaggtttttctccactgcctaggcaatggacccaggctctggctgccaacgggtgaagagcctaggtgtttttgatctgtgccttctctgttcctcagagatatgcgggcg

SEQ ID NO: 176419 - DNA, 122 bp, Homo sapiens
gattacaggcgtgacccactgctcccgacagagtattcattagtttcattgctgtcttttcgtccatgtaagctttgaaacagtgagaagatgcagccctgttgagttggcaactaatgaaa

SEQ ID NO: 176420 - DNA, 122 bp, Homo sapiens
caatactgcactcagaccagcttgagtagacatttcttcaaaaaagatatataggctgagcgcggtggctcttgcctgtaatcccagcacttggagaggccgagggggcagatcacctgaag

SEQ ID NO: 176421 - DNA, 122 bp, Homo sapiens
gagcgcgcggggtgcccgggttaggggccgggaacccaggtgaggggcagcccaggtgagcgcgcgtggagcccaggcgagggggctgggaagcccgggtgaggggaccggggatcccaggt

SEQ ID NO: 176422 - DNA, 122 bp, Homo sapiens
ccgcgcgctgcaggagtataagccagccctgctctgcgcttccagctgcgtctgcccaagcgcggcacgtgctcccggcactggcgcgagagagcgagcgccaccgccgcgggccccgcagc

SEQ ID NO: 176423 - DNA, 122 bp, Homo sapiens
cccaggtgatgctgcgggtgttgggcagactggagaagtcctggaactctttgtagtcagcgcggtcctcctcgacctgtgtgcctaggagtggggactgcggtggcggggtcatgcagcgc

SEQ ID NO: 176424 - DNA, 122 bp, Homo sapiens
tacggtgatggacacagggggtcttctgcggtgatggacacagtgctgcgcggcagcggacggcacagtccagccttgtctgcgtgaagcatgcagttctggtggcaaagagctggctccat

SEQ ID NO: 176425 - DNA, 122 bp, Homo sapiens
taccaagaacaaaccctggtcaatgagaaatcaatgcttcctctgaaagccagcaacagccggtgctgtcacacccaagaagtacaggtacctcagtccaaacatcaggtctcgaatattct

SEQ ID NO: 176426 - DNA, 122 bp, Homo sapiens
gagctccccatccagatgtacaacaaactcttggagacttggatgtgttacacagggggccggtcgggtttccatttaggaccaggagattataatcactttattttagcaacctccttact

SEQ ID NO: 176427 - DNA, 122 bp, Homo sapiens
gggggcagcaacttaaaagggggagggaactgcggctaaggagacgttcggtgatgggagcgcaatatatgaggggatacagtgcctcaggtttaaaagagcaggaagctgagtgagaggtt

SEQ ID NO: 176428 - DNA, 122 bp, Homo sapiens
cggtcagactggtgatgtcccctggggtctcgtcgctgccaccaaaggaagcataatccacgaacgagtagatcacgttgttgtcctcgaaatcccagcgggaggccagtcccacgtcgaaa

SEQ ID NO: 176429 - DNA, 122 bp, Homo sapiens
agggcctgtggggcctggccagccaggagacagtcttggatccgtaccatagcttctgcccgctgctcctccactggcacctctgaggccgcatcaaagggaaccacggagtccatgctgag

SEQ ID NO: 176430 - DNA, 122 bp, Homo sapiens
atggccctactgcttcaactgtgtggcagaatgctttcttcacctccttttcatagaattcggaggatactgctaaccctgcagctctctctagtggcaggatgcattctttcatggctaca

SEQ ID NO: 176431 - DNA, 122 bp, Homo sapiens
ggcactcccccgggagtgagggttgctgggcctgatgacgtggcttggcaacgtccctaccgccgctgcttcccgggaacctggcgccgccggaactgatcgcggcctagtcccgacgcgtg

SEQ ID NO: 176432 - DNA, 122 bp, Homo sapiens
tgccccatccatgtgctgtgcccaggctgggctgaaccctgagagaagctgacctgggcccgggggggttctcaccccacttcctcgagtgcgtccagacgtggggcggggcggggtggggt

SEQ ID NO: 176433 - DNA, 122 bp, Homo sapiens
gaactcgctgggcaagtcgtgccccgcgtgaacacacagaaggggcttggggaccgagcgcggcccatcagtccctcagaccctgaggacccagaattccctaaggggtccgaatccgagtc

SEQ ID NO: 176434 - DNA, 122 bp, Homo sapiens
acacccaggcttgccgagcagcagctcgaacccgcgccccggccgcactggggcggggcacgacggccccaagaagaccctccctgcagcggccccctgcggctccgctctgcttttaatca

SEQ ID NO: 176435 - DNA, 122 bp, Homo sapiens
gatgacttcgggtgcccattgaggtttttagtatatgcaaggccctgtgtctcggccctgcgtctccaatcctaatgttctcatctataaaatatgacttgagggcggggcgcggcgactca

SEQ ID NO: 176436 - DNA, 122 bp, Homo sapiens
tgaccttgtgatctgcccgcctcagcctcccaaagtgctgggattacaggcgtgagccaccgcggccagccttaatctgtactttcaaaatgtttacattgctgcaggaaaagataaaatta

SEQ ID NO: 176437 - DNA, 122 bp, Homo sapiens
acctgagggtcattgatgatgccagggtaaggaagtgctccaacgacctgaagcggtgcacgtactatgagacgtgtgctatgtatgggctgaacgtggaaagggacttccaggaggttgcc

SEQ ID NO: 176438 - DNA, 122 bp, Homo sapiens
gaggtaatgccctggggctccaccagtccagatccacagggcgcagccatgtgggagtggcggctgattgttacccagtagtgttgatagcacattattcataacagccaaagagaggaagc

SEQ ID NO: 176439 - DNA, 122 bp, Homo sapiens
gcccccactgacaccttatacccttgatctgatcataaataagaagcagcccggggacctcgagactgaaactgatttagagacttctgggagcttttttcacttccctcctcccatccggc

SEQ ID NO: 176440 - DNA, 122 bp, Homo sapiens
gctgcccgggacggggctcggggcgccccctgctggagccccctccggacagtcccggggcgagagcccagcttcccggccgggtaggggacacctcagggctcccagactcccgggagagc

SEQ ID NO: 176441 - DNA, 122 bp, Homo sapiens
tccgcgggtcaccccaggaaccagcggctcccgaccacgctcgcgcggaccacggaacagcgacgcgcaagcaggtctctttcgtcagcgtaatccctccgcagaaagccgcgcactagttt

SEQ ID NO: 176442 - DNA, 122 bp, Homo sapiens
caggaagcaaagaaaaaggtctagttttgctttgagaggtcaacaggagacgtccaaggtcgcacagatgggacaggactaaaagccaggcacgacacttccgcatagctttccctgcaccc

SEQ ID NO: 176443 - DNA, 122 bp, Homo sapiens
ggacaggaaggggaagcacattgtatttctcctccccattctgagtcagtgtgcctgagacgggccattaggagaggagagggttttaaaggggatggcttaagcattttaaataatttagc

SEQ ID NO: 176444 - DNA, 122 bp, Homo sapiens
acaagtaactcttcctagttcagaccgggaaacctcatcacacattgggctgtggctcctcggctgcaggtgcctcactggctgacaaggatctgagtggagcttgtgctgctccatcggac

SEQ ID NO: 176445 - DNA, 122 bp, Homo sapiens
agctggcgggaatcgggggcggtgggtttcggccccagacgcggccaacccggctctccccgcaatctccctgtggagatggagctggaggcccagccaatgagactccccctcattagcat

SEQ ID NO: 176446 - DNA, 122 bp, Homo sapiens
taacttttccgggggatggatcggctggttgagaaagaggacacgcatactcggtgtgaacgaggtcacgaaccctctgaccccagggagagatttctgccaagcgtaaggtgtctttggat

SEQ ID NO: 176447 - DNA, 122 bp, Homo sapiens
acaatctaaaagtaattattacaaacaggctgcttgggaacacctgctcccgccgtccctcggaatcgctaatgttcctgcgcccagcactgacaggcgcgagggctcctcacgccccgagt

SEQ ID NO: 176448 - DNA, 122 bp, Homo sapiens
acaggcagggctgctccggccttcgtttagcagcttgattgaggcgtcattggcacacggcgaactgcgcgtcattaacgtgggcggttcagtgagttctgaggaacgcatagcaggtggat

SEQ ID NO: 176449 - DNA, 122 bp, Homo sapiens
tctaggagtctcaacctgagcattagcctggcctccgcttccactgagcaggctgcccttcggcaggtgacggctgcactgggactccatttcctgctgcataaaacgagtagattaaacta

SEQ ID NO: 176450 - DNA, 122 bp, Homo sapiens
cctgctagggacagcagggctcctgagtggcagatgctcgcgcccccgggctgcgtgtgacgccctacacccttgggacagcaacgaatgcctcaggggacctcagcaacacattcggattc

SEQ ID NO: 176451 - DNA, 122 bp, Homo sapiens
ggcctacggggatttatccgcagcccccggatctgagagccgtctgggccttggggtttccgggcgcgccccgacaacgtcacccgcagaccggccaatcccgccaggccgcggcccagtgg

SEQ ID NO: 176452 - DNA, 122 bp, Homo sapiens
ctcgctcagcgcgcggcgaccccggggaatgccgggagggcggggtgcctacgtatagggcgctgtcaggaccggaaaaggccccaccgacggcccggaaggtgtcctggggcccgaacccg

SEQ ID NO: 176453 - DNA, 122 bp, Homo sapiens
tgcaggccttttgttggcgcggggtgggtaaggggttgtgcagagctaacgctaggaaggcgataggagctggctgccctttattgagggcttgctcctggctaccgcattcataacatctt

SEQ ID NO: 176454 - DNA, 122 bp, Homo sapiens
gctcagatttctgaaatgctattgacctgaaaacatctcatgaagttattagtttgaacgcgtggtggcggtacaagctaagagagtgaatgaaagctctgcagactcggtggactccgttt

SEQ ID NO: 176455 - DNA, 122 bp, Homo sapiens
gtctcaaagcgccagcgcccctacggattagcccccagggatctctgagcctggtatcctcggtggaaacgtttaatggttttgcgctgagccatacccattctgcccttcacctctgagac

SEQ ID NO: 176456 - DNA, 122 bp, Homo sapiens
cagacgcaggtctggtagacgtcttggaggccagggaggtgccagtagctggaggagcgccgggagttgaagccccgcgccaactacgcagagaaaactgggcgccagatttcctagaggaa

SEQ ID NO: 176457 - DNA, 122 bp, Homo sapiens
caccttggtagattggcgtcaatttgggtcttatacataaaactgcctgacaaatgacagcgttcaggtagggattatttagttaacacagaagttatgtgatttatattttttaagaacag

SEQ ID NO: 176458 - DNA, 122 bp, Homo sapiens
gggttacaacagatgatgcaagaaatctctgcccagccaccaactaggtttatgatttgacgaggagtctcagtttatcctctagtctccagctagggccacagctaaaccattcaagacat

SEQ ID NO: 176459 - DNA, 122 bp, Homo sapiens
ggaccctggtgttcaggtaggcagctccggttgcagtctgcccctctgagtcactccaggcggtgacctcccccaacccgccctcattcctgaacttctttcctggcacaggactcactgtg

SEQ ID NO: 176460 - DNA, 122 bp, Homo sapiens
gcgaaccggaccaatcagcggccgcagagtgtgggaactgtcgccatggcagccaggaggcgggcgcgcgcggcgggaggaggggcagagcggagcggtgggccgggggctggaggacaggt

SEQ ID NO: 176461 - DNA, 122 bp, Homo sapiens
cgcccctgcccgggcgcatgcgctgccggagcgcgagggtcggcttcgggtgtgtggtggcggcagagctgagctgcgaggcccgagagtcagaacctgggggagagggatggtctctgcac

SEQ ID NO: 176462 - DNA, 122 bp, Homo sapiens
tttctagccttctccattccatcaaactcccagaccccccacacttccttcagcaggtgacgtaatctcttacttcaggaagagaggcagcccactgttatgctataatcccacaccaactt

SEQ ID NO: 176463 - DNA, 122 bp, Homo sapiens
cacacctagtcatgggtgcgcatgagagaacacaaagactggctctcctgcacaagtgcccgaatgagcacgcatacacacatacaccccatccctttgcacaaatccatatgctctcacaa

SEQ ID NO: 176464 - DNA, 122 bp, Homo sapiens
cttcgaagtaagaactcagagggagctcggcgctcccgcagcgggtcccccacccaggcacgcccccggcccggccccgcccacagcactccccactcggccccgcccacagtgcggccacg

SEQ ID NO: 176465 - DNA, 122 bp, Homo sapiens
taacaaacaggtgaaaatgtccggtctttttcttcctggtactagttgagtcctaaagtccgtacttaatgcatagcgaaaaagcgacctaacaaaagtacacacccaaataaaaacatacc

SEQ ID NO: 176466 - DNA, 122 bp, Homo sapiens
ggacacgaactgcgaagagaatccttgctgagtggggaggcccacgcgggggggcaggggcgggcactgtaatcctgggtacggcacggcctgtcccgaactcatggccgcagtaaacgggg

SEQ ID NO: 176467 - DNA, 122 bp, Homo sapiens
tacctgtgcctagaggtgatttgaagggcaggggccgagagattcgtagccctgctgcggcgccgtcccggagttccccggcccagaccagacccgcggggcgccctcagcagcccgcccgt

SEQ ID NO: 176468 - DNA, 122 bp, Homo sapiens
agggcagtgtgaggaccgaagggggctgttaagtgctcggcgcgcagcgagcactcaggacgggtggcagcggtcacctttgtcgccaccgtccaagcctttgcagaggctcagggccgagc

SEQ ID NO: 176469 - DNA, 122 bp, Homo sapiens
gtaaaggaattaatattccccacttcctcctagtttgtctcccctcctccctctatcaaacgactgatttttatacatgagataatagacaagccttgggtgacctgtttttttttttcttc

SEQ ID NO: 176470 - DNA, 122 bp, Homo sapiens
ctgccagcgccggaaaataaataaataaatacataagtgaaggccaggaaatggcaacggcgcatctcaagtcagccttcctgaaatccaataggtaataaagaccaagccccgcgcttcgg

SEQ ID NO: 176471 - DNA, 122 bp, Homo sapiens
gcgattccagagggggcgaacagcgggggtttccagcagggttccccgaccctgtttccccgcgctcgccaggcctgttcccgccgccccagccggggtgcatgggattagggaggaacctg

SEQ ID NO: 176472 - DNA, 122 bp, Homo sapiens
tcttgcgaggcaccggggtcccggcttttggccacagacatccgagcgccttctgttgcccgtggcgcatctttcatgtgggcacacccaggagtggagtttccgggaaacagacgtttccc

SEQ ID NO: 176473 - DNA, 122 bp, Homo sapiens
ctccaggatgtgtgggtgacattccacgcctgcgagagacacactcatcagctccaacttcggcgacggtggcggcggctccgttccacgtccgcctcctttggccttaatatttaattttg

SEQ ID NO: 176474 - DNA, 122 bp, Homo sapiens
gagtccctgcccaacctgaggactcacctctgcctccgggattcttgcctagagagttcccggccaccccgtgcccttggcttatatggcagggcctaatgaagggccacacgtgactgatc

SEQ ID NO: 176475 - DNA, 122 bp, Homo sapiens
aaagccatttaatctctgtgcacagcagtttccttgtctaaaaaccagggataacagggccgggtgcggtggctcacacctgtaatcccagcactttgggaggccgagacaggtggctgact

SEQ ID NO: 176476 - DNA, 122 bp, Homo sapiens
acgaccaaagccctgggggttccggcctggggcgcagggaaccctggcagggctgggtcccgggcagcccggttccccggggaccctgcgggaacaacgacgttgtgggcaggtcctcacaa

SEQ ID NO: 176477 - DNA, 122 bp, Homo sapiens
agtgagttgggtagtgaggaaatgactgtcgggtgtgcgggtagccctgttgggaggcgtcgccacggtcgtggcatggaggtggcaggccctggttccctcagtagcttgtctcaaagcct

SEQ ID NO: 176478 - DNA, 122 bp, Homo sapiens
gccggcgtcgccatggcgactcacgctccctgctcccggccctgaagcgtcgggcagccgcgctcactgctgggccggtcagaggcctggagccctcggctggagcctcagcttcgcaagtc

SEQ ID NO: 176479 - DNA, 122 bp, Homo sapiens
cagggagaggtgcacaagcgcaggagtgcaccggaagtccgcctcccgggacacccaccgcgggtcccaggacaagtaacggactctatttcccaggagcctacgcgctcccccagttttgg

SEQ ID NO: 176480 - DNA, 122 bp, Homo sapiens
gggatcaggcgttgtgggggagggggacacttaacaggtatggagggcggagcagagccccgcagtcactggcctgacttccggaacgaaccgtcgccagcaagcacagcagtaggaccagg

SEQ ID NO: 176481 - DNA, 122 bp, Homo sapiens
gttctgtatgtatttcttccttcccctagccactttgagaagttgttgcctgtcctttcccgcttcagcctttattaatgctgtcctcttcccctatagtgccctctcttcccctagaggcc

SEQ ID NO: 176482 - DNA, 122 bp, Homo sapiens
cctttctgactccacctcacagcctttgcacttactggtcccctgcctagccacaagccacgtatgactgactgactgactgactgtctgtcgtccgtccgtccgtccgtccgtccgtccgt

SEQ ID NO: 176483 - DNA, 122 bp, Homo sapiens
tgagatccttatgggtatattcattgctggcaccctatccctggactgtaacttactgaacgttcacctgagaagagtcacctggcaaaatctgagacatctgagtagtatgagcaattcat

SEQ ID NO: 176484 - DNA, 122 bp, Homo sapiens
catctggtttcaaggcacagattaagtacaaggtcaggctcttgctgtcgttggagaatccggttggggtaggagctaaatctcaggaccacttgctctatatatgagtgccaagataatct

SEQ ID NO: 176485 - DNA, 122 bp, Homo sapiens
atcgcgtttccgccgccgccagattccagcttccgccccgcagcccagccccgcctctcccggtcttatctcggagcattctgggctttgcttgttcagtgcagcggactggtgagcgcggt

SEQ ID NO: 176486 - DNA, 122 bp, Homo sapiens
gtccacggcaattaacaaaaatatgtgaacaagctatctgatccagagccatccactcaacggaccatgcgagtatgtgtaaagggaaaggctctgagagttaaaaattgggctgggcgcgg

SEQ ID NO: 176487 - DNA, 122 bp, Homo sapiens
cgggcagagtgtgggaactactgcctcaatagtaagtacagtaagtcctgtgagaaactgcgagagcgctctgggctggggcaggccaaccgcatgcagggggacccggggtgagtggtgtg

SEQ ID NO: 176488 - DNA, 122 bp, Homo sapiens
tcattttctaaaactattcaattaaggataatgtcaacctattgcctgaatttaaatcagcgattcatttggctaatgaattttcctttttctgtgagtaccgtgtcctacgaatttacagg

SEQ ID NO: 176489 - DNA, 122 bp, Homo sapiens
aagtagggagacaagcccggaagaaagtcctggagctccaccaactccaacgccagtgtgcgcctactgcaaacgcaggccaagggttattgttcccacttacagatgagaaaacttagata

SEQ ID NO: 176490 - DNA, 122 bp, Homo sapiens
gatgagccatgcacgtgcacgcgcatggcagagcgtggtttgctgcaggacttttcagagcgtttgtgaccacttgtcgttgcaggcgcctggatgagtgtttattctgtgattctttgact

SEQ ID NO: 176491 - DNA, 122 bp, Homo sapiens
cgcttaaccagcttgcggctaaaacatcccaaaagggtcctcccatcacctggctcgtgtcgattcaaaacgggttcgtccagcatctactacaggccacgtgctgcctccaacacggggga

SEQ ID NO: 176492 - DNA, 122 bp, Homo sapiens
tggtgccgccgccgccgccgctgtcaccactggccgggagggccaggtcagccgttgctgcgccaggtcggcctgaacttggccctgggaggaaagagggttccaagctgcaccgcggtttg

SEQ ID NO: 176493 - DNA, 122 bp, Homo sapiens
gcagagcgtttcgggggtgacaccgatctgggctgcagtgttgagggcgccactggggtgcgtgagggaggctgaggcccatcagggggttccctggaggagaagccagagaaggggagagc

SEQ ID NO: 176494 - DNA, 122 bp, Homo sapiens
atttatgccttaagggcatgttcccgctgcagttaactagcccaacctatttctttaattcggcccatccctttgtttcccataagggatactttcagttaacctaatatctacagaaacca

SEQ ID NO: 176495 - DNA, 122 bp, Homo sapiens
aactcctagtgcagggatcagtcagcttttttgtgtgaatgttttgggccctggaggctgcgtgacctctgtcccatcttcttagctctgcctttgcagggcggaggcagccattggcagca

SEQ ID NO: 176496 - DNA, 122 bp, Homo sapiens
ccggccgttgattggcctgggcggggagggcggccgttgattggttcgggcccactcgcgcgggcgccactctctttgtctgacaagagagtcgtgaagcctccgcggtcctagaggggccg

SEQ ID NO: 176497 - DNA, 122 bp, Homo sapiens
cgtggaaggcggcaggaagcggaacacggaggcctttcccggcgtccagggcccagatgccggcgaagggaacttgatgcccgctgctcggtcaggattctttgtttgttttttggttggtt

SEQ ID NO: 176498 - DNA, 122 bp, Homo sapiens
tgtctaattggaaattgtccagactagagttggtgggtccaacagggggccaggcaacatcgtgtatactttacttgtgttatttagtttagataacctttagaaaactctcccatttcaaa

SEQ ID NO: 176499 - DNA, 122 bp, Homo sapiens
gagaagccagctagacctttgaaaatgtaccaaaacaaatgacatgcccacaggttccttcgaggcctcttcccaccacagcagtagggctatttgagaacagcgggtgtctgctgaatgtc

SEQ ID NO: 176500 - DNA, 122 bp, Homo sapiens
tctgtgaacctttcctggtcacccagcgatttgctctcctttattccccttgctaacaggcggagaaatctcactccttttctttttccacctttcccaacaaattctccttttttcctaat

SEQ ID NO: 176501 - DNA, 122 bp, Homo sapiens
gagaggggtccattccagcattccaggccttgcttcttaggaacggggtcagtacaatgccgatctccatcttgccaatggaaagaaaggcagcttcgaggagtgaaaagttcccactctgg

SEQ ID NO: 176502 - DNA, 122 bp, Homo sapiens
ggaattcagaatctcttcgttcttggcgttctcctacaggagagaagggcagctagaacccggggtcaagaggaggagagaaacgttctaaccacaaacaagggagattttctatgagtcac

SEQ ID NO: 176503 - DNA, 122 bp, Homo sapiens
gccaggctgctgtgggggcgggagcagcctcagtgtcaagggcccgcccactgacccagccgtacctattcgtccacggtgccccgtagcagcaggtcctgcggccaaatctgtctcccttc

SEQ ID NO: 176504 - DNA, 122 bp, Homo sapiens
ggtgccatcatgggcagggtgcatctgtttgggtatgctgccccccagctggcggggcaccggggacaggcacagccacactgggggcatttctggtcttggaagccttcttggctcttccg

SEQ ID NO: 176505 - DNA, 122 bp, Homo sapiens
gcacttgttggtaaaagacacagacgtgtcggtgtttgcctctcccggggaagggcgaaacgctctgaagttctctggcgctcttctcaggagatgattcggcctcccctcctaccctgggg

SEQ ID NO: 176506 - DNA, 122 bp, Homo sapiens
ctttctgacggtgagtcagggcggagctggcatcaaaccgcaggggctgtagtttattagcgtggactctgaacccaacacggtccacttctgtgcttgggacctgtcatgcatcatgcagc

SEQ ID NO: 176507 - DNA, 122 bp, Homo sapiens
tccaaaagttcttaggtgcttgagacggacctggataccttgaagggcttctctggggatcgggtcctgtttttgcctcaccggctgggccccagtcttaaccggccaatcctggagggttg

SEQ ID NO: 176508 - DNA, 122 bp, Homo sapiens
agagctacatggtccaggactacgcccagatgaaccacatccaggtggagaagatagagccgtctgagctccctctgcccgggggcggcaaccgtagctcctccgtgccccaccccttccag

SEQ ID NO: 176509 - DNA, 122 bp, Homo sapiens
gtcgctccctcccgcgtcccctcgatttccccgcaacccgcaccttctcctcatggcggacgctccaagcagccgtgagtccaggtccagacctactccacacggccccgagagcaacaacc

SEQ ID NO: 176510 - DNA, 122 bp, Homo sapiens
ctcctctcagaccccggggtgggtctggtctggcctgctagctttgtcttccatgtctgacgccacaacccagccaggccgctcatgtatgcaggctccggccatgcccccagtcctgagag

SEQ ID NO: 176511 - DNA, 122 bp, Homo sapiens
tcttcaaataggggctgagcaatttgaatatttgtgctcctggaaatcagtctgtaaaatcgtctcccaacgcccattaaattctgcaaaattgctaagctttgagaacttcatggtggggt

SEQ ID NO: 176512 - DNA, 122 bp, Homo sapiens
agtcttaagtctaaagatatatctgtcaccctcccaccaccttggggaacaacccagggccggcttccacgctgcccacgaaactcccataccacattgtccaatgcctccctcggccctgg

SEQ ID NO: 176513 - DNA, 122 bp, Homo sapiens
actgctgatggttatgagaaacccagacctgaatctccctccactgcacctgcagagacacgctgtgaacaagacaggccttccccaaccacagcgccccctgcgccacccagcccctcgcc

SEQ ID NO: 176514 - DNA, 122 bp, Homo sapiens
tttatttttcgaaggaggcctgtgaggatctggggcaggcccagtgtgaggccacagaggcgggaggtcagcccactgttaacagggattaagcagacaccgtggaatgagggggtttccgg

SEQ ID NO: 176515 - DNA, 122 bp, Homo sapiens
agggggcgccctgggcgtcgggcccaggtcaagtgcgagataggaacggggtgcgggggccgatgagagctccccgcgggaatgtccgctgtggacgccctcggaggccccatctaactcca

SEQ ID NO: 176516 - DNA, 122 bp, Homo sapiens
tggtacggcacgacccgcgcgcgactgcgcgcgcgtctctcttaaccgtggccacgcccgcgccggtggacgacgtaacagaggcctggcctacgacgtatcccattcattcattcacgcgt

SEQ ID NO: 176517 - DNA, 122 bp, Homo sapiens
aaaactgaggcttaatgagctaaaacacaccccaggttccacagcagccagtggaggagacgggcttgggctgtccttccttctactgccagtggccagggagggcaaggactgctgcttct

SEQ ID NO: 176518 - DNA, 122 bp, Homo sapiens
aatacaaaaacactggagatgctggggatcgaacccgggacctcatgcatgctaagcatgcgctctaccactgagctacatccccacctcgaaaaacgttcgtctttaaactgcttttatga

SEQ ID NO: 176519 - DNA, 122 bp, Homo sapiens
cagacccccagagcagagaccatggcttcctgcgcaccaagatgaaggtaatgccactcgcgctgtctccgagggccgggggcgtgcatgtagacctgcgtccagctcatgagacatggcac

SEQ ID NO: 176520 - DNA, 122 bp, Homo sapiens
gcccccgcacgtgcctcaccttctgtcaccctttggctgcacaccttcggctggggctttcggaaaccagcacgatatcagagccttggtgaaaggttctgcctagctggagctctcccaga

SEQ ID NO: 176521 - DNA, 122 bp, Homo sapiens
gctttaaagtccaggaccaacagttatgagctgtgtgacttcaaactgtatttcttaggtcgccaaggttcagttctatcacatttaaaatagaaaatgacagtagtcattccaaagctatc

SEQ ID NO: 176522 - DNA, 122 bp, Homo sapiens
tcactcacctaaacctgaaactaataaagcttggttcttttctccgacacgcaaaggaagcgctaaggtaaatgcatcagacccacactgccgcggaacttttcggctctctaaggctgtat

SEQ ID NO: 176523 - DNA, 122 bp, Homo sapiens
cagccccagggccgggaaggactgggcagacgggacagcagcgcatgcagcttcttccagcgaggcatccgcacggggggctctgtctgaacccatcagtcacccggcaggagcagatggag

SEQ ID NO: 176524 - DNA, 122 bp, Homo sapiens
cttgggatgcgcccctccctgaggctcacttagagcttccaacagcacaatcctcctaagcgcttctgccccatccctggtctggggcgacattggacacccatcgagaggaaagcacctcc

SEQ ID NO: 176525 - DNA, 122 bp, Homo sapiens
tggatccctgtcagttgatatagttaagctaattctacagataacaaagagtcttgggtacgtttagctagcaaatgcagatctgccaagactccaacccagttcttaaggtatctgggtct

SEQ ID NO: 176526 - DNA, 122 bp, Homo sapiens
gcacacagcccgggagctgggatcctccgaggccagcacagctcatacctgttttcgagacgcaggagctgagattcagagtgggaagttatctacccagtgtgattcacggaataatgtcc

SEQ ID NO: 176527 - DNA, 122 bp, Homo sapiens
gccgagatttccgaccttgtcccaggcagggcggtagcgttccggatcagtccttgcctccgtgcccccacgcacaggcagctccaggagcagcggccagcaacccttctggggacacctta

SEQ ID NO: 176528 - DNA, 122 bp, Homo sapiens
aaaaaaacgacgacctagagctcaaggccggtgctgacatctgacctactggatggcagccgcctgtaggaacatcaccatagactattggaattttctggcaagtactgggcactaaatca

SEQ ID NO: 176529 - DNA, 122 bp, Homo sapiens
ctctcggcccgtccggaggcctcttgtcgctgtctcactccccctcccttcaggtcccttcgccgggcgtcagcggactatggccttgggcctaatccatgccccccttctctcttcccctc

SEQ ID NO: 176530 - DNA, 122 bp, Homo sapiens
gctccaggcctgccagccccagtacttgggatggcttgggtccccaggggagggggcccccggccctgtgccaggagcagagccctcctggggagagcaaggcagttctcaaggaaatcttc

SEQ ID NO: 176531 - DNA, 122 bp, Homo sapiens
catctagcttccaaagtgactagtttcctaataaatccctctgcttaacagagatgacagcgcactttcacgtgtgttcctcagtccccactccagccacatttgagtttttatgttaataa

SEQ ID NO: 176532 - DNA, 122 bp, Homo sapiens
ctgcctctacaggacctcccgggaggtgcgaggagtcgagcaattgggaattgattcgagcgcggtgggaagtttccatcagtgaagggacgtgttctggttcggcctctggaccctcttct

SEQ ID NO: 176533 - DNA, 122 bp, Homo sapiens
cccccagagccagggaggggtatctggcccctcacccctcaaacggcagtccagggccagcgtctttctgcgctcacccacctgcctgcgacggggctctctgggccacagggcggccacca

SEQ ID NO: 176534 - DNA, 122 bp, Homo sapiens
tgtggccaggcgcgatggcctgtcctgtaatgtggccattacaggactgcccgctgaccccgtacccagaggccgcagctgccgcagctcccgcagtggccagtcctgtaatcccagcactt

SEQ ID NO: 176535 - DNA, 122 bp, Homo sapiens
caagcaaacaggcccccaaccgccccctatggtttgtactcttctggaaggtgtctttggcgctgtgaatgcaaactcaggctttggattaagggcttcattttcaactaactgtgtgattt

SEQ ID NO: 176536 - DNA, 122 bp, Homo sapiens
cccccgggtatgtgaaatgagcctgaggtatgtgagtggccaaacagcagccctggtacccgaggagggaaaggtttgatgaacaaacggaagaaatgaggatcgtggctggaagaggcgct

SEQ ID NO: 176537 - DNA, 122 bp, Homo sapiens
gctgtccttattcaattaaatcaggagtcccagaagcccttgctctcatgggagatgcagcgcagagcccctaggagccagacctggttttctccgggctaattggctaatcatctgccgcc

SEQ ID NO: 176538 - DNA, 122 bp, Homo sapiens
gcaggagaagatgaagttctctgcctcaaagagctgcttgcttcgacttcttgattccaccgacagattgttgaaggtgtaatgagcttgtgtgattccacagaaaaggacagctacaacgc

SEQ ID NO: 176539 - DNA, 122 bp, Homo sapiens
gtttgtctctactgttcatctttgggtggagtgcggctcactgtgaagcttctctgcactcgctggatgaacgaaggaatgaacagggagatttaggttcttggtagctggaacctcctgtt

SEQ ID NO: 176540 - DNA, 122 bp, Homo sapiens
cggccgcccggattcccgccctcagagaatcctggcccccagtcgttccaagaccctttacggactgcagcttaaaggaaccggcctctgccattgagaccaaactgacagaggaactggtc

SEQ ID NO: 176541 - DNA, 122 bp, Homo sapiens
gctcctccctcgtcccggggctgggctttcaagagagctcaaggctgccagagagtgatccgagagatggatgacttcgcaaagccgcgcccacagacggcccagcggggtgagcgcgtcgc

SEQ ID NO: 176542 - DNA, 122 bp, Homo sapiens
tgggactccaggaaaggcttagctgttgacgaaggaccggggcggggccggggggcggggcgaaggccaggatctccaggtacccggaaccccaaggggcgggtgtagcaggcaatcttggc

SEQ ID NO: 176543 - DNA, 122 bp, Homo sapiens
tggcccaagctatttgcatcatagctgcaccctccaggccccagttgcatcacagagaagcggaagccccggagggatactatctctgccagtttctctaggttgcaattaattttaaaagt

SEQ ID NO: 176544 - DNA, 122 bp, Homo sapiens
cgagtgccgtgtcacacgcagcccaggaaacaaacacgccgcgcgaaaggtattggtgaacgaactgaaaaattgtaaagctcttaaggactttcatgcttgttagcattttttgacagaaa

SEQ ID NO: 176545 - DNA, 122 bp, Homo sapiens
ggcgcacccggtccccgcggctcctggctacgagctgggcgggcaagtgggcgcgggcagcgggggccagaggtcttcaggcagaaagccccagagctgccccgctgcccggctcctcctgc

SEQ ID NO: 176546 - DNA, 122 bp, Homo sapiens
ccatgacaagtgggagaggctgtgttttgggagtgtaccaccaacgccagccaggtgagccgcaggtgtggggaggcacagccccaggctgtctgaaggacattgaggggatgccctcctgc

SEQ ID NO: 176547 - DNA, 122 bp, Homo sapiens
cccgggacgctcgggacgcttttgttgccggagataaacaatgcccccggccggaggtatcggccacccgctccggaggccccgccacagcgccgggttgggggcagcgggggcgcctgggg

SEQ ID NO: 176548 - DNA, 122 bp, Homo sapiens
ggaaacctcctgacaaacttaggtcagagttgcactgatgatctctgtaagtgacataaacgtacattgcagattgaaagcaagagttagagatttcagccaggcagaatctcacagggtgg

SEQ ID NO: 176549 - DNA, 122 bp, Homo sapiens
ctctgatttctaagatgccccggcgcagtccagctttcccttactcctcgcgtggccccacgatgcccaaggcacactccctgcaagagagtccctgcaagagaggaagacctagtggggaa

SEQ ID NO: 176550 - DNA, 122 bp, Homo sapiens
ccgggtttcagactcctgcccctgtccctggagaccccgcggggcggtgggaggcctccacgcccaccaccccaagcccctccctgggggagcctcaggcatcgcccagagggattcccggt

SEQ ID NO: 176551 - DNA, 122 bp, Homo sapiens
ggggtgacctccagaggagcctccttcctccactgccctcggagaacagtgccccttccccggaggagccagtataaagacagccaggatggaaaccgggccaactgctgcagcagctagag

SEQ ID NO: 176552 - DNA, 122 bp, Homo sapiens
tgccgcctggctgcagccttgcagggtgttggcgctccctgtgtcctctgtctgtctctgcggctctgctcccggcctttgctggccttttgccctcccgccgctgcctcactgtgaagaca

SEQ ID NO: 176553 - DNA, 122 bp, Homo sapiens
tgtatcactccttagaaacatgtatcctccatctaaaaaggactagataggacccctttccgtcaattgatatttaataatttacaccagtgtataaattattaccaacccctacacctaag

SEQ ID NO: 176554 - DNA, 122 bp, Homo sapiens
ggaaagcgctggcctgtgcgggatgaggcagttgggttctggagagcacaagcaatcattcggtgctgcccatcagacaactgaaaaatctgatcagaggcagtggctaagtccccgcctgg

SEQ ID NO: 176555 - DNA, 122 bp, Homo sapiens
aaagggcgggggaaagagggagggagaaggcggaggggaggagtgaagtcgctctccctccgtgggtactgacagggttgcagacttccgagcaggtctggccattgaatatttggtggtgc

SEQ ID NO: 176556 - DNA, 122 bp, Homo sapiens
tgggcctccgcgccggcccccggggaggagttatgataatttccttctcattaaggcgctcgggtcccccggctatcgccaggacacactgttcgggcgcggctttccccgtccgcggagcg

SEQ ID NO: 176557 - DNA, 122 bp, Homo sapiens
caatcccaccatccaggaacccaagtccaaccaggcctcctgaaaaacgtccgggaggcacggaacaccatgctggctgcttctctccgtagcttcctggatcctccgccacagctcaggct

SEQ ID NO: 176558 - DNA, 122 bp, Homo sapiens
ccggactccgggcagcgggagggccggggcgcgactaaggggctctggagggtcggccgccgccgcagccgtcggcccgagagtgcccgcgcgcgtctccgctgcgaaaatgtcaaaacttg

SEQ ID NO: 176559 - DNA, 122 bp, Homo sapiens
tgggattacaggcaagagccaccgcgcctggcctactgtttataattcactctagaaccacgcggtagaaaccacaggtagaatctaccacagggtggaaatctacgtagttgaatgtgcaa

SEQ ID NO: 176560 - DNA, 122 bp, Homo sapiens
ggggcgcggtgggcggggtcgctgccggagcgggtgcacccgcgggacgggggtcggacgcgaggctcagcccccagctcgcccccgccgctttccgaccccctgaaatacggagtccggac

SEQ ID NO: 176561 - DNA, 122 bp, Homo sapiens
tcctgaggtgctactacgtgctaggttactgggtacagcaagaccatggaggaatcagagcgtaaacaagcgggcgcgaggtggtccaggcatggagggcacagaagccgtgatgctggggt

SEQ ID NO: 176562 - DNA, 122 bp, Homo sapiens
aaaggaccagtaacttctgctgctgatgtagctgccacagggattagggctggtgaggcacgtgtttaagtctcaggttccttaatgccagatgtgtagtctcagtcaatttcctcatttct

SEQ ID NO: 176563 - DNA, 122 bp, Homo sapiens
gtgctgatgggggcaccctggtgttccggcatgtcaggaatggggctgtggtaggtatgtcggttttcattttgacaaagtcactctgagatgaattcatcctgtgtgcatacatctttagg

SEQ ID NO: 176564 - DNA, 122 bp, Homo sapiens
tcctgcctgagctgcacctcatgtcagatcagcactgcattagattctccagcgcacgcacgcgcgcaagggatccaggctgcgcgctcctcatgacaatctaatgcctgatgatcgggggt

SEQ ID NO: 176565 - DNA, 122 bp, Homo sapiens
gtgcaagattcccaatcaggcctgggaggaaatggatgcaattagggcacacccccgtcccgcagttgccaggagcctgaagatctatgaccgacttaagccatttctggaaaagtcatatt

SEQ ID NO: 176566 - DNA, 122 bp, Homo sapiens
gcgcgctgtacaatcgctctccggtctcggcccagcactcccgccggggagcgccggccccggacccagacccaggggcagggagccaaacccgccgcagccagcctggccggggtcgccga

SEQ ID NO: 176567 - DNA, 122 bp, Homo sapiens
gctaccaagagaaactactagcagtgcttgaccaagccggcccggggcgcaactggcaggcgccgttacgccgcgttgaccacatccgaaaatagatgaagcctttgagaggctgaagagcc

SEQ ID NO: 176568 - DNA, 122 bp, Homo sapiens
acgtgcaggcatcgcccccagcacaagggtcgctgctagggaagctgcccttcgacagggcgggctgatccacctggagcatgtgctgtttaggctgtcgaggaacggccagttcagtgact

SEQ ID NO: 176569 - DNA, 122 bp, Homo sapiens
ggtgggccggcccctggggctccagccgtgcgaccccggaaccacacgtgtggcgaggaacgggtcccggggcggagtaggcagagtcccaagcgcatccttcagccacacctcctcggctc

SEQ ID NO: 176570 - DNA, 122 bp, Homo sapiens
tgatgaaaacttggtctcagacaacagtgggaaccctctgctctgaatgactggggttcacgtggcatgatcacatctgagctctatgaggcagctcagcagtacggaagatggacagaggg

SEQ ID NO: 176571 - DNA, 122 bp, Homo sapiens
aggccggcgggtggcggcgatggagaggacagatccggctcccagaggaggtcgtgagcgcggggcctgcgccggccggaggagggacccggggggctgcaatatggctgctcgggcgccgt

SEQ ID NO: 176572 - DNA, 122 bp, Homo sapiens
gttccagggcgctccgcgctgtcatgattgctgggtgcgcgctccgtgctgggacagccgcgcaccaacagcggagggcgttagcaccccaagacgctgctgcaggggtctgaaccgctcct

SEQ ID NO: 176573 - DNA, 122 bp, Homo sapiens
ctgagctttgtgacttctgtatccagagcacagttaatttccaaaagcccgcctgcaccacgtgttttaagtcttggtgtgtgtgtaaagtctatatcactatcataaaactgttagttcct

SEQ ID NO: 176574 - DNA, 122 bp, Homo sapiens
ggggattatggaggctgaagtcctccgcaagccactgagctataagtgagtagcaagatgcgcttaaggactcgcagagatgggggcagaaacggtggaccttacacttggaagggaagact

SEQ ID NO: 176575 - DNA, 122 bp, Homo sapiens
gcacatagtagagcttccaaagtgttcgtttatttcgtgatttatagacaaacgtatggccgaatgatgtgaaaagccactgtgtttatttcatacattcacactaaggccactgatcctac

SEQ ID NO: 176576 - DNA, 122 bp, Homo sapiens
acaggtcatcccccctggggcacagagcatggtgaagggtggagagaatgatttgaggagcgaaaggaagagccccagctcgctgtattaaagctcattaccctgtattatagttagttgtt

SEQ ID NO: 176577 - DNA, 122 bp, Homo sapiens
tggatctggccaagcctagctggtactgctctcgggctggctgacgctgctcagccatgccggcctttcactgtttctgcaacatggcaggcgtatccccacctctgggtttatggctgatt

SEQ ID NO: 176578 - DNA, 122 bp, Homo sapiens
ttttatcagagctcactgtgcgccagggacttgctaggagataaatggggtttatctcaccggagataaatgtggttgcacagcagatggacacaccagccaatgtggtaaataaacccttg

SEQ ID NO: 176579 - DNA, 122 bp, Homo sapiens
ccaactacccaggacagaggatgcccagccagccgagctccgggcagtacccgccccccacggtcaacatggggcagtattacaaggtgagtcccagcctcgccaccacccacggggcccct

SEQ ID NO: 176580 - DNA, 122 bp, Homo sapiens
ggagggagaggccgagccgaaccggcggcaacaacgccccaagagctgaatggatgtgtgcgcgtccggccgtgggaagtgtggctggcaaaagccaccaatggcctcatctccgttcccac

SEQ ID NO: 176581 - DNA, 122 bp, Homo sapiens
tgtcagctcagtgcgacctgctttaactctgcagcaccgctgcagctgccgatgtagcctcggtaggtggctattagagctctaccatatacagtggtgcatcttcaaatttatgcatcaaa

SEQ ID NO: 176582 - DNA, 122 bp, Homo sapiens
actgggttgggctggagtgatgcaggaagggtacgaagatcactctactccctcctaagtcgctgatcctcatgggctgtctccctctgcaggccctggcgtgacgcacgtgatagtgcggg

SEQ ID NO: 176583 - DNA, 122 bp, Homo sapiens
tcttaaagcaaatcccagccccgaaggaacctaggcggtcgggtctgtggtggcagaaggcgcggctgccgtgctcaggtgggcacagctccccatgtgggcagctgcctcctgcaggggcc

SEQ ID NO: 176584 - DNA, 122 bp, Homo sapiens
ttcaagataatccagctcactaagaaataaacataagtacttcgtgtcataattactccccgtttcgtctaattaaatgcaagtattgaccacagtttactttctatataatccaagctatt

SEQ ID NO: 176585 - DNA, 122 bp, Homo sapiens
cgcgcgaggttaagccaaggtggagcgggacgcgggctcttaccgtagactccttgtccccggcagtggaaggggatcagcgccagaagtagaaggcaggtcacctccatcttcacggccgg

SEQ ID NO: 176586 - DNA, 122 bp, Homo sapiens
cctgtgacaacggcagacgcgcgaagcaccgggaacctgagccgtgaccgcgggctctggcgcctttaagggggtcaacacgccccacccccagttccgcagaggcagcgtcccgcgactgg

SEQ ID NO: 176587 - DNA, 122 bp, Homo sapiens
gtgcaatggcgattgcttcttgatttggcccctctgcaagggagagttccctggtggagacgagagttcttaattattcagaaactatgtgatgggcttagggatcaatgggagcatcatag

SEQ ID NO: 176588 - DNA, 122 bp, Homo sapiens
ctgcaccaaggcgcactgcttttatatactctccagctctgtttagcctcacagatattacgctgacaatataaatttctcatctgtaaataatgagtttttgttacaaatgacttccctct

SEQ ID NO: 176589 - DNA, 122 bp, Homo sapiens
gccgggaggggcgggagcagacgggggacggtgtcaggacggggggctccgttaccctcgcgggctcccggggcaaggccctaggccggggcggagcgcggggcccggccgcctctcttcat

SEQ ID NO: 176590 - DNA, 122 bp, Homo sapiens
ctcccgcccaccatggcagcgcagcgttctggaaggccgaggggactctcccggggaaggcgatcacggcaggtggcctggacggcagcatccacacctgtattccgtttcccaccgagcac

SEQ ID NO: 176591 - DNA, 122 bp, Homo sapiens
gcgcaggaccggtgctcccgaccgctgcgtgcttctgtgttgcgtgtgtgggtggggggacgggatatagagagtgtgtgtcccggagcagtggagcggcgggaggcggtgctgtctgccgg

SEQ ID NO: 176592 - DNA, 122 bp, Homo sapiens
aatgtcttatgtaatccaccgtgaagagcttggtgaacagctgtgctaggaaggatcaggcgccatgggaagtgtggtgcggccgtttcccctacttctctccgcctcgtgcttacgactga

SEQ ID NO: 176593 - DNA, 122 bp, Homo sapiens
taaaaaaaaaaatctttaaaaaggtgttttcacctcccagggaaacgtgctcggtggccacgggctcacagggcctagggtcgcgccacagagacagggtcaggggtcagtagggtccggag

SEQ ID NO: 176594 - DNA, 122 bp, Homo sapiens
gagaaacagacaggaaacctgggagcctcgcggggctgggctgggctgtcagagcctgcgcgatccgtcctcccttcccctcctatacggcttgggcgaccttgctcccgagggcgcatccc

SEQ ID NO: 176595 - DNA, 122 bp, Homo sapiens
gaagaatattaaaaatcaaatgctcaagatgaattaaacctaactcaaatgacaagtcaacgaaactactcagattccatagttagaatattctcacaagaaatacactctacgcaagtttg

SEQ ID NO: 176596 - DNA, 122 bp, Homo sapiens
ggtgggcggggcacacacctggaaggtcaggtgctgaccagggcagccttgtgtcaccctcgcagttgccctgaactaccagtcagaggggcggatgctgcagctgaaccgagccaagttca

SEQ ID NO: 176597 - DNA, 122 bp, Homo sapiens
ggaagagggggagccgaggaagcttcttggccagggcgctggggatccgggagcgggggccgccggcgagactgagcccgggacagcccagagctccagcgctccagcgctctgcagcccgc

SEQ ID NO: 176598 - DNA, 122 bp, Homo sapiens
cattcatagtttctcaggaaattgtcttcatttcaggtttgtggttattgttgctgttttcgagtagttttcaccacagggatccttgcctgactgatttcctccagtctgcagtgggggaa

SEQ ID NO: 176599 - DNA, 122 bp, Homo sapiens
gttagggacgtgggaggacactgactgcttgggtaggggtggggagtgagcatccacactcgagtggctgcagatgccatgagaccctccagggatgaccaggtcactgttagggcagagag

SEQ ID NO: 176600 - DNA, 122 bp, Homo sapiens
ggggaaggtggcggggtgggaaccgtgtcattccagagtggatctgcggtgaagccaagccgcaaggttacaaggcatcctcaccaggggccccgcctgctgctcccaggtggcctgcggcc

SEQ ID NO: 176601 - DNA, 122 bp, Homo sapiens
ttactctccgcaaggagcgatcctacgtccaataccggggctggctgagatttcctccctcgtgaggaggagctgaataattccagcgctgcttccacttaaaccagcaggcaggaggagcc

SEQ ID NO: 176602 - DNA, 122 bp, Homo sapiens
ggcaggtgaaggaaaaaagaaccactcctgctattgcatttcgggagactggtgccctcacgagcgtgggtggcctcgggtgccccgacctgctgccgcagcctcgagcccgggcagagcct

SEQ ID NO: 176603 - DNA, 122 bp, Homo sapiens
aatcacctctccttccaaagctaaatggctactgaatgctgccctcggagccttgccccacgcggagagggcagccggagaggggcgcggtgcgggaggcgggggtagggggcggaacaact

SEQ ID NO: 176604 - DNA, 122 bp, Homo sapiens
gaggaacctgccgtgcactcactcagactcctgcagcacccggggcaggtgctccaccagcgggcacagccgctcagccgcctcctcatcccgccgcagccagtggatcaccacagctgtca

SEQ ID NO: 176605 - DNA, 122 bp, Homo sapiens
agggggacacataaacgaaacgaaaccgagtcccagtgtcacctggacacgtacatttgacgcattcccatattggaagaacccgggagcaaatgacaaaaattgcgtgccgttttcagaaa

SEQ ID NO: 176606 - DNA, 122 bp, Homo sapiens
ggtgacagaatgagattccgtcttaaaaaaaaagttttaaacaataaacattaatgttttcggagtcttatattgtattattaagacaagaaattggaaaaaaaatggaatgatttatagga

SEQ ID NO: 176607 - DNA, 122 bp, Homo sapiens
tgagaaaattcagaaatttggaggcacagtagttaggattcaggccaaactggtaaatgacgaaggggcttcttccagagccaaggaggaagggttgtccgggtaagtcccgcgggacgtgg

SEQ ID NO: 176608 - DNA, 122 bp, Homo sapiens
gtactcagcagggggagccaagacttagcgctaaccattgcacctggggctgggagccagcgccggagccaggaggcccgctaggcggctgcaggcgctgtgatggccacctgggggcggcc

SEQ ID NO: 176609 - DNA, 122 bp, Homo sapiens
tattagagtgagaccatctggaattcaaaatgttattgtaggtaactgacagctgaatatcggaaggtatagaaaatggaaggctaagggggacattatttctatgcctatactcaggtgag

SEQ ID NO: 176610 - DNA, 122 bp, Homo sapiens
ttgcgacggcctgcagcttcactgctgaagccaatgagaccacgaacccgccaggaagaacgaacaactcaagacgtgccgctttaagagctgtaacaccgtgaaggtctgcagcttcactc

SEQ ID NO: 176611 - DNA, 122 bp, Homo sapiens
acccccaagggcccactcgctgaccacaaactccctgtcagaggggcagcctctactacccgagggaaaaggctgccaggctagaccagttcttgggctgtccttggtagagtggtttggcc

SEQ ID NO: 176612 - DNA, 122 bp, Homo sapiens
atgaggccgccttcccgagggcgggcgcgcccccaggatccccccgggctcgggcactgccgccccgggacagtgacccgcccagccgagcaccctcgccctgcttgccgcgaccccgcggg

SEQ ID NO: 176613 - DNA, 122 bp, Homo sapiens
gaagccctctttattcaggtgcagttccctttcccaaacattctccggggttgtgcattccgcagacacatttgggaaccgcagcgccagatgttgatgctgtcccgggttcggggaaggga

SEQ ID NO: 176614 - DNA, 122 bp, Homo sapiens
gcggatgaagcgttgtccggggtttggcggggaaggggtgcggaccgggtgcgacctcctcgcagaccttcaggttaggctcggggagaggcaggggactcaccctcttgtggtatgtatga

SEQ ID NO: 176615 - DNA, 122 bp, Homo sapiens
cagagacgctctgggagcgccttgcaaaccccgtcttggcaggacatgaaaccacttgcccggacagaaaccgaccaccacggcgaacaatatttggcagagctgagagtgtttgggcctgt

SEQ ID NO: 176616 - DNA, 122 bp, Homo sapiens
gctgtgctcagcacaggcctgggacctcccccggcaggcacctgtggggggtgcagctcccgggaaggaggcaactgcctcacttaacatcctccgctgcaaggtggtggcgccgagaggcg

SEQ ID NO: 176617 - DNA, 122 bp, Homo sapiens
ggctgcccagcagacagtggctggcgccagaggtcagtgcagcgaggccgtctcggtgcacggctggtaagacccggggtctcccaccagcgcatcagctttggggaggtgacacacactgg

SEQ ID NO: 176618 - DNA, 122 bp, Homo sapiens
gctggcgacgcctcttccgctcttccttcctgggaggaggcgggcaaggcgaagcctctccgctcagtcgatggtttccttcaggacgtctcatagaggtgtgggtgagatcccaggtctgg

SEQ ID NO: 176619 - DNA, 122 bp, Homo sapiens
aaaacaaaaatgccctaagcatgaagcatgaatgccttagaactaactctaatggagccccggcaatggaatggctaaacagatcacctgacaagatacaggtgggataccttatccaagat

SEQ ID NO: 176620 - DNA, 122 bp, Homo sapiens
aaccctaaccccagaacattgaggccacaggaaatacaaccgcagtgacctggacttctgcgttagtcatgatcagtacgtattaggtcacagctagtctacgctttatcacatggtggtga

SEQ ID NO: 176621 - DNA, 122 bp, Homo sapiens
agccctccaacggcttcccgcaccacctgccccgccctggccactgcatcctggatctcccgaagcacttcctggaaaagagggccagcaaacaccagggctgatgtgcaaagacagcaggc

SEQ ID NO: 176622 - DNA, 122 bp, Homo sapiens
gcctcccaccagcgcgatcacgttgtggcccgctcgctgcaaatgaaacaggcccagcagcgcaagtagatgacccacatgaagcgagtctgccgtggggtcgaagccacagtaaatggttt

SEQ ID NO: 176623 - DNA, 122 bp, Homo sapiens
aggccaccccaggaagaccgcgtcgggcgctgtgtgatctggagagtgcattctgcggaccgaggtcctgcttttgctcgccccggacgcggctacatggggtcagctcagaaggacgttgc

SEQ ID NO: 176624 - DNA, 122 bp, Homo sapiens
aacttggtcctgaggcccctttttggaagtgactcagccacacaaagacagtttagacaccgctgtgatttcatccctagccagtcattgtttcaattcccccagccccctgcttgctaaaa

SEQ ID NO: 176625 - DNA, 122 bp, Homo sapiens
aagaacttataggcttcttatctgaggcttaattagttcagttgggatcacagccctacccggcagcagctccttttaggttctgaactcaattcatggtggctccttttcacttgccagat

SEQ ID NO: 176626 - DNA, 122 bp, Homo sapiens
tcgtctgggaacccactgcctcctcagacaagcccgtttttatcaaacaaaaacaaacagcgatgattgcacctgtttctgagtatgccaggattccgggccgttccgccacctctgtctgg

SEQ ID NO: 176627 - DNA, 122 bp, Homo sapiens
caccctatgtacctctccatctggttatttgtgtcctttaaaataccttttgtaataaatcgacagtagtacatacattgctttcctgggttctgtgatacactccagcaaattattgaacc

SEQ ID NO: 176628 - DNA, 122 bp, Homo sapiens
agctctgccacctgtcagatcagcggccacattagattctcgcaggagagcgaaccgtatcgtgaactgcttatgcgagggatctaggttgcgcgctccttatgagaatctaactaatgcct

SEQ ID NO: 176629 - DNA, 122 bp, Homo sapiens
cggcaaagactgagacagctccgctgcccgctgaactccatcctcccggcggtcgggcggcggcggctgccaagtctttttcattgttaccaatctaataggtaatatttcctcagaaattc

SEQ ID NO: 176630 - DNA, 122 bp, Homo sapiens
cgcggtcggcggcgctgcaggcgagcacaggacgatgacgaagaggacggggctgctgagcgatccccagcacccaaggacctggagccccaggtcgcagcctcaggacccggaggatgtgc

SEQ ID NO: 176631 - DNA, 122 bp, Homo sapiens
ccctgccacctcacaccccagcaccccctaaaccttgggttcaatgtttactttctcattcggatgccagcaacgcgggagcctctcggaggccccagtgcaggtgaggggcgctgagaacg

SEQ ID NO: 176632 - DNA, 122 bp, Homo sapiens
ctgcctgcctgcccggcgccacgcaagagaaggtgccaggggacgcagagcgactagaggcgcgcggtcccggccagcaccgtctctggcgttgtagctgcggccgtggcggaggactacgg

SEQ ID NO: 176633 - DNA, 122 bp, Homo sapiens
ctggctccagggactctcactgagcgggtctagagcacccagcacttttcaaggaacagccgcggttcctttgtcccgcggctccagccccgttcggcccagctctcagggaaacgaagcgc

SEQ ID NO: 176634 - DNA, 122 bp, Homo sapiens
gttgttaaattggttgacccctggcaggtgtgaggtgccgacttgatggcatttctccttcggtgctcagaggcttgtgagagcacatcctatatgtggaaacgttaccgtcccttgtttac

SEQ ID NO: 176635 - DNA, 122 bp, Homo sapiens
ggcggcgccagcgcccgtgcggaagagcccgtgagcagacgggagtgggtcggggggcggcgggggatcccacgtggaagcagcgtcctggagctgggtggggctgcggcgcggactacaaa

SEQ ID NO: 176636 - DNA, 122 bp, Homo sapiens
gtgcggagatgagcagtgcggacaggccccctcctgcccttgggccccagcaccttaccgcgcagtgcctgcatacccgtccacattttgtgactgaggcgggagcacggggcagtccctta

SEQ ID NO: 176637 - DNA, 122 bp, Homo sapiens
agcgagagcgggcaagctggtaccgggtggggttgcgggattaatgacgcaggctgcagccgaccaccccggaatcaggagccggggtagattcctgggctcctgatgcgctgttccccgtg

SEQ ID NO: 176638 - DNA, 122 bp, Homo sapiens
cccctctcccacgtggcagaggctcagcctggctcccttccctggagcggcagggcgtgacggccacagggtctgcccgctgcacgttctgccaaggtggtggtggcgggcgggtaggggtg

SEQ ID NO: 176639 - DNA, 122 bp, Homo sapiens
cctatggtaggaactatgcaaagaattcctcaaactacagtattgcagataggctgcttgcgcaagaacaattgcctgacatgactgtctgcaccaatgcactaacaccaactactgcaata

SEQ ID NO: 176640 - DNA, 122 bp, Homo sapiens
ctctgagttccgcagcgcagcaccggaagcggccgagcgcgctcagcccggcgacccctgcgggctccagacccctgcgccgctgcgccctgggtttcgccgcacccaagacccagcgagtg

SEQ ID NO: 176641 - DNA, 122 bp, Homo sapiens
aacaatcctgtaaatctgcttcacatgtggtgtatcacttgattacttaaactgtgtctccgttggaaccacagctaaatatctgtttgctggagtttctctgcgatttgataaaataaatc

SEQ ID NO: 176642 - DNA, 122 bp, Homo sapiens
ggggcccctcctgggctttcacctgggtctccgggcttttgtctacgcggccaccctccccggggcccctcctgggctttcacctgcatctctgggcatttgtctacgcggccaccctcccc

SEQ ID NO: 176643 - DNA, 122 bp, Homo sapiens
tttcggctcttcttgtctctgccttgacacaggtgacttcccagaatgctgctggccaggcgcttgcagctgctgcatttaatttcaagaagctgtttttcaaaggccagctgtggacagct

SEQ ID NO: 176644 - DNA, 122 bp, Homo sapiens
gctcggtgagcgtctttgctccgatcccagggtcgtggtcttcaatgattgtctggaggacgcatcccatctgtcactcccagaccctcagccttgatttttgtctcttcttcagagcaata

SEQ ID NO: 176645 - DNA, 122 bp, Homo sapiens
agtaccggaggagaaagatggcggctaccttactagctgctcggggagccgggccagcaccggcttgggggccggaggcgttcactccagactgggaaagccgagaagtttccactggggtg

SEQ ID NO: 176646 - DNA, 122 bp, Homo sapiens
aagaggaagatagtcatttgcctttttctgagaacacagcgtttatcatcttgctattgccgttgagagtagtttgctcaaatgaatttaaaaagtaaactatttttcagaaatgttctcag

SEQ ID NO: 176647 - DNA, 122 bp, Homo sapiens
ggataaggtgaggagccggttcttgggaacagttgaatcctggggaggcctgggaggcggcgagccaaccttcccatcccggtctcccttattttctacggccttttgaggggagcccttgt

SEQ ID NO: 176648 - DNA, 122 bp, Homo sapiens
gcttgagaccactggtaagaattttgggtttccaaaaccctccccttcccaacccccattcggtaagaatgctttcgcattagcatcaggtccgaggttactcattagaaactgggcaaagc

SEQ ID NO: 176649 - DNA, 122 bp, Homo sapiens
gatggcctgccggtgtctgcaggtgcctgtcggtgtcctcttctgctggtgtgttcctttcgacgtccagccgcttatgtgttcctttcgacgtccagccgcttgtgtgttcttccgccagt

SEQ ID NO: 176650 - DNA, 122 bp, Homo sapiens
tctctttgctcccagagcctgtgactggggcttgcagtttagggctgcttgtccctcagtcgtcgtgcctatttgccacccatccgctctgttccaggttctgaaccaatttccctgggact

SEQ ID NO: 176651 - DNA, 122 bp, Homo sapiens
gaggtggcgtccctgtccccagccaggcggcagcgcgaagctgcctccccgcggggggagcggaagtggcccagctgctcgagtgacttactagttaaaaagctggggttggagctgccacg

SEQ ID NO: 176652 - DNA, 122 bp, Homo sapiens
cgcacgcgcagaacgcttcgaccaatgaaaacacaggaagccgtccgcgcaaccgcgttgcgtcacttctgccgcccctgtttcaagggataagaaaccctgcgacaaaacctcctcctttt

SEQ ID NO: 176653 - DNA, 122 bp, Homo sapiens
aaggtcaaatgctatgacagccattttacaggaaaaaaaaaaattgtatagttgtggtgacgctcctcacacagagcaccagcttcagggagtctgtcccttgcagacccctgacccggcaa

SEQ ID NO: 176654 - DNA, 122 bp, Homo sapiens
agggggaaggggaaggtggcttgaatgagagccgggcccgggctgggccagggcctcctgcgcgttccctggctgcttcctagtgctttcttggggcctcgccgcctctcgcggcctgcagc

SEQ ID NO: 176655 - DNA, 122 bp, Homo sapiens
ttgggctctgaacagaatttactgcaaactgaacatccttatttccaacgtaggcaagcccgtcttgtttataatggcataatccagctggaagatcacactggcacactcaaattggccca

SEQ ID NO: 176656 - DNA, 122 bp, Homo sapiens
ccacagttgcaaagaggcagcgaagtatgtgttccaaactttccacggttccaaactgagcgcttccattaagagaagcggtgtgcgggggaaaagcattctgggtattagcatgcaaatga

SEQ ID NO: 176657 - DNA, 122 bp, Homo sapiens
catgtgggatcctgaatgggaccctggagccgcaaaagtgttccggatggtgaatcctcacgagtctgcagcaacctcaattcttgcctcctcagaagaaagaattcgactgggggcataag

SEQ ID NO: 176658 - DNA, 122 bp, Homo sapiens
tggggaggaagtgtgtgtgcaggggtgcccatcagccagggagctggcacctcttccatacgatgtgcgcatcactagcactgcacacatcaccctgtatgaggagtttctctcccctgagt

SEQ ID NO: 176659 - DNA, 122 bp, Homo sapiens
aggcacctacttgtcctagccctttccccctgtacactttcttctagagacaatggccttcggtttttctctaaactcctgaaggtgttctcaccttagcccctttacaccttttgttcccc

SEQ ID NO: 176660 - DNA, 122 bp, Homo sapiens
acggcgaccacacggcccgggaggccttccggctccagtcacccccaccctcctgcccgccgacagacgcaaggcctcactaatcgatggccgcgccccgcccactgaggatcgttgccact

SEQ ID NO: 176661 - DNA, 122 bp, Homo sapiens
agcgccacggcgcgagggaagggcacgccaaccaggagagggggcgagggagatgcggtccgcctgcagtcacctctgcacctcagagatttcgggaagtttgagtgcaggaaagcagcgct

SEQ ID NO: 176662 - DNA, 122 bp, Homo sapiens
gctccagccaaacttgtgacctcagacatcctggggagtcagtagatgcagtgagctcttcgtcaaagaccctttacacagaagctcacattgccaactacaatgcactcatggctgctttc

SEQ ID NO: 176663 - DNA, 122 bp, Homo sapiens
gcctacggaatatgttgtgacatacagttgatcctaggttctccagaacaaaatgctgcacgaccacctcatcctggccctttattaaatatagcttaattctggacacaaacagttcccac

SEQ ID NO: 176664 - DNA, 122 bp, Homo sapiens
gcgtctgcatttttctcctagctctagcggctcaagatagctgaacggtctctggagggccggattgccacggcacctcccgcggccgcgcagtgtggttcagcccggactccgcggggcga

SEQ ID NO: 176665 - DNA, 122 bp, Homo sapiens
accggagccagtaaaacagcatttcagacgctttttttttgcgacggagtctcgctctgccgccaggctcgcgatctcggctcactgcaacctccgcctccttgaagcaattctcctgcctc

SEQ ID NO: 176666 - DNA, 122 bp, Homo sapiens
tttgccatgttggctaggctggtttcaaactcctgacctcaggtgatccacctgcctcagcgtcacaaagtggtaggattacaggcatgagccactgtgcccaaccagaattttgtgtgtta

SEQ ID NO: 176667 - DNA, 122 bp, Homo sapiens
gctgctggctggtgtggccgggaggcagccccaaaatccggactgctcggaatttgcaggcgaggagccgtgcgttccgggccctccgcgtgtgtaacgacccccagtccgttggcttggaa

SEQ ID NO: 176668 - DNA, 122 bp, Homo sapiens
cagccgtctctgggtgtgtatggcgtaggtgcaaacgtgcaagggtactggggagagaggcgagcctccagagaggctaagaagtggaccgtagccctgtctgttcaaaggggttgagccaa

SEQ ID NO: 176669 - DNA, 122 bp, Homo sapiens
actcgcccgcggtcggaggccaagcgtttgcatgcgcagctccccgcgcctcgcgagcatcgagcagctccctcaggatcgctcctgacctgctgagctccagccacagatttcccacttcc

SEQ ID NO: 176670 - DNA, 122 bp, Homo sapiens
ggggtcacagagagccgcaggcccgaccgggatgagaagtcctaatcggcgttctaggggcgttctaaaagaaggaaggaaggggatttgaaaggattgctcccgcagggctgtggccttaa

SEQ ID NO: 176671 - DNA, 122 bp, Homo sapiens
gttggaaccctgagttggtgctttacatgccagtaacctcagaactggaagtgggcctgccgtggtggctcaggcctgtaattccagcactttgggaggctaaggcgggatggtctcttgcg

SEQ ID NO: 176672 - DNA, 122 bp, Homo sapiens
gagatccgaaaatgttattatggaggggaaataaaggttattttgaatgcttcaaggtcacgtgacttgtaagtaagtatttggggtctctaactgcatgtctataaacacccaaataactg

SEQ ID NO: 176673 - DNA, 122 bp, Homo sapiens
agaactggcttttttcggcaactttggcagctctcccacccccacccgaaggggcaggtacgcacagctccctccgtgtgagtaaacggaaagaaattaccccactcccgcccagggcagaa

SEQ ID NO: 176674 - DNA, 122 bp, Homo sapiens
ccttataaatatctacgtccaatggcagaaaatacgaggctcatgaaacttctcaacatgcgctcccatggctaaacgtgtttattaatttagaatcaaaatccgtgggagaaacacgtagc

SEQ ID NO: 176675 - DNA, 122 bp, Homo sapiens
gggggtagaggcagcggccacagccgtgtccggctctggctccgctgcgttttccgccgacgggccccgcccactacacttccggttccgggctgaaatcggaaacaggaggagggccgtaa

SEQ ID NO: 176676 - DNA, 122 bp, Homo sapiens
aatccttttggggcaaatcacttatgatttccttccaggactgaagaaaacatgcacagacggaaggtgggggctggtactggtgctgagcctggcatggggagagaggaaacaagagtgaa

SEQ ID NO: 176677 - DNA, 122 bp, Homo sapiens
gtagggacgctgaccccgggaggtgcctttgcctgcatccactggagcctcaggagcatgcgttccgtccccacgggtcacccccactgagcccaccacctaccgagaggcacctcgagacc

SEQ ID NO: 176678 - DNA, 122 bp, Homo sapiens
gactcccgagcagaagaagcgctcctactcggagcccgagaagatgaacgaggtggggatcgtggaggaggccgaaccggcacccctgggcccgcagagaaatgggatgcgtttcccggaga

SEQ ID NO: 176679 - DNA, 122 bp, Homo sapiens
ttggtattgaggatacactggtgaacaaaacagatgtggctagttgggcatggtggctcacgcctgtaatcccagcattttgggaggccgaggtaggcggatcacttgaggccaggagtttg

SEQ ID NO: 176680 - DNA, 122 bp, Homo sapiens
gagttcagggtgggtgtgggctctgcaggccccgcactcagagtggccggccggcaccgccggcaccaggcagtgaggagcttagcacccaggccagcagctgcagagggtgcgctgggtcc

SEQ ID NO: 176681 - DNA, 122 bp, Homo sapiens
gcttcatggcactgcttctcgacctgagattcaaggctccagaggccccactggccactccgcttccgggacccctcacacctcccagccgggacttggggaggcacttgcgagaggctgcg

SEQ ID NO: 176682 - DNA, 122 bp, Homo sapiens
gcggcttgctctcttctctcgctccgaaccagacacagccgctgccgctgccgtccggcgcgctacagactcccgagaacagccctggctgtcagcgagcaccagccgcttcctgtccccat

SEQ ID NO: 176683 - DNA, 122 bp, Homo sapiens
gagcagagccatagctgacaatgtgggggtcctctccccagagcagggctgggcagcctccggaagctggacaggttgaggtgggaagaacgatggtgtgcaggccccagagtcctcggtgg

SEQ ID NO: 176684 - DNA, 122 bp, Homo sapiens
agaggatactgaaaaccatgtagccaaaaaacaccatctgcaagtgggagcgagataaaacggttctctaagcaggttttacatgttactttaccccgttagccattttcactagaagtagg

SEQ ID NO: 176685 - DNA, 122 bp, Homo sapiens
cactgagatgccttagttgtaagctgctgggcgtcttagcttttctctcaccagtgtaaacgaattctctcattaaatctttccatgttaaatactcagaatggtttctactttttttactg

SEQ ID NO: 176686 - DNA, 122 bp, Homo sapiens
gacatcaataattaatatctcaacctggattagtgattacttataaggtgcctccctctccgctaggagaccccacttcgcatcagatttctgtgcagtgcttcttaccgacctacaccgga

SEQ ID NO: 176687 - DNA, 122 bp, Homo sapiens
gctccgtgctcccggctgaggccctggtgctcaagaccgggctgaaggcgccgggactggcgctggccgaggttatcacctccgacatcctgcacagcttcctgtacggccgctggcgcaac

SEQ ID NO: 176688 - DNA, 122 bp, Homo sapiens
tttctgtttatggaggcagcagggaaatcaagggctggatttggtgtaggctgtggtctccgtcttggcattgtggagagagggcttagcaccttctgatgcccctgcccagcactgaggtg

SEQ ID NO: 176689 - DNA, 122 bp, Homo sapiens
cggtgcacggtggccaatcagagctgccgcttctgatggaggctgagccggctggggaggcgtcttggccaagaaccagccccagcctcgctcagggccccaacccgcagaccatgtaatta

SEQ ID NO: 176690 - DNA, 122 bp, Homo sapiens
gccttgcccccatcccaccccacctgtttccggccggtgctcacgttgaaggccttaagacgctcagggtccatgccttcagagtcgttcatcttgtcattgtcctcatggtcatcgtggtc

SEQ ID NO: 176691 - DNA, 122 bp, Homo sapiens
taaggaatcttcctttttgtttgaaaaaaattttaattaaatgtatgggaagttaagagccgactgaattggttcaaggtgccacattgaccattgttcattggcttgcctctcccatgagt

SEQ ID NO: 176692 - DNA, 122 bp, Homo sapiens
gctaggatttcctcttagatacctctacttgcgatgtacagtaggtggtgagcagccagccggactgctgtgcccactccccacgtagcattatggagactgctgagctgggagaccctcca

SEQ ID NO: 176693 - DNA, 122 bp, Homo sapiens
ttgctaggcacagagcaggtgtgcaacaaaagttatttctcaggctttccctcctctgagcgccgtcctccagagggtccggagtgtagctgggggttggagcagcagcctcctaggcgatg

SEQ ID NO: 176694 - DNA, 122 bp, Homo sapiens
ctctttggaaaaacacgggtcacagatcgtattgtgacttgggtttctttttcccaggcacgtcctcagccttggcaaaataaactttgaatcagttgagatctgccatggtcatgttttgg

SEQ ID NO: 176695 - DNA, 122 bp, Homo sapiens
gggggagtgtccttgtcggtgtatctgggcccaggttaggggacttctcctccccacccccgcgtgggtgtgggggtgtgtccgggctagggcgcgtgtgcttctgtgcctgtgcgtgcgtg

SEQ ID NO: 176696 - DNA, 122 bp, Homo sapiens
ctgggctcaagtgaacctcccacctcaacctcccgagtagctgagactgcaaatgggtgccgccacacccagctgatttttaaagattttgtaaagatgttgtcttgctgcgttgcccacgc

SEQ ID NO: 176697 - DNA, 122 bp, Homo sapiens
gccagccctacaaaaatgaaagtggctccttttgaataagctgaatcgggctttggatcacgaaatctgcagaggcggagaagggaccgggttagtgatgaggaagaagtctacccctctgt

SEQ ID NO: 176698 - DNA, 122 bp, Homo sapiens
acatttgctatccttatcctactttgatatcttagcctcttgcaatatgcgcttagtccccgccacattttctgaatatccctatacttcctcagcagtccacaaaggttgagcgatggagc

SEQ ID NO: 176699 - DNA, 122 bp, Homo sapiens
gagcctggtcgagaagcgggaaaagaacccgcccagagccccttctctccattccctcggcgaggcaggaagctatctgcgttccgaatcccgcgacatcaggattatctcgcactgcagca

SEQ ID NO: 176700 - DNA, 122 bp, Homo sapiens
cctgggcatgcatattaagagacaaaaatggtaaagtatgatcttccaggtacactccaccggaaaaaggaaggaagcctcagatgggcgtgcatgtaactccctaaaaacacttcccaagg

SEQ ID NO: 176701 - DNA, 122 bp, Homo sapiens
gtgggtacgagtggaggagtgagcttcccagagccgccgggctccccgaaagtggagcgccgccgccgccgccgcccaagctcacagctgaaagcactgcggaggagccggcgcgggcgggc

SEQ ID NO: 176702 - DNA, 122 bp, Homo sapiens
gacactcttgtctgaaaacaaaacaaaaagactccttagattaaaactggattccagcctcggttgcactggtcaccattcaagtactttgcatctctaagtctctgtttctttaacttcaa

SEQ ID NO: 176703 - DNA, 122 bp, Homo sapiens
gtctcccaggttgtctcagggagcatcagttgtactagggggtgggctgttgccctggcacggctggatgaacacttgcaccagggatggccatcagaagagctgcaggccagttttgagcc

SEQ ID NO: 176704 - DNA, 122 bp, Homo sapiens
ataggagggcgctgccgtctctcacctgccaggtgcccacggtcagtactccatcatgcccgctgcggccagcagagggcagcaacatcctgccctgtgccattgggcaaaggggcgggcgg

SEQ ID NO: 176705 - DNA, 122 bp, Homo sapiens
gcgcccgtcccgttgcggcaggtcccgcccccggcccgtctcgcgcttccattggcccgccgcggcccccgccgctgtttgtctcggcttccccgccacccattggcccgctcgggtcctcc

SEQ ID NO: 176706 - DNA, 122 bp, Homo sapiens
acagacacaagcccaggatgcaaggagcggccccggtccccgacctctctctggaccttccgctgccctgaggtgctggggtcggggcaagaaaacatgacccattctggactcgtcagcag

SEQ ID NO: 176707 - DNA, 122 bp, Homo sapiens
acaatgtgcggcgcatcttgctcggagagcaccggctggtgtcggtccactggccagcgtcggtgcgcaccattctgggatctggctgcctctctaacctgcacgactcctcgcacaagcag

SEQ ID NO: 176708 - DNA, 122 bp, Homo sapiens
cgtccagactggaaaactttctgcaaagcaacgggttgggtccacctcgctgtccaggtgcggagcagcgcagacccccaaccccacgacctggtcagaccccgtctccttaccgtcctgca

SEQ ID NO: 176709 - DNA, 122 bp, Homo sapiens
ccacacactgctctatgaagacagcacagggatttcactcttcccattttcaaaagctgtcggaatctactgccttttgataacctcacctgcttatcttttaaccaattagagtataaaga

SEQ ID NO: 176710 - DNA, 122 bp, Homo sapiens
gggcggggggcgcggcgtcgttgggggctctcccggcgcctgccctcagccctaacggagcgctcccctagagctctgcagccgctcccaaggcaaggggtgcagagtaggggacagggcgg

SEQ ID NO: 176711 - DNA, 122 bp, Homo sapiens
ggctgtggccccgggcagggcatttggaacaggctgacctcagccttggtcctcggacctcggccttgggcgcaccagcctgcggggcgcttgggcccgtgctgggcgctatggccccgtgg

SEQ ID NO: 176712 - DNA, 122 bp, Homo sapiens
gagatgatttaagttttaaaattaaggtgcatggagtttcattctaactttttatagatgcggaaagtaacttggtcaaggctacatggttagcttctagcacctccaggactagaaagcag

SEQ ID NO: 176713 - DNA, 122 bp, Homo sapiens
cgccgccgcggagacaaagatggctgcgagtaagtgcaggttccggtggcgcacggggctcgggtagttctgggaacctctgggcggtcctgggactgaggtgcggcagggcaggggtggaa

SEQ ID NO: 176714 - DNA, 122 bp, Homo sapiens
ttattactggaggtacctaattactaaattgctgtatcctcaagacagcatccaatccctcgtaaatcccagcttttcttcatgccgccacggaaacggcgtcccatgcagaactgattctg

SEQ ID NO: 176715 - DNA, 122 bp, Homo sapiens
acaaacaaaaaaaccgagcaaacaaaacaaaaaattagcctggcatgtgtccctgtagtccgagctactcgggaggctgaggcaggaggattgcttgagcctaggaggtggaggctacagtg

SEQ ID NO: 176716 - DNA, 122 bp, Homo sapiens
gcctcgaggtgggaaagcaggtgccggcgcacctgtggacaaattctggaacgcgtttggcgagggaggaataggcgcagctccggaaggcagtgacctcgaggcagcctcagcacggcact

SEQ ID NO: 176717 - DNA, 122 bp, Homo sapiens
gagtgcaggagcccggggccgtgctgctggcccagcccggggaggcgctggccgaggcctcgggtgatttcatctccacgcagtacatcctggactgcgtggagcgcaacgagaggctggag

SEQ ID NO: 176718 - DNA, 122 bp, Homo sapiens
gaattacaggtgtgagccactgcgcttggcctgctttgtccattttctaatggagctattcgtgtttttattattgagttgtttcagtgtgggtattagttaggagatagggggttggctga

SEQ ID NO: 176719 - DNA, 122 bp, Homo sapiens
cagcgctatagccgcgactgcggcggcggcggcggcgcagggggcgggggaggagagaagcgcccacttcgtcccgctgcctccgcagcagccctggccctagccccggcgcatcagagcgg

SEQ ID NO: 176720 - DNA, 122 bp, Homo sapiens
acagacttccctctgccccctggtcacagaggtgagagtggggcctcatcccagtcccgccgcgacccatggggcagagctgctgccctggcccaggcacgcacagcttctcaacagccaca

SEQ ID NO: 176721 - DNA, 122 bp, Homo sapiens
gcgcttcttcaggggcacagggcgcgccgggccaggcttggagtggcagccttgggcgggcgcggtgggtgtccagcgcgggagggcgccgcaggcccggcccggccagggagccagccgcg

SEQ ID NO: 176722 - DNA, 122 bp, Homo sapiens
ctgcttgacccgcctaccttaatggaagggtcatgaacaggcacagaattagaacctgcacgaggccccattttcccactgacccagtgtgcgtccacctcgggccggcacaactgtgcgct

SEQ ID NO: 176723 - DNA, 122 bp, Homo sapiens
tctgcccacatcagatattctgaactggggcagccccattctctgggccccagcctggtccgtggggccccagcccccttcccaggtcttgctgtcacctcaccatcactgacaaccgtgac

SEQ ID NO: 176724 - DNA, 122 bp, Homo sapiens
tggagtcgcgtgtggcggggaagtcaggtggagcgaggctagctggcccgatttctcctccgggtgatgcttttcctagattattctctggtaaatcaaagaagtgggtttatggaggtcct

SEQ ID NO: 176725 - DNA, 122 bp, Homo sapiens
cctccggctggaagctgctctctcgcctctggccgccggcgtagtacccgggcgagtggtcgctgggtaggtaatcgctctgtgaatattcctcgcatggagggaacttggggtcgacatag

SEQ ID NO: 176726 - DNA, 122 bp, Homo sapiens
agcactaaaacctcattatcttaaaggatctgggatatcctttaagttattctattttcccgacaagatataaagccacataaagcattcccaaaggatacagaaaaaaataactctccctt

SEQ ID NO: 176727 - DNA, 122 bp, Homo sapiens
gcttagacaccatcaaagagtacccccagatgctcgagctacctttgaggtcaacctggccggagctcggaagccagtgtcaatgacgaccgcatatagctgatggcccggcagggaagctt

SEQ ID NO: 176728 - DNA, 122 bp, Homo sapiens
ccccgcacacgtcgttccagtccctccgccacaaagagaccattgattgggaagagcggccgggttgtggtaggaaggctggtggggacacgcacgcacacacacgcgcgcacacagaggca

SEQ ID NO: 176729 - DNA, 122 bp, Homo sapiens
atggaacctcgttttcccgccgacggttggccacgtcacgtgacatgggttggaagatggcgtctcccacagacggtaagagccggcttagagatctttgcctgcagcctccttctttgctc

SEQ ID NO: 176730 - DNA, 122 bp, Homo sapiens
tgggccaggacagctgccaaccctccaaatctgtgcgctcagaaggagctgccctttgcccgctcctcctcacaggcccaccctagacccacttggggatgatcccaggcgcagctctcccc

SEQ ID NO: 176731 - DNA, 122 bp, Homo sapiens
gccaggtttgaggaccactgacttacattctcttccccctggtttccaccttcaccttcacgtgatggtaaccaccatcctgaaatacgtgtagtgcatggacggattctttgcctccatgc

SEQ ID NO: 176732 - DNA, 122 bp, Homo sapiens
gctcctgaaagcttaaccggcgccgtcctgctcacgtaaaacagccccgacatccaattccgatggttgcagctgcgtggtctccctgaaaatctgccactcatgatttttttaaatggggt

SEQ ID NO: 176733 - DNA, 122 bp, Homo sapiens
aaggagcaactgctcaaaggcaaagcgctggcagctgaggcacagctccggttcggcaaacgtctcccgagtgccaaacgtccccccaaacgcctaactggtcgtcagggcgcagaaaagaa

SEQ ID NO: 176734 - DNA, 122 bp, Homo sapiens
gtgcgagccccggaggctgatggtgaccgcgagggagccagtcttggggtgtgctggcgacgcggcgagtgtgagggagaccgggggtgtgtgtggagagggaaaccccaggtgcgagggtg

SEQ ID NO: 176735 - DNA, 122 bp, Homo sapiens
cgattgccaaaaatatggtcatgcagctcttcccgacccttgtcgtgctttgtcattctccggttcaggcgggtgcattgatctgctttcgctgagggctgacgtggaagtttcagctcatt

SEQ ID NO: 176736 - DNA, 122 bp, Homo sapiens
aactcttgagtgtgaaaaccatgtctacttaaccagcctgcttccgagagtgaaaagggacgctaatcagataggacaccgagtaatagatgtgttcaaggctgtgcgaggcaaacctgatg

SEQ ID NO: 176737 - DNA, 122 bp, Homo sapiens
cgagcgagcgagtgagcgggtgccaagcaagagacccgcggtgcacaccttgcgcccggccggcctgctgctcacagtccctccacgtacccacaggaggcccagactcagcggggcgggtg

SEQ ID NO: 176738 - DNA, 122 bp, Homo sapiens
tgagccccgccccaaagctcgtgcatttcctgaatagaggctcgtcccttcggcaagccccgcctctgccgggtcccgctcttttgccagtcctaggtgtaagccctgatcccgcccagtgc

SEQ ID NO: 176739 - DNA, 122 bp, Homo sapiens
tgacatggtgatttactttggcacggcctacgtggctctcacaagggactttgctaacttcgtcctccaagaccagctcgcacttgacttactctcctggtccaaggacacctacagccccg

SEQ ID NO: 176740 - DNA, 122 bp, Homo sapiens
acccgagcggccccacgtcgcccctgagcgctctcaacctcgccgccggccaggagggcgcgctcgccgccacgggccaccaccaccagcaccacggccaccaccacccgcaggcgccgccg

SEQ ID NO: 176741 - DNA, 122 bp, Homo sapiens
gcaacaacatttgaaagcatagaccttagtcagatgggacacatttggcaaatgttcaggcgtgcagcatttcaattgatgaaatttctttgtggaaccctgttcccaagggcagggaaaat

SEQ ID NO: 176742 - DNA, 122 bp, Homo sapiens
gccctgctgcacacttcacatgcctaatcacaggtgtcctgttttgtgctaggcatgctgcgtatccagtagtactaagaacagctgccatttatttgggcctactctaagccaagccctgt

SEQ ID NO: 176743 - DNA, 122 bp, Homo sapiens
agctcatttcactcacacctcagggggccaacctctgggatttagggtgcgggtagcggtcgaggcttcgaggaccggaaggggcggggcggggccggtcactcaccactccgccgagcagg

SEQ ID NO: 176744 - DNA, 122 bp, Homo sapiens
cggcccagccaacttcctcctcttttcgcaactggggaactgcaaggaggtgactcctttcggggtgaggaggcccagacttttcagaaaggaaagagggcaggtaaaacctgccaagcccc

SEQ ID NO: 176745 - DNA, 122 bp, Homo sapiens
taggtggagtcctcacgatagtcacacctctcctttgggcctagcagggccagagaaagacggaatcactctacccactcaggttgcccagagagcactttaggttctgactcgcgtggggc

SEQ ID NO: 176746 - DNA, 122 bp, Homo sapiens
gccagggctcagatggggcctgggctgttgtgtctggagcctgcaggcaggtgggggctgcgtccctgctcagcccatcccctgcctctatccctggccacctgccaggcctccctcgggct

SEQ ID NO: 176747 - DNA, 122 bp, Homo sapiens
cggagacagacaccgggacccacgcacagccgaccgtgtcagacagactggtgaacacagcgcccagtcagaggcagacacaaggcctgcagtgacacatagcgggccggggccggcaccgt

SEQ ID NO: 176748 - DNA, 122 bp, Homo sapiens
ttttacccactactaaaacctggctctgcactgaggccatgcgcagcccagtcaggtggacgagggggtaacgactggaccgtggggaggcatcagaggaggagctgctgagaggcgggtca

SEQ ID NO: 176749 - DNA, 122 bp, Homo sapiens
aaagatcctaccgcctcggcctcccaaagtgttggggttacaggcctgagccaccgaacccggcctgacttaatacatctgttctcactgtgtcctgaccacatgcccttaaagaactcgag

SEQ ID NO: 176750 - DNA, 122 bp, Homo sapiens
tcggatcaaagcattcatccctgcatgctagccagacttgggggacacagcaaacaacttcgaaaatttcttatgagtcagctaaggagcattcaggcacgcaaaatcacaggacacatcca

SEQ ID NO: 176751 - DNA, 122 bp, Homo sapiens
cctgccccattccaagggtggcacatccaggtcccgagggcgccagccatgcccggagcacgggctgatctgcgtaactctgtcccttcgggagacttctgggaaatagttctagtccttgc

SEQ ID NO: 176752 - DNA, 122 bp, Homo sapiens
gccggtttgctcgcgggtgggcaggacgttctcaccccccgccccctacactcgcaaactcgcaggcacagcctccgtcatcgccccacccgaatctcagaatcggaacttggccgctcact

SEQ ID NO: 176753 - DNA, 122 bp, Homo sapiens
aggagggtgggggagcggtgaaggttaaaaacaattttcctaggggatggcatcggggcgcggggtcacgaacgttttcctgtatacctattcgtagtgggtctgcagagtgttttgggtga

SEQ ID NO: 176754 - DNA, 122 bp, Homo sapiens
gctaagcagaagaatcaggtctttgatttttgcacaaggtctcacggaagcaaattccatcgctgacatcgtaagtgacttgttttcagctgttcctgacacctctgatggctcccaagttt

SEQ ID NO: 176755 - DNA, 122 bp, Homo sapiens
cacacacacacacacacacacacacgcagacaaagattccccccttccagatccacactgcgtgcctcctgccagccccatcccatcatcctgtgacagtgcttctttgtggaatagaacaa

SEQ ID NO: 176756 - DNA, 122 bp, Homo sapiens
cttgatgaaaaacatttactactgaaccgttcaaaggcagagcgacgtgaggcccatcaccgctccccacgtgccagctcttcctctaataattctcactttactccttttccacagcatgt

SEQ ID NO: 176757 - DNA, 122 bp, Homo sapiens
gatcccagaaagaaacggatgtatctccatgcggtgaggtacgctgggaagggcatgtcccgcggaaagagcagggtggacgatggaccgtctggaaaacaggctgccaggggacagaatca

SEQ ID NO: 176758 - DNA, 122 bp, Homo sapiens
gcccctgctgatggaacacaaaccaaatgcgctggctttgccactcggtggaacaaagaccgatcccctacctaggggacccaccgtcaaccaccctcaaccccaccccatggccccacgcc

SEQ ID NO: 176759 - DNA, 122 bp, Homo sapiens
ggaaccgaggcagctcatgcggcacaccttggctgagtccgacatggaacaagatatgggcggtcatctttcagataccctctgtagcggggaccatcccaggggaggaacaaaccatgcaa

SEQ ID NO: 176760 - DNA, 122 bp, Homo sapiens
gatgaggacagatctcacccgtttctctctattttatgtatttgaatgtggctggtggggcgcgctttacaactcttggggcccggaggccacctgcaggagccgctgtgcctctcacctct

SEQ ID NO: 176761 - DNA, 122 bp, Homo sapiens
caagcaaaagtagagaattcatattctacatggtgagagggcaaatttgtaggtatcagacgcagagtggcttgaagcaactgttgcccagctaaactgagagcttatagtccaagcaaact

SEQ ID NO: 176762 - DNA, 122 bp, Homo sapiens
gaagtggcagcttggaggctgcccccaagatggagtcagctgggaacctcccagcggccccgcccttcccgccccactcatcgaaaaacctgctcacagcgccgccgccgagccatgagagc

SEQ ID NO: 176763 - DNA, 122 bp, Homo sapiens
gggtagtgcaacccggaccgcacagcggagcggccggcccccaggtgggcggggccaacccggaccagcctcccgccgcctcaagtccttgggttgctgggactgcaggccgccgcgaagac

SEQ ID NO: 176764 - DNA, 122 bp, Homo sapiens
attcctgaagctactggttggttccctgagaggtcccagaactctgcgaagtgagtccagcgctggtaagtcaccacctgcttagggtcatgcccatctgatcagcagccagccagtcaggg

SEQ ID NO: 176765 - DNA, 122 bp, Homo sapiens
gtttatagtggtctggcttttggccatgacaatgacaccttgcccttttaatttggggcccgtgcaaatattcactgaaagctgtcaagaggaaaacagaattggttattgaatcacttgct

SEQ ID NO: 176766 - DNA, 122 bp, Homo sapiens
aggccgccgcggggtggggcgggttagctcggcaggcctcccagcacctgcatttccctacggcaactgtcgggaggcagcccccgacgcagaggtttaaggggcccggcttttcagaaccg

SEQ ID NO: 176767 - DNA, 122 bp, Homo sapiens
tcacctgcctggtacagcagcactcggggtttcaaaggtcatgaacaggagctgggtgagcgtgggtgagcagacgccttcgaacgccggccagcatgctttttgtcagggtgagggtggga

SEQ ID NO: 176768 - DNA, 122 bp, Homo sapiens
aaagtccgaggctagtggagaccaggcctggtatcccagacgaaagggccctataggaaacggggtctcgtgggcgggatctggagccagagaattgtgagaggcggagctaggatggagaa

SEQ ID NO: 176769 - DNA, 122 bp, Homo sapiens
aggtatcccccattcatgctcccacatcatccgatgctatgctgtgagcactactgtatccggtccctcactatatctagttgttccaaggcagggactaaattcttcattcctgcactctg

SEQ ID NO: 176770 - DNA, 122 bp, Homo sapiens
caaacaccatttccaataatactctgctcagtcatagtgacagtatgcccctgcctcccacgctgccacaccagtcccagccgaggagcacctgtgaagtctgttctgcatcacagcagtaa

SEQ ID NO: 176771 - DNA, 122 bp, Homo sapiens
gtgggaggattgcttgagcccaagaggtcaaggctgcagtgagccatgttcatgctgctgcgggataattaagaaaccaaagggaccgaggggttgaggaggaattatttaattatttaggt

SEQ ID NO: 176772 - DNA, 122 bp, Homo sapiens
cacaggactgttgtgagaatcaaacgagataatgtatgctgaggcatgctgtgaacactacgtgctgggtacaggaggtacaatattaatgatccctgctgcttggagggaacttgcactta

SEQ ID NO: 176773 - DNA, 122 bp, Homo sapiens
ggcttcttttctccctggtgggctggtgggctagtagctgaggccggcggtcctctcccccggggagcaggcagatgactttggcaaggggtggtgtggcgggggctggggttactccgtct

SEQ ID NO: 176774 - DNA, 122 bp, Homo sapiens
cgggaacccggtcctaaacacaagttcttgggtcgtaagcacaggctggcagtcccagatcgggaggccccatgcatctgctcccgacctgagtccctcgccctggctcccactccgccacc

SEQ ID NO: 176775 - DNA, 122 bp, Homo sapiens
gagcgactccgtccagctggtatgcatggcacgcaacgagggaggggaggcgaggttgatcgtgcagctcactgtcctggagcccatggagaaacccatcttccacgacccgatcagcgaga

SEQ ID NO: 176776 - DNA, 122 bp, Homo sapiens
gatgctcagagttgtctgtagagaaccagagctgccgagccccggcctggatggacatcccgcaggcagtgcacgtccctcccccgcctctctttgccgttgccgggactgggccgtgtgcc

SEQ ID NO: 176777 - DNA, 122 bp, Homo sapiens
aaagacaccaaatccttgcagaagaagccacctctgaaaagtcaatgagatgaactagtccggtaggaatcgggcccaccgctcaaatccagatttaagtagtcctggcggccaacttctaa

SEQ ID NO: 176778 - DNA, 122 bp, Homo sapiens
gtggttttgcttgcgttccctgtcgaggtcaaatacgaagagacgaatctgtacatttagcgttttatttgggacacaggaattgcaagttcaggttatttacacatacagggtggtcttca

SEQ ID NO: 176779 - DNA, 122 bp, Homo sapiens
attctgaagggagcctttgatgagggtgaagatggggaactggagcagagacaccacagccgacaaggccatcaccagcccaaagagcttgccaaagtgctctgaagggaaactggggagag

SEQ ID NO: 176780 - DNA, 122 bp, Homo sapiens
cggtcggggcggagttgcgggcggggacggggcggggccaatctaggggcgtgttcggggcggagatgggggcgggccgagggcgtgccccgggcggggatgtgggaggggctggctcgggg

SEQ ID NO: 176781 - DNA, 122 bp, Homo sapiens
ctcccggcctcctgcccgcccgcccgcccccgccgccggctcgcgcgctctcgcaccgcgcgcgcccgccggctcccattgagccccgggcccgcccgctgatgtcatccccggcccgccgc

SEQ ID NO: 176782 - DNA, 122 bp, Homo sapiens
gcgggcggctactagcgggaaagcgaaacccgcccggtccattcaagccccgctgcctggcgccctctagggtcgttcttgggaacgggcggacctttcgtcaacactttgcctgcaagatc

SEQ ID NO: 176783 - DNA, 122 bp, Homo sapiens
agctgcctgacgcttcctggtccccggccggggcggcagcctttcgccgacgcctgtgggcggccgaggacccagaactgcacagcctgagccccagattgccaatgccttaggcgctcccg

SEQ ID NO: 176784 - DNA, 122 bp, Homo sapiens
aaaatcatatcccaaggcctccagcactttgaaaatgtaccagacattctatttgggcaccggaaagtctcccggaacccctcccccttacctagatgggacaccagagccaagtgtcgaga

SEQ ID NO: 176785 - DNA, 122 bp, Homo sapiens
gttttgtagcctggcttcttaaatacgtctggattttgttgcagaatctagatgtctagccgcatgggtgctgtgtgtgtgacatgggggccttagccccagcccctctgagaccagcattt

SEQ ID NO: 176786 - DNA, 122 bp, Homo sapiens
cttctgcctaaatctcctggcaccaccacatttatcccctgcagtcctttgtgacctgtgcgcatctcacacccctttgtcctagcctccatgtagctatcccctctggtcagtgtcaccag

SEQ ID NO: 176787 - DNA, 122 bp, Homo sapiens
ctccatgagccaatcacttcccacaaggcccctcttccaacattggagattacaattcgacgtgagatttgggtgggaacacagacccaagccatatcatgttgtttgagtcaaatctgcat

SEQ ID NO: 176788 - DNA, 122 bp, Homo sapiens
ctctgctcccctcaccgccctcccctcctcttttcagaagctgctctgggcttcttgccacgcgggcgacacgcctatgatcaattttgacttccatcagtttgccaaaggtgggaagctag

SEQ ID NO: 176789 - DNA, 122 bp, Homo sapiens
catggaatgctgcctcagtgcctggactgtaaactcctgaggcggtcataaataggcactcggcctggtatggcttcttggctaaacatttgcacagtaacacaaatgaggcagcagacatg

SEQ ID NO: 176790 - DNA, 122 bp, Homo sapiens
ggcaggaagggcaaggaggtgagactgtcagggaaggtgtgggggcctgcgtgtggcagacgagaccaaattggggaaggggcttgtgtctttaagatggaaaggaaataagggaccaaact

SEQ ID NO: 176791 - DNA, 122 bp, Homo sapiens
ctggctgcattggagccctccgctctctgacaggggccgtcgctggcctgtgccccgtgccggcaacccaggcacacctgtgcccctgcagggagccccgcccccagctgtctctggctcct

SEQ ID NO: 176792 - DNA, 122 bp, Homo sapiens
gacaattttccaggatacccagccaaacaattttcacctagtcacaaaagtcattttcatcgaagcctacagtcattcctttttctaattctattctctcatttctttctaaacatgatttt

SEQ ID NO: 176793 - DNA, 122 bp, Homo sapiens
ttttctctcacttaccagcagctctgctgacaagcgagaaaactgacaagtgagaaaagtcgtctgtcagcgcccgggctggtgtctgggctgtcaccgcgggcgcggagggaggggcgcgc

SEQ ID NO: 176794 - DNA, 122 bp, Homo sapiens
gagccaaggatcaggtgacttcacactacagacactttcagagtgatcaggccttactatcgtccaagtgactcgtaaacggctcataaccccagtttgacacgaaaatctagacttgcacc

SEQ ID NO: 176795 - DNA, 122 bp, Homo sapiens
cctatggtctgaggtgggagcatcccacaaaaagtgcatgaagttccttttaagtctagtcgtgaagaatgacaaggctagacgtgctctgcaagcagatggaaatgagtgagctatgctcc

SEQ ID NO: 176796 - DNA, 122 bp, Homo sapiens
cgggtagctcggaggtcgtggcgctgggggctagcaccagcgctctgtcgggaggcgcagcggttaggtggaccggtcagcggactcaccggccagggcgctcggtgctggaatttgatatt

SEQ ID NO: 176797 - DNA, 122 bp, Homo sapiens
ggaggaggtggggcaggagtcctgaatgagcatctccctacttagtgacagtcaggggcacggagaatggtgcccaggccaagggcagggcttgggccaagtgtgcgcagcgtggggtgtgt

SEQ ID NO: 176798 - DNA, 122 bp, Homo sapiens
ccagggacgctgggtgagtcactcctccccagtggacttgcccttcaaccttgatgaggacgaacacctcattaaggagcaatagctctcccctcaccttaatgccttacatggggttggcg

SEQ ID NO: 176799 - DNA, 122 bp, Homo sapiens
attttagagatagggatctcattacgttggctaggctggactcaaacgcctggtcccaagcggtcctcctgccttggcctccaaaagtgctggggctacaggcatgagccactgcacccacc

SEQ ID NO: 176800 - DNA, 122 bp, Homo sapiens
tggtaaaaaacttttacctttctgccatcgtgtcaggcttttgggttcccttcccctgagcgcaatcctaagccaaccagtctaaggtttgggaaattaactgttcctagtttggaggatgc

SEQ ID NO: 176801 - DNA, 122 bp, Homo sapiens
gttactcagcaaaaaccaaggaattccagtgggcacagacgttactaaaaagcacgagttcggactagaagcagcctcgtccgtgagctacgacgttttcacgccttcccacgcagcagttc

SEQ ID NO: 176802 - DNA, 122 bp, Homo sapiens
agaggtcaaagagcaaagggggtctgtgatgggtcacgccctccccggagcatgggcagacgcctcggccgtagcaggcccccgctccctcggggtggaactgcggggtcgtgtaatgaacc

SEQ ID NO: 176803 - DNA, 122 bp, Homo sapiens
ctgcggggaatactggccccccgcgcgctctgcacccgaggctctggggacttgcgcctgcgagggcctctgactccgacaaaggagacccggatttccagctgcttgaggaggggtgcggg

SEQ ID NO: 176804 - DNA, 122 bp, Homo sapiens
cctggagtgaggaggaccgggagctggctctggaggctgcggaggcgacgccggagagaacgaagcctcggctgggagcggtaagtggaggggcgcgcaagggacgagctggggcgcgcggc

SEQ ID NO: 176805 - DNA, 122 bp, Homo sapiens
cccaggatccccagggccagggctagagttcccagccctgatcctcccacagagcctgtacggagacagggaaaattgagagcacagccaccaccactcaccattcctttcttgttgaccat

SEQ ID NO: 176806 - DNA, 122 bp, Homo sapiens
aatgaaccgcggggactgtggggacaaggggcacccatgcctcctccacctgctgagacccggggacctccacccacagctggtcccacagtcgggcagcgctgatggcacacagaggcagg

SEQ ID NO: 176807 - DNA, 122 bp, Homo sapiens
gaagcgccaaagttggccacccagaggccgcataactcgtccgggtactaggaccagcatcgccatgagcctcggagaccgggtctcctttgaccctccccgcgatttccggtagcgttccg

SEQ ID NO: 176808 - DNA, 122 bp, Homo sapiens
acttatttacttatttattatttagaaaaggtctctgtcgcccaggctgaagtatagtggcgcgaacacggctgactgcagcctcgaactctggcttaagtaatcatcccactttaagcctc

SEQ ID NO: 176809 - DNA, 122 bp, Homo sapiens
agcccgtggctcagcccgggcccacatactcacgccgagatgagcccggtggctctcccccgcaagtctcggtactcccgccaggactccatgttggctctctggggcgcagcgccctccgc

SEQ ID NO: 176810 - DNA, 122 bp, Homo sapiens
ctttttagttatcaaaatctggacatatagggtaggttgttccagagttcactttttaggcgtatacattgtacgttcattactgggaaccccgcagcatactgttatttttaagtggaaca

SEQ ID NO: 176811 - DNA, 122 bp, Homo sapiens
ctgagctcaggctgggttgggcaagggaatgggaagagaatgagacatttgagcatggcccggacagtagggtgttgagcatgcagagagaaaggacatctagaaggcctggaagtggggaa

SEQ ID NO: 176812 - DNA, 122 bp, Homo sapiens
tctggtaagaacaggctttagccaaggaaaggaggggtggacgtgcaaagccctcccgtgcgggagccctgggacagaggaaccatcccacagccccccgggagccgccgatccccccgaca

SEQ ID NO: 176813 - DNA, 122 bp, Homo sapiens
agaggtgggagggcctagtgaagagtcaagcgctctgctctgtcccctgggagggaagaccgcagcccaggcctagcctggttgacctcagggtggccagccccaagactcggcacttgttc

SEQ ID NO: 176814 - DNA, 122 bp, Homo sapiens
gagacttactgtgacaaagcctcactgctttgtgatatgtctcaagatgaaggcaggctacgtcctgggaaacattttgttatcagacatgctgctgttaacacaatgtatatggaaagttt

SEQ ID NO: 176815 - DNA, 122 bp, Homo sapiens
tatagcagaggaaatagaggagtgcccagctggtgtccctggtccagagcccgggctgggcgaggagtgtgccgtgctccatcttcctagcttcttaattcatgccgagatacagccgctgc

SEQ ID NO: 176816 - DNA, 122 bp, Homo sapiens
tttttgaacttggaagaaacggtttgcagtaggtttttcaaaacaaatgggctttcctaacggacaagggagtacacctacctttcacttccaacacctgcactatagtgctgtcatcaccc

SEQ ID NO: 176817 - DNA, 122 bp, Homo sapiens
caaaggggacgcgcgctgacccggaagtgaaagctggaacccggccggagtagctctgagcgccggctgtgaggaaggaggttctgggcaagctatagccatggctgtggctgtagccatgg

SEQ ID NO: 176818 - DNA, 122 bp, Homo sapiens
caccgtaaccacgccctccccacagtcccgccccatcttcgctctcagcgcgcccggccccgcctctgccctttaaggccacaccgctatccaggcccggctccccgcctgtccgtcaatcc

SEQ ID NO: 176819 - DNA, 122 bp, Homo sapiens
ggggaaaggtccttactgtttttccagacctacagttgtgatagaggctcctcccagccccgcccacagaccccaacagtgccctctctcacaaatggattctggggcttggtctttatttt

SEQ ID NO: 176820 - DNA, 122 bp, Homo sapiens
atctggcttttaataagaacgattaacaagcgtttttgatcacaggaagttgagaagagtcgctgcttctaagaatacaataaacattgactagcagttagacggtccatctttctctatca

SEQ ID NO: 176821 - DNA, 122 bp, Homo sapiens
ctccttcaatggggtgaataacggtgatcagaacaagcccccactctccatcctgcccctcgccgtcccctgcttggtttcctgcccaccactcatcactgcctgaaatctcattagtcacg

SEQ ID NO: 176822 - DNA, 122 bp, Homo sapiens
caggtcagagccacaagagggcgctcttcccctttctattctatgttgtcctgtggttcccgcttttcctcaggggcaccttccacaaatgtaaaaaccccacataaacatcttgtttctct

SEQ ID NO: 176823 - DNA, 122 bp, Homo sapiens
tgatgtgtggtaggagaggtggatgacgtgcatttcgacttagggtattttcagctcatgcgggtttatcgggatgttccttgtaagttcctcgttgtaagtcagttcctcgttgtaagtcc

SEQ ID NO: 176824 - DNA, 122 bp, Homo sapiens
ctctcagctccagctcttcctgtgacaccaccctccggacagagacccaagctccaggcccggccccgcccagaggttccagggagaagaccaggccaccgcccactgcccggcgtcgggga

SEQ ID NO: 176825 - DNA, 122 bp, Homo sapiens
gctgtcaaacctctcgccgctacggactacaactcccagagggctctgcgacggccagcacgcccatcaccgcagggcccagccccgaggcttcaggaggctgggcagccggcgcgcccagg

SEQ ID NO: 176826 - DNA, 122 bp, Homo sapiens
acttgagcaacagaagtctaagatccctatctgatttgatgttttgcgacccttttaaggcgcagggcgcgaaagaacagaaacagaagtgtccgttcaagtaggtcggccggggtgtcact

SEQ ID NO: 176827 - DNA, 122 bp, Homo sapiens
cactgacttcaagaatgcagccgcggaccctcgcggtgagtgttacagctcttaaggtggcgcgtctggagtttgttccttctgatgttcagatgtgttcggagtttcttccttctggtggg

SEQ ID NO: 176828 - DNA, 122 bp, Homo sapiens
ggtggctggagggggcagaggtcagacgcctcgaaggagggcgccgtgagggcagagccgcggccacctctaccgcagcagcccgtcgggccggacaccagccgcagccgccagcccggcag

SEQ ID NO: 176829 - DNA, 122 bp, Homo sapiens
ccaaaccgaagttactggcttctatcttccaggagaaccaggagccacagccgcggctcacgccccaccgcaacattaaggtgagtcgccgggtggcggcctggcggggcagggcgagggcg

SEQ ID NO: 176830 - DNA, 122 bp, Homo sapiens
ataataatacaacctgggcaacatggccaaacctcttctctacaaatacaaaaaattagccgggcgtggtagcgcactcctgtagtcccagctacttgggaggctgaagtgggaggattgct

SEQ ID NO: 176831 - DNA, 122 bp, Homo sapiens
ttggtcctctaaaaccccacaagccccaaatcagaaggctgtgcctggacttagctcgagcgagcccagaagcacctggtgggatacgcagctgtgccccaggcatttctacccacgggctc

SEQ ID NO: 176832 - DNA, 122 bp, Homo sapiens
ctttccgccacatcacacggcctcactgggcttcctaccagtttctcagaattacacgcacgaccatccaaacattggctccatgccagggctgtgactgcagcctgtgtaggaccatgggg

SEQ ID NO: 176833 - DNA, 122 bp, Homo sapiens
ctgcgtaacttccgcttttaggccgagacacgtacaaacgtgatacgtggctgctggcgtcgacccgaggggcagggactaggcattttagcaaccaagggggtgtggctaagcgagagagc

SEQ ID NO: 176834 - DNA, 122 bp, Homo sapiens
gcagtgttgccatcggcgtgcgcgcgtgtgtgcgagtgtgacagcggctgtggctgtggccgtggccgtgggaggcgggcccggcggagcccagccgcggggggaccggcccgggctcccgc

SEQ ID NO: 176835 - DNA, 122 bp, Homo sapiens
gaggcaggcggatcatgaggtcaggagatcgagaccatcctggctaacatggtgaaaccccgtctctactaaagatacaaaaaaattagcggggtgtggtggcgggagcctgcagtcccagc

SEQ ID NO: 176836 - DNA, 122 bp, Homo sapiens
gaggcacccacagaggaccccaacacgaggaccctggccctgggtgcggggcgtttttcccgcactctgctcccctagcagatggcccctgctaagcaccagctcccagaaaaggaaaggaa

SEQ ID NO: 176837 - DNA, 122 bp, Homo sapiens
accccggggccggggagggcagggacgaccactgcagcggcggcggctgcaggagctcaacgccgagcacgaggaagggagccccgcgccgcggccgccctcccgtcggcacgcccccgcct

SEQ ID NO: 176838 - DNA, 122 bp, Homo sapiens
gggcgagagacctaggtccttggaagaagtacctggagtgtggagctgcggcggttcccacgtgcgcgttcccccgagttccccagcagcgctgcctttgtgcccacggaggcgggggcgtg

SEQ ID NO: 176839 - DNA, 122 bp, Homo sapiens
gagcagggccatagggaggtgctgggtgggacaaggttgcagaggtgacactagtggagccgacgtccagatgcccgtccacccgcggccccaggccctcctgagactctatgcccgtccac

SEQ ID NO: 176840 - DNA, 122 bp, Homo sapiens
tcctcgatctggcgcttgacgaagctgtcgatgcgcttgcggtaggtgcggttggtgagccgtcccaccatgcccagcccatacggccgcttctcccgggcgaagagcttgcgcaccggcac

SEQ ID NO: 176841 - DNA, 122 bp, Homo sapiens
gccgcccagagaagtccttgcccttcttaataagcacctccttggccagctggtggtggccgacaatcactgtagtcttggtgcccatacgaaccgaatagatggggccatattttttctgc

SEQ ID NO: 176842 - DNA, 122 bp, Homo sapiens
cccctaaggccggtccagcagggcgtggacgacagcagcgatgtaggggaggccccttcccggggccccctcctcttccaggatgtggtggggctggcacagtgactcctgggggaaggggc

SEQ ID NO: 176843 - DNA, 122 bp, Homo sapiens
ctggaagaaaggcagcatagatgatgagcttggtgtgggccgtgttgagttaccagtgtccgagggacaatctgaagaagtgtcaggagccatggatggactaagggcttgggaggcagtgc

SEQ ID NO: 176844 - DNA, 122 bp, Homo sapiens
gcccgagggggaggctccggagcgtcggcggaaggcgcacgggatgctgaagctttactacggcctctcggaaggggaggcggcgggacgccccgcggggcccgaccccctggacccgactg

SEQ ID NO: 176845 - DNA, 122 bp, Homo sapiens
cgcgggtaggcaaacagagcgggactgcatttcccagagtgcactgaagacacggaggcgcggagcagggcgggaggaccgtttccatagcaaagacgaccagccgaggatggctggcggag

SEQ ID NO: 176846 - DNA, 122 bp, Homo sapiens
cggcaggaggcggggccgggggcggggcgtgagctggccggggcggggcctatggaggggcgggaccgcggcgccctataagtactgcggagcgaggcgcgcgcccggccagagagcgagcg

SEQ ID NO: 176847 - DNA, 122 bp, Homo sapiens
ctacagttcgcgggtggggcgacctgcgacagcccctttaagaggcgtggtcacgtgctccgcccccacctccgcctcgcgcgccagtaaggggtggggtgcgggaggaggtgccggggagg

SEQ ID NO: 176848 - DNA, 122 bp, Homo sapiens
agcagacagccttggattgaccccaaccctctcactctcaaggaacgaggcggcctgcctcgccacccatcaggtcccacgctcaccccggacaagccgcgctgggactccgggttcttcca

SEQ ID NO: 176849 - DNA, 122 bp, Homo sapiens
cgtcagaacaaaccccttctcgctgccttttcatggagccctggcactccggtttccgggcgttctgccccagggctgagacttggatttgtggctcctgcagcatccctgagggagcatga

SEQ ID NO: 176850 - DNA, 122 bp, Homo sapiens
atctgcccacgtcggcttccccaagtgctgagattacaagcgtgagccaccgtgcctggccgtcagtaagtgaattttttattgggaaaaagaaccttggaaggcatggtaagtatttattg

SEQ ID NO: 176851 - DNA, 122 bp, Homo sapiens
aattaatgacagaccttcatttcagtgttaccaatgacaacctacaatacaatcagactccgccttcagaggacattaattggagttatctagtgagtggagtatcagaattcaatgaggat

SEQ ID NO: 176852 - DNA, 122 bp, Homo sapiens
tcagccccaccaagcggagggcagcaaagcccccgaatgatttcgcttacccccacccgccgtccctgctggccagacaggcacaccccgtccatagggcaccccctccccacggtatccag

SEQ ID NO: 176853 - DNA, 122 bp, Homo sapiens
ttgcttgttattctgtcctatctttccttataattcaggggctaaataccagccacctgtcggccagttaaaagcaactagcacggctgccggaataaagacacgggtgtcaggctttctgg

SEQ ID NO: 176854 - DNA, 122 bp, Homo sapiens
ccagaccccacccatcccgccgcggccacgccccatcctgcccgaagccccgccccatcccgcccgaagccccgccccatcccgccgcggcccaaccatccgctaggccccatccagccgaa

SEQ ID NO: 176855 - DNA, 122 bp, Homo sapiens
agttctgtcttctctggagcagctgtggcttccccgtggctgcttggtgacatggattagcgctacgtgggctgcagcatttgggatccaggctacctagaggggcatcgggccagggaaaa

SEQ ID NO: 176856 - DNA, 122 bp, Homo sapiens
ctgttcagctgcatccgctgctccgaggacatgtccagtagctggtccaggtccacgccgcgctgggtgaagttgcggaaggtctgtttcttctgctgctgtacctctgccgtcttgctgca

SEQ ID NO: 176857 - DNA, 122 bp, Homo sapiens
accccgggcaggcgagtgggaggcggacaggggagcggttcttccggcccccacccgtggcgatcccagcctccaggttcccggcagtcgccccgcctcgcccgtcacaaccctgccgcgtg

SEQ ID NO: 176858 - DNA, 122 bp, Homo sapiens
gaaggctctgtgtgcctgccaggcttctccaggcccttatcagaagctgggggagtgtttcggcctttggtcctctcacccgaaactctcctaagtgtatgatctgtctcttccaacccttc

SEQ ID NO: 176859 - DNA, 122 bp, Homo sapiens
cgtgggggggttggctcaggcctgtaaccccagcactcggtgtgactctgaaaatgaacccgtgggggtgttggctcaggcctgtaaccccagcactcggtgtcactcttaaaatgaacccg

SEQ ID NO: 176860 - DNA, 122 bp, Homo sapiens
tgttctctcttcagaacccccctctcctccttggcaagcttcaagcaacacccccaaagacgctgctggatccaaacaacagacaaagctctccacaggagcagttctgagcagcaccctgc

SEQ ID NO: 176861 - DNA, 122 bp, Homo sapiens
ttcatctcactagggagtgccagacagtgggcgaaggtcagtgggtgcgtgcaccgtgcgcgagccgaagcagggcgaggcattgcctcacttgggaagcgcaaggggtcagggggctccct

SEQ ID NO: 176862 - DNA, 122 bp, Homo sapiens
ctctggtacgtggagtcattggtcaatgcagtgacaatccaagggtgtcatttgtggggacgttcaaacagaactcagggaagcaaagggcattctgtctcaacagtgtcatctttgggatt

SEQ ID NO: 176863 - DNA, 122 bp, Homo sapiens
tccgcaggggcttcctacctgtgtgagaggtcgtagcgggagacagcaacagagagtaggcggctgggccacgtccttcacagggcgtcatgtgcctttctattttcatcttagaaaatttc

SEQ ID NO: 176864 - DNA, 122 bp, Homo sapiens
gaggtcagggcttgcctttgaggcccagggtcagctggggactagcaggagctctaatctcgcgctgcgtcagggcgggaactgcaagaggccgcccccggcaggccgcgcatgcgcactcc

SEQ ID NO: 176865 - DNA, 122 bp, Homo sapiens
gatcctttagagacatcctctcccggccaagtcctgcaagggagacttgagtcagaggttcgatgggctggggtgaggtgggccacacaattaccacacccactcccaggcctattcccggt

SEQ ID NO: 176866 - DNA, 122 bp, Homo sapiens
cgtcctgtttcagcaggaactccgccatttcccacaggttgatgctgcggcacaaagcggcgctgctcaggctcagcgcccaccatcatttctcatttaactccttttccttccacagtgca

SEQ ID NO: 176867 - DNA, 122 bp, Homo sapiens
gtctctggcacctcttgttggcagcgtcgcagttgcaggcacagggcaggcattggggggcgggcagcgggccaggcccaggcgactcctttgccaggggctgggcaggtgtggagaggggc

SEQ ID NO: 176868 - DNA, 122 bp, Homo sapiens
acctgcagtgccgaagccagcaggaggctgccctgatggagaacgtggctggaggggctgcggtggtcggccctgggcatccgcttggcaaggctgctgtctgcagtttcccatcgagcact

SEQ ID NO: 176869 - DNA, 122 bp, Homo sapiens
accagagcccgtttgctattggctgtctccggggacacgtcatcaaggattgaaacagcgcgcaaatctgaatgtgtgtgtatgccgggcaaagaggctgaggcgggagaggcagaggcaga

SEQ ID NO: 176870 - DNA, 122 bp, Homo sapiens
gccccgtagacccgcatcagctgctgcgtgtccacttggtcggccttgttcagcacgacacggatcttgtcgtcctggccccggaaggccttgatggcctctgagaattcatctgagatgtc

SEQ ID NO: 176871 - DNA, 122 bp, Homo sapiens
gcgtattgtcaccgccaccccacactcgccgcactcgatgcttctcagcctgaattgcaacgccacataggtcttctgcttcggagaaataaacacgctgagagaatgtgaaggagttttcc

SEQ ID NO: 176872 - DNA, 122 bp, Homo sapiens
cacctcttcactcaggccttcatcctacaacgtcgggaatcaagacagtttggggctgggcgccctggctcacgcctataatctttgggaccccagggcgggaggatcgtttgaggccatga

SEQ ID NO: 176873 - DNA, 122 bp, Homo sapiens
caggttggagggtcctgtgtcggggacagcgcccctctggctgggatgaaggctttggggcgccccacggggcggtggggctgtggagcggggccgtggggctgtggctggggggccgcgcc

SEQ ID NO: 176874 - DNA, 122 bp, Homo sapiens
gatgtgattcagaaccccctcctcacccaggtgcctggtctttgcagtgcatggcctgggcgctctcagccccaggattccccagcaccaaggcccatccactcacagtctagcaaacaaga

SEQ ID NO: 176875 - DNA, 122 bp, Homo sapiens
agggcctaagcccaaggagtcgagagaatagcaagtgcttagagtctcaatgcttagaaccgcagcccccaggatgtcaggcagaatgggcccttggagcccagcccacccttcttgtcctg

SEQ ID NO: 176876 - DNA, 122 bp, Homo sapiens
gaaggaacaaatgcttctctgtggagttggtctcccttcccccaacaaaaacaagaggtccgggctcggaggaatttgaaagcagcgatctgccaaaaacattgtgaaaaactatgggggat

SEQ ID NO: 176877 - DNA, 122 bp, Homo sapiens
ctgaggacgaaagggcaggcctggtctccgccagagtctaagtgtctcggtgggggccaccggctcctcgcgaggccagctaacctccccaacccccaccccccacccccaacgacgaccac

SEQ ID NO: 176878 - DNA, 122 bp, Homo sapiens
atgcttccaccgtggagccggcctgggcgggggagaggctccccctttctgccgctgcctcggaaatctgcctctcaaagaaaacagcaaaacaaacacggaggaaggatcccgcctggcag

SEQ ID NO: 176879 - DNA, 122 bp, Homo sapiens
cattggatattgacggataggaggcagcaaaccactcacagagccaggaagaaatgaatgcgttggtattgccaggaggggaagccagcccggctgaaatacgctatgaccatagccaggag

SEQ ID NO: 176880 - DNA, 122 bp, Homo sapiens
ggagggagaacaatcacttggatttatttgagtcccagtagattggagaggtccactggccggctttgttagttgcagcaaatccaactcaaactgccatcagagaactccctgcctcctgc

SEQ ID NO: 176881 - DNA, 122 bp, Homo sapiens
acacaaagggctcaagtcagacacgtccaggaatctgggtccaacgcagtgacgggtttccgtccatgggactcgtccacacacatgacagacccctcaagggggcgggaggggaggttaca

SEQ ID NO: 176882 - DNA, 122 bp, Homo sapiens
gacaggggtccctgtttgcctcaggagcaagcatgaacctgacacagctcaaaagtccttcgcactggtccttccctcataccattctccacttgcctctaggacgacagacccaggtcaca

SEQ ID NO: 176883 - DNA, 122 bp, Homo sapiens
tctctaagtgttgctcagagtgaagagtgaagagcatttggtacacacttgaccttctgtcgtccccagaccagtagtgaccaatcgggagtagcaaggaaggacactgcccagtgtatctt

SEQ ID NO: 176884 - DNA, 122 bp, Homo sapiens
tgcgcgtcggcagcagcgtttgaaccgggtctggggcggaaacagcactcgccgctgaagcgcctgcgcaaggccaagaaggaggtaccgcccatggagaagccggaagtggtgaagacgca

SEQ ID NO: 176885 - DNA, 122 bp, Homo sapiens
agcttcatgctgggaaaagatccagcttggccagggaagtggaagtgtgcgtaagaaggacgatgtgtgtcactgatgccctaggatatctgggggtagcagataccctgcaacatctctgg

SEQ ID NO: 176886 - DNA, 122 bp, Homo sapiens
cgtagaacctcgaggtttctcaaagaaatttccactcaggtctgttttccgaggcggccccggccggggtggattggatttgtctttggtgaacattgcaatagaaatccaattggatacga

SEQ ID NO: 176887 - DNA, 122 bp, Homo sapiens
cacacaccacattgttctacatagaagtgccttcactatacagcttttcatttattcattcgttcattcactcatttattcaacgggtaatagtgaattccaaatcaggaactgtgctatgt

SEQ ID NO: 176888 - DNA, 122 bp, Homo sapiens
ggataaaggagtaagaaaatcaaaggtcaccaaacggagcccttaaagggcaatgctctgcgtgtgccacggtgcccaacagcatctcgtgccagctgagctgcggtgtgtggacccgggga

SEQ ID NO: 176889 - DNA, 122 bp, Homo sapiens
ggtcctcgggcagcaccgtgttcaccgtgtcccagctgttgtggcggctgttcatggagccggagtagcaccaccaggccgccccgcggtgctgctgcgccgaagagttgagcgcctgcgag

SEQ ID NO: 176890 - DNA, 122 bp, Homo sapiens
ggcctcaccaactcggttgcgcaaaccgcgctcctggctgagcggccgctgtgcgcgccccgcctgctggaccacttcatctgtgagctgccggcgttgctcaagctggcctgcggaggcga

SEQ ID NO: 176891 - DNA, 122 bp, Homo sapiens
ccacgtctgtcctctaagagacccaaagcacacaagtgaaatggttatgcaacaacacaacgattataaaataagactgtggggacagttaatacttacaagggttgggaaaaaggaatgac

SEQ ID NO: 176892 - DNA, 122 bp, Homo sapiens
tgtttattcaaactaagcttctctgagcacatggtctgtcccactcatcctcagagtatccgttggttttacttcatgttcagactgcagtgttgttaaagaaataaagctacagtgttttc

SEQ ID NO: 176893 - DNA, 122 bp, Homo sapiens
cacgtggtgccgccgccgcgcttcaacaacaactttattgggagcgcaggtctacgggtgcgcacgcaggaagtgggaggagccggttcccatggcaactagccacccctagcacccggctg

SEQ ID NO: 176894 - DNA, 122 bp, Homo sapiens
tttgcctggtggaccttccgagtggaaagcagccaatgatttgttaccatgcaggacagccgcctccgggaacccgtgtgtggcccgggtgccacgcagcctcgcgacccctgcctctcttc

SEQ ID NO: 176895 - DNA, 122 bp, Homo sapiens
gagcagtcatttccccacttgagtgtgcattagtatcacctgggggcttgttaaacacagcgtgcaagctccatcccagggtttctaattctcagggtttggtttgcggcagaagaatctgc

SEQ ID NO: 176896 - DNA, 122 bp, Homo sapiens
tccttccatctcagcctgccaaatgctgggattataggcacgagccactgcccccagctgcgatacagaatattttcatcatcacagaatgttttatttgacagcactactttacagaatct

SEQ ID NO: 176897 - DNA, 122 bp, Homo sapiens
ttttataagactgcatttcagtggttggtaagaaacagggagaccttagccacgtgtagtcgaggctgagccttgtgacaggtgcagatgcctcctggggccaatgcagctggtcacagcag

SEQ ID NO: 176898 - DNA, 122 bp, Homo sapiens
ccccggaaatcctgctgcgctgtttaaacctaaggtgacctaacggatggcgggagcggccgcgcgagccttggagcagggcgcggccattggtgacgcacgccggggagcacggcgcccac

SEQ ID NO: 176899 - DNA, 122 bp, Homo sapiens
ggtgtaacttactctcatcgtttgtcttaagtaatacaaaacagcacaatacaaagacagcggctcatatccactcttggttataggatgttataaatccctgaaaggaaccgctaaagtaa

SEQ ID NO: 176900 - DNA, 122 bp, Homo sapiens
agcccctgtcttcctgtatcaccccgtctcccaccacctcccatctccccagccctgccccggccacacgccaggaacagcaggctaagcagggctgcacgggtacagtagaaaagaggcct

SEQ ID NO: 176901 - DNA, 122 bp, Homo sapiens
actggcacggaggggcacggtgaggccggactgcagggccaccgtggggtggtgtcgtcccgagcctcagctgcaagggggcaaccctgggcctgtgtcactggctgcggagggacaagtga

SEQ ID NO: 176902 - DNA, 122 bp, Homo sapiens
ggctaggtgtaggggtcctgagttccgggctttgctacccagctcttgacttctgtttcccgattttaaatgagcagtttggactaagccatttttaaggagagcgatggggagggcttccc

SEQ ID NO: 176903 - DNA, 122 bp, Homo sapiens
agtaaaccaagtttaatatagaaaagaatcgttcactgaaattcacaaggaaaaatatcccggagcatcctaaaaggggatgcagaggtgtgaaaactgatattacctgttgtgctccatgg

SEQ ID NO: 176904 - DNA, 122 bp, Homo sapiens
gggcactggggcggggacggaggagaggctgtgggagaagggagggaccagaggagagagcgagagagggaaccagaccccagttcgccgactaagcagaagaaagatcaaaaaccggaaaa

SEQ ID NO: 176905 - DNA, 122 bp, Homo sapiens
tgtagccgtcactggccagacctccagggtgcggaatcaaataggaagcatgcagagactcggcagcttttcctctgatgtgtaagttatttggaacgcgtgctgtgtcccgcgatgtccct

SEQ ID NO: 176906 - DNA, 122 bp, Homo sapiens
aagccaccagggccgctgcgttgccactgccttgcacccccgggagctggggaacagacccgcacagccgtgaccacctgaaagccagatgagccaggggaagcagctgcgcctgcagccac

SEQ ID NO: 176907 - DNA, 122 bp, Homo sapiens
cctcatcagacatcaagaggctgttgcaccaggagggccggtaccgtgtctagaggtggtcggcatggggttggagttgtattacataaaccctactccaaacaaatgcatggggatgtggc

SEQ ID NO: 176908 - DNA, 122 bp, Homo sapiens
agagccccgctaggggtcggccccaccctctgggatctggagaaaacctgccttaaggaccggatcgtaccggatccatccggctgggaagggaggggactggacccggtttggccgggccc

SEQ ID NO: 176909 - DNA, 122 bp, Homo sapiens
ggccgcggaagcggtaggtgatgtcccagcacatttgcggcagcacctggaagaatgccacggccaggtcggccaggctgaggtgtcggatgaagaggtgcatgcgggacgtcttgcgcggc

SEQ ID NO: 176910 - DNA, 122 bp, Homo sapiens
tgataatgcagtaagggacccccattttacgacatagggcaggcaagaagacaaccagctcgatgggatccatgtcgtgtgaaatcaccaccagctgagctttcttgttctccaccaaggtg

SEQ ID NO: 176911 - DNA, 122 bp, Homo sapiens
gcgcttcctccgcgggtatgaacagcacgcctacgacggcaaggattacatcgccctgaacgaggacctgcgctcctggaccgcggcggacatggcagctcagatcaccaagcgcaagtggg

SEQ ID NO: 176912 - DNA, 122 bp, Homo sapiens
tgacgcgccgcagcctggccttggtgtcggccagctctacggccaggtgctgcttgtcttcgctagagaggctgctggtggggctgggagtggagtcggcgctggaggacttgatggggctg

SEQ ID NO: 176913 - DNA, 122 bp, Homo sapiens
gtaatctctaggaagtcaatatgtggaagcaaccaagcctgctgtcttgtgatcacttagcgaaccctttatttgaacaatgaagttgaaaatcataggcaccttttactgtgatgtttgtg

SEQ ID NO: 176914 - DNA, 122 bp, Homo sapiens
ctctcctactagaagccctacctccaagtgaaaggtgacaacgtgctagcagccctggctcgctctcggcggcgcctccccgtcctctgcgtccgctctggccgcgctggaggagcccttca

SEQ ID NO: 176915 - DNA, 122 bp, Homo sapiens
gtgaaaaggaagttggtatcaacgtgatctcgactaagggaccgagcggaagtcctcaatcgtacgccacgcggagagcatgctgggggccggaaggaagaggaaattccagtagccgatca

SEQ ID NO: 176916 - DNA, 122 bp, Homo sapiens
cctagatccagggttaaagaggtgaaatcaactatgttcgtcctgtaggctccctggggccgaggctgcttttattagagcaaatcaggcctgtccagaagctgtgctatgggggaggagag

SEQ ID NO: 176917 - DNA, 122 bp, Homo sapiens
gctgtggaagactgtggaataagcagcagccagccagcctggtgtgtgagatgagggatccgatcggttgctcgtgttggaacaaaggcattttgcagccctccaggtggttgcagatgatt

SEQ ID NO: 176918 - DNA, 122 bp, Homo sapiens
tcgcggccgcgatccacgtgccctgggccctttcccttgcctccaattttcccatcttcccggggagccttgaaatgtacatttgagaagacttttgccatcctcagggaaaaggactgtgt

SEQ ID NO: 176919 - DNA, 122 bp, Homo sapiens
cccacggtcctgagcgaggtccccagtcccagagaagcagatgtcttgggggagcctccacgggtgtctgtggtcttgactgtgctcttcagatctgcaaagaaaagctcgatgtctcacag

SEQ ID NO: 176920 - DNA, 122 bp, Homo sapiens
ctccgagagccccctagacccggtgccttgcaggacgcctctggagatcaggagggctggcggcgcattcggcgtccgggaggccgggccccggacgcgcgaggagcgcggggcgcgggaag

SEQ ID NO: 176921 - DNA, 122 bp, Homo sapiens
acctccttgccattcacacactctagttcaatggtatctactctggcactgctaatcctccggaagacgctgttcaatcaagtctaaatcagccttccagtagtttccatccattgggtctc

SEQ ID NO: 176922 - DNA, 122 bp, Homo sapiens
atatgatgaaatgtacaatgatcttatcacgaaagacgaagaattctatacacagaatggcgttctgtatatgttagacagaaataagagaatcaagctccggccagaaaggttccaggatt

SEQ ID NO: 176923 - DNA, 122 bp, Homo sapiens
gggggctccatgtttcagtcttgcgaatcatgctgctatgaacagggatgtgcacatgcccgtccgagattctgctttcagttctttcatcccgttttccacagtgcctgcctcagttcagg

SEQ ID NO: 176924 - DNA, 122 bp, Homo sapiens
gcctcctcgagcaaggtgggggtcccagggtcaggtcaggtgcagatcctgtggcagccacgtctttccatgctgggcctgctgggccccccaggcttcctgatggggtccccagttaggag

SEQ ID NO: 176925 - DNA, 122 bp, Homo sapiens
cgagcgcaagtccccgggaggtagggagcaggccagagggagggacgacccgggggagggcgggacctgcagagccagctcctttccagtagccgcgaccccctgccgccagcgtgacacac

SEQ ID NO: 176926 - DNA, 122 bp, Homo sapiens
ttgtggttacctgttaatacttggcaacaattatgagccctgatatgagccaacttcttccgtcttatcccctttgaggacgctctgttatcgcccccattttgcaaacgaggaaactgagg

SEQ ID NO: 176927 - DNA, 122 bp, Homo sapiens
cacactgaggtcaggattctgaacgtagtgctgttgagactctagaacaagacggctgtgcggcaggaagacatttacctggttgctgggagggtgctgactcgggtgaaaaatacagacgg

SEQ ID NO: 176928 - DNA, 122 bp, Homo sapiens
tggaagctggcgacaagtaggtcgcatcctcagagcgactgatagccagtcctggatctgcgcgaagagcttgactcgcagaggataaagtgaaaggaaaaggaaatgggagacaagggaga

SEQ ID NO: 176929 - DNA, 122 bp, Homo sapiens
actcaaggatgaccccttttcagtcccggttctcaatttcaccttctcgcaggaaagccccgcgtctctattaacccttccatcaccgctgcaccgcgagagggaccggagaagtcttagca

SEQ ID NO: 176930 - DNA, 122 bp, Homo sapiens
gctttttgtgggctcccagacctgcaccaggcccagaagtgcttacccaggccgtcgcctcgtctggcctcgcttgcccatgacagctttcagaaaactttaattcaggactggctagatga

SEQ ID NO: 176931 - DNA, 122 bp, Homo sapiens
atccataactctgtcgggatcctctactccatgctgctagaggaggaaaaggaaaaaaatcgccaagtggagttccaagcaggtgagtggccccgcacgccccacttggcattttgggcaag

SEQ ID NO: 176932 - DNA, 122 bp, Homo sapiens
cgtttcacaggcaacggggtctaagagccgggcggaagttctccctgtgtcacacaaggtcggtttgacttcaggcttctgtggcctcgatttcttcatgtgtgaaacagggaatgtatcgt

SEQ ID NO: 176933 - DNA, 122 bp, Homo sapiens
cttggagtgtttcccatatggggagagtctcccctaacaaactctccaaaggcaatccaccgagctttttactctcccaccagcacacagcttctgtacaggcagaggcaaaggcaaacaca

SEQ ID NO: 176934 - DNA, 122 bp, Homo sapiens
agttgaggcagaccggtgtcatcccaaggacaacagtgtcttgtccggtagcccctgcatcgggcctggggtggttgtggagtccctggcttgcacccggggtgcgtgtcgtgcccacgatg

SEQ ID NO: 176935 - DNA, 122 bp, Homo sapiens
gtctctctgctcttggtgtctgcatccagggctgggagggggtcaaatgtatcacactatcggccccaggcccaccaagcctggggaggtgaccacccttccacgatggcatttggatgttc

SEQ ID NO: 176936 - DNA, 122 bp, Homo sapiens
ctggcagagcacatgcgccgtacgtccatatgcagggactacaatccccagtatgcagcgcgggcctggcctcaaatcccacctgccctagcatgcacgtggtgtccttcgcgcatgtgaca

SEQ ID NO: 176937 - DNA, 122 bp, Homo sapiens
atcccgctggcgctggtggtgccctgtcatccgtttatttaagggacgtgctgccctcctcgccggcaggaaaagcagctgctcagcactcgcagcccatcctccacctgctcaggctgtag

SEQ ID NO: 176938 - DNA, 122 bp, Homo sapiens
tctctccacccatcccctggaaaatgaaagtaccccagaagcacaagttggcctgcagagcgcgagagcgcggaaaggccgctgacagcaaggaccgcgcgtgcaccttgcggccccggacc

SEQ ID NO: 176939 - DNA, 122 bp, Homo sapiens
ggagccgatccctagcgccgcgatgcggagcacctactgcaggagatcgggggcctgggacgcgctggccgaggtgtgatcggaccccaggctagccacaaagggcacttggccccagggct

SEQ ID NO: 176940 - DNA, 122 bp, Homo sapiens
gaatgatgcagagttccgccctctacagaggcaggcattatctagcagcggaaatagacccgtctgacgccaaatgagatggagaaaataaacactgccaatgaaatactgggggtggggca

SEQ ID NO: 176941 - DNA, 122 bp, Homo sapiens
cggggtccgagctgtggagggcggcagggcctgggacgccgtgaggggtcggggccgagccgggaggccgagcggggccggtggctgccggccggcggggccgagggatgcggggcccgggg

SEQ ID NO: 176942 - DNA, 122 bp, Homo sapiens
ctctgcaaaccccctttttcagcaccagctccagcacagtctgcgaaaacttttttcaagcgatgcagctttaaataggaagaatgctgcctccacttcttttcctgccccttttcagcttg

SEQ ID NO: 176943 - DNA, 122 bp, Homo sapiens
gcccatgacactgagaaacctgggccaccaggaaggcctcattgcccgtgaagatgccatcggctcgcatcacaggctcctcccatggattagggggcggtgatggtgccggtgctcggggc

SEQ ID NO: 176944 - DNA, 122 bp, Homo sapiens
ccggcggcctcagcatggaggacggcttctccagctacagcagcctgtacgacacgtcctcgctgctccagttctgcaacggtgaggggcggccgcgcggggccggggcggcgagcggctgg

SEQ ID NO: 176945 - DNA, 122 bp, Homo sapiens
ggtgcgctcggggcgggaaggccctccgcgctgcgtggggctgaggcgagctcgggcttgcgtttgcttttgtcgctgaggaagacttttatttgtttattttcttgagacagggtcttact

SEQ ID NO: 176946 - DNA, 122 bp, Homo sapiens
ttggggcctgtcggccggcctctccccatttttgtgacgtgtcaggggcagcagcggtgacggggccaccacacaaagccaggtcgtcgggcagtggtctcccaggctaagagccccgatgg

SEQ ID NO: 176947 - DNA, 122 bp, Homo sapiens
atgtatgcaaattaatatatgcaaattaagtatcctaaacgacccacccaaagattgggacgcctgggacccttcccccaggaggtgaaatatctttaatcccctcctacccctctccctcc

SEQ ID NO: 176948 - DNA, 122 bp, Homo sapiens
cacacaagatccttgacagcagataaagacagttcctgggcttcaatggtaacactctcccgtgtgaggccaatttgcagtagaaatgaaactgtatgcactgagcctctggagttggtgag

SEQ ID NO: 176949 - DNA, 122 bp, Homo sapiens
ggcgagaaatcgagcgcagcgccggtgggccagcactgctgggggacccagtacaccctccgcagccactggcccgcgtgctaagtcccccattacctggggccagcagggctgactggctg

SEQ ID NO: 176950 - DNA, 122 bp, Homo sapiens
taacctggaagcctctgtcagtctcatctgctcacctgtcaggccttatcagataaggctcgagacagccctaggagataagagccaggcagggggggccccggcccctccctgagcaccta

SEQ ID NO: 176951 - DNA, 122 bp, Homo sapiens
aatggttaactgctgtcttagagtcaatttgctagcctcttgtgtttagcaaggtggtggcggctaatgccttaacacagggaggccatcctagcatcacagaatccaattgtttggatcag

SEQ ID NO: 176952 - DNA, 122 bp, Homo sapiens
acctcctgtcgcatcagcaccctcttcccctctcttcatggacacatgggcagatgtgtccggtggtgtaccccgtcagcctgcaggctctgcgacggcagcccggggtcctcacgcctctt

SEQ ID NO: 176953 - DNA, 122 bp, Homo sapiens
ggggggctgtggtgcacctcgcaggatgcccccccacacaccctgtgtcctgtagtcccccggcacagccagaggccatacagccctttaggaggagtattagtggggcaccaggcccccct

SEQ ID NO: 176954 - DNA, 122 bp, Homo sapiens
tcacaaaaattttggaaagtttaacaactatcaagttgatgccccactataccagtgcaccgctggcagaaggacccatgaaacctgggaagactacatttcccagaagcctcctctcccag

SEQ ID NO: 176955 - DNA, 122 bp, Homo sapiens
gtgaaatggcagagatacacaatggagttgagatgtgatttttttttttttttaaggaaacgagagaaggcttaccaagttatataggcaggagaaaataagtggcaagaatgagaaagggg

SEQ ID NO: 176956 - DNA, 122 bp, Homo sapiens
cccaggccctgatgactggtgaccatcagccttgtagccaccatatcaactctgagtgaccgtgccctccctgggggaggttacagcctctctcctgtgtgacagggcatttgcttaagatt

SEQ ID NO: 176957 - DNA, 122 bp, Homo sapiens
tcacagggcttccgtgatccccgcgcagggcctgcctccttcgccgctgaccgctggccacgtcccgctccctccgccgacgtgtgcttagaatagctgcagaaatgtccgcttccgggtca

SEQ ID NO: 176958 - DNA, 122 bp, Homo sapiens
atacaggctcccttcttgctctcagagaagtgaagcctatccttgttaccttcagctccccgtaccagtgagcaacttggccacgcagggactttagggcctgagaatggattcctcgaagt

SEQ ID NO: 176959 - DNA, 122 bp, Homo sapiens
gttactgctgttattattattgctactgccagcaataataagtggtggatgtactcaagacggtcgggagggaaggcaagggcagcctctccctcattttcaccgaaaatcctccgggtgtc

SEQ ID NO: 176960 - DNA, 122 bp, Homo sapiens
ggaagtgggtcacgtggctcagacgggggcggtagctgtgggggcgtggccgtcacacggcgcgatccgtctgggcagcggctcttcgggggccacgccctccgggccctgggggcctagcg

SEQ ID NO: 176961 - DNA, 122 bp, Homo sapiens
cctcccctccggggctccggttcagaggcactctgggcgcctgctacagcttccaaactgcgccgcttccttcttcggcagaaaaggactttcagatgcggcggcggcggcggcggcgactc

SEQ ID NO: 176962 - DNA, 122 bp, Homo sapiens
ctgcgctagcgtgtggtacttgaagataggttatccgtgttgccttcgctttatttgtgacgaatcatacacggttgacctatttttcagtaccaaatcccgccttggagggcttcctggag

SEQ ID NO: 176963 - DNA, 122 bp, Homo sapiens
cactattgccctcgggaaatagttctgtcccctctagtgtactatgactttaagaacatacgtaatcctttaatatttttctaaaaatcctgggtaaacctgaggcaatgcacttgaagcca

SEQ ID NO: 176964 - DNA, 122 bp, Homo sapiens
ctgccgagccgagccgaatggctgctggcagtgcgatcgattcagcccgaggagaaggagcgcattggccagttcgtctttgcccgggacgctaaggcagccatggtactacaggtcttttt

SEQ ID NO: 176965 - DNA, 122 bp, Homo sapiens
acttgtagggcttctggccagagtgagtgcgctggtggcgaagcaggtaagagctgtcggcgaaggccttgccgcaacggggacatttgtagggccgctcgccagtgtgggtgcgctggtgt

SEQ ID NO: 176966 - DNA, 122 bp, Homo sapiens
gatgactaactcccttttctgtgaccatccctgcctcttgtttactccactgaaaaagggcgtagggaggtcagttgccgctgctgatctgcacaaaggtcaaaggcagagccaccgaaagt

SEQ ID NO: 176967 - DNA, 122 bp, Homo sapiens
actcataacacattagccttcactcttaaagctttcagtcaccaaagaaatgcttgattccgaaatcgtttttgttttttttacagataagcctcaaaaacgattcttctggcacccattaa

SEQ ID NO: 176968 - DNA, 122 bp, Homo sapiens
aacactgggcgttctctgaggcacagagtaggcgccggcgctctccgcctgcccccggcccgttctctcagttagcacctagcccgggcccccactccggcacactcccctcaaacccaggg

SEQ ID NO: 176969 - DNA, 122 bp, Homo sapiens
agtggaaagcgacagacctgatcccggaagcgttacagctaggcgccaagttcacaggcgcgaagttcaaatttgtcttgtgaccactgtgataggtgggtacaggggagcgcgggcgagca

SEQ ID NO: 176970 - DNA, 122 bp, Homo sapiens
gcggaaaaggcggagaaaagggacgagggagagcgggcagaaggcaaagacagaagggagcgagggagggagttcctcgggcctggcccctttactaggtcagtctggcaggtacctcgccg

SEQ ID NO: 176971 - DNA, 122 bp, Homo sapiens
ggcttgagggtgacggtggggcccgagtcgcgggcactgcgcggggaggagagcggggcccgtcctgagcacatcagctgacctgggctggggcctctccctgacttgaagacgtcaacacc

SEQ ID NO: 176972 - DNA, 122 bp, Homo sapiens
ggaaggcccaggggtattgcctgtgggagtccagcggaacctgggcgggcttcccggaggcggcggcctccgagcccctgggcacccgtgatccgccagggcctggaagaaaacggacggag

SEQ ID NO: 176973 - DNA, 122 bp, Homo sapiens
gctcaattctgcatcccctccgaggccacaagtgggagaaagagtcgtccgggttggccccgcagggacgagggacggccctgcttctaacccgagtgtcagcagccacaccccgcgtcttg

SEQ ID NO: 176974 - DNA, 122 bp, Homo sapiens
acacaagctgtgtgcccgtgagggctgctgcgatctctgttcagaagaggcagtgtagtgcgggggaagaaactgggtcaggagtcccagccctggcagcgccctccatgacacactgggcc

SEQ ID NO: 176975 - DNA, 122 bp, Homo sapiens
tcaacccccctctcacgtcccctttcctgtgttcccagcctcacacatccgcacgcggcccgcactctcacagggcgcgtatacactcatctgcatggactcacatccacaaggatgcgcgt

SEQ ID NO: 176976 - DNA, 122 bp, Homo sapiens
gttccggcccggagggataggggtttgcagggtgcgtgagcgccgaggctgcccgcgaggcgagagaattgcggggggaggcagggaggccgacggggagggcctgggaggctgcacgcgca

SEQ ID NO: 176977 - DNA, 122 bp, Homo sapiens
ggaccggccaaggcttggcgttaacctttgtggatgaaaagtcccgctgggctgatcctgcgcggaccgggcctggaccctggggcgtgaggagggcgcggtgcgtcccgtggttgtgcttg

SEQ ID NO: 176978 - DNA, 122 bp, Homo sapiens
agtgccacctgggtgagggggcggtgaccaattatgtcggccaacgaagagccacagtcccggggaggccgggagggggcggagtggggaccgggcaccaggcagggaggggccacgaggac

SEQ ID NO: 176979 - DNA, 122 bp, Homo sapiens
gcgcagctctcccagtcccacccttcggcgcagggctccggccaacacagccctccaggccgcctactctccagccagccggctccacggacccacggaagggcaagggggcggcctcgggg

SEQ ID NO: 176980 - DNA, 122 bp, Homo sapiens
actcacagccaggccgagccagacctgcccagttttgccagttccttgaaacccagttggcggaagagcaaatcaaaataacccaatccgagtctaaactcaagtcctttcttgcaaagctc

SEQ ID NO: 176981 - DNA, 122 bp, Homo sapiens
taccttgttccaccagccccatggtggtgccggaggccgcggtggacattgtggccggagcggtggtctgtctgcccactgttagcaccgggttagagacgaggggaagggaggggtgggcg

SEQ ID NO: 176982 - DNA, 122 bp, Homo sapiens
cttcaagcaaaatgacgtgcaccaactcaagttctcaataagcctccaaagtgagctgcccgggacacaaggtataaaatgggaaggatatagtcaaatgctgcattgtagatagacgagga

SEQ ID NO: 176983 - DNA, 122 bp, Homo sapiens
tctgtaagccacagcttattcatctttcttcacatggttagtgcctggcactggcactcacgctgtctctccccatcttcctgtctatatttgtagatatatttttaaactgaaagtcgtga

SEQ ID NO: 176984 - DNA, 122 bp, Homo sapiens
ctttgcaccttccgcctggaactgctgtccccactcggggctgtaggcactccccagaatcgggcttcctgttgaggagaaacagcacgtctgtgttttccagtcgtggctgatccccgtaa

SEQ ID NO: 176985 - DNA, 122 bp, Homo sapiens
acccagcaggagcgcttgcttctgaagctcccgtgcgtctgtgacagaggcttgaacccccggcttgttctctcacgtctgttgccgtaaatctgtctccatcgcctggcacataggagagg

SEQ ID NO: 176986 - DNA, 122 bp, Homo sapiens
gtcagcccagagctgcttctctctgcctggaaactgggccatggagggcattgtctctcacggatgtctaattttttcgtggttgcacacctgggatggcgattctgctttaaaaagcagag

SEQ ID NO: 176987 - DNA, 122 bp, Homo sapiens
aaggtggcctcagtgctccagacagcgcagccattctccttgggcgggagggcactgggccggcggggcaggggcagggctgggaccggggctggggcagaaggcagggatgggactggggc

SEQ ID NO: 176988 - DNA, 122 bp, Homo sapiens
gacgtcaatacgttgaattttgatatcccttttataaatcatttaaaaatgtcttctcagcgtgttccatatcaaatccacacccacaccccccgccgggcccgcttctcctgagactcagc

SEQ ID NO: 176989 - DNA, 122 bp, Homo sapiens
acggcgttgtgggccgggggcggggcggccggcggctctgggatttctctgggaggcagccgcagggaagggaatgatcttggtgaacttataatcgaaccaatggttccgggaaagcagga

SEQ ID NO: 176990 - DNA, 122 bp, Homo sapiens
tagtccgcaccatgttcaaacaagaagagaggagaggagagaacgaactgacttcccagccgagggtgtttcactggacaaggacccgaaaactatcccgccacagtttatattggtctctt

SEQ ID NO: 176991 - DNA, 122 bp, Homo sapiens
aggagttgtaggtctgaactcaagaagacgggtgggctaagaaagcgaatggaacccctgcgtcctttccccagccgaaagaaacagggacagggattcatccagctcgttgtagtctgaag

SEQ ID NO: 176992 - DNA, 122 bp, Homo sapiens
ccccacttcctctggggcctgggggagtagagtctgtcacccggaggctgtgtgcctccccgcgacattccccagtggccgggccgaccaggcaggctctgcctgtggatggggctgctgag

SEQ ID NO: 176993 - DNA, 122 bp, Homo sapiens
cacagatagggtttgcacatgggagatctaaccactagagggagtcagagttttgcaggacgccatactggacgccaagtgggaggaacttcaaggctgtcccctgcgggcctcccgctctg

SEQ ID NO: 176994 - DNA, 122 bp, Homo sapiens
gaaaaaagcggtgagtgggcgaactacaattcccaaaaggccacaaaggggccaccactacgcatgcgtagatccctcccgttagctttggcgcctcagcgagctcttctcgcgcatgcgtt

SEQ ID NO: 176995 - DNA, 122 bp, Homo sapiens
gtttgcacagttaacagcttctatttagttattcttttctccttccaactcccacaactacggcaaacattgttcaaggcaatgctatgcaaatagcccacatccttgcccttgtcttttct

SEQ ID NO: 176996 - DNA, 122 bp, Homo sapiens
cagttggcacagtacacttttggaggctatacgactcttctgctcttctagcacaaggcacggagtaggtgcttgctacagttttcggatgaatgaatgaaaagtaccttagtccccagcac

SEQ ID NO: 176997 - DNA, 122 bp, Homo sapiens
tgcacttggccacggctgtctcgtatgggaaggtctcgggggctgtgggtgcagggctggcggctgccagcctgcgggcaccggtgccctcagcattggtgtggaaggcctggaagtcgatc

SEQ ID NO: 176998 - DNA, 122 bp, Homo sapiens
gtttgccttcttcaggccagacaacccttgagccaagcctaaattctgcctgcaagaagccgcccgggtcgacactccctgggttgcccgtgaaaagaaataaactaaaacctcttgccctt

SEQ ID NO: 176999 - DNA, 122 bp, Homo sapiens
ggcttgtcacctcccgctggtgctgaagggctctccccatacccttcctgaagaggtctccgccccttaaatggtggagagcccagcctgtcctgcccccggctgctcctctcctccttccc

SEQ ID NO: 177000 - DNA, 122 bp, Homo sapiens
ccgcctgtagccaggggctccctgcagttgcagagaagtccgcagccaacggagctctcccggggcccacccgtgaaaggacctggtcagggccctctccaggcgcagaggcccgcgggagg

SEQ ID NO: 177001 - DNA, 122 bp, Homo sapiens
caacgagtcctccctctgggagtgcagccttggctcatggtgccagagcccgtgcccccacgcatgggtggtggtcgcgctgtgctccagtaagtagggaggagtgaaggggacggggctga

SEQ ID NO: 177002 - DNA, 122 bp, Homo sapiens
ggtctagaacagtgacaggtgcaacacaggacccctccacccctcaaagtcacccatccccgtcaggatagacaaacatactattgacatcgcccccactctagaggtctgtaccgaacact

SEQ ID NO: 177003 - DNA, 122 bp, Homo sapiens
ggatggggtgagggagcctcacttctgccatctcagtttcctcatctggaaaatgggaaacgcctcccacaccacggggttgcaatgaggtttcatgaaatgtgtgtaaaagtaactggaca

SEQ ID NO: 177004 - DNA, 122 bp, Homo sapiens
caggtatgctcgcttccccaactggagctagctcctcaaaggtggggtttgttctttcttcgagtctccaggatctagcagaatgtctaacatatatacagtatgtttgtggtaaatgtttg

SEQ ID NO: 177005 - DNA, 122 bp, Homo sapiens
cccggggtagtcagggcgccgagaccgggacccgaggccggcacggagacctttgttcctcgtggaagtctcatgaattgcagagtccacggagctcccccgtctcgcccctccgagggcag

SEQ ID NO: 177006 - DNA, 122 bp, Homo sapiens
attctactattgaaccttctttacatgggatattgggtgcaagtcgagttctgtggaccacgctttgggaagtgctgccagaaactatccaaaacagtaatctccagagcacttatgaggca

SEQ ID NO: 177007 - DNA, 122 bp, Homo sapiens
acatggtgcagcaatgtgaatgaaaggtgacaattatgctggctttgaaggcttcctccccgaagggactctcgtcacttctgctcacgtttcattggccagagcaggtcacatggccatgc

SEQ ID NO: 177008 - DNA, 122 bp, Homo sapiens
ttgtctggaccttcccaccaggacagtccaagtaaggcaattgctcaaactttaaccaatcgaataatttatttgctctacttccacattcaacctattaaatccttccctttgtgcctctt

SEQ ID NO: 177009 - DNA, 122 bp, Homo sapiens
ggggagttgggagtgggttggagggggactgtctagattctactctggaggatccaatcacgtggtgctgttcccctgcctagaacttcaaggttttccaacggtttgaataaaacccaaac

SEQ ID NO: 177010 - DNA, 122 bp, Homo sapiens
tttttaagtgaggggggcaaatttgggctatctttgatctctggaatctctggagttcaacgcaatagcatcttaatcttcatacctggaccttcgcagttatggctgaggagcacaaaata

SEQ ID NO: 177011 - DNA, 122 bp, Homo sapiens
tagtccaagggacggccacaaatgaccaaggccagaccaatcccaagtggaatccttccacggtatttttataactgaattagagacaggaaacccttttgggggagcagaaatgacaaaat

SEQ ID NO: 177012 - DNA, 122 bp, Homo sapiens
gatcacagggccggctgcaagctctcatgaaggatgaattaattccactaatgctctgagcgggccttcggcgtgagggttgtgtggcaataacctccccgcagcctctcttttctccgtgg

SEQ ID NO: 177013 - DNA, 122 bp, Homo sapiens
gttattccacacctcctccctgaccttgtcgtgcagacgcttccaggatgaactccaactcgccgagccaccgcagctcctcagctgactaaaagagttaatgatcctccaggttaaaactc

SEQ ID NO: 177014 - DNA, 122 bp, Homo sapiens
caaactcctgacctcaggtgatccacccacctcggcctcccaaagtgctgggattactggcgtgagccaccatgcctggcctcatggtcttttgttaacagtgtgtagctggctatgggttc

SEQ ID NO: 177015 - DNA, 122 bp, Homo sapiens
ttggaggatggggtggggtctgtgctgtgctgctgggaggggctgcgctgcgctggcgcacggccaaactctgggaaactcagagccttggagatctgatccaccgtttgtttcccgaggaa

SEQ ID NO: 177016 - DNA, 122 bp, Homo sapiens
attttcagttgcaccttcccacataacagtgactaattccttacaaaacaaaacacaaaacgagatatattaaagtaacagcatttcagcagctacagtgactctgtgtgctgacttcagca

SEQ ID NO: 177017 - DNA, 122 bp, Homo sapiens
ctggaggtaattgtgttactggtgtgagttgttaggggctgtaaaaagatacaacggcaccgtggggagctcaattgggaagagagagttacaataaagagcccattcaagaggtctgcccc

SEQ ID NO: 177018 - DNA, 122 bp, Homo sapiens
ggcttgctgcacctcctccccctgccagcaggcctgctgtgtgcctgtctgctgcaagcccgtctgctgtgtgcccacctgctctgatgattccggttcatgctgccagccagcttgctgca

SEQ ID NO: 177019 - DNA, 122 bp, Homo sapiens
cattggggagttggatcgcaggggacagcagaagcgaagcccagcccgtggatcacctggcggctcgcaggctgtctgaatgcagcccgtctgaatgcagccctaaactccagtaagcccta

SEQ ID NO: 177020 - DNA, 122 bp, Homo sapiens
ttggtgtgatctgtttgatattagatgtttcttggctgctacttctggagtaatttttaacggtgctatgtaagaattccattgttcacataagtatgcaatggaaggtctacttttcagct

SEQ ID NO: 177021 - DNA, 122 bp, Homo sapiens
caccggaaccgcaccggggaccatatttagagtaacgccttaataatgcgcatgagtctccggcagggctgtgaaggtttccgggaagccagccaatcattcccaacggaaactcagtagcg

SEQ ID NO: 177022 - DNA, 122 bp, Homo sapiens
aggctgaagcccaggcctgggccactacggccgccgccggcccgctgccatggtcgccgccggccgccttgcagtccctcagccagctcccggcgcacacactcccgcgcggccgcccgtct

SEQ ID NO: 177023 - DNA, 122 bp, Homo sapiens
tgtgggttttccctactgctatatctgtcattttccagctacctagtcttctttcaagtgcggaaaggaaaaaaattattgctccccaggtggggtcaactcatctcttctgagaactttga

SEQ ID NO: 177024 - DNA, 122 bp, Homo sapiens
cccgacgaggcgcgggagggcaggctcccctaggctctgacggacactcgggggccacagcgaccgatgccggtactccaggtgcctgtggtactgtctgcaacgagaagtgatggggcgat

SEQ ID NO: 177025 - DNA, 122 bp, Homo sapiens
agggactttgttgtcttgctcactactgtatcctcagtgcctagcaaaaaacttgatgtgcgttagacactcattgcattgctgctgaatacatgaatgaatgtgtgttttacttctatctc

SEQ ID NO: 177026 - DNA, 122 bp, Homo sapiens
gtcggcgccttcgctgtagcaaagctcggcctctggaattctgagaactaatttgctattcggtgacataagagggggagtgcgctttgctttcccggggtctggggctaattccttctttc

SEQ ID NO: 177027 - DNA, 122 bp, Homo sapiens
aggaccccgtcggtgtccgctacttctctgtgagtagggaagggcccaggagcagcggagcggtctgtgctctgcagagactaccgagcaggatctgtgggccgccctagagacagcggcac

SEQ ID NO: 177028 - DNA, 122 bp, Homo sapiens
caccagtgccagctcggtggatggcagccgcccacaggcctgcacccactcagagagcagcgaggggctgggccaggtcaaccacaccatggaggtgtcctgttgaagcccttgatcccgct

SEQ ID NO: 177029 - DNA, 122 bp, Homo sapiens
aacaatagtatttcataccctcccaactatgacagcttcagagaaccccctccacacacacgtgtgtggacacacatggtttccctaaagaaacacctctcactgccccacagtcagcagaa

SEQ ID NO: 177030 - DNA, 122 bp, Homo sapiens
acctaaggagcctgatctcaaccacacatggatgggacctctggttcaagcagaagaatgcgcatgtgtcctccatcatttcagaaagatctgacagtcacagtccatattttgtctcacat

SEQ ID NO: 177031 - DNA, 122 bp, Homo sapiens
ggaggaagaggaccgtagcttttcttgtacccaaggtttgcctttcaaatggcatccagacgtgaccaaataaatctctcctctggaggctaaagaatgtgtacaatgcaacaaaagtgagg

SEQ ID NO: 177032 - DNA, 122 bp, Homo sapiens
ctccgctgggcgggcgacagcacccgggaggcggcggcggagcgaccagtcgcgcggccgcggtgctggatgcaggagggcctggtgccccgccctcaacaccctaatccccgccccacccc

SEQ ID NO: 177033 - DNA, 122 bp, Homo sapiens
tgagccaccaagcccggctgatgccaatttttatcaggcaagtttcatgcccaaaccagccgacttcagccgacttagtgctcctggagataggaagccccctcccgggatccccggctccc

SEQ ID NO: 177034 - DNA, 122 bp, Homo sapiens
ttttcttagagcagggaacctgacgcagggctctgcagccgctgcgggcttgccgaccgtcgcctggttgtaatcaccatgacttatgggtcttggctggtgttttgggcaagatgaacatt

SEQ ID NO: 177035 - DNA, 122 bp, Homo sapiens
ctgtgggatgatggggagggttcccacaaagatggagcctcgtcagcctttctccagcaccggaaaccacaggaaaccaggtcagtgtgtggggcccgctccctctgctccagggctcagct

SEQ ID NO: 177036 - DNA, 122 bp, Homo sapiens
cacaaagggacactcacaaattgcactccaacaagaatgagattatcctctaaagtactgcgttaaagtgaggatcagggagaaatgaaataactctgagagacacttcctcctatacagaa

SEQ ID NO: 177037 - DNA, 122 bp, Homo sapiens
ggagccttgtccgcgcattccagcggcagaaacggaatgtctgggcgaggcggccagcggcgcggtggtcacctcccgcccctgccctaagccccgagccggctgcaactgggtgggctcgg

SEQ ID NO: 177038 - DNA, 122 bp, Homo sapiens
cggagttcagaggagccgccgggatgcgtggcctttctgttctcttctgcgcctggggcccgggcgctgggcttggacaggtgtccagagagacacgccctccatacctagggacccggcac

SEQ ID NO: 177039 - DNA, 122 bp, Homo sapiens
gtgtcatctccagcaggctgagtccccttggagcctccataaatgctgctggctggctggcggggcacatgggtgggctgcgtaccacactccaagcacttagcattgagcagtggtggctc

SEQ ID NO: 177040 - DNA, 122 bp, Homo sapiens
aatagaatcctttgctgttccatttataaactgtggacagaccagcctttgagctgtctgcgatgacaaagaacgtctcgtcgtcgatctgaaacagctcgatgtcattgggcttggaaatg

SEQ ID NO: 177041 - DNA, 122 bp, Homo sapiens
ccaaacatctgtccctgactatgctcatctcatgtttgtcctcagctgctgaaagggccacgtttgttttcattacaaataagaccaccgagtgggctcctggcgtgggggcgggaccagcc

SEQ ID NO: 177042 - DNA, 122 bp, Homo sapiens
cattcatccatctgtgttgatgccccctgcatctctttcctatgagctgaacatgtcacgcgcctttctacctccttgtggttctttgattgctcagtcatatttgggtctttttgtcctcc

SEQ ID NO: 177043 - DNA, 122 bp, Homo sapiens
gtttctgcgcccaggtgctgaggcagcagggaaaacattggcctgggaacctgtgatctgcggtctggcctgttgcctgctctggagctctgagaaagtcactgcccctctctgggcctcag

SEQ ID NO: 177044 - DNA, 122 bp, Homo sapiens
gggagtggctggttggtgggaggtgctgttttctgcacccgggggccccccgggtgtggacgaggttggtggcctcagagttgtgccagagggtggatgagggcctgtgcctcccccagagc

SEQ ID NO: 177045 - DNA, 122 bp, Homo sapiens
ccgcctgagcccagagtatccccagggggcaggagcggccccgaagtgtgtggaggaggccgcaacggccggggtgtcagggatccggcggtgagtggctgcactggccgccacgtggccgg

SEQ ID NO: 177046 - DNA, 122 bp, Homo sapiens
gaaagcaaggaggagcaaggctggtcaggtgatgggggtgagggagagggcacctatgcccggctcccagcgacaacctgccccaggtttcagggccctctgcctctgctggaggagcccag

SEQ ID NO: 177047 - DNA, 122 bp, Homo sapiens
aatccggctcggagctctactgagcctgcctgtgctaatttgggccgagctggcgcctcacggccatgtttgcgccacctacagcctcggagggtgagcgtcatggcggcttcttgccctct

SEQ ID NO: 177048 - DNA, 122 bp, Homo sapiens
tttcgtcgggccctggctgcgccgggccgagccctgccccgcggaggtcgccgcccagcacggtctgcagatggcagcctctcgcggaaagccccgcaacgccgcttcctgcctgggggcgg

SEQ ID NO: 177049 - DNA, 122 bp, Homo sapiens
taggtcccgggccacttggatggggcgtcggactggcctttcccatggccagctgaagcccgtgttcttacccccccgcccgcagagcgcagcagttcggagcggcagccgagcggcctgtc

SEQ ID NO: 177050 - DNA, 122 bp, Homo sapiens
taaggttgggggcggtgggagagacaagcctcgtttttgccatggccggcaggggggtcccgccatctgcggagggtgccccccgcggcccccggcccagccaacttcctcctcttttcgca

SEQ ID NO: 177051 - DNA, 122 bp, Homo sapiens
ccatcgaccccacattcaaggttccatagctcccccaaacgggatcccatggcactgggccggggcagaggcccggagaagagggtcgctagctgcaggttgcacagcccggcagggtgcga

SEQ ID NO: 177052 - DNA, 122 bp, Homo sapiens
tctgtcccgcggacgccgcagccgtgcggcggaatccctccttcctagccggttgcatttcgtgcctctttgaaatgccacattcgcttccagcttaagtgtcttgagattgtcgcggtgtc

SEQ ID NO: 177053 - DNA, 122 bp, Homo sapiens
agcttatatcggggccttacaccagtgcagagggcaggcttgaggctgatctggtacacacgtcccttgttccacccatggactgtgagaggacctcagctcctgccgtgactctaggctga

SEQ ID NO: 177054 - DNA, 122 bp, Homo sapiens
gccacctgggatctcctcccatggcgcccccaggacttcatgctctcagcctcctgcccccggcccctaagcctggagttacagactttattagatgcataaatcctgtctccagagctcaa

SEQ ID NO: 177055 - DNA, 122 bp, Homo sapiens
ctatgacaaagcaggtctttcttttcataaccctgatgttttcttttcctgcagcaagtccgcatgcaacaccatcgactcttcatttcccgacatcacccattatccagcagcctgggcct

SEQ ID NO: 177056 - DNA, 122 bp, Homo sapiens
ggacccgtctgctccagtcccccgactcagctgggcctgcgcctctgggtcagctcactgcgaacctcagcccaggtacctaccctgccgggcttcctggtgctgtccggtccggtccagca

SEQ ID NO: 177057 - DNA, 122 bp, Homo sapiens
aacaggcctgtccttaatccttctcaagctctgtatcttgccaagatctggcctgtggcccggcgcagcaaaagctgggaaaatgccagtgactcaacccagttccattgatcagtgaaatg

SEQ ID NO: 177058 - DNA, 122 bp, Homo sapiens
gacaagaaagcttctgtcacccaccgcgcctctccgccgagccgctcgggggcggcacctcgttcatcaaatcttcgcacgcaggaaacgatggccgacgctgtcgattctccagccaatcc

SEQ ID NO: 177059 - DNA, 122 bp, Homo sapiens
aaaaccgttgggctgagggtagaggctgcagcagccctggacaccagaagggggcagagacggggcctcctggatgccatcctcacccggtacccaccaagccctggagctctacagaggga

SEQ ID NO: 177060 - DNA, 122 bp, Homo sapiens
ccggccttgtcctcagtgtggccggaagacgactcggggctgctgctgctctcggggcgccgccgccgctctttctcctctgctgccgccgccgtctcccggcagccgccgccgccgccgct

SEQ ID NO: 177061 - DNA, 122 bp, Homo sapiens
ctacccggctctcctgcgattgggcccagcggtcggtgccccagcggcgattggtccacccggacgtcactctcccctggagagtggctagtggatcgtgcacccaccctcggaggcccgga

SEQ ID NO: 177062 - DNA, 122 bp, Homo sapiens
gatgaacgcccacgccaccttctcccaccaaaggtggatccagctaacaggagactggatcgcgaccatagcgcgtttgtgcccagttctggggaaagcctcatgttagcgagtggccctcg

SEQ ID NO: 177063 - DNA, 122 bp, Homo sapiens
ctaagcagcatgctctagggggcagccaaggtgtgatcagggaatagaaaccagcttgagcgctggctgaagtttcagaaaagactgaaagcctaactgtaagaaattcccactgtgagtcc

SEQ ID NO: 177064 - DNA, 122 bp, Homo sapiens
tggtcaacatgaagggcaatgacatcagcagtggcacagtcctctccgattatgtgggctcggggcctcccaagggcacaggttagtaaaggttgtttttggtgggaggttggggagggagc

SEQ ID NO: 177065 - DNA, 122 bp, Homo sapiens
tgatacaaggaaacatataaggattccctagctcagagctcagtcccttggattcagtagcgagtattattcttgttactggttttccttgcctaaaaatggactctctttacatgcctggt

SEQ ID NO: 177066 - DNA, 122 bp, Homo sapiens
tgtgattgtaaaatgttcttcacaggaacatcgtcttgagcaatcccaagaagaggaacgcgttgtcacttgcaatgctgaagtctctccaaagtgacattcttcatgacgctgacagcaac

SEQ ID NO: 177067 - DNA, 122 bp, Homo sapiens
gccccaccagcagcctcaccagggaagcagctctcactccctatggaaactgattgttgccggggttaaacaattgtcaatttggaaaactgttcagctcgtagtagtcactgcataaatat

SEQ ID NO: 177068 - DNA, 122 bp, Homo sapiens
aagacccttgactcagtagccaaggagcgcgcccgcctgcagctggagctgagcaaagtgcgtgaggagtttaaggagctgaaagcgcggtgagttcgcccaggtggctgcgtgcctggcgg

SEQ ID NO: 177069 - DNA, 122 bp, Homo sapiens
aagaaagcatgtgactcaagctgtgatttccagtgcatgcttagagagggcgcctgtatgcgtgccccacatgcccggggtaggctatgcaactgccaggtctgcagtggcgcatggcatct

SEQ ID NO: 177070 - DNA, 122 bp, Homo sapiens
ttatctctctatcatgcattgcttcacaaggggaaacggcccctttttttaataaatctacgatggctggctgcaatatgcctcactgtaagtattttgtgtatgtatgtgtgggagagaga

SEQ ID NO: 177071 - DNA, 122 bp, Homo sapiens
gtacagctttgtgagcagccagcccctgggccgggaccagtacaaggagatgtacctgttcgtgtacaggtgaggggcgggccgcagggaggggcgcgcggggccgcaggtcgggggctcag

SEQ ID NO: 177072 - DNA, 122 bp, Homo sapiens
tatgctaaaggaatttgagaaaacaacagaagcaggaaggtcactgtcaccctccccctgcgcttcttccctgaagcctatcataagactctcatgtgagaggtgccctctctgtacccaga

SEQ ID NO: 177073 - DNA, 122 bp, Homo sapiens
ccaacatggtgaaacccctctttactaaaatacaaaaaatcacctgggtgtggtagtgggcgcctgtaaccccagctactcaggaggctgaggcaggggaatcgcttaaatctgggaggcgg

SEQ ID NO: 177074 - DNA, 122 bp, Homo sapiens
cctggttgacatctgtatccccagaaggcctggtgcacagtgggccgatgggcaggcctgcgtgatgctgttccagagaagcagtctcgccagcttctggggccgagggcacagcagagggg

SEQ ID NO: 177075 - DNA, 122 bp, Homo sapiens
actcatcaagaagataggtgaccacctgaccaaccttcacaggccagccggcctccaggccgggctgggcaaaaaggttcaccctcaggcacacgggagcctaccgaacccagcgacatctg

SEQ ID NO: 177076 - DNA, 122 bp, Homo sapiens
ggcatttcttgagccggcagcgttaagcgcccactgtgtgcaaggaacgcgagggcagggcgccgggctggggccgaggccaggaagcatttggcgggtgctctgtacgatgctccctagcg

SEQ ID NO: 177077 - DNA, 122 bp, Homo sapiens
tgaacgtgccaccgggtcttgcaggcttgagaagtgtttctccaagctgattttgctttccgtgcccgggcagctcccgtgaattgcacggtagaggtcaggagtttctggggggtccgtgg

SEQ ID NO: 177078 - DNA, 122 bp, Homo sapiens
cctcgccgtcaggcgcgctggcgaacctgtagttcgggcctgtagttgtggactcatggccgggaggctgcactgggcaccttgacggtaactccaccactttacaaatttaggaagacctg

SEQ ID NO: 177079 - DNA, 122 bp, Homo sapiens
tgggcaggggtcactggcaggtgttgtagatctgcacctgcaagttgatggcttgaagcacgctgcgcatcctggcctccaacccgtccaactgggctgccttactctccagtgcccgctca

SEQ ID NO: 177080 - DNA, 122 bp, Homo sapiens
tggactctaagaggctatgaattgaattggcctcatcattttggctgctgagatgggagccgtgtgccctgatcctcacaccatttcccatcaccctgccttgctctgccccaccgacaccc

SEQ ID NO: 177081 - DNA, 122 bp, Homo sapiens
ccgggaaacacttttattcaactttgcatctccctttctcaaacacttttatgcaactcccgagtgtgcaccctaactcactccacgcggtgggaaaggttgactttgacagaggtcgtgag

SEQ ID NO: 177082 - DNA, 122 bp, Homo sapiens
gagcatctgctcctcctccatctccgatgtcctcaccacctccgtcactgcctttacttccgatactttggcagcaatccatcctctgcttcactgtggtctgaaggatgaccaccagctga

SEQ ID NO: 177083 - DNA, 122 bp, Homo sapiens
tgcagcagcgtgcatcacttccactttgacctcatagttaatctgcgtgatagttaatcacgcagagtctctagtgatttttttcctatttattttaaatacacacacccacagggctctgc

SEQ ID NO: 177084 - DNA, 122 bp, Homo sapiens
cttcctttcgtcccccactaaggcccatacagttcctctcccacccgcttcttggagactcgtggctcgcatatgcacaaggcgccatcgtggaaatggaccctttttcatttgtacatttt

SEQ ID NO: 177085 - DNA, 122 bp, Homo sapiens
agaagtcaaagagagaggccgggtgatgccacggggtgccctgtgggactgtgcacactgcgttctgcagacatgggcatcctggacagctgaaaacagggcaatgatgcaaactggcattt

SEQ ID NO: 177086 - DNA, 122 bp, Homo sapiens
gagtatctgggtctacaggcatgcatcactatgcccagcttaaagtgcaaagttttaagacgttagcctagtgccagcccctaagaatatatccagggtcttcagtgtgaatgagcaccctt

SEQ ID NO: 177087 - DNA, 122 bp, Homo sapiens
ttaagtgttctagcctttgcggccccttgttaccgcctgattttgggtgttttacagcaacggaggaacttaagcaaagaaacactatgtggcttgaaattcacactaatccatttagaaat

SEQ ID NO: 177088 - DNA, 122 bp, Homo sapiens
ccccgctccaggcccagttctctccttgccctaatccaaaatggccgttgcggctacaggcgccggccttgaaaaccagccgcgcatgctccggccccgccaggtgaggcggcgcagctcag

SEQ ID NO: 177089 - DNA, 122 bp, Homo sapiens
agtggttatgctggcttcctccaattcctcctcttcgtcggttgtgactgaccgagacagcggcttgggcttcggcagagacttgagactgcgggcacccgctgccattaggattgttgaat

SEQ ID NO: 177090 - DNA, 122 bp, Homo sapiens
ctgcgtccacctgacagctgacagagcagaaaggaaggtctgtgtatggggaaagcacagcggtgctgggagcattggtgccgcccacctcacctctcagcagtgactgtgagaccatttaa

SEQ ID NO: 177091 - DNA, 122 bp, Homo sapiens
ttctgcgcgctctcgtgggaacccagcgtttccgactcccagatcccattctgatggcgccgggtatccctctgaccctcgagtaaaacctccaatggagtattcatcccttcctctcccat

SEQ ID NO: 177092 - DNA, 122 bp, Homo sapiens
ggctggccagaccctgagctgccaccacatcaactgccccctggccggggcacccaggtgcgatgctgatctctcggcaacagcttttccataagggaatccgatgcatttgctgggatgca

SEQ ID NO: 177093 - DNA, 122 bp, Homo sapiens
agaccagccccgagaaagcatcccttacaacaggagcgaagcatgcaccccagaaggcaacgtgcggccgcagagcagggagacccgtgcgcctacaggggaccctacaggggacccgcacc

SEQ ID NO: 177094 - DNA, 122 bp, Homo sapiens
ttgggttctcagagagcctgggaggacttttcagcttgtcttatgtgggtttgttcaccccgtccggtttcatttttatttaaaacaattggtatctttcatcttggttgccaagtatgggt

SEQ ID NO: 177095 - DNA, 122 bp, Homo sapiens
ctcaccacttcagtggtgcccccaactctgcttctaggactctggcaagtcctacaaccacgatcctggtaatagtacgaggttggatttgtcaaccttgtcacgatcacatttctgttctg

SEQ ID NO: 177096 - DNA, 122 bp, Homo sapiens
gcgagagcgttaaagcgctcagaggatgttaggacggggtgggtagaaaacctgactcttcgtgtcttctgcgttgcactgaggtggatttttacttttgtcttatttcaagcagaagttgc

SEQ ID NO: 177097 - DNA, 122 bp, Homo sapiens
aggaggcataaaagatgattttttccccacaacaatgagctttcttacagacatattaaacggaaatgaaatgtgctactcattcccagcgttgcagaaccaggtgaggcccgagacaaagg

SEQ ID NO: 177098 - DNA, 122 bp, Homo sapiens
aggttaacgtggataagatgagaacagctgcacaagccccaaggagcacccagcaagtgtcggcgaacgatggcacccacgcacccgcccagcaggcaacagccgtgtacctccaggtcgga

SEQ ID NO: 177099 - DNA, 122 bp, Homo sapiens
caacatggtgatggtgtttttgctgctatttaaactaaattttaatgctttcagggaccacgtatactcttcagttcccttagcacttgagttccaaaacccttgtctatgtcatgtcatgc

SEQ ID NO: 177100 - DNA, 122 bp, Homo sapiens
aggctcatggtgagagcaggattgagagcaggtgcagatagaagcttgcttggcctgggccgaggactgtggctcttccccagagtggacaccttttatacacctccataggggctggttat

SEQ ID NO: 177101 - DNA, 122 bp, Homo sapiens
gagtagcccaaacagactacagggccgttttcccacagagcaagtgagaaggcccgtggccgcaaatcacaagcgccagctcagagctggctggcgggtttgaggtgccatcatcctgccgg

SEQ ID NO: 177102 - DNA, 122 bp, Homo sapiens
gcttcatcctcctctggattccctcatgaatgagttaaataaatcctctgagattgagaccgtcctggccaacatggtgaaaccctatctctaccaaaaatacaaaaattagctgggcgtgg

SEQ ID NO: 177103 - DNA, 122 bp, Homo sapiens
aaatgatttcttcctgcggggaaaactgtctaagttaacaaaacacactttagcacccaccggccatgcctattggctttggaggtgggaacagatctctggtaaagtgacagtcctgaggt

SEQ ID NO: 177104 - DNA, 122 bp, Homo sapiens
catcaacactaattgagggcccacttggtgtagacactgaactatgttcaatttaggcagcgcattaactctttagggccattaagcaacagctgctgtgctggagggactcttactgattt

SEQ ID NO: 177105 - DNA, 122 bp, Homo sapiens
tggagctgttccaggtggagatcgaggtgctggacattaatgacaaccccccctctttcccggagccagacctgacggtggaaatctctgagagcgccacgccaggcactcgcttccccttg

SEQ ID NO: 177106 - DNA, 122 bp, Homo sapiens
tgctggcccgccgggacctgggacttgtgccacatggagtgtcgggagtctccattgccgcgagttctacaccacagggccaggctgtttgctccccatcggtcgctgcccccagcaccctg

SEQ ID NO: 177107 - DNA, 122 bp, Homo sapiens
cctctataattttatttaagtcatttaatttgcctgtcgccctctccagcgtgcttccttcggcatctttgtcccttctttgctctccagtcagaatcagggaaaaatctttgtttcctcat

SEQ ID NO: 177108 - DNA, 122 bp, Homo sapiens
ggttctagagccaactctaaagaaaatttcacacatgggaaatacatcctactggatatccggattaaaagcgttcagtagagactggtgcagtggctcaggcctgtaattccagcactgtg

SEQ ID NO: 177109 - DNA, 122 bp, Homo sapiens
ttattttcccatcgcggaggaggtgttcccggtgtgtctcatgaatttaacacaagctgccggagagcctttgaaaggttagggggtgggtagggaggcagtttatgtagtggggaagttgg

SEQ ID NO: 177110 - DNA, 122 bp, Homo sapiens
gttccgctgtcccctttcctagcgggaccccgaaacacccggcggcttcccgctcctgagcgggagagaatagagcttgctgcaaccctctgcttggagggatggcctctgcggtgcttggc

SEQ ID NO: 177111 - DNA, 122 bp, Homo sapiens
aggcagagggccagccccggcaccatgcaggcctgcatcttcccggtgcttcctgatctgcgactcaggcccacctgcagcaggatgaacccaggaagggcgagaccacccatccgtcaggg

SEQ ID NO: 177112 - DNA, 122 bp, Homo sapiens
aagtacacaggcaacgatatttgtaaacaaatcctttagcagggaactaatcaactcttccgatggctctagcttccacttccgaggcccgctgtgatggtaaccaaccaggttccatctgg

SEQ ID NO: 177113 - DNA, 122 bp, Homo sapiens
ctcccaacatggggagacaaaatggccgccacgccccgagccgaaattacatccgggctccgcgacacgcccgaaccacaactcccagaatgctctgcatcgacagcgggagacgagacgcg

SEQ ID NO: 177114 - DNA, 122 bp, Homo sapiens
ggccaacgaggaaacacgttatatgtccacttgggatgaatgtattgataacgataagcccggccaaagacctctcctccctccctcacctggctccctgtccttcctggggagcttcaggg

SEQ ID NO: 177115 - DNA, 122 bp, Homo sapiens
agtctatgccagccgggtgtgaggggagtggtgggggtgagcagggggaggagagagattcgaaaagtacaggaggaatcagtccagtacaggggttgcccctgccaacaagtagctattcc

SEQ ID NO: 177116 - DNA, 122 bp, Homo sapiens
agatcctgttagccttttttaacaaatgaaagaactggtcaagtggcttgctgtctttctcggtaagtgcgagagacaggacatggaaccagatctttccaagtccatggccagtgctactc

SEQ ID NO: 177117 - DNA, 122 bp, Homo sapiens
tcaccaaaaaggagacattttgccgagggaatggcaggcagaagtgggtcacgttattctcggtgggggaaggggacggcgcgcccacccgtccctccgcgcgcacaggccccggcccggct

SEQ ID NO: 177118 - DNA, 122 bp, Homo sapiens
caggcggacaaagcggagaatattgggccaaagggccgagcacacccctgcagtgcccttcgcccagtctaccatggggtggcgctctaaggcccagatttgcccgccctcgtcctccacgc

SEQ ID NO: 177119 - DNA, 122 bp, Homo sapiens
cctccccgagttccgcggtcattatgtgagggggacgcagccgggccttcccgagtcctgcggtccttactggttaactgtagtcccgcactgttaatgtttttcgttttttgaagccaaga

SEQ ID NO: 177120 - DNA, 122 bp, Homo sapiens
agaaacagccgacaagctccccaggggtgagggtgccagggagactctgcactcccacaacgccctaggatgcagaggggcctgcccagaaagagcctctctctgctttcaaggccagactg

SEQ ID NO: 177121 - DNA, 122 bp, Homo sapiens
ttaagattctgaaaaattgaattgtgttggacacaggtcaccgtaatgagaatttaatggcgacgtattacaatgctagctaagctttgagtgcgtgctaaaggcatcacattgctactgac

SEQ ID NO: 177122 - DNA, 122 bp, Homo sapiens
ggactgcccagacccggtgggcaaggggactggggaggccctgcgcacagtcgcgtggaacgggaggggacaagacaaactgctggacacttttccgtggaatgagaagtggggggtgcgtg

SEQ ID NO: 177123 - DNA, 122 bp, Homo sapiens
ggggatggtgggaaggaatcagaatggcactcgagcctgcgccggcagtcgggggacccgcgagacacggtgcggccacatgctggctctggaccagccattcgtttctgactagcaggaca

SEQ ID NO: 177124 - DNA, 122 bp, Homo sapiens
ttccccttcgtggccgttttattcggcactgaaatgctgtttaacctcagcaagagtaggcgtgggaaggtggcgctcttccccacagcacaccaggcaccccccagctgctcagcggaagt

SEQ ID NO: 177125 - DNA, 122 bp, Homo sapiens
tcataaaggccccgtccccccaactcgacccttctcacgtgggctaagggcctgacggggcggtaagacatcctggccggcccaacccgccttacacaggcgccaacatacagagtttccaa

SEQ ID NO: 177126 - DNA, 122 bp, Homo sapiens
cctaaggcagcctggacacaccagtcagagccacaaagctgaggagcctggctgagagggcgtgtggtctgccctccttcactttatatatatggattccaggctacagctaaaaacatttc

SEQ ID NO: 177127 - DNA, 122 bp, Homo sapiens
gaaggggaggctggaatggccttgagaggccttgagaggtccctaagatgcctaggatgacgtttaccatcatctggggagctgagagattcagaggtttgaacaaaacaaaacaatgtttc

SEQ ID NO: 177128 - DNA, 122 bp, Homo sapiens
catagagaaagaccatggcactgcagatggcattgcaataaagaaagagtttaatagacacgaggccagccacaacatgtgggagacagacttagtactcatattatttcatctgaagttcc

SEQ ID NO: 177129 - DNA, 122 bp, Homo sapiens
tggcactccttttctcgtagtatttaagagtttttagcagtgctcctccaatgcagtccccgaacctgcagcatcactatcacctggaaacttgttagaaatgcaaattcttaagtcccacc

SEQ ID NO: 177130 - DNA, 122 bp, Homo sapiens
tgctgcgtcgcagagcgggctgggcggctgtctggacctcgagaggcctgaggcaaggatcgcgtcagaccccgaaagctggtttgttgattagtgatctaagaccgccggaagcgcttctt

SEQ ID NO: 177131 - DNA, 122 bp, Homo sapiens
tcctttggactcgctcatggtcctgtcccagccacacttccggccagctcagcgcaggtgcgcagtagctccctgtggagggcaggaagttgtgtctctaatgatctcacaggagcacctcc

SEQ ID NO: 177132 - DNA, 122 bp, Homo sapiens
aagagaagcttgtaaggacactatgcaggcatctccgaaggggtggcgagttcttatttccgtgcccctcgacatggtggacgtttgcagctcctagcccagctgggaagtacaacactccc

SEQ ID NO: 177133 - DNA, 122 bp, Homo sapiens
ggcggtcgccacggcgacgggcgcggggggaggctccgtgggatgcttggctgcggctggcgtgaggagagggctgagttacgtctgggtcagccttagttctgccctacgtacctaggagg

SEQ ID NO: 177134 - DNA, 122 bp, Homo sapiens
ctggaccattctgcccgactccaagcatccctcggagttcatcacatcctcacacccaaccggagagttcattgaagggactcccacggagtcagctctcagatctgtgaactgatccttta

SEQ ID NO: 177135 - DNA, 122 bp, Homo sapiens
ctttaccccaggtccactcccctgagcagggcatctgggagaaggggccgggcgtgcatgcggtgggggtacctcaggtagccaaggcccaggaggctgctgccattcacctccaggatacg

SEQ ID NO: 177136 - DNA, 122 bp, Homo sapiens
cgtgttttgccaaactaccctccgagatagctgaatctggtacattttaaagcaggaggccgcagaagacgctcggcagttctggcctccgagcagcaggcggcgctgtgagtcgtctttgc

SEQ ID NO: 177137 - DNA, 122 bp, Homo sapiens
gtgacccaccctcagtgagaaagccttctgtagcgatccaagaggtgtgcatttggggtacgggatcccccggcctgccgcctctctctgcgttatggtagcgctgccatagcgactcgctt

SEQ ID NO: 177138 - DNA, 122 bp, Homo sapiens
ctccgttttttttcctctctcttcttactccattccttcctggagcccctccaagacaatcggcacccggctccacttggcggccacaaagcctctttgacggcccaggtccaacagcgggc

SEQ ID NO: 177139 - DNA, 122 bp, Homo sapiens
tgaacccgacgctctgggggctggccccttgagtcttgcctgcaccttcggccgggtactcgcgggttcccaagacgcggccggcagtgaggttgaggccatggcagaggctccgggcctgg

SEQ ID NO: 177140 - DNA, 122 bp, Homo sapiens
gtctcctgctctgccaagccacagggacccattgccaggcaatggtggcattcactgtgtcgcaagccagggctcaccactctcacctgtgcccagagactggcgcatgcgcattcgtgagg

SEQ ID NO: 177141 - DNA, 122 bp, Homo sapiens
tgctggcactgctgtttggagacttatacctctagctgctcaacctgcttcctctgcatccggggctggacctactgagggcttctgtgccaggcatcaggcccacaggctcctgggtggcc

SEQ ID NO: 177142 - DNA, 122 bp, Homo sapiens
ctctggaatagaagaacaatgtgggtgtaaggtaaaagaagacgagggtgcgcaaagtgacggaggtaggaaaggatgatgcattcggggaagagctaccaaaaatgcctggaaccacagtg

SEQ ID NO: 177143 - DNA, 122 bp, Homo sapiens
ctggttctgaggccatggccaggcccagctgagcgcagatgatgtgctagccaggctggccgtgactgcgtgctgcccagctcactgcttagctctttggagatgaaagtgctcgcctcaaa

SEQ ID NO: 177144 - DNA, 122 bp, Homo sapiens
ctcagcaacgcggaaagaaagcagccagtaacctggagtgcagggtcctcacataccacgcgggccaggtaacctcatgcataagacaaggaaggaaataccggaggagctggtaaaatatt

SEQ ID NO: 177145 - DNA, 122 bp, Homo sapiens
cgcagcagagctgggctccgagccggatgcgccttcctttcctctccagagcaggctgcccgcccgcggaatcccgcacgtagagcaacctcgcagcaccctcagaacagccccgctggggc

SEQ ID NO: 177146 - DNA, 122 bp, Homo sapiens
atagcaaatgataaagacagacgtgcctcactggacagttaaaaagcaagggccgccaggcgcggtggctcacacctgtaatcccagcactttgggaggctgaggcaggaggatcgcttgag

SEQ ID NO: 177147 - DNA, 122 bp, Homo sapiens
gctgggtcgccccgctaacctggtgtcttctctctcttctctctccgcccccgccaccgccggccccccgccccacacagaggacaacgagaactccaagtccgacgagaaggggaaccagt

SEQ ID NO: 177148 - DNA, 122 bp, Homo sapiens
ggaaagcctaaaacaatacacatatgttttcactaatttaaaattcatattgaagcgggacgttttagaacttccaggacgcaacgtgctattaagggaccgtgaggggcgggcagcccttc

SEQ ID NO: 177149 - DNA, 122 bp, Homo sapiens
gccctagtgggagcaactcgctgaagccgagggcagaactggcggaagtgacattatcaacgcgcgccaggggttcagtgaggtcgggcaggttcgctgtggcgggcgcctgggccgccggc

SEQ ID NO: 177150 - DNA, 122 bp, Homo sapiens
gtgaaccccagtccaggtttccgcacctccagtgcagacgtgagagtcagagcccgggctcggcttcagccacagacaagtccggccaccgcaagtaaggcttagagccgggagtcggttcg

SEQ ID NO: 177151 - DNA, 122 bp, Homo sapiens
ttcttccgggtggggctgtgcactgggcgcgccacaagctcggtcgcaattgagccttgccgtggacaggctcacaatagaaatgaggaaactgagacacctgaggtcaggcctctgtccaa

SEQ ID NO: 177152 - DNA, 122 bp, Homo sapiens
gctcggcgggcaggtctggccgctcagtgaccggaggcaggtgggtcctcggtgggtgaccgggagcgcgcggggactgccgggtctgtgcccttcggggccctccgcagggctgggccggg

SEQ ID NO: 177153 - DNA, 122 bp, Homo sapiens
ggccggagggttttgactgcaaggccagcccacgccgagggtccaagcatcgggatatgccgccagcacctggctgctgcagcaccgcgctggacatgagcgctccgcccaacccgacggcg

SEQ ID NO: 177154 - DNA, 122 bp, Homo sapiens
ctgagggtagcacgagcttccagcagccttcacttcacccccccgccccccccccccccccgcagaagctgctggtaaattttgggactaaaatctatgagccacatgaatcttactctgct

SEQ ID NO: 177155 - DNA, 122 bp, Homo sapiens
gtgtaaggggagttctggtgtctcagctgagggcgtgagtagggagccaggaaagcgacccgcgactgcagccgtttcttaaggccagtccttcgctcgcagtctgtcccgggcggcagtcg

SEQ ID NO: 177156 - DNA, 122 bp, Homo sapiens
gatctcttgacctaatggtccgcccgcctcagccgcccaaagtgccgagagccaccgcgccgggcctctgttgcgtgttttctaaaacaggtcaagataaacgacaatcttgttgcacaagt

SEQ ID NO: 177157 - DNA, 122 bp, Homo sapiens
aactgtacatcccatcataataatcccgttgaaagccatagtccaagtcaaaagaggagccgtacatctccgctgcggatcgtttcacacctgcgtttcctcggttcacttttggctctgca

SEQ ID NO: 177158 - DNA, 122 bp, Homo sapiens
ttctttgttggaggaaccttcttaaacaaaaacccatagatactgtaaaagggaggcatacgaatggttttcagatggtcattgaacccactaaaattgaggcaaattttcatgcatttgtg

SEQ ID NO: 177159 - DNA, 122 bp, Homo sapiens
ttatctggctccagcgggctcttccctaaattcaccttggagaaagatggatcatgtgagcgggactgagagctttatggagccaaactcccgcagctgtaaatcaccctgtcctcctgggt

SEQ ID NO: 177160 - DNA, 122 bp, Homo sapiens
tttaataattgaagtctaaacaggaatctcaaaactgattttcaatgattttcactactgcgctgaaatccttttcaactaaatatgcaaactagaaatgctgtaatgcttacagaacagaa

SEQ ID NO: 177161 - DNA, 122 bp, Homo sapiens
agagatgactctcctgcccttgcttacacaaggtgctgaccacacagccactgcgaaagtcgatactaaatcttggtgctagttagaggaactggtaggttgagtgaaacaggaagaggagc

SEQ ID NO: 177162 - DNA, 122 bp, Homo sapiens
gccaggccctctgtgcctccgtttcctcttttcccaagtgaggagcctggacctgatgcccggattctggcaatcgtcagttgtaggaacaaagtctggagtagtggctggcatgagagtca

SEQ ID NO: 177163 - DNA, 122 bp, Homo sapiens
gcaggccgcaagcagtaggtagcccctcagccattcccagccagttgccactaggagaggcggtgctggctgggtcacagtccaggggctgcccgagggaggggctagggtaagtgggaccg

SEQ ID NO: 177164 - DNA, 122 bp, Homo sapiens
accccggaagacggggaccggcgattgggcggtgtccagaggctccgagaagaaggccatcggcggttgggcagcgttgggtaagcttggtttttaaaggagccggaggtgggagctgcgga

SEQ ID NO: 177165 - DNA, 122 bp, Homo sapiens
gtggtgtcttcggtttgggtgctatcccagggctcgggctggcttgcatctgaggggagccggggcggggcgatcggacccctgctggccctacgggggagcgctgggatgagctgcgggcg

SEQ ID NO: 177166 - DNA, 122 bp, Homo sapiens
tgctactattctaggcatttccctgaaatgttcaactttccattgaccaagaaagcagctcgcccaagtgtgtgggaagcacttgggtgggacacttttctgccccatttccagaaggatta

SEQ ID NO: 177167 - DNA, 122 bp, Homo sapiens
tttctcgtgccagtttcctccctccgtccgatttcctttcccacgggccctggagttcctcgggcccaggcagggctctggaactggcctgacatgttcataataaggattgtcagacacgg

SEQ ID NO: 177168 - DNA, 122 bp, Homo sapiens
gagccttccccagccgctccccaaaggcacggcttattcttcagggtgcccgactggccacgtggacgtctctccagctcctcacttggggcccagggctctttcgatttttaggagtttgt

SEQ ID NO: 177169 - DNA, 122 bp, Homo sapiens
gaaaagcagcggcttccactcggggggcgggtcccaagggtcttgctgctgctctggggccgtttggactcctggtgttgggggaggggtcagggaggtgctgctcgcgtctccttttgcgc

SEQ ID NO: 177170 - DNA, 122 bp, Homo sapiens
tggctccgggcagaggtgtcaggaaaaataaacagcatttcccccttggcctaagggacccgctccgccctcagcccccagcccttgttgtcatggagagcggcctgtgcacccgagccggc

SEQ ID NO: 177171 - DNA, 122 bp, Homo sapiens
gctccggaggcgggggcgggaactggggcgcgctgggagctgtagtccggatcctatcgccgcctgcggcgtccctgcgcggggcgggagataagaatccgacgcgcccagaagggctggtc

SEQ ID NO: 177172 - DNA, 122 bp, Homo sapiens
tcctgagccctggcgtgggcgtcctgcgagcacggcctcctgtcctggaccctgttcgtccgctgccgtgctcaccaggccagccctcggtaacccgccagagccaaacacaggatttcaca

SEQ ID NO: 177173 - DNA, 122 bp, Homo sapiens
cagtgcttcaaaaatggcaacgattgtcatggtcataaccaacattcagctgatgagtgccggctctacggtgggtcccatgtgagagattgagggtctagagatgacaaggctgccacctc

SEQ ID NO: 177174 - DNA, 122 bp, Homo sapiens
ggcttctgcccagcagccagcaggaccctaccaagccccatcttctctgctcactcccatcgctcccagatcttcccaggggctgaagcattttgggctgagcattttcgtgctgagtcagc

SEQ ID NO: 177175 - DNA, 122 bp, Homo sapiens
gactgggatctcggagttcccctgcgccctcctgacggtgcagtctggcggcccgtggcgcgggcgctgccatggagcatcctggagcctttggcctcggtttacatgggaggcccctcgaa

SEQ ID NO: 177176 - DNA, 122 bp, Homo sapiens
ctctgcccttttagactgtctaacaactcgcagtttctcctttgctgcaggaatggtggccgcaaacggtctcagcctccgcacccaccgcctccgtccccgcccacccgcacctcctcctc

SEQ ID NO: 177177 - DNA, 122 bp, Homo sapiens
ggggaaagttggctcctgagggtttcagtttccacctagccgcgtgctctccgggttctgcgtgctcctcccagggcgcccgctgtgccccagttctggacctgggtcctacccagtggaaa

SEQ ID NO: 177178 - DNA, 122 bp, Homo sapiens
tgtcccgcacccacctgcccctccccttctgccccggcgcccccccacaccccacctgcccgcgcccacctttcagggttcagagcccaccggaaccggaagccgatctgccgcgcctggcc

SEQ ID NO: 177179 - DNA, 122 bp, Homo sapiens
aggacacgacgagcaccggctccttggcccaggcattcttgaagaaggtgcggagtctcgcggccatcttggtctcggcggcggcgacggcggcgaggacgcggagcactctgggagttgtg

SEQ ID NO: 177180 - DNA, 122 bp, Homo sapiens
ccacctgtgcacacatttttcttcaatgtatagttcctcggcgcgcctctgaccttttcccggagctcttcaatcccagaagctatagcacaacggctgaatcgccaggacccccggggagg

SEQ ID NO: 177181 - DNA, 122 bp, Homo sapiens
ggtgcctgtcagagggatgtgcttgggctgagcgcagggcctcctcaggagagcagcctgcggcccgcgggtgccgacctaatcctcagaggggccagaaccgaaccgagcattgcagcggc

SEQ ID NO: 177182 - DNA, 122 bp, Homo sapiens
gccgaagacctgaggaggcccgggtggcccagagtcaggtggtccccaggcctttctctccggccgcaacctgagtgcacaccacattcctcgcccagcgaatcaggagagaagctttaaaa

SEQ ID NO: 177183 - DNA, 122 bp, Homo sapiens
tgttgagctccgtgcggtggtgatagcccttctgcccggcccgagcaatggagcagcccacgcgggcggggtgccaggcgccaatgcaggccaccttgcgcaggcccttatgggtcttccgc

SEQ ID NO: 177184 - DNA, 122 bp, Homo sapiens
cgcagcggaggctgctctccctaccttgggtagggggccctcgagactagagtccaacagcgcggcctcggtcagccccgagtcgtcatccatgctgatgaagatgcccggggtctcgcact

SEQ ID NO: 177185 - DNA, 122 bp, Homo sapiens
attatataacccctccctgaataaattcacagtaaatcatccatagtaaaaacagccaaacgccaagcagcttaagagatttaagaaaacttcaagacagaagacatcatttacagagggcc

SEQ ID NO: 177186 - DNA, 122 bp, Homo sapiens
acgaatgtctaagccttgtggttagtggggacaatgctggtggagtctgaagttgtcatgcggtgactcatgcaagcttaggcagatttggtgatatatgacacagagatgcaaagaaatgt

SEQ ID NO: 177187 - DNA, 122 bp, Homo sapiens
ccctttctgagtcaaagaaaggggtgacggacgcacctggaaaatcgggtcactcccacccgaatattgcgcttttcagaccggcttaagaaacggggcactacgagactatatcccacacc

SEQ ID NO: 177188 - DNA, 122 bp, Homo sapiens
cagccagaagaggatctagttagacttctgtgaaagaaagtctatgtgccattccagtgccgtactcatgcctgccatggagcaagacggtggaagacacttaaaccttcagtgctttaact

SEQ ID NO: 177189 - DNA, 122 bp, Homo sapiens
gcccactccacccgacctccctttcctgaggctgttcccagttgctgctttgggtcgctccggagctcaagaactcgggttgcctgccgccccactctccacgcacatacttggttttcttc

SEQ ID NO: 177190 - DNA, 122 bp, Homo sapiens
ggaagtgaatgatatgggtataattaaaaaaaaaaaaaaaaacaaaaaacctttacgtaacgtttttgctgggagagaagactacgaagcacattttccaggaagtgtgggctgcaacgatt

SEQ ID NO: 177191 - DNA, 122 bp, Homo sapiens
catgttccgcagagacataaccatcttttttttcccaaatattttcaatcccaggttggtcgaatccacagatacaaacctacaaatacaaagggccaactctactctagaatagtttgaat

SEQ ID NO: 177192 - DNA, 122 bp, Homo sapiens
gaggtcacaaggcggaagcccaggtggtgatgatgggcctggactcggcgggcaagaccacgctcctttacaagctgaagggccaccagctggtggagaccctgcccactgttggtttcaac

SEQ ID NO: 177193 - DNA, 122 bp, Homo sapiens
gtgcttcacgaacttcccgctgagcgtcctctcatcctggggtggagagcaggcccatcacggggctcccacctgcctgcctgccatactgtccatgccagtgcctgagaaacaccgcctct

SEQ ID NO: 177194 - DNA, 122 bp, Homo sapiens
tccttcaacggggactcacgaagtgaaccttttcctttagttctaaattcctgaccacaccggaccctggcttctatccgttgcaggcaaccacctcctcctagagctcaaggagaatcagc

SEQ ID NO: 177195 - DNA, 122 bp, Homo sapiens
acgtgcaagcgaggacggctggacagggccgcgactggagcccagcgggcgcgctcacctcggacaggctgaccgggagcccccagaatgcacaacaggcacacgagatgcaggcagcggca

SEQ ID NO: 177196 - DNA, 122 bp, Homo sapiens
acccggatgggtgaggctttccgatcactcctaggggcggggcttctggcaactccctgtcgctccggtctgtcggctctgggtacctcgcgatctgactcggctcccttccatcggccccc

SEQ ID NO: 177197 - DNA, 122 bp, Homo sapiens
gagttcctgggacacccaagttcagcacttctgcatgaaaccgaaacggccagggaggggcggagtgggccgaggctgagggagcggcggtgttgacgccctcttcccacccaggatcgatc

SEQ ID NO: 177198 - DNA, 122 bp, Homo sapiens
aggctcatcgggaggtcctgatgggagaacccatgcaacttgccaccatagagccaggcccgcggcggttggcgcctggtgggtattaaagacgagtcgggaaagaagagcaggtaagaggg

SEQ ID NO: 177199 - DNA, 122 bp, Homo sapiens
gactccttccctccagcaggatcttgtgactaggccacagcttgcagagagagcagggggcggcagaacggtatagatggtaatgacctcccaggcaggtgggactggttgtggtgagttcc

SEQ ID NO: 177200 - DNA, 122 bp, Homo sapiens
ccaccacgcctccatcctgcacctataaaaactcgagaccctagcgggcagacacacaagcggctggaggtcgtgaggaacacatctgtggaggaagacacaagtggctggttgttgagagc

SEQ ID NO: 177201 - DNA, 122 bp, Homo sapiens
aaaatcagcacagatatagagctagaagttattgtaaaagaataatagtggcggccgccacggcgcaggagttgccaagattttcctggatgaattccatccaagatacggttttaagtctc

SEQ ID NO: 177202 - DNA, 122 bp, Homo sapiens
tagaaggagagcccaggcctgccctcacgctctccatcataggctgacaccaagaagactcgtcttggcacaatctcacacagctggggctgtagcaaccctttccaacccctttgctggtt

SEQ ID NO: 177203 - DNA, 122 bp, Homo sapiens
atgctaactgcaatgaggtcttgaatgccgagttgctcacagactcacccagcagcagctcggcctggagtgacaggtgagagggagcaaagggcagctggcgtgggcatggagctggctgg

SEQ ID NO: 177204 - DNA, 122 bp, Homo sapiens
gagccacagatgatgactgagtctccgaggcctctcggtctttttctattttaacaggggcgcgtgcagagcgtggtaagtgggaggggcttcgtgtcaaaagtaaaagaacccagtcggtg

SEQ ID NO: 177205 - DNA, 122 bp, Homo sapiens
acgggcgagtgggcttctcgggttctactctgtgaaggccaaggcaagggcgtcgtcgcgcgctgcctggcggagcccagccccttccccacactgtcgctgacacgcccgcctgtcaaagg

SEQ ID NO: 177206 - DNA, 122 bp, Homo sapiens
tggacttacagagcacccacctgcttaggggccaggaggtcatcttccctgctgggcttacggagctgcagggacacacagagttggacaccggatcccttgccccatcctccatcactttc

SEQ ID NO: 177207 - DNA, 122 bp, Homo sapiens
ggcggccctgacaggcggcggcggcggtgagggaagccggagcgagaggcagcggagccgcgtgtgtgtttttattattattatttctgattaaagaggaattcatctcgtatctgcctcct

SEQ ID NO: 177208 - DNA, 122 bp, Homo sapiens
cagctgagtgaccatcccatgggaaacaaatatttgcattcctttatcatgttactgaggcgacatctaattgtatccttctttttaccttacgtgagacactaatgggtggttttctcctt

SEQ ID NO: 177209 - DNA, 122 bp, Homo sapiens
tgttttctagcggcttctctaagcaaggcttagctcagcacaactttcccttccagcccccgcctcccactgtggccattggcaggggctgttgggatcaccacagagggcacatggggaag

SEQ ID NO: 177210 - DNA, 122 bp, Homo sapiens
gactgtagtgagtccttgtttgggctgcaccgttcctgtctcggcaccgatgtagtcgaccgtccaggtgaggccgaaccaggagagctttggcagcggtgaagcctctccattctttccag

SEQ ID NO: 177211 - DNA, 122 bp, Homo sapiens
aagcagcaggaggatgaagagcatggagggtgtctgagaggggcagctctggctttgctgcggcgtcccctagatgaacctccctgcctggagccactccgtcatagaaagctcatatctca

SEQ ID NO: 177212 - DNA, 122 bp, Homo sapiens
cggaggctggagccgtgagagcgtgcgggaatatgcgttgggaaaacacaagtcgagggccggggagaggagacctccctgctcggtcctacagtgtgacaactttgccaggctcttttctg

SEQ ID NO: 177213 - DNA, 122 bp, Homo sapiens
cttcgcggtgctgaattaaagcgtctgaatggggatttcccctcgcgccggacggcctggcgcgcggcgcatacttccaggttgctatgactggcctgcgctcgcctaatcaccgactaggg

SEQ ID NO: 177214 - DNA, 122 bp, Homo sapiens
cctctctagcagcagatcaggctcagccagagatgtctccaaaccacatccacaactcttcgtggcaggaccttctatcagtcactgggcgctctcaattatgtcttgactctgcaatccct

SEQ ID NO: 177215 - DNA, 122 bp, Homo sapiens
tcagttgaggggtagtcgaggaaggaacccggctcggccaggccccgccggcttggcgcacgctcctcggcccggacgccagtctcctcccggatggcatccagggcgctgggcttcatcgg

SEQ ID NO: 177216 - DNA, 122 bp, Homo sapiens
atgattttagacatgttacttaaaaactctttgcctcagtttcatcatcatctataaatgcggagcaatgaacacgttatcatagagttattataaatgttaatattgcaaagtgcttaaaa

SEQ ID NO: 177217 - DNA, 122 bp, Homo sapiens
cttgaggttttttgttttattttttaatatggggtaaaatttgatcatgtgtgcaagctacggggaaggagtcaatggagagggaaagatctaagatgcaagactgaagaattatgctgact

SEQ ID NO: 177218 - DNA, 122 bp, Homo sapiens
taaacaagaggaatttagcaatatcacctcttggcgtgagtattatgtagcatctgtagtcgggaggggtggaggggttgtagagcaggggtgacttctttaaaacctctcagtttgcatat

SEQ ID NO: 177219 - DNA, 122 bp, Homo sapiens
ttcctggtgtgctgatgctaagagatctacttacataaataagtcctgaaaccatgtcatcgcctatgtcgatgccacgattcacgaggccaccagaagagttgggcacccagtatgtcctc

SEQ ID NO: 177220 - DNA, 122 bp, Homo sapiens
ctctctgtcccttccccctttaacatcatgcccaccccaccatgccaggacaacagccgccgggtagacaatgtgctaaagctgtggatcatagaggcccgggagctgccccccaagaagcg

SEQ ID NO: 177221 - DNA, 122 bp, Homo sapiens
aggtattgtattttcatcattcatcaacagaagacttatttgtaatataccccttgcaggcgggtctggtgtgtatattcatttattaggatcacacatcacattacctcacgtacataacc

SEQ ID NO: 177222 - DNA, 122 bp, Homo sapiens
ctccgccccacggaggattccccagtttcctcgaagggcacttgcctaccgaggtccctgcggctgtgacttccctgtcatgctgcttcctaagaatccagaacagattcaggtcagtgcgt

SEQ ID NO: 177223 - DNA, 122 bp, Homo sapiens
gggttcatgcccaggaagagtacttccttggggccctggcagtagcgagtcacgtagttgcgatgtggctcccatgcatactccacgggattgtagatgatgcccacaggctccgaaaactg

SEQ ID NO: 177224 - DNA, 122 bp, Homo sapiens
aagttttgtattttttagtaaacctgaagtttcatcatgttgctcaggttcgtctcagaacgcctgggctcaagtgatccatctaccttggcctcccaaagtgctgggattacaggcgtgag

SEQ ID NO: 177225 - DNA, 122 bp, Homo sapiens
gccctggcacgcgctctgcgcatgcgtacgctcgctggccccgccccctagcgccgcggtcggagccatttcgccgattcctccatgcgagttgctgtgcgtttctctgttgtctcggtaga

SEQ ID NO: 177226 - DNA, 122 bp, Homo sapiens
taagccccctcgattccggcgcctccggcaagagcgggagtccctgggcctgtggggacccgaggaggagccccacctgctggcaggtcagtggccaggcaggcccaaactgtgttctgggg

SEQ ID NO: 177227 - DNA, 122 bp, Homo sapiens
ataaagatataataacttggacttttaagaattcactaatttgatgacttgccacacatgcgattatgttaccctcagatggtaatggaggaatgtttttctgaaagtgataagaacactat

SEQ ID NO: 177228 - DNA, 122 bp, Homo sapiens
aaaaacagaaacggttagctacactcagagcgaagagaaggctggtgtgggtgagtcatacggtcttttccacgcagcagagaaggtacctaattcaattgcttcacttttaactaatatat

SEQ ID NO: 177229 - DNA, 122 bp, Homo sapiens
aggccggctccgggctttctgcagcagcaccaggggcgggggcggggatcttgacctgggcgagcgaccgggacgcatacagcgccggcctgaccccgcgggacccgcgcctcaccaccgga

SEQ ID NO: 177230 - DNA, 122 bp, Homo sapiens
tgaccggctcgaagccggcctccgtctcccaggccacagccacaccccgcacagtctgcacgtgcgtgtagaaggcacacacactctgcggagcagcattgtcctcatcgcacatgcaggag

SEQ ID NO: 177231 - DNA, 122 bp, Homo sapiens
cactagttatgttttctgctaggttaaagatcttcggacagacttgccgccgaatctaatcgccaggagtgagcaggcgatgctggttggggtgacagggtgctaaaaaataaccaagggag

SEQ ID NO: 177232 - DNA, 122 bp, Homo sapiens
tgtgagccactgcacccgaccaagtgttagttcttttacaacgtaacaaatagccgggcacggtggctcactgtcatcccacactttgggaagccaaggcaggcagatcacgaggtcaggag

SEQ ID NO: 177233 - DNA, 122 bp, Homo sapiens
actttgcccacctagagctgctggtggtgaccttaagtttactatgtttctcctggtatacggcacttggcccagagtggactccagcttgccacctgtcacccaggctggagtgcagtggc

SEQ ID NO: 177234 - DNA, 122 bp, Homo sapiens
atctactttgtgatgagtgtggtgatggaggtttcagcttttcagagacagtggtggtggcgctgtttgcatccagtcctcagtgagggctgccgtgtgtgtgacgagtggcagggacagtg

SEQ ID NO: 177235 - DNA, 122 bp, Homo sapiens
aagtcagcacgctgtcctttcgctgagtcccgagtgtaaaaccttactgaggaaaaaaaccgaagctcatagaagtcccagcaatctgaaccaccactgcccaacacgggagaggcaggagt

SEQ ID NO: 177236 - DNA, 122 bp, Homo sapiens
cgatgcctctcccgccgccggtgatgaggacgttctcccgcgacaggtcccgcagcttggcgggcagcaccagtccgacggctgctttcaccaccagatagatcatctgtagagggaacatc

SEQ ID NO: 177237 - DNA, 122 bp, Homo sapiens
tggtggtgcaggccgggcttttccacggcaacgagatgctgtgcaagacggtgtccagctcggaggtgagcgtgtgctcggagcccgtgtggaagcagcggctggagttcgacatcaacatc

SEQ ID NO: 177238 - DNA, 122 bp, Homo sapiens
catctgtggaatgggacgtagtaagtaatgctgcttaactacccacagttgaagtgacgacgaaggccggctgagatgaattctggcccccatctgaatgctcaccgtgtgctttcgacaca

SEQ ID NO: 177239 - DNA, 122 bp, Homo sapiens
agccacaagtagttgtctcacagagcgccaaaggctgcaaggaggatgcagagtggggcccgcacagagcccggggctccagggatggcttctctgagactggaagaatgaattaggaggca

SEQ ID NO: 177240 - DNA, 122 bp, Homo sapiens
attgggcaataaactctcctgggaagagaaggtattccaaacatttaaaccgttctccaccgactcctgcccgcctcaacacaatgccttgtgagtagaaatgaaaaaccacctgaatttaa

SEQ ID NO: 177241 - DNA, 122 bp, Homo sapiens
caacagctagcagaagcccagaatccaggagaatccagccgagcaggcaggcgctcctggcgggtgctgtaagctgttgaggacattctgctacggcaggagaaagagcaagggctccctca

SEQ ID NO: 177242 - DNA, 122 bp, Homo sapiens
cgctcagggctggagggcgcagccgggaagggcaaggaggccccgcacgcctgggaggggcgatcctgaccagactgcacccagtctgtcttggagtgaaagccatttagtctgtccccatc

SEQ ID NO: 177243 - DNA, 122 bp, Homo sapiens
cacacccaccccgcccggctggggcggcgcggaactatgacgtagtagctgcgtcaggagcgcgcccgcgtttctaaactttgtctggataaggcgcacgcttggcgacgtcgaaggtccgt

SEQ ID NO: 177244 - DNA, 122 bp, Homo sapiens
gctgggacgccgctgcctccagctctgggaagcggctggggctcacctggggaccacgtgcggaggtactagaaagcatgcaccgactagtcgccgtaccttccaaaaatacccatgggagt

SEQ ID NO: 177245 - DNA, 122 bp, Homo sapiens
gggagtccagcccggatattgagtgcagccattgagaaaagccaaactcttgtgtgtgcgcgtctcgatagcccccaagatggccgccaatgtgggatcgatgtttcaatattggaagcgat

SEQ ID NO: 177246 - DNA, 122 bp, Homo sapiens
ccgccccccacccagatacgggcctgggaacgcagggacaggcccaggggcgtgggcgctcgaggcgggctcgcagaggtcgggtcgccgcagggccctgagcgccgcgccgcacgcaggtg

SEQ ID NO: 177247 - DNA, 122 bp, Homo sapiens
gggctgtgtgagtaaaagcaccaatcacatatatacatgtgtacatgcatttctgtatgacggaacattatcttacaaaagatccaactttaaataaggggggagaattagtacctataaag

SEQ ID NO: 177248 - DNA, 122 bp, Homo sapiens
ctgctcttggttctggttctggaggctgggttgagaggtcgccggtccgactgtcctcggcggttggtcagtgtgaatttgtgacagctgcagttgctccccgcccccgagcagccgaggtg

SEQ ID NO: 177249 - DNA, 122 bp, Homo sapiens
ttggtaggcccgggccgccgccaggcctccgcctgagcccgcacccgccatggacaactacgcagatctttcggataccgagctgaccaccttgctgcgccggtacaacatcccgcacgggc

SEQ ID NO: 177250 - DNA, 122 bp, Homo sapiens
cgcaggagaggcccacacagcccgtgtcctttcttgcacgcatgccgagcgtcaccattgcgtggggctgtggtcatcaccagggagtgctcctgacaccctcggggtacatctcgcaggcg

SEQ ID NO: 177251 - DNA, 122 bp, Homo sapiens
ggaagctggtcaggaccttccagaaatggttgaaagaaactgaagggagtattccacctacggaaacttctatgagtgctaaagagttagaaaagcagattgaacacctgaaggtaggtgaa

SEQ ID NO: 177252 - DNA, 122 bp, Homo sapiens
cctgtgctaagaatgagcttggcatgtgaaggatctgaaaaagggccagtgaagctaaggcgctaagaggacagagatgaggctagaaaaccagaaagatcctgttaaacttaagaatttta

SEQ ID NO: 177253 - DNA, 122 bp, Homo sapiens
caagcgggcactggggagaagggaggcaaggagccagcaggtgctgcagcaggtggggtacgtcactgctgtaggtcatggctggtggaaacgtgtctttgtgcaggcaacagcaatcctgc

SEQ ID NO: 177254 - DNA, 122 bp, Homo sapiens
cagcaaagcactgttgtgtgcttgagttgctggacagggatgactcagctaagaagacagcgagagaacctcttagaaatatgcttttattatctgcacacagagatatgactgcctccctc

SEQ ID NO: 177255 - DNA, 122 bp, Homo sapiens
gtaaagtttcctttatagattccttttctatatcgctcctagtggttctgtttctctgatcgaattctggctgataacagttgctgagactctgaaagagaaggcaaggaactactgtttct

SEQ ID NO: 177256 - DNA, 122 bp, Homo sapiens
ggcgccggtgacaacccaggcggcgaacgcggcactaagaagcagcggcggcagtagcagcggccttggcctcggaggctttagcacttccggttcgttgcgatccgctttccgactggcga

SEQ ID NO: 177257 - DNA, 122 bp, Homo sapiens
ccatggatgcgcgaggaacgagtgtggcgaaggctgcgagttcccacggggtccttggcccggtagtgaaggtgacctgaggactgctgggcacgcactaggaaccggcaggccctagctga

SEQ ID NO: 177258 - DNA, 122 bp, Homo sapiens
tgcttagtatctgccagtctctgttcttagcaccttaaacatatgaacacatttagtcttcgtaacaactccatgaggtatatactatcgatgtccccacttcactgatgaggaaactaagg

SEQ ID NO: 177259 - DNA, 122 bp, Homo sapiens
cagtttcccagactgtctactgatttttagaaggatgcaaaaaggggacatgtataccctcggtttctgaaagggggtactcaagtgattccccaggcttttgtctgttccagaataaccgc

SEQ ID NO: 177260 - DNA, 122 bp, Homo sapiens
acaagccaaatccgaaccaaatcagcgtcaacaacgtcaaggccggtgtggtgaacggcacgggggcgccgggccagagccctggggctggccgggcctgcgagagctgttacagtaagtgc

SEQ ID NO: 177261 - DNA, 122 bp, Homo sapiens
cgtcagctccgacctgccctcctgggggaggccccgacccagggctgcgtgagcatcacacgggttcagcttctccagagcgtttaggaaggcgccttacttgtcaccagagtcccgggagg

SEQ ID NO: 177262 - DNA, 122 bp, Homo sapiens
aacaactcattgtttgagatactttgatcacatccggtattcatacctttgctcatgcaccgtaccatgtgcccagaataggctaccctgctcccatctctgcttattactatgtcatgttt

SEQ ID NO: 177263 - DNA, 122 bp, Homo sapiens
gggagatttgctctcactgctcccaaaaatggcggacgcattcggagatgagctgttcagcgtgttcgagggcgactcgaccactgcggcgggaaccaaaaaagacaaggaaaaggacaagg

SEQ ID NO: 177264 - DNA, 122 bp, Homo sapiens
tttgggcgtagggttttgagacacagctgtgttttgcccgtggcacgggagctctggggccggcatggcccgtgtggcctaggtggaggtgggaggggaggcgggagaaggggtgccctcga

SEQ ID NO: 177265 - DNA, 122 bp, Homo sapiens
accccagaccccaaagtgcgggggtagggtgcccggctctgggcaggccccaggcggtgccggtatgggagatgtccatttagtcacgcccccaccggcgcctgcctgcccctgtcccgcct

SEQ ID NO: 177266 - DNA, 122 bp, Homo sapiens
ccagcaggcgcccgatgatcgagtccaggttgagcttctcgctgtcggacatggcggcgccgccgctccagcccagcagctcctggcccgctcctgcctcccgccctccggcagcctccttc

SEQ ID NO: 177267 - DNA, 122 bp, Homo sapiens
aagaagacccagccccgaggcctgccgggagttgtagtttctcattttgatgaacccttccgattccacagacctttaggttcaagtcagaaatcaccagcctatgctcaaattttgtcctg

SEQ ID NO: 177268 - DNA, 122 bp, Homo sapiens
cacttgtctaagttacgaagctgcattgtaaccatggacatagattcttcacagattacacgtgtgtaccacacacagattcagtctgtgcttcctctttcttcacttttgacctctgacta

SEQ ID NO: 177269 - DNA, 122 bp, Homo sapiens
agctcatcccgggaccacagggcccggggcggggctcggggcggggctcggggcggggctcgacagggttccacaccccggaagtggccctcgccccgcccacccgcctaccaggtctaccc

SEQ ID NO: 177270 - DNA, 122 bp, Homo sapiens
aatccggatctccagctcgcagagctcctccgggtgggaggcagaggcgagcctgggggtcgaggggcaggggaccaggggcgaggcaaccacctcaggccccggcggcggtgagtagaaga

SEQ ID NO: 177271 - DNA, 122 bp, Homo sapiens
gctttctgggttccatcatgtgaccaccatactgcagagcagaccagaactgctgatcaccgtgagaagcaaacacaaaggtcaggggctgagtggtttggctatttttctactgtgagaca

SEQ ID NO: 177272 - DNA, 122 bp, Homo sapiens
ttcctccctccatcagtttcttcaatgtattcgttatccgcgggtctagacctcccagcccgtctagacctagcggagcgaactcctggaacctgagggatttttttctttccaacatttac

SEQ ID NO: 177273 - DNA, 122 bp, Homo sapiens
atatatcattagtgttgcaccacactgatgctcagtctgtactgtgtagatgtcagtgcacggttagtgctgtgccacgctgacgcttggtcagtaccgtgtagatatcagtgcacggttag

SEQ ID NO: 177274 - DNA, 122 bp, Homo sapiens
gggattacaggcacaaggaaccatgcccggctgtcttgaatatctctgtatgcttcacatcgccaggctcagtgctctgcactcaacaaatgtgagttaaattaaacatatcacttattact

SEQ ID NO: 177275 - DNA, 122 bp, Homo sapiens
gtgggtgagtgacagggccagacctcactcctccagcctggcatggcccagggcccagcacgcttgccaacccccctgccgagctgcagagcgggcttattgcctggtggccctggagacgt

SEQ ID NO: 177276 - DNA, 122 bp, Homo sapiens
agcacggtttgcgcccttcagtaattaataactccacaaataaggtaacaccaagccgctcgcagcgcactcagcccgcggcccccaggtgggtggggccggcccgatgcgggccaatcagg

SEQ ID NO: 177277 - DNA, 122 bp, Homo sapiens
ccgcatgaagtcaggaagcaagccatgaaaaaatgtttaagtagaacgttctagggagagcgaacagcaagtgaaagccatggaggaggttacctgcttgctgtgttgttataacagcaaaa

SEQ ID NO: 177278 - DNA, 122 bp, Homo sapiens
ggaggctattttacatcagcccaggggtaggggtcaggcaagaggctggatgtagcaacgcgcaatgtactgccatggtctctataaacatcagttagttttattgtcagcaacttgcttta

SEQ ID NO: 177279 - DNA, 122 bp, Homo sapiens
ggtggtgcattccccggcacgcggcggggaaccggctcaggaggccacgctgctccccggcggaaaccaaagtgccttctggagaaggtcacctggagcatttcatagacaccgccaggccc

SEQ ID NO: 177280 - DNA, 122 bp, Homo sapiens
catgcacacacgcatgcacacacacacacacgcagtcttccacctctcacccaccactcacgacccacccacacatgggcccaacagtgtaaactcacgccttgagcttccagtcgtgagga

SEQ ID NO: 177281 - DNA, 122 bp, Homo sapiens
aaaatagttaacgttcagagtagcagatgaacacagctctcacatttgcattttccctttcgttctgactcatcttcccctctccccaccctgttgcccctccaccagcctcacccattgac

SEQ ID NO: 177282 - DNA, 122 bp, Homo sapiens
aaaaaatccacccccacggtggggtcagaaacctgggcaaagcgaccctcggtgaagcggcggatcaggcaggacttgcccactgtggaatccccgatgacaatgagccggaactggtacag

SEQ ID NO: 177283 - DNA, 122 bp, Homo sapiens
ggaaactgaggcctgagcgggtgagtgcacggtttaggggtgcgcagagggtcacacgcccgctttgttcagaggggaagctaaggcccgccgaggtcaagaaggggccgatgcgttctgca

SEQ ID NO: 177284 - DNA, 122 bp, Homo sapiens
gcaagatcactgtgtgggatatgtgttcacccttagccccaagcacagtgcctgcatcagcgggcacttttgttgccattgttgaacttttggatggatgcaagctaggcggtataatgtag

SEQ ID NO: 177285 - DNA, 122 bp, Homo sapiens
agagccttcttgggcactgagtcatgcttgcccaccctggacttgagggaaatcagtaagcgctccagtgcacacctgaaatacctgtgctttttcatcttcacaatgatcctgagactttg

SEQ ID NO: 177286 - DNA, 122 bp, Homo sapiens
ctcgatctcctaacctcgtgatccacctgcctcggcctcccaaagtgctgggattacaggcgtgagccaccacgcccagcctgcctgttgggtttatgtccccttctgtcattgcctgttgg

SEQ ID NO: 177287 - DNA, 122 bp, Homo sapiens
taaatgttcatttctgaaataaattcattttaggtatgcagatgcattatttaagtcatccgatatcagatcagccagtttagaggacctgtgggaaaatctgagtttaaagcctgccaact

SEQ ID NO: 177288 - DNA, 122 bp, Homo sapiens
tgaccacatgtacctgtccacaaagcagtgactgtggggcagtcgcagggctgacaggtgcggcagaggcagaagaggcacccaagggcggcggggccgtcaaacactgacgcactctcctc

SEQ ID NO: 177289 - DNA, 122 bp, Homo sapiens
atgcccaaagctcataagagcaaacacctgggttgccatcactgctgcactgcacatatacgcatgcacacatgtacacacatgcacttgtgcaaacacatgtgcacacatacacagacatg

SEQ ID NO: 177290 - DNA, 122 bp, Homo sapiens
caaaggtggcgggttccacgggggtcatctccttgggcaggcggtgggttctctacaggacgtggaaaggaaagggaggaggcacgttcagcaggctaggtgggcggtggcttggccggagc

SEQ ID NO: 177291 - DNA, 122 bp, Homo sapiens
gactatcagttccagagtcttctgaaatggcaaggaggcccccagttctgaactccagcccggaggcccacggcactaggctggcgcaggtcaagctgagctcatctcaaggtacctgaagc

SEQ ID NO: 177292 - DNA, 122 bp, Homo sapiens
cctttgtgtgcgttgatgactcacagaggcactcgtggtctttgtattcggaggtaaggccgtcctgtggtcagaactgttgggactcaggaaacaatactccaaaatgaaggtctcagaag

SEQ ID NO: 177293 - DNA, 122 bp, Homo sapiens
aaaggacacccccgcacacacgccagcggtgggccttatctccccccttatccaaagctgcgctagactattacctacaaagggcacaattttcctgctggctcagaaatgccagacactgg

SEQ ID NO: 177294 - DNA, 122 bp, Homo sapiens
gttggactgcaggaactggaagatcatccggaacttgtccatcatgcccgctgtggggcccggcctcctcttcccaactcactgctgcctccaagagggcccctgctgcccaccctgcccac

SEQ ID NO: 177295 - DNA, 122 bp, Homo sapiens
aaaggcaagcgctgtttctctttaccgttcaatgcatatgtgcgcaagccacctctgatgcgccatatttgtccggctcctctgtctatggatggctttgctcctgatcagaagtgtagggc

SEQ ID NO: 177296 - DNA, 122 bp, Homo sapiens
ggggcttaagggacagaggcgcatgcgttctgccgggggctcgcccttcaccaggaatgacggtttctcttgcacatgcgcttccaggccgcaagtgtccggaaacagaagaatgggagtgt

SEQ ID NO: 177297 - DNA, 122 bp, Homo sapiens
agagtgaggaaagaggtatatatgcagttaaggtgagaacggaaccgtagcttccgccggcggacttgtgagcacgtcagaaagcgaatgtgcctcactagaacgcacggtggcggcaggag

SEQ ID NO: 177298 - DNA, 122 bp, Homo sapiens
aaccctcaaacgtgtgcatcaccactcctttgaaagcatcaatgagggaaatgaagctgccgttggtggaaatgaggatgaccttgccatcgttgctgaatttaagtcctgtccactcacaa

SEQ ID NO: 177299 - DNA, 122 bp, Homo sapiens
tcactacaaaaaataaaaaattagctgggcagctgggcatgctggctcacgcctataatccgagcactttggtaggccaaggtgggaaaatcacttgcgtccaggagttcaaaaccagcctg

SEQ ID NO: 177300 - DNA, 122 bp, Homo sapiens
cagatttaagaaagattcggtagtttggaggatggcacacagaatccaggaaccatgctgcgtaccctttaaaaattggggtggaggggcggggctgttagcagggacgcgtctgggccagt

SEQ ID NO: 177301 - DNA, 122 bp, Homo sapiens
agatgagcaaacggggcggagattgcaggctgatcagtttgaagagccaagatcatctagcgtgacctgttgcccaaggcagagacaaggctgtgggctggtcagaagctggttacaattcc

SEQ ID NO: 177302 - DNA, 122 bp, Homo sapiens
agcaagtgcaagtctgttccttaaagggtaagtatgcagaatggaaagcagagtgtacttcgggttgacagctcatatttgcgcagacatgaaagtgatgatgtgttaattgtgcgtatagc

SEQ ID NO: 177303 - DNA, 122 bp, Homo sapiens
cagacaataatacttagtggcttataatgctctgacctaaaatatacacaccactatatacgctccccggctccctccaaccccgccaatctaccagccactcgggagccacctcagtcatc

SEQ ID NO: 177304 - DNA, 122 bp, Homo sapiens
tgctttctgagggtgaaggatagacgctgtggctctgcatgactcactagcactctatcacggccatattctggcagggtcagtggctccaactaacatttgtttggtactttacagtttat

SEQ ID NO: 177305 - DNA, 122 bp, Homo sapiens
acccgagaccgagaccggcccacggagcggcccgcgcggggaggggtcccgcccgcctcccgcccccgccctccaggccgcgcccgcctcacccccagcgccgacagcagggcggacaccgg

SEQ ID NO: 177306 - DNA, 122 bp, Homo sapiens
ggatcagtaccggggacgcagggcgcacagctagggctggcgggggcggcccgactggggcgctgcctgggctcacgcgggagccaggtgggggacgcagggagaagcagccgagcaggtgc

SEQ ID NO: 177307 - DNA, 122 bp, Homo sapiens
tgaatgccacccgaactcatccagatgccgctgcgttcaagctctcccagcacccgcggccgaagtaaataacaattctcttaatgctaaggcagcaaggagagggcactgcgaactgcaga

SEQ ID NO: 177308 - DNA, 122 bp, Homo sapiens
gcacgaccttccgggaccggaagtgccggtcgaagtcgccctgcaaggcgtgtgtgtgatcgcgcacctgccggggtagggagtgcgacgctgcagcccgtttcgccacttcttctctggtt

SEQ ID NO: 177309 - DNA, 122 bp, Homo sapiens
attcacatcttgacagctttcattggcctgaatgtgattaaagctgagacttcagggaatcgaaactgtgatttccaaaaagcacacagcatctgcataactaaaaaccctctctgactgta

SEQ ID NO: 177310 - DNA, 122 bp, Homo sapiens
agaacacaagaatcgaaaaagcctgtgagatactggtgctcgtgatcgtaagctccaggtcggggggttttcagatgaacacaaaaagggggctgctcccgtcccaagatgagtgataaatg

SEQ ID NO: 177311 - DNA, 122 bp, Homo sapiens
gtccatgggttccagcgccgtctcttccacactcagactggtgctgggagggtgggcacccgctcacttatagccctgtcgccctcccggcccagcccctcaacgctatatataacacaaat

SEQ ID NO: 177312 - DNA, 122 bp, Homo sapiens
ggcccccctgagcagaggactgtaccttgtaaggtgatttcccaacacttctgtgtatgacgtcctgatgcccattatggcgtaggacagccacgtcccctttattcagcagaagagtgctt

SEQ ID NO: 177313 - DNA, 122 bp, Homo sapiens
gtatagacgcaccacagtttatccactcatcagtggacacaggttgtttccactttttggcgatacatcatgttgctatgaacatttgtgtgcaagtctttgtgaagatatatacttttttt

SEQ ID NO: 177314 - DNA, 122 bp, Homo sapiens
tgcaggcccagcagcaggctctgatgtcatgctggggagcaagtgttgcagcccagctttcgtcctcccgaggaagcaaacactggctccctctccagggcctaggggaaggttcacaaaga

SEQ ID NO: 177315 - DNA, 122 bp, Homo sapiens
ccccacccaccaggggcatgaatcctcagaaaagggatattgtgatgtcaactctatcctcgcagtcaccctgggccagctggggaaggaggacatatttaggggtccagggctctacaata

SEQ ID NO: 177316 - DNA, 122 bp, Homo sapiens
agggggtgagcattgagaagacgtaggagctgaccacaatggctagaccggccttgatgtcgcctgcagatcacctgaggttgggagtctgaaagtagcctgaccaacatggagaaaacccg

SEQ ID NO: 177317 - DNA, 122 bp, Homo sapiens
ctcaggtgatccgcccaccttggccacccaaagtgttgggattacagcagtgagcaaccgcgcccggcctcaaatgtcactttctcagcaaaccctttcctggcgtgttccctgccttctcg

SEQ ID NO: 177318 - DNA, 122 bp, Homo sapiens
ctgtccctgcctgtcagcccctgccaaacagaggctgccaaacctccctctgttgcctcccgccccagactaaccttggaaggcaggagacattggaaggtccaggttcagctctcaattcc

SEQ ID NO: 177319 - DNA, 122 bp, Homo sapiens
tcaaggggatgccaatcaaagcatcaacttcaaattgtgtctgaaagccccgccgccgagcggagggcggccgccgcagtcggcgcgcgattgcggatccgggcgcagccgggagccgggcg

SEQ ID NO: 177320 - DNA, 122 bp, Homo sapiens
gataatacacaattctttttctatatacagactcacagccaagagaatgcatcatgttaacgcctgtgagaataaaagttgtgttcagcaggccatgtcatgagctgttaaatgagggtata

SEQ ID NO: 177321 - DNA, 122 bp, Homo sapiens
agtatagacagcccttctggataggggcagacgggtgggagctccgaaggggtgccggggcggtgatcgggaggtctccagcggcccgaaccagggtgaagaagaaggtggagtctgcggag

SEQ ID NO: 177322 - DNA, 122 bp, Homo sapiens
gagaaaagaggaagaacaggaagaagcaagcaagcaagcaagcaattctaaactgctgaacggttctacttttcatcttgagatgcctggaagcactgacttttgttgtcactttgggccca

SEQ ID NO: 177323 - DNA, 122 bp, Homo sapiens
ttgcgggcgtagagggcacgaactcccggcttttgcccgataaatagcatctcttttgtacgagtcattcaaataatagacgcaatctaggtaacttcaagagaagatgggaaggggaaggg

SEQ ID NO: 177324 - DNA, 122 bp, Homo sapiens
tctggaggtcttgaaatgacagcattatgcacccccagcctcctgcaggcgctcgcagctcggctgggtgcatccttgattgtacgggtgccgtggcccatgtgcatcctgcctcgccccga

SEQ ID NO: 177325 - DNA, 122 bp, Homo sapiens
ggaggagaggagcggtgaacagctagctctctttgaagactggaatggggctgcccttcgcgccttacccagccttccagcgtacttggggtgtcttccctgctttggctgagacgtcccgg

SEQ ID NO: 177326 - DNA, 122 bp, Homo sapiens
cataaaatacttcctagggatggtaaactgattcaaccagataacgcagggaaaatgcttcgcacgccgcctgacacgaacttactgtgcctggctgctgctgttatttatcactaacactt

SEQ ID NO: 177327 - DNA, 122 bp, Homo sapiens
atcctcaaaatgttggtatcatttccagactgtcctgtcagcatcagaacttacaggaaacgcttcatcttcccatacaaaccctgtatttattcacaaccctggcatacttggggaaagaa

SEQ ID NO: 177328 - DNA, 122 bp, Homo sapiens
ggggctggtggggttgtcgccctgcccctcccggccacctcggccacgtgctgctccttgcgcttcagaacgcactcgtactgctcctcgccctgccgcagcagctccagctccagcctgtc

SEQ ID NO: 177329 - DNA, 122 bp, Homo sapiens
gggctcggcgggccctggtgaggggcttagtacccagccagcagctgcggagggtgcctgcgtcccccaggagtgctggcgctcgatttctcacccagccttagctgcctcccttgtggggc

SEQ ID NO: 177330 - DNA, 122 bp, Homo sapiens
gggaaagagggactcggacgtgtctttccttcctgggggaataggaagaggactgcagttcgttgatataaacagaacgcgcctcctagttcactcaggccttgggccgagcggggagcaga

SEQ ID NO: 177331 - DNA, 122 bp, Homo sapiens
attaggaggaaaaaaaaaagaaatcaagccagatgccacaatggactaaaacaagctccccgactttgccagttggttttgattgtttacaaagaaaaagccaaacaaagaaggaggtggaa

SEQ ID NO: 177332 - DNA, 122 bp, Homo sapiens
ctatttatagctgattgcttcaccgcttgtcttgcctgttttttagaatgccctttgccacgaacaaagcagattgaaaatagatgtggggccaggttctgggagtcttctaacatttcttt

SEQ ID NO: 177333 - DNA, 122 bp, Homo sapiens
ggatgcgattggctgggctctttcctaacgcttagatttttggagagcccctgcaggaatcggggaggggaaagtaaggtctgccattaatgtggcaaacaaggggatttatgtgcatcaat

SEQ ID NO: 177334 - DNA, 122 bp, Homo sapiens
cctccagggccacgagcccaccagctcattgttggtcacccagtctggtgcttgccatggcggcacacacaaacccagacacccggcagatccccactcagtccccagttccagacaagcag

SEQ ID NO: 177335 - DNA, 122 bp, Homo sapiens
catgatgacaccagcaccctcagctccacccctacgtagaaatagctttttccttccaggcgccagcctcaaccaagcagcagagacccccgccccctggagaagcaaggaccctcccccac

SEQ ID NO: 177336 - DNA, 122 bp, Homo sapiens
gtcaccacggcaacagccagccctgcctcgggctcgagagtgacacagcagttctggagccggaccccttccccagctgtcacgagacattgaatgcgggacgatcccagcaaacaagtgaa

SEQ ID NO: 177337 - DNA, 122 bp, Homo sapiens
caaccactatagattaattttgcttattcgtgtgcttcacaaaaatggaatcattttggccgggcctggtagctcatgcctgtaatcccaagactttgtgaggctgaggcaggcagatcacc

SEQ ID NO: 177338 - DNA, 122 bp, Homo sapiens
gccgagcgccgacacagactgaaggcccgtgaggggggcgctgtggatgcaggacggggtcgccctgtgacaggccagaggagccctcaggatggcattcacatcccactgccccaggagga

SEQ ID NO: 177339 - DNA, 122 bp, Homo sapiens
gtggagagtccgaggtgcccacgccgggcggagcggccaccccgaagggagaggagaagccgggtggcgcgtccccaaaagcatgtgtgcctctctagcgttttttattttcggggcaggaa

SEQ ID NO: 177340 - DNA, 122 bp, Homo sapiens
ccccacgctgtcactcattcctcaccatggttgcagcacaaagcaacaagccccagaggccgcttcctccctgaggagcggctccggcggccggagaaggcgcaggaggaggaagaggcgga

SEQ ID NO: 177341 - DNA, 122 bp, Homo sapiens
gcctgatagatgattcaggctcatcttggttaaaatagaacttgctgcctccattccccccgtgaccagctcctcctgggtgctcctccgagagaaggcacttcctcactccttccagagaa

SEQ ID NO: 177342 - DNA, 122 bp, Homo sapiens
ttccacctgcctcggcctctcaaagtgctgggattacaggcgtgagtcacggtgccaggccgccactgcctcaactttttgggcttatccctggaagaagaaactgccactactttttcaat

SEQ ID NO: 177343 - DNA, 122 bp, Homo sapiens
gacctccttttggttgcctttgtagttttaaccgacacacataaaaaagtgatgacttagcggtaaccccccttcccgaccccctcgaacaggtgaggaagtcagacgggcagcccccctcc

SEQ ID NO: 177344 - DNA, 122 bp, Homo sapiens
cggtacaccgacccggaccgcgccttcccaaacgagtggcctctcctccagcccgattggcgagctagagaaaagaagggaactggatcacttcagcattaaggaggacttttccccaaaat

SEQ ID NO: 177345 - DNA, 122 bp, Homo sapiens
gactgagatgacaggcacagagggtcagaggactgaggactggaaagaaagatgcttactcggtatgtatcgtctagcttccattatcgaaagtcaaggtgacacgctggtctttctgtaag

SEQ ID NO: 177346 - DNA, 122 bp, Homo sapiens
caggcctctgcagctcaccgggcaagtacggtttctccgctgccctgtccataggcgccacgccgaccccaaatcatttgcacccagcacctctgtttggtgaagacgattttgcaaacagc

SEQ ID NO: 177347 - DNA, 122 bp, Homo sapiens
accctctctcgagggcaggcggacaggcggggagctttaagccgatctgtgtcatggggtcgctgggcgggcgcggcggcaggggcgccgggagcggcggactggaggggcggactgaaggc

SEQ ID NO: 177348 - DNA, 122 bp, Homo sapiens
ttgtgggccaggaggacttccgggtgggtgtggtatctgcgggcccgcacttggaatggccggcccgcgcagccggcccaggcagtgaggggcttagcacccggtccagcagctgcagaggg

SEQ ID NO: 177349 - DNA, 122 bp, Homo sapiens
agaagtcagcacctgttagtggaaccgcgactgctccgcagagctgctggtatgagcgcccgtcgccaccccacatcccaggcccagccattctgacaagaactagactttgggctccttga

SEQ ID NO: 177350 - DNA, 122 bp, Homo sapiens
tgtgtgtgcgcacgcaagtgagcgtgtgcgatagtgtgcaaatgagcgtgtgagtgtacgcgcggggatgggtgggatggtgtgggagggatgtagtaaggccatgggtactgcctttggat

SEQ ID NO: 177351 - DNA, 122 bp, Homo sapiens
attcctgggcatccggtgcccttcagcggcctcatctgggttgtgctgatcctagatggccgggatgggcatgaggtggccaaggatgctgtgtctgtacggctgctgcaggcactcattga

SEQ ID NO: 177352 - DNA, 122 bp, Homo sapiens
tttctcctaagtacccttgctccggagcgaagttgagttgttgtttgtaaagagggggtgcgtgctgtggccgccttaagtggattgtataactgtattttatttaggtggatgttgccagt

SEQ ID NO: 177353 - DNA, 122 bp, Homo sapiens
cctgggggaggggctgggcccagggcagaaaagtccaggttcccatgcggcctgggcccacgtggagcgggcgctgaatcaccgttcagccgcccccctcccctcctccccgaccggtgccc

SEQ ID NO: 177354 - DNA, 122 bp, Homo sapiens
ctgtacacagtttattattaataataaaatctgaccacccaaatcctcagtgaaaaccaccgggacggccgcctgtgacggggctagaggggagcaggaacattccagagctccagttaagg

SEQ ID NO: 177355 - DNA, 122 bp, Homo sapiens
cccgaggagggtgcccttccttgccccgatgctgccgggaccgtccctcatcccccaggtcgcagcagactcagccaagacacccggtcctagtgcgaacacctcgcgggccccgggagacg

SEQ ID NO: 177356 - DNA, 122 bp, Homo sapiens
atgtcctgtgttcgtgtgtggcattcttctggcttcctttatagacctgggggattgtcccgtctgatccaatcaagagacctggcttctcattctggctcatccactgccctatcatgtgc

SEQ ID NO: 177357 - DNA, 122 bp, Homo sapiens
ccttcccatcccctgggacccaccccaatcctcctggggctgagtggctgggctggaccccgattcagtgatgcagacgtggacggtggaaagttaaaagggcgacctctgaagtcgcaggc

SEQ ID NO: 177358 - DNA, 122 bp, Homo sapiens
tcattcttttcagtaaattctctctctgcgtggtgagaaaacaggcctggagaggctctgcgacccgcttaggaccacagaactcggtactaggaaaactcctattttaaaatccagccctg

SEQ ID NO: 177359 - DNA, 122 bp, Homo sapiens
ggatgaacacttccacatgcgagcactgcctttttcttgctttcctgtaacagtgtggcacgcaacgaggccagagacaaccacagaaccagagtcccgtttacctgccgggtttattcttc

SEQ ID NO: 177360 - DNA, 122 bp, Homo sapiens
tacaggccttggagggagagaatcgagtggccaaggtagcgcctttcccacggttagtcccggcccgggaggggagcgcaaccttgaccgtgcgctaagaggcgagacgcgctctgtgccct

SEQ ID NO: 177361 - DNA, 122 bp, Homo sapiens
gagcccgggcggcgggaggaggagaagacggcaggcggcggggagggggagcgggcgcggcggccccgccccactcgcttccccgggccggccctggccccggcccagccccgcacccgttc

SEQ ID NO: 177362 - DNA, 122 bp, Homo sapiens
cacgaacgcgtttgtgtgcacttgcacactcctttcccggaatgtgcccgtgtttggagccgcccgcatccttctctaacaatcttggcttcttgaaagtccgggcctcccgggcaccgcat

SEQ ID NO: 177363 - DNA, 122 bp, Homo sapiens
gacctggggatttcagaccaagttgggggctgctacccaagaaccagtaagaggagtcagcgaatgaatagaaacttcctctgcccagatgcaaggcacaaacagctccaagaaggactagt

SEQ ID NO: 177364 - DNA, 122 bp, Homo sapiens
ctgtcctcgcccctccttccgttttcgcaggcgagcgattccgcagttggtagaggggcgcgtaaaacaattctcgagcaaaagtgcttctcgtctgccgaggatgtagctcccaagtcaga

SEQ ID NO: 177365 - DNA, 122 bp, Homo sapiens
ccaggggacatttgggaaacctgggggtgtgggggttaaccctgtatttgtggtccatttcgcaaaggatagcatcccacatccatgagagggaggtcagaagggagtggctgtggctgtga

SEQ ID NO: 177366 - DNA, 122 bp, Homo sapiens
atgaacaaagccaatcagacttcgatctgcaacatagagtgattctgaagctgccattcccgccccgcgacgacgaggccgccggaagtcgtagtttcggaagtgcggcgcgtgaggcagcc

SEQ ID NO: 177367 - DNA, 122 bp, Homo sapiens
ccgcccccagggtcccttcctatggggcagggcgggccctggccggcagcgattcaggaccgccccagagacggccaggagggcgtgggggaggggcgtggggcagaaacaggggtgtggag

SEQ ID NO: 177368 - DNA, 122 bp, Homo sapiens
cattcacgttatacatttcaaatttcaacatacaaagccatgaaaaaaatttcaaagctccgtaacttgactcctccctcccagccttctatgccccaggtaggtatacttttccattgaaa

SEQ ID NO: 177369 - DNA, 122 bp, Homo sapiens
aaccattcgccatccccccaagttcctcggctattgcttcttctctcctttggtgggtaccggctgggggctacatttcttcttcaattttgtctttttcagcatggcatggttctctttcc

SEQ ID NO: 177370 - DNA, 122 bp, Homo sapiens
aaatgtcgcattcgggccagacaaataaactgttcttgcagcagcacctggggaatgaaacgctgagaagggagaaggcgcccgaaggcgaccacgtgggccacagccacagcactgtaggt

SEQ ID NO: 177371 - DNA, 122 bp, Homo sapiens
ccaaacattaggagagaaccatgaatttggtttctgcacagaagcactaaaagcaccctgcgtggaggagaatgattaatgggtacccatcctgtgtgaacacgcctgtaaaactgagtcat

SEQ ID NO: 177372 - DNA, 122 bp, Homo sapiens
gggatctcaaccacctagtgtccttgaccatgagcggcataaccacctccctccggttcccgggtcagctcaacgcagacctgcgcaagctggcggtgaacatggtccccttcccccgcctg

SEQ ID NO: 177373 - DNA, 122 bp, Homo sapiens
agccggcaacgagcggctgcactgcaccatgaagcgcacagaggacgacccggaggtgggcggcccgtgctacacgctctacctggagtacctgggcgggcttgtgcccatcctcaaagggc

SEQ ID NO: 177374 - DNA, 122 bp, Homo sapiens
gtgaccctgggcgagagggtttggcgggaattctgaaagccgctggcggaccgcgcgcagcggccagagaccgagccctaaggagagtgcggcgcttcccgaggcgtgcagctgggaactgc

SEQ ID NO: 177375 - DNA, 122 bp, Homo sapiens
ggaggaggagcagggcccgtcctcgtccggctggtgggtcctgccctgggtggctctggtcggagtacctcatagatgtggtagagattggagccttcatccggccagtagtggtagcactg

SEQ ID NO: 177376 - DNA, 122 bp, Homo sapiens
ctccaagcaggaggagcgcacgcactaccagcagctgctggcctacgaagaccgcctctacggcgacatcctgcagtggggctttctcgacaccttcttcaacctgaccctcaaggagatcc

SEQ ID NO: 177377 - DNA, 122 bp, Homo sapiens
ccctctgaagcgggtggattggctggggtgcttcgctcagccaatccggacgcgcccgggcgtcgcggccccgcctcctccccggcgctctgggcccgtagcgctccgcgggaaggaggctg

SEQ ID NO: 177378 - DNA, 122 bp, Homo sapiens
ccacagcatatcctatgcagatcagatcccaatgcagccggggaaacaggacgtgggacacgcacagtcctgctcctcttcctgggacccctgtctgctgggcgcacccctcaggcccagga

SEQ ID NO: 177379 - DNA, 122 bp, Homo sapiens
cacagaaccacgaatgtccaacgcgggcaaggctggcgggggcagcactgtggcctcgctcgggggacagggaggcttacggacgagtgagcgcttgaacagcgctgtggacggtgaggaga

SEQ ID NO: 177380 - DNA, 122 bp, Homo sapiens
cgaacactacccgctctcacattaacccgaccaagtcttccggagtttccctggcacccgcgcaggccctaacactagctgtctctgcttctgtatgtctcttcaaggagtcattactccca

SEQ ID NO: 177381 - DNA, 122 bp, Homo sapiens
agcaaaattataaccccgcacaccgacttgcatgcaattatcatagcccgagtgctcctccgttgagagacttcgcccccgagaccgctgactgtgaatgacaaatcaaaagtcagggttgc

SEQ ID NO: 177382 - DNA, 122 bp, Homo sapiens
cctcgtttcaccaaggagaaaacgagctcagagaggcagtgcattggcccgggattgcaccgggcgcgaacccacgtcagctcccgcagaacctagatcattcgctgccacctccctccggg

SEQ ID NO: 177383 - DNA, 122 bp, Homo sapiens
ccctaaaggcgacttcaagaagatggaaggatctcacggatctcattcctaatggtccgccgaagtctcacacagtagacagacggagttgagatgctggaggatgcagtcacctcctaaac

SEQ ID NO: 177384 - DNA, 122 bp, Homo sapiens
gggcatgcgcacaggggcacaggcgggtgggggaagggaacctggacgtccagctgccggcgcctgccgagccccgccctccattgcctccggggccgcgagtctgagctccaggcccggaa

SEQ ID NO: 177385 - DNA, 122 bp, Homo sapiens
ttacaggcaaaatgcgaacttgaacctgcctggttttattgcaaagacagtgcatttagccgttatagttgactaacaaagctagatagctgtgttctttgaataagacacacacacacaca

SEQ ID NO: 177386 - DNA, 122 bp, Homo sapiens
caaggctaagagtctgcaccaggtcaaggatgaggagttgcagacactggctgggaagcacggggatgacctgcgtcgcgggaagatggagaactctgagatgatccgcaacatcagcgggg

SEQ ID NO: 177387 - DNA, 122 bp, Homo sapiens
gtctcattaatcctcataacacccctgtgggataataataatattattataacgtttaggcgtagaactgtggcaaagccaacagcttctctgagcatgtgcaggatttcctcatatttcag

SEQ ID NO: 177388 - DNA, 122 bp, Homo sapiens
cgcgcgcgcgcgcgcgcgcgcgcgacaagcgccgggagagtcctgcccctgtggcttgcacgctcagcagggcgccccgggcaccctggagagaccaaggagttcctcgctccgcttgccaa

SEQ ID NO: 177389 - DNA, 122 bp, Homo sapiens
catgtttaacaagagactgggagtctcacctgccacagctccttctacgcacacacgagtcggaattctgccctaatgacccgcctggcatccctgaacaatccgggaaatactcggcgctg

SEQ ID NO: 177390 - DNA, 122 bp, Homo sapiens
cactgtgcttccagccggctcaccttgaattcgtccatgattttgcgaatggctttgccgcgggcaccaatgatgcgggcgtgaacgcggtggtccagcgggacgtcctcagaaaccatctg

SEQ ID NO: 177391 - DNA, 122 bp, Homo sapiens
gattaaaacatgggaaaatataagttataaaatttttatactgggtgcagtggctcacatcggtaataccaactacttgggaagctcaggcaggagggtcgcttgagggcaaaaacttgata

SEQ ID NO: 177392 - DNA, 122 bp, Homo sapiens
aggcctcgcggccgactgacccgaagtcctggtccatggacttaaagaagaatttgtaggcgtgcacgggccggttgctgagcacgttcttgaagtcggccagcgtgacgcgctcgggggcc

SEQ ID NO: 177393 - DNA, 122 bp, Homo sapiens
ccccgggccaaacctgttcttgcctctaagctccacatgcaccgttccctccacccacagcgcgccgccctcttggaaaaactcacagccatctgctgacgacgagctccgtggttgcagct

SEQ ID NO: 177394 - DNA, 122 bp, Homo sapiens
ctcaggtgatccacctgccttggccccccaaagtgctgggattacaggcgtgagccactgcgccaggccaagttttatgtcttaaatgtagagccaaaactctgtgacaggaacgtgttaca

SEQ ID NO: 177395 - DNA, 122 bp, Homo sapiens
gcctgggaaacgcatacagtggtcctgtgctcttagcctttcattgaaagagtccacatgcggttgctagaaagcacacggagccctttgcccaggcccctccacggtggcgtcgtgcggaa

SEQ ID NO: 177396 - DNA, 122 bp, Homo sapiens
gcgacgcgccacgctaacgcatggtgtcggagggaggcccacttgctgaacagcagggagcgatggcgcagaacgtgtatggtccgggagtccggataggcaactggaatgaggatgtctac

SEQ ID NO: 177397 - DNA, 122 bp, Homo sapiens
aaaaatatttgcaagaatactaatgaatatcgaggaagcatggcgaagtggctaggagtgcgacctctggaggcaggtgccagggattcaagccagggcacttgctggcagtgtgtaacttt

SEQ ID NO: 177398 - DNA, 122 bp, Homo sapiens
atgctgccggagttggacagcaggaggcagcccgagttcgccatggagcacagcatggggcggcaggggggcgcccggcggcggctctgcgctcgctgcgtccctcggagtgtgcgcgcgcc

SEQ ID NO: 177399 - DNA, 122 bp, Homo sapiens
aggaatgagtcactttgctcaaatttgatgagtaatatcaggtgtcatgaaacccagtttcgaaggagaggggagggggcgtcagatctgcagacggaagcaggccgctccggattggatgg

SEQ ID NO: 177400 - DNA, 122 bp, Homo sapiens
gtggctgactggatgcatccgctggtactgatttacgtgagtttcagcatttagacgttccgagtttccaccgagccagagttgggtagagagttattaagatgactaggagactaatgcgg

SEQ ID NO: 177401 - DNA, 122 bp, Homo sapiens
aggagatcccatctagatttcttcttgcttttgactcacagctggaagttagaaaagcctcgatttcatctttggagaggccaaatggtcttagcctcagtctctgtctctaaatattccac

SEQ ID NO: 177402 - DNA, 122 bp, Homo sapiens
gtctacattaccgactctttggagtttcagatggcatgcaattataatcatttcattatccgttcagtgtattacagtataatcaccaaaccacaagtcgcaacctagaggccttttactgt

SEQ ID NO: 177403 - DNA, 122 bp, Homo sapiens
ctcagttggtctctgtcacacacccatcctccacattctgacacatgggctcccacagagcgggcaacacaccctcacagggactcgctcaccatgacacacggtcattctgaccctcacac

SEQ ID NO: 177404 - DNA, 122 bp, Homo sapiens
ccaggctgcgacgagtcctcaggggacgccttcaacccaggctggaagagatgatactaacgtcagacggggagtctcgggtgtcaccggacgccagaatgagcggcgaggtccgcattgtt

SEQ ID NO: 177405 - DNA, 122 bp, Homo sapiens
agctaaaaggtagtatttgagtaataattttcaaaagacctttggaaatattctagaccccgagctactgataaaagagatgccattagaacctaaaattatggggaaaaaaagagaagata

SEQ ID NO: 177406 - DNA, 122 bp, Homo sapiens
cagactgtgaaccaggtgaggtggggtgggaggttatcagctgttatttaatggtaaaaccggtatgctaaatgtaggcagtcaaaattaagaaaacacattcaaatgcggaagtacaattt

SEQ ID NO: 177407 - DNA, 122 bp, Homo sapiens
gagaaccttctattgtcctgaagagaggtgatgacttaaaaatcatgctcaataggattacgctgaggcccaacctaggtgagtatgttggaagaagacactgggatcccgagatctccaac

SEQ ID NO: 177408 - DNA, 122 bp, Homo sapiens
cgggtgtgtgcgcgcagtgttgtgcctttcgccagggctgaatggggtgtgtgtgtattccgtaggcatcttcttgacaccatgcttgatcggggactggtgacaggaaaaagagggaagat

SEQ ID NO: 177409 - DNA, 122 bp, Homo sapiens
agtgagaggcaggtctcaacgcagcgagcagagagctctgcacatgtgccggggcctcatcgggaaaagctcagatgtggaagacagcccaagacacatgggggaaacacagcgtggaggaa

SEQ ID NO: 177410 - DNA, 122 bp, Homo sapiens
gcgagaaggcttttcagaagcaggaagggttcctgaaaaggctgaagcatgcgaagaatccgaaagttcacttcaacctcacggacatgctacaggacgcgattatccaccacaatgacaaa

SEQ ID NO: 177411 - DNA, 122 bp, Homo sapiens
tggtggagcggcggctggcgcaggagcagggtggtggtgacaactcactgctggtgcgggcgctggaccgcttccaccggcgcttgcgggctcccggggccctgctggccgctgccgggctc

SEQ ID NO: 177412 - DNA, 122 bp, Homo sapiens
ttttcctaagacatcaggaaaggagcgaggagagacttatccattttgtcccatagcagccgccatatggtggcagacagcaacaacctcgtcgcactgattactgggagctgtagtcttga

SEQ ID NO: 177413 - DNA, 122 bp, Homo sapiens
gtgacccccgtgcgggggtcccgggcgctgtgcccacagaacagggtctgacccagcacgcggacggaaccttattttaacccgagacacaaacgcgcccctcttggaccctggctccggcc

SEQ ID NO: 177414 - DNA, 122 bp, Homo sapiens
gctcaggagggacatgtggcagtggacagggagtgcagcccccagatcctctgtcagcgccgggagatgccccgcccagtcatgctgggacagcctgagaagggacgagaggggcggctgag

SEQ ID NO: 177415 - DNA, 122 bp, Homo sapiens
taaggatattatagcaattttccattagatgttgtgttcctcctcaatagttcacagaggcgaaaagataatacttcattcaaacagagactcctgttggattgtacagtccaggccctgta

SEQ ID NO: 177416 - DNA, 122 bp, Homo sapiens
atgtaaccagccgctgagctgcagcccttccgtgtccgcaggcttcggcccggccgccgccgcccatcagctatggaggagctttacaacttcccggcctgcagagccgggcgcagcaaggg

SEQ ID NO: 177417 - DNA, 122 bp, Homo sapiens
ccggaggcttctgaagggaagcacacaggagctgatggactcctctcccaggcccagccccgcgatgggtgcttgggagccagcccctgacgcgggccctgcctcgcctaggtacatgtaca

SEQ ID NO: 177418 - DNA, 122 bp, Homo sapiens
atcttatagagccaaagtcatcgttactcaaacacatcactctgcagttacacggctgcacgctaccgtcatgtaaactctggaatactgacgtggacctgaccacccgctgaggtgaaagg

SEQ ID NO: 177419 - DNA, 122 bp, Homo sapiens
gtgccgctcccctgctggcaggcagctgggccggccccctcgagttggcccccaggatgacgggctccagtggggctcccgcttgtccttggctcctgccagcacccgggagtgcagcactg

SEQ ID NO: 177420 - DNA, 122 bp, Homo sapiens
agacgcatattgatgaaatcatttgtgacctcacaggaatcacaaatgatgttcctatgacgccctagattgttctgttacacaaggggtaccaaagtccactctgagcttttcctctggga

SEQ ID NO: 177421 - DNA, 122 bp, Homo sapiens
acccctgtcccctgaagataaatgatcgcagctgcaaatttcaaacagtgtgacgtgctgcggtcggcagccaagacaaaaaacccacagacgtttggcctttgaggcagaggaacaccacg

SEQ ID NO: 177422 - DNA, 122 bp, Homo sapiens
gcggggggcgctggacactctctgccctgcctccctctgctgtgttcccacagacagaaacgcctgcccctgccccaagtcctggtgtctccagcctggctctatcttcctccttgtgatcg

SEQ ID NO: 177423 - DNA, 122 bp, Homo sapiens
gacttcggggggcgggtgacccaggagtccgccaagaacttccagattgagttagaggggcggcaggtaagacctcagaccaggtggcgctgcgagcccaggaggcgagggtttcagtgctt

SEQ ID NO: 177424 - DNA, 122 bp, Homo sapiens
ggcccagtgttgccgtggattccagcgggaggagagcgcacttgaccgtcggccaggcagcggcagggggaagtgggaatcttctcacccagagaagcactgactcccagctggggaatgca

SEQ ID NO: 177425 - DNA, 122 bp, Homo sapiens
gccaggcacctcccagcaactcccagggggccactgtttctcctcttcaacaaggaggggcgcctcaacagcctggctagaggcccctggccagacccaagcaggacgctggcgctccagaa

SEQ ID NO: 177426 - DNA, 122 bp, Homo sapiens
tggccaggccgtggcttctgctccgggcctggggacgggtggagagaccctgcccgcagacgtcccccgtcggaggtggggagacaggctggcagcaggagcggcctgtgtacacttcccta

SEQ ID NO: 177427 - DNA, 122 bp, Homo sapiens
gggtttcgcacttggcctcttgcaccaggcactagatgaataaccacgggcaagtcagtccgacactctgatttctccccgccgagcgggcacagcgacatctcggggattcggacatggag

SEQ ID NO: 177428 - DNA, 122 bp, Homo sapiens
gcttactgacaagctgctagaactgtgcttctgaatccttgtctctgcctccatataatacgcaggagccgcatactcctcaaggtaacactctcattacacatggattctcaagtgtctgg

SEQ ID NO: 177429 - DNA, 122 bp, Homo sapiens
ctgcctggaaccggcgcgatctgaacgccggctgggaggctcctggggggaacttgcggtcgtctgccctccgcactcctccgggaaccgcagccggccctggttcgctgcgcgccggggct

SEQ ID NO: 177430 - DNA, 122 bp, Homo sapiens
ctgaaaaggggaacctgcacctagggcagcctccagccctaatgactcacgtggaggaaacgtggggttagaagaacagattgtacaacaccacgggggtgagactgactgcagcccaccac

SEQ ID NO: 177431 - DNA, 122 bp, Homo sapiens
cctccagcaatttgggcacttaccagagcagtggaaaggcgcaggatagccagcagggtccgggcagaagtataggtggcatccttactagcccaagcctctcgcctcatctccacgtatgc

SEQ ID NO: 177432 - DNA, 122 bp, Homo sapiens
caccctggctgtttcccggcctccttcccaccccagcctccctcacccactcgccgacctcgcaggcctctgccccgtcctcaacacgccacgctcgttcccacctcggggacttcacaccg

SEQ ID NO: 177433 - DNA, 122 bp, Homo sapiens
ttaatccgcctgcaggcgtttaaatgccgtgggaaatatggagtttaccagcgcagctgacggggacttgacacttcatcacgttgttccctctcagcctctctccttggccatcgtctctg

SEQ ID NO: 177434 - DNA, 122 bp, Homo sapiens
tgacctcatgatccgcccgcctcggcctcccaaagtgctgggattacaggcgtgagccaccgcgctcggcctgcattttgtttttgtttggaggaacaaaaaagggaaagaaaaaacaaaac

SEQ ID NO: 177435 - DNA, 122 bp, Homo sapiens
gcagtgctgcggcaacgtggggcgagggaccgttggcccttggccgcggaccgcgtgggccgagaactttgccagacgagacttgttttctctgggcagttggagggtctcgcggctcctac

SEQ ID NO: 177436 - DNA, 122 bp, Homo sapiens
caccgatttccctctctcagtggtgccggggtgcgcctaaccccggcgggcgcgccgggacgtcccctggccagtcctgggaaacgtggggagctgggcattgaagctctggcgagaaggtc

SEQ ID NO: 177437 - DNA, 122 bp, Homo sapiens
agggacaggcaaataatatacacaagtgaagtgggtcaggtatatgacaatagggaatggcggagaccatgacatgtgaatagacatagtttgtttaaagacagttaagttcaatttaaaaa

SEQ ID NO: 177438 - DNA, 122 bp, Homo sapiens
cagaaggttctgctgacagcggctccattataagcgctctggggcccggaaataaataaccgcgcgcacgaggcgccgccgccgccgccgccgcccggaggaaatcaggggcgggcgcggag

SEQ ID NO: 177439 - DNA, 122 bp, Homo sapiens
catgatgtcacttattcctcccaacaaccctgcaaatagataactgtctctcccattctccgagcttgtcctcagagaattaggtaacttgttcaaaatggtcagaagcaacagatataact

SEQ ID NO: 177440 - DNA, 122 bp, Homo sapiens
aggttttcttaccaaaaaactgagacagtagctgaaggcttcagcacctggatgtctccacgagtcctgtctggtccccacacttagccacagtgaagtcatgaagtatggcaagaaaattt

SEQ ID NO: 177441 - DNA, 122 bp, Homo sapiens
gaacgccaggggaacacacacaggggagaacgctgggcgatcacacagggtggagaacgccgggtaaatacacactggggaaaacgctgtgcaatcgcatagagggaagaacgccgggtgaa

SEQ ID NO: 177442 - DNA, 122 bp, Homo sapiens
gaaaagtaaggtgtttctgctctcgcgccatatgcagttcccgcgggatctcgttgagggcggggcacccagttccttacgaaagggatggagggggtggtacttctaaagttggcggtgtt

SEQ ID NO: 177443 - DNA, 122 bp, Homo sapiens
accctttacctggcattttagccagcaagacccgcttgcattgcagtcgttcacggtgctcgctggcacaattttagaatgttacatgaatactcaggcctgactaaccttcccctccaaaa

SEQ ID NO: 177444 - DNA, 122 bp, Homo sapiens
aggccggggaacctcgtggccatttagggaggctccaactgtttagggagcctgagaaggcggcaggaagtcctcgttgcgcgccttctcccgaagctttggactcagggggaccgctcagg

SEQ ID NO: 177445 - DNA, 122 bp, Homo sapiens
tggttgtgcgctctacgggaggcttcctgctgaagcccatcctggggtccatttagggggcgccacgctgcgcgtggtgttaacgaggtctgggttggggaagggggctgcacacttagggg

SEQ ID NO: 177446 - DNA, 122 bp, Homo sapiens
gagtttgtcaagaaggaatggaaggagggggagccgacaagtccacgttcaccgcatctgcgttggcgattgcgctattgatgcgcatgcgcaaaaggaagaccctgattggtttgtgggac

SEQ ID NO: 177447 - DNA, 122 bp, Homo sapiens
gtgcggcgcaggcctggcccaggcggggtgtggttccgtgggccgcagcggcctggtgggcgaaggtacaattgcggatagcctctaatactcacggccctgccgcaggacaatatgttggc

SEQ ID NO: 177448 - DNA, 122 bp, Homo sapiens
aaaggaagcgacccccagactctcacggggacttctcaatttgctctgggtaaagaaagacggaggagaacttccaggtctatgaggaccccacgtcccaggtacagaagcgcctgggaccc

SEQ ID NO: 177449 - DNA, 122 bp, Homo sapiens
gggggccccgatgcctgagtgatgtcatggatttaggtttcagtgctggcacatgtggcccgcagagctcagctcctctgtgagggacgtttcggctcctgtgggctttgctgtcccccatg

SEQ ID NO: 177450 - DNA, 122 bp, Homo sapiens
cgcgctgcgccccgcggcggggctgggggcggggctaggtgtctcgcgcagggggcggggcgcggtgacgtcgcgggcgcctgggccgtgctgtggcggcggcggcggcggtagtggcggcg

SEQ ID NO: 177451 - DNA, 122 bp, Homo sapiens
ccctccctccccgcatctcagtacttcggggcccatctgctgaagacggtgcgcctgctgcgcctgctgcgcctgcttccgcggctggaccggtactcgcagtacagcgccgtggtgctgac

SEQ ID NO: 177452 - DNA, 122 bp, Homo sapiens
ctcagattctttcgaggaaaccctttgggacgaactgcccccagggggcgactttctgaccgaaggaagggccgagcaccggtgcctggggaggccctgggagcttttggagccgggtgggg

SEQ ID NO: 177453 - DNA, 122 bp, Homo sapiens
ctggttaggacataaatgtccctgctgcacccggggctgcctctgtggtgacgatgatgccgaacctcgggtgggggagggaggctcagaagggcctgtgtcccgaagcctggacctcccgg

SEQ ID NO: 177454 - DNA, 122 bp, Homo sapiens
ctcatagaaacctctgcttggggtccaaagcccagccgggcactcccagaggacaacatccgcccccgcatgtacacgtggccccgcaggacccagccgcagggctcccacgctcggctccc

SEQ ID NO: 177455 - DNA, 122 bp, Homo sapiens
tagctgaaaacctttccccatccaatatccattaactctcagtggaaacacagatgtgcacgtccactggagcagcactaaagggctctctgcagtccagcaccctcccaactgcccctacc

SEQ ID NO: 177456 - DNA, 122 bp, Homo sapiens
tgcgcatgttttctagtataaatcccatcttaatcacacaaaatatgtgataatttcccacgtcaatcccttacttaaattcttctatgaaaaactagaacttccatgggactttagcatgc

SEQ ID NO: 177457 - DNA, 122 bp, Homo sapiens
tgcaggccagctacagttccgggtgggcgtgggcttggctggccctgcactcggagcggccgcgtggccggccccaggcagtgaggggcttaccacacgggccagcaactgcggagggtgcg

SEQ ID NO: 177458 - DNA, 122 bp, Homo sapiens
cccatcaggaattttttttgcagaaccacctgcagaaataaatcaagaaagctgagagaacgcacacaccctctgaaagaagcagattgctcctgcaggacccgggaaacaccccaaatatt

SEQ ID NO: 177459 - DNA, 122 bp, Homo sapiens
tctccacatagttctcagcagtggccgctcctggtcatctccagggctgatggctgcggccgcgattctcagcgctcacccggtcccatgatccggccaagccctaggagctcccctccaag

SEQ ID NO: 177460 - DNA, 122 bp, Homo sapiens
gaaggggggcgcccaaggagccctggccccgggagtgggagtcagcgggtgggaacagatcgcccttcctttccgctgggaattgggggactccccctgctttcactctcccagcccgccat

SEQ ID NO: 177461 - DNA, 122 bp, Homo sapiens
tactcctgaaaaacgggctagaacaaatggtaaaaatgtgtatgcaaatctcaactgccacgtaaacttactctgttctctagatatttgaacaatacatggcatccagcctctggaaatcc

SEQ ID NO: 177462 - DNA, 122 bp, Homo sapiens
ggggcaaatcaagttggggtcaactcggctgccagagacctaagttgccacaagggtcaccgacgacctaagcagcaagtttccttcgtccagcctcctgcccccacgcacattgcctccac

SEQ ID NO: 177463 - DNA, 122 bp, Homo sapiens
ctgggcgcgggcccctgcgggtgttgcaacgcccggccagaaagtgggcatcagctgttccgcctggcccacgtgacccgccgagcataaatgtgaccggccgcggctccggcagtcaacgc

SEQ ID NO: 177464 - DNA, 122 bp, Homo sapiens
ccacacaggagtagggggaccacaggagactgagcaggggctgggggccttggcagtcgtcgccctacccccacccctgtccccagtgggctctgctgaacaagaggctgctacgctgcgtg

SEQ ID NO: 177465 - DNA, 122 bp, Homo sapiens
gatgttacagttgaagagcttggttttcattgagcatttctctatttttccagttatccccgaaatttctatgtattatattttttggggaagtgaggtgtgcccagttttttaatctaaca

SEQ ID NO: 177466 - DNA, 122 bp, Homo sapiens
cgcgcccaaagcgaccctctgcgcaaactacccccggggacgacgtcacccgtgaggtcccgcggcgcctcctcctaaagctcggctgggaaaccgtccgcttccccaagacttgggggctt

SEQ ID NO: 177467 - DNA, 122 bp, Homo sapiens
ccccctccttcctggcccctagcccaatagccctgaagactattacacatctttggataacgacctgaagattgaagtgattgagaagctcttcgccatggacacagaggccaaggaccaat

SEQ ID NO: 177468 - DNA, 122 bp, Homo sapiens
actactaaaaatacaaaaattagcctggtgtggtggtgtgcacctgtattcccagctattcgggaggctgaggcaggagaatcgcttgaacccaggaggcaaaggttgcaatgagccgagat

SEQ ID NO: 177469 - DNA, 122 bp, Homo sapiens
ccggtccctgtgtgggctgctttgactcagcgccgggagccgagcttaggcaaaccacgccgcactggacgccattcaagcttttacaggccctcaaattggggctggagccggagaggaaa

SEQ ID NO: 177470 - DNA, 122 bp, Homo sapiens
gaatcttcctcgcggctcggcctgctccagcctcccggaggatgagcctctgaccagggccggcccaggtgccacagtcacagccagtggcccgcagttctgaggcccctggcaccgctgag

SEQ ID NO: 177471 - DNA, 122 bp, Homo sapiens
ttatgctgtaagacccaaagtctgctgagggctgcccctgccaggtaacttccggagacccggagttacttggagacagacccggccctttgcacattccaagtgaaggacgtctcgcgcat

SEQ ID NO: 177472 - DNA, 122 bp, Homo sapiens
ctgaacaacagtgcagatgctcagtgcccaactgtatgctcaaaagtggatggctgggagcgggggctcactcctgcagtcccagcactttgggaggcggaagtgggcagatcagctgaggt

SEQ ID NO: 177473 - DNA, 122 bp, Homo sapiens
cagccgcccaggcttcggggaaggagggaggggagaataatgcgcccctctttcaataaacgccactgccaaccactccaacagacacactttcggtcccccgccagagctccggtgccccc

SEQ ID NO: 177474 - DNA, 122 bp, Homo sapiens
agcagcgggccccgggcatcagggtttcagggctgaggaatgtccagcgccgcccgatcgcgcctcgcttcctccatcactaaaccaccgggggactgactgcccgaggctggtgcagaagc

SEQ ID NO: 177475 - DNA, 122 bp, Homo sapiens
tccaccgattagacacaattggccgcaaacgtttgacacacacaacctcacgcatatcttcgtatgacggatcactcggtaccatgttataatatggcaattggtagtcttccacgatccct

SEQ ID NO: 177476 - DNA, 122 bp, Homo sapiens
cctcatgcttcaggggcggggcctcggactgcctgggtgtggggtctccagcttcagggtcggggagcctcgagccgcctggggaccgggggatctgttggggaggaggttctcgaactgct

SEQ ID NO: 177477 - DNA, 122 bp, Homo sapiens
tgactctgtaggcggaagcatagggacaagcctgagcgtcacaggctccccacaaacaaccgcgtgacccggggactttccccagggtgtgcaaaagcacaggcaccccctcagttctgggg

SEQ ID NO: 177478 - DNA, 122 bp, Homo sapiens
atattttttttccctggccagatcattctcttccatggttactggatcttctttctgccccggttaggcaaggaagggtgaactgtacgactcttgagtagtttcagttctaccagtttgtc

SEQ ID NO: 177479 - DNA, 122 bp, Homo sapiens
atttcttataataataccggcgcaggagggcagcaccagaggccagtggcactcccagctcggtgagagggctgggaagccagggaataaaactgggagggtggggtggggctggtgtttgg

SEQ ID NO: 177480 - DNA, 122 bp, Homo sapiens
tcgccggccggggcgccagtccagcgccctgcgggcaatgggcttcagcgctcgagcacgcgcatgcgcgggcctgtatctccagaggattcctcgggtcacctggacgccagcatctcagc

SEQ ID NO: 177481 - DNA, 122 bp, Homo sapiens
acatgctgttctggtatacaatgcattgcaccacaaaattaatgccataaatattgtagacgttatagacacaaaattatagtaactatgtaagcttcgtttcctcttaaatcaactcggcc

SEQ ID NO: 177482 - DNA, 122 bp, Homo sapiens
gaatgtcttaagggctttgctttttgaggaacagtataccaggaaactcctcccaccccacgacatccagctgctcccctataaggtcccaccccccacctctggctgtcctctgggaggag

SEQ ID NO: 177483 - DNA, 122 bp, Homo sapiens
tcttttgctgctcttgaagggaggggggaagggggaagaaagaaaagaaagttgctgaatcgggacattctggaagtgcctttgctgtgtttactagccccatccccgcctgctgcacccgg

SEQ ID NO: 177484 - DNA, 122 bp, Homo sapiens
tttacttggaaaattagaaatgggaaggttggtttttggataagcacttttcaggatttgcgttgagcactgaaaatggaagcaaggaagtcaaagaataagtagaggacaaaagatataga

SEQ ID NO: 177485 - DNA, 122 bp, Homo sapiens
cccaagctggctggcggcgggaacgcagcagcgatgagggctctcaagccgaggtggcagcgggaggcgcggaagccaggggaccccctgtcctcccgcccgcagcctcacctacctggctt

SEQ ID NO: 177486 - DNA, 122 bp, Homo sapiens
ataaactaatcacatggggaaaaaatgggtggtgctgagctggctggagggaagcaagggcgtcagaaaggaagactggcccagcacccgaccaggcagagggagaaagagagatggtgact

SEQ ID NO: 177487 - DNA, 122 bp, Homo sapiens
agaataatatttaggcaataacgtctgcatcttctaaatcatgaaattaaagtctgaggacgagagcacgcctgggagcgaaagctggccttttttctacgaatgcactacattaaagatgt

SEQ ID NO: 177488 - DNA, 122 bp, Homo sapiens
caagtcctggctgagcttcttcctaggtgggtagaggaagctatgtcaccgacagatcctcgaggtccttctgtgaagtgaatattaaaatcaaacaggccctgccctgcgctactgcaaga

SEQ ID NO: 177489 - DNA, 122 bp, Homo sapiens
atttttttgtactctctacactattgtttcccaagtgccaaaagcagtcaagagctagcacgctaacaacgatcaatcataaaatgatcatgaaaacatccaaattatattgactttgaaat

SEQ ID NO: 177490 - DNA, 122 bp, Homo sapiens
ggacagaaagcaatgtggactcaaaaataggaaaagaatttaaataaatcctagtgtacccgttatacatgaaattatggaaatatgaccctgagcatggaaatatgtacatgagaatgtct

SEQ ID NO: 177491 - DNA, 122 bp, Homo sapiens
acggggccatgccaccaccacgggcatccggggaggagtgtcaaacgggtgactcagccacgaacgccagcatttgagtgacagagatgcttgccccatccccttgccggcttccttctccg

SEQ ID NO: 177492 - DNA, 122 bp, Homo sapiens
agaatctatggtgtatggttaatacgtgttacatgctaactgcaatgaggtcttgaatgccgagttgctcacagactcacccagcagcagctcggcctggagtgacaggtgagagggagcaa

SEQ ID NO: 177493 - DNA, 122 bp, Homo sapiens
tgttctgggacataattaagggattggagagagtttgggcctcctgggcctcgtgtggctcgtaggtgggctcagagcagtgctgagtccagggcaaactacgcctcaccattgaggcaaga

SEQ ID NO: 177494 - DNA, 122 bp, Homo sapiens
ctcaaggctggcgcgctgagcgcccacctgcccctcgtggtgttcctggtcttctcggtgcgcagcccctcgtgggtgctcaacttcctgctgcagaagcgcacggagcagggccgcggctg

SEQ ID NO: 177495 - DNA, 122 bp, Homo sapiens
caaacatattgaactcaagacaaatttcataagcataaaaaactgatgttttgaacctaccgaccatccacaattgtttgccatttcttaagaactagaatttagaagtgacattggcatac

SEQ ID NO: 177496 - DNA, 122 bp, Homo sapiens
ctcagcggcgcgtgagtttcgctccatcttgtatgaagtctgctcttcccaggtccccggcgcttctgtccctgggacgtggggtccctacagacctggaaattctcacccgtcttccttcg

SEQ ID NO: 177497 - DNA, 122 bp, Homo sapiens
cgcctggacgtgaccctgcccccgcctaccggccccaagtccagacttttttgatgtctgcgaatacgcaaggcttgtggatgcataatcctcttgggtctttattgacatcaaacaaggga

SEQ ID NO: 177498 - DNA, 122 bp, Homo sapiens
gtgggcatggacacagagctggccctccttagggtccttcatctgagggttcctgcaagtcggggcagcagcctcggcatgaggtgaggggctatcagcctaccagggcagaaccccaaact

SEQ ID NO: 177499 - DNA, 122 bp, Homo sapiens
ctctcctgctatgtgatatgcctgcttcctttttgccttcccccatgattgagagcttcccgaggccttacaaaaggcagagtggatattggcgccttgatttttatagaatgtgcagaact

SEQ ID NO: 177500 - DNA, 122 bp, Homo sapiens
taatggggttgccgtggcaacgcctgtcactaatccccagctgctcctggttgaccggcccggcctgtgttacataaagcggtttggcccatgcaagccggctcctggctagggaccccgag

SEQ ID NO: 177501 - DNA, 122 bp, Homo sapiens
agagattcaaagaattttaaaactaggaggagctacagagactcaaccaaatctcaattccgtagtactttgctatgctgttgtttcctaatgtcacctccctcagtaaaaaggaatataca

SEQ ID NO: 177502 - DNA, 122 bp, Homo sapiens
tagtcccaggccgggggaaaggcaccgggctggcactgggaggaaatggacgtggttgtacggaactggtgagctctgggtttcagagacagaataaaaaagggtccatggccaagaggctt

SEQ ID NO: 177503 - DNA, 122 bp, Homo sapiens
acacttgaacgatcccgtttctcattctcactagatctctaggtctgctgatcccaaatacgtaatacttctatttcatggaccatatgagattcacttgcttcctttaacagcacagaccc

SEQ ID NO: 177504 - DNA, 122 bp, Homo sapiens
ggctgcgggaggtcctgaacccccagcccctccgcaggcccatggtcagcgcgtcccacccgggtctctgccggaactccacattgtctctatccaatccaccactgatgggcaggcctatg

SEQ ID NO: 177505 - DNA, 122 bp, Homo sapiens
taacataaaggaaaaacagtaacacttgtgtcagaactatactcctgccaatggcaacaacgcagttcctgttccactcgctgaatgaggtcacgggtcgttcactcattgtagtctttgtg

SEQ ID NO: 177506 - DNA, 122 bp, Homo sapiens
gtggccaggggcattgctcacaccctggcaggaggccttccctgctaacagtgttaataacgatgtcatttttccactccatgctgaagatggctttgtcaataaaatcaggcagttgatga

SEQ ID NO: 177507 - DNA, 122 bp, Homo sapiens
aaccggctgaggttcgcctcacggtggggaggagcgacgggaggcggaagcccttcggtccgggccccgcccccgcactcgccctcgccccgccgcgacttcccattcgccgccaacccatg

SEQ ID NO: 177508 - DNA, 122 bp, Homo sapiens
aatttggctttcggaagtgctttggagcttctcgatccaaccactgagctggtggtcgcccgttgtcacggttgtcatataaaatccacttttcattgcacgtcaaaatccgattgagaaat

SEQ ID NO: 177509 - DNA, 122 bp, Homo sapiens
gataaaaggcctatgctgatgggatgaagtgaggtgaatgacacaggcattgtgacatagcgttaggctactattgtcaggaggataaactgcttcaggtgatcctggatcacagaaccatg

SEQ ID NO: 177510 - DNA, 122 bp, Homo sapiens
agacaaacgtagaaagtggctcctttagtaagccacttgcggctgctgctcatcagggttcgcctggggccactgagaccacgcgccggtgcccgccctcccgctgcggtccgattttctga

SEQ ID NO: 177511 - DNA, 122 bp, Homo sapiens
ccgcggtgctgaggggtggggcctggaagaggcggtgtggtcacgagggctctgccaccacgggtgcatcggtgtcgtgattgtgggggtgggcttgttaggaaggtgagttccgccccttt

SEQ ID NO: 177512 - DNA, 122 bp, Homo sapiens
tgtgctctgggccgccgccccgcgtggcctaggcccagctgcccgggcccccggagggaacggggataaacttttgtcacgtgcttctgttgtctttgtctgcagccctttgacttcgcagc

SEQ ID NO: 177513 - DNA, 122 bp, Homo sapiens
gaactggttttgcctggcagcacattacctgcctctgcagcgaggtggcagtgaagggtgcgtgcccttccacaaccttcatgagcagcgtgatccactgcggggagctgagggcgccgcac

SEQ ID NO: 177514 - DNA, 122 bp, Homo sapiens
attgtgtgctgcggctgtgatgtaggtttcggtcgctggaagctgctaaaccatagctgacgccccctcctaagccagccttccttccccgcgcgggcatctgtccagggccttgtcgcgct

SEQ ID NO: 177515 - DNA, 122 bp, Homo sapiens
agatggagtgcttccttcacctgtggtgggtctgtatccatgaaatcgcccactcacaatcgctttttgtagctactggaagcactaggcgtctgacctgccatcatccttgttatgatgtc

SEQ ID NO: 177516 - DNA, 122 bp, Homo sapiens
tctcgccggctgggatgacgtagatgcacacggcgatgaccacaaacatgttgaaggcagcgctgcccacgatggtgcctgggcccagctcacccgcctggaagttgtggccgcagacttcg

SEQ ID NO: 177517 - DNA, 122 bp, Homo sapiens
gcctcggtctcccaaagtgctgggattacaggcgtgagccaccgcacctagcctgaatttcggcttttataaccttcctggctctggtcctttgaacaggcagcctgagatagtttttgttt

SEQ ID NO: 177518 - DNA, 122 bp, Homo sapiens
agttataatccaatctttatttaaaaatctaatctgccagtttagcgttttccaccaactcggggagctgaaactttcacaggcttcacaatcttttgcttaggtgctgcctttgtaggtgc

SEQ ID NO: 177519 - DNA, 122 bp, Homo sapiens
agtttcccggaggctcgccccgggaaccccgccccgccgccctggaagcccctgtctgctcgctggcttacccctaggacgggcagctcaccacttctcccggtcagttctgtttaagagaa

SEQ ID NO: 177520 - DNA, 122 bp, Homo sapiens
agtggcaaaactccagggcacgtgccagccgggctggatcctgccttaccttggggaaggcgtcgggccacacggtgggagagccgtggttgagcagcgcctgcaccgtgcgctgcggtgag

SEQ ID NO: 177521 - DNA, 122 bp, Homo sapiens
ttattgctggtttgccatgcacaggaacgctgagaacaccatcgccctggcctcatcgaacgactccagagaggggcccacatctgctcaaccaagaaggagaaagctgaggtcttccaagt

SEQ ID NO: 177522 - DNA, 122 bp, Homo sapiens
ctctgtcatattggcaagtgcgtttgacatgcaagaattgtacagttataaggagtgacccgtggcaaaagcagaccatgcatttgcacatttaggttagtatagtgggtaagatgagagac

SEQ ID NO: 177523 - DNA, 122 bp, Homo sapiens
cgggggcgggaggggaggcggaggcgggccctcccctggcgctgtgaactttagctgggccgccgcctgtcagccccagaaagcgttaaaggtgcagcagctcgcgccagcctccgcagccg

SEQ ID NO: 177524 - DNA, 122 bp, Homo sapiens
ataaaacacagacagttattatgtcacctagaaaacaatgtgcctcaccagtgacagcatcgaggtggcccccacggtagccagcgcccgcccccatcctgggatctagataactgggcctt

SEQ ID NO: 177525 - DNA, 122 bp, Homo sapiens
ccagatattgatgagtcaccgtggcccacttggcagggaggctggccctctagctggaatcggttcactccctccttcccaccagccagagcacagccctggtgcaggcatggctgaggcaa

SEQ ID NO: 177526 - DNA, 122 bp, Homo sapiens
ttcaaatcagtggaaccccaaagcccatgaattttcagctatcacatgaaaaaatgcttacgctataagcttaaaagagtaatggataaatttttaggaagagtataattgtgtaaagatta

SEQ ID NO: 177527 - DNA, 122 bp, Homo sapiens
gatgaaagcgaggttgtgcggccggctgggacgtacacacccatcgctgacgtacttcggcggctgatgacctcagccaggccgtcagaccccgtcttatcgcgctgccccagtgagggtcc

SEQ ID NO: 177528 - DNA, 122 bp, Homo sapiens
ggccgcgagagccgtgggaccgagggggcggggccggacggctgaaacttgccaaagtcccggcgcgcgggtcctaggggcggagccgcgagaacacgccggggacagagggggcggggcct

SEQ ID NO: 177529 - DNA, 122 bp, Homo sapiens
cccgcgcgctgcttaagtagagccgcctgctctggtgccgtggcgcgcaggaggcgtgggcggcggcggagcctcgcttaccgggcgaggggaggtggggagcggggactcgatttgcatct

SEQ ID NO: 177530 - DNA, 122 bp, Homo sapiens
tgaccttaggtgtggatcatttccttttccctagatggaaggagctgatgttatggagaacgggggtggtgtttgctgatgtggttcctgaatgtttccagcagcccagagtgaagcaccac

SEQ ID NO: 177531 - DNA, 122 bp, Homo sapiens
tcaccaaaagttgattctttgaaaagatcagtaaaatcataagcatcaacggggagcaatcgtttttgtttttcttttttaaaaaaagcaaatacccacacctgtggctgatatcgggaatg

SEQ ID NO: 177532 - DNA, 122 bp, Homo sapiens
tcacagcacattcataacagccccaagctggaaacaactcagtctccaaaccctagtaaacgggtgagagaatctgtgatcattccgcaccatggactattttactcagccccaaaaatgga

SEQ ID NO: 177533 - DNA, 122 bp, Homo sapiens
gtctctgaaggtcctgtccctttttcgcttcccccccgctggagctgcttctcccgcttgcgggagcccaggctgagagcagacacccaacctgtcgaacctgtctgacgtcatcatctctc

SEQ ID NO: 177534 - DNA, 122 bp, Homo sapiens
ttttttctcaccccttcagacttttctaaattctccattttttcagaccattcattgctccgtggctgagaaggagtatgtgctgtgtcagcagcaagcttttcttgcaacccgtcaaggaa

SEQ ID NO: 177535 - DNA, 122 bp, Homo sapiens
tcttcacctgagagtatcatgtattttcaaatggggggctatccgctcagctcccccagccgtggggtggggtgtgggtggcaagccacccaggtgccgaggcaagagaccgaggacacgag

SEQ ID NO: 177536 - DNA, 122 bp, Homo sapiens
tgcccccagtaaaattccttaaagctatgaggttctgactcaccacggggagtccctggccgccgctgggagggccttggccatgcaaatctcagtgacatagcacgtcttatttgcttcag

SEQ ID NO: 177537 - DNA, 122 bp, Homo sapiens
tcaggcaggtgaagagctgtgagaatcacctcgaaggcgtggggagcactcagagctccccgcaggggaagagacatctgtttccacctgtggttgggagatatgcctgggtgtgcaggtgt

SEQ ID NO: 177538 - DNA, 122 bp, Homo sapiens
gggaaatacttctaagacggcacaagagcggagcaatacttctaagaagagccacgcccacgctacgcctctgtgatttccactatccttaccccgtaactcctggcgtttatggttggaac

SEQ ID NO: 177539 - DNA, 122 bp, Homo sapiens
gtgtgagaatgagggatgcagggccagaaatgaggggagaatttgaggtggagcatggggcgttctctgagtgcaaagacagggtctttaaagagatttgcccaggtggaggggggatttga

SEQ ID NO: 177540 - DNA, 122 bp, Homo sapiens
tggtgttaagcatatctggcactaaagagtgtttgtaatcatatgttgtatttcctttctcgtagattcctgatgattaaaattacatagtctggatgtgcccatgggattttttgaaaata

SEQ ID NO: 177541 - DNA, 122 bp, Homo sapiens
cttgatgggcgtgacaacacaatcgatgagtgatcccatccactctgcctgcacaggcctcgcctgcactgtcttctggaagatgacaatcaggctcattaaatccagcacaaagaagcttc

SEQ ID NO: 177542 - DNA, 122 bp, Homo sapiens
cagaaaaccgagggctgcctctgggggagcaggctttgggcattcctggggctgtccctccgctctgccacttaacaaccgtgtggctgtggttgagtgactcagctctctctgtaaagcag

SEQ ID NO: 177543 - DNA, 122 bp, Homo sapiens
tttgctctttaggccaaaataccaaacctagacatcctggctatctctattctttaagatcgttcatgcaactaatgcccatattctgaagacccaggtcatcatgatttgaccaccatctt

SEQ ID NO: 177544 - DNA, 122 bp, Homo sapiens
ttctcaacattacagagactgccagcaaggattccatttgtcaaggaaagacactgcccacgaaactaaaggtttctgtagcagaaggcaagagttatgttgcgtcccctttcttccttaaa

SEQ ID NO: 177545 - DNA, 122 bp, Homo sapiens
cttgcactccagggccacacgggactccaggttgtccatctgcatctgcagccgcttcagcgtgaggtcactttcgcgggacttgcgtttataggcaatgagcacggccacgatgaaaatga

SEQ ID NO: 177546 - DNA, 122 bp, Homo sapiens
gaatgcctacaggatttggagattcctgccttgaaagagtgtttaagttggcacccaaatcgcgatacctgccctgggagagaaaggaagagaacagcagagaacaagtacctgattgtttc

SEQ ID NO: 177547 - DNA, 122 bp, Homo sapiens
acggggctcatagacctgaactgggtctgcctgcctgtgtgctggaagcaaacgacggcccgtcctctaagctggctttgcagctccagtaagagtgagagactcacgggggcctggctgcc

SEQ ID NO: 177548 - DNA, 122 bp, Homo sapiens
gtccaggtgcaggctgggcagtgcccggccacaggccatgcacaccagccggttcccccgcgggtcatagtccatgagacactcggcccggaaccagttctgcagggactccttcagcctcc

SEQ ID NO: 177549 - DNA, 122 bp, Homo sapiens
cggatacagacaagatggagacagcttctttctcgcctttccgagattatttactatctgcgagacacttccggacgcacagcgcaacccgcccctcagcctcgcgtcacttccttccaggc

SEQ ID NO: 177550 - DNA, 122 bp, Homo sapiens
aagttgtagtgagagagagggaagatgacagtttggttttagttgatgtgtacagaaatacgggtgcccaggagcccacaaaacggccagaggagaaatgctttcaaaggcaagctgcaggg

SEQ ID NO: 177551 - DNA, 122 bp, Homo sapiens
ggtgggaggctggcggagtcagtgactatggcccccacgttcaggaggaaggtgtgatgccgtcatacagttacaggaaaaataagaacttcctcagaaagaacaggtccgaattcttcctg

SEQ ID NO: 177552 - DNA, 122 bp, Homo sapiens
gttgacacagctgggctccagtgtcccagagatgctaaacgatggtccctcacagccccacggggcttcagagagagccatgtgaatttgaattatgctcacttggaaatcaggcaatatta

SEQ ID NO: 177553 - DNA, 122 bp, Homo sapiens
ggtcccactgtgaagggccatccaccaggtcatggtccccatagatgtgggatgatgccacgcaggagccttccaacacaatcaatttcacttaaaaaaaatgtggtcatcaatctctgacc

SEQ ID NO: 177554 - DNA, 122 bp, Homo sapiens
ttgcctttcatccttgcccacccacgtgactgcagcctgtggggcttcctcctaatgtcccgaagataactcgtcatccttgaccccgccgccacctcgggttctagtggaggatgtggccc

SEQ ID NO: 177555 - DNA, 122 bp, Homo sapiens
tgagagtacatagagtttggatcatgaaagcagaactcaattcatacttctgatccttcccggtttcacatttttaaaaaatgttatttcaccacctccatgatcagaaggcgatgagcttg

SEQ ID NO: 177556 - DNA, 122 bp, Homo sapiens
ggaaggccgtgtgccctccgcggggcatgatggggtagctggagatttccatcatggcggcgtccatttcgggctacaccttcagtgctgtgtgtttccacagcgccaacagcaacgcggac

SEQ ID NO: 177557 - DNA, 122 bp, Homo sapiens
cagtcgtgggccagggaggtctggggacaggaggactgaccccaacaggaactggaatcacggtctactctgcagacctcaaccccgtgaaggtggggtcaggggtccagattcagaggatc

SEQ ID NO: 177558 - DNA, 122 bp, Homo sapiens
ggcgtgtgcgctcaatagctccgtcacagtggctgtcgctttattgagcaaccgagggagcgagggagaggagcaactgcggcgagcgtggaggcccagcccgcagagctcccgtctggggg

SEQ ID NO: 177559 - DNA, 122 bp, Homo sapiens
gaaatagatctgagtgctctcaaggagttagaacgcgaggccattctccaggtcctgtaccgagaccaggcggttcaaaacacagaggaggagaggacacggtaggctgcccttcccggggg

SEQ ID NO: 177560 - DNA, 122 bp, Homo sapiens
gccagcacacacgagtccagcttcctcggaggtgtttattgatgcccagctgccatgctccggccactgacacaaccagaaaaggcgtaaacatgcacgggtgtcccccaggagggtggcag

SEQ ID NO: 177561 - DNA, 122 bp, Homo sapiens
caaattatatttgggttctttgaaaatcctcttcccctagggaaatctctttccttcctccgccccgtccccacccctgtatcaccactactctcccaccaccacttgtcatttgtttactt

SEQ ID NO: 177562 - DNA, 122 bp, Homo sapiens
gccggctctagtaccttttcagtaaagtggttctctgcctttttactatacagcataccacgccacagggttagaaccaacgaagaaaataaaatgagggtgcccagcttataagaatggtg

SEQ ID NO: 177563 - DNA, 122 bp, Homo sapiens
ggttcaagcttgtccctaaggggacatagactctcgtgcctggaaaagcattaaaggtcacgcaggccagcccattccgtttgtagctcaggaagccgaggcccaggaagaagagactcccg

SEQ ID NO: 177564 - DNA, 122 bp, Homo sapiens
ccctagcctgtggctttaagcctccttatcccctcccctgcccccagtgctggccgggcccggagagtctcactaacatgcaccatgccgccgactcacctcagtaaataaatcgttttcta

SEQ ID NO: 177565 - DNA, 122 bp, Homo sapiens
gcccttcaggccgggctgaatgtggtttagggattctctggctgtcattgggtgaaaaagcgatcagtttgaaggtagctccgcctgggctctagggaactctgggatttgtagtccggaac

SEQ ID NO: 177566 - DNA, 122 bp, Homo sapiens
atgaaaactcacatacaaagtacctgccctcctggaaccagtccccagttatcacagagccgagaggaaaccagtcccctattatcaaatcctcttactcttgactagagtgatggaatttg

SEQ ID NO: 177567 - DNA, 122 bp, Homo sapiens
ggtcgcgttgactagaaaggtaatggctccggctgcacaccgcagtcatgggcacccccacgtctggcacccgggtcctttcaggttctctttccacccagagagagacccagatgtgatct

SEQ ID NO: 177568 - DNA, 122 bp, Homo sapiens
caaaaagtgtgccttccgtacccacacgggcaagtactggacgctgacggccaccgggggcgtgcagtccaccgcctccagcaagtgagtgcctcgctcccacctgtcaccgcccccaccac

SEQ ID NO: 177569 - DNA, 122 bp, Homo sapiens
accatggcaggagtgctggaaaggtggtgtcagctaacagttgcttcagccagataaggacggtaacttcagtccaataaaaacctcatcagttaccaactaaatcagggcatggtgttttt

SEQ ID NO: 177570 - DNA, 122 bp, Homo sapiens
gcgaccactggcccctatcccttcaggctttgcgggttaccgcactttccatctctcgtgcgcctgactgttttgtgggaagccctctgtcccatctaaccctgttgtcctgggcatcttta

SEQ ID NO: 177571 - DNA, 122 bp, Homo sapiens
cattgtgacttatgtaaaagctttcctatgaatagggactttgttttgtagtggtagccccgatcataaatgcttgatcaagtagatggtatttataaagtatgcctaagggcaatggttct

SEQ ID NO: 177572 - DNA, 122 bp, Homo sapiens
atcctttcgccccctccccacgtgaggccctggaggctgattggccgtgtgctgcggaggcggcaagaggaacgtgtcctggcacgtgccgaaggagcgctaaaggccaggggcggtcccac

SEQ ID NO: 177573 - DNA, 122 bp, Homo sapiens
gccccagggttgctatgatcacgttgcaggtgaaaactaacgctcattggaagacaggagcggagcactgagttacaaaaacagttaacaatttgggtgtaaccaagtttagtgagcaaacg

SEQ ID NO: 177574 - DNA, 122 bp, Homo sapiens
ttctagcaggtctgctacttgttccaaccactaggtttgatcccagaaaagactcacatgcgttttggccatgagaaggaggggttccctgcaggccaaaggaagggtcagtagaagttgag

SEQ ID NO: 177575 - DNA, 122 bp, Homo sapiens
ctgacaccctcagacacccgggacaatacggggctgcactgaacgcaaggctgttttgaacgcatcggacctgacaccctcagaaacccgggacaatacggggctgcactgaacgcaaggct

SEQ ID NO: 177576 - DNA, 122 bp, Homo sapiens
ataaaagcttttcttcaaggcaaaggacccagtgacctttctctattccctagagctgcccgttacccagagcctatcatatgccctctttccagaacctcccatgtcatggatttctctct

SEQ ID NO: 177577 - DNA, 122 bp, Homo sapiens
cttcaaccctttcttaaagaaaacagtgcaaaattccaagagtcttcactctatccggaacgcgtaagatgttagtgtctaaacattgaatttgtatgtaacagagtcgattatttaggaga

SEQ ID NO: 177578 - DNA, 122 bp, Homo sapiens
cccaggtagagaagaaaattaaacaatgtaactcatctctctgcaagtaaagatctagagcgagattaagaccctcatccccggcttttcctctgaagctcccccagaataagcccgcaggt

SEQ ID NO: 177579 - DNA, 122 bp, Homo sapiens
gacaggcccggcgcgccctctcgaggccccttcaacctcccgggggcagcagcgccgtgtcggctatgaatggggcctctggaaaactcaggcttggaacaggtaaccccccggtttccgca

SEQ ID NO: 177580 - DNA, 122 bp, Homo sapiens
ttttttatttttaaatgcagaagtgatttagtagtaaaatcctgcttgctggttagaggtcgtgggaatgcctctccatctgaatggaaagaaattggttttaaattattagatggccaaag

SEQ ID NO: 177581 - DNA, 122 bp, Homo sapiens
aaacaaccctaaatcatcaagttagtgttatgaaatggaggaaggtcttaatttttcccacgttgctttgatgctttttttgaaataggaattgtgtggccaaccacagtggctcacgcctg

SEQ ID NO: 177582 - DNA, 122 bp, Homo sapiens
ggattaaactgcaaatatctcatgaagctgctgcctgcatcaccgctctccaggcagccacggaggctctggttgttgaggccatctactgtggccctcatacatcatactgtgtatggttc

SEQ ID NO: 177583 - DNA, 122 bp, Homo sapiens
gtgtgcacactccctctctctgagtgtgtccaataaacatttgttgagtaaacactcacacgaacacagaggaaaacaaacatgcttgtaccaaatcagacacgagcaatctgttacctaca

SEQ ID NO: 177584 - DNA, 122 bp, Homo sapiens
agtgtacttttactcctgacaactgcagccttttacattttcttggaatttttacataaacgctttaagtttagaaagagaaatgccaggcataaaagcaatcattacaggaatgggttcat

SEQ ID NO: 177585 - DNA, 122 bp, Homo sapiens
attccagatgaagaaacatggtctcagagaagttaagtttattttgctccttgctgttctcgaaagatttgaggtatttaacaaaagtgcttatgattcaaaaggaaaacaatacaggcttg

SEQ ID NO: 177586 - DNA, 122 bp, Homo sapiens
tggaaataaaaacttcggaaaggcgaagcggatttagaaaaggagggaagtcgaggcgggcgaagcgggccatggagattgctaagaggaaaagttggagagaaaaggaaggaagagaagca

SEQ ID NO: 177587 - DNA, 122 bp, Homo sapiens
aaacacaggcactcaggtccacggtgtcccagtgccttggggacacagccgttcaacagccggccctgaggggctgacagtccagcaggaagacagagttaatgaaatcaagacctctgccc

SEQ ID NO: 177588 - DNA, 122 bp, Homo sapiens
cggttccttcagtcattgaattcatgtgtgatttgtttccgggggagagaggacacagagcgttctctcagcctcagggcagaaaccccagctcacagacagactgaaaaattctcgctaaa

SEQ ID NO: 177589 - DNA, 122 bp, Homo sapiens
taattattttacaaattaggcaactaagccaccccctctggaagtaaagtgtcttgctcacggacactgtcttggctagtaagatagaagaatcaggacagtagatctcaagtctactggct

SEQ ID NO: 177590 - DNA, 122 bp, Homo sapiens
gtaaatcttctgctagcctcttgccagttttgcaaccctgctatgtatttctcaaggacccgggagtcatccttttgaaatgtaattatttcaattactgtgaaagagtccttcactcccaa

SEQ ID NO: 177591 - DNA, 122 bp, Homo sapiens
gtcctgggaaatgaagaagcatcttccttaggtctgccctgcttgcaaatccactagcaccgaccccaccacctggttccggctctgcacgctttggggtgtggatgtcgagaggcaccacg

SEQ ID NO: 177592 - DNA, 122 bp, Homo sapiens
tcagaacacgtaaatgtttgtatttggccaacctgctttcaattattagcattcacagaccgattgtgctgtatgatgcagttgagtgatagtgagtgaaaggccaattggccatggaaaat

SEQ ID NO: 177593 - DNA, 122 bp, Homo sapiens
aagccggtcacatgcacgtcccttctgctccgggcggtccacatgcaggcgtgcgtggtgcgggctccctcagcagcccagccccgccacggcaggggcagggtctagtgcagagggctcct

SEQ ID NO: 177594 - DNA, 122 bp, Homo sapiens
gcgtcatccccgctgccgtcgtggctgtggcggtacatgtaggatgcctgcttcatggagcgctgtagcaggtgccggcggtaggccctctggatcttgatggcgcacacctcctcgtgctt

SEQ ID NO: 177595 - DNA, 122 bp, Homo sapiens
taatggcctccatggaggctgtgacgaggttggtcttgcagtggcgtgcagccaagatcccggcgacctcgtccatgaccttcatggtcaccccttcatgcacgaagctgtgcagggtacag

SEQ ID NO: 177596 - DNA, 122 bp, Homo sapiens
cattctggctgcagcgtcatcttgtgtggctcaggaaggaagaggggagaaaagtgtgaacggaacaaatggcacactgtgttccaaaactgaagagagcattttttgtatatttgagagta

SEQ ID NO: 177597 - DNA, 122 bp, Homo sapiens
cacaggggcagcctgatgaccccttggcccctggcccaggccagcgtctcggggaggattcgcctgggtgggtgccccgcaccggggctttctccccccacccacagcccagcctctccagg

SEQ ID NO: 177598 - DNA, 122 bp, Homo sapiens
gcctcggggaatgacagctccgcgggggacgcactggtaggcggtagacgtaagcggggtcggtgggaaagtagacggtggggcggcggcatcacacatacgcaagcgcagcctccgtttcc

SEQ ID NO: 177599 - DNA, 122 bp, Homo sapiens
cttgccagacacttctcaaacaaaatgtgcttcctcactttgataccttcttggtgtccccggttcccctgggaaataaccgctttggaaagtctaatacccagatgtattgggaaatgatt

SEQ ID NO: 177600 - DNA, 122 bp, Homo sapiens
tatcatatagtaaacagaaaaaaaaaagatgatgcatttgtcttcttccttaactccatgcgatggacactggaaggccttttatggagtgccacaataactgagatgcagctaggagggga

SEQ ID NO: 177601 - DNA, 122 bp, Homo sapiens
tggaagagccggaaggaggtgggatggccgctccacaaatctgagttggcctggggttgtcgtgagaacagggtatatggcccctactgacaccacccccagtaggtcaggcctggcactct

SEQ ID NO: 177602 - DNA, 122 bp, Homo sapiens
ctcccaggttcccttagctcagaaatcaggccttacccctgaggcgcgaggctgcgggcacgaggctgcgatttggcggcagccgtatttgcacactgtcacagaattaacctcagagctgg

SEQ ID NO: 177603 - DNA, 122 bp, Homo sapiens
taagatactacaaaactaagccttttggttttttatctgtacaaagaatgatagcagttacggtggagattgagaaaattcagtaagcacctgatagtaggtgctctgtacacattcatggt

SEQ ID NO: 177604 - DNA, 122 bp, Homo sapiens
gagcgctggcgtcttccgtggacagtggtggcgggaactgggtttgggggacccaggagacgacgggggacggatgggggtgggtgcgcgcctcggactggccccggccgtctgtctggctg

SEQ ID NO: 177605 - DNA, 122 bp, Homo sapiens
tcctcccggctttctgaacgcaagccagcaagtgggcgggacctggggcgggcggagcggcgaaagcatctgctcctgcgctttgtggtctcctgcctccggcttctccgcctgcgacgtcg

SEQ ID NO: 177606 - DNA, 122 bp, Homo sapiens
gcctgtcctgtttgtaaaccagccagacatagcggtggagatctgtgccctccggaggcccgagcccacgtaatggagatgactgggccactgctaacgtcattacccttcatgttgaccac

SEQ ID NO: 177607 - DNA, 122 bp, Homo sapiens
ttacaatggcaagacagcagcataatacatgaactcatacattttcatatgttcagtatgcgtcatgctgttaatagtgacagaaactaaaaaatcatggttacagctttagaaaatataat

SEQ ID NO: 177608 - DNA, 122 bp, Homo sapiens
agaatgtgatctggggcgtaaccagatccggcagggaaggcatcctgtgccgggcaggctcgtgtgacctgcccttcaattattcaccccttggagctgtgggctgatacaagtgcccatgt

SEQ ID NO: 177609 - DNA, 122 bp, Homo sapiens
cctatccgctgtaagaaagggtgaaggatccagtatgggagatggagattgtccatatcccgagggagggactggccagggcacacccgccaagggcaccttgtgtccctgctctgcagaga

SEQ ID NO: 177610 - DNA, 122 bp, Homo sapiens
tctcggcctcgctctcactcacggtgctacaggtggtaagcaaattgactatgttgtggtcgaaaggtgtcacatggttggaaatgaggaccctgacactgtgatcccggagtccggagtcc

SEQ ID NO: 177611 - DNA, 122 bp, Homo sapiens
caaactactcctccaaattgacaaaaaccatgtgttttatatccagtcttcaatacgcaacgtgtagtaagagctcatttctctgagcatacattcttggagaaatacaaactttcttcgga

SEQ ID NO: 177612 - DNA, 122 bp, Homo sapiens
tctaccagaggggttgggcggccgctggagaaatggcacaaggctggggactcttacccacgttggccaaagtcaggtgcagccggcccttcaccaccgagtggacgccgatgggcttgacg

SEQ ID NO: 177613 - DNA, 122 bp, Homo sapiens
gcgggacccaaggaacgctagaactatacgtcccagaacacttagctttgtttttaactacggtgcagccgcaaaagggaaataccggctcaggacccaggggagttgtagttctctaatcc

SEQ ID NO: 177614 - DNA, 122 bp, Homo sapiens
gagatgttacttctctccgtcacagggctgctgtgagatgctcaatcacctgaccaccagcgagcagaaacagtcacctctgcgaggcccagcagccacagcagaaagcgagacctcaaaac

SEQ ID NO: 177615 - DNA, 122 bp, Homo sapiens
ccgcccggcggggaaatgcgctgctctcggaaaactggtgcagctgcgccgcaagggagccgccggggcggtgggtgcgaagcgcgcatgcgcgcttcgtcacaagggtgcgaggaaagtca

SEQ ID NO: 177616 - DNA, 122 bp, Homo sapiens
cacttatcatctcaagtttttaaaattgtaagagcccccttaacttactccctaaaaacgcgccattttccacatcatctggtatcctggttttctgagacagataatatgtaagtaaccta

SEQ ID NO: 177617 - DNA, 122 bp, Homo sapiens
cgtcgaagagcttgcgctcgatgtcgatatagtgggaccagtacttgctcttgaggaaggcggcctgcgtgaagcagggccgcacagagcgcaccacgaatgccagcagagtggtcagcagc

SEQ ID NO: 177618 - DNA, 122 bp, Homo sapiens
gaggaccgaagggggctgttaagtgctcggcgcgcagcgagcactcaggacgggtggcagcggtcacctttgtcgccaccgtccaagcctttgcagaggctcagggccgagccccggacatg

SEQ ID NO: 177619 - DNA, 122 bp, Homo sapiens
agcagcgccgcctcgcctccagcagctctgcctgccttggtgaggtccgtcagtaacagtcgcccagtccagaagacttcgccccaggcctacccccagggcgtcggtgcgagtatggctcg

SEQ ID NO: 177620 - DNA, 122 bp, Homo sapiens
cagccccagccccagccgagcacccccggccccgcctgcccggcgttcccttttgtgcggcgctctcccgtccgcatccgcccgatcctctggaactccccgcggacgccggggtccctgga

SEQ ID NO: 177621 - DNA, 122 bp, Homo sapiens
gaggcaatcggagaagctatcgctctgaccaaagcaaggacttcatctaccgtgagggcgcggggcaaagagcctccattcaaccgctgccagtgacgactgagtcccccttccacgcaacg

SEQ ID NO: 177622 - DNA, 122 bp, Homo sapiens
ctttcttgtcttccttatcacagtcccatgggataaggttgcccatcatccccatttcaccggggaggaaaccaaggtgtgagaagcgactggtgtacttaaggccacctgattctttcagt

SEQ ID NO: 177623 - DNA, 122 bp, Homo sapiens
caagacagatctgttgatttgcagatcaaagcatgtccttatggaactcctcccttcgggcggttgcctcagaaaggcatgtggaaagcatgcctatttggtcacttttacaacttacttct

SEQ ID NO: 177624 - DNA, 122 bp, Homo sapiens
tgactcatcagccctgcccgacgctaagaagatgccctggcaaccgccgcgcccctcacccgctcctttctgacgctgtggtggttttcgttcgcagcccagaacattgcggaagtttctct

SEQ ID NO: 177625 - DNA, 122 bp, Homo sapiens
agccccggctggcccggctcactcttggatgcatttcaagtcaactttcagaaacacgcccgcccgagccacagcctaggcacgggcagccttacttacctggtaggcgagctctctcccag

SEQ ID NO: 177626 - DNA, 122 bp, Homo sapiens
ctatcgtaagcacacctcacccaaacgcttgctccctgaaagctgctgacggagctttggcgagggctcatcctcccgttggctgataagcgaagccctgttttatatttaactcgctgcag

SEQ ID NO: 177627 - DNA, 122 bp, Homo sapiens
ccctgaacagtgggctagtgtgtgggcctggggagtgagggcccaggccgggctgggtctcgctccataaaccctggctggccggagctgcagacatcactgttgacacaggggtgatgtca

SEQ ID NO: 177628 - DNA, 122 bp, Homo sapiens
agaagcggcggcggagaggttttctgcggccggaattcccttcaacagcatccctgtcggcgcccgcgagcgcagtctcgccgggcaggggcgccggggaagatggagactgggggccgggc

SEQ ID NO: 177629 - DNA, 122 bp, Homo sapiens
agctctccgtctgcttggagatgctccacagctccccatggcaagagtgtatcctgggaacgatgggcatgactcccaactccctaactcaggatgctccctgtactggacaggtgatggat

SEQ ID NO: 177630 - DNA, 122 bp, Homo sapiens
gtccggggcccaacttccagagcaacatgtgtagccacgtcctcgcctagtccaggtggccgcaaccttgggggagagacagggcaggacaggaccaaggaagaggaaggagagacggagcc

SEQ ID NO: 177631 - DNA, 122 bp, Homo sapiens
ccaatgtgcaaacttgaattgttgaggggccctctaagccactaggctgtcatttaaggtcgatgagccctagtgaccagtagcagaatgggttttgctgataaggctctttttgattggcc

SEQ ID NO: 177632 - DNA, 122 bp, Homo sapiens
aaataatatattctagaatatgtcacattctgtctcaggcatccattttctttatgatgccgtttgaggtggagttttagtcaggtggtcagcttctccttttttttgccatctgccctgta

SEQ ID NO: 177633 - DNA, 122 bp, Homo sapiens
gaggagtagaaacgagtacaaagctgggtggagacagccctgtcctggctgccctgagctcggccctgtcagtcgccttgaggagggttggggggagcagggatgcagggtggcgcgtgcat

SEQ ID NO: 177634 - DNA, 122 bp, Homo sapiens
ccaaagtactggagacagagcaaacgtccccgggaccccagaaaccagggtcaacacacccggggggcccacgaacacaggcagagatacccaaagctgtgggctgaattaaagggacccgc

SEQ ID NO: 177635 - DNA, 122 bp, Homo sapiens
agatgggtggcatcggaaaatcaagactgtctttactactctcttcagtgtctctttcagcgatatgaagttaaaaaaccaagtactgtgatcactcacctgagttttggtttttagaaggt

SEQ ID NO: 177636 - DNA, 122 bp, Homo sapiens
tgaaattttctactcacccaagtgaagtgaaacctagtgtatctcatagcacaggtgtctcggtcaccatcataattgttatttatgctgcacagctcaagaaatgggagggcggctcacag

SEQ ID NO: 177637 - DNA, 122 bp, Homo sapiens
tggttgtatctgttctgtcagattatacctaaaaccaaagtatctaactaggtttagatacggcaagtggtagaggaataaaatttgagtggcatgtatgtttatttagagaggaataattt

SEQ ID NO: 177638 - DNA, 122 bp, Homo sapiens
ttgtccaatgcagccaacagtgaacacactcagagagtgtcggccatcttccttggcaaacgtgaatggcaggctctggggacagccatgctatgtcacacgatggtacagccacagcaata

SEQ ID NO: 177639 - DNA, 122 bp, Homo sapiens
acctcccctccccgagggcaggcgggtgagaggtgacccggagccaggacccacgggggacgggcgtgcagggaagggcgggatggccggccgggtgttgcgtctgcgggccgccctcgggt

SEQ ID NO: 177640 - DNA, 122 bp, Homo sapiens
ataaaaggatatggagatgtgtcaaagtcccagtgaaccttggtccagctacttctgcaccggagctccaccagggttttgagaaggtgagactcggctaaatcatgcccaattatcaaaac

SEQ ID NO: 177641 - DNA, 122 bp, Homo sapiens
gagtttaacctgacaatttcttcttgttctctattcttttgattgagaagctcctgtcgccgaattctctcccattctaagcgacgttgtcgttcaagttcctgttttgctgcctgaaaaaa

SEQ ID NO: 177642 - DNA, 122 bp, Homo sapiens
ttttgtcttgtgatggttcttacgggcatccacacatttcaccgacatgtaggacactgccgttgtgggccctggagctgaaaagagaaagtttgtctgttttagaaaagccatctattgaa

SEQ ID NO: 177643 - DNA, 122 bp, Homo sapiens
tacaggcatgagccaccgcgcccagctggttccttctatttcttttgctttgccttccgacgtggccctgatggcctgacagtcactgtcccctgcactgtggcgtccatcctcctcctcct

SEQ ID NO: 177644 - DNA, 122 bp, Homo sapiens
gattcacgcgctaggaaagcgcgagtctcagggtgcttagcactctccaggcccggcacccgcgggaacgggggacacgcgggacttcggcagtcccagtaacttgctttgctgttctgaga

SEQ ID NO: 177645 - DNA, 122 bp, Homo sapiens
cctgttgtgacatgacatgcatgctaggcacaggcaggagcaagaaatgtgtcagggacgcgggagacgcagattctgaaggatctcagggccctggaaaagagcatgtcgtttcagcaagt

SEQ ID NO: 177646 - DNA, 122 bp, Homo sapiens
gacatcgtgtcagtagctcgatagtgctgtgatgggaatatttacaccacagcgatgggccgtggcaatcactacaaatctgggctgtgtgtgtgtgtgcatgtgtgtgtgtgtgtgcgtgt

SEQ ID NO: 177647 - DNA, 122 bp, Homo sapiens
ctctgaggggttgaggatatggagaactcttgggaacttggtcttggggcccgaagtcgtcgaggaaatacagacaggttgagtcttctaggaatcagacatggctgggggtcatgggtttc

SEQ ID NO: 177648 - DNA, 122 bp, Homo sapiens
tgatctcaggtgatccgcccacctcggcctcccaaagtgctgggattaccggcatgagaccgtaatcagcactgcgcctggcctcagcagatatttttctaatgaatgattaattcgccctg

SEQ ID NO: 177649 - DNA, 122 bp, Homo sapiens
gggggaacagtattcaaatgcctctgctctcagccttttacttctgactgtggttcccagcgagtctaaaatttgagaagtgaaactgaacatccaactgccttggtgaggggagaggaaga

SEQ ID NO: 177650 - DNA, 122 bp, Homo sapiens
tatcacccatccatctcccctgaactgacatctcctttgttcaaaatttgtaccacttgtcgtctcatatactaaacccccaaacaaaagcaaggctagaaggcatgctcgagcaaaggact

SEQ ID NO: 177651 - DNA, 122 bp, Homo sapiens
gacagtggcaattttgccttctatcattgtaccatgtgtgcattgtatggagaaaataaccgagccagggagtatcactgcttcttatgtcttccaaggcagcagatatacctcagaatctg

SEQ ID NO: 177652 - DNA, 122 bp, Homo sapiens
ctaatttttgtattttcagtagagacagacagggttttgccatgttggccaggctggtctcgaactcctgacctcaggtgatccggcatggctagtttttatgtaattatgaaatacagcac

SEQ ID NO: 177653 - DNA, 122 bp, Homo sapiens
tcctgacagcccaggatttcccttaagccactgacctccaaaagcacctcctctcagagccgtaaggccccacctggtctaacctgctctccccgccacctgtggcatagtttcctctcaga

SEQ ID NO: 177654 - DNA, 122 bp, Homo sapiens
tgcctgcaagccgcacctgcctgggcacatgcagggaagggagcggcgcagcactgggcacgcctgggagctctcctgcaatcaggactttgttagcgggcaagctgggatatgggtcctgg

SEQ ID NO: 177655 - DNA, 122 bp, Homo sapiens
tacgcgggatctgggcggggcggggccggtgaggggtcgggggtgctcctgctattcagccggtgcgcgcggcggcgggaggcagtggctggggagtcccgtcgacgctctgttccgagagc

SEQ ID NO: 177656 - DNA, 122 bp, Homo sapiens
tggcggcccggtagcgcttctgagagctgtccacaacagggtcggcgtccaccaacacctcgatctccatggacttattgctcgtgaaggtcatgcgtcccgagatggtgatgacgcagcct

SEQ ID NO: 177657 - DNA, 122 bp, Homo sapiens
aggctagccagtcacaaggtccctatcccctggccacagccatgggcttgttccaatggccggatgtctcaagttggattccctcccaaacagattctgagacaggatgtgggtgcaagtag

SEQ ID NO: 177658 - DNA, 122 bp, Homo sapiens
tgaaagatgccccaaatctcatctgcattcctcacactacctggtatagcgagcaggtgtcgctggagatgagggaggcagctgccaccgagttccgccgagccatcaaaggtcgcatccca

SEQ ID NO: 177659 - DNA, 122 bp, Homo sapiens
gcagggggagcaccagattttctgtctccagattcctaggcagggaccccctgactctaccgggctcacattcaccaaacaccttaaccctcaggcacacccacaaaggtctgtttacgaat

SEQ ID NO: 177660 - DNA, 122 bp, Homo sapiens
ttgtgatgagaagctgggctatgtggcggccacctcgaaggccaggtctggggaccctcccgcttgtgactcagcggctcagcttcttggttagtgaagaggggagaggccgtgtctggctc

SEQ ID NO: 177661 - DNA, 122 bp, Homo sapiens
tggagtttgtttccagtgcagagaggataaacaaaaaagaagtctgccattcagttttatcggaataagagggaaataaactcagacaacaaaatttttagtaatgagatcaatgtgattgg

SEQ ID NO: 177662 - DNA, 122 bp, Homo sapiens
agtatgtttaccggtttcagtacataacacagccagatagagggccgcggacttcagcggcgagaagctacaacaaaaatagggtgaacaaaaacgaaggtgcccaggagcctgaattgcat

SEQ ID NO: 177663 - DNA, 122 bp, Homo sapiens
cccttaaaatgttttggaaacctctaggcatacttagggtacttccaccatgattatcatcggctgtgtggcttccgatcgctaattcgcaccgggcatctggcgaggccggcctggggaaa

SEQ ID NO: 177664 - DNA, 122 bp, Homo sapiens
ggggccggcagctggattagcaggtgatgtacggctcctcgctcgggcacagaggctcagcggggcatttaatcctctcggagtggggaggcagagagaggattcccctcccacccggccca

SEQ ID NO: 177665 - DNA, 122 bp, Homo sapiens
catccggagcagcctctttgctaggctagatccagaggaccgctccccaagcaaggacaacggcctcccaggcgctcattgtccacccgcaggagggtgcccgctgaccttcaagaggatgg

SEQ ID NO: 177666 - DNA, 122 bp, Homo sapiens
ccctccacagggggtgctgccttaggccggccccgaggtgcggccttgggtgggaacaaccgttttttcccccctctcccctccccgaccccatcaacatcgtgcgacagtccgggcagttg

SEQ ID NO: 177667 - DNA, 122 bp, Homo sapiens
ccgtcgggggctgagagggcagatagctggaaagcccagcattgatgcatctcccccagccgccaccccgctgccccaccccgccaacaagaagcctgggccagccgccccgccgagcgacc

SEQ ID NO: 177668 - DNA, 122 bp, Homo sapiens
attggctctggcactgcatacaccagagcagagactgatcttccatttgcagtttgaacacgggtcaccttcctcaaggactcctgtcaaggggactctatattgactttgttctttgcttt

SEQ ID NO: 177669 - DNA, 122 bp, Homo sapiens
gtacttggagagaggtggtccgtggcgcgttcgctttatttatggcgcacattacacggtcgacctctttgcagtatctaatcccgccttgcaagctttcctggagctaacatcaactgcgg

SEQ ID NO: 177670 - DNA, 122 bp, Homo sapiens
tctcaagccgtaattaaccttgttgaactctgagcggtggtgtgtttccctggataccgccgggtgtgcttgttctatttcgttcctgcgtttttagagctttgcggttccctgtgtgtgca

SEQ ID NO: 177671 - DNA, 122 bp, Homo sapiens
gaagcctctgtgccaaggccccgtgagtgcccggagatggctccgacccctgccggttgccgggcgccctgggtgtgtcccgctatcccagccaggagcagactcaggccctgggccaaagt

SEQ ID NO: 177672 - DNA, 122 bp, Homo sapiens
ctcggacgccaccaacgctctcccgggctcttccgcgttacctacgatggaaggtcggggcgtgcgggcagctggaacccacccctgtcttggagctccgggtagctctcaaactcgaggct

SEQ ID NO: 177673 - DNA, 122 bp, Homo sapiens
tccatggccctggctctctcggggccacccgcctcggtctcttcttgtgcaccgctggcccgtccctcaggcctcctcgtccaatggcggagccgctgctctcgtcaccgcctcgcctccgc

SEQ ID NO: 177674 - DNA, 122 bp, Homo sapiens
cagcgcaccaagctcagcgccaaggatcggccgggccaggtggcaaagctggggcagggacggtgctggctcccagctcctcccgggactgccctccagtgacacctgtccaagcatgtgca

SEQ ID NO: 177675 - DNA, 122 bp, Homo sapiens
tattatagacaacttttcctttccacttttagctagaaaagtggtgggctccccttagttcgtctcgttttatgctgtaagacccaaagtctgctgagggctgcccctgccaggtaacttcc

SEQ ID NO: 177676 - DNA, 122 bp, Homo sapiens
gtgggaaatctgtttttaactgtagtctccctgtcacccagccggcggagcttggcggcacggattccagtgctgcctccaccgctgggaggcaccacttgacatgacctgggacaggtggc

SEQ ID NO: 177677 - DNA, 122 bp, Homo sapiens
ggctccgctgtgagtcgggcgtcccaggagctgccggcccacccatccgcgggtttcttccgttgggggagccctccagactcgtagaatataagagagcgcccctccctagccgcgggcca

SEQ ID NO: 177678 - DNA, 122 bp, Homo sapiens
ggccgtcggcaccacactattccaaggctaaccctgcagaaagctccctgaccagtgaagcggcttccgccgcccgccctttgtccctagcagccagcctccgtatactgcagcacggctgg

SEQ ID NO: 177679 - DNA, 122 bp, Homo sapiens
ttagaggtcggggacggggaaacggcaagtccagcaccggtgcagcccagggacagagcacgaagaatgtccacactaatgcgccatgcaaggctgggaatggagctcaaaggaaaccccct

SEQ ID NO: 177680 - DNA, 122 bp, Homo sapiens
ggcatgagccaccacacccagtccatataccattttaaagcatacaattcaggctgggcacggtggctcacatctataatcccagcactttgggaggccgaggcgagcagatcacctgaggt

SEQ ID NO: 177681 - DNA, 122 bp, Homo sapiens
tttgagcattttgatgatatgctgagatatgtagcagcatttccactttacacgtggctccgagagggtaaatgattaactcagggtcacttggctgttcagtgcctctgctgagatttgaa

SEQ ID NO: 177682 - DNA, 122 bp, Homo sapiens
tagtgaggctcgaggtaggggagacatctatggggctatcttacctgcctcgccaccctccgtgcctcccagtagggcttggagtcttccacagctttgccaattttcttcaccagttcatc

SEQ ID NO: 177683 - DNA, 122 bp, Homo sapiens
acaagagccggccttagtgcgggccgaagcgctgtcacggttcaccccgccccctctgggcgtgaaagacggggccaagctagccccaccccttccgtagggacagtcttacgccggaaatg

SEQ ID NO: 177684 - DNA, 122 bp, Homo sapiens
agctgagtgtgtgaggggccgggctggaatgcggatctggtcagggtggtagctgctggccggttgaacttgtcaggccctttctggccacctcctttgcccctttctcctctgcggcccaa

SEQ ID NO: 177685 - DNA, 122 bp, Homo sapiens
ttgtccattctgtatttgagcctcccagaagtatctcctgccttgaaagtaagtgaatctcgctgatgctgtttttgttaagcttcttggacgacttgcttgtttgtaatagttttattcgt

SEQ ID NO: 177686 - DNA, 122 bp, Homo sapiens
cgcctgaggcagtgcgtgtagctccttttaaattctttgtattgagtagaaatgtattcccgccaggcttttagcctttgattccatcgtttgttccccaggagaataaatctaaatcctct

SEQ ID NO: 177687 - DNA, 122 bp, Homo sapiens
tacaatttttcccactgacatgtaggcaccagaaagggaggaaccctgcctgtcttgtcacggaggagtcatcagtgtctgccagaggaatgaatgggtagagagaaaaaaataacacattc

SEQ ID NO: 177688 - DNA, 122 bp, Homo sapiens
ctcccagatggggtcgcggctgggcagagacactcctcagttcccagacagggtcgtggccgggtagaggcgctccccacatcccagacgatgggcggctgggcggagacgctcctcacttc

SEQ ID NO: 177689 - DNA, 122 bp, Homo sapiens
ctcctccacgcgcagctccacgtgtgcccagcaccactgcgcctgcccatccctcccgggcgctcttaaagggcccacaccccgtcccacccccaacgttggccggagaaggtggagtccag

SEQ ID NO: 177690 - DNA, 122 bp, Homo sapiens
atgggggttcagtgggtgcaagctttataatattcatctagtcttgccaactgctgctaacgtgctgcatggctgaggtttagtcccagccagatgtcccatcacaaaagttaggcattgaa

SEQ ID NO: 177691 - DNA, 122 bp, Homo sapiens
ctcgccgcgtccagaacggaacgctgggcttggggtgcggggcggggactccaactcgcgcgctacgctactcgtgtctcctgctcggatagtgactgtagaggtaagggtgggagggtgga

SEQ ID NO: 177692 - DNA, 122 bp, Homo sapiens
gcagaaggaagcctgtaggtggcgctatggctccggttgccgagctgctcccaggagattcgttttcagaggatctgagaaaaacccggcagggttgatggcagctctttcttctcggtgcc

SEQ ID NO: 177693 - DNA, 122 bp, Homo sapiens
ttccctgagggccggccggcaccacaacggggccaaaggcagtaactcggttgaaaggcgcgccctgggacaggtcagcgggctccgccatgcgcggcacgcatcccgcaggagcgggtgcc

SEQ ID NO: 177694 - DNA, 122 bp, Homo sapiens
tccacagattcaacagcccaggacagcacgacacagcaactcaccctactgccaaccccacgcaaacggttttactatcgggacagagaccaaaatttctgattaaaaggtagtgagcgagt

SEQ ID NO: 177695 - DNA, 122 bp, Homo sapiens
ctcggagtgtgggcggcaggagatgcagcagctgtgtttcaaggggcaaaggggcagaatcgagtgattggtcacagaacaactggtgcctcttctgggctcaactctgccatccctggctc

SEQ ID NO: 177696 - DNA, 122 bp, Homo sapiens
ggatgaacgggctgggtggaatcgcagccaaattattcgcagccccgttcagcatgcgtgcggtagggatagctaataactgccccgaagggttatcgcgaggatgtagtaagatgcgtggg

SEQ ID NO: 177697 - DNA, 122 bp, Homo sapiens
gtttttctcagcttccgggggacaggtggatggggaagctctggaggagtgccttcctctcgccccactgaagcacatacctaaaagctcaaagcccagctcctccgtgctggactatttct

SEQ ID NO: 177698 - DNA, 122 bp, Homo sapiens
tgattggaatagctttcctttaatgttacaatactgcctattgatttggaaattagatcacgctctatgatgtttcgattttactcaaaggcatcatgagtactctgctcattctttcattc

SEQ ID NO: 177699 - DNA, 122 bp, Homo sapiens
gccggagatgggggagaagggtgggaggtggatggtttggaaaagggatggagacccagacggagagaagccagccagccagggtgagggaacaagctgctgtgctgcccaggagaggcctg

SEQ ID NO: 177700 - DNA, 122 bp, Homo sapiens
gagcccgaggcttgcggcgaccacgaggtgagataccgcgtagttagagacagtcggaggcggggccgggaaggtcgggtttggttcctacacagcagaggtgaacattggagcgcctgctg

SEQ ID NO: 177701 - DNA, 122 bp, Homo sapiens
agatgtgccccaggtccaggtggtgggacctgagtgagccagtttgggagtctagactttcggggccgcctctaccaagaggaagaggtggggatgtcttggttaatctatggtctcaaatc

SEQ ID NO: 177702 - DNA, 122 bp, Homo sapiens
ctgcccagtaaacaggctcagggtatcctcttgtggttcatcgtgggtccccagataccacggtggatttcagatgcagtgaggggcgtgtggctgccaatacccccagatccttctgaatg

SEQ ID NO: 177703 - DNA, 122 bp, Homo sapiens
tgagtgtttctggaagtctgctgctgtgtgggaatcactcttgtcttgctgcttaagacacgtgggagctgttaatggctcacatttcaaagcctggctttggggtaggatttaatgcaagc

SEQ ID NO: 177704 - DNA, 122 bp, Homo sapiens
agaggagctcagtaaatatttgctgctattatcgttattactgtgatccctggcaggggacgggactggatttcaagcctttacaccagcactggggagggacctgctttatattcacggtc

SEQ ID NO: 177705 - DNA, 122 bp, Homo sapiens
tctggagaggctttgtgcggatacggggctggaggcctggtggggctgtgtccgggggctcgccgggggtgtggggaggtctgcgttcctcaccctccctccttccttccctccctccctcc

SEQ ID NO: 177706 - DNA, 122 bp, Homo sapiens
ccccgcccccccgcctcagcctttcccgccgctcgggcgctgagcccagggaccagccggcggcagtgaccccgcccgaagccccttctggaacctcctggggacaattcccttttcctttc

SEQ ID NO: 177707 - DNA, 122 bp, Homo sapiens
aggggagcctccggggagcgggtctggagatagttctccccaaggaagggccccatacgccgggctgggggtggtggagaggcccccagttcctgagcgccgtgaaggcctcttaaaggggc

SEQ ID NO: 177708 - DNA, 122 bp, Homo sapiens
gtgaggcgagcgggcaagttggctgagggcgtgcggcagaggctgcttccctcggcgacgcgacccctcagcaactcaagctatgaactgaagctccctagggacggagaccggagcggagc

SEQ ID NO: 177709 - DNA, 122 bp, Homo sapiens
cccatcctgtggggctgccttcccctcctcactgcggctccgggagcaccgctgtgcagccgctgctgcccaggccccacggcgctttgagtgtggcacctgtggcaagaaagtgggctcag

SEQ ID NO: 177710 - DNA, 122 bp, Homo sapiens
aagggaagatgaaaggaaggaaagagaactcacttctagaggcttctaagaaaaaaacaccgtttcgaaaagcaggcaggatcggatgcaaatgaggctttcagaggcaatttggtagaaaa

SEQ ID NO: 177711 - DNA, 122 bp, Homo sapiens
gctcagggggcggggccttggaaggtccccgaggagagcgctgggctttttcagcaggcccgtaactgtcggttctttccccttcggtcttaggatgaggtgggcgcaccgggcatagtggt

SEQ ID NO: 177712 - DNA, 122 bp, Homo sapiens
gccatgacctgaagaaggaggtcgaccttcttcagcacctccaggtgagcccacctgtctcggggctccagaaggtggtgctggacgtcctgaggcacgcgctgtcctggctggaggaggtg

SEQ ID NO: 177713 - DNA, 122 bp, Homo sapiens
gcgtgggccccgcctcctgacgatttttgccgaaggcaggcgagcgcttcggagcggactcgtttttttccgccagtcttggcggaagcctgagacgcaatagatggagactctccttttcg

SEQ ID NO: 177714 - DNA, 122 bp, Homo sapiens
aggagggtagtggaaggttcacacctgtttgtaataactggcttatacaaaacgtaagtacgaacacaatggatggcgattgtgttctgccaatgcggttggcattcattctgagaaaagat

SEQ ID NO: 177715 - DNA, 122 bp, Homo sapiens
ccgcaaagaggcggggcgatgagctggagcgccgcaggtcgggcctccatccagggcctgcgctttcccacccaaaagcaccccctaatcgggagctgtttgcagggcccccggttgccgta

SEQ ID NO: 177716 - DNA, 122 bp, Homo sapiens
cacgttatttatgtgtgaaaccgcgtttacactagatacgcggatccaaggccgatagcacgacttcgcgggaggtcacagacctctcgccccggctccaggctcctcccccagcacgatct

SEQ ID NO: 177717 - DNA, 122 bp, Homo sapiens
accctttgcctggtaggcggggcccacagcccaactcgggcagcgataggctttcggagacgccagtctctgccaggcccagtcagtcggccaatagacccggaacctgagggatcggaatc

SEQ ID NO: 177718 - DNA, 122 bp, Homo sapiens
taggcattattttaactgccagtgcatgtctgtataataggcagtgactactggtgctttcgggagccacatattttattaaggtgacagcttcggcaattttcccatccactgccctagaa

SEQ ID NO: 177719 - DNA, 122 bp, Homo sapiens
gaacttcccacggcctgcagcccccacggaccacgcagcgcatgtgatcctaagcagaggcgtggcctgtgaagggccaccgtgccacaaaagctgagctgccacgtccgtgcctgtgagga

SEQ ID NO: 177720 - DNA, 122 bp, Homo sapiens
cctgcagcgggggcccgggtgcgccctaaatgaggggtgtatacagacccttccgcgtggcgaactccgcgggactcggccgaatcacggccgcctcacctacaccccggacgtgccccctc

SEQ ID NO: 177721 - DNA, 122 bp, Homo sapiens
ttccctcacttgtgttcaatactgtaaataatctgccttgctttttgtgagctcaaaggacgccgtggcagacatccacagcagcagcagggggaattcgtttacttggaaaccatcagcga

SEQ ID NO: 177722 - DNA, 122 bp, Homo sapiens
cgtcacttcctaacccagtctcacagagggtgacttccaaacctggctagcggggaaaaccgctgcccgggggacagaggggctgacaggaactgcgggttggctcagccgaatgcggccgg

SEQ ID NO: 177723 - DNA, 122 bp, Homo sapiens
ctactcacctgctctgaccgctccaggtttccctagccacagttaccgccgcggtccctgcgttgctaggttacccgccaatctcagaaggcgagactcggtgtctgactgacctttctttt

SEQ ID NO: 177724 - DNA, 122 bp, Homo sapiens
ttacaaaagcaccagtcctctgcggcaccattccattaaccagctgtcaccttatcccaccgtccagtcctggctgtccagtcctcaagggcagctacttatggctgtggcatctggcattc

SEQ ID NO: 177725 - DNA, 122 bp, Homo sapiens
tcacctgggcctaggatgtgttgtcgaggtcgctggccaggttttagccaggaggtctcgcgctaaaactttttggccccgcctggctgctgtgtgtgacatggcctgatggagaggagctg

SEQ ID NO: 177726 - DNA, 122 bp, Homo sapiens
cggcggccgcccccggccgaaaagtaaggaaggtgccgccctcgctggaccagctgggcccgaagaggggcccccccaccacaaattcggaaaccgagtgaccccggcgagggacgcgcggt

SEQ ID NO: 177727 - DNA, 122 bp, Homo sapiens
cctcccgtcctggaggaccgtaggtggacgctcttgcagagcgcctctcgctggttggggcgggggtgggcggagccagcaccgtctgggctgtggaagcggagggggtggggacactctgg

SEQ ID NO: 177728 - DNA, 122 bp, Homo sapiens
agtaggtgctcagtcaaggtgtgaacgaatagcaaatatccctttggaaggctgagtggccggctccgcatcgcagaaggcggctcaggggcgctccgcccggactttgcctggtgcggccg

SEQ ID NO: 177729 - DNA, 122 bp, Homo sapiens
ggcctcactctcctggtgagagctgacctgtccctgctgggtattcctctgaaatctgagcgtccatgttaggataaaagaggagttggggcaaagttaaggtggaagggaagacatatatc

SEQ ID NO: 177730 - DNA, 122 bp, Homo sapiens
ccggaacaatttctgcttcaacacaattgtccacggagggcaccagttccgtcccaccggcggaagcgagatctgcctagctactagacctgctgcctagctgtcattcggacaaaaagggg

SEQ ID NO: 177731 - DNA, 122 bp, Homo sapiens
agagcgtagatgcacactcaggcagtggtaccctggcacagtcgtgcgggctgcgcactgcgccagagcccgcgcctagcacgtctcgggggttgggatcctagcgcgccaagagcaggcgc

SEQ ID NO: 177732 - DNA, 122 bp, Homo sapiens
agcggcgagctctttcttagcggctggctgctcggccgcggctgcaactgcccgtgaccccggctgccagagagaatgctccccgctcactccaggggctgcattttgtagcttgtggcttg

SEQ ID NO: 177733 - DNA, 122 bp, Homo sapiens
gtgtgttcagttggctgcactagggatccagataatcaggagttgtctggattagagagacgcatgtgagagttattagctgtcccagactgtctcaaacagtttgagagtttcccaaacta

SEQ ID NO: 177734 - DNA, 122 bp, Homo sapiens
cgcggctcacatgctcccaccactggcccccggaacagctggacagagaatctgtgtgcccggtcgccctctgccgccctcctgccgcctgccacacccatcgaaagctgctgcctcagccc

SEQ ID NO: 177735 - DNA, 122 bp, Homo sapiens
tgaccttgtgatctgcctacctcagcctcccaaagtgctgggattacaggcatgagccaccgcgcctggccttatttaaagagacaatgtctcattccatggctcaggctggaatgcagcgg

SEQ ID NO: 177736 - DNA, 122 bp, Homo sapiens
ccccttctcccgagactggctgcctaatgcactgggatcctactttgtgtttgtgctctgcggggagggaaggtaaggtaaggtgcgggcaggattgtgtatatgtttgcctttttattaaa

SEQ ID NO: 177737 - DNA, 122 bp, Homo sapiens
ggttccacggccagcaggaggagggaccgggatcaaccccggcagcctggcgggagctgacgtctctctcactcaggaaggtgggctactcttccacgtctcgggtgtcacgggagcagtca

SEQ ID NO: 177738 - DNA, 122 bp, Homo sapiens
gcgcttgcgcggagggctggtcttgcgcaagcgcagtcaccacgtcctcctatccccacccgccgcgaatttccaatagagtctgcactaggaaactggtgggagccgaggtccggaagtcc

SEQ ID NO: 177739 - DNA, 122 bp, Homo sapiens
taaccgctgaaagtatttggtctgtttcctgcccggctttttcctacacacactttttggcgccttaagtcgggctccccccggacaggaggggcccctcccaggcgctggtgtctgcgccc

SEQ ID NO: 177740 - DNA, 122 bp, Homo sapiens
cttcctttggggtcaagacagaggcacagaaggcccaggtctgggaggttggatcacctccggctggatgttgagccgggtgggagcccaaacagcagggggcccacaggaggccggcccag

SEQ ID NO: 177741 - DNA, 122 bp, Homo sapiens
cgcgtctacgctgtccggagggtgaacggccgcgggcttgtcggggctgggggtggcgcccgagccgggcgggcagacgaggggcccgcggagacccagccccgcccgaggccgctcgcgcg

SEQ ID NO: 177742 - DNA, 122 bp, Homo sapiens
aaacgcccgtgacaccacactaagaaaagcaagcacgttaaagggggcagctccgagaagcggacagacacacgtggagactcaggagggggcgggccccgtctgggctgcccggacgcggc

SEQ ID NO: 177743 - DNA, 122 bp, Homo sapiens
tgcagacacccaaatgagaacgagtacttggcttagggcacactgagagaagggaagaggcggtgctctgtaaactgtaactaatcccccgtcacaggtgctgatggagtcacttccagcac

SEQ ID NO: 177744 - DNA, 122 bp, Homo sapiens
aaaccttttcaaggggcatgctctgtggcaggttcttctgttagcccaacaaaaccatcacgttttctagaatgaagcctaaatagaaatgaatcttaagtaaaaagcagaaatcagggtca

SEQ ID NO: 177745 - DNA, 122 bp, Homo sapiens
cgcctaccagcgcgggcgggagcctagggggcggagggcggcttggtgcgggcctgcgggcgcccctcggcgcggacagccgggacgccgcggacggcatgtgacggtcccggcggccgcag

SEQ ID NO: 177746 - DNA, 122 bp, Homo sapiens
ttttccagtagacaggcatggctccaccagtgttggtctcctctttgttggtgatgaactcgacatccgagatttactctgtcaggggtttgctgtgattggagtagtgtattagtcaattt

SEQ ID NO: 177747 - DNA, 122 bp, Homo sapiens
agctgaggagcgggagactgggcggcctgacggaggtggcccagggggaggtggtggggccgggctctgagtccaggcggcccagcgctctagccacattttaaccacaaggctctgcaccg

SEQ ID NO: 177748 - DNA, 122 bp, Homo sapiens
gggtagcctttgctcaaaccggagcccttccttttttccatgccaagagttaaagggattcgattcatttctatgagtcataataataaacaaaataggagcacctgcctccatgctcacaa

SEQ ID NO: 177749 - DNA, 122 bp, Homo sapiens
acgcgtatctggggagaggatcccaagcaagtgctcaaaccacaaaacagtgagaaccaccgccctagctctgtagacacactatatggctagaatcctggctctaccacttactagctgtg

SEQ ID NO: 177750 - DNA, 122 bp, Homo sapiens
gttttccgatccacgaacacggtctcgctccccagtgcctcatgcacgtcttagtaataccgagttttccgatccacgaacactgtctcgctccccagtgcctcatgcacgtcttagtaata

SEQ ID NO: 177751 - DNA, 122 bp, Homo sapiens
ggaggaacgctgggaagaggccgggccccatccagcgggggcggggactgggccgtgctccggggcgccctcttgtggccacaagctcgcagcgtccatagactccgctaaactcgttctca

SEQ ID NO: 177752 - DNA, 122 bp, Homo sapiens
gtttacagcgccccctggcgccggggaggcccggggatcgtggaggctaattcagcgggccgagttgggcctgccccagatgaattcctctggagctgaccggcccgcgcagagagcaagtg

SEQ ID NO: 177753 - DNA, 122 bp, Homo sapiens
tcggggcccaagaaaaggcggtaaggagcggcccggggacttgggggcgaggtggacccccggcttcccggcctcacgtgagcacatctttccccaggtcgtgttatcgctcccaagaaggc

SEQ ID NO: 177754 - DNA, 122 bp, Homo sapiens
cgacaaaatggtgcgcacccccaagtgctcgagatgcaggaaccatggcttcctggtgcccgtcaagggacacgcgggcaaatgccgctggaagcagtgcctctgcgagaagtgctacctga

SEQ ID NO: 177755 - DNA, 122 bp, Homo sapiens
tgtccttcccacagactgagccctgtggggttgggcagagtgagcctcaggagagggtggcgaaagaaacaaaggaagggcatgggggcctccctcggtcttctgcctttgcaccctccttc

SEQ ID NO: 177756 - DNA, 122 bp, Homo sapiens
gaagaccctggccttcaccagggcacagaggccactctggagcagtcttagcttcaaccacgcgggaaggaatgcatgtgaactgctctaacagatcctcaccccactcgcctccattccct

SEQ ID NO: 177757 - DNA, 122 bp, Homo sapiens
gccactgcgcctggcctgcctgttttctagacacattaaggtgagtggtctcaggccaggcgcggtggctcacacctgtaatcccggcactttgggaggctgaggcaggtggatcacttgag

SEQ ID NO: 177758 - DNA, 122 bp, Homo sapiens
gccccctggcggccacagcgcaagcccggtctctcctcctgctggaaggacaccggggaccgcacctccagctgtgggagttccgagagaccccgccctgcccgctcctccctggaggccgc

SEQ ID NO: 177759 - DNA, 122 bp, Homo sapiens
gtcactctgggccgcaaagaccgaactggagtgggggcgggcccgaggaaacagccgaagcgatcgtgggccgggttagagccaaggaaggcggggcttgaaagagggcggggaagtcaggg

SEQ ID NO: 177760 - DNA, 122 bp, Homo sapiens
caggtccaacccgcccggtgggaagcgcagacactgattttccagaaaaagtcctccttccgtttcccgcactggtaggaaagctggggagagagaaggagtctcaccgtcctggaccagtc

SEQ ID NO: 177761 - DNA, 122 bp, Homo sapiens
cccggagcagcgggagccccaagtttgccatgaagaccaggcaggctttctatctgcacacgacgaagctgacgcggatcgcccggcgcctgtgccgtgagatcctgcgcccgtggcacgct

SEQ ID NO: 177762 - DNA, 122 bp, Homo sapiens
aatgaaaagcgtacccctaataacacaaaataatagtgaccatttatggagatcttatgacgtgagaggcctgaccactctttggagtcctctcgtgtcttaattcatgtcactctggtcac

SEQ ID NO: 177763 - DNA, 122 bp, Homo sapiens
acccacccaaacaacagtaatccaactgcccgctgtcgatgaatgaagatgctgcatttccgggctgtggcaagtcctcacagtgagtcttggaggatccacaagaacccgcagccggtggc

SEQ ID NO: 177764 - DNA, 122 bp, Homo sapiens
tcctttcacttctgcttaagcgccacctaagccactgcttttgtctccctccggttcccacgctccgagatcgtatcacccacagaaaaacaataactaaaaagcggtctccatccctgaag

SEQ ID NO: 177765 - DNA, 122 bp, Homo sapiens
aagatctggcacattctaactcagtgtcggggcccagttcagaacttccacagctactatcgcatttgactcccacagctactatgtatcatacaatgacactgagccctgggaggagagag

SEQ ID NO: 177766 - DNA, 122 bp, Homo sapiens
agccagcttccacagggcgactgcatcgagttttcatcctgtccgccttgttagactacacgcgcggtgggggcatcggatgatgcagcgtggctgctgtcgttttggcaatgctgttgccg

SEQ ID NO: 177767 - DNA, 122 bp, Homo sapiens
aggcacttgtgctggcccagccctaccccaaagatggggccacgcctctttctatggtcacgcccacactcctgaccccaccccaaaggccgagcacacccagccataccccttttggctcg

SEQ ID NO: 177768 - DNA, 122 bp, Homo sapiens
aatgacagtggcttttctagcatcctggccgctcccgtccgtggagctccccagtgccagcgggggatggctcagacctgcctagggtcaccctgggtttcacaccagtgactccagcatcc

SEQ ID NO: 177769 - DNA, 122 bp, Homo sapiens
tggttggcatggctgcagttgggccctcagatcttgcagattatgaccaggcagcaggctcgccaagccgtgggcactaactcaagctcccctggagcgcagtcactttacaaccaccttcc

SEQ ID NO: 177770 - DNA, 122 bp, Homo sapiens
ccccaaggtgtggcgcactgaagactccacacgggagtcagtactgagagatccagaaggcggggtgcactgaagactccatacggggagtcactactgagagatccggaaggcggggagca

SEQ ID NO: 177771 - DNA, 122 bp, Homo sapiens
gcactgcctaagtgtggtgggctttcgcaggggaaggggcaggatcattggggggtgtgccgccgcccccatctgcctgccctggtgctggctgttccccatacaggcagctcctgcgttag

SEQ ID NO: 177772 - DNA, 122 bp, Homo sapiens
gagaagccctatacgtgtgtgcagtgtggcaaaagttttcagtactcccacaacctgagccggcacaccgtagtgcacactcgagagaagccgcatgcctgccggtggtgtgagcgccgttt

SEQ ID NO: 177773 - DNA, 122 bp, Homo sapiens
agggttatcttgttccacgtatatatacaggaaacatcgtgctacatgacctcttgtaatcgttcccatacataccactaacattctgtgtaaacatattttaaaatagtacaaaacatttt

SEQ ID NO: 177774 - DNA, 122 bp, Homo sapiens
gggctgtggtgggagtgcctgggacatagtgggtgctcaaaagaggcttgggcatggactcggtgaagtccattaagacttgggttataatgaaccctaagacacctggaggaccaggtctc

SEQ ID NO: 177775 - DNA, 122 bp, Homo sapiens
cacattccccttcctttctttctccgcttccttttctccagagatgccttctgcaaagcccggcactgctcaaggtccaagcgccacgcctggggcccagcttctagcacttctcccttaac

SEQ ID NO: 177776 - DNA, 122 bp, Homo sapiens
gaaggaggcgggccctgcgcgcagcattttgggaaagagtggaattctgggtgttaggcccgccattcgcttgactcacgccttcgccgtagcatctttcgcagcggaccgaagagaagaaa

SEQ ID NO: 177777 - DNA, 122 bp, Homo sapiens
cccgggccgggaccaccgcagcgctaaggaccccgccgcgccgccgcccagaccgcaacgcgcccagcactaattcccagcccagtcgcctccggcaccggcacgcatggtcctgcgactct

SEQ ID NO: 177778 - DNA, 122 bp, Homo sapiens
cgcctggaacctaacccttcccactctgtcaccttctcgatcccgccggcgctttagagccgcagtccagtcttggatccttcagagcctcagccactagctgcgatgcatgtgatcaagcg

SEQ ID NO: 177779 - DNA, 122 bp, Homo sapiens
agctggccccagatgtggctgtggcagtggtggggcctgggaagtgctgagctcagcaggcgggaagcggagggggtggggccttctgagcactctggcctgcggggtgggtgggcacaggc

SEQ ID NO: 177780 - DNA, 122 bp, Homo sapiens
ctgacgggttgagtttgaatcccagctctgccatttaactagctgtgggcaaatgtttagcgcctagtactgtaataaatgtgaactctcagccgggcgcagtggctcacgcatgtaatccc

SEQ ID NO: 177781 - DNA, 122 bp, Homo sapiens
ttaacttttaaaaaaatctagtcaccccatgctctcagtttttctgactcaaagcttcctcggaatttggggctatcatgaactgtccaagataaagattatagtcctacattggcatgcct

SEQ ID NO: 177782 - DNA, 122 bp, Homo sapiens
gggcagcagcgcacggcctagtctggtaggtcccctccatcccggccgactggcctcctgcggtgcaaacgcaagatcttgactttcaagaggctttgtggactacgcaacttgaggcagga

SEQ ID NO: 177783 - DNA, 122 bp, Homo sapiens
cagtgccccgcgccagcctgcccgaggaggagggtgttagggggaagttagccgagactgcggactgtgcccttgacggtgtggccttcgtgctgcgggcctcactctgtgcccggggtgtt

SEQ ID NO: 177784 - DNA, 122 bp, Homo sapiens
tggatttcttcataataattgcatgtggcagaacatgtcagcacttgggaattatgtgcacggtttgcataacttttattttctgccttctaacaggtcccttaatacagcagaatgatact

SEQ ID NO: 177785 - DNA, 122 bp, Homo sapiens
cagtgcgcctgggtcggtgcgggcgcagactgggagctatagattgcaacgtgaagatggcggagtccgggttctctgggagctctcggtctctctatggctggggctgcctctgtacaatg

SEQ ID NO: 177786 - DNA, 122 bp, Homo sapiens
gcaccctctggcagactcggcggcggcgacagcctgggcggacagtgcgccgtgcgcaggcgcggagctagacctcgctgcagcccccatcgcctcggggagtctcacccaccgagtccgcc

SEQ ID NO: 177787 - DNA, 122 bp, Homo sapiens
cgatgtggtggaaccggaacagcctgtctccatcttcccccaagaaccaagagattaaagcggtccttctgcaagcttctgggtccaggaactcggagctggaaggtgagggcgcagatgga

SEQ ID NO: 177788 - DNA, 122 bp, Homo sapiens
tctggagctggtgctgctgtgtaaggagaagcccacaaccgccctcctggacaaggtggccgacaacctggccatccagcttgctgtaagtgtggccaccactgccgggtaggtgggtgggg

SEQ ID NO: 177789 - DNA, 122 bp, Homo sapiens
tggaacaagggaagcaccatgttagggtaagctattattattgctattactagcatcatccgcttctaagtcatcattgttatcatcatcatcatcattgtcatctccactcccttgtgtta

SEQ ID NO: 177790 - DNA, 122 bp, Homo sapiens
gggcggagggagggaagggtggtcttggaggttggggcccgaggatatcgggggtccccccgggcccccgacatcggtctcgggaagcgaagcagccgcggttacctggctctgccaccggc

SEQ ID NO: 177791 - DNA, 122 bp, Homo sapiens
agtgagctccagtgtctcttcctcttttgtaaggacaataatcccatcagaccagagcctcgcacatgacctcatctaaccctacttatctgtcaaaagccccatctccatttaccattaca

SEQ ID NO: 177792 - DNA, 122 bp, Homo sapiens
aagtctgggcacaatgacctctgagcagaagaggctctccctgacccgccaggttgtttccgggttaatgcctggggaacttggcaaggcgccatctctacaaaaaatacaaaaggtagccg

SEQ ID NO: 177793 - DNA, 122 bp, Homo sapiens
gcataactgcagaagccgaggcagctggtcctcatgtgtgcaccctccacatgtgcaccccgggaaactgccaaactggcatgctgcatatccttgaagacaagcctctccctgcaggaatt

SEQ ID NO: 177794 - DNA, 122 bp, Homo sapiens
agatgaaggcaagttaaaggaaccggccaaaactgcagagggagaggctgaaggctgtcgcgcctgcctggtgtccttaagcaatccaagtcctcagtctcccgggtccgccccttccgccg

SEQ ID NO: 177795 - DNA, 122 bp, Homo sapiens
accccgcctccgtggcgtcacgtgggaggcggagtcggaagtgtgacggcgtgcgcggggcggggctactgctgcgcgcgggcgcgggggcggggcggggcgcggcgcggcgcggcgctcgc

SEQ ID NO: 177796 - DNA, 122 bp, Homo sapiens
atcccagagagtggggcctcccgggggcggacggtgctggtgctgtccacacccgcaggccggagttgggtgttttgggcttccctgctctgagcgactcttcacagtcacaggatttggaa

SEQ ID NO: 177797 - DNA, 122 bp, Homo sapiens
cccaaagggctcgggggcggggccggcggagggggcgtgtcttctgggggcggggcctgccgagtccgcggcgttccccggctgcagccgggagggggccgaggagtgactgagccccgggc

SEQ ID NO: 177798 - DNA, 122 bp, Homo sapiens
gttggaaggaagacaaggcattgcactcacgtgaggaggattcagtcttggtccctagggcgatggtgatgaggaggaagaagggaatggcagccacggagatcttcatgctgtgggaagct

SEQ ID NO: 177799 - DNA, 122 bp, Homo sapiens
aatgccccagcgcccacaggcacccagaggctgcgtgcaccctggtggtccctgtcgaagcggtcacggctcaccgccagacacccttggtccttacagctctggctctgccagccacagac

SEQ ID NO: 177800 - DNA, 122 bp, Homo sapiens
taatcacgtaaccgaaacctggaaatctgccttgggcacacaaaagagcaggcgcgacctcggaccagctccgaggcaaaattcactcagcgcgggacagcgacagggaatccggccgcacc

SEQ ID NO: 177801 - DNA, 122 bp, Homo sapiens
acttggagcttgggtcttgttctggccggtctgatggtcagcgggggcaggcagccctgacgtgtagggaagcgctgcgttaggtcaccaggcacctccagcccgcacccaccccacccgcc

SEQ ID NO: 177802 - DNA, 122 bp, Homo sapiens
ccctgcagccagcgccctgcacagctggcaacacacagcgcctggtgtgcgaagcagagtcgcctccgtcctggctgtccagctccagcctaggtgccattaggatctccctctgcctccct

SEQ ID NO: 177803 - DNA, 122 bp, Homo sapiens
ccccttctctttggccttattctgtgggtgtgattggggcatcaccatgggcttctaccccggatgtgccctgtggaggtctgctccccagctccctgccggccaggggtcctcgccttacc

SEQ ID NO: 177804 - DNA, 122 bp, Homo sapiens
cagcacctgtagaccctcccaacccagccccatgacaaccctgccccaagtgcaccagtgcgttcctgtggctgaggcagcaggagcaccaaaaggtatactaaagcatccttggcatgggg

SEQ ID NO: 177805 - DNA, 122 bp, Homo sapiens
tactgaaattttattatgacctctctcgattaaatatgactactgcaaacacaaagaaaacgagaacaccgctgcattgatgaataaagcagtggctggccattgtagaagctcaataaata

SEQ ID NO: 177806 - DNA, 122 bp, Homo sapiens
gctggtgtaagtcctggtgtccagaagtccaagaaccaggagctccaatgtccaagggcacgggaagaaggatgtcccagcccatgaagagagtgtgaattcacccctcctctgcatttttg

SEQ ID NO: 177807 - DNA, 122 bp, Homo sapiens
ccctatcccaggaggagcccaggaacgcaagcgagagcctctgcaagtcaccccagctgccgcgtttccacccaggaggaagacgcacgtggggcggcacgagagatagacggaggtgagga

SEQ ID NO: 177808 - DNA, 122 bp, Homo sapiens
cttttctcaagtacgcggcgttaatgaaactcgacccgtccgctgatgtccaggtggacgcgagcctccaaggaggtaaacgtcacttggccaagccagtttttgtagccaaccttcagcgg

SEQ ID NO: 177809 - DNA, 122 bp, Homo sapiens
acctgtaaagaacccatcttagtggtgtcttacaaagtaggggtgtgccgtgtagatccccggggcaagccctgtgagacagtgttccagaggctaagctacaatggccagtccagtgtggt

SEQ ID NO: 177810 - DNA, 122 bp, Homo sapiens
tctatgaaggcagagactatcttgttcactttttcaccaaggctcagcataaatctgtaacgtattagaaaccttcgaatgaatgagctatgtcttaaagtgttttttttttcataatatgg

SEQ ID NO: 177811 - DNA, 122 bp, Homo sapiens
agttgagtggatttgggaatggaagcaaaattagggtgggctatggtcatgggtcaggcacgggggctgtttctcctcacgctgccatgttctggcacaaaagtccaaagaatctaaaattt

SEQ ID NO: 177812 - DNA, 122 bp, Homo sapiens
cgctcctgggtgggattctttcactgggtgtggctgttgggatttgagaccgtgtgactccggagattcggggaagccagttcctatattttccatttctgtatttttaaatggtaaaaaca

SEQ ID NO: 177813 - DNA, 122 bp, Homo sapiens
aaattgagaagtcacctagccttgtcctgctattttcagaagcccaaagagattgagccacgtgatcaactctgcacagcactgctcatgctctggcagttttccagagcctaggaaaggta

SEQ ID NO: 177814 - DNA, 122 bp, Homo sapiens
aggagaaggaagagatagtcagtggtggaaaactggcagaaacttctccaccacttcatccgcggagatgatcctccggaccctggcattcacgttggtggttccacctacagatgcctgag

SEQ ID NO: 177815 - DNA, 122 bp, Homo sapiens
cgggccggcgccacgtgggctgtccttcccttttgggccgtcccacctccagagctgaggcgcctgcgccagctccttcgaggccctgctcggcttcagggagcacgcgcgccctgccgtgc

SEQ ID NO: 177816 - DNA, 122 bp, Homo sapiens
ctgccggagaacatgtttcaggtgtgtgcggaacttgacccccacgaagacatagagcaccgggttaaagcagcagtgggagaaggcgaggttgcggcagatgagcagggcgtattctagct

SEQ ID NO: 177817 - DNA, 122 bp, Homo sapiens
taagaaaggtgaataataggttcaactgtatgccattccatgaacatgggcccaaaaggacgaggccatgccccactgggcacttgatgattatgtggctaccacagggacaacatagaaca

SEQ ID NO: 177818 - DNA, 122 bp, Homo sapiens
tgggtctctccactagcctcctccccaactgcaacgtgggaaccagagctatccgagtcacgagccccaagtgcacacaaagcccccaacggggccacggcgcctccacgcctcgctacctc

SEQ ID NO: 177819 - DNA, 122 bp, Homo sapiens
agtggaggcccaggcttgcccatggtggtgttagagggatgcaagacaggttccagggctcggatggcctcaggagcaagcagggctcccttggctgcctctgctgctgtcacgccagccca

SEQ ID NO: 177820 - DNA, 122 bp, Homo sapiens
cagctttcgaggtggccttcctggtgggccagtacctgctgtacggcttcgaggtgcgaccgttctttccctgcagccgccagccctgcccgcacgtggtggactgcttcgtgtcgcgccct

SEQ ID NO: 177821 - DNA, 122 bp, Homo sapiens
cggctatttctacaatcagataatgtatttttgtgtgggtgttaccagacagaggcgcgtcgttcccccgctgtccggtcctcggcgggcctgggcctcctgtcccagctgcgttccttgat

SEQ ID NO: 177822 - DNA, 122 bp, Homo sapiens
ccacaaacgtgggtgccctttcttcatgaaagggaaggggacgaaggaagaaaaacactccggtccaaaagtaccctcaagcccttaccccacagcgtggatgccccgatttcccaggtccc

SEQ ID NO: 177823 - DNA, 122 bp, Homo sapiens
ctgaccttgtcttagtctattctagccaaggtttcacatctggtacagacgctgcagttacggttactacttggctgagttttcaatagtccactttcattctccagtgtctggtttttaca

SEQ ID NO: 177824 - DNA, 122 bp, Homo sapiens
ctttccaagcacagaatcttatcagtgcctaggagttcagccgacttagcacgaagagtgcgatggaagggctgcttttggcaaaccgtctcaaccccgggcgacggcgggcacgggaggtc

SEQ ID NO: 177825 - DNA, 122 bp, Homo sapiens
cgaagcccagtgaagatccacttctgtattaccatacgcgggagctatccacggacacgacgctgttccagaaagccatttagttactggaggtgcatgtgctcattctagttctctacgat

SEQ ID NO: 177826 - DNA, 122 bp, Homo sapiens
atcaggaagccaggactcgggcttgggtgctgggctctgggcctgtgtgtctgacttctccgagggggtgctgccttctcctttcctctctttctccctaacccccccacactcagccacta

SEQ ID NO: 177827 - DNA, 122 bp, Homo sapiens
gccaggagttcaaaaccagcctgggcgacaaaacgagaccccatctctacaaaatacaaacgaacaaaacacagcacatagaaatttatactgtgatccatgtgagagtagatttaaaccag

SEQ ID NO: 177828 - DNA, 122 bp, Homo sapiens
gtccgtttctcaggcagactaggccattaggtgcctcggagaaaggacccaaggctgctccgtccttcacagacacagtccaatcagagtttcccaggcacatcgatgcaccgcctccttcg

SEQ ID NO: 177829 - DNA, 122 bp, Homo sapiens
taagttactggctgcaacgtggagatgacgctagtgccgtcttcatggaagtggcggagtcggttagataaccctggttaggttcttagactcgcgcccggcacagtggcactctccgatga

SEQ ID NO: 177830 - DNA, 122 bp, Homo sapiens
gggagaggagccttcctggcttcttcccgacttcttgggatggggatgcgcatccatcctcggccttccttggtttgtggctgtgtcactgcaccctctgcctctgtcacggcatggtgtcc

SEQ ID NO: 177831 - DNA, 122 bp, Homo sapiens
aagtactggacaagacgcaagaagaacaacgtggcagctaaacggtcacgggatgcccggcgcctgaaagagaatcagatcaccatccgggcagccttcctggagaaggagaacacagccct

SEQ ID NO: 177832 - DNA, 122 bp, Homo sapiens
cttcctcccccaagaaaacattgtgggttgatggccataccctgaggttctggtccaaatcggactttctatgaccttctgggtctctagtgaaaactaaagactcctctccagaaaaaaac

SEQ ID NO: 177833 - DNA, 122 bp, Homo sapiens
aaggccccagagttattgatctcacatgtgagtgaactttttcctagaatttattgcacccgattacaatccaaattcatatcttcactaattgtaactaggaacatttgagatttttgcaa

SEQ ID NO: 177834 - DNA, 122 bp, Homo sapiens
caaggccacccctctggtcctccctgccaaccaccacttcctgggtgcctggaagcgtggcgctggctgctggagggcctggtggcctgaactgcgcccaggacgctgtggcagaggcaccc

SEQ ID NO: 177835 - DNA, 122 bp, Homo sapiens
ccagcacgggggcaggaggcagtgagatggggtgtcggacaagacagcacaagtcagaaccgccgtggccaaagagaccccccgggacccccctggggcagcacggcccgagccccgcagcc

SEQ ID NO: 177836 - DNA, 122 bp, Homo sapiens
acccgcggcccgcgcgcctcccggcaccggctacatcgctgggaggtgaggcgctgggagcgcgtgaggctctccgggagaaaacagcccagcttgcatcccagaggaggcagcagccgcag

SEQ ID NO: 177837 - DNA, 122 bp, Homo sapiens
gaccgctatgtggccatctgcagtcccttgcactacccagtcatcatgaaccaaaggactcgtgccaaactggctgctgcctcctggttcccaggctttcctgtagctactgtgcagaccac

SEQ ID NO: 177838 - DNA, 122 bp, Homo sapiens
gtaatgagctgccagacctggcctcccctggctggtgcccagctcacttgggctggcattcgaggtcatcttccaggggccagctaaggaggtgggtatgaggaacaagcagatgtgggaga

SEQ ID NO: 177839 - DNA, 122 bp, Homo sapiens
tgtagagtgttcctggctgtgacaggcatgtcgagggcctgagaaccctcgcatggtctacgttcgcacctgggcaggccgatttcataaacactgaggcctcgttatgagccaggaagatg

SEQ ID NO: 177840 - DNA, 122 bp, Homo sapiens
gggctggtgcaggagcagtggggaactcctgttacccctgacctgctgccgtcagtcagccgcccgcccccccaccttaaggaggggcagagtcagggaccagccctgaggggtggctcacc

SEQ ID NO: 177841 - DNA, 122 bp, Homo sapiens
gatggaagactcccacagacgcctgctaacatcacatgcccaagtgtcaccgcgatgccacgtccagtctgagccattcctcgcccatgtccctgtccttgttgcatagccggcctccagcg

SEQ ID NO: 177842 - DNA, 122 bp, Homo sapiens
ccctgagctgtggggtgtccgcgtgattctgaggcctgcgtccctgagctgtggggtgtgcgggtgattctgaggcctgcgtccctgagctgtgggctgttgaggtgattctgaggcctgcg

SEQ ID NO: 177843 - DNA, 122 bp, Homo sapiens
aacccagactggccccggcccctttttatctcctgggttgcacttggcttgtttactttgcgaggtcctgggagtcgaagtctaagcccgggatgaggaggcctctgaacaagatgggcgag

SEQ ID NO: 177844 - DNA, 122 bp, Homo sapiens
gaaggagacggaggaggacagcagcacgtagggcatgttggaggcgaaggcacagcagcgcgggttggagtggcagcgctgcgcctcggcgtcggcccctacgcgccaccactggctcatga

SEQ ID NO: 177845 - DNA, 122 bp, Homo sapiens
tactttggccttcttggccctcgttttggcagtcgttttctctttagaacatcacttaatcgactgtccatgggaaaatatgagataagtttagcaattaccactgttttatatcttcactc

SEQ ID NO: 177846 - DNA, 122 bp, Homo sapiens
cagtgcgcgtgcgcagctcaggtccgggtgggggccggcagggggtcctgggcttggcaacgtgggcggagggcggccaagcacggtcccctgcgttttgcacccggccgcgccttggtccc

SEQ ID NO: 177847 - DNA, 122 bp, Homo sapiens
aaatccccaatgatgggtatcgtccctttgaaagttcaaatctctaccaaataagccacacggatgccaagctttgaaggaaacttaggactatcaacagtgcagaagtccagttatagtgc

SEQ ID NO: 177848 - DNA, 122 bp, Homo sapiens
gcggcggcagtgacatgtttggcgacatctccttcctgcagggcaagttccacctcctgccggggaccatggtggaggggcctgaagaagatggcaccttcgacctccccttccagttcacc

SEQ ID NO: 177849 - DNA, 122 bp, Homo sapiens
tttctttctccctttctctcctgcagcacaacagcaactcgtggcttttcctctaaggggcgggttctctccatttcccactcccacgtgtggggagagcagccccaccgccggctcatacc

SEQ ID NO: 177850 - DNA, 122 bp, Homo sapiens
cggaggctgaggcagaattgtttgaacccaggaggcggaggttgcagtgagcagagatcacgccactgtactctatcgtgggcgacgacagagcaagagcaagactccgtctccgagaacaa

SEQ ID NO: 177851 - DNA, 122 bp, Homo sapiens
cgggtccctgtccatcacccagacggccggccaatcaggaggcgccgactccgcgcagcccgcgcccacttccttacaaggtagcgaaaaaccaggagtgaaaagcgccgctgtctggcttg

SEQ ID NO: 177852 - DNA, 122 bp, Homo sapiens
agcttacgcctgcgggtggcatccgactcgcggctgacgtcctggggccccttgccctgccgggcatgggtcagtagcatggcagccagctcactgtccacgtccgccagcttctgtgcttg

SEQ ID NO: 177853 - DNA, 122 bp, Homo sapiens
aacagagcgcctctcaggcgtcagaggctgctgcaaatgcgggtcagcgggtcacggtcgcgcctgtcttgctgatgctcatgggaaatgtagttcaaagggcatgggcggtgccttcggtg

SEQ ID NO: 177854 - DNA, 122 bp, Homo sapiens
cggcagccatcaggcgccagctccacagcctggctaaacagactccctccaccccacgtgcgcctcttcagccggttcccgttcactccaagacgtctgaacctgtcaccccacttcttcag

SEQ ID NO: 177855 - DNA, 122 bp, Homo sapiens
catcccactggggtaaaacgcccttttatttctagccaggtgttctgttgcagaacgcctcgaagggagggagtgaccggcaggttgaggtttattaaataaaatacattcctggtttatat

SEQ ID NO: 177856 - DNA, 122 bp, Homo sapiens
cgaacgacgtcatttatggttcaaaaatcttagggcaattttttcagaaaacaactattacgtcaaacccccacctctttgctgggcccctctgctcgattcaggtacctagatgaatggag

SEQ ID NO: 177857 - DNA, 122 bp, Homo sapiens
ggagcggagggcgtcacgcgcaggcacgagtgtgtcattaggtgcgtgggaaagtccgatcgcaaccatgtgcacctgcgatcagtcacgcagctgatcaatcgtgcgtcctcctccctgct

SEQ ID NO: 177858 - DNA, 122 bp, Homo sapiens
cggccggcagagagaacaaccaaaataggaattgctccttcgacatgaagtcatggagaccgcagtgagatggcccggtgctgtcgccacctggatacctcaagttatttcagatgttgctt

SEQ ID NO: 177859 - DNA, 122 bp, Homo sapiens
agctcctctctggctctaggagctgatgctccaagtcttggcccaaacactacttccggccgggtgcggcggttcacgcctgtaatcctagcactttgggaggccgagacgagtggatcact

SEQ ID NO: 177860 - DNA, 122 bp, Homo sapiens
cccgtcccacgggcaccaactctccattttcactcccactcagggttcccgggaggaacgcgccggcaccacaccctccagctcgcagcccgctcgcacacacggagccccgcgccggagcg

SEQ ID NO: 177861 - DNA, 122 bp, Homo sapiens
ggctccaccgagtgcgtcctcctggttgtcatgtcccatgaccgctatgtggccgtctgccggtccctgcactacatggcagtcatgcgcccacatctctgcctgcagctggtgactgtggc

SEQ ID NO: 177862 - DNA, 122 bp, Homo sapiens
tcgcagagcgggaagcaaggaagcctcgggaaaccacagggaagctgcaggccagcgactcgaaaccggccaagctcttcccgcgtctgggacggcgggccgccagaggggcggggcgcgcg

SEQ ID NO: 177863 - DNA, 122 bp, Homo sapiens
aaaaatagccatggttttgaagtggagaattggtgtgggttacaccatcagaaagtgtttcggcttgctttggctgcctttacagtaccattgaaaaacatgaaatctgtggcaatttgtgt

SEQ ID NO: 177864 - DNA, 122 bp, Homo sapiens
tgtggcaagggcacctggaggtgggagggcaggagcgtcgtcttgccctggcagaagaagcggtaggctctgtctgcgtggcagctggtccccagccctaggagagaagctgtctgtgagca

SEQ ID NO: 177865 - DNA, 122 bp, Homo sapiens
ggagccatggcaggcgaggcgccaagagaatggggtcattgcctgaaatgccactggagccgagagatgagctgagcccacgtccacagaagcccattcccagtgggaggaacagcgtctgc

SEQ ID NO: 177866 - DNA, 122 bp, Homo sapiens
gttttgggggcctcctagcgtccccctggggtcaaaggtgacagaagaggcggaggctggcgctttctggagaatttactgaccacagaggggtgggcttcacatgagtgcccgccactgcg

SEQ ID NO: 177867 - DNA, 122 bp, Homo sapiens
tctccccctccctcctggcttccactcccgggggagccgcggagccgagttgtttgcttgcgccgcgaccgtctggctccgaatcctccttgattagggctccgggttttaggaagcccgag

SEQ ID NO: 177868 - DNA, 122 bp, Homo sapiens
gaacttcacgctggtgggcaagcccctccttgccttcagaaacctgcggcctatgctggccgccgatgctcagagatacttcacggcctccgtgagtcctggcactgggtctcccagagagg

SEQ ID NO: 177869 - DNA, 122 bp, Homo sapiens
agttccccgggatgctgctagaaacacgtgagacagcgcgttcatttgctctacaaaaagcgaatgaaggcgcagttaccaggccagtcaacccaggctgtttaaggtcaactactggggga

SEQ ID NO: 177870 - DNA, 122 bp, Homo sapiens
ggggaaatgaaaacagctgttccgagaggacaacgcggtgttgtgcgggagatgagcccgcggcccaggaggactgagccccctgtgctcactggccccggcccacgcaggctgcatgcccc

SEQ ID NO: 177871 - DNA, 122 bp, Homo sapiens
aggactcccagaggacaactccagggtcgctctctagtctccagcactgagagcaggcagcgtggagaatacgcaatgacaaactcagattactcacctcccgggaccaaaacaggggcctg

SEQ ID NO: 177872 - DNA, 122 bp, Homo sapiens
gcactttgagaatcctgctttataacttgtccagactactcagacttttccctcagtaagcgtgacatactgggagaagcactggaatgggagccaggagacctgtgtttttgatgtacttt

SEQ ID NO: 177873 - DNA, 122 bp, Homo sapiens
ccccgccttcacgcaccttccctgccggacgcttccgcctttcccgcgcctcggggatcccgcccccgcttagtaccttggggccacctggcggggaggaacctggaccctgctccagtgct

SEQ ID NO: 177874 - DNA, 122 bp, Homo sapiens
ccattagcgcggcaggtgcctcccgggctgtaaattcgccccgatttatctccccggggacgaaataaatccagcttggatgggagtgtagttaggcaaaggttttcatgcgaaatcaggaa

SEQ ID NO: 177875 - DNA, 122 bp, Homo sapiens
aagaaagaaagaaaaagcagcacaaaacccacaagtcccacgggtcaaatggccgagaaacgactcccaaggagtccaagtccagaaaggcccgtacagtggccggtaagggtcaaacatgg

SEQ ID NO: 177876 - DNA, 122 bp, Homo sapiens
aatcgttttaggacctcaggcacctctgggtacagtcggacgtcttggccccgcctatctcgtacagttccatcactggagagggcaagagtgcgctcagccctggctgggtcctatctcgc

SEQ ID NO: 177877 - DNA, 122 bp, Homo sapiens
attagctggctggagtaaaacaactcaaacagcagttaaagcaaagggtgcagcagtagccggggaatcgaggaggcgcggggcggaaagggttagttaggagcccagaggctgatctgtgg

SEQ ID NO: 177878 - DNA, 122 bp, Homo sapiens
aagcatttggcttaagcggtgacaatatccctctcctcagatgccaaggtcaaggcgagccgcggcaacaccatctccccagacacacacgcaaaatcggcccttctcggggaaagggcagg

SEQ ID NO: 177879 - DNA, 122 bp, Homo sapiens
caaagtttgttcttcactcttatgatataccactaatcatatattgttatttacttgagtcgtctgtgtaacaaaacaggctaggcctcttaggtctctgttagctgcaagctgttactact

SEQ ID NO: 177880 - DNA, 122 bp, Homo sapiens
atgcgctgccagagcagtttctctagttccgtactcggagctcaaggtgacagaggactgcgcttccagccctgcgctgcgcatcgcgtcggtcccgcggacctttgccccgcctccttcca

SEQ ID NO: 177881 - DNA, 122 bp, Homo sapiens
ctaggagatgggaggcacagctcgtgggcctgggcggaaggatgcggggccgcctggggccgggctcccgccccagcagcggaggtaacggcgccacggggtaacgggctggaggcgccaca

SEQ ID NO: 177882 - DNA, 122 bp, Homo sapiens
actgcccacttcccgagcggtcgcctgtcaccccgggggtagcccgctcggcgatcgcagcgcccctccaaagctcccctctgcgaccacgctcgccagacaaaaagaggccgaatttggag

SEQ ID NO: 177883 - DNA, 122 bp, Homo sapiens
cacgccgaggatgcaccgtctctggattggtccggccttcttcctaatgacatcgctcagcgtctctggagccgtcatcccgcggaatgggggcccagggggtgtcagctcggggccttgcc

SEQ ID NO: 177884 - DNA, 122 bp, Homo sapiens
tggtattcactttcgcgactcaggtgaactaacctgcgagaagctggttgtgcgctgaggcgaccagcgccggaaggcacggtggcgactcacgctgttctcgccgctcagaggcgggtctg

SEQ ID NO: 177885 - DNA, 122 bp, Homo sapiens
cgcccagggttgtcttcctttagcagctgcacggatgatagtagcgtggccagctcctgccgcagggccccaaccttgaactccctatgggcaccagaggccgaggctggctgtcgggtgtg

SEQ ID NO: 177886 - DNA, 122 bp, Homo sapiens
tgaatggtggagagtctgcttgtcaccccaagagacacatcaggaagctaggtggtcagtcgggagagagaggatgtgacactctagccaccaccacgcagagaagggattggaaacagtag

SEQ ID NO: 177887 - DNA, 122 bp, Homo sapiens
ctgagccccagaccgtctctatcccagtgcaggccgctgccccctccccgggcttgtcagcgtgtgaagcggggtctactccccagctctggctgttcagcaggagcaccttccagcatggt

SEQ ID NO: 177888 - DNA, 122 bp, Homo sapiens
ctcactcgctcggagaaggcggcagcaggctggaagaggagcggcgccaagcgtctgttgcgggacacaaagccccggacctgaagtggaagcttgcccaccagcttcaccaccacgcacac

SEQ ID NO: 177889 - DNA, 122 bp, Homo sapiens
ctggggctttggatgcacagggttagcatctgcaggtggggcagcatcacccacctcagccgctgcaaccaggtcgtgccgtctctgttcatcttcctctctggtgacagtggccagcacct

SEQ ID NO: 177890 - DNA, 122 bp, Homo sapiens
ggtgacggataaatttagcgcacgagtcgagtagctagcgcgggccggcaggcgtgggaccgcgagccgcgcgggggcctcgggggcagccctccatcccctcgggtacggtggggcccgca

SEQ ID NO: 177891 - DNA, 122 bp, Homo sapiens
cggcgatcccggggttggaactggctctgggaccaatggctcgggcgagcgcttttctggcgccgggacctctttctggcgccgtctggcacttgcgcgccctatatagcggtacggtgcct

SEQ ID NO: 177892 - DNA, 122 bp, Homo sapiens
ggggaaaaggaggaaagcgggggcgtctagggcttgcgatttgctatcttctggcgccttcgggcggcctcggaaactcttggtgcctggacctggagcctggacagggaccgggcggggcg

SEQ ID NO: 177893 - DNA, 122 bp, Homo sapiens
gaaacacaaacgtcacccttgatgcttgctctcccttatcccctacagtaattgaataaccgagctcttctctagtccatccatgtctcctttgccactgccactaccctagtttggccgcc

SEQ ID NO: 177894 - DNA, 122 bp, Homo sapiens
agaagtccacatgcggacagtctctgactactcaaggctcggcggttcccagaaggcgaacggttcccacagtgtcctgacagtagggtgcaggagccagcacccgcgtgtggtgggcggga

SEQ ID NO: 177895 - DNA, 122 bp, Homo sapiens
gcccttgacttctctgtgggctcgagcaaggaccatcccaactcaggatgaaccctccttcggggccaagagtcccgcccagcccaacccaagagcccagctgcatggccaccccagcacca

SEQ ID NO: 177896 - DNA, 122 bp, Homo sapiens
actttaagaaaatgaaaattgaggtgttgaaaaaagcttttaaggctaacgtgaatgaggcgtccaagtgggaaacccatccagttctacttttttgaactttgcctgtcgtggccaggata

SEQ ID NO: 177897 - DNA, 122 bp, Homo sapiens
gtccacgttcagagccgccttagacggtttgcctgtcaccggcattcctggacctggaaacgggtgcccccagccaggccggggaccactgtgtgcccagaattctcctcccgtcctttttc

SEQ ID NO: 177898 - DNA, 122 bp, Homo sapiens
ctgagtcaagaaaggggcttaaaaacagcgagcgaatctgagggcacccaggttgatggccgtccaaccaaaacagtgccgtgcgcctgggcacaagtgagggatccttccgaaagcttgca

SEQ ID NO: 177899 - DNA, 122 bp, Homo sapiens
cgccaaggcaaagcaacgcccttatatgccgggaattcggacctaattgaagactgaaagcgcgcataccggaactttggtcctgcttcttggccccaccccgcatagcccagccctggatg

SEQ ID NO: 177900 - DNA, 122 bp, Homo sapiens
atactggatgaacagctggtggcacatggtgagctcagttaaatggagctattgttattccgaaggtaaaggtacctgaacccatgctagacaacatcaaaacaaagggaagcatgccccta

SEQ ID NO: 177901 - DNA, 122 bp, Homo sapiens
ggaggttgttgcctcagtgggagcctgggctgtggctgccagtccccaaaacagaccctgcgccccgggcaaccatctgcttcccgccacagtggtgcccaaaaccttttccaagtcgtctt

SEQ ID NO: 177902 - DNA, 122 bp, Homo sapiens
agtggagcctttttcaaagatcccaaagccctctctctatctcagagatcaggtcgtgagcgactaaaggaagggacagcgcagtcagggagatgtcagtgcgttcagattcagagggcaga

SEQ ID NO: 177903 - DNA, 122 bp, Homo sapiens
agtttgccaatgcagcacagagctctcttagctttaatcttgcctttcatagagcaaaatcgaacttttcccccctaagagacagcacagactgttcaagaagaggtaaatattaggaagac

SEQ ID NO: 177904 - DNA, 122 bp, Homo sapiens
cttcctttgaagcccatagcgcctcgtggggccgctagaagtttgtgttgcaggaggaaccgatgcaccttcctttccttttggctttgtagtgctttcctcgttcattcatgagccccaag

SEQ ID NO: 177905 - DNA, 122 bp, Homo sapiens
agaagactggtgttttgttctaggtcacctaatgaggccccatctccccaaccccaaagacgaatccctttggagtgatgatctttgatgatctttagagactcctccatatctttcctgcc

SEQ ID NO: 177906 - DNA, 122 bp, Homo sapiens
gcagcttcagcggccagggtgggggcgacgctccaggtggggtggggaaggcacagcaaccgccagtcacactctccctcgtggagtcagacccctgcacctggttggaatcctccttgcca

SEQ ID NO: 177907 - DNA, 122 bp, Homo sapiens
cacataatattttcctccatgctttatgatccaactttgtacaatggaaagagtgccacccgatcctccagacgggcttcaaattactacacctcaccccaggactgtgctcccatccccgg

SEQ ID NO: 177908 - DNA, 122 bp, Homo sapiens
gaggcaggataactgcttgaaccaaggaagcggccaagattgcaccactgcactccagcccgggcgacaaagcacgattcagtctcaaaaaaagaaagaaggaatataagattattcaggat

SEQ ID NO: 177909 - DNA, 122 bp, Homo sapiens
agttctctctgctgtctgacctgaaccccaactcagaagcagcagaccaacttggtctcccggtatctccagccttccctcaggcctaggcttgctcctcagtctgcaccccaggaccttcc

SEQ ID NO: 177910 - DNA, 122 bp, Homo sapiens
gccatcccttcttcacccccgtgggctttgggacctatgaataaaaacaaacagtggccacgttccaccaggccaggcaggccgccaggccccattacactcgttcacaatctccttccagc

SEQ ID NO: 177911 - DNA, 122 bp, Homo sapiens
gccttttatattttttttatttttgagacagggtctcgctttgttgctcaggctggagtacggtatggacacaatcatagctcactgcaggttcaacctccatgggctaaggtgatcatgcc

SEQ ID NO: 177912 - DNA, 122 bp, Homo sapiens
attttttttctacttagaaactcaatgtgttcctcttctatcctaaacactactgatgttcggtaatgcagacatgtttacatgctatttcttgttttaacaacatgaaaacaaaataaaaa

SEQ ID NO: 177913 - DNA, 122 bp, Homo sapiens
gccctggctcattctgcttctgcacagtggagctgctgttggattcttctgctccggacccggcactgtgttttggcacggacaggccatctctagtctttgctaagcgagagtcactcaca

SEQ ID NO: 177914 - DNA, 122 bp, Homo sapiens
cctgggttgccaggatggaggtcagtaagcctggggcacacccagccctcacaagttccccggggcccccgaaggaaggcagggctgtgccgtgtgggctacgagagagaggtttccatggg

SEQ ID NO: 177915 - DNA, 122 bp, Homo sapiens
aggccatccgggccaagtacaaggaggagtcagatagtgactgagccccggccagcccagcgaggcgacaagatgcctggatgctttccccggtgaccgtctgctgaccttcccctgttata

SEQ ID NO: 177916 - DNA, 122 bp, Homo sapiens
ggcactgtgctagcccactctggctcatttaatcctctcctaagaagagaggagacacagcgtccccatttgacagatgcagaaagaggttccacaggtgtgccttgattctgtcctaaaac

SEQ ID NO: 177917 - DNA, 122 bp, Homo sapiens
tgtgattcctgctgcactttgagacagaacccacagaaatcttcaaaaatattaactctccgtccaggtcagcatgcccaggaggtcacgtcccacttcccagctcttgtcccacttcctaa

SEQ ID NO: 177918 - DNA, 122 bp, Homo sapiens
ctcccgctaagcggcttggcagagtaagaggcatcccaaaacctaagcaaccgggacacgcgcccacctccccgcctctccaggccgggtcaggtcgaccccccaacctcctgacccccttc

SEQ ID NO: 177919 - DNA, 122 bp, Homo sapiens
taacggtgcaagaatacccttctgtcgaaaaactgccttataggaatgggtgactgtatgcggtatgtcctgtactgtacatcaataaataactaagccaggccagaaaaagggtgacaaaa

SEQ ID NO: 177920 - DNA, 122 bp, Homo sapiens
aaagcacaggcggcctggatgtcagtgtgaggggaccttgtgctgtcgttgctgcaaaaccgcatttggcctgaggctatgttaataaagatactgcctttagaataggaggtgctctacag

SEQ ID NO: 177921 - DNA, 122 bp, Homo sapiens
atttttatgttagctatggcagtgcattcccagggtgtcagctagtaggctggttacaagcgaggtctcctttctctatcctagttcagaagcatcagttagagcagaggttctccaggtgt

SEQ ID NO: 177922 - DNA, 122 bp, Homo sapiens
cctgccttcctgacctgggacttgtttccagctctcgcgagactttcaggggtcggagcgcgggggccggccgagaggaaagctggaggcgcgggtggggaacatgtctgagtcggagctcg

SEQ ID NO: 177923 - DNA, 122 bp, Homo sapiens
atatccctttttgttatttaaaacgctgcttaagcaattccctaatggaacggcccggcccgggtccaggaactccctggcccggccggcagcgtctccggatcgggtggaggacgagggaa

SEQ ID NO: 177924 - DNA, 122 bp, Homo sapiens
ggtgggctgggggcgcggggtggagacagggctgtgccttcctcccagcaggtgggttcccgacgggtgggcgtgcgtgcagggcccccggcccgagaaccggccccagcctcggcgggcgc

SEQ ID NO: 177925 - DNA, 122 bp, Homo sapiens
tgctgccatcgtggggctgggcgtgtttgagaggccgggggtggggaggaggggacctggcgttcactgtccaaacacctgtgggggaacaggggccatgaagaacagcacacgaaggagaa

SEQ ID NO: 177926 - DNA, 122 bp, Homo sapiens
cctctcctgctgtcaggaagcttaggtgtgatctggtgaactagaggctgtctttgccaccgaaccgttggctccaaagccttgttctgtctgtgtctacacaatggctaccttttgctatg

SEQ ID NO: 177927 - DNA, 122 bp, Homo sapiens
gcgttatagaaaaggaagagagagaagtcattagctgagatccactggagcaggtttgtacgcagaggagaaggtgccacggagagttcagtacaaaccggaagcaccatgctcttaactgg

SEQ ID NO: 177928 - DNA, 122 bp, Homo sapiens
gagtctctgctccgccaaggccatgagccaggagtggggggccgtcagccggtgtcaccacgttcccctgccctgaggaccccaaaggccatgaagccagagtttactcaatgagtaattca

SEQ ID NO: 177929 - DNA, 122 bp, Homo sapiens
gaacagaaatcaattagccacttacgaggctggctttagttaccgagtcggcagggcctgcgctgcagtttgacgctgacagaagcgaatctcagcgcgctgggctggtcagcgccggcccg

SEQ ID NO: 177930 - DNA, 122 bp, Homo sapiens
ccgatcctggggcggcgccgcctctccacccgcagcctgcggaggcggggacttgggtgtcggcttttctgagggtgatcttttgttttccgagtttgggattcggctgttgggaaaaaaaa

SEQ ID NO: 177931 - DNA, 122 bp, Homo sapiens
cgggggggggggcgctggtgtaggacggacctgattggccggaggcccgggcggtggccgcgcgcgcctgcgcaggaggcagcagcgcgcaccggcggcgggaggagcgcgcgcgggtgcta

SEQ ID NO: 177932 - DNA, 122 bp, Homo sapiens
agacagaagtaaacaagctttgccgtgcccaggacaattgttactttgttattccaggagcgctctgccttctcccacccccaatataccccagggctggagttaggtcctacccatccccg

SEQ ID NO: 177933 - DNA, 122 bp, Homo sapiens
tgggtggtgcagggtcaaaaacagatgaatacccagggtcatggtcggtaacatttattgcgcaactctgaggccggggcggacccagctggggagatttactgtgggaacgtctggcccgg

SEQ ID NO: 177934 - DNA, 122 bp, Homo sapiens
actagtcagcctagtaccaacctattggtctgggtggtgaagaccccaaagagagcagagcggccatgcaggttcacaggcccagtcaaggcctgtaaaacatcaaaatagaaagtagagtc

SEQ ID NO: 177935 - DNA, 122 bp, Homo sapiens
atgcagttgccggtgaagaaacagtgatggtcgtgcctcagggtgactctggcgcacactcggcagaagtgggtgctaggtgaggggcatggagtcttcctggccgaggccccctggcaggc

SEQ ID NO: 177936 - DNA, 122 bp, Homo sapiens
ccaaattcaccacccacatacaaatacagactcggtttcacgagtagttctgagtgcagccgcagcacgtgttgagcctggtgtcagaagggggagtgtgagccctgcatcagcgctgagca

SEQ ID NO: 177937 - DNA, 122 bp, Homo sapiens
cgggggcctgggctgttgcactggggctggactggggatcacggaagagggccaggcccgcgtgggtctccagggctgtgctcaggggcgtggtcttctgcagtgggggcttggctggtgag

SEQ ID NO: 177938 - DNA, 122 bp, Homo sapiens
gggcggggcgcgaggcggagagaccttgccttttagaaccggcagagggcagggccggggcgggatctgcgcgtctctcagcctcgctcccagcgtctctgttttcaggttttggaggcgag

SEQ ID NO: 177939 - DNA, 122 bp, Homo sapiens
gggggtacaaatatctctttgagatcctgctttcagttcttttggggatagacggagaagcggagttgccaggtcatacggcaaacctctgtttaaccttttgagggaccaccatgttgttt

SEQ ID NO: 177940 - DNA, 122 bp, Homo sapiens
gtgaaatgtgcaccctggaattacctttcccctttcggggataatttccctcctccctcgcgtgacacagctaagttttcgcggagctggccgcgctttgcacgcacaactcgggatggatg

SEQ ID NO: 177941 - DNA, 122 bp, Homo sapiens
gaagtagtttcccctggctgatctttgagggtgtcccctttaaacttgccagcctccttccgtggaagataaaatcatgcaggggtatggattagctatcatgtcattatagcaggcacagc

SEQ ID NO: 177942 - DNA, 122 bp, Homo sapiens
ctggccatcctccagccacccatgtcaaaggattatgttctgaaatgttggttgggaaatcgtgctctggatgatgaggtttgcctctttttctccctggaggaaagtgctcattatttctg

SEQ ID NO: 177943 - DNA, 122 bp, Homo sapiens
cagcgcctcattccgtcaagaggaaagcgccggacgcagacgaccaagatgtcaagagagcgaaggccaccttggtgcctcaggtacagccctccacatctgcgtggaccaccaactttgac

SEQ ID NO: 177944 - DNA, 122 bp, Homo sapiens
aggagttgggcgacggagggggcggggagagcttcgtgggtggccacggccagcagcacccgggtgcccctcagagaggaaggtacctgcagcctctgctcatgtgtggggccagcccccac

SEQ ID NO: 177945 - DNA, 122 bp, Homo sapiens
gtatagatacctttcttaaggaacagagaaatgtaataaatcatttaacagtgctggccacgtgaggggatggtggttaacaaacgatagctattattattattaaataaaatgtaaactat

SEQ ID NO: 177946 - DNA, 122 bp, Homo sapiens
ggcgaatgggctcctcccgaggcccggaccaacccctggccgtgaggccgcgccccgccgcgttcagcgaagggaagcaggcaccccgcccggctctccgctgcctccacactcggggaccc

SEQ ID NO: 177947 - DNA, 122 bp, Homo sapiens
ccgcctccgagccccgcccccgcccccacgtgccccgcccccgagccccgcccccgtccccgtgcctgcccatgagccgcgccccgccccccgcgtcccgcttagccccccaccccgagccc

SEQ ID NO: 177948 - DNA, 122 bp, Homo sapiens
ttgtctctcttgctagactgtgaactccacaaactgttcaccagcctatccccagagactcgcatggtttctggcacatggcagacactataaatacattttgaataaatgcatgttagggc

SEQ ID NO: 177949 - DNA, 122 bp, Homo sapiens
acgcgagaagggctggagtcggcgtccagcctagagcccccggtgggagccaggccgggacgcgtgcaccatgccctacctgctcatcagcacccagatccgcatggtgagtaccggccgcc

SEQ ID NO: 177950 - DNA, 122 bp, Homo sapiens
ctggccactcccacctccgggacagggcagatgaagtgtggggacctggagccatggggtcgctcaggccttatgcctgccatttgcaggacagaggatctccggggggatgtggccatgtg

SEQ ID NO: 177951 - DNA, 122 bp, Homo sapiens
atattttctatgattgcattagattctgcttaagactcaggatgcaggatgctatcgtgacgagggacagacaaggttgaaaaggggaacatactgagcaatgaggaacagctgagagctac

SEQ ID NO: 177952 - DNA, 122 bp, Homo sapiens
agggcgggcgaggaggtaaacctcactgggaggcctcggggcgccggcggcagcgggagccgggctgctagtgcagcactcaagttcacttgcggttcaaaggcgactctgtgactccagtg

SEQ ID NO: 177953 - DNA, 122 bp, Homo sapiens
tgggagctggggacgtctaggtccggttccgtgtcccacgctttggagcagtagaaccaacgcgcggccagcgcatcttctgccaccagagggcgcccgcgcctcgggctttggctcccaca

SEQ ID NO: 177954 - DNA, 122 bp, Homo sapiens
ttcttgtggaaaaagccaggccttgcctgtgggtgtcccagtgattaagaacctaagaggcgccatggctcacgcctgtaatcccagcactttgggaggccgaggcgggtagatcatgaggt

SEQ ID NO: 177955 - DNA, 122 bp, Homo sapiens
ttaacagccacacatgctggctggccttaaccccttcagtgctgggttgcctcagccagccggagctggctgatggacagccctgtcccttctactctgccctgagaaagtagcaactccca

SEQ ID NO: 177956 - DNA, 122 bp, Homo sapiens
gaaggaggagctgcggaaacagctggatgacctgaaggtggagctgtcccagctgcgcgtcgccaaagtgacaggcggtgcggcctccaagctctctaagatccgagtcgtccacaaatcca

SEQ ID NO: 177957 - DNA, 122 bp, Homo sapiens
ccgctcccacgttcgtggagaggagcgtcgccctgggacccccaactccgctcccacgttcgtggagacgagtgtcgccctgggacccagcaactccgctcctacattcacaccaaagagaa

SEQ ID NO: 177958 - DNA, 122 bp, Homo sapiens
atagggagggagagggtggctagtggcatcttggttacaagacatgggctcaaagaccatcgaagaccatacaaccctttcacctaaaagctcgagccttctagggcttctctagtggggct

SEQ ID NO: 177959 - DNA, 122 bp, Homo sapiens
ccccccgggtgctggctccatgtctgtgtgaccggcctcaggggtagagtccaggcccgacgcggggcgggccagcggcggcggcagctgaggtgagagacggcggcggcggcgcgggcacc

SEQ ID NO: 177960 - DNA, 122 bp, Homo sapiens
aggagctgttcttaggactgtcaaattagaggagaaagcatggtacagctggtgtttttgcggcagttgggtgagagccatgtagatattaaaagtttttcaaatgcagttcattgaatgca

SEQ ID NO: 177961 - DNA, 122 bp, Homo sapiens
gtgtggacgccgccgctcccctccggccggccaggcgccccgcgtgccccgggagagccgcggagtcggcccgccagccgcagctgagcagtagccctgacccaaggccccgcccgcaaccg

SEQ ID NO: 177962 - DNA, 122 bp, Homo sapiens
gagcaggaaatctggggcgagattcccgccgcggacgcgcactgccgaagcctggtccctcgacctgtccctgcccagcgcgggggcgcaaccgccacgcctcctcacccctccctccggct

SEQ ID NO: 177963 - DNA, 122 bp, Homo sapiens
ggccgggcaccgagatgagcaaagctgagagtggagcgcacacatacacatacgtacactcgctccgcggcgcgcgcgcttgcttagacacacatccgtgcatgcatttatcttatcaggca

SEQ ID NO: 177964 - DNA, 122 bp, Homo sapiens
tctctgaaatggatggttaattgtctccaggccagggagacctgcagaattagggctttccgggactggaccaggagacctgggaggcagagaccctgcccctacccccagccctctcattt

SEQ ID NO: 177965 - DNA, 122 bp, Homo sapiens
cccttaggggcctcaagcaggagggctgagggcaccgctggttcgtctgttcatggtgggcggctttgtgtggccaccagtgctgggtggtgtgggtttgggctgttctccctcctggctca

SEQ ID NO: 177966 - DNA, 122 bp, Homo sapiens
aggcgacacatgtgtctaacacatgctacaggtgttatgcacgtggaggaaggcgctcctcgaggagagagctggtcagagacacgtgctaggaaaggggaccggtgtttctggagagaagc

SEQ ID NO: 177967 - DNA, 122 bp, Homo sapiens
tgagccccctacccgggccggggtgcgaggcgggttgggcgcacgtgcttgtggtcagggcgaggtgcgaggtgccgccggtgggcaacctggttctcttccctgagagtttggaggtcggc

SEQ ID NO: 177968 - DNA, 122 bp, Homo sapiens
cgggaagcaggggctggcacccccgacgccccacccgccccccgtggcctagcagcagggcggggcgaggcgggtcatgcacccctaccagccagccactcccacccagccctcggctcccg

SEQ ID NO: 177969 - DNA, 122 bp, Homo sapiens
acccacccccgcacctcagcaatgatcttttccagttcacggttctccttctccaacagccgggacttctcctcctcgttgttgttggtcgatgaccctgtcttcatggtgtcctgcgcctc

SEQ ID NO: 177970 - DNA, 122 bp, Homo sapiens
ttgctcctcccggggcccttcccgggcaaggtgagcgccgcgcggggctggctggggaggcgccgggagggcggggccgggccgccacccacagcagctgctcagcccgccgcgaccttgcg

SEQ ID NO: 177971 - DNA, 122 bp, Homo sapiens
gagttggatgcagaaacacgcacttgtgcacgctgaaacatccagctgggtccacgcagccgcggctgcccgcgaaccgcgtgttcatctgcgtgctcgcacgctcggcgggacttgttgca

SEQ ID NO: 177972 - DNA, 122 bp, Homo sapiens
cccccggcggcgaccccgggaagctgcggcaggagggtcccgacaaccctggggggcaggcgcagcgcggcccgcggggcgtctgctggcatgggacgcccaccgggcactgcagctcccgg

SEQ ID NO: 177973 - DNA, 122 bp, Homo sapiens
caacgtacactgaattcgtacctcaaatacctggataccaaacataccccacatatgccgcgtacccgacctacccagtaggattcgcctggtacccagtgggacgagacggacaaggaaga

SEQ ID NO: 177974 - DNA, 122 bp, Homo sapiens
aaaggggacacagggcagtgaccgccaggcttggagaggagccgctcctggcaaagccagcgccctatttctgaacgccgcctccgttccggactacacttcccaggggctattgcagcgga

SEQ ID NO: 177975 - DNA, 122 bp, Homo sapiens
gcccaccgtggcggtcttcatgctcaaaattttcatgtcactggtggtggggatcaccagcggcgtctgggtgtggagctccaagactttccagacctggcagagcctgtgctaccgcaaga

SEQ ID NO: 177976 - DNA, 122 bp, Homo sapiens
tctggcaccgggcgccttctgggaactggcatggacgaggcaggcagcggattctgacggcgtcagcagcgcgagaggcacccgacctctcactaaaacgtttggcctgctcccaggaagag

SEQ ID NO: 177977 - DNA, 122 bp, Homo sapiens
gggggcgaaggaccagggcgggagctggccgcagtccaccagcgaccacaggtcggtgtccgggtcgtagcactgcatcaccatggtctccttgccagccagggagccgatggcatagagcc

SEQ ID NO: 177978 - DNA, 122 bp, Homo sapiens
cggctccttccatggaaagctcccgaatgcacggcctggagtgggctttctcctgaccagcgagccacttccttcgtcggacagagcaccatgcggagtggagattagagtggaggcaggca

SEQ ID NO: 177979 - DNA, 122 bp, Homo sapiens
gtcaaactcttgaacgtgttccaagaggtcattggtactaaatcacaacattctgtttcacgtttgtccctaagggatttttaacagcagcgacaaaacctcaagagaagggtccctgatag

SEQ ID NO: 177980 - DNA, 122 bp, Homo sapiens
ctcagtagatgaccgctgggaggaacaacgggctaagtttcagagcttcgtggtcacctacgtggccatgctggccaagcagtctaccaggtaggaagtccagctgcatcctgtgtgtgcat

SEQ ID NO: 177981 - DNA, 122 bp, Homo sapiens
acccagtgaaggagcctgtatccaccctgctcagtcgcttttgggctgctgcggagcttccgctgccatcttcggatcctgtgttccccaccggggctccaccagggcagggatggtggtga

SEQ ID NO: 177982 - DNA, 122 bp, Homo sapiens
ttcgaaagggaaagtgaaagtcacaacttcccagcagctcatgaccaagcacagtaaacacgctgctccccagcaccacctgcagtccaggcccagcctccttgctgctgcacttagaggag

SEQ ID NO: 177983 - DNA, 122 bp, Homo sapiens
aaaaagccccagtggtgggtcaaagagccgcaaaaagccccagtgttgggggcaaaaagccgcggcggcagtggcaaaaagcagcggaggcaaaaacccacggcggtggcggcaaaaagcag

SEQ ID NO: 177984 - DNA, 122 bp, Homo sapiens
ttgaaaagctcctaaacaagcaccaactcggcaatcttccaccctgattctcttggatggcgaaaagaaaatacttcagagttgctcaccactgggcggcacttggagtgaggtcatgtttg

SEQ ID NO: 177985 - DNA, 122 bp, Homo sapiens
gccgggggagctgtgctttttaagaagatctgatgcgcttactatgctagtctgataatgcgtgtgataatccttcactatattatctttgatggataatgaatttgcacttgcctcctgca

SEQ ID NO: 177986 - DNA, 122 bp, Homo sapiens
cttgcctccagtctatgcctcaggcttctcactttctgcttcgaggcttgtttcttcatgcgatggggccatgggaccttgctggagccaatcagcacccagacaggtgcatcccagaagtg

SEQ ID NO: 177987 - DNA, 122 bp, Homo sapiens
ggagtctccctgcaaccatgaaagcactagtgtttctctggagcctgatgcacacgcatgcgtgtttctctctctccctctctctctttctctctctcttacacaatgcagtcctactgcac

SEQ ID NO: 177988 - DNA, 122 bp, Homo sapiens
ctttgggggcgcgagagcaccccataagcccggggccctgcgccccaggggagcggacaacggtccactttacgaggcacaacttcgcccagccgttccgccaccgcactcgaacacacacc

SEQ ID NO: 177989 - DNA, 122 bp, Homo sapiens
gggaagcagtagtgtcttcagtttcatggaagaggtcactccaggagcctcagaagacaacgctttgggacaggaagtcaggctgctgcaccaggggtcgtttcctctctcgctttatttct

SEQ ID NO: 177990 - DNA, 122 bp, Homo sapiens
gccccctctatgaacaaacgtgggctctgttacactcccggggccccctctatgaacaaacgtgggctctgttacactcccggggcccccactatgaacaaacgtgggctctgttacactcc

SEQ ID NO: 177991 - DNA, 122 bp, Homo sapiens
tttctgtgatagcatcctttcggtgatagcatcctttctgtgatagtatcctttctgtgacggcatcctttcggtgatagcatcctttctgtgacggcatcctttctgtgacggtatccttt

SEQ ID NO: 177992 - DNA, 122 bp, Homo sapiens
ctggctcaggagtgaagctgcagactttcgccgtgagtgttaacagctcttaaggcagtgcgtctggagttgttcgttcctcctggtgggctcgtggtcttgctggcttcaggagtgaagct

SEQ ID NO: 177993 - DNA, 122 bp, Homo sapiens
cagggacgggagcaggcacgcacagtcgcgtaagtgtatgaaatgacgacctcagaagggcgcccagggacatgggtttggcagccccgagcggaggccgccaggcagccgttcctttcgga

SEQ ID NO: 177994 - DNA, 122 bp, Homo sapiens
ccccggcctggccgcacgtgtatgatgacaactcggtaatgctgcatactcccgagtgcgcggtggggaagccaaccttggagagctgagcgtgcgaccggcccggcgcgggggtctccggg

SEQ ID NO: 177995 - DNA, 122 bp, Homo sapiens
ggtctagccaccgaggacccagtgggccactgctagccataggccagtccgcctagactgcggcttggacaggctgggcttccggcatccaccacctaccgccccactctcttggggccctc

SEQ ID NO: 177996 - DNA, 122 bp, Homo sapiens
aggttcattaaagtagaagtcagccgatgataaagcatgataaagtcattttgaaatagacggtagagagggaaaatacaaaatgatggcagagtttgtgttgtcatcaccaataattaaaa

SEQ ID NO: 177997 - DNA, 122 bp, Homo sapiens
cttcccctgagacgagtgctctccacacgaagcacatgaatgtgagggggaattggtcggcgtgtaagagacacgttagaaatgctttcctagttttcattcgggatgacactggcgccctc

SEQ ID NO: 177998 - DNA, 122 bp, Homo sapiens
ccagggtgctaagcccctcactgccagggcctgccgtggccggcagctcccagtgtggggcgcacccagcctgcgcccactgggaactcgcactggcctgcgagcgctgtgcgcagccctgg

SEQ ID NO: 177999 - DNA, 122 bp, Homo sapiens
ccgcagattagggggctggcacgagtcacagcacctcgtgcgtcacttggcggcgccggacgttgggctgcgcaggatttgagacgctcccctgaccaccacttgctctgcgctgaggtgct

SEQ ID NO: 178000 - DNA, 122 bp, Homo sapiens
gtctttgatgggtacttggagtagggtctcgactgccgttcccctcttccctccacgatccgcaacccacgccctggaccagccgcccagatcatggcgccgcagcagctggttgggggcac

SEQ ID NO: 178001 - DNA, 122 bp, Homo sapiens
gccaagcctgtcccacaaagagtgcgggctggggacgcggctcaggtcgcctctccgcctcgcacgtgaatgtgttgttttggaaaaacgaagccttttgtgttcacttccttgccctcctt

SEQ ID NO: 178002 - DNA, 122 bp, Homo sapiens
aggtaccttcaggacccacagctgggcctcagggccacagctggggtttggtgaacacttcgccttgcacttcatacttcagtgcccgccagttcaggacattaggactgaagggcccgcca

SEQ ID NO: 178003 - DNA, 122 bp, Homo sapiens
gccaggcgctctcaggagtcccaaaggacaaataaccccgccgctgccgcgggacccagacgcgagccagctgctcgcccgccctgccccgcctgagctttccgccggcagcctggggccca

SEQ ID NO: 178004 - DNA, 122 bp, Homo sapiens
taagacttaactccctctgtataaaaagcctcctgccagcagcgtgaccacctactctgtcgttagagctgggaagctgcagaatatggtggttagagtttaagctactggaactgcctcct

SEQ ID NO: 178005 - DNA, 122 bp, Homo sapiens
tgccccgtctggaaagtgaggagcatctctgcccggcagccccgtctgggaagtggggagcgcctctgcccagccgccccatctgggaggtggggagcacctctgcccggccgccccatctg

SEQ ID NO: 178006 - DNA, 122 bp, Homo sapiens
ctggagggtcggccgccgccgcagccgtcggcccgagagtgcccgcgcgcgtctccgctgcgaaaatgtcaaaacttgcggcagcgccgccctggccttcttcgaggagcagaggagaagcg

SEQ ID NO: 178007 - DNA, 122 bp, Homo sapiens
caaacctgtaaattaccggcttccgtttgctgggacaagtgtaaaatgggcctctttgtacgcaggtgaagtagatttggcaatcacaacagaccctttgtgtgacgattgtgatgataagc

SEQ ID NO: 178008 - DNA, 122 bp, Homo sapiens
taagatccgttttcagaccaaaaccctgaaaacaagcgcagccagtcaagcgaacggaagcgcaggcccggcccaggctttgtcccggcccgccctggtcccagccagtccggcctctagga

SEQ ID NO: 178009 - DNA, 122 bp, Homo sapiens
gccccttctgggtcctccctttgcagcccgtgcggggccgtctcggagaccccgcgccgacggctgctcaaacatcagggtgagtttctcacaatgtagcaatttctctttaaatctcttaa

SEQ ID NO: 178010 - DNA, 122 bp, Homo sapiens
gatgctggcggcccgggtctggccacctgggtcagctgcacgcccccgccccgggctggccggacctcgtagcccaggtcccaccacgccgtgaagtttgcggaaagttttgcagttgcttc

SEQ ID NO: 178011 - DNA, 122 bp, Homo sapiens
gcgctgccttaagagctgtaacactcactgcgaaggtctgctgcttcactcctgagccagcgagaccacgaacccaccagaaggaagaaactgcaaacacatctgaacatcagaagggacag

SEQ ID NO: 178012 - DNA, 122 bp, Homo sapiens
atgctggcttttacagactccatcgctggcggtttgagcagaactgcctcagtcccacagcgacccctggtggtcgcttcaagaagggcatcaaaatgctcccccaaagcacggaacaaaca

SEQ ID NO: 178013 - DNA, 122 bp, Homo sapiens
ccttgggaggctgccagcattccctgcgatctcgccgcttctcccctgtgcctgccttaacgaccccgaggtcctgcggccccctcacgccaccctgcagccccgtttgcgattatgggggc

SEQ ID NO: 178014 - DNA, 122 bp, Homo sapiens
gaaaagaaatcttggccactcagaggggaatctgaaaccagagaggtaaggtagctgaagcgcatgtcccaaccaagcctgggacgggccaggcacctgggcaggactcctctctgctgcac

SEQ ID NO: 178015 - DNA, 122 bp, Homo sapiens
ggatcatggggtagcgtatggcgcgcagcgcccgctcggccacggcagggggcggccgcgcgcgacccagccaggcctccagcgcgtggaacagctccagttcatcctgcagcaccaggtcc

SEQ ID NO: 178016 - DNA, 122 bp, Homo sapiens
ctactctatgagactccccgcgtccccgacaactccttgttggaggccacaagccgtagccgcagccaggcttcccccagtgaagatgaggagacctttgaactgcgggaccgtgtccgccg

SEQ ID NO: 178017 - DNA, 122 bp, Homo sapiens
gcgcgtcggagcctctttgttgctggggcgctggggtccagctgcgcgtgcgcagtaggccggcaccgacaagtgcgctgcaccagtggcaccggctgggggcgagccgacctcgagcagcc

SEQ ID NO: 178018 - DNA, 122 bp, Homo sapiens
ccccctcccgggttcacaccattctcctgcctcagcctcccaagtagctgggactacaggcgcctgccaccacacccggctacctttttgtatttttggtagagacgaggtttcactgtgtt

SEQ ID NO: 178019 - DNA, 122 bp, Homo sapiens
gggggcatccaggcagagcctcaccagcactcccgggcttagctggcccttcgcacctgccggaggtggctgtgtctccaggtcttgagcttgagcctggaagaattttctactgcaagtca

SEQ ID NO: 178020 - DNA, 122 bp, Homo sapiens
tatgtcagaactggggctattcacctggaaaaggctgaccaggtcaaatgtgtatgggaacgaccctgttaggatgctttgttggacaagcacatttcaccaactgttaaaaagcttctgag

SEQ ID NO: 178021 - DNA, 122 bp, Homo sapiens
tctctgagaccaagtgagtctctggggatgggtggagtcgaaaacctctcccttgctgggcgatactgtcttgtgttgacgttcaaaaatatctcctttaagttatcaaaagaaccatctct

SEQ ID NO: 178022 - DNA, 122 bp, Homo sapiens
tcttctcgcagcagctctgcctcctgctgggcagcgccctcgggggcgtcttcaaaaggacgtgagtgccgcgcccgtgcgcccccgccccgcggcccccggcacccaccctcgccgggccg

SEQ ID NO: 178023 - DNA, 122 bp, Homo sapiens
ttgggtaagggggaacattggactatagggctcaccaaggcagggaccccaaaccacccccgactttgggttggaaccctaaggactgtatccaaaataaggattaactggaagtaaaccca

SEQ ID NO: 178024 - DNA, 122 bp, Homo sapiens
gtcaataggagtgatttcattctgcctgcacaggactgctgatgaggtctgacggggcagcgccacttcattaatgcatcacaatggtgaagagcacctgaagcagcagcagcagcagcagc

SEQ ID NO: 178025 - DNA, 122 bp, Homo sapiens
ccccaagatttccgccaggtttcctcagtcatagacgtggacctactgcctgagacccaccgacgggtgcggctgcacaagcatggttcagaccgccccctgggcttctacatccgagatgg

SEQ ID NO: 178026 - DNA, 122 bp, Homo sapiens
ccccacactcttgcattctgcatgcctgcggaactaacaccacataaacaccaccaaggccgactgcttgtgtcctctggagtgctagcccagactgcacctggggccattggcaccacagc

SEQ ID NO: 178027 - DNA, 122 bp, Homo sapiens
ctctccacgccctgctcctgcttcagtttgtacagcttctgccgcagcacgtcctggtggcgctcacgcagcctgggacgcagagccggggtcacccgcatggaggcgaaggggctccgcgc

SEQ ID NO: 178028 - DNA, 122 bp, Homo sapiens
tgcttgcgggccagcatgagttctgggtgggtgtgggctcagcgggccccgcactaggtgcggccagctggtgctgctggccccgggcagtgacgggtttagcacccgggccagcagctgct

SEQ ID NO: 178029 - DNA, 122 bp, Homo sapiens
atgaggtcatactgggaacataaagtgactgcgaaaaagactcccctaccccccaattgacggaagccattgtcgttagtgtgattcttaatatctctaccgagtcaaaactctaatacaca

SEQ ID NO: 178030 - DNA, 122 bp, Homo sapiens
gcatctctggattttgttaaataccatcttaggaaagtactctctgctcttcaaagtcagcgacgacatgagtcactgttacagaacccacagaatgtgtcccttaaaatactgagaatgaa

SEQ ID NO: 178031 - DNA, 122 bp, Homo sapiens
cctcggccttaaggcgcaaccaaggagcactggatggctggggcgctgaggacgccgctccggggcctccacgcctcgccacgcccctcggccatgttccccccatttccagggaggttgga

SEQ ID NO: 178032 - DNA, 122 bp, Homo sapiens
ggtgtgccctcttcccgacacgcaggcccgggggagccccggaccccgcatcccccagggcgcggaaactggcgaggccccaggagctcccatttatagctcagtttccactgagcgcagtc

SEQ ID NO: 178033 - DNA, 122 bp, Homo sapiens
agcaccgcgaagccctgacccctcctcccggcgccccgccgcggccacctgtctccgctccgccccgcccgctcacaggtctccgcgcagcctcgctcacctgtgtccgcctccgccccctc

SEQ ID NO: 178034 - DNA, 122 bp, Homo sapiens
ttacaagacacattatccttttaattacaagctgtagacagggccaacttcgaaggtcttcgtggcggagtgatcttggatcattcagggggctgaaacccgatgccttctgactttcgcgt

SEQ ID NO: 178035 - DNA, 122 bp, Homo sapiens
tggcagaggagccatgctcacgcttccaagggtaggcggtgggggcctgagacggagtagcggtaaaggaaggtgaggaaggcgcggaaggcagggaaggcaggccagcgggacagcacagc

SEQ ID NO: 178036 - DNA, 122 bp, Homo sapiens
aatagcggggcatgactcgggtgaggcccctggagaccggggccggcgacggatgcagggcggccctcctcactgaggatgcgccacaggtccaggcctctcgagcccctgcgcctgcgcta

SEQ ID NO: 178037 - DNA, 122 bp, Homo sapiens
caccaaaatgtgtctattatatatccattctttaaaactgtaagtcagttattctctctgcgaatttggctctcctgtctatagattagacagtgaattgttccctgccctattaataccaa

SEQ ID NO: 178038 - DNA, 122 bp, Homo sapiens
actccagtccccagcgggccacacggcctggccccggaggctgcgcggctgcgtcggccgcgctacccgctgggagtagtagttcccctggagcgcaggcgtcactcccccgcccaagcgaa

SEQ ID NO: 178039 - DNA, 122 bp, Homo sapiens
tcagtgctgggcctgttggcattggcatttgtgcccaagacagcccagacctctgccagccgaggcccagatgtggcctcagagccactactggtgcccagacaagtccagacaggtgcctg

SEQ ID NO: 178040 - DNA, 122 bp, Homo sapiens
tagagggcatagctggccacagtgctacaccacctgcctgattgccaagggtgcccagcacgtggccccagaccaatctgagtgacttagtgttggcaaggtcccgggacctgtgcagactt

SEQ ID NO: 178041 - DNA, 122 bp, Homo sapiens
aacaggactggactcccggcagccccagggcaggggcgtggggagctggtcctagctcagcgctcccggaggtggagcttctgcaggctgggtgctgccgggcctacgggcacccaccccct

SEQ ID NO: 178042 - DNA, 122 bp, Homo sapiens
cgttaaaccccgacgcgcgcgtctccgcaagagcacaggaagtagggaacgtgctttgggcgaaagaccggaagttggtttatcacgtgaccatttttagcccctgtaaaccaggtcgccgc

SEQ ID NO: 178043 - DNA, 122 bp, Homo sapiens
tttagctgcatttctgagacagcttgataacttctttctgaagaaagaaaaaggtgctttcgctggggttgctgaaaatgttagaatgtaagtctagaattgattgcagtctgcaccatgaa

SEQ ID NO: 178044 - DNA, 122 bp, Homo sapiens
tttcgggactttcctaagctgctctaactttcctgccccttccccggccaagcccaactccggatctcgctctccaccggatctcacccgccacacccggacaggcggctggaggaggtcgg

SEQ ID NO: 178045 - DNA, 122 bp, Homo sapiens
acacccagaccgacgtggccattgtagtccccgatagcaacaaacgccttgaacctggtgcgctggccagcacgggtctgcgtctgcactggcataatcttcaaaacctcatccttgagaga

SEQ ID NO: 178046 - DNA, 122 bp, Homo sapiens
ggtctcagctctgttgcccaggccggagagcagaggtgtcatcacagctcactgcagtctcgacctctggggccgaaggaatcttcccacccaagcccacaaagtagctgggactacaggct

SEQ ID NO: 178047 - DNA, 122 bp, Homo sapiens
cttactatattgcccaggctggtctcgaattcccataggctcaagcgatcctcccgagtgcggagattacaggtgtgcgccacggcgcccggctccaaagtcaacgttcttaacgtctgcct

SEQ ID NO: 178048 - DNA, 122 bp, Homo sapiens
gacgttgtcgtgctcagagctgtagatgttgatgacaatgaccagctgggagggcttggccggggtgtagctacgcttgaccagctcacccagagccacagactggtcggcagagatgaact

SEQ ID NO: 178049 - DNA, 122 bp, Homo sapiens
atccctgatggtctttttttggatgctgacacgtacaatgctctctgtaagaccctgcagcgtgactgtttggtgctgcagagcttcaagataatggactatagcctctggctgtcaatcca

SEQ ID NO: 178050 - DNA, 122 bp, Homo sapiens
acctggtcgtctccagcgggaaggaacagagagtgcttggtgtggttctgtgtgtccgcacgaggttgatgagaaccctcggtgcctggactgtcttctcaccaggcgcagctcaggaacat

SEQ ID NO: 178051 - DNA, 122 bp, Homo sapiens
gggccagggcggttggtggactgggcctggctgtacgtaggtgctctgagaagcccccggcgagaggggcggggccagagcaacagtgggcggggacaggctgtgcgtcggagctccgcggg

SEQ ID NO: 178052 - DNA, 122 bp, Homo sapiens
gaacctgttctcaggtgctgagaaaccactgtctcccccaagggcaaggccagccctgcccgcccttctcttggacggtattgaggccacagtattgcacccagcagggttccaattctcta

SEQ ID NO: 178053 - DNA, 122 bp, Homo sapiens
tactgtgcacacgagtgtagcagtcttttatgggtaatctgcaaaacgtaacttgaccaccgtagttctgtttctaataacgccaaacacattttctttcaggttaacatcagatcccagaa

SEQ ID NO: 178054 - DNA, 122 bp, Homo sapiens
caggaagaggaggggctggggatggaggaaatgcctgttgtcccaggtaaccagaggagccgatgcagccacccatgggggaccctgggctccaggtcaaaggctaggacgcctttcccctt

SEQ ID NO: 178055 - DNA, 122 bp, Homo sapiens
cggcacgaccagagacgctgtaaccaagacccgcagagcctgtggcttcccgctctttggcggctgcagcaggcatggtgctggagcccaaggcttctgggaaagagtccaggttttcgcgg

SEQ ID NO: 178056 - DNA, 122 bp, Homo sapiens
ctaccactaggagttccaaaaacagcacttaccttggcaggctttcccagcctgacaatgcgtcatgtgattcaaaacgtttttcatggttcgacaatgcgggagcgagcaggcccgaacct

SEQ ID NO: 178057 - DNA, 122 bp, Homo sapiens
ggttctggagaacttctgctgcacaacgaagcacgctgacacgcagcgactcacagcagacgtgtgattttgctcatgattttgttggtcagacattcgcgcggggcttggctggggggctg

SEQ ID NO: 178058 - DNA, 122 bp, Homo sapiens
gaagaataaatgcaccaggtctgcaaaagccttcagaattcaggcaagggtcccccctcccgcgcacgcaggccgcctgcctgcaagacagcagagctctgcagtgcagggcgaaggggcag

SEQ ID NO: 178059 - DNA, 122 bp, Homo sapiens
tgcctgagcctcctcccgctccgtgggctcctgcgcggcccgagcctccccgacgagcaccgccccctgctccacgccgcccagtcccatcggccacccaagggctgaggagtgcgggcgca

SEQ ID NO: 178060 - DNA, 122 bp, Homo sapiens
tggaaccctgtatattgttgcttcctccagggagtctgccctggtttcccccaggctgcacgaggagtctcccctggctcccatgtcctgggcagcctccatgagtgcctgaccgtgcatgt

SEQ ID NO: 178061 - DNA, 122 bp, Homo sapiens
tatggtttggctgtgttcccacacaaatctcatcttcagttgtagttcccataatccccacgtgttgtgggagagatccagaggtaattgaaccatggtacggtttcccccatgttattctc

SEQ ID NO: 178062 - DNA, 122 bp, Homo sapiens
gacactgagccactagagggcatcggtcccggtagggccggacggcaggctccgggataccgccacgctctctatggcgcccagaagggggcggggtggcgaccgcagtcgctttggctgag

SEQ ID NO: 178063 - DNA, 122 bp, Homo sapiens
ggtgccaagaaccaaccgaagcagccagaactcctcagtgaaaggcctgctttatgttcccggggcagtgaggagggggcttctcccttcccattgtccagactcagcccccgaaagagagg

SEQ ID NO: 178064 - DNA, 122 bp, Homo sapiens
gagctcaatgttaacgagtcgacaatccggtacatcaagaaaaaggaaaaggaaattcaccgatctgtccgtgaggccgctccggatagtgctgaagtgacctccatcgtgcgtgatgaagc

SEQ ID NO: 178065 - DNA, 122 bp, Homo sapiens
ttgcgagtgtggactttccagttagacagacttggttcagcaccgcctccgccacaccctcgcctgggatcctaaacaagccgcatcttctctgcatcgtagtgtgcttgtctctgtgatgg

SEQ ID NO: 178066 - DNA, 122 bp, Homo sapiens
tctgacatgctccaaacatgtatgtgtacacatgtgcacaggctgcatgtgctcctgaagcgttctcccacgtccaggtctgagcgtttggctttgatcaagagccacagtcccgccactgc

SEQ ID NO: 178067 - DNA, 122 bp, Homo sapiens
tcagcgctccagcagggcaacatcgccatgacaaccgtcaactcacaagttgtgtcaggtcggtgcaaagactgggaagggtgattgtgggaattccctgggaggagaaagggtggccccga

SEQ ID NO: 178068 - DNA, 122 bp, Homo sapiens
tgccgtcctcctggccttgaacaacagcctgaagtcgagtccgggctaggcaggggaaagcgcaaaggtgcagcacgcaccctcggggattttctcagcgctcctcaccccccacgacctcc

SEQ ID NO: 178069 - DNA, 122 bp, Homo sapiens
aattatctagcaaaatgaactctactgcctgcgagctgggtgctcaggagggagcgaggccgcccgtccgcctggtggtcaggaaccctgggtgcctgtggctcatacagactgtgggacct

SEQ ID NO: 178070 - DNA, 122 bp, Homo sapiens
gacacagccttgggcagtatccaaggcagtcactgcactgcagcaccagggtggagtctccgaacctctcagagccccactggctggcgtgggtggtgtgggaggcagacagacgggccctt

SEQ ID NO: 178071 - DNA, 122 bp, Homo sapiens
caggctgagttcggcagcgggacccagtttcctcctgagagaggtccaggtaaaggtttacggttgccacaggtcagtcctgacgaaaaccgcaagctgcgccaaatctcgcgcagcggggc

SEQ ID NO: 178072 - DNA, 122 bp, Homo sapiens
gccaacacagcgaaaccgtctccaccaaaaaaatacgaaaaccagtcaggcgtggcggcacgcgcctgcaatcgcaggcactcggcaggctgaggcaggagaatcaggcagggaggttgcag

SEQ ID NO: 178073 - DNA, 122 bp, Homo sapiens
ccatttcattgcaacatactttttatttgtatgactgttatgttcccgacacaaactgcccggctgtgggaaaaggcctgtcatatctccaggcctcagtctccgtatctgtatggtgggtg

SEQ ID NO: 178074 - DNA, 122 bp, Homo sapiens
agccgcgctacgcgagtgatccagggctgcggggagcgcttgccatgactcagcagacagcgacgaggctgcgactcggcggctgggatcctctcccctccctccccaggcgcccccgcccc

SEQ ID NO: 178075 - DNA, 122 bp, Homo sapiens
cccttcgcggggcaggctggggcatgtagttctccgtaggcgggaggcgcacggtgctgtcgggaaagttggtctcggaaaactacagccgccctcagcgcgccttccgcccgcatttcttc

SEQ ID NO: 178076 - DNA, 122 bp, Homo sapiens
cagggcgctcggagagggggcggggcctgagggcagagtcaccctggagctcaggtcggacgctggtgcaatcttgctatctatccccgggcagtcagcgcgcacttcagcagactccgtgc

SEQ ID NO: 178077 - DNA, 122 bp, Homo sapiens
tctctttcttatgcttgcgactgtaggacaacacttaacatgccagcaaagctacaaacccgtagaaagctaagtagaaactaagagtagcccttcctgcagaattcactttttgcactgca

SEQ ID NO: 178078 - DNA, 122 bp, Homo sapiens
aatgggaatagtcataatgcctaccaaatgggttttattgtgtgtgacaattgaatgaggcgattcatttgaggcactgtgcctggcagatagtaagtacgcaataatactattgttacttt

SEQ ID NO: 178079 - DNA, 122 bp, Homo sapiens
tttagcaaccgtgaaatccaggaaggtttcccataagaaaatgggatggaaggtctggaccgaacacacacagccaacagagcggaggctctgaggctcacattaatcagggaaaaggaaga

SEQ ID NO: 178080 - DNA, 122 bp, Homo sapiens
tttttctaggtctattataacactttgttttttgagacagtctcgcttttgtcacttaggcggaagtgcagtggtgagacctcggctcacggcaccctccgcctcccgggttcaaacgattc

SEQ ID NO: 178081 - DNA, 122 bp, Homo sapiens
aaataactggctgcataaagctaccgacctgtcttccgtacagtactctccactaaggttcgcccactcaacaaatacagtgggagcatgggcagaaagatgaataaaggtcagtcttataa

SEQ ID NO: 178082 - DNA, 122 bp, Homo sapiens
cgtgtccctggctttagcgcccgcggtcctggcgagcgttttcccagcgggcgtttgcggcgcttctcctactgagaaactgttgctgtggaggcttgagaagtcaaggggctgcaggccgg

SEQ ID NO: 178083 - DNA, 122 bp, Homo sapiens
tcagaccgcccaccgccagcccctccacctccaggatctggtctcctggccgcagtcctccggcatgcgcgctgctccccttggccacctccaggacgaagcaggggccagagccacctagc

SEQ ID NO: 178084 - DNA, 122 bp, Homo sapiens
aagcacagaaattccctacttgggccctttcttatagctccagaggtagtgcctatagttcgaatgagaacaaagaaggaggtggtcacagcacaaagccacacatcacactgcctagccat

SEQ ID NO: 178085 - DNA, 122 bp, Homo sapiens
aggattataatactatgaacaacgttaggccaacaaattagacaacttacatgaaatggacgtattcctagaaagatgcaaactaccacaaccaactcaagaagaaatagaaaatcatagta

SEQ ID NO: 178086 - DNA, 122 bp, Homo sapiens
aagcctccccagactccaagccccaccaggcatgcagacaagtgcctgcagtgattgcagcgcctgcgcagcggcccttgttggaagtccaggagtccgcgctaccccgcaaagtccctggc

SEQ ID NO: 178087 - DNA, 122 bp, Homo sapiens
aatcagtcacttaatcttgtgcgggaaggaggggaaaggaaccacgaaaaagagaatcagcgaactaacaatccagtccaaaggtgttccaaaggtgttctcttgggagtcaggcagggagg

SEQ ID NO: 178088 - DNA, 122 bp, Homo sapiens
cctgaagcaatgtctcttcaaagctctgtcccagaagcaaatggaccccttgaaggtggccggcctcccctggggcccacctgggggctgcgagtggccgcgtggagaagtttaagccttca

SEQ ID NO: 178089 - DNA, 122 bp, Homo sapiens
aaggccacggagaggaaccacacccgcagggagcacttcatggtgccggcaggcgggtgacggtcaccgtggccactcttttcccagcccgctgaggggccagccacggcgtagcctgccta

SEQ ID NO: 178090 - DNA, 122 bp, Homo sapiens
agactaagtgatctccaatgtttctttccattctaaaactctatggttctataacattctcgatttattgagccactgtttcactgattcattcaataaacatttattgaagcccaattctg

SEQ ID NO: 178091 - DNA, 122 bp, Homo sapiens
gcggaggggagatggtgaccgtctctacagccgcagccaccgccgccgccgctgctgccgcggagctgcccttgaaggggttgttggcgctgaactcccgccacttggcacccaggacggtc

SEQ ID NO: 178092 - DNA, 122 bp, Homo sapiens
ccaccagctattgattattttcagaaataaacacattttgttatccttatcttgaggagccgggaggggtgaagagagggagtgaaagagggagggagtgtttctgtcttccttgagcatga

SEQ ID NO: 178093 - DNA, 122 bp, Homo sapiens
ttgggccatgaggggtgggatgagccgtggatgggtcccgtgagctggtccaggtgaggacgtgcatgttccctgccccaggtgaatgagacctggaccctggagaactgcacggtggccag

SEQ ID NO: 178094 - DNA, 122 bp, Homo sapiens
tgggctggccatggcagaactctcttgtccacactgcctgccctactagagctgcaggaacgtggactggtgggctgtcaaatgggtgctgggtacagtttggggtacagtccagagccgtg

SEQ ID NO: 178095 - DNA, 122 bp, Homo sapiens
aactttgaacagattccatctggaaaacattaagcacaggcctgtttgcagatgtgttaacgctgactcaattgtaatacaggctttaacttctaagcagcatttcttgctagtccattgtg

SEQ ID NO: 178096 - DNA, 122 bp, Homo sapiens
gtggcaagcaatggatcccaaatatcagcgtgtagagctaaatgatggtcacttcatgcccgtattgggatttggcacctatgcacctccagaggtaataatcacattttcagcattgagca

SEQ ID NO: 178097 - DNA, 122 bp, Homo sapiens
acacactgcacggaactcctgtatgcatatacacacaggcacacacgcactcacactgcacggaactcctgtacgcatatacacacacacacgcactcacacacactgcacagaacccctgt

SEQ ID NO: 178098 - DNA, 122 bp, Homo sapiens
cttcagacacgcccccaccttcacgtcacccttcgcctcacagcctgacggccacctccccggtcacctggtaaggccctttatggaatcttcttccatgaagagagcaagaggaacaacaa

SEQ ID NO: 178099 - DNA, 122 bp, Homo sapiens
ctgcggtcccgggccggctctgacggtagaagcggaaaagtttccgaaaggcgtcctccccgggctcagtcgccagagtcgccacagagcccacggccgctgccatcttccccatctcgcgg

SEQ ID NO: 178100 - DNA, 122 bp, Homo sapiens
gaattatcccaagaaaccaatcctggagtagtagggcggatccttcctgggttccggctccggctccagctccttccctcgcctacagaggcggcgctgtccctgatcgagcggcgggagcg

SEQ ID NO: 178101 - DNA, 122 bp, Homo sapiens
ccttctccccctcccccctcccccacgtgggcctcggccacaactgccccccgatactcacgctttgtccaccagctcgcgcaccttccacatgttcaacatcgtgccccgcgcgggacggt

SEQ ID NO: 178102 - DNA, 122 bp, Homo sapiens
gaattgggtggaggccatggtgagttgggtggaggccctggtaagtgtgagcggaggccccgttgaggtggatggaggccctggtgactgcaggtggaggccatggtgactgtgagggtgga

SEQ ID NO: 178103 - DNA, 122 bp, Homo sapiens
cttactcacaacagccccgcaccggaggggtgctctccccatttttgcaaatgtggaaaccgaggctcagagagcttatgtgtcttccaatttccagtcagtctccacgcagcagccgaagt

SEQ ID NO: 178104 - DNA, 122 bp, Homo sapiens
ggctacgaaggggagctggggtaggcaggggagcacagccctgcaggagggcaggatgcccgcccggggcggaagagccgagggcaggccctggggcggggcgctgggctatggagaccacg

SEQ ID NO: 178105 - DNA, 122 bp, Homo sapiens
accttaaaggctgcggagtgccagcgcgcaaggagtagacggcagcggctgcagcagaggcggcgcgggctgtaccagccccacctgcctgccacctgcgggccccgggcagcagacgtcga

SEQ ID NO: 178106 - DNA, 122 bp, Homo sapiens
ggaggttccaggagtcaaggacattgaggacatccaggcccaaacgggatgggccaactacgcgcagcagaacctttctctaccgggcccgcgtgtgcccgccggtcggcttaggcggagac

SEQ ID NO: 178107 - DNA, 122 bp, Homo sapiens
cggggcggcagcgcctcacagggtctctctgggggaatcatcaacaggtgtgcctgaacacgcacctgcggcagccacaggtgtctgggagccaccttttttcttctccctggcctggcacc

SEQ ID NO: 178108 - DNA, 122 bp, Homo sapiens
actttctgcagcagccccaggctggtcggaacggggagtcagggagtaccccagcccttccgatgctctcctgcccctgggcgccctgggaggttcctgagggtggggtcctcccccctgga

SEQ ID NO: 178109 - DNA, 122 bp, Homo sapiens
accaaaaatactctacacaccaaactctagagcagtgcagcagtacatcccatgactcaacgggacagcttctgccacgtggcacacagctccggatatgtggtgcgcagccctcactcgcg

SEQ ID NO: 178110 - DNA, 122 bp, Homo sapiens
tgaaggggtacacactgtacagaaattaagaacacttatacctaagaatgtatttgtgtgcgtgtttgtgtgtgtattgaaatgggcctttctatgagcccactgtttcattcattcattga

SEQ ID NO: 178111 - DNA, 122 bp, Homo sapiens
gcacagagctggaaaaatgcaacatttgcatctcagaggcctgggaggttacacaaatgtcgaaatcacacaggcacaagagaaagatgtcaaggcttagggtaaactggaaaggcttgtgc

SEQ ID NO: 178112 - DNA, 122 bp, Homo sapiens
gttcatagacgtgctaacaatgtaccctcaaggaatcgctgctggcggagaagaacactacgtccacagaacgccaccgggcactgcctctggagcgtggcttcaacccacctctgaagccc

SEQ ID NO: 178113 - DNA, 122 bp, Homo sapiens
tccggtgacctgcagggaccccgcgccagtggctgctgcagctgactcatccgactcccacgcgcgacgctgccctagtggcgtttaaaaaaatcccactcgagtcccatttaaaacataag

SEQ ID NO: 178114 - DNA, 122 bp, Homo sapiens
gactgcatctaagctcctccttttctgtgggtgatggtggctgtcaggcccctgaacctacgtcatccctccctctgatttgactgtacctttgctaggcctggtcaagggctagggactcc

SEQ ID NO: 178115 - DNA, 122 bp, Homo sapiens
cccagcatcctcttggttaaatagataaaagaatggctgccataccatgtctgtgaaagccggggagcagcaaccacagagcagaagtcacttctgctgagcttccaaatcccatatgcctg

SEQ ID NO: 178116 - DNA, 122 bp, Homo sapiens
gggtatcacaatgaaagaggcaaaagtgtctgaaaaacactgtgacgcatatttccagcccggcatggaggacgtctgccaaaagcatccggtaaaggtcaactgggctgctgggaaacctg

SEQ ID NO: 178117 - DNA, 122 bp, Homo sapiens
agccgctttgggaagtacattgacatctactttaaccccagcggggtgatcgagggcgcgcgcatcgagcaatttctcctggagaagtcccgggtctgccggcaggtgaggcctcccccttc

SEQ ID NO: 178118 - DNA, 122 bp, Homo sapiens
ccacaggcacatgccaccacgcccagctaatttttcgtacttttagtagagacaggttgtcgtccaggctgttcttaaactcctggagtcaagtaatccacctgcctcagccttccaaggtg

SEQ ID NO: 178119 - DNA, 122 bp, Homo sapiens
acattctttaccttgccccttctgccttgtatccaataaataacagcgcagcccgacattcggggccactaccggtctccgcgcattggtggtagtggtcccccgggcccagctgccttttc

SEQ ID NO: 178120 - DNA, 122 bp, Homo sapiens
taattataactaacatttgcaaacaacaaagtgctgtcacagacattctgcttgtaatcccgttgggaatgagcctcatgtggtaggttttattgccctgttttatagccaaggtgcagagc

SEQ ID NO: 178121 - DNA, 122 bp, Homo sapiens
ggggtcaccaaaaaaaatccaccaaaaaacacccaagaagggagaagcggtcaccccccacgtgctggaatgacagctttttacttgctaggcagttggaccttttccgaattttctacaat

SEQ ID NO: 178122 - DNA, 122 bp, Homo sapiens
ggcggggcgcgaaggagggagggagggggcagcggagggagggaggggcgccgccgcccccgtgcccgccacagcggtgcccccagcacgccattggctgcgccgctcaaagttctcggctc

SEQ ID NO: 178123 - DNA, 122 bp, Homo sapiens
acatctcagccactggatctctacttttgttatctaaagaccttcctgaatcctttcctacgtctacccattcttcaaggctgttcagactttatttccttcctcctcaaagccttcctgga

SEQ ID NO: 178124 - DNA, 122 bp, Homo sapiens
tgaccgtccttgcgccggcacatcctgcagctgtgtgatgcgtggcctcttcctgtgtgccgggctctgtgctccacatttcagtaaaggatctccaaaaggtgaagatacttcttgtgact

SEQ ID NO: 178125 - DNA, 122 bp, Homo sapiens
ctccaggaactgccaatctatttaagatccctgaaatctaaaaactgtcctctgttctgacgttgttagcgaggggaatgggagccttagcttcgttttcctgaggaaactgagtgccggct

SEQ ID NO: 178126 - DNA, 122 bp, Homo sapiens
ccggcgacccgcccgacctgcccggccctcgccggctgctcctgcccccaggttcggcaccgacagtcagggcaagtcatggtgctgaagatgaacaagctccccagtaaccggggcaacac

SEQ ID NO: 178127 - DNA, 122 bp, Homo sapiens
ccggggagacgcgcctagcggccagggaccccccgcccgatcccccggccaactgtcagacggggccccagccctggagtttgacaagtgcctcgagaaaggggtctgcccatggggagggg

SEQ ID NO: 178128 - DNA, 122 bp, Homo sapiens
gtgagtttactctaacagattggcaaagccgcagagactggctgcggctggtgagtaaaccggacggtcatttatcaggagggtttgtcgcagctgtcagaattgtaagtggaggtgacctg

SEQ ID NO: 178129 - DNA, 122 bp, Homo sapiens
agcccgttccccaatacttctctgcccccaccttttggaatccttatctaggtctaaaaacggttctagatcctgacccctttgattgggggatgtagaatgggattcttttcaggggacat

SEQ ID NO: 178130 - DNA, 122 bp, Homo sapiens
ctctggagacctctgtaacagtcgtgcggagaagacaaagtcagctgcgtgcgtctcctccggcgccggctctgcaaggagggaggagggggcggggccccacaaccaccgcagcctcttag

SEQ ID NO: 178131 - DNA, 122 bp, Homo sapiens
tgacaataatttatatcattaaaaagttttaggccggttgcggtggctcacacctgtaatcgcagcactttgggaggccaaggtgggcagatcacctgaggtcaggagttcaagaccagcct

SEQ ID NO: 178132 - DNA, 122 bp, Homo sapiens
cccttgaactgggcggcaccaaatacgggggctggggcctcccttagaatggggtacgcacgccctgccgatgcacacagtcccgctggaactctctgcctggacccttatgaatgtcccta

SEQ ID NO: 178133 - DNA, 122 bp, Homo sapiens
tctccatgttgggtggatggagccattcgacagacgttaccgagtgcccgtgatgtgtcgcgcagtcactgtttccagcgctgaagacccaacagtgaaggagacgaggcaggatatgcgat

SEQ ID NO: 178134 - DNA, 122 bp, Homo sapiens
gtctgtaatgggtcctggtttcctgtaaacccgtgtgtgtcccgtgtctgtaatgggtcccggtttcctgtaacccgtgtatgtcccgtgtctgtaatgggtcccggtttcctgtaacccgt

SEQ ID NO: 178135 - DNA, 122 bp, Homo sapiens
ttgctgccatcctgctcctgcatggcacctgggacctgccggaaggctcagcttcctgaccgcagggcggggacgtggactgtgcccatggggcggccgaggaggacggaggggaacccgcc

SEQ ID NO: 178136 - DNA, 122 bp, Homo sapiens
tgaacacgtgaacgcatgcacatgtgaacacacacgcatgtgaacgcatgagcatgtgaacgcacacatgtggacgcacgagcacgtgtgcagtcttttgctctggcatctgcctctctctg

SEQ ID NO: 178137 - DNA, 122 bp, Homo sapiens
aagtcaccgcactgaaaatcagaggctgtgcctttcattaccagctctgcaaagggcctgcggcagggggtggggtggtggggtgttgtgggaggtcattgaacctgtatgcttctcagttc

SEQ ID NO: 178138 - DNA, 122 bp, Homo sapiens
gagcaagctgggggttggggttggcgctagcgcagcggctcgcctggtactgtgggagagcggcggctgctcctggaagttgtggtgtcgggagcccagccggtgccgccgcagccgccgcc

SEQ ID NO: 178139 - DNA, 122 bp, Homo sapiens
gagcgggctaactggtggcctctcccccaacgcccaccgcacgccccagtctgccagccgcggcccccttcccaagcaggcctgtccatacagcacagtacttggtgggctccgaagacccc

SEQ ID NO: 178140 - DNA, 122 bp, Homo sapiens
ttcttgcagggctgggacggaggtccccagtcccagctgcttaggggccaccacactcctcggccctcctctaaggccagcagcgcaggtgcggccctcctcgggttctaacctctcctgct

SEQ ID NO: 178141 - DNA, 122 bp, Homo sapiens
tactgagctgtactcagatagcatttggggaaagtacgtgagtcacacataaaaacagaccgttcttaatgcaatgggaagggtgttaactataaaaggaccctgtccagctggctcaggga

SEQ ID NO: 178142 - DNA, 122 bp, Homo sapiens
ctagcaatatgtattaaagtctgaagtgttgccatggaaacctcagtgtccagtgtactgcggtggaaaggggcttggagggtggagtggctcacaggggacacgacagagcaggggcagca

SEQ ID NO: 178143 - DNA, 122 bp, Homo sapiens
atactccaggtgctcggaagctgaagcctagagcctgctgggttcacccgagcctccacccgggggcccagggctggtcctcaagtttcctggcctggtgcctcctgagatggggagggtga

SEQ ID NO: 178144 - DNA, 122 bp, Homo sapiens
ccctgccacgtgggcctccacactgccagcacatctgtggcagggcaagctgaagccaaccgcccgctggccagcattgtgggactgaggaccaccacagggaagcaggggcactttgtaga

SEQ ID NO: 178145 - DNA, 122 bp, Homo sapiens
ccagtcccgtgctttgcgcccgcacttctcagccgttgggtggccgatgggattgggcgccgtggagcagggggcggcgctcgtcggggaggctcgggccgcgcaggagcccatggcgggga

SEQ ID NO: 178146 - DNA, 122 bp, Homo sapiens
gctacctcttaaccattccagatccaggcaagttacttattcttaggccttgcatttgcccgattccatcagacaggcctgagcacatgaaacaccagcctcccaagccacagacaccctct

SEQ ID NO: 178147 - DNA, 122 bp, Homo sapiens
ttcccgcgcccagaggcatggatcccaggccctgcattttcccagagaatggcgttggtccggagagggagagacaggagcctgcagtcacacagcagggtgggccaggtcccgtgcagccg

SEQ ID NO: 178148 - DNA, 122 bp, Homo sapiens
gcatcccgctccaggaactgcaccagatgatcctgactccgatcaaggcctacagctccccgagcaccacccccgaggctcgccgccgggagccccaggccccgcgtcagccctcactgatg

SEQ ID NO: 178149 - DNA, 122 bp, Homo sapiens
actcacagttccagaaacggcttctgcagcaccggcctcccgcggccagcccaagggtcacgcaaggccaggaggtgttccccggctgctcagcccacattctgcaaccctagatcgaggtg

SEQ ID NO: 178150 - DNA, 122 bp, Homo sapiens
tggagctctttctgtacctcaccgccatcctgcagagcttttcgctgcagccgctgggtgcgcccgaggacatcgacctgaccccactcagctcaggtcttggcaatttgccgcggcctttc

SEQ ID NO: 178151 - DNA, 122 bp, Homo sapiens
gtgctgctccacgaccttctccagctgctgccgctgctgaatctgtttccctccctgaaacgtagccctgtctctcagctggcttcctgatctgggaagggtggtgcctgtcccctgttcag

SEQ ID NO: 178152 - DNA, 122 bp, Homo sapiens
tcccgggggcgttcggtcgtcgcccgctggggcttatagtcttccgcgtcggtggcgcctcgcctgctgctcactgggaattagctcggcgccccgttgcattgtggtcttggtagtctttg

SEQ ID NO: 178153 - DNA, 122 bp, Homo sapiens
tttttgtttttgtttttgttttttgtttcttgttttttccccctagacatctcactctgtcgcccaggctggagtgcagtggtgtgatctcggctcactgcaaccaccacctctcgggttca

SEQ ID NO: 178154 - DNA, 122 bp, Homo sapiens
ggcttttgttgtaaacgtctagaagttcagttaaattacaagatctaccagatctaccggcgggcagaattattactttgaagttactgaagttatgcgtcctgctggaagaccttgtaatt

SEQ ID NO: 178155 - DNA, 122 bp, Homo sapiens
ggttttaacattgctaaaactccttcctgtcatcttccagcagtcagaggacttactcatcgaaacagctgaggttggcaaaagaatttgcacccattaggttggcaaagaatttgcaaagt

SEQ ID NO: 178156 - DNA, 122 bp, Homo sapiens
gttcgttcctcctggtgagttcgtggtctggtaggcttcagaagtgaagctgcggaccttcgcaatgagtgttacagctcacaacagcagtgcgggcccaaaaactgagctacctttattac

SEQ ID NO: 178157 - DNA, 122 bp, Homo sapiens
tgctactcctcctttacagatgaagacaacagagataggcaagtagagggccgtggaccccgtaagactccggatgccagctctgacccccacaatgggcatccttcatgggcccattggca

SEQ ID NO: 178158 - DNA, 122 bp, Homo sapiens
aagggactatggggagctatgcagaaagaaaaccacataggcaggaatgtcgaaagactgcgggctctgcctggaggaactgaagtccttgtggcccgaagtttctaagcagaggctgggct

SEQ ID NO: 178159 - DNA, 122 bp, Homo sapiens
gaacgctgtctgcttccctggaatccaagatgctgagtggaagtggaccctgggtgggcccggccctgtctttttcaggaaaattacatcctcccatggaggatgagagactgaggctcagg

SEQ ID NO: 178160 - DNA, 122 bp, Homo sapiens
agcctctttaggcccggcctctccaggaccaaaacatccttaagtcaacctcaccaggcccggctcctgtctccttgcggcctccagaggccgagcttttgcctgccaatggcctctctagc

SEQ ID NO: 178161 - DNA, 122 bp, Homo sapiens
ggagaatttatagaggaaccctaaagtggggtccattgttccgggggctggagctgtccccggtgctggaagactcagcagatggggggtggcggggaaagaggggagcccggcatctgggg

SEQ ID NO: 178162 - DNA, 122 bp, Homo sapiens
cgggagctggagagttctcggcgggcatgtggggatccagattccccgactccgtgtccgcgtggccgtggtgtggacacctgtctgtagaatgcctccacttggtattttaacgacttgac

SEQ ID NO: 178163 - DNA, 122 bp, Homo sapiens
gtatttaaggatcctgccagcttgagctctatgcagcctccactctctttagaagtgtgacgtttggtaattaggtggagccctcaaattagactgcacgtggggttttgctttcggcagtg

SEQ ID NO: 178164 - DNA, 122 bp, Homo sapiens
tgtctcctgctcccgttttctcggccgccccaggtacttttccagccacctctcctgctgcggcgcccccagccccgccacttctgcgcctcctcagctattgctgtcctttgactactcgg

SEQ ID NO: 178165 - DNA, 122 bp, Homo sapiens
ggcagtggctgcttgctgcttttaagccttttccagctgatttgagcccttcagcctggtcggcttaactcacatctctaaaagcttctactttaccacaggagttatctaagcatgcagat

SEQ ID NO: 178166 - DNA, 122 bp, Homo sapiens
atgtcactttacccgagaaattcactacgatgggccattggtttctgctcggctcgcaggcgcactgcacgagtggaggtgtggctagtggctgtgatgagataaatccatgcatagccttt

SEQ ID NO: 178167 - DNA, 122 bp, Homo sapiens
caaaacacccgcgcagtctggctaatgataggcgggccgtggggagggggaggggcggagcgcaaaacgccgggtttgaatcttggaattaaaaagagggcaggggctgggcgcggtggctc

SEQ ID NO: 178168 - DNA, 122 bp, Homo sapiens
tgctgggagttttctgcaaataccccccaaagcctgaaggcgggcttcaaacgcaggcgccggggaccatgggagccttcaaatagctgcgctggcgcaatgataccttaatgatagatttt

SEQ ID NO: 178169 - DNA, 122 bp, Homo sapiens
gtctcctcactgagacccctcgtgagcgcttcctccatattgttccagaaaacccatcttcggccgctacaaaccagacaccttggctgtagccgttgaaaacggaactggcaccgacagac

SEQ ID NO: 178170 - DNA, 122 bp, Homo sapiens
cggggctgatgagccatccagatacggagcttccgccgcactgtgtgaccgtgagcgagtcgccagccctctctgggctcgcctcccggctaccccggagtcagactgcctggaggataggc

SEQ ID NO: 178171 - DNA, 122 bp, Homo sapiens
gtcgcgtctccctcgcggtctcagcgccccctccctcccccgccgcagccctttgtttcccggcggagtagttcctgggttgccgagcgtctctgtctccgcatctctcctcgccccgcctc

SEQ ID NO: 178172 - DNA, 122 bp, Homo sapiens
ggtaatactggaattgcatggaattcctactgctgctccagtaacctgctgattttgtcacgtgtaccagattcgttgtctggcaatgagaacaatacacttcagaggtaatattgcaattt

SEQ ID NO: 178173 - DNA, 122 bp, Homo sapiens
gccaccagctcctagtctccctaacacatctgaattgtgaactgcacaggcagcatgacacgcagctgccaggatgtggtgaaatgcaagtgctgcccaacttccgccgcaacggaagccct

SEQ ID NO: 178174 - DNA, 122 bp, Homo sapiens
ccctctgccctgctgctaggctcagtactttccccacagggggaaacattggcaccttgccgaattctcagaaatggccaatctccttcttctttcacctttcctgttcacagtccctgatg

SEQ ID NO: 178175 - DNA, 122 bp, Homo sapiens
atgagccaagccgacatgcgggcggcgccggggagcagcgagcatttgcaagtgctaactcgttcctgctgtgtgcagacagcacccgcagacagaccaggcccgccccgccagcgtctagg

SEQ ID NO: 178176 - DNA, 122 bp, Homo sapiens
gcttcgtcactagaaaccgggtcatctgagtcagccgagccaagtgacgttaggccgacccgggccccgggctagcagagcggaggcgctgccacgaaactcgtacctgcggctaagagcag

SEQ ID NO: 178177 - DNA, 122 bp, Homo sapiens
gcccaacgagggcttagcgaacagacctttgctaatctgtttatttccttgaactggagtcgggctgcgatgggctgcgattcccaggacgatacatttaattagaacaaaacagaaaaaaa

SEQ ID NO: 178178 - DNA, 122 bp, Homo sapiens
tgagtggggctgtctgtccctcagtacttccaggggttttcctatgcagaatttttaaaacgcagcaccccttggtcccggcctcgacattatttctagggatggattgacagaagcgaatc

SEQ ID NO: 178179 - DNA, 122 bp, Homo sapiens
ggctgcccgggataaaagcagaacatctcggatcctattcaaatgtcaacactaagcaagcgcaggaatttagttgagtccaggtaactttgcccagtcccttcccgtcccccacctccagt

SEQ ID NO: 178180 - DNA, 122 bp, Homo sapiens
cccgcgcgcgcacgcaccctgcgcacacaccacacacacacacacgatcacacacacacccgcgcgctcgctcccacccggcagtcatccatcaatcgaaaagcacacatccagggccaggc

SEQ ID NO: 178181 - DNA, 122 bp, Homo sapiens
ccacgtgactgagccgggcatgttcttcgggcccctgtgtgagtgccatgagtgggtgtgcgagacctacgacgggagcacctgtgcaggtaagagggcggcgctgtctcctccctcgggag

SEQ ID NO: 178182 - DNA, 122 bp, Homo sapiens
acctgcctggtgcctcataggcatctgggctgtgacgcttaggattcctaaatagtctctcgctttttacacaaaaagcagaaacctgcccagtgtcatccggcaaacccacgacgggcaag

SEQ ID NO: 178183 - DNA, 122 bp, Homo sapiens
cattttccaatagaagggaatcattgataatgtgtggacaggacttggagctgccagcaccgcccatgggctctgggctcaggacccagcacaactccatgcacagcaaagtggctccaacc

SEQ ID NO: 178184 - DNA, 122 bp, Homo sapiens
aggaagagatgctctggggcctgaggttggggccagcttaggagagtcccagaggcccatcgaggagatgcgctgtgcacagggctgtgggcaaggcctgagctctgccggttggactctgt

SEQ ID NO: 178185 - DNA, 122 bp, Homo sapiens
gcacctgctctgggcggctaaagaactgatggcgcgacgcgcccgcgctccgtagagcggcgctgcgggtgcatggtcccatagtcttgctctggagttcactgctgaaagctgagctggga

SEQ ID NO: 178186 - DNA, 122 bp, Homo sapiens
gaggctaacgccgggtctggtccctggtgaccccaggctgctgtgagaacttgtgacccccgagatcagaacagccttcgggtcccagagcttcccgcatgatcgtgtgtggaacagaccgg

SEQ ID NO: 178187 - DNA, 122 bp, Homo sapiens
agtagagggttagggtagaaagtgccccgccctttatgcaaattaaggggcgtgtctaggcgcggagggaggtgggaggtgggagggggtgctcccgggggcggcggttgcccggatgggcc

SEQ ID NO: 178188 - DNA, 122 bp, Homo sapiens
aggaaccctcccagccgggacacggcactgcctctgggtgtgtggcccccgctctcctgccgtgcccacccggccccaacgggccctcaccccgaggtccccacacatcccaaggacccaag

SEQ ID NO: 178189 - DNA, 122 bp, Homo sapiens
tcccgcccagactccgcgtcttctgaaagagggcgtggtccgcaggaagttctcacgttacggaaagtaaagtgtttccggctccggtgtcatggccggctcctaccctgaaggtgcacctg

SEQ ID NO: 178190 - DNA, 122 bp, Homo sapiens
gcaccgaactacctcctttcgcctacaaaacgtaggtggggaccactggtgttggaatgacggcccacctcgagtttcaggtgacttccactctgcaattaacttgcaggcagccccagacc

SEQ ID NO: 178191 - DNA, 122 bp, Homo sapiens
cctcccctctgccaggaaccttggggccttgtgtgtgaccaggacctggtggcccccgggcggtggcagagcccctgtcccaagctgcttcctgccggcacctctgatcaagtgcctagagg

SEQ ID NO: 178192 - DNA, 122 bp, Homo sapiens
gaaggagtgggcgtgtcccccgggtcaccgccgaccgctcccaggggcgccaagcccacccggagccccacttaagcactcccctcgcggagcgcccctcccgcgtggcctccccgcgcccc

SEQ ID NO: 178193 - DNA, 122 bp, Homo sapiens
actgatctcactacctggcccagattctaaggcaacttcacaggctgcctcacaaatattcgttaaatgaatgagtcttatttcctttcactttgctgtaaaaaaaaagaatgcatcttgga

SEQ ID NO: 178194 - DNA, 122 bp, Homo sapiens
ctgcttagtgaggcgttctctcctctcctactagaaattgaggccggccacagtgactcacgcttataatcccagcactttgggaggccgaggcgggtggatcatgaggtcaagagatcgag

SEQ ID NO: 178195 - DNA, 122 bp, Homo sapiens
agaggtttgctcaactcctgcagacaggaagagctgccctgtcctacagccctctgcatgcgtgatgtccaggcatctcccacctgcatcatttcaccccctgacagcaagcaccttggggt

SEQ ID NO: 178196 - DNA, 122 bp, Homo sapiens
agaaaacgctgatgcggcacctccatcgagggatcacccctcttttgggctttcctggcgcgtgttgtatgatctggttacgtccttggaccctacagacacaaagggaagctggtttgaaa

SEQ ID NO: 178197 - DNA, 122 bp, Homo sapiens
tatctcgctttggagctgcagctaggtccagagtgggaaggaggctcgcgccggctttgccgctttccctgagggtgtccagttttgtgaataaaattagagaaatctgcgggcgtagttcc

SEQ ID NO: 178198 - DNA, 122 bp, Homo sapiens
taattctgccttgggttgggaacagcccgtgggatggtgatgtttctcagtcctgtgcctcgtgcattcagcactatgcttctcagcacagctgggtcagacacctccttttaggctgcata

SEQ ID NO: 178199 - DNA, 122 bp, Homo sapiens
tgagagcttcctcaaactcaaggatcactctgaatcctttgatagtccagtgccttttttcgggtctgggtcacttcccttgcagacgttccctttctctgtgggcagcggctgttccattt

SEQ ID NO: 178200 - DNA, 122 bp, Homo sapiens
gggaaacggcaaacacccaaatcagggcattggtttttggagggcccaagcctcggcatacgctgcccgtctctcccgcccctgaaaagagcgagtgtgggccgggggcggcctttttacgg

SEQ ID NO: 178201 - DNA, 122 bp, Homo sapiens
ggttctgggaggtcccacgttgggtgagggacacagggtcacagacactggccttgtgggcgctttgccccctctccccttggcctgagagcaagctggtcccatgcctgggggccgcaacc

SEQ ID NO: 178202 - DNA, 122 bp, Homo sapiens
ctaacaagtttcaatttcaggactactgtttgagctactgagaaagtaaaatctctttttcgttgtttgagctggaaaccttgtcactccaaggacagtcagtaaacacttttcaatgttaa

SEQ ID NO: 178203 - DNA, 122 bp, Homo sapiens
ctccagcctgggtgacagagcaagactctcagccaaaaaaaaaaaaaaaaagaagtgaagcggggaaaaaaacaacagaataaaccaaacaaataaggaaaaataggccacgtgtggtggct

SEQ ID NO: 178204 - DNA, 122 bp, Homo sapiens
tgcactgttcagaaaagcaccccctccttcccgcccctccccctcctcactggtagggcccgcacaaagtccacagggctgaggctggcttcttgaactgagctctttgtgaggagccttcc

SEQ ID NO: 178205 - DNA, 122 bp, Homo sapiens
gccttgtcttcattctctgcagagagaatgtttttaggggcttgggaaagtatttcaactcgaagaaaggacttatagttactagaatcttcacatctgctttctcgagtgaccttgagtca

SEQ ID NO: 178206 - DNA, 122 bp, Homo sapiens
gagcgggcgagctagctgcacattgcaaagaaggctcttaggagccaggcgactggggagcggcttcagcactgcagccacgacccgcctggttaggctgcacgcggagagaaccctctgtt

SEQ ID NO: 178207 - DNA, 122 bp, Homo sapiens
agatagacaatctcgatagctgtatttagggtaccatccctttaggtattacgttttggtcgagtttggaaaagatctgtatgatttcacacgcagtatttgacacaggcaggtggggcacc

SEQ ID NO: 178208 - DNA, 122 bp, Homo sapiens
gagagtatcgccttccgcaggctttcgctcctgcgacaaaatgctgtgagtaccggtgatcgtgggggcgggacctctttggtggggcggagcctggtgctgggcagggccttgggcgtggc

SEQ ID NO: 178209 - DNA, 122 bp, Homo sapiens
ggaaaaaagagaaaggagaagaaaccacatacaagggtttgaatgcctctagtggaagaacgtgaggcattgcagggccttaccactagatgatggatctgagtcatggcaccgaagtacat

SEQ ID NO: 178210 - DNA, 122 bp, Homo sapiens
cagtgtaccaccttagaggagccaggggcgcgtgggaaacacagagtcccttgttctctccgaagtgggaccctgactttaagcagtcgcagctgtttgcagttctagatacaggagttaca

SEQ ID NO: 178211 - DNA, 122 bp, Homo sapiens
tagaaaccctgccctgctgttgttgcccaaatgaaatctgattcaaattccagaaaaatccgatttaactaataagtctgaatcagcaagaatgccaagacagagaaatctattcacatggt

SEQ ID NO: 178212 - DNA, 122 bp, Homo sapiens
cctctgggattggctgtgcctgagcacatcttccctcagcgtttctgattggtcgctggacgcgcgggatgcgagtccccattggctaggccagggcgcctgcgcggcggggttctcggtcg

SEQ ID NO: 178213 - DNA, 122 bp, Homo sapiens
ctgtagcacgcggtcccatcaactggggctgaggagtgcgggcgcagggctgaggagtgccggtgcagggcacagggcgcgggactggcgggaagctccgcctgcggccccagtgtgggatc

SEQ ID NO: 178214 - DNA, 122 bp, Homo sapiens
gggatcctgctggaacctcagctgcaacatgagctccgcagccaggtcccgcctcacccgcgccacccgccaggagatgctgttcttggcgttgctgctcctgccagttgtggtcgccttcg

SEQ ID NO: 178215 - DNA, 122 bp, Homo sapiens
tggaggctgggttggtgatctttctgactgtgagtgctcaccgtcctgggtgggtgagtccgtggctacttggaggctgggttggtgatctttcatagcctttctcagaacaagctcagaca

SEQ ID NO: 178216 - DNA, 122 bp, Homo sapiens
ttggcacctgaaacacttctgctgctttgactgtgatagcattctagctggggagatatacgtgatggtcaatgacaagcccgtgtgcaagccctgctatgtgaagaatcacgctgtggtga

SEQ ID NO: 178217 - DNA, 122 bp, Homo sapiens
cggagatcctgtggttccctggggcccgggctccctgcgggtgggagcggttaccttgcccgtttgggtggcggccgccaggcacgggtgagtcccgtcgtagcgccctatggccaccattc

SEQ ID NO: 178218 - DNA, 122 bp, Homo sapiens
acacggtcaggcaggcggggctctgccttgccgctgggctcccagcgccggccctgccagcggtagcgagccccatccaccggaatcacatccagaagaaacaagtagcgggcctcggggtc

SEQ ID NO: 178219 - DNA, 122 bp, Homo sapiens
gattcatgatggtcaacaagctgggaaaaaatgggcaggtatctaggctctgctgggtcccgagggcagcgagctgtggatgcctccacaatgtttcctgaatgaatgcctagaaaaacaca

SEQ ID NO: 178220 - DNA, 122 bp, Homo sapiens
ttcacttaagagcaggtgtaccttcctcccctgcgtggctccacgaagctgggaaagaaacgcacaggacgaccaccctagaaccccgggcctgtctggactgaaatcgcctctcccctccc

SEQ ID NO: 178221 - DNA, 122 bp, Homo sapiens
tttgtagcttacacagtaccaaacctgagagagcactgcaaagtcaggtcaggaaggtttcgccaaggcttggaaataagaacagggtatgagtcttataccacctaactgggccttccagt

SEQ ID NO: 178222 - DNA, 122 bp, Homo sapiens
ccagcccaaaatgtcgtcctgtgctctttacatacgtgagtctatccacacacgcacacgcgtcccagctctgaccactgacgggctggaagcaataacaccctgatgacagtcggcacatg

SEQ ID NO: 178223 - DNA, 122 bp, Homo sapiens
cagcctgtagggaaactgaggccagggttccttcgtcctgcaccgcacaggggggcctggcgtgagggtggggggcccaggtgggggagccccgcccgtgtcccctttcccgtccgggcagc

SEQ ID NO: 178224 - DNA, 122 bp, Homo sapiens
gcgaagtctgggacgaggacaagagctgcccttggcatcactgcctgtcacctgtcccttcggggcgccccctgcctccactgcttggcctctgtttgtagcttgtgttttggccttgccag

SEQ ID NO: 178225 - DNA, 122 bp, Homo sapiens
tccctcagaaataaacagaaacgcaaagacaacttcccgagggcccgggccgtcgtgtgccgttacctcagccccaggtggttcccaggctcggccaggctatgtctcacacactgactagg

SEQ ID NO: 178226 - DNA, 122 bp, Homo sapiens
gggcctcacaaatggccggccggagatgggggctgggtggaaggagccactgggcctgctcgggaggttcctccattgccctgcgcagcctgagccagacagagcgcaaatcccacggaggg

SEQ ID NO: 178227 - DNA, 122 bp, Homo sapiens
gcgttatttccagaatccttctgatagggcagcgcttctggttctggttttccatggagacggtttgtgggtccctatgaaactgagtgttgggattttgattatctgcatctggcccttgt

SEQ ID NO: 178228 - DNA, 122 bp, Homo sapiens
gcccccctggcctggccgaggaccccggggtttggacgtgccaacgccactctcgcgcgccgaagctgtgacggtttactaagcagagacttgcgaggcacacagagagggaatgaggcgga

SEQ ID NO: 178229 - DNA, 122 bp, Homo sapiens
aaagaaaattagcttactttttaactggccagggaagaactttagccaatgaaagctgcccgggcacctgtatgagagtcactgtaggggagggcgatggaggtgcatcgtgggggtacatt

SEQ ID NO: 178230 - DNA, 122 bp, Homo sapiens
aatctgagggaggtggggtagaggaaacagcaccagtggacagactagacaactccagcacgcctgaagcatggtgtgtctgttctgttttaacctcccacagcttgccatgatagatgcga

SEQ ID NO: 178231 - DNA, 122 bp, Homo sapiens
aactaatcagtaaaatttgtcatcataaatgccatgagagtaagaattaaaatgagaaggcggctcctgttgaaggtccacctgttgtccgcctggcttttctgtgcccttctataaggtat

SEQ ID NO: 178232 - DNA, 122 bp, Homo sapiens
gccggagatgggccgagcgctgccccccgggggtcctcggcgccggacgcagcttacgagcgcaacgcagcaggctccattcccggccgccgccgctcagcccattacgcaaacctggcggg

SEQ ID NO: 178233 - DNA, 122 bp, Homo sapiens
tggcgccgcccgcctgctgcctcctggcggctcctgaactccagccccctctctatcagccgctcactccgtctcaatatgtctcaagatggcggccaatgtgggatcgatgtttcaatatt

SEQ ID NO: 178234 - DNA, 122 bp, Homo sapiens
ctgggaagcagagcttgcagtgagctgagatcatgctgctgcactgcactttagcctgggcgacgagcaaaactccttccccaccacaaaaaaaaaaaaaaaaaaaaaaaaaaagaagagaa

SEQ ID NO: 178235 - DNA, 122 bp, Homo sapiens
gagcgagcaggaaggcgcccagcgtcccacacaggggactcgcagccctgcccccaagagcgctggctccgcagcagcagtgccctgcagctccgcgtctgagcagcagcagcgcgcggccc

SEQ ID NO: 178236 - DNA, 122 bp, Homo sapiens
ctctccggccaggctgcggggacagggccgacggaaggtcccccgtggaggccaaggccgcgtctccccaggcagaggccccagcctgccggcctcctcccggctgcacatctggccgggcc

SEQ ID NO: 178237 - DNA, 122 bp, Homo sapiens
cactccccgccgtttgttgctgcctcagcttctgttttccccacgtctttgccgtcctgtcgtctcactccccgccgtctgtccccaccgttcattccagcctcggtttctgttttccccag

SEQ ID NO: 178238 - DNA, 122 bp, Homo sapiens
ccaaccggcgctgctgaaagttggagagctcccagctcgccgatagaattcggcggtgggcgccaggggaatcccttccagtgccgcaattaggaaagttttaaaaagtaaggaccctagac

SEQ ID NO: 178239 - DNA, 122 bp, Homo sapiens
tggatggagcaggaggttgtccagggactgtcacatgctcgctcctcaccatgggcaggacggtggcagcaggggggtccacgggcccgtccttttttttagggggcagaacaaggggagtg

SEQ ID NO: 178240 - DNA, 122 bp, Homo sapiens
caggctcccctgcacccctactcacactgcacggtcaggtacgccgaggcggagggggagcgccccaggctgttgctgggcacacaggtgtacttccccgagtcctccggcttcacccggaa

SEQ ID NO: 178241 - DNA, 122 bp, Homo sapiens
ctctgcagggctcagggttcttgcaaggcccagctcacgtgtggccacctcattgctgcccgggtagggctctctgcgtgatgtcacgtggccttcgtggtgaggggcagatgagaactgta

SEQ ID NO: 178242 - DNA, 122 bp, Homo sapiens
gctgatcgaagcgcttggggccgtcagggggcgcgggcgtccctggtggggccagttgtacgctgcggcggtcggcggagatgagcaggcggcggtgtgcggtcccagggtccagggtcagg

SEQ ID NO: 178243 - DNA, 122 bp, Homo sapiens
ataggcctcaatttcctcactgtcaaatgagaacagaagtacccagacctcgcaggcacgcggaggattcagtggaattgtgttaatgtggatcttggcattgagtaaagtgctacctcaag

SEQ ID NO: 178244 - DNA, 122 bp, Homo sapiens
tgaggcatttgcaagggccgtttaatacaccgcgtggaaaccgtgttcagtgtctactcacgcagaggcctgccttctgacacacacatcaatcaagctcagaatcgtgccgttcaaccata

SEQ ID NO: 178245 - DNA, 122 bp, Homo sapiens
cgacagggccgtgccggagcagaggggcacaggacgccgatggcgacagcctctcctgtccgtcccagcccagacacttcttgccgctgcgcgcagcccctgcgaggcagcctctgacatgc

SEQ ID NO: 178246 - DNA, 122 bp, Homo sapiens
cccggccacgcccgtcgctgagcgtgaggcgatggcggccgagctcagaacactggtccccggaatggagagctgaggggacagatctaagggacatttataactccgcagggactccgggg

SEQ ID NO: 178247 - DNA, 122 bp, Homo sapiens
gggaaaagcacgtcagcctcccagctcgaagggcccgtgtcagaaacacatggcggggcacggtgagtggaagataatgtctcaggaagcatcaagatgtgaacacctgaccctgacctcta

SEQ ID NO: 178248 - DNA, 122 bp, Homo sapiens
cgtgtctgtgcggttggccttcctttgtgacagggcagcaagctggggcctgatgccacccgccgcccagggttccgtgagggggaggcggctcgtgttggggcaccatgtaaactgttgag

SEQ ID NO: 178249 - DNA, 122 bp, Homo sapiens
tggggtttcaggctgcgttgccaagcgttgggaaatgaaggcacacagaggccgacggagcgtcttggggccaccctgagctcctggcagcagagcaaggctggagctcggcacccaggcaa

SEQ ID NO: 178250 - DNA, 122 bp, Homo sapiens
cgaacgcctggcctcaagtgatcctcctgcctcgtcctcccaaagtgctaagattacaggcgtgagccagcacacccagcctggaaattcttttacagtctaagaaacataatttggataaa

SEQ ID NO: 178251 - DNA, 122 bp, Homo sapiens
ggcgcaccccagggccagcacataatgggccgcgtaggccgggcaggcgtccagctgggacgccgccgcaccacgtgggctgcagagcgcacggggcaggcagctgccggtgggcccagggc

SEQ ID NO: 178252 - DNA, 122 bp, Homo sapiens
aagatggtgattaattcaatctccagtgcaaataaaaacgccaagcccctgaacttgcaccggcccggaacgcggccgttccacagcccgcgggtgaagtgcggcccggaagccgcgggcgg

SEQ ID NO: 178253 - DNA, 122 bp, Homo sapiens
tcccattttgtttttgcaccaaggagactgcagtcaaataaaacagatactatacacactcgtcggggcagccgtactgcagaagcacgttgatgcactcctggctggaggcctgccgggcg

SEQ ID NO: 178254 - DNA, 122 bp, Homo sapiens
tctctgcgccggcggggtcgggttactgccggctgcaaccgtgaaaggagccccatctgccgccgccagcgtctctccatggggtctgcgaacagggcgcacgcaccccagatgctacctac

SEQ ID NO: 178255 - DNA, 122 bp, Homo sapiens
aaaagttggtgggagcagcacggctgagcagggtgtgggggtggctctgcaggatggaaacgcgtgccaaggtggaggctgccaagaccctcgccccctgcactccttcccccacccctcca

SEQ ID NO: 178256 - DNA, 122 bp, Homo sapiens
tcgagggaataattaaggcaacatagtgatatcttggtaaattgtcatttgtctacacagcgcctttcagcacacacgaatgattcttcttcattttcttttaagaagcaagtattaaaagt

SEQ ID NO: 178257 - DNA, 122 bp, Homo sapiens
cgtggcgctgcgttaggggctcaagggcagaaaggacgacccggaggactgccgagccggcggcttacccataaccgagcagttgacatcgcgctgggaaccgctggagcccacctggaaga

SEQ ID NO: 178258 - DNA, 122 bp, Homo sapiens
tgtgtggggatcaccccaactttgaggggtagctcaggcatctccacatgggacacagtccgccctctaaaagtactttccttagagggcacggctcctgtctggattcttattacaaccct

SEQ ID NO: 178259 - DNA, 122 bp, Homo sapiens
cggccaaccccccacacttctggaatgcacacaagccttatatgaaatccacatggtgggcggccgaggaaggcagcggcacgaaaggacttcaacaagttgacagcgaccccaggcccggc

SEQ ID NO: 178260 - DNA, 122 bp, Homo sapiens
gttttgagcctccagccttgaggcaagtcccctctcactcagtgcggaggaactgagccccgggaggaggtgctcctgtgcagccccactgagtcagctcatctatcgcctgccctccacct

SEQ ID NO: 178261 - DNA, 122 bp, Homo sapiens
gtagcaatttacagaaatacattcagattaacttaggccaaaaaaaaaaaaaaaaaaaagcgggggagaattctctggaaggcagccaaggcctcccctacaggccaagggtagaaaggaga

SEQ ID NO: 178262 - DNA, 122 bp, Homo sapiens
tttctcgccctttagaacatgcgggcggaatgtggggcggccctgtggtctgatgtctcccggagccttctgggagtctcaggactcattaaaaggctccccttaggggcccacctgtcctc

SEQ ID NO: 178263 - DNA, 122 bp, Homo sapiens
ggtccagcaccttctgggtggacttcttcacatccccgtggctccttcgggagaacatcccgcggcaggaagcccgggccccgccggcggggcagtaggcgcctgcgccacgcgaatcaaag

SEQ ID NO: 178264 - DNA, 122 bp, Homo sapiens
acatccagggagcagagcctgctggaactggactctagggtgcccctggggtctgtgctgcgtctggctccatgcacaggacacaggccttgaaataatcaaggatggagaggaagaagggg

SEQ ID NO: 178265 - DNA, 122 bp, Homo sapiens
ggacggaaactccgaggcaactcctcacttgtcggaggtcctgcgtatgcgacccatttccgcacatgcgcggtccatgccgcagtgctccctagacgcctaggtagctgcgcggcccgtcc

SEQ ID NO: 178266 - DNA, 122 bp, Homo sapiens
cgaacttctgacctcaggtgatccgcccacctcggcctcccaaagtgctggaattacaggcgtgagccaccgtacgtggccatgttaccctaactcttatgttcctgtttccctaacataat

SEQ ID NO: 178267 - DNA, 122 bp, Homo sapiens
gctttcctcgcctgactggccgcctccatctctctttctgtgggctgagcactttccctgcgcctccttcaatgcgcaccctgcccccaacccccacctcgaggagagccccaggaggaggg

SEQ ID NO: 178268 - DNA, 122 bp, Homo sapiens
tacaggcatgagacaatgtgcctggcccacaagtatcactttatcaaacatgatcatttccggataatgaataatatccagtatttggagaaaaaagttctcagtttttttttaaatttatt

SEQ ID NO: 178269 - DNA, 122 bp, Homo sapiens
atgaaatccaagcatcgtttcccttccccgatggtcgcctccctggggtgagacgttcgacgtgtcagacttcaccaagagcatctcccgcctcggtgcagtaatggacttggaaacgattt

SEQ ID NO: 178270 - DNA, 122 bp, Homo sapiens
ggactgcgcggagccgccagccagccctgagggtgggcacccaggtcccgagtcagtcaacggcccagagccaggccgaccactcctgacctctcgtccctgcgccccgactctggccccat

SEQ ID NO: 178271 - DNA, 122 bp, Homo sapiens
ggtaggaaattattattttttctcatcaagttatacaaaatgacactgaacgaaaaaatgcgattcaaggacctgctgtactgtactttttgctctgccagtcaggtgcgatcgctggcttt

SEQ ID NO: 178272 - DNA, 122 bp, Homo sapiens
gctgagcagaggtccacaaggttaatttaagttacacgcattcaaacaaaattcttgctccgggacaaacctttctgccctggggaagcccactcagtgatgaaggaaatgggacattccac

SEQ ID NO: 178273 - DNA, 122 bp, Homo sapiens
atcctactcccggttgagagcgcaagggtttgtgtcaacaccagtgcagtctttgctctgcgagccagaggcggggcggccggcgactaaccgcctttcacggttcttgcgggagctgccaa

SEQ ID NO: 178274 - DNA, 122 bp, Homo sapiens
ccaatcagacacctcaaggctggcgcctgatccaatctcctcccctggagggtgggaacgcgaagttcctacctgcacctgtggcagcggtgaccgcctcctgggttattttcttttctccc

SEQ ID NO: 178275 - DNA, 122 bp, Homo sapiens
caagtttcccggccccacggggtttggtttttagggggtcccaagttcccacagtcgttccgacaaaatggaggacgtcgtctcctcctgctgcagccatggcgggaggtgggggactattc

SEQ ID NO: 178276 - DNA, 122 bp, Homo sapiens
ctgtgcaaggggttattgtgcccaggtgcacaggccggagctctggggtcactcaccctccgcgttacctgtcgttacctgtcgttacctgtcgttacctgttgtctggaccataaaatgca

SEQ ID NO: 178277 - DNA, 122 bp, Homo sapiens
tttacaagctatagtttctcatgcctccacactgaatggttacatcctgttgagcctgttcgtaaagttcagtaaaaatccagttctcattccagaacagctgaatcgtagctatgaacgcg

SEQ ID NO: 178278 - DNA, 122 bp, Homo sapiens
caaggcccctgcctggggtgaggcgggggtggtgggtgaagcagagttgggggactaggccgggggtcactgcctccctggaaatctctttgcctagcactgctgggggtctgcggggaaca

SEQ ID NO: 178279 - DNA, 122 bp, Homo sapiens
tggaccacacgctgtcctcgccgaggtcctggtttgttcctcaacgtcggctgaaggcatcgtcccctgacttcctcttccattcgtccttccgaaaggggacccgactggttcctcttcta

SEQ ID NO: 178280 - DNA, 122 bp, Homo sapiens
gcagtgagttggcccaaagcataactgaccctggccgtgatccagagacctgccccctgacgtcagtggcgagcctccctgggtgcagctgaggggcagggctattcttttccacagtattt

SEQ ID NO: 178281 - DNA, 122 bp, Homo sapiens
gaaagtcctgactgtgagttttccaggttcttggagtgttgaacaaagaattgaacaaaacgcacaaacaaagcaacaaaagaacgaagcaacaaaagcacagatttattgaagtgaaagta

SEQ ID NO: 178282 - DNA, 122 bp, Homo sapiens
gtccacagctttaggcatcacttccaggtcatcagctgcgcgagaagccgccgtacaacacggccaatcaggaaaggaagtctccgactcagcccaatcgttgacgcccagcttcgtaacta

SEQ ID NO: 178283 - DNA, 122 bp, Homo sapiens
gagacggcgtagactagggggtctccaggggagggagacccggagagggaaggcggcgggcgcagcagccctggagccaccccgcctggagccacccgtcccggctcctctccgctccgggg

SEQ ID NO: 178284 - DNA, 122 bp, Homo sapiens
acttttgcttcctacataacccctccctattaactcgctttttgctgctgtctaggtcaccgtgcctgggaaagaatggacagggaaaacgctaacggggctcctttatttattaaattact

SEQ ID NO: 178285 - DNA, 122 bp, Homo sapiens
ttacccacctgacgttggaggaagccaggcccagagacgagccttggatggaggcagagccgaggtctggatcccgattcgctttctgaaggagacaaataaagggtgtataggtggcttca

SEQ ID NO: 178286 - DNA, 122 bp, Homo sapiens
tatttgttctcagggcatggcttattgccagatcatagacaatccatcacattttccaggcgctgcccagaggcagcactgaagcttcaattaaaaaatcaagagatcacctctatcactac

SEQ ID NO: 178287 - DNA, 122 bp, Homo sapiens
agctcatgaagccgagcatccaaaagcaaaactcaacatcaaacatgtctcgaactatgacgtgtactttccaatttaccctcggagtgggaatacttctgtcatctgtatagcatttaaag

SEQ ID NO: 178288 - DNA, 122 bp, Homo sapiens
aacccacttctccagcctgacgctccagtcgcctctcggactcttcctggctgggagcagcgaagagagggctagaggcctggaacagacccagcaaagtgcaaaacattgcgggcagggtg

SEQ ID NO: 178289 - DNA, 122 bp, Homo sapiens
aatgaaagtgagctaaatgaaagttagctaaatgaaaaaacagctcacacagctcctttccgttcaccgaatgaactgtgttctaggtatagggcctctttacggacctttgtttttcccaa

SEQ ID NO: 178290 - DNA, 122 bp, Homo sapiens
agccagagaagaaacagcaaccggcgcgcgccaaaagtatcgtcacttcctgtattggcgcgtaatgatgatataatagccgacctccggcccagaactcgagacaaggacaggggctcgct

SEQ ID NO: 178291 - DNA, 122 bp, Homo sapiens
agcggcagcagcggcaacaagtgccggaggctagcagagccaagccggagcagtccctgccgccgacaccgccgggccgcccgtccggggcgccgcgcatggagcgtgagctgcggcggtcg

SEQ ID NO: 178292 - DNA, 122 bp, Homo sapiens
gaggctgggacaactgagcccgagttggggctggaaggtggatgtctcttttggggcagacggggcccctgtctcccctctccagcccaggtaacctgagcccagcattgtgtccatcctgg

SEQ ID NO: 178293 - DNA, 122 bp, Homo sapiens
ggagccggaaccggagcgggcaggacctgaggcttccctcgccggggcaacggctgccgccgcaacccgggtcccaccagcgccgctccacctgcaacggtccctcaggctttaggagaggg

SEQ ID NO: 178294 - DNA, 122 bp, Homo sapiens
actgctccagctgggattgcagcagcagcagcttcttggcagtgagacctggggtaccctcgccttcaggccggcccatccgctcccgcagccctgcattctcttgcgccaggctctgcttc

SEQ ID NO: 178295 - DNA, 122 bp, Homo sapiens
cacccagttctttcacttccactggcgtcctgcagggacagctcagggaccatgcaggcccgggtgggcgtggaggctcacctagctcggtggtgaacagctggcacgtctctgggttgcgg

SEQ ID NO: 178296 - DNA, 122 bp, Homo sapiens
taaaatagtattatgaattatgactgcaaagtcttcttcaaactgtgctcatggactgcccggcatgacattaatcaatcagctgcagtgatgcactgttggccccgagatccccttaccca

SEQ ID NO: 178297 - DNA, 122 bp, Homo sapiens
tagcagtgcaggggccccagtttgcacggtagcgtgtgcaggggccccagtttgcgcggccgttcccctgttgatagcttggttgtttccactgtttggtgactgtgaccgtaagatgacga

SEQ ID NO: 178298 - DNA, 122 bp, Homo sapiens
ctaagggaagaagtttatggttgatttcccctgccaaaggagactcggtcgcaaggcccccgggtgattaaagggctgggagaagtccccaaaggcctctccgggaggggtgatggattctt

SEQ ID NO: 178299 - DNA, 122 bp, Homo sapiens
gaaggggagcggagactgggcgctggggtgggggcgggggcgccgagcctcaacttcccgcgtctgctggaagcttgctctgagcgccggctgcggcgttttcccgccttctgcccacgttt

SEQ ID NO: 178300 - DNA, 122 bp, Homo sapiens
tattttaagtgctctctcccaaagaatccaaagatgtttctcctatattctgtaaaatggcgtgcttgcttagttttcccattgagggttggagaacttgcgtacattatcggctaggttta

SEQ ID NO: 178301 - DNA, 122 bp, Homo sapiens
aaagaaaaaggccatgctcagcagtgttctttcttcctggtcataggccggctgttcggacggaagcatcaggctgcaccagctgagctccgcgtttccgctcctgcagtgggacagcagca

SEQ ID NO: 178302 - DNA, 122 bp, Homo sapiens
caagccttttgttctctgacctggggttcttggcctcagggattccaaggaatggaacctcggccatgcagtcaatgttttagctctattagaagccgttggtcacggaggagaaccgcgga

SEQ ID NO: 178303 - DNA, 122 bp, Homo sapiens
agaccctttggatctgcgctttttagaagtactgtacttcacattctggcaccgtaagcccgaaatgtcctttaggcaaatgttaggagggaaaaatgtattcttgcaattcaaaaccgact

SEQ ID NO: 178304 - DNA, 122 bp, Homo sapiens
agcccctctccagctggttaaattcagaggtttcaacatcccagcctcctgtgtcccagccggcatctcatgggccctgtgccaccagcaagtcccagctgcaggcccaggatttccctctt

SEQ ID NO: 178305 - DNA, 122 bp, Homo sapiens
ctactatgtcacccaggctggagtgcagtggctatttacaggcgtgaggccactactgatcggcacaggagtttcgacctgctccatttctgacctgggccagttcaccaccccttagacag

SEQ ID NO: 178306 - DNA, 122 bp, Homo sapiens
aggaaatgctggggaggtgggggcagatcacatcaacatcctggcattgggctgggtcggcgtggagccccagaaatgttcccaagcccattcttaccaagaaccaatgagtaaaatcaggg

SEQ ID NO: 178307 - DNA, 122 bp, Homo sapiens
cggcgatcccaggtccggggaaactccgcgagcgacgcgctcgcccgcggccttccttgtcgctctcggatgttcccgattaatgggctccaagtgaccactgccaggtcggggaacacagc

SEQ ID NO: 178308 - DNA, 122 bp, Homo sapiens
atgtctcatgtttctctgaaacttataaaactaagctgtgccctgaacactttgggcacacgtcttaagggcttcctgaggctgtgtcatgggcatgcatcctcaaccttggcaaaataaac

SEQ ID NO: 178309 - DNA, 122 bp, Homo sapiens
tgacaccacatggaatgctgggagcctccccctcttgcggaaaactcccacaagcaaaaacggggccgcagtgtggcgtgggcgggccacaggaactcatggggacgttgagacaggcagag

SEQ ID NO: 178310 - DNA, 122 bp, Homo sapiens
ctgccgccccgccatggctgggtctctgggggcgcagccagggaccacagtgcagctggccgcaggtggcgcggaggctgctgtgactcagaatagaaggtgtcctgaaggcttctcccaaa

SEQ ID NO: 178311 - DNA, 122 bp, Homo sapiens
ccgctgctccctgtgcggggccggctgtcccagcctggcctccatgcaggcgcacatgcgcggtcactcgcccagccaactcccgcccggatggaccatccgctccaccttcctctactcct

SEQ ID NO: 178312 - DNA, 122 bp, Homo sapiens
gcagccggtcaggggcgggagttcgcggcagcaaacctgcttccccctcccacgcgccaccgcccccgccccgcccccgtccagaggccccgcccctagccgggcctggccccgcctctctc

SEQ ID NO: 178313 - DNA, 122 bp, Homo sapiens
tcccaggaacctctcccgctgggctagcgggtgagaccgggcggtccatctggagaacatcgctccactgaggagtgccaacgggtccctcccagaagcggtcaagcagataggccgggagc

SEQ ID NO: 178314 - DNA, 122 bp, Homo sapiens
agaagtgaatcaccaaacgtgcccacggctaaaactctcgtgcggtgcgctcggggaaggcgggttaaccctttagaaacagggtcgacctgtcgtgtttgttctttagaaagtgacacttc

SEQ ID NO: 178315 - DNA, 122 bp, Homo sapiens
agaggccagactcacaggggttctggggtcactggctgggaagggaacaacagtacttaccggagaccaccatggcctcatttgggccacaagtgaaaaacatggttcaggctggagctgga

SEQ ID NO: 178316 - DNA, 122 bp, Homo sapiens
cggagcgggctcggcctgtgggcgtggccagcaggtgcgggccagtgggcgtggcgggcgcgagaggggcagtgaggggccggggtcagggaggggcgagtccgccggcggggtcgggagac

SEQ ID NO: 178317 - DNA, 122 bp, Homo sapiens
agagcactgcagccctcatgtttttgggatctagctcactctcccccaaagaagggcttgcgaaagtcacaccaccaattagggaagtcagaacatgaatctgtcctcctgaagcccagtca

SEQ ID NO: 178318 - DNA, 122 bp, Homo sapiens
ccaacctcaccaccccgcaaaaaaacctgtgtccaaaacacttggcagtggggcttaaaacgctcaggtgccccgaggaggcgccgggagatgagcccagagcggtggctggcgaaggcccc

SEQ ID NO: 178319 - DNA, 122 bp, Homo sapiens
cgtctgcttcttagctgtaagtgatggtactcaatcaatagagtggagaccagaaccctgcgccttttgcagcctccgatttgcaattggccccctggccctcactctttatgcactcttaa

SEQ ID NO: 178320 - DNA, 122 bp, Homo sapiens
gtattctgccccagatgccctggcatgttggctgtagttatccccggataatgccagatgcgctcctgcgatcgcacagaatgttccttcacaacagcacgaatttgtttatcgcctttacc

SEQ ID NO: 178321 - DNA, 122 bp, Homo sapiens
acagctcagaaaccctgaccagacctggcggacaagaaccgtgtgggcgggggacaggaacgcccacccagaggccgggagagcatggtccaggactggcagccactaacagcctctgaatg

SEQ ID NO: 178322 - DNA, 122 bp, Homo sapiens
gttccctgcattcctcctgccagcacagccccgacggccctttgaatgctgcgccaggcccggctctgccccgcccctgccggggctcaccaccgcccacctatgactgcagtgtccttatc

SEQ ID NO: 178323 - DNA, 122 bp, Homo sapiens
ctccttgcatcaggtaggggctttgcagagaccatcgacgggctgacttgagtaagaacacgaattatgcatgtggccatttccagagcactttctatgtgatatgaacatgtgatttttat

SEQ ID NO: 178324 - DNA, 122 bp, Homo sapiens
tttcccaggccggcgcgctgcttgctgggaaatttagtttgggttcagatcgctaggggccggccaaagtgcgtaaaaactaccttcccatcaaccactgtggcaccggcgggagggggcgg

SEQ ID NO: 178325 - DNA, 122 bp, Homo sapiens
ggataatatctggaatataggttacagaatgcctttcaaatgtctgagatacacacattccggagtaccgtgaaaactaaacaaacaagaaagcaacacttaaacgcccgacatttcccaga

SEQ ID NO: 178326 - DNA, 122 bp, Homo sapiens
aacccagaagccatcttgggatgggaggaatcaatcgcgatggctccagaggttgctcctcgcgggactacccgcaaccccgcccgaccgcgcttgttcccgtgaaaccccgagcattgggc

SEQ ID NO: 178327 - DNA, 122 bp, Homo sapiens
agaaaataatgttctttccagcggctgcttgaacccgcttccttcagtgcctaaatttaacggctgcagctgcagctgcaacctgtttcccccgtaataggaatgaaagtggaggataaaag

SEQ ID NO: 178328 - DNA, 122 bp, Homo sapiens
atcgtttctgaagtcataccctttagggtgaactcacaacaatgcatgtcagagaggctgcgcgccctaaagcaaaacagttaaaacatcaggccacgctcctcaaactgcaggattgcaag

SEQ ID NO: 178329 - DNA, 122 bp, Homo sapiens
agccagtgtggtggcatgtgtctggtgtcccagctacttgggaggctgaggtgggaggatcgcttgagcacaggatgtccaggctgctgtgagctgtgatcatgccactgcactccagcctg

SEQ ID NO: 178330 - DNA, 122 bp, Homo sapiens
gacaaggtgtgctgaagtctgtgttcacgggcacggcattcaggcgcagagcgtgggatgcgggagaaaaacctgctgccgttgctaatggccccagtgttcttccctcgcaggcagaaatt

SEQ ID NO: 178331 - DNA, 122 bp, Homo sapiens
tccagtctcccggaaagcggtcgggcaacgatgacgacaatgacgcgccggctctgcccccgccacgagcggcgcttcccgatgatctcacgctgctcgccacgccccctgctccttaactc

SEQ ID NO: 178332 - DNA, 122 bp, Homo sapiens
gtggacaaggctgaggccttctctggccggggaaaaatcgccatggtcgacccattcttccggggatatggtgagagcctcagaggcactgggagggggcgggtggggggtgcatcagggaa

SEQ ID NO: 178333 - DNA, 122 bp, Homo sapiens
tgccccctgcaggtgcaagtgcaacgctccgcgcctttgcctgccctgctggccaggacgcggccacctggttctctgccttgctgcagccacagtgatccttctgacgcgaacttcggacc

SEQ ID NO: 178334 - DNA, 122 bp, Homo sapiens
cgagcctgcgcgcaccgctcgccgagccaggttccctcggcaaggggcgctcgatacgggcggggatccccagaggccgcggccttccttggctgccagacagacagcgttcccaaggagga

SEQ ID NO: 178335 - DNA, 122 bp, Homo sapiens
ggactttctaggtaggcggggcccgggtctgggcggagcctgggcgcggaacgggtctggcgctcccgggtgggcggggtcagcgcaggagagggaggcgggacctcgcgccacgcggcgag

SEQ ID NO: 178336 - DNA, 122 bp, Homo sapiens
gccaggcggtctggacaccatcggggctgagaacacagagtcctggagcagaggatgacacgtgggccctgttggctggaggggccgcccctgggttgctccttacgccccctctgctctct

SEQ ID NO: 178337 - DNA, 122 bp, Homo sapiens
gcctctccgcgccttctccatggccctgctcctgaggaaggcccttggccacggggattccgtcccagactccggaggccatcggggaccatgaaatcacgctgacctcgggaggccggaga

SEQ ID NO: 178338 - DNA, 122 bp, Homo sapiens
gtgcactcctcagcccttgggcggtcgatgggactggcccctggacaagggggcggcacccgtccgggagacttggtggcagcccaccgcggtgggggggcttgggcatggctggctgcagg

SEQ ID NO: 178339 - DNA, 122 bp, Homo sapiens
cctagagaagcacaggtgctttcctttatgatctcatcacgcacttctccaacctacagtcgctggggggtgggggtgagcagcagtgcaggctggagctgctgaggacagcaccatgtcct

SEQ ID NO: 178340 - DNA, 122 bp, Homo sapiens
aacagagcaagatgccatctccacaaaaaattaaaaaattacccaggtatgggccgggcacggtggctcatgcccgtaatcccagcactttgggaggcagagatgggtggatcacgaggtca

SEQ ID NO: 178341 - DNA, 122 bp, Homo sapiens
ttggtgcctgctgggggagactctttcttccttttttatagccctataaagctcaaggcacgggggatataaggcaggcagagccgggctggggaggggggtgggcaggaggtagaggcggt

SEQ ID NO: 178342 - DNA, 122 bp, Homo sapiens
ccagccagcaagtggggctcagtctgcagcgccacctccatgccgttggccagcagcagccgcaaggagccatcggccccgatgtagtagctgttccggacttggtctgcaggagaggacaa

SEQ ID NO: 178343 - DNA, 122 bp, Homo sapiens
ttacaggcatgagccaccgcacctggcctctggtgcattctttattgattcttagatacacgataatttgagttgctattttagaggctttatttttcattaactttctagtttgttgtttc

SEQ ID NO: 178344 - DNA, 122 bp, Homo sapiens
agccatggcgcttctcagggcattcagcagcagcgttgctgtaaccgacaaagacaccttcgaattaagcacattcctcgattccagcaaagcaccgcaacatgaccgaaatgagcttcctg

SEQ ID NO: 178345 - DNA, 122 bp, Homo sapiens
tcggctgaggtgggggcagttacccgaagagttgcaggtgtccgttctccttggcagggccggccagaagcaataggtccgggagctccagggctggactggaggctgccacccccatggtg

SEQ ID NO: 178346 - DNA, 122 bp, Homo sapiens
aagcctgacatacaggcaaccttcaataaaacatgtttttaaaagttattgtcggccgggcgcggtggctcaagcctgtaatcctagcactttgggaagccgaggcgggcagatcacaagac

SEQ ID NO: 178347 - DNA, 122 bp, Homo sapiens
cctagacactgacaaatgtcccaagaggagaactgctctctattgagaacctcttgcctacgtgatgcttacatagctcagatgacagctcaccacacttaggagcaggctccttcaatggt

SEQ ID NO: 178348 - DNA, 122 bp, Homo sapiens
ggccagtgcccgtgtggtatttgtttttgctgagcggctctttgctgtgctgcatctcctcgcctcctttgacggggtacacacgctctacctgctgagacagtctcctccatctttgtcat

SEQ ID NO: 178349 - DNA, 122 bp, Homo sapiens
gaggccattccttgaagactgagagagattttggagacatgtaaaggaaatactacccaacggacagtaaaattatggaactcattagctcccctgggacttgcagaacatacaagggtgat

SEQ ID NO: 178350 - DNA, 122 bp, Homo sapiens
ggtgcagctgcctcatccttcaccggcttcctctgtgcaggaggctgcgcgcaccccgggcgaggagcatctctcacccggacagcggggatccaaccgcactcagggctcgctttgttaat

SEQ ID NO: 178351 - DNA, 122 bp, Homo sapiens
taggaggaccagacggggaggttcggtatgtctgaccaggacttatgttcctcgaaagggcggccaggaggatgctcttcctctcttttctttctcgcctttttctccgcatgacgcctcgg

SEQ ID NO: 178352 - DNA, 122 bp, Homo sapiens
acgaggaagatcacagcctgggagtggtctccgagtccaccctaggatgtgtggagcgggcgggagccgcttttcctcgaaagggctcccagtccctggtccctcgcttcccaaggctttgt

SEQ ID NO: 178353 - DNA, 122 bp, Homo sapiens
tgtttcacacactattttaggtgctgggggatacagtaaggtacaagatggacaaaaatacgtgctcttacagatctagtagaacagaaaaaattaaatgcatgctatgtgataagtatatg

SEQ ID NO: 178354 - DNA, 122 bp, Homo sapiens
tgaagttgtgacttgtgcggccacagttcacactcatgcgtgtgtccctgtcggggctgacggggcctgagtcccctgggcactgctgggcggggcccatgtcgtacgggttggggtgacgc

SEQ ID NO: 178355 - DNA, 122 bp, Homo sapiens
ccctggtggagaccctggtcaccacactgctcatacgctaagcagaagtaggagcaggtgcgccgggctgtgtggatgcaggtggtcccgctccgcaccacatgcgtggcctcaaaagaaga

SEQ ID NO: 178356 - DNA, 122 bp, Homo sapiens
tgttcacgagacactcgtgggatattcctagccttctgcccccttagttacgggcattgccgtctcactgctgtataaccagaggcgtgggagctgcagctgtcagaatcctaatcccttct

SEQ ID NO: 178357 - DNA, 122 bp, Homo sapiens
gcagcactgagccaaccaggccgccctccgaccctgtgaagtccccctgtctggcactatcgtcgttgttgtggctgctgttccactggagacttagaagcagggatttcagcgcagacatt

SEQ ID NO: 178358 - DNA, 122 bp, Homo sapiens
aacagcagatattggtgagtatgcagagaaattgaactgcgcgtgcattgctggcagggacgtaacatggcgcccctgctgtggaaaacagttccagcagctcctccagaagttaaacgtgg

SEQ ID NO: 178359 - DNA, 122 bp, Homo sapiens
gcggagcttctgccgagcagaggcggggcctggggactgggcgttaacatccggctttgacgtaaggagagccttaagttcctgtttggacaccttcctagcttaaatccgtactgagagct

SEQ ID NO: 178360 - DNA, 122 bp, Homo sapiens
ctgctccagcatagatggtgataaaacccaccctggtttctaaattaattatactcaatccgcctcgctctgccggccccgagctacacttgtgtatcgaagggcgcggtagcccctcggtg

SEQ ID NO: 178361 - DNA, 122 bp, Homo sapiens
gctccgggtccccgcggcgtcggagaggcttctgcctagcgcctctctgctgcgcgaggtcgtcccggccttacaaaaggagctcctcgctggtgagctcaagaccccaggcgggctctccc

SEQ ID NO: 178362 - DNA, 122 bp, Homo sapiens
gaaatgcattactagactcactaacaaccatatgagacgatgtgattttcatgacaaagccgatgaactctccctggttctgctcagcagaaggatggagacagaacattccaccccgtatg

SEQ ID NO: 178363 - DNA, 122 bp, Homo sapiens
ctaggcccagctcctgctcccgggtctccgctcggcggctcctccagcctccgcccgccccgccttcttgggaccccgccccgcacaggccgggcccggcttctattgctccgactcgccgt

SEQ ID NO: 178364 - DNA, 122 bp, Homo sapiens
atgccccgcataaagaaagcagtgtagttaaaagcaaatgaaagataaaaagagtaacaacgtggtttctcagtatttcatggtaccggtagatatgaccttcacagacaaacctaaatctt

SEQ ID NO: 178365 - DNA, 122 bp, Homo sapiens
aggaacagggctcatcatggcaggactgtgatagagtcagaaactgactctgtgacctggcgcacccactgcaggtacggaaagttcccctgttccacaggcaatgcaattacctcggccac

SEQ ID NO: 178366 - DNA, 122 bp, Homo sapiens
aaaccgcaccttcgtcctcaacttcatcaagattcccgtggtcccgcacaatgagtgcagcgaggtcatgagcaacatggtgtctgagaacatgctgtgtgcgggcatcctcggggaccggc

SEQ ID NO: 178367 - DNA, 122 bp, Homo sapiens
ggaaaacgccgtatctttgagccccttcaatgacgcttcttcctgctctttgaacagaagcgctgcgttttcattttgccctgggcctcatgttacgtagctggtcctggtgttaggtaccc

SEQ ID NO: 178368 - DNA, 122 bp, Homo sapiens
aaaaagaagacccccccaattagtggggtgtaaggaggcaaggatgcatgtgcctgcaggcggtggtgtgagaggaggccaagtggagccattcatactctcagcttctagaaaagcctctg

SEQ ID NO: 178369 - DNA, 122 bp, Homo sapiens
ggactgagggctgagagcctggcaacagcgtctgattgctgcccgtcagcagcttcaccgcgagctaatctggactgcagtccgacctcccgggctccctcatgctccacgtgattgccatg

SEQ ID NO: 178370 - DNA, 122 bp, Homo sapiens
tgaaatggaaggaagggaggaaaggtggaggggaggaaggagagggggagggtaggagggcgagaaggaaggaaaagaaggaacccaggttcccaattggcagcagtacccacttccaaccc

SEQ ID NO: 178371 - DNA, 122 bp, Homo sapiens
caccttgagcctggcaaggaggggtccaaccatttctcatgtatggccacacaccacttccgttcacagagaccccagccactccgggcgccaggtgctgacgtgccacgtgggcatctagt

SEQ ID NO: 178372 - DNA, 122 bp, Homo sapiens
cctagtacctcttgtcatttggcaagagcactacagctagagaaaaattattggggattacgggtggtatatgtgtgtgatatttaattaggagatgcagattgcaaaaaaaaaaaaaaact

SEQ ID NO: 178373 - DNA, 122 bp, Homo sapiens
caatggaccctctgctttattgcaaggaagagggccagtgtgacagccttccatatcccacgctgttccctagcgtcccggatcacacgcaggctcgaaggatgagtgcaagattttactga

SEQ ID NO: 178374 - DNA, 122 bp, Homo sapiens
tcccttgggttttccgttccttcccggttgggtcgtgggaaagcggcacgtgggtgtggccggcgccgcctttgccaagaggcgaggctcgagcggggatgagaagcgtggcgagtgcgttc

SEQ ID NO: 178375 - DNA, 122 bp, Homo sapiens
tggcgccgtgcagagaggcggaatgttcaactcctaactgcagcggaaacgtgggagccgcgcgggccgctgtcgtcccaacccccgccgccctcgtcgcgcgcggggcctccgcgcccccg

SEQ ID NO: 178376 - DNA, 122 bp, Homo sapiens
tcctggacgatctccggggcacggcttcgcggtggctggcttcccgctggctccgtgggacggagctgcctagagcagccggggaagtggtctccacctcttggggtcactccacagtgcct

SEQ ID NO: 178377 - DNA, 122 bp, Homo sapiens
ctacccgccaggttgtcagaacaagcggcacctcgcctcctgcgtgtccctacagagccccggcacaatcagactgccccaagccagctccgaaacccgaaatccccgctccggcgcttgcc

SEQ ID NO: 178378 - DNA, 122 bp, Homo sapiens
gctatattataatttcatatttacagagtgagctaatgctccttgggattagtcattaaccgtgagaggaaagctgttagccaagaaaaaaaaaatagctcgtgcacaatttcagcgcctgg

SEQ ID NO: 178379 - DNA, 122 bp, Homo sapiens
gtggtgcaaagctccccgcaataagaggcaggaaaatggttgggctccagccggcagaggcggggctgtgatcaaagccgtgtcctccccaaactcaagcctgtgactgcagctgggccatc

SEQ ID NO: 178380 - DNA, 122 bp, Homo sapiens
acggttaaagccgttttcttattcatttcatccaggggcccattttgactcagagcaagccggcgcccccctcgagcctggcctcctgggggcctgggtgcatactccaccccacatgtacc

SEQ ID NO: 178381 - DNA, 122 bp, Homo sapiens
tgaaaaacataacctctctcattctacatggcatacctctcttaatgcagcccagggtcacgtcatcacttcacattgatgactcacaacagatattcagggggatgtttttccttatctaa

SEQ ID NO: 178382 - DNA, 122 bp, Homo sapiens
agtgaccttcaaggcccggcgccacgagagcaagttcacggacgcctacaaccgccgccacgaacatcattatgtacacaattctcccgcggtcactgcggtggccggggccacagccgctt

SEQ ID NO: 178383 - DNA, 122 bp, Homo sapiens
ggtgtgaaagcccagagcttcaaggggtccctagattgcccagtgtggcccctctggccccgcccatcaacagcttgcagacaagaagcaaaatccctgtccctgctgggactctactgaga

SEQ ID NO: 178384 - DNA, 122 bp, Homo sapiens
ggtccgggccccagtccacagcagagataagggtcccggggcccgggggcgagccagctgcgcctgcacaaacactccacggtccccaggcaggccgcgtgcaggtgaggcggggggcgtgc

SEQ ID NO: 178385 - DNA, 122 bp, Homo sapiens
gttctaaagagaagccaggaaaaattcaaagctgacaagtcacaggtgctcagctgtctccgggttgagggtgggtggcacagatgaggtgagaaccagcccctatctgaaaggaaagtcaa

SEQ ID NO: 178386 - DNA, 122 bp, Homo sapiens
gaagcagaaggaatgtgactctggtcacagcggcacagcctgctggctgtgtccctgggccggcctctccgccttcctcagcctccatggtccactcagcagaggagctgctgtctggggtg

SEQ ID NO: 178387 - DNA, 122 bp, Homo sapiens
ccagacttggcagctgggatctctccttcctggttcatagttctcattcccacccctcagcgatggagttagagttccaggcccacgtggtgaacgagattgtgagtgtcaagagggaatac

SEQ ID NO: 178388 - DNA, 122 bp, Homo sapiens
gcctcaattcccactgtcccctccatcaatccagattatggagctgggccagagaagacacgcataatgactcactcatcatattttggggtcccatcctgagttaggtcctatacctggtt

SEQ ID NO: 178389 - DNA, 122 bp, Homo sapiens
gaaattaaattaataaaacatgtggacataaacagaagcaggtgacttttctcaagggtccgtctcattcaccgtttctaaggcaagccttggtagtgatgcctgccaaccaccatgttccc

SEQ ID NO: 178390 - DNA, 122 bp, Homo sapiens
gtgaatggtcgtaattaccaacgtgaggtcgtcagtctgagctgaagtcctctaactaggcggggagagtcagggctggccagggctcttgcactttgccccgagagagagccgtggagcca

SEQ ID NO: 178391 - DNA, 122 bp, Homo sapiens
ttggattagtgtctggcattatatacgtctaaacaacctagacttgggagtatatgctgacgtctgacaattgtttcatttattttgaggtcacagaatctgtgggtaaggtttgatttcac

SEQ ID NO: 178392 - DNA, 122 bp, Homo sapiens
gccagtggcctcctctctcggggcctccccggaaggagccaaggtctgtctgcgaggcaccggtccccggccacggccatcagcccccagaggtggatcagggcatcacccccactccacag

SEQ ID NO: 178393 - DNA, 122 bp, Homo sapiens
tgatatggcagtgcttgtgttcagttaacctttattttgcttcagaatggccacaaagcacgagagtagtggtgctggtaattttattacagtatattgtcacagcatattgtattgtatac

SEQ ID NO: 178394 - DNA, 122 bp, Homo sapiens
tcacatcccctcggctgaggcagtcgtggccacacccctgtaaagggtacaggatgcaatcgccccatcctcccctcagcttccttcctttgcttttccatgggagaattccaaagaatgag

SEQ ID NO: 178395 - DNA, 122 bp, Homo sapiens
gcttacaccgggactttttttcttttttcttttttttttgctatgacagagtaatgctaacgtaaggacaactgagtttgatcagtgtttaatcgcagtgggtaatcttatctgattgtctt

SEQ ID NO: 178396 - DNA, 122 bp, Homo sapiens
gggcagcgcagccttagccgccagccctacagccgggagggaatgtaatgtaaggtttggcgcctcggggcggatccggcttgcacagtcagttaaggaaccagagtatcgcgagatccggg

SEQ ID NO: 178397 - DNA, 122 bp, Homo sapiens
ttcaagcaaagcctgatgagctggtccatgtctcctctgatccctgtcagccctgacctgcgctggctcttcacaaatggttaggaaggagactagaacagaaattatatccaacccccaac

SEQ ID NO: 178398 - DNA, 122 bp, Homo sapiens
caacgccatgtccttcctgggtccctccaaagtagggttggaggatcaactagtggattccggcgaggaggtatcttcctccctggaagcagcagaacaaatttcagggactcgggagtcca

SEQ ID NO: 178399 - DNA, 122 bp, Homo sapiens
aagattgtagagagcagctgtcggtcatggagtcacagggctgccttaccaggacaccaccggcagccccacagacaacacaggtttattctctccagctctgcaggctggaagtccgaggt

SEQ ID NO: 178400 - DNA, 122 bp, Homo sapiens
aaatagagtttccagcatattctggtattctgtagcagagaattattgtttggggcaactcgcttgaacactgggctttattttgtcatctgctaaattaagggttgaaccaatatgtctga

SEQ ID NO: 178401 - DNA, 122 bp, Homo sapiens
aaaaataccactgctttttggttcacactaattttcttccttcttttggaaaggcatttccgtccatctcctggatattttccaataccacgatagaaaggttattagtacagcacccagag

SEQ ID NO: 178402 - DNA, 122 bp, Homo sapiens
ccggctcccgccgcggcttcccaccccgggcggggtcccacttgcccaaacgcccccgaacgcccccgtgcacagcctcagccggccgcgcctcgagcagccagctggcccgcgtcccgtca

SEQ ID NO: 178403 - DNA, 122 bp, Homo sapiens
ttcccgggcacattcctgccggggagccactctgccacccgcaccgccccgcccgctccccgcacacagtgcccattgtctgcccagacactttgagctgccgccgcccccggcctctgcca

SEQ ID NO: 178404 - DNA, 122 bp, Homo sapiens
aagtactgggattttgatagaaattacattaaacctgtatgcctatttggagagaattgacgtgtttactagtttgaatgttccagtccgtgaacatagttatgtctctccatttatttaga

SEQ ID NO: 178405 - DNA, 122 bp, Homo sapiens
attcccgcggtttggtccggccattggcgggcggtttgaatgacggaagtgacggcggctcggcgatggctctcccgcaggcgcagaaacggctgctgggcagctgatgggcaggagcttac

SEQ ID NO: 178406 - DNA, 122 bp, Homo sapiens
cagacgcttcacactcacccactgccggtaagaaccacatgaagttaggggcgcccaggccgcagacctcccggctgagaggagctggcggctgcccagccccacaccctcctcagttaggg

SEQ ID NO: 178407 - DNA, 122 bp, Homo sapiens
tggaggcgcaggccagaggcgcaagttaatgacgcagccatgcgcgttggtggcagttcccgccccttaaagacccaagagcaaattcagctgggctgggctgggctgggctgggctaggtg

SEQ ID NO: 178408 - DNA, 122 bp, Homo sapiens
tccaagtttcttcgttccctcggatttcgggttgggggatgtgcttgctggttttctgaacgcaactctgccgccgaggcctgcactcaggagatgtggatgtagggagcacaggccggggt

SEQ ID NO: 178409 - DNA, 122 bp, Homo sapiens
cgcccagggctccgcacgtggtgctccgcccgctcggaggggggacacaccagcgcccgccggggcgcacactcccacactgacccgggggctcacagccacagacagccgcacacgcggcc

SEQ ID NO: 178410 - DNA, 122 bp, Homo sapiens
gcagtcttgagtttgcattattgcaagtcctaggctctgccgtcccccagcccctcacctcggtgctctgcaaatgctgaatttctacgctgtaggcacctagacccttaagaaacaagccc

SEQ ID NO: 178411 - DNA, 122 bp, Homo sapiens
ctgtttatcccagatgaggtccagagagacgcattccaagcagccaacacgggacagaggcgatgagggagggcggcctggacagaaaacttccaggcagatcggggcaccctgtctcgcag

SEQ ID NO: 178412 - DNA, 122 bp, Homo sapiens
gaagcccagctggcttcacctctcaatggcactggccatgggacttttcggcacccagcccgggcactctggcagcccagagggagctcgtccccgtatcaagcccggtcaagcccagcagg

SEQ ID NO: 178413 - DNA, 122 bp, Homo sapiens
cttcgcgacaggaacggagggccaggacagcgagacgcgctcagcgaggcccctcccccacgaccccccatctctatagttaccagctaaggtagattgacggggtagggggaggtggaccc

SEQ ID NO: 178414 - DNA, 122 bp, Homo sapiens
gggctagaggagtggaaacagccccgtccaggctgcagtggacgtccgggagagagttcccgctgctgccaggggcgaaggcccagcatctcccgccgacgggccaccgtcatccttgtccg

SEQ ID NO: 178415 - DNA, 122 bp, Homo sapiens
tctcaagtgaagcctgagaaccgggtctgtaagctcccaagtgcagattctcaggtctagcggtgacattggacaggacgagacatctccaagcctcggtcattgcctcttaaaatctcaca

SEQ ID NO: 178416 - DNA, 122 bp, Homo sapiens
aagggcattcactttggagccaggccaatcttaggccagctagtaaacttctctagcctccgtttcgtccctgcaaaaataagcctgctgccatcctgcacgctgctgtgaggatagttgga

SEQ ID NO: 178417 - DNA, 122 bp, Homo sapiens
ggccggcagggggcgaaggcggagctggaagtcgccgccgggccccgggggaccggctcccgcgcttcctcccgcgccccccgcacagtgctcatgcgcacggcccagcctttatagcggcc

SEQ ID NO: 178418 - DNA, 122 bp, Homo sapiens
gaatacacagtagctgcaggagtggagccaccatttccaaactacacaaacttagtttcacgtgatcttgtagtgatactgagtattttttaatttatcacaggaaaacaaaaggattctga

SEQ ID NO: 178419 - DNA, 122 bp, Homo sapiens
gtgtggtacttggagagaggctggccgtgatgaattcgattcatcaaagcgagtcatacacggctctcctctcttttagtgtcaaattctgcctcggagggcttcctgagccagtgctgctt

SEQ ID NO: 178420 - DNA, 122 bp, Homo sapiens
gcaatcaagactctgctggcaactcacagcttacctgaacttaaagtgctgaggattccacgtgtgactttgtctataggaaagagggatcagaggttaagaaatagattataaattcctta

SEQ ID NO: 178421 - DNA, 122 bp, Homo sapiens
ttgtggacatcgggctggacctggaggagcagaatgcggtgagtcaccgcctggggatggcgagatgcatgacccttgcttgctctctgccttcgaggaacccccaccagtccatggtgaag

SEQ ID NO: 178422 - DNA, 122 bp, Homo sapiens
tgtctgtgttcagggatccccggcgccgcgagagactacctcagcgagcggctgccaccgcgtaagcttcctgcacctgggccacaaacagcgagtctaaaatggcgcccagggctcgcggc

SEQ ID NO: 178423 - DNA, 122 bp, Homo sapiens
acggatgccccttctcctgggcccgaggccagcgcgcgcggcactgactgccttgcagcgcgtggccctctgcagatcctcagactctgccgctcaagtcccctcccagcccaccgtttggc

SEQ ID NO: 178424 - DNA, 122 bp, Homo sapiens
aaccccgtgttgtgtaaatacagtttttgctccggtgcttccgcctgatttttggggctgcgggggcgggaccggggtgtgaccgcctcggggtgggccgcgagcaaggcaggcgactccac

SEQ ID NO: 178425 - DNA, 122 bp, Homo sapiens
ggtgtgtcgtggctgaaccccagctctgtggttcccgaggcttttctgggatggaggcctcgctccgggtcctggtgttttcacatagcagaggagagtgccccaagcctggcgagcaccgc

SEQ ID NO: 178426 - DNA, 122 bp, Homo sapiens
cccggccgccgcccattggccggaggaatccccaggaatgcgagcgcccctttaaaagcgcgcggctcctccgccttgccagccgctgcgcccgagctggcctgcgagttcagggctcctgt

SEQ ID NO: 178427 - DNA, 122 bp, Homo sapiens
ccaaactggaaacagctcaatcgatcctcagcggaacggagaaatcatggcctcttcacgcgatgaaatattatgctgcaatgaaaagaaacaaaattctgctgcacacggcagggaggaat

SEQ ID NO: 178428 - DNA, 122 bp, Homo sapiens
accccaagcctcctacctggccccacagtcacaggtctcctcaaccccccagaagccagccgtctctcccaagccccgggtgggaccccagaagtccaccccacccaccatatctgtcactc

SEQ ID NO: 178429 - DNA, 122 bp, Homo sapiens
tagtcgtaatcgtcctccatctcctgcttgatgtggatgttgcccactagggtctggatgcgcacaggccggggctgcttgcggcagtgcgtggtctcgggggtggtggacaggtagcgctc

SEQ ID NO: 178430 - DNA, 122 bp, Homo sapiens
ccatccgagaaccacccttcagacccaggcaagccttcagatgactacagccatgactgacgtcttgactacaacctcatgagagtccctgagccaaaactgctcagctgagctgtttctga

SEQ ID NO: 178431 - DNA, 122 bp, Homo sapiens
ataaacagtctttcaagccaatccaaaagaggcatgggcttcttctttgaatatggtcaccgtgttcatcaggaccaagcttctgcttcatttcctgaccctcaccatgcacttgtcacact

SEQ ID NO: 178432 - DNA, 122 bp, Homo sapiens
ttaatgttgctctcactgtggagactgttgtctcctgggatccaggtcttggggtttggtcgggggaggaagctgcggggccttgggaccctgggggagatgtgtgtgcgctgggggtgagt

SEQ ID NO: 178433 - DNA, 122 bp, Homo sapiens
tgaatatttgaccaggttaatgtgaagaacagagataaacccttacattaacccctcgctcggagcacctagggctgcagattaaaatcccatgggcctgccagtcaaaggcaaggccccaa

SEQ ID NO: 178434 - DNA, 122 bp, Homo sapiens
agtgccggctccctgtttaacatgtgcagataaaatgcgctcagcctcagacaggcagctcgctggctgggaagggagacccactccccctcctgcggatccccagatgactgtatttcgtc

SEQ ID NO: 178435 - DNA, 122 bp, Homo sapiens
aggaacaacaagctgttttcttctctgcactcactcgacaccacagaacacttctgtggccggacatgtgtgtctccagggacaccagctgagtgtcctataattccgttcagcctctacac

SEQ ID NO: 178436 - DNA, 122 bp, Homo sapiens
gctggggtgtccacccaggaggagcacgtggttggggtgacagccaaggagacccatggccgagggcagtgtgtggcccctgtggaggctcagagtggaaggtggaggaaggagacccccag

SEQ ID NO: 178437 - DNA, 122 bp, Homo sapiens
aggattgctcctcatctgactcctcctgtgtgagactgattctcagtcagaggctgatgccggaactgagaccatcagccatagagagatccttccagaatatggtgtcattaaccctgcag

SEQ ID NO: 178438 - DNA, 122 bp, Homo sapiens
tgacccatgcaaaacatatgaaatttaaacctcagtgaaacacagccatgcaccttcattcgcatattgtctatgactgttttcatgctacagtgacagagctgaatagttgcaacagaggc

SEQ ID NO: 178439 - DNA, 122 bp, Homo sapiens
gactgatgtgctgtgtgagggcatttctagttatgtcctagagacaaaagacctgtagatcgagtttagccagcaggacttaatggcatggcagtgggcagacaggtaggtcagtgaggagg

SEQ ID NO: 178440 - DNA, 122 bp, Homo sapiens
ttggaggtaactgtaccgcacttgccgcagattatcagagaggatcaggctggggtaggccgtgtctgggtccagagtcacgtccactgtagagacacaaggaagacagtcagccgtgggcc

SEQ ID NO: 178441 - DNA, 122 bp, Homo sapiens
gaaccaaaggccggtttccagccttctaaagcacagctatcatcttgccactcctctgctcgagttcctctggagactctcaccagaagagcagaacaccccagcttagcgtgcaatgtctt

SEQ ID NO: 178442 - DNA, 122 bp, Homo sapiens
ggagtccccgtagcaggtcagggccccggcggggacgcacagcagcgctgccagcagcagcgggatcatagctgctatggggctgagatccaggaatctgtgtcgggactgcggggcgctgg

SEQ ID NO: 178443 - DNA, 122 bp, Homo sapiens
cgggcgggcgggctagcgccgggtcggccacgccctcgcccgtggcgggcgctggcgccgcggccccgcccacacgcaggccccgcccacactcccggacctggggttcgcggccgcagcgc

SEQ ID NO: 178444 - DNA, 122 bp, Homo sapiens
gtgcaaaggtaaacagtctaggccccagcctacgggaagtttcagtttgcagagaaggggcggggcgggggcgggaatgacgaataaatagttaccgtaccgtgtggtaatagctgtaataa

SEQ ID NO: 178445 - DNA, 122 bp, Homo sapiens
ccgggcctcctccaaggagctgccggttccgcctgactctcgcctgcttgcgccccgggccggttagtgctcacttggagggttgatgcggggactgacagtgcctcaatgtcagtccccgc

SEQ ID NO: 178446 - DNA, 122 bp, Homo sapiens
ataggacctatgaacagaaaaggagctgcaggtaggagagatgtcatattattaagactccgaaacccagagaggacaggatgctagaaatttatctggagagggccgggcgcggtggctca

SEQ ID NO: 178447 - DNA, 122 bp, Homo sapiens
gcccatagtctcctggatttttggaacatctttctcagcctattttgtgtcctaatgattcgctcaataaacatgtttgaatccacacgttcccaaggtgtggcttgagatcgttaaactga

SEQ ID NO: 178448 - DNA, 122 bp, Homo sapiens
ggtgcccgtgatgcgcgcgttggctgctgcacgctgcacgttcagctgcaccgtcctgcgcgcggagcctaccaggttggcggccacgcactcatagcgcccgctgtccttgggcgcgaggt

SEQ ID NO: 178449 - DNA, 122 bp, Homo sapiens
aggtagctgtactgcaactgtcggcccaaaccaaccaatcaagagacgtgttattgccgccgaggtggaactatggcaacgggcgaccaatcagaaggcgcgttgttgccgcggagccccct

SEQ ID NO: 178450 - DNA, 122 bp, Homo sapiens
tgattgtcagttatgtgccaggtgttagaatacgtgttaaactcaattcatatgccaacgcgtgcgtaagcaatatgccagttttatagctcagaacaccgaggctcagggagtcacgtaac

SEQ ID NO: 178451 - DNA, 122 bp, Homo sapiens
aatgctgaatgtgaactgagagcatgcaggggcattgaccaattcacatgtgcacctttacgtgtcatggcctaagaaatgtagtctagctctatgggccaagagcctaaaatttaatgatc

SEQ ID NO: 178452 - DNA, 122 bp, Homo sapiens
aggaccggatccctgctaagtgcaggagggaccctgccgcttctttcatctcctcatcatcgctctcggggggcttttcggtgcgtctctttttgaggggcagtgtgtcgctggggaccttc

SEQ ID NO: 178453 - DNA, 122 bp, Homo sapiens
agtgacagcagtgcctgctccccctaacattgcctgttctctccaggacgagaagttcctcggaagacacagctggggagctccctgctgttcgggacctaaagaaactggagtttgcgtaa

SEQ ID NO: 178454 - DNA, 122 bp, Homo sapiens
gtcaactcaggcccctcctccttgcagtcagccctgtactcaaggttgctggagacatggcgcctctatttcctgcccaaagaagcccccttaactgggggccacgggttgagtggtgaagg

SEQ ID NO: 178455 - DNA, 122 bp, Homo sapiens
aggagagtagtctagctccatgtccggggctctaggggttcatagatggcagctcctgtccggggctgaggttgggaggggagaaacaggggcagagtgagttggtctctggagtgactgtg

SEQ ID NO: 178456 - DNA, 122 bp, Homo sapiens
ttctgcaatagaagtctctgcagcttcccaagagtttttttttctttctttctttttcttcgtttccttctttttcttttggcacctgtgaagtcatgatctaattagtcaacatttagaca

SEQ ID NO: 178457 - DNA, 122 bp, Homo sapiens
ggtgttcactgacctttgtttcacttgcctctgctcgactccgagagcaggaaacccggccgtggcctggcagctccgcctcccatgcccgcacgctggggtctgtcttgtctggagcagtg

SEQ ID NO: 178458 - DNA, 122 bp, Homo sapiens
ggccccggagggtgtggggccttgaggaagccagatcccaggcctcgggggtggctttttcgcaattgtcgcacgttgtgaggcgcaggattggcgctgggtctcgggctcggggcgaggaa

SEQ ID NO: 178459 - DNA, 122 bp, Homo sapiens
gcaaccatctggaggatcctgacggcatcccgctctgtaaaggatccctgagcaatgagtcgatcaaagagctcccctccggtagccagctccattaccatgtaaacttgatcctcagtctc

SEQ ID NO: 178460 - DNA, 122 bp, Homo sapiens
cagcctggcaccttccacgacagatggaaaattttccgggccttggcccatccgagcatccgcagcgccttattactgtactctgtattagcatggcggtaaatttagcagcataaacaaca

SEQ ID NO: 178461 - DNA, 122 bp, Homo sapiens
gttacttgaaatcatttgaactcctcttgagctgtcccctcatctggctcttgtcttagccgttgcaggtgaaccactggatggatggctgaaaggaattacaccgtagtgacggagttctt

SEQ ID NO: 178462 - DNA, 122 bp, Homo sapiens
ctcgggcctactgcgagcccgggaagaggccgccggcgaggccgccactggccggctgcgcgctcccccaggctcgggccgcctgggccgctccgcctcgcttagacattggccggctggca

SEQ ID NO: 178463 - DNA, 122 bp, Homo sapiens
cagcataccgtaaaacctgagtcccacccagccagctcggaatggaaggcttccaaggcccgggaggcgcgctctgtcaagttgctgattcgggagatagcagtgaatcggggttccaccac

SEQ ID NO: 178464 - DNA, 122 bp, Homo sapiens
tccgcccgccttggcctcccaaagtgctgggattacaggcgtgagtcactgcgcccggcccgcagaaggatattaaagagcacctgcaggaattttttaaggggatgccgggggaagggctt

SEQ ID NO: 178465 - DNA, 122 bp, Homo sapiens
actggggcaggaaaggagagcgacgaacagagaagggactggaacgggccgcgatggctccggcgaacagggaagagggactcacccctgcacaaaagcctcccctagtcccgccctcgcaa

SEQ ID NO: 178466 - DNA, 122 bp, Homo sapiens
gctgcatgcaaatctgtgtgcagggtaaggttgacctccaagctgcacctgcaggggccccgggaaaacccctgcagcccagctgctctctgtggtattaatactaacaccatctaccatgt

SEQ ID NO: 178467 - DNA, 122 bp, Homo sapiens
agactccatctcaaaaaaataaataaataaaaaatcttgtggaaggaggtaccacatatgcggtctgttgtggaacaaaatgccgttacgtggggcatgactgtattctgtagggcacattt

SEQ ID NO: 178468 - DNA, 122 bp, Homo sapiens
ctcaaaaaataataataataataataaaacaaaagcagctcggcctggcttggtggctcacgcctgtaatcccagcactatgggaggccgaggcaggcggatcacgaggtcaggaaatcgag

SEQ ID NO: 178469 - DNA, 122 bp, Homo sapiens
cggcctgcctgcgggagggaaaggacccagggcggcttctgccaaaagtgcggcttctgccgaaagtgcgtcttctgccgaggggcccacataaggcgcgacagacactccagcccgacccc

SEQ ID NO: 178470 - DNA, 122 bp, Homo sapiens
tggacagtttttgacgtagctattctgacagtggtggttccggttatacccgctgtgactcggggctgttcggaatccgacggggcgccctgagctctggggcctcctgggtgggggctggg

SEQ ID NO: 178471 - DNA, 122 bp, Homo sapiens
cccagcgccttcggaagcaaagtcctgggcccccggggaccgaggggccggtgcggagggcgctgcggggctccgcgctgtcggtgcaggcggcgggatcccggctccgcagtctgaagcat

SEQ ID NO: 178472 - DNA, 122 bp, Homo sapiens
agaatctgcctaaacctcgaccgtgcttcctgatgtcatgaggcccagtcggaatgtgcccgacttccccatctcagtgagggcagtggaaggggaagccgtgctcctgtggggagagccac

SEQ ID NO: 178473 - DNA, 122 bp, Homo sapiens
cggatttatggagtccttaaaacatctgttccgttctgattcccccgctcagtacaaagacgttagtcaggggaagcatctcacactgcactgtttccacgcactgacgttggcagcggcta

SEQ ID NO: 178474 - DNA, 122 bp, Homo sapiens
aggtagcgaaggctttatacttcccatctgacgatgaaatccttagaatggaggggcgcccgccccactgcgatgtggatcgtcatatccaggggggagaggggggtgatatgactccccgc

SEQ ID NO: 178475 - DNA, 122 bp, Homo sapiens
caatagcgcgcgcgtgctggtgggggtggggacaggctccaggcctggcatcccggtagccgcagctgtcttttccggcccccgtgcactctccgcccgagcggagccccccggctcgcggg

SEQ ID NO: 178476 - DNA, 122 bp, Homo sapiens
cagcgctttgcctcgcgaacgcttaaaacatcatttgggtgactgaaaacagccagctctcgttcgctgcaatagcttacagcctacagcaagcgatctaccaacaggttttaaaagttagg

SEQ ID NO: 178477 - DNA, 122 bp, Homo sapiens
agagcagatgaatgactgcaaaggaatcactggcacaaggcaggacattcacggtgggggcgtggcttcttccctgacactggcacatagcaggacattcacgatgggggcgtggcttcctc

SEQ ID NO: 178478 - DNA, 122 bp, Homo sapiens
aacaggggaatccagaggcagtatctgcaaggtcccgccaagcatcactcacaataacgccgcctcccccgcacagcgcgtccctccgggaactccccccgcccccacgtcagtgagctggg

SEQ ID NO: 178479 - DNA, 122 bp, Homo sapiens
aaatgttttcatcactccaaaaaataaccccatatgggaggccgaggcgggcaggtcactcgagaccagcctggccaacatattgaaaccccgtctccactaaagatacaaaaattagtcgg

SEQ ID NO: 178480 - DNA, 122 bp, Homo sapiens
aagtgcggcccttgggcccgcagcattagcctcatcagggtgctggttaaacacacaaatcgtcagacctccaccccagactttctgaatcagaaactctgggggcacagcccaggaatctt

SEQ ID NO: 178481 - DNA, 122 bp, Homo sapiens
ctccccaacctctgactccgagaacctcagccccgatgagctggagctgctggccaagctcgaagagcagaaccggtgagttgggggctgggggatggggtgaaatcttggggtgcagtctg

SEQ ID NO: 178482 - DNA, 122 bp, Homo sapiens
agtgccagacagtgggcgcaggtcagtgggtgagtgcaccgtgcgcgagcagaagcagggcgaggcattgcctcacttgggaagcgccacgggtcagggagttccctttctgagtcaaagaa

SEQ ID NO: 178483 - DNA, 122 bp, Homo sapiens
ttaataggaaatggagaaggagcaagtcccgaccaaaagattccatgctgtggccacccccggcccgccctgctgacgggtttcaggcgagtcaagtcattcaacccccagcccctgcatac

SEQ ID NO: 178484 - DNA, 122 bp, Homo sapiens
gataacatctggggcatttcttcccgggctggataggatcccagatacagcagcaggggacggggagaaaaccagccccaggtgctccagcagggtgctgtcagtgcccccatggtaagggg

SEQ ID NO: 178485 - DNA, 122 bp, Homo sapiens
cgtgccaagaactccttgctgaccaggccatgcatagccaggatcttgaggaatccatggcgaaaattttggccgatgaaggcgtagatgatggggttgaggcagctatggagaaatcccag

SEQ ID NO: 178486 - DNA, 122 bp, Homo sapiens
ccagaccacaagtcatgatctttcctgagaagcaggaaccacactgcagcctcacaaagccgtaggagacaattacaatcccaccaaggggccaatcacaggtgaatacccaggcttttttg

SEQ ID NO: 178487 - DNA, 122 bp, Homo sapiens
tgacccaaaagaggcaaacgatttctctacgatggtgacagctctgggatacaaggtgaacgggccaggattttgagtctgtttccaggtctgtatgaattaaagaatgtgttatgaatggc

SEQ ID NO: 178488 - DNA, 122 bp, Homo sapiens
gggaggaaaagaacataaatgtgattgagggaattcagtggggaaacagcttgaccgctccggtctttgacgatccaaaagaaacccttaacacttgagaaggactgggaggtcacttacca

SEQ ID NO: 178489 - DNA, 122 bp, Homo sapiens
ccacgccaagcaaccagcctgttgtcagtcgctaggcaaaaagataaattttaaaattcgcgagagttgcttccactctcgtgagacctcctgcgcgttaagcctcacccgcgaaggctctc

SEQ ID NO: 178490 - DNA, 122 bp, Homo sapiens
gcgcccagatgagtgcgtagagcgcggtgaacagcaccttggcccagaggcgagtgtccacgcccagccgggcgtccaggctcagccccgggttggagctgggccgcgggggccgcgggctg

SEQ ID NO: 178491 - DNA, 122 bp, Homo sapiens
caccttcccccgtattaggatagcactagttttccataagaaccatactggaaatgtcttcggaattattttaactattagtctataacaagtctagaaaaaggtaggttttttttttctct

SEQ ID NO: 178492 - DNA, 122 bp, Homo sapiens
gctccctcctgcgaccgaggcacttctccttaattggtttgaaaaattgcagctggatcccgacagccgctgctcccggggtgggtgcggagggagggagcgaggagggagggggacagctt

SEQ ID NO: 178493 - DNA, 122 bp, Homo sapiens
agtgatgagaacagacgtcaaactgccttatgaatattgatgcggaggctaggctgctttcgtagagaagcagaaggaagcaagatggctgccctttaggatttgttagaaaggagacccga

SEQ ID NO: 178494 - DNA, 122 bp, Homo sapiens
gccgctgcccatggcaataaccgggcccaggcccgtagctcctcgttcctcgcgcagaggcgtccccacctcctgtgaacacttgtcagagacagcctcgaggcctgtgtcgctggggcacg

SEQ ID NO: 178495 - DNA, 122 bp, Homo sapiens
agctcttctccagggaggagctggaggccgccgaggccatctcctgctcgaattccagggcgacgtagcacagcttctccttgatgtcacacatgatttcctgctcagcgtggtggtgaagc

SEQ ID NO: 178496 - DNA, 122 bp, Homo sapiens
cagccagctccgatttctcgcaccccggtcccaatccacggccacctgcactttgcgtaacgttgcgctggggggcgctccagagaacccacaccctcccgcccggcccaggtgcgcacccg

SEQ ID NO: 178497 - DNA, 122 bp, Homo sapiens
gctcagctgcggctcagtgggcctgaactccggagcccacagaatctggcgctgggcgtccgctctccgcgcctgaccgcacctcagaactccggtaggacgggggggtggccccccgctca

SEQ ID NO: 178498 - DNA, 122 bp, Homo sapiens
tataccacagcactgggcatcaacttaaaatactcatgaggtgaatgtaaggcactttcgcggtttacaaaagtgaatgcctcaaagttagatatttatcaaaaatggaaaaatatccctat

SEQ ID NO: 178499 - DNA, 122 bp, Homo sapiens
agaaggccagagaggatgatggatcactgggtagtagcctgcagtaagaggaatttaaaacgctttaccataaagaataactgctcccaaaatattaaaagaatgaggttctcaaggttatt

SEQ ID NO: 178500 - DNA, 122 bp, Homo sapiens
aaatcacccctgttttgggaatagccccagtccaacttgggtgaagtggaatagagttttcgatttaccaatgccgatgatgtaaatttgcactgaaaagataagacctggccaagcagcaa

SEQ ID NO: 178501 - DNA, 122 bp, Homo sapiens
ttgggccggtcggagggagcagttgggtggccgctgataggctggagcggcgcggggctgcggcgggagagcccgcgccggcccccgccctccggcccgcacccggggccccctggctctga

SEQ ID NO: 178502 - DNA, 122 bp, Homo sapiens
aggcagggcagggcctctgggacggggctggacggcttgttgacggaaacgagcccttgacgctgtggcccggaagtggagcggctgtcgcagtgcggctccggcagtggcagcggaggcct

SEQ ID NO: 178503 - DNA, 122 bp, Homo sapiens
catgagcaatgcagatgtcgtggcttcacacaagacgtcggagggtcttattcctgcagccgggacctgggcatcggtgtgctttcatgttcctaactgattttgaggggagcccaatcgat

SEQ ID NO: 178504 - DNA, 122 bp, Homo sapiens
agggtccgagggccacagggtggatctctgtggtgctgggcaggctgatgatggtggcctcgcccagcaggttgcagatacgttgttgcatgggggtcagcagcactggggctacagctggg

SEQ ID NO: 178505 - DNA, 122 bp, Homo sapiens
cgcacttgtatccaacgcaatcaacaaacatgatgtgtcaagtgctgtattgcacttgagcgggtgtaaaatggtagagctggggttcctgcccaaacgttcgtctaattgaggaaataaga

SEQ ID NO: 178506 - DNA, 122 bp, Homo sapiens
ggcggcctccggtgcaaaaaacggaaaccttggagcagaggatgaggaggaatacggaggcggggagcccacagaaaaagatgttgaggaaagaagaggagaccccggcctaaacaaatcga

SEQ ID NO: 178507 - DNA, 122 bp, Homo sapiens
tggctgcgacatggggcccgacggacgcctcctccgcgggtatcaccagcacgcgtacgacggcaaggattacatctccctgaacgaggacctgcgctcctggaccgcggcggacaccgtgg

SEQ ID NO: 178508 - DNA, 122 bp, Homo sapiens
tcacgcagctattccctgtgacgctggctcagttggctgtttgtacacattctttcagcacgtgaccaaagggaaacacaattgaaagtgctagagtgaccctcagagatggcggagtctgg

SEQ ID NO: 178509 - DNA, 122 bp, Homo sapiens
gggcccctggctggagcgaggcgggaggcggacggcccgtatgcaaatatcctgcggggccggggccgcctccagagcccgggataaaaggcggggcggggcgcggggcagcgaagccgctg

SEQ ID NO: 178510 - DNA, 122 bp, Homo sapiens
tatgtgaccattcacagtgagcttggtcaatacaaagatgttcccagaaacatgtgtcatcgttatatatttaatgtgcaggagaaaaaaaattaaagtagcattttaagcctgtgagttca

SEQ ID NO: 178511 - DNA, 122 bp, Homo sapiens
tcgactgcctggctgccccacccccgtgtcttttggcctcctattttctgttgccttccccgtggatggagagcctggtgagcatagtactctgcagggtcacccgtttacctccatttttc

SEQ ID NO: 178512 - DNA, 122 bp, Homo sapiens
ccactctggagaggcagctgtggcccttggaccagcccaagtgtgcttatttaagatgatcgctgttcattttcacatggctgacaaaatatttccagagtcaggaaagacatgtgcattcc

SEQ ID NO: 178513 - DNA, 122 bp, Homo sapiens
cttcactgttctcagcagggagttcctgatactttgtaagcaatcactaataaatccaaacgggacttggacagatggcaggagcagaaagaaaaggggactgacaaaagacaattagctgc

SEQ ID NO: 178514 - DNA, 122 bp, Homo sapiens
cagtgggatctctagacttcagcgcagggcacctctgctttcggtttctgtctggctctacgtgccgtgggggattgagaggcatctctggccaggccaagggcaacccggatcccggatct

SEQ ID NO: 178515 - DNA, 122 bp, Homo sapiens
aagggtctggcgcgtctggaaagcgcctgcgtattcctttcactgggggtggtgtcaaagcgggaaggtgggcgtggcttcagggaacgcctgcgcgttgctcctccgaaggggtggggcga

SEQ ID NO: 178516 - DNA, 122 bp, Homo sapiens
ggactctggggatcattttgcatagacctgcccaccacggaatgatggtatgtctcccatcgccaggagtgaccctaagagagccaagaggatttgaaggacaaaaatcagctgccccacct

SEQ ID NO: 178517 - DNA, 122 bp, Homo sapiens
tctttaccctacatccacgggcttgaacatttcttgacttgttggcaatccaaatcgttacgtctccgaaacagagttgactgatgggaccgcaggtctgggcaggactttgacttcctata

SEQ ID NO: 178518 - DNA, 122 bp, Homo sapiens
ttcctttctccttcccaccgtcatttggacattccgcgccccccgccccccaccctttagcggattgtctttctatgacattaacacattgtgatttcctggcctttgaggggtagaggagg

SEQ ID NO: 178519 - DNA, 122 bp, Homo sapiens
ctggcatctggagcccgggcccgggctggaggtggcggggcaggcggttgggactcggggcgggctcacctcaaacatgagccccagcaggaagaccatcgccacacaggagacgatgtccg

SEQ ID NO: 178520 - DNA, 122 bp, Homo sapiens
ccagcctcgcggaccatggttcgagctcttgagggaccccagggctccgaggggcaggtccgccagccggttctcccaggtgtgcgggagcggagagtccccgggcagccgcggcgccgcaa

SEQ ID NO: 178521 - DNA, 122 bp, Homo sapiens
caagtgcctaggttacacagaagaggagaagccatgtgtagacagaggcagagggtggagcgatgcagccacaagccaaggagcacctagagctgccagacactggaagtagcaggaagggt

SEQ ID NO: 178522 - DNA, 122 bp, Homo sapiens
ctctgagagtctctcccttccttcctgtttggaaatgattgttacccgagactttgatgacggtcccattcagtttttaaacttcaggagggatcacagaatcttgatcgtcttgcttccct

SEQ ID NO: 178523 - DNA, 122 bp, Homo sapiens
ctagggtctgagggcagggactgccaggcttaccccagggggttgggccagaacctagcccggcttcatgaccacaccatgggggcagtagcactgagatgaagaagagccccatcgtctgc

SEQ ID NO: 178524 - DNA, 122 bp, Homo sapiens
aaggggcctcccgtgggctttccaaacagcctgtgctcatttccgcgggagccctcggggcgctgtgctgtggctgcattgtcactgtttgtttatttctacatctgctctgttagaagata

SEQ ID NO: 178525 - DNA, 122 bp, Homo sapiens
gcgctcccaggttctgtctcgccgcaccccggcgggcactggcgcgggcaaggacgctggcggggagaacgccctgggctcaacgtactccagaatcgaatgttgagagaagcagtgctctg

SEQ ID NO: 178526 - DNA, 122 bp, Homo sapiens
gcagctactcgggctccatggcctcctccggccgcagtggatgcatgcgtgcgggggagccgggggcgggggcccagcaactttccacgcagggactgcctctcacaagagcacttcctcct

SEQ ID NO: 178527 - DNA, 122 bp, Homo sapiens
ccggaaacggtcgcacctcgggggtggaaaccactggcttcagctccaggaagcctcagacgcggggacagcgccctcacccggctctcggaggctctgcacgtccgccgccgtctcccctt

SEQ ID NO: 178528 - DNA, 122 bp, Homo sapiens
gcccggcccggcccggccaccagccaaccttcggccccgacactggccggccagccccggcgccagggtgcatgctgagggccctgagtctagctgctcttcccaacggatctagaaagcca

SEQ ID NO: 178529 - DNA, 122 bp, Homo sapiens
aggggaaagatgacgttactcccagtatctcagggggtctaccttctctgtgatattgttcgtgatatgtaaggggggagacgacgtcactcccagtgtcgcagggggtgtaccccttctgt

SEQ ID NO: 178530 - DNA, 122 bp, Homo sapiens
cttctctgggctccatcatggggcggggggccaggggatgctgcaggagtgtgttctgctcgctctctctcctgatgcccctgtaaaccacaacagttgagtctggggctcaggaatccatg

SEQ ID NO: 178531 - DNA, 122 bp, Homo sapiens
agcaaagtctgaccagcaggttcctcctgaaactatttataaccagatgtgcctcctccccgctccgttccttcctcctgccccacacaggcttcaacaaatcccttcaaatctgtttgatc

SEQ ID NO: 178532 - DNA, 122 bp, Homo sapiens
ttatacccggagctacgacgacttatgagatgggcgactctaggaccctcattttccagacgagaaaacggaggcacctgcaggttcagtgacttgcccaaggtcacgcacctggtcagcgg

SEQ ID NO: 178533 - DNA, 122 bp, Homo sapiens
ccatgagaccaaccccatgcactgctctgagacctgccagccactcccattcctggggtgcggtcctcctggttcagaagtgattttccattaggctatcttttaatttaaacatgaactct

SEQ ID NO: 178534 - DNA, 122 bp, Homo sapiens
ttgagggaggggaggacgtgaatccgcgtctcctccaccaggtggacgatgcgcgcattccgggccaagtactcctgacacacgaactgcaccagcagcagcagcagctcccggcccagcac

SEQ ID NO: 178535 - DNA, 122 bp, Homo sapiens
gttcccgtcactctctctgggtctttgctcagttcgcctatctttgcttttgtctgttgtcgtcaccctttaccaagtctcagacagctctgaccctctcatttcctttctttgccctttct

SEQ ID NO: 178536 - DNA, 122 bp, Homo sapiens
cacgtcaggtctccgtgattgcctcattcacttaaactgttgaagctctttcttcatcagcgaaaaggagagaaaaatgaccccctggagagaggttacaagggttaaatgagatagtctag

SEQ ID NO: 178537 - DNA, 122 bp, Homo sapiens
tggggccaagagtgagctgctgaggagtgaaacagacaaagattcacgttcctctccggccgcctatggggagcagtttccaaactcccatcccggatcacgcaggggcggggcagtgctag

SEQ ID NO: 178538 - DNA, 122 bp, Homo sapiens
agcagcttcgggttcgccatggccctgggaaagagatctaggcgtcctcgagaccctcaacgtgggaaactttgcccaggatccgaaccccagtgcctgctctggccctcaatcgactccgg

SEQ ID NO: 178539 - DNA, 122 bp, Homo sapiens
ttgtggtgtcggaatgggaggaggctcggcgcgggtttgaatcggtgcggaggcaacattcgcatctgagatgaggtggctttttaacccctgagggaccacatttaaggatttcgaagaga

SEQ ID NO: 178540 - DNA, 122 bp, Homo sapiens
aaagtacttcccttatagaaagaataagaaaagtttaagcacttatgtatgccacctagacggtactgaagattatttggaaagaatataaggaaatgatcattttaaggccaaaagagggt

SEQ ID NO: 178541 - DNA, 122 bp, Homo sapiens
gctaggtatgcccatgacatccacatgacaattcacccagaggtatttttatatccctgtcgctgatgaaaaagcagaggtgtggctcctcggtggagggctctgattccaaactcttgagc

SEQ ID NO: 178542 - DNA, 122 bp, Homo sapiens
cactgcagaccgtgccaccgaaggtgacatgcactttctgccacccatccaaaaccgtaacgtgaatctgcaacaggagaggaaagaagaaccaaaacttccaaggccttgcattttttctt

SEQ ID NO: 178543 - DNA, 122 bp, Homo sapiens
ggggaatttgcagatttcacgcgtgcaggccgggggcgggaagagaagatgcaagctgcgcgggcggtcctgggttctgcagacacccgaagaaactttggcccattcctctctggcttccc

SEQ ID NO: 178544 - DNA, 122 bp, Homo sapiens
ccatgggcacctccgggctcctggagatttgctgtgacagccatgagggacacacacaggcgaggggcatccccggggatctttgcggtggcgagtgtgtgcggtggtcagaagggctgtcc

SEQ ID NO: 178545 - DNA, 122 bp, Homo sapiens
cagagttaggacggcagctttcacctctgcattcctcaggctgtaaatgatggggttcagcgagggcgtcacaaccccgtagaacaatgcgacagtcttatccacgttgggatccttggcct

SEQ ID NO: 178546 - DNA, 122 bp, Homo sapiens
gagagcagaagggcaggccctgcaactcaggctgggagtatcgaaccctctgcctagggccggagttgctgccagtacccgctccctctgctcatccatccttgattatttggcttctagga

SEQ ID NO: 178547 - DNA, 122 bp, Homo sapiens
ggccagcccactcagggtcccctcactcctcaagggagccggcagaccacaagcagctttcgccctcagagacccagactccaggctgaacctcctcctccttacagggaccctggcctcac

SEQ ID NO: 178548 - DNA, 122 bp, Homo sapiens
aaggctgcagcctaacctgttacttttgctttattcagcccagtgtctgatcaaattttccgtcactcagggcatgaagggtggggcctcaaaccttatccaatcaggggccgtgaaataga

SEQ ID NO: 178549 - DNA, 122 bp, Homo sapiens
gtcgggggcgtggcgagaccctgtttcagtggagggagggcttatgcattgccgagacgccgattatcagaccttgaccctgtcgctttcagaaaaaccactggcagaagatccggaccatg

SEQ ID NO: 178550 - DNA, 122 bp, Homo sapiens
taaatttggggagatcctgaagagaaaagctgctgaagcccatgtggatgctcattactacgagcagaatgagcagccaacaggaacttgtgctgcatgcatcactggtgacaacaggtcag

SEQ ID NO: 178551 - DNA, 122 bp, Homo sapiens
aaggaagtaagtgggcagcccggggtctgctggaggcatccgttgggcgacctagacacccgcctgtgctccagggcctctccccggtgcccactcagttcactctctcgtgtgcggatctc

SEQ ID NO: 178552 - DNA, 122 bp, Homo sapiens
agtggctctcagcttaaaggatcttggcttagaaggaatgtgcagtgggctgcctctgctcgggaggggctaaaaaaagcctcaccctcccctgggctttgtgtgaggcttatcaactgctc

SEQ ID NO: 178553 - DNA, 122 bp, Homo sapiens
tgttctctcttattcacttctgacttgaagtatatttagtttcacaaagtcactgttccccgaggctaaggccagcgggctcggcgctatttttaccttttccatctgccaggcgctgcggc

SEQ ID NO: 178554 - DNA, 122 bp, Homo sapiens
agggtacggagtaggcagatgtaaattcacaggggataatcagaaatgaggaaaggatttcgtagggtgctcatttttaaatagaggcctcactgaagttgacatttgtgaaaaggcttgaa

SEQ ID NO: 178555 - DNA, 122 bp, Homo sapiens
agcgaaacaagagtgtcttagcaaccagcaaggaagtcctgccccctcaccggacgttgacgagaatttcacttattattggtggataaaagtatcaatcagagtgaaaggcccttataagt

SEQ ID NO: 178556 - DNA, 122 bp, Homo sapiens
agattccaacttcctgggcagagggtcatgtagtggaatagagctgtacctggcttcaggcgagacttgggtaggtgaagaaaccccagaataagaatggttctaaaaaaacaagaatagtc

SEQ ID NO: 178557 - DNA, 122 bp, Homo sapiens
acgaccctcagctcccacccctctctgccccactgtccctccggcgtccctcgggggagacgacacagccgggcccaaaagaggcctcgcagatgctgccgcgtgagcaccgcgctgagggc

SEQ ID NO: 178558 - DNA, 122 bp, Homo sapiens
taactaccgaacggccagtcaaattggccagaccagacttctgcctccaggggtcttcagcgcccaccgcccgaccccacccctcggcagacagtgagaggcgggcctctggccggagcgaa

SEQ ID NO: 178559 - DNA, 122 bp, Homo sapiens
tcagtttcatttaagaaccaggagagcctgatgtttgtaaacacagctttagtggaagcacgagggttaggagtccctagaaaggtgatatgaagcctaggtggatgtgagggttggtgaga

SEQ ID NO: 178560 - DNA, 122 bp, Homo sapiens
cagctcctaagtgtttgattccattacccccaaaagcaagcagtgcacatttcaaatcgacgtcaaacaaatcccactgataacgggtgtcatatcaatgacttatcaggtcttttttattg

SEQ ID NO: 178561 - DNA, 122 bp, Homo sapiens
tttttggccttattgctacattggggtgccccccggtgggcacgacatgccccatgggtgcgaacgagggattccaggatccccgggtccccaagcagggactgttgggaaggcactttcac

SEQ ID NO: 178562 - DNA, 122 bp, Homo sapiens
ctatagatgtgcataaattgagagcaaaaccccaaatgttttagaaactttaatggctaccgtatttcaagcaatcagtaaagtaaactttaaaaaatactggtgcagtttattgcttcata

SEQ ID NO: 178563 - DNA, 122 bp, Homo sapiens
aagtaaaagataattacaacacaacaataaattattaccacagaggggagcagagagcaccgcaagaccaaaggtgagaatctaaccaatggcagaagtcacaagtgaaaaaagagctcaac

SEQ ID NO: 178564 - DNA, 122 bp, Homo sapiens
ggatctagaaaagtcttcctgtcctggttctgggctgccccggggcctggggtgatgacccgcaagcccaagggcgctcggactcctggcccgaaattccagggcggacacagcccgggatc

SEQ ID NO: 178565 - DNA, 122 bp, Homo sapiens
cgagtcccctttgatttgccttcattaattattcatgattcaggttggaaggcctgctgacgaccccctgtggccgttctctgagctttcctgtcacatcgtttccttccacgctctttggt

SEQ ID NO: 178566 - DNA, 122 bp, Homo sapiens
acaagcctgatgtggccatgcattcagcatgacgtcaaaatgacaggttatgttctgttacgtgtccgctggtatcagctgtattgatcctgaggttggtgaatgaaagatgccctcacttt

SEQ ID NO: 178567 - DNA, 122 bp, Homo sapiens
acagccacagtacaactgctggtcttcagtcagggccactggaattctacccaaggctcacggacagaactcaaatcacattactttactggtccttctacaatgagaacaatttcagtgat

SEQ ID NO: 178568 - DNA, 122 bp, Homo sapiens
aactcagtgcccacgtgcgaatgaatgaacaaactagttccgggcggagccagaggcgcgcgccggcgcggaccgaggcccggccctatccgccccgccccctccgccccgccccctccgcc

SEQ ID NO: 178569 - DNA, 122 bp, Homo sapiens
tttcaatacaagaggctctaatcccaacatcacaggttgttgtaaattaagtttgcacctcgtcatgcttgtaaagcacttagcatgacacctggcacatagtaagcgctcaataaacagta

SEQ ID NO: 178570 - DNA, 122 bp, Homo sapiens
acggctccaccatggaggaggcggaccgaatcctcatccattcgctgcgccaggccggcacgtaaggacagagcccccgcccacccccgaagcccacatccgggactctaaagcccaggacc

SEQ ID NO: 178571 - DNA, 122 bp, Homo sapiens
cccggagacgcggcggaaaaccctggtggctctctttactgaccatcagtgggtggcccccgccgtggccaccgccgacctgcacgcgcagtacggctcccccacctacttctatgccttct

SEQ ID NO: 178572 - DNA, 122 bp, Homo sapiens
atcctaaataacattcttgccagtagaatgcaaaaacagagacagagtaagaaaggacaccgagcaggagcccacgaggttcacagtaagaaaacaagtggctgagcagccagagagaaagc

SEQ ID NO: 178573 - DNA, 122 bp, Homo sapiens
tttgacgtgtataaaaacgcagcgccctgcagaggacacatgccgtgttgccagtgccaccgcaacgtcattcggcgggacgctgccggacgctggttcgcctgacgcgcgagctacgcagc

SEQ ID NO: 178574 - DNA, 122 bp, Homo sapiens
cctcgagacaaagaggacgcagacacgggaagtgaagtggcaccgggcactgggcacacacgcctgtcccaccccgacctccgctgcggggcgctgctgcactgggcgtgggactttctgac

SEQ ID NO: 178575 - DNA, 122 bp, Homo sapiens
tgcactcacccaccggcctagggctccgggcactctgcggaaactcgaccaattagagcccgactctggtctgacgagcatcccgtccgaccaatcagtgtgtcttgagccggcaaatcacc

SEQ ID NO: 178576 - DNA, 122 bp, Homo sapiens
ttcccccacgccggcgatccgggccttctcttgcgcccctcgcacttctccccgacgggccgcagactcactagcaagccgggtgggtagaaaagcctaagggagtataggggaggagttca

SEQ ID NO: 178577 - DNA, 122 bp, Homo sapiens
accccgggctcctcacgtgcaggcgtcggtccgggccactccagtgacgagggtaggatccgcagccccttcgcgaagcccgagcgagaccgggcgacaggcaggtgagaagcgcgaggtgg

SEQ ID NO: 178578 - DNA, 122 bp, Homo sapiens
tgtaatggacgtgcagtcgtatgttatgtagtccttcgtttggtctctcctttagcataacgatgtgtgagatgatgccattcattcatttttgttgctgagcagctgctgagtattgctgg

SEQ ID NO: 178579 - DNA, 122 bp, Homo sapiens
gcaagccggcctggcccgtgtcttcatcggcatcaacgacctggagaaggagggcgccttcgtgtactctgaccactcccccatgcggaccttcaacaagtggcgcagcggtgagcccaaca

SEQ ID NO: 178580 - DNA, 122 bp, Homo sapiens
gcccgagtccccagctccactgtcctccgcctctacactcggggattctggagaccacgtcgacccgcaatgaactggaataaagattccagtctccagcccctgggggaaggcaggagcag

SEQ ID NO: 178581 - DNA, 122 bp, Homo sapiens
tgcagatctcatccaggatttattggtgtccagtggggtgagggaggcctgtctgaaggccgagcctccctgcctgcacccaagttagaaatgggggtaccagcacttagcttctctctgag

SEQ ID NO: 178582 - DNA, 122 bp, Homo sapiens
agaaagtccacagctgaaggacccggatgaagcgagcctaggactttgaagtgcaagcctcgccaattgtagagcagtcaccatggcgacaagataggggtgaagaggtggaaaaagagaag

SEQ ID NO: 178583 - DNA, 122 bp, Homo sapiens
ctcactgtcagctgttgtaataacaaggattttcttttgttttaaatgtaggttttggcccgaaccgcgacttcaacaaaaaataagagaagaaaggaatattttctagctgtgcaaatcct

SEQ ID NO: 178584 - DNA, 122 bp, Homo sapiens
tggccctggggggcaggctccggagcctcaggtgcgtcagagttaagctgtttcccaccccggaacacgcaccggcatttcagccttcacttgctcaactccagagccaggacgctccagag

SEQ ID NO: 178585 - DNA, 122 bp, Homo sapiens
ggtggaaagaggcgcagagaggcctagtgacgagctgggatcacagggagttgatggcagcgccgggagagcccaggctccgaactcccgggctgggttctgcccctacagcccgaaaagaa

SEQ ID NO: 178586 - DNA, 122 bp, Homo sapiens
agaaggcgacgattacacagaggagcccccagaggggcgaactcttgaggaagatgaacgcggagggtggagccagccagaaattcagaaaaactagaggcgtccccggtagcgaaggaagc

SEQ ID NO: 178587 - DNA, 122 bp, Homo sapiens
tgtggtggatgcaattcccctcgcctccagccgcgaggagctccccggcgccgcaggcagcgtcctcctccgaagcagctgcacctgcaactgggcagcctggaccctcgtgccctgttccc

SEQ ID NO: 178588 - DNA, 122 bp, Homo sapiens
cgtggcttctgctggaaaccggccttttccaccttccttgctgtttggcttatgaatttccggggagaccaagaaaagaactgtatttgccaactaatgaagttcagattcaccctttcttt

SEQ ID NO: 178589 - DNA, 122 bp, Homo sapiens
tgaatgagtgaacttgggaataaccacgcgaagcgttgcatggctggagagttgcacggccggcagcagaaacaagttcttccagcttccacatgagtttccgagtgcacttcccacatgaa

SEQ ID NO: 178590 - DNA, 122 bp, Homo sapiens
aggaagagccagggcaccccacgcttgagcagctcctgggtcatggctgagttctgcaggcgccgcagctcgtcggtggccttttcaaacagcgaaagggtcagggtcctgagatcgtccag

SEQ ID NO: 178591 - DNA, 122 bp, Homo sapiens
agaggtaaggaagatgaaaattgagggggaaattaaatgtggcagctaagaattcattgacgactttcacaagagaggtcttagaaccatgaattgctggaatgtatcctctttgtcagtct

SEQ ID NO: 178592 - DNA, 122 bp, Homo sapiens
ttctccttcctttccttatcggggccatccttcttctccttctctcgtgctgggtggtgccgttcccacggctccaggcccttcccaaagtcgccgtcggacttgtccttgaagccactctc

SEQ ID NO: 178593 - DNA, 122 bp, Homo sapiens
ccaacatcttcccaagggaccttccagtacctgcaggtcccaggtccacggaggcaatggcggagtcacgtggagcctcacggagaaaaccggacggagcaacggacaccaaacgcggagct

SEQ ID NO: 178594 - DNA, 122 bp, Homo sapiens
aggatttgctgggagagggtgttgagttcactgtgccagcatgcttcctccacagtaacacgctgaaggggcttggtgtttgtaagaaaatgctagaagaaaacaaactgtcacaagttgtt

SEQ ID NO: 178595 - DNA, 122 bp, Homo sapiens
tctcgcactccccggctcccaggccaggtccccagccccagagttggaagagccttagggcgggaaggaagagacagcaaggaccagaatggggagcatgagatcctgatgcggaacccgac

SEQ ID NO: 178596 - DNA, 122 bp, Homo sapiens
gacaatataagaagtagagatttaactttatcgaagttactaaagttactgaagaagaaacgaaacaatagtgggggaagacagagtaaaatattgcaagtaaacaaaatcctcatgtgtta

SEQ ID NO: 178597 - DNA, 122 bp, Homo sapiens
gtagcaggacaagccacagacaaaacccctcagacaccgagttgaaggaagggttttattcggctgggagcatcggcaagactcacatctcaaaaaccgactccccgagtgagcaatccctg

SEQ ID NO: 178598 - DNA, 122 bp, Homo sapiens
ataacacggagagctttttctcctaatcagcgcacccagtaaacccacacctgtttttcccgaaagctagatagcaaagctggaaatcaaggcaccctggctgagtgcctgcagtaaccttc

SEQ ID NO: 178599 - DNA, 122 bp, Homo sapiens
acataacaatgcaagataaaagtgagcaatgctgagtatgcagcgggcagcccgtgtgggcgggtgcagcttccacctgcaaggaaataagtcatttagcccccaggattcccactggagaa

SEQ ID NO: 178600 - DNA, 122 bp, Homo sapiens
gggggggcccctggaaccctctgtgggctggcagtgtgcttcctgcacccagcgccagcccgccctggggaggggctgaacccgccctgctcgtgataaggcacaagcaagggctgccctga

SEQ ID NO: 178601 - DNA, 122 bp, Homo sapiens
ggagcgagccgtgggcgcctctaggggtgcgggagccgcgggagcgcagggggtggggcccggcgggccaggggaggggcggcggggcggcgggcggagggaggggccggcgcctgcggcgg

SEQ ID NO: 178602 - DNA, 122 bp, Homo sapiens
tagaaataccagccagtcccggcgttcagcactgctgttccagcctctggctggacttcccgccctccctggccggcaccaaggctactgtcacctgagtggtttccccagcccctggggaa

SEQ ID NO: 178603 - DNA, 122 bp, Homo sapiens
cttcaccccacctgggcccctccaggagggtccaggcccttactgtgggcatcagggggccgaatctcctttccaccagctggcccatccctggaaggagctcaggcaacccctgctatctc

SEQ ID NO: 178604 - DNA, 122 bp, Homo sapiens
cgctgggcccgcccccccgtgcctggggcagcttctcattggtgaaacctcctccccggccgcccgctgcttggaaaatcagcctcggattggctgacagccccccgacgggcgtggcttcc

SEQ ID NO: 178605 - DNA, 122 bp, Homo sapiens
gtccctccccgccccgccccgcccccagcccggctcgcggcagccgccccgccccggccccgggggatccccacccgcgctgtcaccggccgcgtcctcaccctagcctggacaaccccatc

SEQ ID NO: 178606 - DNA, 122 bp, Homo sapiens
ccttctccacggtttgcagggcccacatggcagctgtggtgcggggttccagccagcgggcgttgacagtggccagcgtaaggctcaggaacagcaggtaaagctggcagggagagcagagg

SEQ ID NO: 178607 - DNA, 122 bp, Homo sapiens
tcctagatctcccggaagtccctttcgctcccagcgcttcgcgtaccaggaaggggacggcgtcctgaaagggacatttgaaaaacggaggcaacgcgtctattaattaggtggcggcgcct

SEQ ID NO: 178608 - DNA, 122 bp, Homo sapiens
tgacgacaggaacaacggtattaacaacggccggaaggtgagcggtgtcccagacaacgacggatagcggccacctggccactggtcttccttctctaccagacctgtatgtgggaagagag

SEQ ID NO: 178609 - DNA, 122 bp, Homo sapiens
ctccggccgctgctcctttgtgtgccggtctggccgagcaggggcctgggcaggcagtctcgggggaaggagcgtggctggccccgtggcacccgcagctctctcaagaacgattcccgcca

SEQ ID NO: 178610 - DNA, 122 bp, Homo sapiens
gaacccggggctgtggggagtcggccagaattcttgatgcgcttagaatgtttcttcttccggccctctggtcttcgcaattatcgtccctctcctaggtcccccgcccattctataggctc

SEQ ID NO: 178611 - DNA, 122 bp, Homo sapiens
aaacttgagacgggcggatggcacctccaaggctcggaccttggggccctgcagccttgtcgaggccacctcgaagggtagcctccggggcccgcacccccacggctgggccgggggcgctt

SEQ ID NO: 178612 - DNA, 122 bp, Homo sapiens
atcccatttcgtagcttgctgagagattcgctgcgggagtttggctctgagggaggggaacggtctggagggcagctcagggtacaattgcgccttgttagtgaaaaggcgccctgcttatt

SEQ ID NO: 178613 - DNA, 122 bp, Homo sapiens
cccccgcctggccctgagactgctcacccaagatccgctggctgcctcattgtactatgccggcgcccgtgctcccggccgcgcgactccggcttcggctggggcaccggccgcggtcctgc

SEQ ID NO: 178614 - DNA, 122 bp, Homo sapiens
cacacacatcctacgaggacggctccaggaaccacaatgggcgaggagggctcgggcggccgctgattctcatgactctgtgggtctcaatgctccatgagaacgtagcccagctcataaaa

SEQ ID NO: 178615 - DNA, 122 bp, Homo sapiens
tcgcgacctctgcggtttcggctgcagcagctggaggccctgcggaggatggtgcaggagcgcgagaaggatatcctgacggccatcgccgccgacctgtgcaaggtacgcacgcgtgcggc

SEQ ID NO: 178616 - DNA, 122 bp, Homo sapiens
gggtcagaccatctggaccaaggggggccgagcgaggcctacttctggtttacgcacgggcgctgaaagaagcggcactgtccccccctgccgatgcgcagtggcgcctcccggaggcggag

SEQ ID NO: 178617 - DNA, 122 bp, Homo sapiens
tgcaactttacccatttgtattagttatctattgctgtataacaatttatggctattgtccggagccctcagttttgtgcaacatggagctttccttagggctgcttgagtctcctcacaac

SEQ ID NO: 178618 - DNA, 122 bp, Homo sapiens
ccccacactgccttttgtagacgagttttgtcaccaagtcaaaagcagcagcgcgcacgccgcctggacttgggtctgcgatcctactcacgcagatgtgttgcgctcacggattcgccttg

SEQ ID NO: 178619 - DNA, 122 bp, Homo sapiens
ggacagcaagcgtcaaaagactgcacagcaggaaggcgaaaccgaacagaactgctgctgcgcggcgacagctgaagtgggtggagaacgggagggcgggggaggcggggccgagagcgatt

SEQ ID NO: 178620 - DNA, 122 bp, Homo sapiens
tggggactacgtgtgcggggaccacggagcagggaccacagacccatcctcatgagctgccgtgggaatgcttccaccgtggagccggcctgggcgggggagaggctccccctttctgccgc

SEQ ID NO: 178621 - DNA, 122 bp, Homo sapiens
aggtgaagagtcaggagaggcgccagttcacctccagacctgccttaaaagcagcttgcccgccttctctcctcccctccgggcgggccctgcacgtggccctgacagcagtaggccccacc

SEQ ID NO: 178622 - DNA, 122 bp, Homo sapiens
tacagaaaatgtacagcaagacaagtgcccggaagttcactgatccttcagaaggaaatgcgctttactgattgcaaagccttcagaatattggagtgtggtgtgtttgctcatctgatgct

SEQ ID NO: 178623 - DNA, 122 bp, Homo sapiens
acctcaggtgatccatccgcttcatcctcccaaagtgctgagattacaggcgtgagctaccgcgcccgccctctaactgtttctttggagtgctgctaggaagattcaaagaagtgcaaata

SEQ ID NO: 178624 - DNA, 122 bp, Homo sapiens
tcctgggtgcaagactcacaaaaccacagtcatggggccacgtggtgttggctttcagaccgatgagcagaacgagagcgtccagaaacaggcgcccgcacgcggaccactgacttgatgaa

SEQ ID NO: 178625 - DNA, 122 bp, Homo sapiens
gagaatcgcttgaacccgggaggcagagcttgcagtgagccagaatcgtgccactgcactcggcctggcgacagagcgatactccatctcaagaaaaaaaaaattgtttctcaatacctaat

SEQ ID NO: 178626 - DNA, 122 bp, Homo sapiens
ctcaggtgatctgcctgcctcagcctcccaaagtgatgggattacaggcgtgagccactgcgcctggccccagctctgacattctaagtccagtctgaggatctcataaagtgaaaagtaca

SEQ ID NO: 178627 - DNA, 122 bp, Homo sapiens
tccaagtagatttggcaaggtcttcctgatctctacggtcagacattgtgtctatgtgcacgcacacagacataccgtgccatatcagtatagggaagcaggctaggatgaaggaaacatgg

SEQ ID NO: 178628 - DNA, 122 bp, Homo sapiens
gcccactgagccagcccaggagcggccaagcctcgggttagggctccctctgccagctgacgctgggcactacactgctcaagtcccaggtgggtcctaagctttgagaaagggctcatacc

SEQ ID NO: 178629 - DNA, 122 bp, Homo sapiens
gctccctgtgctgtttcagagtcagcagggagtagcacactcccctctggctggagaccccgagacgcccgcctaccgcaagtgtcgggtttaggacgtctcccctgagcgaagtcaggggc

SEQ ID NO: 178630 - DNA, 122 bp, Homo sapiens
ctgggctagtcctgttccctggcgtctgggcctttctgctctccgcaaggagctgggtcgcgacctgtcactgccagccgtgcgctcgccctctgcgccccgtctcgtggtcactgccgccc

SEQ ID NO: 178631 - DNA, 122 bp, Homo sapiens
aggggggcgtgtcagggctcagagggcgactgcaaagacagagagccatggggttgagggcggtgaggtcgggggcagttgtggcctgggtggtggctgagcatggcccacggctcgtgtgt

SEQ ID NO: 178632 - DNA, 122 bp, Homo sapiens
tgtccaatatgacagccaccacccacattaggctattgagcatttgatatgtggctagtccgaattgagatgtgctgactatttaaaataaacacctgtgtttgaatacttaaggtgagaaa

SEQ ID NO: 178633 - DNA, 122 bp, Homo sapiens
ggcctcacctgggcagcccttcactttgctctgcacctcaatcaagggcagagcagcagccgcggggccagctcctgacgcacatcttaacatggcggcaggtgagagagaacaagcgtgag

SEQ ID NO: 178634 - DNA, 122 bp, Homo sapiens
gtgcttcattctttttttctgatcccaggcagtttccaaggcaaataaatgcccacaccacgtgaggctgccactggctttcacggaaaatttctcccctttagcttaaagagtatataagt

SEQ ID NO: 178635 - DNA, 122 bp, Homo sapiens
cggtgcacaccccagcctagcaatacacatgcccaaagtagacagccagtgctgagaaggcgatgtgccgaccatgcagagccgctgttccagcctgggacttgccttcgtgtgcttctcgg

SEQ ID NO: 178636 - DNA, 122 bp, Homo sapiens
ttaccttgcgctccagcctccaggctagataatacctggaaggcagggcagggctgttcccgctctcaccccttgcggaaggatggcaggatccggcgcagcgacgtagcagcgggagggca

SEQ ID NO: 178637 - DNA, 122 bp, Homo sapiens
tccccgcagttttcaatcatggtgagtgtgggccccgggttcctgcccacctctggccctcgcgcccttgagtggggtttcttgcactttagggacttttgggaggcagctgtgcaaggcac

SEQ ID NO: 178638 - DNA, 122 bp, Homo sapiens
actttttactcttaaagggtttagggattgctcacagcgccctctccctgagcttcaaaacgagacacaggtcgggctcacgcacctgtgaacccagcactttgtggaggccgaggcgaaag

SEQ ID NO: 178639 - DNA, 122 bp, Homo sapiens
gatgaatgaataggtaaatggaatggagaccaccaagatgtatacagtgagttggacagacgaacctagtggactcaacagaatggtagagcaattgatggatcataagtggacaatgaaac

SEQ ID NO: 178640 - DNA, 122 bp, Homo sapiens
cagggaaacgcgggaagcaggggcggggcctctggtggcggtcgggaactcggtgggaggcggcaacattgtttcaagttggccaaattgacaagagcgagaggtatactgcgttccatccc

SEQ ID NO: 178641 - DNA, 122 bp, Homo sapiens
taaagaaattcatctcccaagtgacaagctcagcagagccgcaccaacttctgtaacagacgtctagacaatttgactttgaaatacataccctaagcctgaacagcctgaagtttcccagc

SEQ ID NO: 178642 - DNA, 122 bp, Homo sapiens
tgattggttctcgccgggtgccaatgagcccgggcgccttcaggtgctatggcaacgaggcgtacgtgcggaaacacatgatggccagggtggaaggggagtaacggggtttaggttggtac

SEQ ID NO: 178643 - DNA, 122 bp, Homo sapiens
aagctctgccttttcttctgagaatgtgggaccctgtggccttcgcagcatcctcacagccggagtcttcttagcgaaattgagggtggttcttcacgctttcccccactgccctctcaacc

SEQ ID NO: 178644 - DNA, 122 bp, Homo sapiens
ggtcaaggccatctcctgggccgcctggcggccatcgtggctaagtagttactgctgggccggaaggtggtagtcgtacgctgcgagggcatcaacatctctggcaatttctacagaaacaa

SEQ ID NO: 178645 - DNA, 122 bp, Homo sapiens
gtctccccttcttctccatcagtgagagccacgtgggtgggcccctgcaggcggtggggccggttttccaaactcgggacaaatcagggctcttaactgcagaatttctgctgctttctaag

SEQ ID NO: 178646 - DNA, 122 bp, Homo sapiens
atgttgggcaaatcccagcgtgaccgtatttggagatggggcctgtatggaggtaataaacgtgaagtgagatcataatggtggggccttaacccagtaggcccattgtctttataagaaga

SEQ ID NO: 178647 - DNA, 122 bp, Homo sapiens
tgagcagagactgaggacaagtaccagggctggagacctgaggttgaggggaggaggggacgagaatgagtgatctcagacgggagcaccgccatgccctggggcctctgggaagcactagg

SEQ ID NO: 178648 - DNA, 122 bp, Homo sapiens
cgattctgtacaagggggcagcggcagaaggccggccgggcgggtcactgggcgtccacccggaaggacagcagcttctcggaatgcatgttgttcagggtccgcaggtccggcagcttgag

SEQ ID NO: 178649 - DNA, 122 bp, Homo sapiens
cgcggcgccacgagcaggtcaggagagaactccctcccgcgggccgtccgcggaccctggcgtcagccagcatgtcctgagccacagacgaggctgtcccaggtgtgaaagagggtctgtgc

SEQ ID NO: 178650 - DNA, 122 bp, Homo sapiens
tgccccttgcagagcactgataaccaaacccacatgagaaagatgcagaggcctggtgcccggtatgggctcactgcctatcaggctctacctctgcctcccagcacaaacagtgaagctct

SEQ ID NO: 178651 - DNA, 122 bp, Homo sapiens
acctccccgctaaacctcggtttccctgaccccaaagggcagcgctcactggggaagcggcgccgccagctgccaggacgctcccgcgcagcccggtttccctacgccggggcggggcagag

SEQ ID NO: 178652 - DNA, 122 bp, Homo sapiens
gtgaaggggaccccctgggctctgtctctttgtcctcttcctgctagaaagccggagagccggcagcagagcccgagctgcctctgcccgcagccctgagtggctccgaggtgacctgcttc

SEQ ID NO: 178653 - DNA, 122 bp, Homo sapiens
tgggggtgtttgagcctctgccgcagggacactgataaggacatgagttgtggtacgccccgttttgtgtagcagctgtcagtttgtttctggaatgagactgagcttctagaagtctgggc

SEQ ID NO: 178654 - DNA, 122 bp, Homo sapiens
aatcacattagcaagctggaaaaaatcagtgtaagttaagtaagtttctaaactgaagagcgtgtgttttccaggattcctattgctactgactgtaagtggtccacattttgttaatgaga

SEQ ID NO: 178655 - DNA, 122 bp, Homo sapiens
cgcgagctggaccagccgtggtgagtgcagcggcgcccaggcggggagcgcagtgcgggtcgctgggactgagcgcgcgagcggggtgggagtcgggatgggggcccggggcgctgggcgga

SEQ ID NO: 178656 - DNA, 122 bp, Homo sapiens
acccactcctgggggtcttttacttcccacccgatccggcgacccgccacccccactccgcgtctctgcctgcggggactccacggagttcgataattacctagagctccaccgcgccgcca

SEQ ID NO: 178657 - DNA, 122 bp, Homo sapiens
ggcggtcggtcctgatcgtcctgatggcagcgaccaggctggactcgggctgtgcaggggcgaggggagcagggcggggtgacgcccggagagcggcctggagagcgcgtgcttcagaaggc

SEQ ID NO: 178658 - DNA, 122 bp, Homo sapiens
tcagtctatttttaagggattcttcttaggaccaaaacctagaaccactaacctggcccccgatctaccctctcttgcccccagtgaatcactgtgacctaaaatgccacagccttccccca

SEQ ID NO: 178659 - DNA, 122 bp, Homo sapiens
actgtgcacggtggccgacacccgcagggacgcccgccggacgagcacgcggagggccctcgcctccacggatgcaccatgccggtgtgaggagcatctgttcttcccactctctgcagtta

SEQ ID NO: 178660 - DNA, 122 bp, Homo sapiens
gcctacatgtactatagcttcacaacttagtttgcttttataatctttatggattttggccgtgttcaaggttttcagagttgagcatatgatacagtattccatcaacaaaataaggctac

SEQ ID NO: 178661 - DNA, 122 bp, Homo sapiens
agttctcctggactatgctcctgactcagcagaattcagcagacagtctgtacaaggcatcggtctgtggtggagagacttatctggaaaactagcagggaaaaagatgctaactaaaatgg

SEQ ID NO: 178662 - DNA, 122 bp, Homo sapiens
agataggcatttattgggctaaatcctcacgtagaatgagctttcccaacacaggagctgcgtcctatgcatactcagtcccatgtgcctggcgcagtgtgtggcctgagactgacaccagc

SEQ ID NO: 178663 - DNA, 122 bp, Homo sapiens
tgtagcaccgtcgtctgcgtgatctgcttggagaagcccaaataccgctgtccagcctgccgcgtgccctagtgagcggggaggtcgcggggtccaggggcgcgggtgtccggccatggcgg

SEQ ID NO: 178664 - DNA, 122 bp, Homo sapiens
aatccctctccctcagcaagctttccatcacggcccccccgtcagcatcttccctgatagcgttcttctctgtgtttattctggggcttcaggctcgcccaggaggaactgataaccgctgg

SEQ ID NO: 178665 - DNA, 122 bp, Homo sapiens
tgcctgcaagggcctggtcccggaatgaactgtggatggaggctgctttgtccttttccccgtccagatccatgcccatagacaccgctgactataggctgggcccagggtcccttcctcca

SEQ ID NO: 178666 - DNA, 122 bp, Homo sapiens
ctgtgccccaggggacgcaggactctgcaccctgaccctagagcttgccctaggatggcccggccatggcgaggccctggaacggtgaagactctctgcccatcaacctagcacctctgccc

SEQ ID NO: 178667 - DNA, 122 bp, Homo sapiens
tgcgagccccggcgcaggggccggatctggccgggggccggcggcggtgtgggagcggcgcgtcatgtacaccatcaccaaggggcccagcaagctggtcgcgcagcgccgcacaggtgcgc

SEQ ID NO: 178668 - DNA, 122 bp, Homo sapiens
ttgtatcatccgagttgatctatacgccggatatcactgctcttcttttcatctggccaacgtgaagactgtattcgaaaagtgctgcagtcctacctacatccacactattaattcccaag

SEQ ID NO: 178669 - DNA, 122 bp, Homo sapiens
gaagctggtataaaacttccgaggttcttggctccgccagacaaaagattccggagcagccgcttataaacactggcagcctccttttttgaaatgtcttctttgagttgtttaacttttcg

SEQ ID NO: 178670 - DNA, 122 bp, Homo sapiens
cctgggccgtgattgggcgcgacctgggctcctgggtgctcattggcgccgtgaagtgctcgtcaccgccccctcctgccccttcatgcatgcgcggaggccgcctgctagcaaggtaggtg

SEQ ID NO: 178671 - DNA, 122 bp, Homo sapiens
aaacgtgcaattctcctgtgcccaaggcacagacaagaaacgggaggcctgaggggccagcgctggggctgactccgtcctgtgtgaggctaagaggccctgagaaacgcggggggaaagcg

SEQ ID NO: 178672 - DNA, 122 bp, Homo sapiens
aacggcttgggtttgtggcaaaaccaggactcaaggttaggaattctgactctaggcaaacgaagctcttgagagttcttccaaaacactccatgcgagtgatttaggatggtcctaaggca

SEQ ID NO: 178673 - DNA, 122 bp, Homo sapiens
tttgacttccgccaccagcaaccaagggaaccagatcccaagggaaccagcacccctgggcgctcgcggcccgaagcctgaggttcccgccccgccccggcagggcggccccgccgacaccc

SEQ ID NO: 178674 - DNA, 122 bp, Homo sapiens
tagcgtcttctatcatccaatcactgcactttacacactataaatagagcagctcatgggcgtatttgcgctagtgttgggtgttccgctgtgctgtttttccgtcatggctcgcactaagc

SEQ ID NO: 178675 - DNA, 122 bp, Homo sapiens
cgaaacattctgggaaatgtcttaaacaaatgcgcacatcatagacttttaaattggaatcgtttttgttctttttttttcctactttttatgtgttctattttttttctagtttgcaaaag

SEQ ID NO: 178676 - DNA, 122 bp, Homo sapiens
gcctttgtgttcctaggtggagtccgtctgctgggtgcgctgcttcctttcagggctgtgcggactttccttcgctgcgtggatcaggatgcaagatggacttccccccaccctccgaatca

SEQ ID NO: 178677 - DNA, 122 bp, Homo sapiens
gctgtccccaccccatgaccacatgttccgcaggcaccctcagcgctgtgccctgcgtgtcgcccaggcaggtgtttgtttttgagcgcagattctgcctgtggccatagccatgtggagat

SEQ ID NO: 178678 - DNA, 122 bp, Homo sapiens
actccccacacacacttaggcatggcagaaaatagaacccagttgggaaaatctaaacatcgaccaccctggcaggaaccaaaacgctctctgcagagcccgtggcgccccagccggcgggg

SEQ ID NO: 178679 - DNA, 122 bp, Homo sapiens
agcctccgcgcacctccggagggaggcggcacttgcaggtccgggggccgcgccgccatgcgcaacaacgggaaattccagtggcacccgagccccgagctcacccaccccaggcggcatgc

SEQ ID NO: 178680 - DNA, 122 bp, Homo sapiens
agctctaggctactttcccctttgtttcctagagtttcataacagaagaggttgatgagtcgtcgtcaccacagcaaggtgagcgcctccttccatgggcacaaaccgcatgcagggaccag

SEQ ID NO: 178681 - DNA, 122 bp, Homo sapiens
aagcatggctggcagagggggcagggtctcaggaaactttcaataatggcagaaggtgaacgggaaaccaggcacatcttgcaggcttgtcttacatggctggagcgggaggaagaagagag

SEQ ID NO: 178682 - DNA, 122 bp, Homo sapiens
gcctgtggcaatgggaaacggtcatgtgtgggggcgatgtgccagcgccgcgctccgggccgcgctccagctaccgagaagccagaggcgacgactccctggtccaggtgtcccgaaaacaa

SEQ ID NO: 178683 - DNA, 122 bp, Homo sapiens
gtcctccgactttctgaggttaacaatcttgcaggatttttattgacctgatacagctcccgtagccttggtggcaccaccatacggttcccgatagccacccaggtgtcctgtctccacgg

SEQ ID NO: 178684 - DNA, 122 bp, Homo sapiens
ggaggctcgcacggaggcaagaacttattcaacaagtttacctccctgctttcctcttttcgatgtgcgttttcggacatgcggaggttactggaaccgtgttggtggattttgttcctgaa

SEQ ID NO: 178685 - DNA, 122 bp, Homo sapiens
ctctatttttcatcctgtcttcattttgccagcatttactcagcacctgataggtgtccacgttcaccgcgggagcgccctgccatccccactttgggcagttactgccttctcgttcagcc

SEQ ID NO: 178686 - DNA, 122 bp, Homo sapiens
ctctttcttcactccgcccagcatttggtcatatcttctgtcactcagggcctgaaggggcgggcccttaaaccgtatccaatcagacacgcagaactgggaaccgtccaattaggcacaca

SEQ ID NO: 178687 - DNA, 122 bp, Homo sapiens
ccaaacctgatgcgggtcttctctgattcggcactctaaggaggactcagccgccggctgcgaccaccgtggactccctctatggaagggaatcctgggagtcccggccgtcagaggggttc

SEQ ID NO: 178688 - DNA, 122 bp, Homo sapiens
aggcggtgtagacgcggctgggtccttggcgttttgttcgattatggtcccggcggttcgcgataaggggcgctcccccagtccgcaaactcaagccctcaggtagtgtttatgggataacc

SEQ ID NO: 178689 - DNA, 122 bp, Homo sapiens
aaagtgctgtgggttcttctccccagctctgcctctgatggtgttctgggactgacacgtcggcttcctcttcagcctacttctttccttgcccaccactcccccacccccaccatcccttc

SEQ ID NO: 178690 - DNA, 122 bp, Homo sapiens
agaaaagtgaaagtggggggagtcattctgtccgtcccgtgaaagcacgggagttagtgacgggatgcaggccgggacttgcggccactagccgagggtcggcctctcccacgtctcactcg

SEQ ID NO: 178691 - DNA, 122 bp, Homo sapiens
ctcggcatccgtgatggtctagggggcttccgaggcgatcggccggtgtcagtcttcagccgctaagccgagaagatctgggaaggagtcagtcagagagccttgggccagagttccagggg

SEQ ID NO: 178692 - DNA, 122 bp, Homo sapiens
caggtgggggcaacggcgccagcgcgggttatgggggctacagctcgcagaccttgccctcgcaggcgggggccacccccacccctcgcaccaaggccaagctcatccccaccggccgggat

SEQ ID NO: 178693 - DNA, 122 bp, Homo sapiens
cctggggctggaacccaacaccacctggccagttatccagagcagttagttcaaaccctccggtgagcacctgcaacttgcctagcatggcagcaccacaaagatgagtttttattcatact

SEQ ID NO: 178694 - DNA, 122 bp, Homo sapiens
aagtaatttctttcaaattttccctgcagtcacaaattccacaaactgcttgcataaacacgctgtcttcattataggcaccactcctcagctctggaaacctgatctctttctgtcaacta

SEQ ID NO: 178695 - DNA, 122 bp, Homo sapiens
gttttgctcttgttgcccaggctggagtgcaatggcgcgatctccggctcaccacaacctcggcctccctggttcaaatgattctcctgcctcggcctccggaatagctgggattacaggca

SEQ ID NO: 178696 - DNA, 122 bp, Homo sapiens
cttccccagggcagtggacgccatagcactagccccaggttggggctggcaccagccagccggcttccttttctttctcccttttagggaggccccagggaccctctaccctcaaacacagg

SEQ ID NO: 178697 - DNA, 122 bp, Homo sapiens
gggcgccggcggccgttgggccgcgcaagtactgtcaaggacagttttcgggacgggggacgcggctccaggcacccaacagcactgacggcgaacacttcacgggcgcgcgatgcctcgac

SEQ ID NO: 178698 - DNA, 122 bp, Homo sapiens
gttcatactgaaagataaaagggaaagcgcctccacgaaatccgcttacggacacgatcccggggccacactcagccagacgaatgtctggcaaatgacagtcacttcacgccagactctca

SEQ ID NO: 178699 - DNA, 122 bp, Homo sapiens
cacccccgctgctgaagacaggttggaagtcagaagaatgttggcaagccctaagtgcagcggcagtcctgctgtgggaactgcaggatgctctctgcagaggacaatggcagcaggaacta

SEQ ID NO: 178700 - DNA, 122 bp, Homo sapiens
agcatccctgagaggaagcctttaaaggactggacccggaaagcacctactaaagtgtatcgtctttgttttccatgacactcaattacattgcaacccgatcctgtggtttctgcaaggaa

SEQ ID NO: 178701 - DNA, 122 bp, Homo sapiens
tccaggggcgaatccacgtgttgtggggcttgaaactgaaacaactgtgagtagaggtggcgaatcttcaagggaagtataaaatgagattctgggattagcaagcatctgtgcgcgtgagg

SEQ ID NO: 178702 - DNA, 122 bp, Homo sapiens
ggcgccgagagcttcgaggggactcaacgcgctttgtagggcctgtgaaatccggcttgtcgcataagctccctgaagaagagaacaaacttcccagaccaggggcccgcggggagcggtgc

SEQ ID NO: 178703 - DNA, 122 bp, Homo sapiens
ttgagttcacctttccccgggacaagtaaacagacttcaaactatgccgactgtagacggcgaggagaagaatgtatttgatggaaactccatccaatgcaaagatgataaggccgagggtg

SEQ ID NO: 178704 - DNA, 122 bp, Homo sapiens
agctgggctccatgttggtgaagaggttgggataccggcgggcaacgctgttccaatccacgtcctccagccgaaagccctggccaggaagcaagaggcacatggtcctcccctcccgcagg

SEQ ID NO: 178705 - DNA, 122 bp, Homo sapiens
atgcagcaaagactctgatacaaaccaggtgctcaggaaatgtgaatttattgtcaagtccgccaccctcctgcccctcccgcctccctcctccctccaccctcaggttgcagcccagcaag

SEQ ID NO: 178706 - DNA, 122 bp, Homo sapiens
acgaggacaaatatggatgaggtggagagtgggaagcaggagcccagccagctgcgcctgcgctgcaggagggcgggggctctggttgtaaaacacacttcctgctgcgaaagacccacatg

SEQ ID NO: 178707 - DNA, 122 bp, Homo sapiens
ggggctcacctccgcttcctcccgatagccccttcctcgccctggcaccggcactgcccacgcctgccccccgaccgctatgacacttgtccctggcgggggtcccccacgcggtcgcgacc

SEQ ID NO: 178708 - DNA, 122 bp, Homo sapiens
tgggtgccagccctggatgctcccgggcagggctcaatgggcatcgtgggtcagattctgcgctccttctgggacacggagaactgtatgcacgttgccattgggtcctgcctgggacccct

SEQ ID NO: 178709 - DNA, 122 bp, Homo sapiens
aggaggggttgttatgcatgtcgcctcgcagtgttgtttctccttaggcagcagtggcagcgatgtttgagaggggcctatggagcttgtttacataatcaaccggaaagcacttgtccatg

SEQ ID NO: 178710 - DNA, 122 bp, Homo sapiens
gacgctgcctaccggtggccgggcgggatgtaacccgctgctgagctggcagctctgtgtcgctaggcttcggcccggccgccgccgcacataagctgcgaggaggagctttacgacttccc

SEQ ID NO: 178711 - DNA, 122 bp, Homo sapiens
gagaaggcgcgcgtagccggtggacagcaggaacgcgccgcggagacacctgggaggcatcgtccgcgtgggagtgcgcatgcgcagacgcccggccggcaaccgaaggtgaggctggtggg

SEQ ID NO: 178712 - DNA, 122 bp, Homo sapiens
tcaggtagcggcggataggctcacaggccacctccaggatgaccatggaagggtccagcacgcgcagcgccttgatggcagagatatagagggtgatgatgtcacacgtgttgacgcctaca

SEQ ID NO: 178713 - DNA, 122 bp, Homo sapiens
gtccccgggagcgtccaggctgcctgagaaggcccgggtgaggccagtgttaagggttcccgagatgtcaagttcaaacccggggctttgggccggggtgggggtccccagttgtctccgaa

SEQ ID NO: 178714 - DNA, 122 bp, Homo sapiens
ccccggccaccatcggggtcagcatggtggctcaggacttgggcagggaggcaggcgggccgtgaaggggcagggaggccgagtggaaggagttaggggtggagaagggacgccaagcccgg

SEQ ID NO: 178715 - DNA, 122 bp, Homo sapiens
cagcaataggattttacagcgaaactgctgcctttgcttgcagcattctttcttgtttatcgaagcagctctgagcctttttagcgtcctgaagcgctttgagtaacggatgaaagctatgg

SEQ ID NO: 178716 - DNA, 122 bp, Homo sapiens
cagtggaggaatattctacctgacagcccgcggtggaggaatattgtaccggacagcccgcggaggaggaatattctaccggacagcccgcggcggggaatattctactggacagcccgcac

SEQ ID NO: 178717 - DNA, 122 bp, Homo sapiens
ggtggtcccgatccggggcgtggccccaagggaggcacttagccctactggggatgcgcgcgcagacccacggcctctgctccgcccccagctggcctgtaattggcgcagtcggcccaagg

SEQ ID NO: 178718 - DNA, 122 bp, Homo sapiens
tcacctcgcagactgggtggcgatcgggcagagacactcctcagttcctagacagggtcgcggccgggcagaggcgctcctcacatcccagacggggcagtggggcagaggcaatccccaca

SEQ ID NO: 178719 - DNA, 122 bp, Homo sapiens
atggccttccagtctcttactgtggtgacgccacgcttgcccggcatcatccgtgtctgacggtgcagcaggtgtggtctccccagaccaccaggtgcttcacacacgcacaggggcactcg

SEQ ID NO: 178720 - DNA, 122 bp, Homo sapiens
tgaagccagaactttgcaagccccatcctttctcatccttctttattcagctcaagatgtcgccatctcagaaaggcctcccttcaacatccaagcattctctctcccatcaccctgttttt

SEQ ID NO: 178721 - DNA, 122 bp, Homo sapiens
tgcagtgccttcatgggctggtgcctgcctgggagggagcccagggatagaagcctggttcgctggccacctcccgctggggcgttggcccaggctgccaggtttcacgtttcagctttcag

SEQ ID NO: 178722 - DNA, 122 bp, Homo sapiens
ccgagaaacccagcccggagccctcctctgccgagctagaagaccctgcaggatgggggacgatggaggcagaggaggccgaggccccacccctgcggctcccggggccgcgggccaggggc

SEQ ID NO: 178723 - DNA, 122 bp, Homo sapiens
tccgtggggagccggctgggctcgcagcacatggctctggaacctgagccgtgattccttcgactccttttcgcgctgctgagcacagaacgattcttgctggctgtgcagggctggtccta

SEQ ID NO: 178724 - DNA, 122 bp, Homo sapiens
gtttgagaaacacggtgttcggaaaagagcccagagaaaattttttctagagctgttgaccgtagcatcctctgtattagtgaatggctcagtcagaagtcttgacttacagataacagatt

SEQ ID NO: 178725 - DNA, 122 bp, Homo sapiens
aattgcctaataaactatggtaggacaaggacagcaaatatttggccacactctgcaactcgtaatttccatactcaaagctgacattagtatctcttcactgccctgttccctgctgagcc

SEQ ID NO: 178726 - DNA, 122 bp, Homo sapiens
gtgtttctgtgaggatcaccctgtgaagaaacggctgcagtgagagcagccgaggcgggacgcagccccggacgtggggtcagagaggagccgtgcgtggggtcagagaggagccgtgcgtg

SEQ ID NO: 178727 - DNA, 122 bp, Homo sapiens
acctcctgcatccccctgcaggcaccgtggcacccccacgctaggggaggtggccagggccgtaccacctacctggtggcctgtgggccctaccagtgtacacctaccgtgagggacaggtt

SEQ ID NO: 178728 - DNA, 122 bp, Homo sapiens
ccctcatccgggaactcggattgctcatcccaccaatggctgccacccgccctcgggacgcgtccttgagacttcagccaatgagcaagcgaagaaaagggtggaggggcgggcgcttctaa

SEQ ID NO: 178729 - DNA, 122 bp, Homo sapiens
cctccctccgcccttcctccccagtgtttgtttcaagcttgtgcaaccgggaggtggaggcggagggagggcgcgagcggcccggccgggaggtgcggaagttcgccgcagcagctcattgg

SEQ ID NO: 178730 - DNA, 122 bp, Homo sapiens
cagcgtcgcgcggcccaaggtcagaggcgccgcaggagcagcagctgggaaccagggaagcgggtcaatcccggccgcagggagaaagccccagggcgcagtcagccggcgtccacagccgc

SEQ ID NO: 178731 - DNA, 122 bp, Homo sapiens
atgtgactttgcagaggaattccaataaacaagatgtgtttccaagtcttctgaggctgccgagactgagtagctgcgtgtgagcagccacaactcctctgttgtcctcctgcaaagtgtcc

SEQ ID NO: 178732 - DNA, 122 bp, Homo sapiens
aggaagcagacacaagggccacacaggctgtgatttgctcattaagcctccggaacaggccggtccgcagaggcaggaggcggctgagtggctgccggggctgggggtgggtgctggggagg

SEQ ID NO: 178733 - DNA, 122 bp, Homo sapiens
tgtccctcactagacgatgtactccttcagggcgtgtcttattattccttgttctgtacccgggccttgcacaatattttgcacacaaatgactcaattgaccatcactttattgacaagac

SEQ ID NO: 178734 - DNA, 122 bp, Homo sapiens
atacctccgctcacagccccagcccttcctcttctcccatctggtttcctggccaggtttcggccctgcggagaaccctccaagggagcagtggaaaaagcttcacttggcagtaaagcccc

SEQ ID NO: 178735 - DNA, 122 bp, Homo sapiens
gagctcaccctgtaaatggggtggggtggggagaccccctgggggtggtggtgttggctccggagatttcctgggtaaaggaaaatgttcaaattcctgggcactggtgccccatctcatcc

SEQ ID NO: 178736 - DNA, 122 bp, Homo sapiens
tttctcaaccctcaccttccctgtgcttgtggaattaagtgtgaatcctggctttctctccgtggcctcattcatcacaagactacctgctgcactttcccagccctctatgcctggggaca

SEQ ID NO: 178737 - DNA, 122 bp, Homo sapiens
ggtattaagcataaaaaataaacctgagaaaaagggatgtttttgtgtgctcagatattacggcccgctaaaagcatggactgttttggcagtcactgtcagacctcccggtgtctgaggaa

SEQ ID NO: 178738 - DNA, 122 bp, Homo sapiens
tgccctccttgaggctggatgagctcaggtagtcgtctttgcacacgaacttgttctcgtcgatgacgtagagctcctcgccggtggacagctgcttgttacacaccatgcaggtgaaacag

SEQ ID NO: 178739 - DNA, 122 bp, Homo sapiens
aatggagcaaaggtgatgtttcacttcatcacgtccagcactgtcccaaggttaaatgggcgcgtgaggacagttttctccggtcctggcgggtttgcccacctgccggccagcgttctgcg

SEQ ID NO: 178740 - DNA, 122 bp, Homo sapiens
tctgcatttctcaccagctcctgggtgatagcgatactgctttgagtagcaaggatgtagcggactctgaagccagacagcctggtttaagtcctgcctctgctatttactagctgtgtaaa

SEQ ID NO: 178741 - DNA, 122 bp, Homo sapiens
ggcctgcaccagcccaaaggacatgacaggagtgggtagcccacgggacactggcacgagcgccatgatgggcggagacgcgcggaatcggccggcccggaagtgccagctgcctgcgtcgg

SEQ ID NO: 178742 - DNA, 122 bp, Homo sapiens
gattgcctgtgaggccgcgcagagacaggagtttaagatgaatgaagcaccccaaccttgcgctctgggaatgcgccgtgtttaaggctcccctggtcctctcccgggtgccccggaccctt

SEQ ID NO: 178743 - DNA, 122 bp, Homo sapiens
gtctgcttttctccttcccgtccatcccagcaggccccagggcgagggtcctccggctgccggccctgaagctgcagtaaccctgccatctgtctctcaaaagggccccctgcgcctgctct

SEQ ID NO: 178744 - DNA, 122 bp, Homo sapiens
aatacagagacagatccagaagaaatgagataatctgaaagaagacagggaaagaaaaagcgagagaaaaaaacaaaggagcacagaaaagaaaggaagaagagaaagaaagataggagaaa

SEQ ID NO: 178745 - DNA, 122 bp, Homo sapiens
caataggcgtggccgagagacaggcgcagagcgggggcgggccagttgccttgcaagcttcgcagacccagcggcccgcaggcccctaggtgtagaactgctaggggtatagcgattcagcc

SEQ ID NO: 178746 - DNA, 122 bp, Homo sapiens
gatctgcgcctgcttgcagcggattgggggactcgatccggatactgtcccacggccgctcgtccagaacactggcggcctccgcggtgtcccagcctgtgaccccaaatccgctcgagagc

SEQ ID NO: 178747 - DNA, 122 bp, Homo sapiens
gtaggccacagaggcggcccaggcaggcagggtggagtagctggctgtgctatccgaggtcgctgtcctaatcagagcagggccgggagagccaggacaggaagtatggagagcagggagcg

SEQ ID NO: 178748 - DNA, 122 bp, Homo sapiens
acatcctcccggtgcccgccacaggcaaccagagaacaacagaccctcctccagagtccccgttctaggacctccctgactgtcaacgaaagatgccaatcacaggcagccttagccagatc

SEQ ID NO: 178749 - DNA, 122 bp, Homo sapiens
atgtgggtggttataatctaaatctacatccttattttttttttctttgtgacaaagtctcgctctgtccaccgggctggagtgcagtagtgtgatctggactcttggactcactgcaacct

SEQ ID NO: 178750 - DNA, 122 bp, Homo sapiens
gcaagggtcaccggaggtttgttccttagagagtgccaggaatggtggtgaagtagtcatcgtgtcgtgctttgctgtggtgtgacatttacaggtttcaaggcacttttacctatggcctc

SEQ ID NO: 178751 - DNA, 122 bp, Homo sapiens
cacctaggaaatccagccgaggacaccagagtggcttttgactctggtcccctggctgaacgcgttccctttacagtttaaatttaggctcaaggagaagaagctggcaatcggcagggcca

SEQ ID NO: 178752 - DNA, 122 bp, Homo sapiens
aacggcagcctccacgagtctctccgtccctcccccttccagcctgatcgccatctcgaacgaagcccctgctctagagaaatgaattgaggagttgcttccgccgagaccccttttctgtg

SEQ ID NO: 178753 - DNA, 122 bp, Homo sapiens
tgcgtgacgcagccctaggcccctgtgaggctagagtcacccccgcaaggtgggaggtcacggcccctgcctgcacaggcagcacagctcacatgtccttccttgagccttctctgcttccg

SEQ ID NO: 178754 - DNA, 122 bp, Homo sapiens
aggccctcgccctcctgcacgggcctcccattgtggctccagaccacgggggcgccagcccgggacagttcacagctcagcaccactggctccccaggggccacacagagcgggcttggagt

SEQ ID NO: 178755 - DNA, 122 bp, Homo sapiens
gctgccggtagggcggggccctgggctgctggcggggcggaggccggaggcggccttgggcgggtggcttctctgggtcccacggttcctgcccaggctcttcgaaccaggaccagtgcggg

SEQ ID NO: 178756 - DNA, 122 bp, Homo sapiens
ttctcttctttccgcatgggacttgtgcatcaagtttgtcttccttggttttgtctttagcgttgtgtttcaaatcagcccatgagggcactgatttcagtgggtgagtgaaaagaaaggaa

SEQ ID NO: 178757 - DNA, 122 bp, Homo sapiens
caccacgtggccagggtggcagggacaccgaggcactgacgcctccctgcccccaggccccggcattgccatcagcagcctcagcgtctccccggccatgtgtgctgtgggctctgaggacg

SEQ ID NO: 178758 - DNA, 122 bp, Homo sapiens
tgtagttcgcgcgcccggcgtggacccggggttgcaggagcgaggctccgagtgcgcaggcgcacttccagttctgccccaccgctgcggccattgtccgaccccggtgcggctgaggcccc

SEQ ID NO: 178759 - DNA, 122 bp, Homo sapiens
acgtaggggccggggcggggcggggcggggcggagctgggctgcacccaccagcagaaaacgcccctgcaaagtgggggaactgtgtccctgcgcccgtgcagttccttcccctcgccacgc

SEQ ID NO: 178760 - DNA, 122 bp, Homo sapiens
tccgagggcgcgtgggaggctcacccttggctgacacgctgggaactcagcggatgatgtcgtctgggctggcacccacagtcccgataaacaggagagagggagggagagatgggagaagg

SEQ ID NO: 178761 - DNA, 122 bp, Homo sapiens
cgaggccgggaaaccaggttccggccccaccaacggctcgacgcatgcgcagggcggcgccgctgacccgcccccgccatccctgcaactggaggaggggattttggaaagttgcgtctgag

SEQ ID NO: 178762 - DNA, 122 bp, Homo sapiens
tggaagcactcgacctctctgacccttgccaccctacaggttcctgtgagccgtgccctacgtcgtggctgcccttcgggggctcctgctactatttctctgtgccgaagaccacgtgggca

SEQ ID NO: 178763 - DNA, 122 bp, Homo sapiens
tcacatccagtttagtgtagtgaagagagtcaggcccacatagggagaggctgcgacaatcgtatctcatcttcagggtttttgtgagaacatgttgcttcatcctgccctgctcagccccg

SEQ ID NO: 178764 - DNA, 122 bp, Homo sapiens
cgtgcccgctcggagggccggccgggggagggggcgcccgcctcgccttcttgctttgcccgagctccccggccgggcctgagctccagcttctgcccaacctccgttccctgccgaggtcc

SEQ ID NO: 178765 - DNA, 122 bp, Homo sapiens
catgtgacccggggcctggggcttgcctctgtgggcgcctcagtgcgagtttgcgtatgtcgtgcgtgcttgcgcgcgacgccccttcgcctgcgctcccctctcacgtgactcggtgccgc

SEQ ID NO: 178766 - DNA, 122 bp, Homo sapiens
tggagggtgcaccgggtcccccagcagtgccggcccacctgcgctgcgcttgatttctcacggcccttagctgcctccccatggggcagagctcgggaccttcagcccgccatgcctgagcc

SEQ ID NO: 178767 - DNA, 122 bp, Homo sapiens
ctgcaggagacgctgcaccgggaggtggtgcggaaaatcctgctgctgcagagctggttccggatggtgctggagcgtcggcacttcctgcagatgaagcgggccgccgtcaccatccaggc

SEQ ID NO: 178768 - DNA, 122 bp, Homo sapiens
aggctgcgtctggcgcgagccgcgcgggtggcaccgggcggacagtaggcgaagtccgggcgccgccagcgtgcgcccagttctgggtgacccacgaacgaaccccaacattcgctccccta

SEQ ID NO: 178769 - DNA, 122 bp, Homo sapiens
gtctgaggctgggagagaaatcccaagcccggcccggttgggaggccgtgggcatccacacggggcatgtgctggcggccctgaagcgccgatgtccccggactcgccgcacgcggactggg

SEQ ID NO: 178770 - DNA, 122 bp, Homo sapiens
aggtaaaatgaaatatatttttcttacccttaattggtctagcagataacttttgctcaacgtaacaacagcaaccatgtattggttaactgcagcttatggataagtggaatgaataacag

SEQ ID NO: 178771 - DNA, 122 bp, Homo sapiens
gggaatctagcataagaaattaactaacgtcgaacatctgtaatgctggtatttgtgtgacggatgcaagtcaggataagatcttattctaaaacactaatttccagggaggataacttcac

SEQ ID NO: 178772 - DNA, 122 bp, Homo sapiens
tttggcctagagctggggctgagcacgtgggatggtcggggcctgtttgcccaatgtacacgaggctggagaatagggaaagaaccgtccctgtgagcgcctcctcttcactcatgccagca

SEQ ID NO: 178773 - DNA, 122 bp, Homo sapiens
ccctcagcgtcttccactcagagagccaagcgcggggcagggcggggggtggggcgggggcggggtgttaacccaccggttctgccccgccacaaatcacttccaagtcggtgactcaaaaa

SEQ ID NO: 178774 - DNA, 122 bp, Homo sapiens
tgcaatgacagtggccaggcctagtggtgagatatcattgagatccaccctctgaattgacgggtctttttttaggatgttgtaaaaatactcactgcatgaagccatgactgacttatgaa

SEQ ID NO: 178775 - DNA, 122 bp, Homo sapiens
ggcaacggcgcatctcaagtcagccttcctgaaatccaataggtaataaagaccaagccccgcgcttcggagatgagaacaaatacagggattgtattttaaacactctgtgtaaggtctgt

SEQ ID NO: 178776 - DNA, 122 bp, Homo sapiens
cgtccccatgcgcacttggcgcttctcctcaagcggagcaggaacggaactgggcggacccgccggaagactcggcgagtgcgcgcgcgcaggagcccattttcccgcccgcaacgtggccc

SEQ ID NO: 178777 - DNA, 122 bp, Homo sapiens
attagccgggcgtggtggcacagctacttaggaagatgaggcacgagaatctcttgaacccgggaggcggaggttgcagtcagttgagatcatgccactgcactccaggctgggcgacagag

SEQ ID NO: 178778 - DNA, 122 bp, Homo sapiens
acaagcgggacctgaactacatccgcggcctgatccgcaccgggggctggttcgacggcacgcagcaggagtacccgcctgcagaccccagcgagcacatgtatgcgcccaagtacctgctg

SEQ ID NO: 178779 - DNA, 122 bp, Homo sapiens
ttcgtcttcttcttcctcttctgtgatgatgggcagcttcataaactctggctggaaatccgaaggtatctaaaaaactctcaactagaggtgagagtgctctgaatcattcacacaaaatt

SEQ ID NO: 178780 - DNA, 122 bp, Homo sapiens
ttgtacctccagcttcctcggcggctctgctgggctccgcgagtgccagcccgggccactcggccctggcggctgtacctgtccacctcctcgtagtcttcgccaccaacgacccctgcggc

SEQ ID NO: 178781 - DNA, 122 bp, Homo sapiens
tgggttaaatcccagctctgctatctgacctagtttgggaagttacctaatttctctgtacgtcagttttttcatctgtaaaatgggagtaataaaaggacctacctcatagggttgttaca

SEQ ID NO: 178782 - DNA, 122 bp, Homo sapiens
acgcggtgacaggcttacaggtctgtgaacgaaagggcgcctaataagtgacgtgaacttcgaccccatggcactctaagcaatatttgtacccacagaaccacgatccaacagcaaggagt

SEQ ID NO: 178783 - DNA, 122 bp, Homo sapiens
caggagatctggggctactgggagatctctcatgaaggtggctataaaaagagccctgaccgggacacaagcctttggagagcggaagactctatccaaataaacactgggaactgggtggc

SEQ ID NO: 178784 - DNA, 122 bp, Homo sapiens
cacagtcagtttgctggggcccgcggggcagctcaagggcaccgagggggcacacacccgcggggaaagaaggggaaaagtttgctccaagtctaaactttgggcctaggaggcgcccggcg

SEQ ID NO: 178785 - DNA, 122 bp, Homo sapiens
ttgggctagagcgtcgccgagtcggagccggagcctgagccgcgcgctgtgtctccgctgcgtccgccgaggcccccgagtgtcagggacaaaagcctccgcctgctcccgcagacggggct

SEQ ID NO: 178786 - DNA, 122 bp, Homo sapiens
ggtgtgacagcggcgctgtggcttcaccctgcatgtggcctgtctagggattccacgtctcgatgtctggtttgccttaaaaggtccaacaaagctggacacagtggctcaggcccgtaatc

SEQ ID NO: 178787 - DNA, 122 bp, Homo sapiens
gaaaagcttcactggtaagcattcccgacctttagacctgccttggcccatagctggccacgagcccataacgatcacttcccggctgggtgtttaccttcctgggccccatgggttgagcc

SEQ ID NO: 178788 - DNA, 122 bp, Homo sapiens
tcagtgtaggaaggactgacttgtgggcgattccgagctgcgctctcccagtgcaagaggcgtctccccattattcatgcacgctttgtgtcaggtttcaaaacccccatttattcatgcac

SEQ ID NO: 178789 - DNA, 122 bp, Homo sapiens
agtcaatgtgtcaggtaccaggcatgcaataattaaacagtctctcgcctcaaagatctccgccattagtggtagccatttaagaaaacagaattacgatgaataatgatttgaagccaaaa

SEQ ID NO: 178790 - DNA, 122 bp, Homo sapiens
atttgacctcacaataggcttgagaacaaagcatttgtcttcttttacaaatgtggaaaccgagacgcaaagacatgaaatgacatgcctaaattcgtgtttctagcatgtggtggctcaaa

SEQ ID NO: 178791 - DNA, 122 bp, Homo sapiens
tgcttcccagggatgcagagattggggcatgctgtgtctgcagaagctcctagtcatttccgccataattgtgagagagaggggcagccctcccacaagatttttcccttcccatatcactt

SEQ ID NO: 178792 - DNA, 122 bp, Homo sapiens
taactgcaacctctgcctcccgggttcaagcaattatccagcctcagcctactgagtagccgggactagaggtgcacgccactgcgtctggctaatttttgtatttttagtagagacagggt

SEQ ID NO: 178793 - DNA, 122 bp, Homo sapiens
cctgaccccggccccagggtcgtatttatgtttatcctcgtttaaccaagttgatttcaccgaaatgtgaatgatgcaaagtgaatgatgcctggatgatgccggagtggggctaagggggc

SEQ ID NO: 178794 - DNA, 122 bp, Homo sapiens
ggcaggtctagcctccaaaacgagacgagctgggagcgaggcggagggaagcgcaggctccgcccaatcccacccgggcctggcctcgcctcgcctctcagctgcgcgcgcagtttcctgga

SEQ ID NO: 178795 - DNA, 122 bp, Homo sapiens
cctggtcagttctccatttgagtaattccatcgtatgtgcttattattcatatataattccggtacctaggggcaaaaaggactggatgctgttaaataattagctgcatgccaactttggg

SEQ ID NO: 178796 - DNA, 122 bp, Homo sapiens
ccgccccgccccgccccgccccgcacgccgctccgtgcctccctcctgcctcggatgtggcgggacctggagtggcgaagggcctgagacaccgcagacctgagacccatagcaactcggag

SEQ ID NO: 178797 - DNA, 122 bp, Homo sapiens
tagccatttctatgtgtgtatagtactcacatttagggtctgctctcctggcaaatttcacgtgtactatatgttattgtcaactacagtcaccttgctgtatattaggtgtccagaactga

SEQ ID NO: 178798 - DNA, 122 bp, Homo sapiens
gagccccctaaggaggagactgcacagctgacggggccagaagcaggccgaaagcctgcccgcggagtcgggagtggaggccagggccccccaccaccacgcagagagagtcgcacagagac

SEQ ID NO: 178799 - DNA, 122 bp, Homo sapiens
aaccgagccgcaaaccagggcggaatctcgactctccgggttcagatcatgtcgaatttacgacctgctgctgtggacactgcaggaaatgatgagcctgattcgggctttgaccttgagct

SEQ ID NO: 178800 - DNA, 122 bp, Homo sapiens
agccgctggggcacgggaaaagcgccagttccctccaagcacaggtgaagcaggaaaccgcggtgactgtcggcgaagaacatctccagacctaaatattagatgcaaaattataaaatgcc

SEQ ID NO: 178801 - DNA, 122 bp, Homo sapiens
aggtagagttccttggccatccagatcccatctgggctcagacctggcccagaccttccacgctgggcagttcccccggtgccacgtgtcatgtcgtgcagcacatggtgctcaggtcagac

SEQ ID NO: 178802 - DNA, 122 bp, Homo sapiens
gctctccgctccccgccaatggagagcgagctgatgacaaatagcgggccgcggagtccgcgggactcgcaccaggagtaataaaacagacccagagatcaaggagctggggagggggcggg

SEQ ID NO: 178803 - DNA, 122 bp, Homo sapiens
attttggttaccgagctgtgatgctccctctttctctccgtgaaacctctgcagcagggtcgccatcacacttccggcagaaagactgggaaaacaagccactgatttcaaagagggtgcaa

SEQ ID NO: 178804 - DNA, 122 bp, Homo sapiens
acaaactcgatatttacaaactcattctctggcaatgaaaacttgaaatgagttgagctccgcatttgcgcgcctgcaaattgctccagctgagtgcacgggaacacagcccaacagggact

SEQ ID NO: 178805 - DNA, 122 bp, Homo sapiens
ccgggtggagtagggtggggaggtggtgtccacctgtgtggccccgttctcactccctaacgcccgtcccttctcccccaggtgaggggccttcccatcccaggagggttttctgcttccaa

SEQ ID NO: 178806 - DNA, 122 bp, Homo sapiens
caggtagcccagcttagaggtccctagagccacagtggtgcaagcactggataaaagagacgcttcatgcctctcatcacctgtgactgtttccacagagaagaacaactgaattttgagac

SEQ ID NO: 178807 - DNA, 122 bp, Homo sapiens
cggcccgccagcgccgctcgaacgcgcgggggtcccacatgccccgagctccgtccgcgccgacccttccccgcggcccccgaagagaccagagggaaagtcaagtgtccccttccgccctc

SEQ ID NO: 178808 - DNA, 122 bp, Homo sapiens
tgtatattgctgataaatacaagcgtatggggactctctctattaaacccaggactccagcgaaattacagggaattcgtggtcacgggaccggcctccgccaatcgctcgtctgggcctgg

SEQ ID NO: 178809 - DNA, 122 bp, Homo sapiens
ccccaggtgtgagtttccaccctggcctgatgacgtcaggccttagcatgtgggactgaccgggaaggcggatcagctgcaggggctgaggtctcagcctgctccactcacagcgtcgcggg

SEQ ID NO: 178810 - DNA, 122 bp, Homo sapiens
gctgtgaggggtggagccagccacctgccccacctcacccgtaccctcgctacctcatgccggaggctgcacaggtatctgggacatccagccccatgtattacacccttacctctgacctg

SEQ ID NO: 178811 - DNA, 122 bp, Homo sapiens
agaaagcacgcctgcaaatcgggaaagcaagccgcctcccggagatgggtggctggggaccggcaggacggcagagggagtagagcccatctgggcagacgctgctgcaggcctgggtggac

SEQ ID NO: 178812 - DNA, 122 bp, Homo sapiens
tccaagaagaggaaaagtactactactgactgtgaatcctaaatacatgtaaaatttaaacggcattcatttattctgggcctctgtgcaaagtttcagcgagaaaactccccttacccttt

SEQ ID NO: 178813 - DNA, 122 bp, Homo sapiens
cagccttatccagcggccggtgggcggggcggcccgccccagtcctctcgcagtgggctgcgggcctgtccgtcaagcgtggtcccgcccctaactcgtcccgccccgctgaggtcgtggcg

SEQ ID NO: 178814 - DNA, 122 bp, Homo sapiens
tcctgggaagctttcatttcttggtccctcctgacgagggaagacgggcagccaggggcccgttccctgggagatgctggtgatctggattctgacgctggctctccggctctgcgcgtccg

SEQ ID NO: 178815 - DNA, 122 bp, Homo sapiens
accggcgcccgggccccacagggtccagggaagagggcgggggtgtgagctgaggatgggcgtcctgggttccaggttccgcgcccatctgcctttctggaggtcggagcaaggcacttctg

SEQ ID NO: 178816 - DNA, 122 bp, Homo sapiens
ggagtggggtgctgctcttaggagcccactcggccctggagccgcagccttcccccgggacgtgatggtctctgagctgcagctctgccagccgcgtctcgtttcctccttcctattttgaa

SEQ ID NO: 178817 - DNA, 122 bp, Homo sapiens
gcgtcatccgaacatcgtggagctgaaggaggtggttgtggggaaccacctggagaggtacgtggtctcctggtctgcacattgggccctagggagcatgtgtcttgggctagaggtgttgc

SEQ ID NO: 178818 - DNA, 122 bp, Homo sapiens
gcggtcccacgtgggctcgggcggggctagcgccgcggcgggggctgggcacgcccctagcgcatagctggcttctgattggctttccggtgctcgcccgagcagggttggggcgagtggac

SEQ ID NO: 178819 - DNA, 122 bp, Homo sapiens
ccaaagacgcagctcctcctgagacgcctgggagctccttcaggcttgtggcacagaggtcgggggctctaccatctaggaggcccagagagaagccctgactacaaagagaccccatagtt

SEQ ID NO: 178820 - DNA, 122 bp, Homo sapiens
aagcacctctgtctggagggaacacgacccgccaccatcagggaaagcaaaggaaggaagcgctgagctaagttcagaaagagagctcagtctgtctccgaggcagcacatccagctttctg

SEQ ID NO: 178821 - DNA, 122 bp, Homo sapiens
ccagaaagttccataatgccccttcccagccaatacccatcttcaccctggagagggagccgccaatgtcacctctagcgccatagattaggtgtgcctggtaatgaacttcatgatgccca

SEQ ID NO: 178822 - DNA, 122 bp, Homo sapiens
tggtgccagatactctcctgtcccttggtttgcttgtggcttggttcttggtgtgtgatacgtctctgtgtgtgtagttgccacaccctccagtctctctcatacacactgtttcccaagca

SEQ ID NO: 178823 - DNA, 122 bp, Homo sapiens
tcaaatattttgctaaattgcagcagaatgaaatgtcttccggctggggtcggtggctcacgcctgtaatcccagcactttaggaagctaaggaggatggatcacctgaggtcaggagttca

SEQ ID NO: 178824 - DNA, 122 bp, Homo sapiens
cagccgaggcactcgcttccagggtagggccgggaccggggccctggccggagaggctggcgctcaacagtacagctgtgtgccctcctcggagcgcagcatgaggaggaagatggttctgc

SEQ ID NO: 178825 - DNA, 122 bp, Homo sapiens
gctgaacagattctaaggctgtatacccacccatagagccacagttaatgacagagatggcggttctgatcacaaattagatagttatcctcttgagtagaagtgactactaaaagaagtca

SEQ ID NO: 178826 - DNA, 122 bp, Homo sapiens
gagtgcagcacccacaggtcagttttattgcgttcgaaaccaagctcgtgcctcatttggcgtctcttcaggtgtggccctgcagccgaggatggacacacagacatcagttagccctcaca

SEQ ID NO: 178827 - DNA, 122 bp, Homo sapiens
ttattggctgctacgtgaacgagacaaacgcaagcaacaaccaatgggagtggcccacggcgcgtctttcccggggaagccgacgcggacgcgggaacccggaaatgcgagggaaggacaag

SEQ ID NO: 178828 - DNA, 122 bp, Homo sapiens
tcccttctctgaagttcatttcctctctgcctagggttttctatactattctagtctgctcgatgacgacaggctgataggccctgcggtttcttctgagtgtgtgttcttttttttctttt

SEQ ID NO: 178829 - DNA, 122 bp, Homo sapiens
catccagggtggactctggcttctcgggctgtggctgctgctgcccatccttccagaggtcgctggggtcagtggctggggtgaaggtgatgagcaagggccgggacatggcttttgggaga

SEQ ID NO: 178830 - DNA, 122 bp, Homo sapiens
gccatctatggggctgtgatggtgtttatatgtaagtgagcatcggacttggttggagctcgctgatttaatggaggatgcctccagtctagcaagtgaggtttgtaaagggccctgtagga

SEQ ID NO: 178831 - DNA, 122 bp, Homo sapiens
tgggcttttatttgatcatcactgctcactttaagagcaggctttcgatctgtgagcccgcggagtatacaccatgagcaaagctcaccctcccgagctgaaaaaatttatggacaagaagt

SEQ ID NO: 178832 - DNA, 122 bp, Homo sapiens
tagccatggaaaccgagagctggcccgggcggggccgcggtgagctcgttattcggccgccgcagcttttctgcctccgcattcgggcactaaccaacctcccggcgggagcgcccagcccg

SEQ ID NO: 178833 - DNA, 122 bp, Homo sapiens
acctcatgatccgcccacctcggcctcccaaagtactgggattacaggcatgagccactgcgcccggcaattcatggcattttaaaagaaagagatgctgggccgggcacggtggctcaagc

SEQ ID NO: 178834 - DNA, 122 bp, Homo sapiens
tttaagaaacaggagaaaaatctactcccattaggaagaggtaaaacaactgagaatccacggagatacgaacaaaactgttttataaagattttgtactgggaagttatctcagtcatgaa

SEQ ID NO: 178835 - DNA, 122 bp, Homo sapiens
gagagacacgaccacgaggcacttccagggcaggaacaggtacccacagacccccattctcgacagccacaacttcccaggactccggcagccgcacagtcctggtcccccgccccgcgcac

SEQ ID NO: 178836 - DNA, 122 bp, Homo sapiens
ccttctcacctcctccctcacttcttagctatgtggcgggggactaaggctgaggaattccggggctcgcagcactccccggcctcacacacaccccaccatcttgcaacctaggtctcact

SEQ ID NO: 178837 - DNA, 122 bp, Homo sapiens
tttttctgcttactactgtccatccgcagcccgccgagcccgctgagcagaaacaagacgcgccacatggcttgaagtcctgggtcccagccggaataatggcagttggtggttacagggca

SEQ ID NO: 178838 - DNA, 122 bp, Homo sapiens
cctctcagccccatgtgagcctccccaaggcctgaaactctttaagagcaaagcctgggccgagagccccttatgtgcaagacgccacctggcagcctcctgcctatgcccttgggaatgaa

SEQ ID NO: 178839 - DNA, 122 bp, Homo sapiens
ggtagagaagactctgctccaccacctcttgtggaggtcctgacatcagtcaagcccgcccgcagtcatccggaggcctgaccgtctccctgtgatgctgtgcttctgcggtcacgctcctg

SEQ ID NO: 178840 - DNA, 122 bp, Homo sapiens
ttaaaagcagcttatacagtaaaagtcacattccacatgacatgactctcaccatcttaccgaaatctctcttgcccatcccccacaccctgtgctttagtcaggccccaaacacgtgattt

SEQ ID NO: 178841 - DNA, 122 bp, Homo sapiens
atgggaggaaggtaaaggaagcagccgctgcgcgatccagccccacgcccctccccacagcgtcccccagtttcctcacttggtatcgaggagacgactctcgcgagaacttcgtggctggc

SEQ ID NO: 178842 - DNA, 122 bp, Homo sapiens
agatgagcttgcctgactctctccatactcagtggcactcaccacattccaagcgtgccacgtgggcaaggggaagtcacagtggctgcctcctgacttccagaagcttccatgaccattcc

SEQ ID NO: 178843 - DNA, 122 bp, Homo sapiens
gatacagctcgacacgtgcattgcttgggaaaggtctaccctgtgctcccggcacgtggccggagccccccaggactcgaaggcggtggagtttgttcctgcaacaggcccttccccgacct

SEQ ID NO: 178844 - DNA, 122 bp, Homo sapiens
ggaagagtccccatgtagtacaaaaatatgtctttatacaaacttttttgtgactttttccgtttctttacaataggacttctctcagtgtgtgacacccagtgagggctgacccatcctcc

SEQ ID NO: 178845 - DNA, 122 bp, Homo sapiens
cccccggttccgttccacgggaggccccggcctccctgccctctcctccaccgttctacccgcatcgcccggcttcccgcaagccgctggcaccgtcccctcaacaccctccgcccaccgcc

SEQ ID NO: 178846 - DNA, 122 bp, Homo sapiens
acctgcaaaacgaagccacggaaacgccctttcagggtggccaggggttctaggcggcatcgcccggtggcagggtgttcccagggtgaagccgcagggttcccgggtgggggcggggaagg

SEQ ID NO: 178847 - DNA, 122 bp, Homo sapiens
ccctggtggcgaagtggtccgagtagcctcccgaactgtttgtaaatgcaacctagagggcgatcgagttctctgggagaacttgctccatatacgcgtatacgcggcttcccccacttgtc

SEQ ID NO: 178848 - DNA, 122 bp, Homo sapiens
ctaggacgtgagaggcagagccatgtgctgcaggctgcagctggcagagccaccatgccacgtgtggtgttgctttaccaaggagcagtcagggaacagagctgaacagagcatctcttaat

SEQ ID NO: 178849 - DNA, 122 bp, Homo sapiens
tcccttcatggcttgattgctcatttctttttagcactgaataatacttcattgttgggacgtactacagttaatccaatcctgcagcatctgcttcctccatattcctttgtctgttgttt

SEQ ID NO: 178850 - DNA, 122 bp, Homo sapiens
gggggaaccctgggcaccctgtgaaccctgtggtctgcactggctgccctgctgctgtcgcggggctgcgggcggacgacctgagcccgagctccgagggcccggagcggggcgccagggcc

SEQ ID NO: 178851 - DNA, 122 bp, Homo sapiens
ttatcaacatctgatgtgctaaaaggcattgcattttgattatcttcttttttgagaccccggaatgcatcacctgggaaaaaaatttttaatgatcgaatttaaaggaaatttctattatt

SEQ ID NO: 178852 - DNA, 122 bp, Homo sapiens
ctgagtttactgttgggctgcctcccattgtccagcatagacctctcactggaagacactcgaaaaagcactggacctcagtctcccactgaggctgctatttaagagccatgaaagacaac

SEQ ID NO: 178853 - DNA, 122 bp, Homo sapiens
tccaccatgtattttacacttagagcatgtcaggtttcagactagccactgtgcggtgcccgagagccgtgtgtggctaccggattggacagcacggatctgaacaagacagggattttttt

SEQ ID NO: 178854 - DNA, 122 bp, Homo sapiens
tccggattcagggctgagaccattgtctccatgcaaatgggggctttctgcgcatgctaacgggcaggtgggcgtggccgggggctggggacccagcctgtgtgcggcctggagaagcatcg

SEQ ID NO: 178855 - DNA, 122 bp, Homo sapiens
agtcctgtgcaggggaatggtggtctctgaagacacgtccacctgctgacccctggaacccgtgagcatgcctgcccgagaggccgtctttgcagatgtaacaagttaaggcctggagagga

SEQ ID NO: 178856 - DNA, 122 bp, Homo sapiens
gcttccagaaccaccggatttgtgctgggcgtgtcacggtgggcctctccgcgtggctgtcggccctgccgcccttggaatccatggcacagccgggtccctctgcagttcctggggaagct

SEQ ID NO: 178857 - DNA, 122 bp, Homo sapiens
aatttcaactgttttaataaataatatgttacaacatgacatgatgttactgttgtttttcgtacttatgtcattcaaaatggggtagaacatactagttgcatgtgtaactgttttttaag

SEQ ID NO: 178858 - DNA, 122 bp, Homo sapiens
tgctggaaccacaggcggtgagtcaacgggcacctccgggctaggaggttttcccaggctcgcctcattgctcctgcacctgcagggttcgctggaccctgggcgtcccgctgcccggaaca

SEQ ID NO: 178859 - DNA, 122 bp, Homo sapiens
ccacggagcggcggccctgggaggggccgggcccagaggttccggccgcgatgccgtcagcgccttcggcagagtgactgaagcgagatttcgttctcagaagtgagatgccacgatttcga

SEQ ID NO: 178860 - DNA, 122 bp, Homo sapiens
acaacagacttctggctaccgtgctgtggggtgcctcgaaagtgtgaatcaccaaatattcgtatggaaattaggtttattttcaaagttaccatcgcagccatggttgaaaaatgaagtaa

SEQ ID NO: 178861 - DNA, 122 bp, Homo sapiens
ccccggctccgcttcccactcagagctctcctcccctctcttccccgccacccgtttctacgcagatcggtgccccagtccctggaggagcctccgccaactccgcaggaccccgccgggaa

SEQ ID NO: 178862 - DNA, 122 bp, Homo sapiens
acaaatctctcccacggacccgcccaccctgatcctcaacctggcccctggcctttcccgcggcgtcgagtccagtacaccgacgcacgagtcccacccccgatctctccctcggcctatcc

SEQ ID NO: 178863 - DNA, 122 bp, Homo sapiens
tgggccccgcgcgcctccccgccgcagtccgggcacgggggtttccaggggccctctctgcgagccctccgcatgggtccacctggcaatgaggggctgctgtagagagagttaagggtgag

SEQ ID NO: 178864 - DNA, 122 bp, Homo sapiens
ggttgtcttggcaacaggaggtggagaggagatgcgccgagggatggaggtgtatgtcaccgaggaggctgctgcgctcctgccccacgccctgggcccttgaaggtaccgagcaccctccc

SEQ ID NO: 178865 - DNA, 122 bp, Homo sapiens
aactgcctcccttccttccctccacggttctctcccgtaatcagcttttctaccacacagcgagcaaggccaacttccctaaactaagaatgctgagattcttttcgacttataatgttctg

SEQ ID NO: 178866 - DNA, 122 bp, Homo sapiens
gtcctctctcatgttggtcccccacctgcagatactgtttcctgttccatggactgggctcggcctgcctaaaataggctgcacccaagaagcttctacctccactactgccattatcccag

SEQ ID NO: 178867 - DNA, 122 bp, Homo sapiens
ccgaagcgcggccgggtcccctcatgcatatgcagcagattgtgatccttactccgtgagcgctgggcgggccgggttgtgttcatgttggtgaacccgcttcgttcttgcccgcgtggatg

SEQ ID NO: 178868 - DNA, 122 bp, Homo sapiens
aaaacaggtttgggtagggggatactctttcaggctctccagatttccagccacgacttacgctcagaaaaaataacgtccaccttaattatctctccaaccctgtttttccctgtcccggc

SEQ ID NO: 178869 - DNA, 122 bp, Homo sapiens
cgcgctccttcgcgtctgctgctgccctgatgaaaacgctcacagcgcacgcggtacagacggagcaaatcctatgaacttctccagcccagtttagaacaagggaaaggggagcgcgcggt

SEQ ID NO: 178870 - DNA, 122 bp, Homo sapiens
ggcgtgcatggcaaagctgccacggaacaggtgtggaggtgatggtgagtggcaaacctccgtgcccaagtgggacacagcttgtactttcttgaattgttgaatttgaaagcttgaagaag

SEQ ID NO: 178871 - DNA, 122 bp, Homo sapiens
aaagaatcaacagttcatgtgtgcacagtctaaccaatgtattcttcccttgtcactgaacgccagaaaaagcccctggccatccatcaggaaagtacttactgaagccaaattgggagctt

SEQ ID NO: 178872 - DNA, 122 bp, Homo sapiens
cagatttgctttttcgctattcctcttcgtagccccaaattcgttgttggaggcggtctccgctgtgtcatgccatgagcaaagagtgaagagagctgtgtccacagcacgaaggggtctcc

SEQ ID NO: 178873 - DNA, 122 bp, Homo sapiens
cccagtcttccctgtccctacctcacctgctcttatggaacggagggtctacgtgcgtgtcgacccagaaaggccagagagtgtaatctgcgagaggaaggagagggaaggttcagcctggg

SEQ ID NO: 178874 - DNA, 122 bp, Homo sapiens
atggttaagttagaactttgttcttgactgtgcagtctctaagcctggctctctggcccccgagcagattcagagggctccctaacatctttttaagattactttctgcttaactaaccaga

SEQ ID NO: 178875 - DNA, 122 bp, Homo sapiens
agctggcgcgccgcgggggcgtctgggagttgtagttcgggacggcgggctgacgcacttcgccgccggccgacgggcgccattgtgcggcgcgcgccgggtgagtgccgcgcgaaacctgc

SEQ ID NO: 178876 - DNA, 122 bp, Homo sapiens
gggggacactgcagggaactgttcggagcagagctggtggcaagtgggaacgggtgaccccgggggcacgtgagggctaggtttgctggtgaccgggtggctcgggcgtgtaggatactctg

SEQ ID NO: 178877 - DNA, 122 bp, Homo sapiens
gggcagaggcgccccctctgaggggctggcccctcagccgcactccgagacagccgcccccgggaccgcccttccttggagccccgccgcccgccgctcactctgcacacgcagcagaaggg

SEQ ID NO: 178878 - DNA, 122 bp, Homo sapiens
ccaacttgggcgtctctgggtaggcacatgtgatccaggacatctaactgggggactcagcgtgggacctggaatgggaggggacatgcccaggtctctctgaccaaatatttctgaagatc

SEQ ID NO: 178879 - DNA, 122 bp, Homo sapiens
ttttcgcgggaaaaaaatcagagcagctggcagcgcggcgggcagcgtttgccgagcgggcgctccgggtcgcacgcaagtccgcgcggggtccgggccacgcacgcggtttcatcgccatc

SEQ ID NO: 178880 - DNA, 122 bp, Homo sapiens
actcttataaagttttttttaaaaagagaaaaagagaagatcaaaagcactggaactcaacgagtaaataacccatggtaacagagagatataatgcagtgatgtcagaggtgtacaagaag

SEQ ID NO: 178881 - DNA, 122 bp, Homo sapiens
ctcaagcgccgcagtaaaataaggctgacaaaaagtgatccgaggcttgtgtgtttaattcgccaggaatgttaagcttcataagattcaccctatggggtcatgttggtccttggcactgt

SEQ ID NO: 178882 - DNA, 122 bp, Homo sapiens
atgcggacttcgctgccatggagttcctggatggggacagccgcatgctgcgctcccacacgggggaggaggcagcccgcgatattgtgcagttcgttccctttcgagagttccgcaacgtg

SEQ ID NO: 178883 - DNA, 122 bp, Homo sapiens
aaagactgactctcctatcaggtatgtaaacccccaagtcaggcagaccagagcacccagcggtggggactgtaccagctggctgtgggcagggctgtgggggagggaggaggaggtggagc

SEQ ID NO: 178884 - DNA, 122 bp, Homo sapiens
cccccttgtccactccactcacagtttgcactgcctcttgtgaccccgtgggggtgtggacggcatgatcatctgggaaatggggggcaggtccccagcgccaggtctgcccttgcttactg

SEQ ID NO: 178885 - DNA, 122 bp, Homo sapiens
tatttttgttaagttgtttctccagaaaacaaaactctaagtgctccttggcccgtcttacgattctcagttgatgcgtaagaaatacaaataaattttaatattggattgcacaaaataca

SEQ ID NO: 178886 - DNA, 122 bp, Homo sapiens
agttggcttcagtatccccaagtgcctgcttgttccagctcccacacctctgactcttcccgagtgtttttaagcaaagtctctgcagactttttgagaccaaggaatcttcccacatgtag

SEQ ID NO: 178887 - DNA, 122 bp, Homo sapiens
gtgcgagaaacacccacgagaaacggactgggacgagtcgtgcctgggcgaccggctcaacggcatcctgctgcagctcatctcctgcctgcagtgccgccgctgccctcactactttctgc

SEQ ID NO: 178888 - DNA, 122 bp, Homo sapiens
gcaggcaccgcgcctgggtacacttgagcttccggaggacgccgggaattgtagtcctggcgggcgtgggcccttgaggtgtgctgggagctgtggtccgggtcggcgggcgcgcaagttgg

SEQ ID NO: 178889 - DNA, 122 bp, Homo sapiens
gtggaacctgagtatacaaagttgaccctccatatacttgggtttcacgtccagcaaatacgtattttcagtaacaattggttaaaaaaaaaattcatgtgtaagtgtacctgtgcagttca

SEQ ID NO: 178890 - DNA, 122 bp, Homo sapiens
ctggattattaatgcatacataaaatacaaactatggtgacttgctaagagacagaccctcggaactgcacagaatgccactgttgttaccttttacagatggcagcttcagcctccttcag

SEQ ID NO: 178891 - DNA, 122 bp, Homo sapiens
ttctgtgccatcgcccatgattaatgtggatgctttcatgaatgtgttttctctcggcgccgggcctgtgcttagcccgcgtaaagcagtgctctcaggcccaggagctggggtctggttaa

SEQ ID NO: 178892 - DNA, 122 bp, Homo sapiens
cagaagggggcttagtccaggaaaccctgcactgcaggaaaccctgtgttctcatcatctcgcagggtccacgggggcaggcactgaccaactgcaaaggaagagacggcttgcatttgtga

SEQ ID NO: 178893 - DNA, 122 bp, Homo sapiens
ggggcactcgggtgatggcatgattgctgtggtcagctcagagtcctgaggggaagcaagcgggctctcaccatctcagggcagtaccactgctgtgcggctgtcagtcagtgctgcaggcg

SEQ ID NO: 178894 - DNA, 122 bp, Homo sapiens
agttctcaagatgaatgtccaagtccatttgtgctactataacaaaatgcctgaggctggcgaatttatagacaatagaaatttatttttagttctggaggctggaaagttcaagagcaagg

SEQ ID NO: 178895 - DNA, 122 bp, Homo sapiens
ggaccaaaccaggagtcagctcagtccaaaggaaatcagggttcaggtagcgacggtgtccgtgcgtttcttcactagtgcatgtgcgaggagggctggaggcatgagcgaaagagggaagg

SEQ ID NO: 178896 - DNA, 122 bp, Homo sapiens
tgtgtttgcttaattcaggggtgcagttgaacttagtggatgccgagagccagccctagccgcgggagcatcgtgtccaggtgcccctgtgcaaacgctggaaccggtagtgtgctttgtac

SEQ ID NO: 178897 - DNA, 122 bp, Homo sapiens
tcagactctggagaaagatccagaaaactgcccgtttaataaacatttgggcgattcttacggcctctaaagaccaagaaccactgctgcctagagctctgctctcttcattgaacaataca

SEQ ID NO: 178898 - DNA, 122 bp, Homo sapiens
cgggggaggaaagaagaccaaggagcagtcagtttccgccgagcgtgccgaggcgggggccgtccgcagactggccggcgccagggaggaaacttggtctgtacctccagctgataactccg

SEQ ID NO: 178899 - DNA, 122 bp, Homo sapiens
aggttcctatcatccacttcaacctcttatagttttatacactcccttagtgatctcatccgcttacaggatttaaactattaatacttctaaatgtttttctctaaccaatctctctttca

SEQ ID NO: 178900 - DNA, 122 bp, Homo sapiens
agcggcccccgtggcgggaggtggaacccgcaacctacccccaaggatggggggcccaggcggagaaagggggtcccagccctccccgggctgcccgcaccggcacccccctcgcacggccc

SEQ ID NO: 178901 - DNA, 122 bp, Homo sapiens
tcctgggtggttaatggttagaggggccagtggccttcaccgcttggtagtcctctcccccgagtcattaaccaatgggaggctttgtcaggatagctgagtaaacacagaaatgctgcaaa

SEQ ID NO: 178902 - DNA, 122 bp, Homo sapiens
atgaacaaggctaacctgctgagcctttgaagcaaggaactggagatggtccttttcaggcgttttattctggattccagaaaacatgcaaacagggccactaaatgcatctttatttttct

SEQ ID NO: 178903 - DNA, 122 bp, Homo sapiens
ccccgacgccagactcaagcggggaaaagcgggcctagagctccagggcgggagcgacgccgacgcctaaaacattcttgaaaaagaagaataaagtgagttgaaaatcagtctgccctatt

SEQ ID NO: 178904 - DNA, 122 bp, Homo sapiens
ccgcggtccctttaagagggggtggagcttcaacctggcactagggatgctgctagcgtgcgtgtccctacggagctgagactgcagttcctgcgacgcccctgcagcagcagcagcgtggt

SEQ ID NO: 178905 - DNA, 122 bp, Homo sapiens
cttccggtcccggggctgacgcctggcggcgtctccgggaacccgcgccctttcaagcgccgctggctcctgtttcacagatggagaccctgaagccccaacaagcagcctccccagcacct

SEQ ID NO: 178906 - DNA, 122 bp, Homo sapiens
ccagttcacgagggtccagggccgccgggggggcaccatgggcgtctctgggaaggtgcccgtcctgtagtactcctcctgaaaggcatcctgggggacaggaaagaggaccctcagacgcc

SEQ ID NO: 178907 - DNA, 122 bp, Homo sapiens
ttttttcccttttaaataaggctgggggatgggcaaggagcatgtgaggcaagtgaggggcgcagggttatgtgtcctctaagaaacaggaaatgcatagtcaaggattcccatggtttgtg

SEQ ID NO: 178908 - DNA, 122 bp, Homo sapiens
gtgaagatgagatcctctacatccttagggcagctcagagggccactcagcggccaagtccggccggggagggccgagggctctgtttgaggtcaccctggagaccggcctcagagtccagg

SEQ ID NO: 178909 - DNA, 122 bp, Homo sapiens
caccactggtttaaagccatcaagatgaatcatgccacgtgatgcctgtagattgcattccgattattgaaggatttccgtttaacttcactttcctcagtccatttcatacatcttgaaac

SEQ ID NO: 178910 - DNA, 122 bp, Homo sapiens
ccccgcccgccgcgggcagggcggatctgggtaggggccggagggggagggtccgcccagcgggtgtccggtgtcctccctgcagcctctcccaggcattggtcacttctccgcggaggagc

SEQ ID NO: 178911 - DNA, 122 bp, Homo sapiens
cgcccgcgccacagcacccgcagccggggtcccaggcgctcccagcccccgcgctggctccggaccagctgcctcaaaacaacacgcttgtggcgctgcccatcgtagccatcgagaacatc

SEQ ID NO: 178912 - DNA, 122 bp, Homo sapiens
tcaccactcaggaatgggggtgtagtaagcagcgttcagacaccaacagtttactccttccgaaccccacagaccatggctagaaagaccacatgtcagcgaggaggaaacggaaccaggag

SEQ ID NO: 178913 - DNA, 122 bp, Homo sapiens
ttgaatgacaaaagggatggaataaaattcatttaaaactggttcacaccagctctcctgcgtgttctattaactgctaagatcaagtcacaaaacattattttgaggagaaagggtttagt

SEQ ID NO: 178914 - DNA, 122 bp, Homo sapiens
accgggcccagagacaacctgttctgcagcccatttgcttcttccagagtctccctctgtcgtccgggctagagtacactggctcgatctcggctcactgcaacctccgcctcccaggttca

SEQ ID NO: 178915 - DNA, 122 bp, Homo sapiens
tctcaagaaagctttcagtttctttagcaaaacccttcagccaggtttcacagacatgtccggcagactgtgacattttcactcatacatctacaacatgcacaccaagacacaccccctcc

SEQ ID NO: 178916 - DNA, 122 bp, Homo sapiens
cacctgcagctgcagcttcacaggcttgaagtcattcaacccctgcgctctgtgctttcacgcccttgcacttgcggtccctcggcctggaatgctggtctgtttaagccctggaggcagct

SEQ ID NO: 178917 - DNA, 122 bp, Homo sapiens
gcactaatggagaaggccaggaaagcctggattctgtgtgtcctcattgtgctccctcatcgatacactgtctctcaccagcctttggaatttccttcctttggttttctgccatttttttc

SEQ ID NO: 178918 - DNA, 122 bp, Homo sapiens
aacacaaaacatttacatttgagtacatcatccattttgacaattcaccagctgagacttcggaccttcattaactaaaaagtgctcagcatttccttcctgggagactcccagtgccaatc

SEQ ID NO: 178919 - DNA, 122 bp, Homo sapiens
cctcgctatttttttatttttgtaaagacaggggtctccctgtgttatccaggctggtctcgaactcctgggctcgagcaatgttcccacgtccgccttccaaaatgttgggatcacaggct

SEQ ID NO: 178920 - DNA, 122 bp, Homo sapiens
tgaggaaactgaagactcagagaagttaaattccttgtccaagtcacatggcttgaaccacgtagaacccacatccatctaaatgcagagcctgcacccttagccagttagtcattacacta

SEQ ID NO: 178921 - DNA, 122 bp, Homo sapiens
agatctgcgccaggcacaggcgctcttgcccgtcgatcaccaacgacacgatgggaatgccgtagaggatcacctggcccacctggttgggtttgaggttggcgtgccctggccgcggctgg

SEQ ID NO: 178922 - DNA, 122 bp, Homo sapiens
catcaaaccgctaggcctcaagtcagttcttcaggcccaccccggctcctggcaagagaccgctcaccccggagcaggatttcagtggaaactctggctttgtctcagccctttccgtgctg

SEQ ID NO: 178923 - DNA, 122 bp, Homo sapiens
tgctggctggaaacttaacggctaatgtggatctgaccgtagtttgccaaattaagaaaacggtgtgagcaaaacccacctttacctaccatgcacttgcatttgggcattagtagagaaca

SEQ ID NO: 178924 - DNA, 122 bp, Homo sapiens
caccacccccaacagagcctggtcagtgctgaagactgcgtcagtctggctctgccgccccgcccactgaagccgatagctggagcaaagctcggtcgggcgtcttccggggtcgtcacgtc

SEQ ID NO: 178925 - DNA, 122 bp, Homo sapiens
tggcatctccaggcttcagggcacagctcacccgggtagcgggtgaaagagtgagtgtaccgaggggtctcctgtggtctgaggagagctgaaggtctgcattttacatcaaggatcaggtg

SEQ ID NO: 178926 - DNA, 122 bp, Homo sapiens
tgaatggattcataataagaacaggacttcaccagcttccaagggaccctccccacctctcggatatattctgaagcctaaatttcacctgcttatctaggatcctaggccaggccttctgc

SEQ ID NO: 178927 - DNA, 122 bp, Homo sapiens
ttggagagccgcggtttcccatgattgttaagattaggatcgccttgatcgtggctgggtcgggcccaccgggtaggcactgggggccagggtgcgggccggcgcgcaagcctcgcctcgtg

SEQ ID NO: 178928 - DNA, 122 bp, Homo sapiens
agtcctcatcctcaaacaccttcctgggggcttaaagccggtccacagaggctcactctccgcaatgcctagggtccggcgaggaagggcatcgtcccctccgtttgggggaccaaggccaa

SEQ ID NO: 178929 - DNA, 122 bp, Homo sapiens
aggacccagctggagacacactcacctcaaactcagatctgccctctcctgtgcctggaacgcaccacctattccatcaactccgccagagcaaaaacctgtgccttccaggcccctggtgc

SEQ ID NO: 178930 - DNA, 122 bp, Homo sapiens
ttgtgaataacatttcacattgggagatgatatatagaattattgatttttgacttccctcgaaagatgaagaaacccgtgtttctgcacggtaagaaggagctggagctgaggagtggagg

SEQ ID NO: 178931 - DNA, 122 bp, Homo sapiens
aatcaccttgggcagaaggcctttttgcaaaaagactcggcagcccgggccccgtaggttcggcgcatgcgcagcgcgctcggcgcccgggttccttcctccgcgccacccggaagcctcgg

SEQ ID NO: 178932 - DNA, 122 bp, Homo sapiens
ctgcacaaagtgggatcccggcctctcgcagaattaagcttgaagagttgaggaagtggtcgttgaaagtgggcgtgcgattcccgcagtaagagcgctcaggcggaggagaaagggctgag

SEQ ID NO: 178933 - DNA, 122 bp, Homo sapiens
agatattggtgcatcaatcaaacttgaggatgctcagccccagaaaaaagtcactcagtacgttttgggttttgtttctttttaaaaagatggggtcttgctatattgcccaagctggattt

SEQ ID NO: 178934 - DNA, 122 bp, Homo sapiens
ccagtccacctgcgagcgccggatgggggagcactcgcctccagcaacccgcagggtccccgaacctttgcactgctctggccaggaacagagccggcttaagccagtatggtttacataca

SEQ ID NO: 178935 - DNA, 122 bp, Homo sapiens
acatctgtacagaacaagtgcgcacacccatgtgtctgtgtacatgcacacgggtccattcgcacatgtgaggccaccattcataccacaccctgggtgggtcttgagttctcacccacaga

SEQ ID NO: 178936 - DNA, 122 bp, Homo sapiens
aaacacatttttaacatttgtccttaatattcccttttgtgtattcctaagcactattgacggtatttagacacctggtatttacaccaacaatactctgaattagttttctgtttctgata

SEQ ID NO: 178937 - DNA, 122 bp, Homo sapiens
tgggcggccgcgcggcggcgggctgggtcgaggacagccttgtctgtgaggtggccttgccggtcgcgcgggcgagtcgcagttgcctcagcttggggaacgaaaacgtgctctgctctggg

SEQ ID NO: 178938 - DNA, 122 bp, Homo sapiens
cctcaggtgatccatccacctcggcctcccaaagtgctgggattacaggcatgagccacccgccctggtgctggatttttgcttagtcctatcattttctgagtcccgagagttttcatatt

SEQ ID NO: 178939 - DNA, 122 bp, Homo sapiens
cagctgctttgagtgctacggagatagagaaatcaatttctgctaggtaattaaccatttcgactcgagcagtgccactttaaaaatcttttgtcagaatagatgatgtgtcagatctcttt

SEQ ID NO: 178940 - DNA, 122 bp, Homo sapiens
cgctcatgtggaagtcacgcccgttgggcagttgtgtgacacggaagcggcagtcctggccgggctggctgcggtcctcggggaaggcggccagcttgtccgtctggttgctggggctcatg

SEQ ID NO: 178941 - DNA, 122 bp, Homo sapiens
cccattgatgggttccatttgcctgggcttggaatcccaaaggggaagaaccacctttaccggagtaacagtccaaagcctggggctgcagttggtggggcaactcttcactgtgcttgcac

SEQ ID NO: 178942 - DNA, 122 bp, Homo sapiens
cgggccgcagccctggcactgggggctgcggcaggatgtatgctgaagagtgggcggcatcgggtgggggaagttgtgcaggtgctggagaaaagccggaggcttgccgagaggagcactga

SEQ ID NO: 178943 - DNA, 122 bp, Homo sapiens
atctccgtgttcccagcaaagcagggagcacggagagtcaaagctaacatagagcccaaccgacgcttaaaggaggtgttttgggttttgttttttttttttctatttgcgtacggtctatt

SEQ ID NO: 178944 - DNA, 122 bp, Homo sapiens
cctgaggcacagcagggcttcgaggaggctcctaaagggtacaggagcactttgcagggccgtacccagaaaccccgttctaggcagagttccccatttgggctgtgttttgagaaggcatt

SEQ ID NO: 178945 - DNA, 122 bp, Homo sapiens
taacaagtcatttagactcaaaggccagtcagaaagaagggaagaggcagcatgggatcacggcaagaggattggtctgggagttaggacgcctggctccacacctgctcttctttgatcag

SEQ ID NO: 178946 - DNA, 122 bp, Homo sapiens
catctttttaacatatttttaaaaagtaagttattctggctgggcgcagtggctcatgcccgtaataccagcactttgggaggccgaggcgggtggatcacttgagggcaggagttcgagac

SEQ ID NO: 178947 - DNA, 122 bp, Homo sapiens
tgagccgttatctgcctgactgacatcttggccaaccaatgacctttggggctgccaaagcgcctgcctccgagagttgggcggggcgagtagttgcaatgacaaacatttaacccaatagc

SEQ ID NO: 178948 - DNA, 122 bp, Homo sapiens
cctcgttgttgtgcttgttcatggccgagcgcgcgtccggcctgttctcgcgcgcatccgcgaactccctggacactaacacgccgaagtcagcgtcctcgctgcagccgccccacttccag

SEQ ID NO: 178949 - DNA, 122 bp, Homo sapiens
cagggggtcacacagtctgaccaggctttcgcgtccttcctgctctctcactgcactgtccgcttctgcttcccagcctgtggacgctccctggagggcagagcagctggcacaccatgccc

SEQ ID NO: 178950 - DNA, 122 bp, Homo sapiens
acatcatagatagtgcagagtaagggggaggaatggattagaggacagaaagagaagcaacgcagcttgagtgactaaagcaacccatattacgcataaaatcatagaaggaaagagtggga

SEQ ID NO: 178951 - DNA, 122 bp, Homo sapiens
cattgggacaggataattgagcagctcaggtcatagagacctggaaagttgccacgtggccgagtttcacacaggtgaggtgcatccatttgcttttaaaagaactaaagagtctgaaacaa

SEQ ID NO: 178952 - DNA, 122 bp, Homo sapiens
tccacactgaggagaagccgttccagtgcggcgagtgcgggaaggccttccggcagagcacgcagctggctgcccaccaccgcgtccacacccgcgagcggccctacgcatgcggcgagtgc

SEQ ID NO: 178953 - DNA, 122 bp, Homo sapiens
attggggacaaggccaggacaagcaggaccccgtgcgtgtttcctcgaatggcttatggtcgcttcagaaagacactgggtgtttgttggcgttcgggctgccagggccatcgaatccggtt

SEQ ID NO: 178954 - DNA, 122 bp, Homo sapiens
tgctttgctggctgttaggctttgtcaataggggacgctccagggtgttttaatggaacccggatttgcatttgttttaatcaggtattgtaagacaagcagacttggaagggaatgtcatg

SEQ ID NO: 178955 - DNA, 122 bp, Homo sapiens
gatgactcctcctgaccagcccaggaccagctttcttgtcaccttgaggtcccctcgccccgtcacaccgttatgcattactctgtgtctactattatgtgtgcataatttataccgtaaat

SEQ ID NO: 178956 - DNA, 122 bp, Homo sapiens
tatgaaagtatctctgtagaacaaaaccctggagatagaatttctggaccaaaagcatatcgaatttaggcagaaactgctcaattgccctctgtagaaagttgtactgatttagactccca

SEQ ID NO: 178957 - DNA, 122 bp, Homo sapiens
acatagcagtgctttctaaaaaatgtatcttattttatttagatcactgtctcacaaggccgaacaaataaattaatgacacatctctgtagattcatttaaaggaaacagcagaaacacaa

SEQ ID NO: 178958 - DNA, 122 bp, Homo sapiens
cagtgccagcccaggagccttctctgcggcccccaccttatgagatgggcggtgaagcgccggcctctcccagcaggggtgcctgggtgctcagagcccacctctcacagccgcggtcccgg

SEQ ID NO: 178959 - DNA, 122 bp, Homo sapiens
gtgattcccgtgttaagaagagagacagactggggagcagcccaacgctggaggtggaggcggaattcgaaccccaggctggacgctggagctctcgcccgccgtgctaaggcgtcttcccc

SEQ ID NO: 178960 - DNA, 122 bp, Homo sapiens
tcggcagcggggcagtgggcctgggtagggaaggacacccaagaagtgtcccctaagctccgctgatgggacagtttggcctctgctctggcctgtcattccagggttccaggcccggaggc

SEQ ID NO: 178961 - DNA, 122 bp, Homo sapiens
gtgccgaccctgccatccgttctgagcagtggctgctgcctgagttagaggccaataggccgcccgcatcagcggacgcggatcctacccctctgtggatttgaattcactagttctctctg

SEQ ID NO: 178962 - DNA, 122 bp, Homo sapiens
tttgcgagatttggaggcctcgcgtggggagagggccgcgtctgtggaggagcttggctccgcacctgctgggctggcgaacccgaaattgggcttggaacccgggagccagatcttggacc

SEQ ID NO: 178963 - DNA, 122 bp, Homo sapiens
gcggcggcggtggaaaaaggcgcggcgggggcaaaacggtgcagcggcagcaaaaagccgcggcgtcgggggcaaaaagcctcaaaaagccacggcggagggggtaaaaagccgcaaaaagc

SEQ ID NO: 178964 - DNA, 122 bp, Homo sapiens
gccgccgccgctgcagcagacagaggacgccccgtggcggctggaagcctgtgtgagtagcggcgcccgggagagcggggatctgctgaggggcgctggagactccgcggctggaggcgcgc

SEQ ID NO: 178965 - DNA, 122 bp, Homo sapiens
tggagagaacggtgggcaagtagggctccttccgcacgctgcacggttcttctccgggcccgcccccttccagcaacagccaatcagaaactcgctgacagcgctaggctctccacggtaat

SEQ ID NO: 178966 - DNA, 122 bp, Homo sapiens
gcccaggcctcccggagccgcccggcgccgccgcccccgccgccatttcctcgcgctcgccgtcgcctcgtccccgctgtcaggttactccattcacctgggcctgcagcagcctgcgccgc

SEQ ID NO: 178967 - DNA, 122 bp, Homo sapiens
gagaagaagtgggccctgaagccgcgcttggagacggtgttgtcggacttgaactccacgcgcatgttgttgctctgcgaggtgatgacctccggcgtctcagagccgcagaacctgccgtg

SEQ ID NO: 178968 - DNA, 122 bp, Homo sapiens
tggggtaaggtgtctgtggggcaggtctacaagggttagtccatgcccagggtacccaagcgtcaccctctgcagtccctgcccttggcttgacctctaagtggtaggaaatagctacagtg

SEQ ID NO: 178969 - DNA, 122 bp, Homo sapiens
ctcgggagctgggcggcgggtcccccggggctggagtgtcgtcccggcgcccagagcgcgcgctcctttggccctgccccctgcccgggggacttcggcagcggccactcctgccactgcgc

SEQ ID NO: 178970 - DNA, 122 bp, Homo sapiens
attatgtgtattaagactgaatttcactctagaatttgaactggtcctcagaaaacacatcgtgaagttgtacttgttgtctggtatttatagccctgatttctctgagggtatagaaatat

SEQ ID NO: 178971 - DNA, 122 bp, Homo sapiens
cgccgcggcctccgccatgtcaccgactacccgaacctcaagcctctctgagacaccaggcgccgcaactcgcccggcgcctcttgatgacgcgagcatcttccaacgccccgcccctcacg

SEQ ID NO: 178972 - DNA, 122 bp, Homo sapiens
tccctcggttagggtgtccgtctgtaaatctttggcgatcctcccttcgctcttcagtggcgacacttgggatggcggggtgaggaaggggtagtgagggaaaggcctttggttttggtctt

SEQ ID NO: 178973 - DNA, 122 bp, Homo sapiens
gttgtgtgtgtctgtgaaaccacaatctgcccttggtttcccagctcaatggtggctctgcgtgctcgtcccgaagtgacctgcctggttccgacaaggacactgaggtatggatgttctcc

SEQ ID NO: 178974 - DNA, 122 bp, Homo sapiens
cgaggacttgggttcgggtttgcggtgttattgccctgttatctgcgtggttggtggtatcgctgtacacagatttgcaccgtggtgttctctgagggagcagaaaaggggcccctccattg

SEQ ID NO: 178975 - DNA, 122 bp, Homo sapiens
cctgggtagcgggtgtgtctttcccttctgagttagctacaggggacacctcagagaactcgagttgagactgtgcccatgaaggcactttactgttcagtttggcatcccagctcctagca

SEQ ID NO: 178976 - DNA, 122 bp, Homo sapiens
caacccacattcctctcctgaaattctcgactctttcggataaatttctattaaagtgaacgtcaagtcagtcttacgcctcttgaaggaaaacagaaaagaaattcctgtaagaggttgag

SEQ ID NO: 178977 - DNA, 122 bp, Homo sapiens
tgccccaacctctgtttccaaatttttccagcggacgcgcgcccttttctgggaaccctgcgtccgctcagcgcgcgctcatcccagtgtctaaggcgctcccgggtggtcttgggagttgc

SEQ ID NO: 178978 - DNA, 122 bp, Homo sapiens
atgggatgtgtataaattcatgggaggttatttgaggatatttatcccaagccttattcgcggttgtccttgaaatgaataccagaacattagaattcagggatagtcgtgacttttctaca

SEQ ID NO: 178979 - DNA, 122 bp, Homo sapiens
ctcgtggtgcgccgttttttaagctggtttgaaaagcgcaatattcgggtgggagtgacccgattttccaggtgcatccgtcacccctttctttgacttggaaagggaactccctgacccct

SEQ ID NO: 178980 - DNA, 122 bp, Homo sapiens
cttggcattggccaagaactcctgctccgcctgcagcacctcctccgggctgccgcaggccgcgtacttgtccaggagctggcggttcaggtccaagaagcccttgccccatttaaacttcc

SEQ ID NO: 178981 - DNA, 122 bp, Homo sapiens
cctggcactgcacgcaggatctttggttagctgcatccatatcgtttgcacgagagctgacggcacagacgcgtaagaggcgtgcacggcggggagctggggacagcagccagagcatgggg

SEQ ID NO: 178982 - DNA, 122 bp, Homo sapiens
tccaatcaggggcgctggagtggaaaccgtccaatcaggagtgaagccggagagcaggggcggcttccgggatttggcgggggccttcgtcggctccagttagagctcgggtctcctcgcca

SEQ ID NO: 178983 - DNA, 122 bp, Homo sapiens
aatatctgtacacaaaatattggttttatatattataggtatgcccaagaggacagagaacgaatgcacagaaatattgtcagccttgcacagaatctcctgaactttatgattggctctat

SEQ ID NO: 178984 - DNA, 122 bp, Homo sapiens
catctggggggaagacaatctataaacataagaaaatcaataatatagagtgttagaaggcgataagtgctatgggaaataaaatagagcagaatgtggaggattgggaggacggagggtgg

SEQ ID NO: 178985 - DNA, 122 bp, Homo sapiens
cagcgggggcgccagcgtgaagatggggtccgaggccatgcccagagccacgaagagcaccggcaggcagcagaggccgagctgcagctgctggccgccgcccagcgcccccacctgggcga

SEQ ID NO: 178986 - DNA, 122 bp, Homo sapiens
aggaggagggggccagagccttttcaaaaccaaccaggctcttcctcttttagccttgaccgtgactaggtctttctgaccttgacatcacagggagcacagggaaggggggggaggggtgg

SEQ ID NO: 178987 - DNA, 122 bp, Homo sapiens
agtgatccacccacctctgcctcccaaagtgctgtgattacaggcatgagccaccacacccgggaaagggagttttgaattgtgttttacatactccatatttgtgagaatgagcatatatt

SEQ ID NO: 178988 - DNA, 122 bp, Homo sapiens
aaagccaaggagagggctctcaagatcacagctctgatatggaacattctgtcttcagggcgcatgttgtggggtctataattgatgactgtgagcacaggaacagtgatgaggaactgagg

SEQ ID NO: 178989 - DNA, 122 bp, Homo sapiens
cctccacccacctccctctcccgcagtacctggtgcccgggctgaggaagatgcaggagccgtcgggggcccacccgcagtaggggtcctgactgccgatacagttcctagagcagaccagg

SEQ ID NO: 178990 - DNA, 122 bp, Homo sapiens
ttaccttcagcctatgtatactgaattaatggatgaaatgctttataattacaaagtatgcgtaaaagagtagacactcatatgacgactggccttttaagtttaaatttaaaaaatcacag

SEQ ID NO: 178991 - DNA, 122 bp, Homo sapiens
gaagccggaatgggcccccaaaagggagggtgtttgggaagaatgacagcctctgggcagcgtcccccactctcgcttcgtcgggacggtgcaaggaaccatgcagaccgtgagcgccaaag

SEQ ID NO: 178992 - DNA, 122 bp, Homo sapiens
gatttctgataccataaagtaaaatttcaaggtcttcctctccgtatcttggggtacaggcgaaaaataaaggaggaaggtaagtctctttcttactgggaagaaagatcccctctgtcact

SEQ ID NO: 178993 - DNA, 122 bp, Homo sapiens
gagctgagtcctctgggccgcagtccttcctggacgagctctgaggccgaagatgcgttgcgtgactatgctgctgcctggacgcggggtctctagtccggaggcacggaaggacctgcctg

SEQ ID NO: 178994 - DNA, 122 bp, Homo sapiens
gccagcaataaaggactcctgaattagtctcagagtgtggcattctctctatgacttgctcggttacgacatttggaagccccagagagattcgccaccgggtgaagacctgactcattccg

SEQ ID NO: 178995 - DNA, 122 bp, Homo sapiens
taacccctgttttttctggcctcagtttctccagaacccagagtagggtctggcacacaacgggtgctcaatgaatgtctactgaattgaggccactgacttcagcccaaggggcagccaga

SEQ ID NO: 178996 - DNA, 122 bp, Homo sapiens
aacttctgtgatccgcccgcctcagtctcccgaagcattgggattgcaggcgtgaaccaccgcgctcggtcctggcttgagttttgaatttagggtcaaggtgagcctctggagttttcagc

SEQ ID NO: 178997 - DNA, 122 bp, Homo sapiens
cacacaccagtcacacacacatacagacccggcaccaagtaccccacttcccagccatgccggaggtttcctggatgggaccactcctgtccagaggctgctcccagcccagcccacattcc

SEQ ID NO: 178998 - DNA, 122 bp, Homo sapiens
tttgcaattagcatatgcaagtgaagtcttcttttccctgtggctgtctcttcctggagccggcctgcccctcgtcaaacacggggctttaaatcagcgtcggccccacctcagtcttgtcc

SEQ ID NO: 178999 - DNA, 122 bp, Homo sapiens
gaggccccaagctggaggaggagcaagaggggaaatgagcagcaacaataccaagtcaagcgtagagggttaagaatctgtacaggtgcagaacttgtaccacaggggaaggagagtgagta

SEQ ID NO: 179000 - DNA, 122 bp, Homo sapiens
tgtggatgcagcatataagccaggcatgtctcccgaggagtgcaggcgcttcaccacagacggtaaccagccaagtggaagggtacctggggagggctttgaaacatgggaaggaagtagat

SEQ ID NO: 179001 - DNA, 122 bp, Homo sapiens
actttcctctcgcctcccacgtcctcactaagttactcggggaccccaaggaaccaagaacgaaaagtaggaaggtccagaagcgttaacacaactgtgagacatcacagttacttgcctaa

SEQ ID NO: 179002 - DNA, 122 bp, Homo sapiens
ttgaacagtttggtagcacagacctgggaaatctcagagtttgcccatgcatactgaatgcgtaatatctgtgcacggtatgcatctgccttcggtccggtacatatgccagatgtaattgc

SEQ ID NO: 179003 - DNA, 122 bp, Homo sapiens
tgggttctttctgggggctccagggagaccccgtttcccgccttctccggcgtctgaagccgcctgccccttggtgcagccctgagtcaccccagcctctgcctccgtctcacgtcaccgcc

SEQ ID NO: 179004 - DNA, 122 bp, Homo sapiens
tcgtcaccagcgtgtgcgtgctcaacgtgcaccaccgctcgcccaccacgcacaccatggcgccctgggtgaaggtcgtcttcctggagaagctgcccgcgctgctcttcatgcagcagcca

SEQ ID NO: 179005 - DNA, 122 bp, Homo sapiens
ttcagaggcagcactgcagaaccgcagacgcctagccagccaggtccaggacagctgtggcggccgcccagggtacctacctttcgccagtcattgaagaagttcttccggaaaacctcctt

SEQ ID NO: 179006 - DNA, 122 bp, Homo sapiens
agtcccggaatcaatggcttctccagggaaccctggatccatgtttgggagaactgtgttcggacccaatctagtgctaggtgtgctaactgctgctgggcgacagagcacgcagggccctc

SEQ ID NO: 179007 - DNA, 122 bp, Homo sapiens
atttccatgataaagtatcgtttccctggtaacaatagcattggtcttgagaagcttctccgattgcagcaggacctttaagctgagaactgaaaaacgaatgggaagtgttatgagcagaa

SEQ ID NO: 179008 - DNA, 122 bp, Homo sapiens
tttttgcaaggcccgagatggcgggccctgcgcaggccgccctattccgcgccctcagggcgtcagtatccgcctgaggccggatacccactctgggctcggatacccgcgctgggcccgga

SEQ ID NO: 179009 - DNA, 122 bp, Homo sapiens
aaatgaagaatagcgatgatgaagtgacatgtcaccgggagggttgaaaaagaaaaagtgcgtaagagggtcccaaaaagaaccagcttccgtgtagacgggtctgcagaatctgccgtctc

SEQ ID NO: 179010 - DNA, 122 bp, Homo sapiens
ccatgtgctgtccctgtggacttgctggttgcggacatctcacctcaccagagtcgtacacgacacagccttttgcgtctggccttcactgagcccgatgtgtccaaggttcatctgcgctg

SEQ ID NO: 179011 - DNA, 122 bp, Homo sapiens
cacacaccttgttcctggcacgctacactgcggacggcgctgactctcctcctaccctggcgtccccaacccacacgggcaggctgtggggctggcaccacccgactttctcctgcccttgg

SEQ ID NO: 179012 - DNA, 122 bp, Homo sapiens
tggactggctgccgcagcgccacctgggaaactgaggtcgcctcttgcgaacacaaccggcgatggaggcggtggaactacctttctctagaagagacacgtacatgcacacccccaccgtg

SEQ ID NO: 179013 - DNA, 122 bp, Homo sapiens
ccttcccctgcgcagctgcgggagaggcccgttcccgcgagtgcccccgcggcgcagcctcggacccagggcctgcttgacctcctacctctggcccgccgcccctgtcctctgttcccagc

SEQ ID NO: 179014 - DNA, 122 bp, Homo sapiens
cctgagaagacagtaggtcagcatcagctgtgctcaggggtatgcgtgtcttctcccagtcgccctcagcccacctctaacaaactgatcatcatggaatcctatttttataactcctttgg

SEQ ID NO: 179015 - DNA, 122 bp, Homo sapiens
tccgggaggaaggccccgtgcccaggctccaggagccgacacctgctctgggcagcacgccgacggtgccaccaaatgttccgtggctctgacgtccagggaacagcaggacgactcttgaa

SEQ ID NO: 179016 - DNA, 122 bp, Homo sapiens
tgggcccatggggtggaagcccccagatgactgagcagttctacaaaagaatggccagcacgagcggggactagagggtcctgattttgtgtctgtgcctcttcatctctctggactctgat

SEQ ID NO: 179017 - DNA, 122 bp, Homo sapiens
agcagcccctgggatggaagcggttggtgcaacgtgaagtaaggtaaaccgaatccatgccgtgaagacttttaaacgccaaactgaggcgtcggaactttgctccgcgggcatcgaggagc

SEQ ID NO: 179018 - DNA, 122 bp, Homo sapiens
aaagctggtgcggcccctggcaacccgggggcgcctagctagggagccggttgctatgggcgccgtaactggggacgctacaggagccgccagggaccaaaagtcacgcaaaatccactcag

SEQ ID NO: 179019 - DNA, 122 bp, Homo sapiens
gaccacgttgttgatggtggcgatggggtccagctcactcttgggcctgttcttgctgcccgtcttggggccgtgcgccttcatgtggttcttgaggaaccagggctccttgaacctacggc

SEQ ID NO: 179020 - DNA, 122 bp, Homo sapiens
gggccagggcgggttataactagcggcttccacacagcaggaagcctgacagaggctgcccgcggggctcccagcgacccgaggacatcgcacacttccggccttctcttctcacactccct

SEQ ID NO: 179021 - DNA, 122 bp, Homo sapiens
ccgtcgaacccttttggcaaccgcagggaacacgcatcctcaggttggcacgggaggcggcgaggagctcccggagccaccggctgctggatccccctctcccccgcgtctgggcggaggag

SEQ ID NO: 179022 - DNA, 122 bp, Homo sapiens
ccaggcctgaaggcagagaggtcagcaggctcgggggcctctgctccagcggacaacaagcgcaccgggcgggaacggccgcctccccaggcgctgcagcctagctctcatgtgacccacgg

SEQ ID NO: 179023 - DNA, 122 bp, Homo sapiens
aggaaggggctggacgaccctctgccgtgttctccagcctcggcccacctccccacacgccggggcaagcagggtggagaaggaagaaaacgagaaaacaacaaaagtaccagactctccgg

SEQ ID NO: 179024 - DNA, 122 bp, Homo sapiens
ggccagcgggagctgagcgtgcgggacgtgcaggccacacgcgtgggcctcaaggaccagcgcagagggctcttctcggtgtggcaggaggtcttccagctgcctcgagcccagaggtaggc

SEQ ID NO: 179025 - DNA, 122 bp, Homo sapiens
tgctgtatatcaagacaatgcttggttttcaagctgttctgagaatgattaaagcagtgtcgcaaggtgacattgtcaggggagaacaagcagcttgagaatttcctcttaatctgattgca

SEQ ID NO: 179026 - DNA, 122 bp, Homo sapiens
cattttggtgtcttctgacactttttgttgccccaggactctggagaaaacaggtggtcacggaggagcagatctgctctgtggaccttccaagctgctctaacagactgagaccatggcaa

SEQ ID NO: 179027 - DNA, 122 bp, Homo sapiens
caggtgggattcttcaaaacaggaggctgttccagtctcttcattttgcagctgagaaaacgaaggccttggagcttgagaactccagttgcccaaggcacacaggtggtgggtaaggaagc

SEQ ID NO: 179028 - DNA, 122 bp, Homo sapiens
agtcattgtcactgccctcagagcccagctccatgcaccgcagagaggggccctggcactcgtgtctgaagtcctggccgtgtgctcctgcagcactcttgtgcttatcaccacacggcacg

SEQ ID NO: 179029 - DNA, 122 bp, Homo sapiens
tcagagcttatggtaccccctataagtatgcaagtaagttgtactgagacataattatatcgactagcaagcaaatgtattacttaggtctataaattgataaacaagtggtacagatcagt

SEQ ID NO: 179030 - DNA, 122 bp, Homo sapiens
cacatgtaacagccgaagctgcaatttgaattttcctgccaacgtgaggaagccgggattcgaaccggggagacaaaaggggtcccgaacatgtccttggatttaatagatggtcggaaatc

SEQ ID NO: 179031 - DNA, 122 bp, Homo sapiens
gtggactgtggtgccacccacttttacaccaaatttgggtgtccctggaattgtcaagggcgctggtgggtgggtaattttagtattttaatgagtacataatgagatcctaggtgaaacct

SEQ ID NO: 179032 - DNA, 122 bp, Homo sapiens
caccggaacgattctagctgctcttgccggaagtgtggctagcttagcgtgcaaagacgccgcgttgtgacctacgtgggcggagtcagccgtgcagacctagaacttagcgccggaagtgt

SEQ ID NO: 179033 - DNA, 122 bp, Homo sapiens
aaaggacaagtttcacgtcatttcccacccagagaaacaaataaagaggaacctagaggacgtagcaaaaactttacaaacaaattttattcaaaggtcaggccagaaggaagatggatgta

SEQ ID NO: 179034 - DNA, 122 bp, Homo sapiens
tttcagagaattcatacagccattaattatccaaacctatttctcagtgcttttcaatggcgtgatctcggcttactgcaacctccgcctcccaggttcaagcaattcttctgcctcagcct

SEQ ID NO: 179035 - DNA, 122 bp, Homo sapiens
cggggcactgggactgtggcgggcacccgcgccgggggtcggacggtgcttctgcaccggcgagataagggtcgcttctgcaccgcccgggtttccagcctttaactttttgtcctttcctc

SEQ ID NO: 179036 - DNA, 122 bp, Homo sapiens
gttgcagttttcgctgcatctcatcgatctgctgagcatacttctcagatgtgatgttttcgctgggattcagaaagctatagtggatcacaccggcagcagcccaccaaacagtgaccata

SEQ ID NO: 179037 - DNA, 122 bp, Homo sapiens
tttgtgaccttggtaaattgtttctccctaagttttcccatttttttaccaaggggttggcgaagaccactgcacagggttgttgtgaagactgaattaagtaagataatgtatgtaaagta

SEQ ID NO: 179038 - DNA, 122 bp, Homo sapiens
gggagacaacagtgggtccaggggaccggcactcagcacacctaggacctgcaccggcaccggcctctgagttcccgcagtttttattgattgtgattttcattatttcagcacaaaggaat

SEQ ID NO: 179039 - DNA, 122 bp, Homo sapiens
tgggtgctcctggaggctgagaactggagctaccaccttaggggacatcccagcccctcacgctgatcccaccatgacccatggccaggctgcccagggccctgcaggagtccctggtatgc

SEQ ID NO: 179040 - DNA, 122 bp, Homo sapiens
gaaagctagctcagggctcctgccctccaatcagtgtcgcttgtcccctaagaaaggacccgtgggcttctggcaggacccgcgccatggacctcttatttctgcgccctgtgacaatctga

SEQ ID NO: 179041 - DNA, 122 bp, Homo sapiens
ggaagagggttttcctgatcttttttctaggagactcaagaattattgaagtgtaattagcgtgaaagtatatactgtagtttacaagggagaactaaaatttgcaaggagggaaactggct

SEQ ID NO: 179042 - DNA, 122 bp, Homo sapiens
cggccaggggaacgccagggccaaggccagcatgcgctgagcttctgcccagcctggagtcgccttcaccaggccatgagcacgtgaggcactttctaagcactggttgcccgggaggcgca

SEQ ID NO: 179043 - DNA, 122 bp, Homo sapiens
aggggaaggacatttggtgtggatcatccttctcagtaatggggttatttggggcctggccgggctggggaacatgacgccgcgtcgctgctgagcgggaacagcaggtgtctgtccatgca

SEQ ID NO: 179044 - DNA, 122 bp, Homo sapiens
gaatgtatatctcctctttgcctcagtttctccatctgtaaatgcatttgatcctatctacgtccaaggcatttgtatgatgccacaaataaaatgatttgacaatttctttagcttattgg

SEQ ID NO: 179045 - DNA, 122 bp, Homo sapiens
ccattggccggatggggctaccctccccgccgcggccgctgctgatgtcagcctcgctcgcgctcgctcctcccgcacccacctcccggccccaggcacactgcatcggcgcggacgctccg

SEQ ID NO: 179046 - DNA, 122 bp, Homo sapiens
ctgctgctgctgtggctctggcgagtgtgccgactgcgacctgccctgcgacctggactgcggcatcctggatgcctgctgcgagtccgcggactgcctggagatctgcatggagtgctgtg

SEQ ID NO: 179047 - DNA, 122 bp, Homo sapiens
agctcaatgggtagaactaatgtgaccttccgacactgagattgaaacgggcttctactgcgtgaacgttaaacatctaaaatctgaatctggtttccagagcttactccagtcaagcagct

SEQ ID NO: 179048 - DNA, 122 bp, Homo sapiens
ctcggcgcctccagcccgggcgggaacaatggagccggagctggtgccccggaggcggggcggggggagggctcccgtccgccacccggggtctccagaccttgtgcccccctcctccagaa

SEQ ID NO: 179049 - DNA, 122 bp, Homo sapiens
tcagaatcttttacttaagagtttccaagagaaaaaaaatgattcggaattttaggactacgtaggtactctaggtttggtattgtgctaagacttttgcactaattattttgttttaaact

SEQ ID NO: 179050 - DNA, 122 bp, Homo sapiens
aataaaaacagaaaagaaacgcagaaagaacacacggcgagcaagcggcagggccaagatcgggaaggctttggactgcagagctgcgtctttccccaacattccgctctcctaacagagga

SEQ ID NO: 179051 - DNA, 122 bp, Homo sapiens
cacccacctctaccaaggaggcctctctgacggcaccgcggtggctgcagcggagtctcccgcaaacgtcccgagatctcactgcagaaggcaggggtccacacggtactcctcgatactcc

SEQ ID NO: 179052 - DNA, 122 bp, Homo sapiens
ctctgtcacctaagctggagtgtagtggcacaatcacagcttactttagtcctgacctcccgagctcaaataatcctcccacctcagcctcctgagtagctgggaccacaggcgtgtgccac

SEQ ID NO: 179053 - DNA, 122 bp, Homo sapiens
aagggccaaggcagccctggtgagtgttttcagctctcttctgtagcttgtttggtcagtcgagtttggtgtgattgtcctctccttttgcttctgacctaagtaaaagctaatggttggca

SEQ ID NO: 179054 - DNA, 122 bp, Homo sapiens
ctgggactgtgtagaaaacccaccataaaaccttcacactttcctttgatcttgtgaacccgcaacacagtctaatgtaatttgagaaaacacattcatatatatttttttctaaaattggt

SEQ ID NO: 179055 - DNA, 122 bp, Homo sapiens
caggggtgggggtgtgcccctcaacacagagcagagtttggctgaaggtcctgacactgtcgtcccctccaggtcaggcggtacatttcctccaagacagggaatcagtcggggtgtctcag

SEQ ID NO: 179056 - DNA, 122 bp, Homo sapiens
ccaaaatccagggggtccacaccaggtcagtaccccggaattggctgttttgcaagatttcgggagtaccaaattggcatgagacatttgacaacgaggccagccatgcaccgagctcaggt

SEQ ID NO: 179057 - DNA, 122 bp, Homo sapiens
ttgaagccctccaccgcctcctcgagcggcagcacgctgtggccgcggtgctcgcgggagcggtcgcacaccacgcagatgggcatctggtcctcctcgcagtacagcttcaggggctcgcg

SEQ ID NO: 179058 - DNA, 122 bp, Homo sapiens
cgtgatggctaatactaaaacagactcagttctgcatgctctatttcatttaaccctcaccgaaacctacacggtgaccatcagcagcctcatcgtaaagcataaaaaaacaagattgcaag

SEQ ID NO: 179059 - DNA, 122 bp, Homo sapiens
tttgcgatttggcgccaccgccgcagctccgccccttcccgggcgcgcccctcccagctccggcctcggccctggcccgcgtggcgctaaaccctgttaagatccctgcttggtctccgctg

SEQ ID NO: 179060 - DNA, 122 bp, Homo sapiens
tgtgatctgcccacctcagcctcccaaagtgttgggattacaggcgtgagccactgcacccggcccagaccaatgtatttctttaatgtatttgattgatgtctcttgcctccttaaaatgt

SEQ ID NO: 179061 - DNA, 122 bp, Homo sapiens
gcttggcaggtcccggtaatgggtaagggagaagtaacacccctgaagaagggagaatgccggtcccaaaagaaagaaggggagtcaggcagataaagtaaatagaaatcctgtaaacataa

SEQ ID NO: 179062 - DNA, 122 bp, Homo sapiens
gcgtgaccaccaagtctccccagacatggagggccttgtggacaccagcgtggccaagatcgtgtctgaccgcaacctgcccttcgtggcccgccagatggccctgcacgcaaatgtgagtg

SEQ ID NO: 179063 - DNA, 122 bp, Homo sapiens
ttggttgcagagtacagtgccccattaaacaggtgtgttttcttggccaagccctaagcccgatatcagatttactcatcctctgtcccaccgttttggggccctgacaaattgtcaaaaat

SEQ ID NO: 179064 - DNA, 122 bp, Homo sapiens
tcccctggtgcatgtttctgatcagatcaatttcttctcccggagacacccaatccgggtcgtatggattacctgtgggttaaccaggggtctccgggttaaccatccaactcagagtaaag

SEQ ID NO: 179065 - DNA, 122 bp, Homo sapiens
tgctcccaagcaacatacccttaaaaaatgatgtcccactagcggaaaccattttccaggcgttaggacagtgtgccagggtcaaaggcagcctgggaccgggtcctggggtcccgcgcctt

SEQ ID NO: 179066 - DNA, 122 bp, Homo sapiens
ggcactctgggcgcgcgcggacggcggggcagtgcctactacgcaggcgcacgctgcgggcgtcaggacccggcagcaacactgccacgcgaatccgcgccggccaatcagcatggccaggg

SEQ ID NO: 179067 - DNA, 122 bp, Homo sapiens
cgagcgcctggcgctggtggatgccgggaccggcgagtgctggacctttgcgcagctggacgcctactccaatgcggtagccaacctcttccgccagctgggcttcgcgccgggcgacgtgg

SEQ ID NO: 179068 - DNA, 122 bp, Homo sapiens
cggaaagggaactccctgaccccttgcgcttcccgagtgaggcaatgcctcgccctgcttcggctcacgcacggtgcgcgaacccactgacctgcgcccactgtctggcagtccctagtgag

SEQ ID NO: 179069 - DNA, 122 bp, Homo sapiens
ggcccgtgacaagccacgtcgccagctccgctctgaatacccccggccacgccacacgagcggcctcaaccctgagacgcccagggaacatgagctgaccctctagaagcaagatggcggcc

SEQ ID NO: 179070 - DNA, 122 bp, Homo sapiens
ctagtgaaagatcaaagttgtttattacactgagttcacaatacatatgtgataatatgtcgcctggcaacttgaagcttgttgtgaaattgcaaagaataaaatgatctgaaactttgtcc

SEQ ID NO: 179071 - DNA, 122 bp, Homo sapiens
agtgatcttaacatgtatttcagtttttatattgtgtgctggttgtaagtagaagtttggcgtttttcttaatggaattgtttagaattttgcaggttgtataaatgtacttattctttgct

SEQ ID NO: 179072 - DNA, 122 bp, Homo sapiens
gcgcaggggacgcgtgggggcctaccttggtctgttcgctcagcttctcacttctcaggtcgctcagcaggtcgcgacccaaatcctccccctcgggacctgccatgaaggcagacgggctg

SEQ ID NO: 179073 - DNA, 122 bp, Homo sapiens
tataacctggatttgcagatgaggctcagagaagttgagttactttttcaaaaatatcaccgataagaggcagagctcaggattgaacccaattatgtctggctccaaattccatgcatttt

SEQ ID NO: 179074 - DNA, 122 bp, Homo sapiens
cacatgactccaccgaccgtccacgaggtctttcctggagtgaagctttaattctctgtccgcccactgcagtcccggataggggagtaagaaggtctgacagttaatgacacttgaggaag

SEQ ID NO: 179075 - DNA, 122 bp, Homo sapiens
gcatacaaggccagcgacaagtggcaggcagtgacgccagcctgatttgctgagggcacacgccatgcttcctgcagtgccagtgctcttctgggtccactttgcagcaggatagatgtgtt

SEQ ID NO: 179076 - DNA, 122 bp, Homo sapiens
acactcctcagcccttgggcggtcgatgggactgggcgccctggagcagggggcggtgctcgttcgggatgcttgggccgcacaggagcccatggagggggtgggaggctcgggcatggcgg

SEQ ID NO: 179077 - DNA, 122 bp, Homo sapiens
cgaggcataacaagccagcttgatgaaaacgctttcccaatctgtgacaacgcacttgaacgtcgccatcaaatcataacccccaaatatgtattttcccattttaggggagggcgccggca

SEQ ID NO: 179078 - DNA, 122 bp, Homo sapiens
gcacaccagatttggcccatggaatgtagttggctggcccctggtgtaatgtaaccaacacgtgggcacagctgaataagaagaggaataataacctttgcccattactttctaaagagctt

SEQ ID NO: 179079 - DNA, 122 bp, Homo sapiens
agcagtggttcggctcctcgatcgaagcccaaagaccgtggtggtcatccggacggccaacgcccaagagctgggacctgaggtgagccttttcaacagcgactggtacaactttcagctgg

SEQ ID NO: 179080 - DNA, 122 bp, Homo sapiens
gcgactgaaggaggaatatcagtcccttatccgggttagttgtgtttctacagtctaacgcgtagcataagggttgggagaaatcaggtgtcctcaataataggctccgtgtggaagccgct

SEQ ID NO: 179081 - DNA, 122 bp, Homo sapiens
tgagggcgcccgttctcaggtgagctcccggactagcgcgcatgcgcacaggtgagtgcccgccccgcccccgggcttggccacctgcccaagaaacttgttggttgttgccctcaggtcgc

SEQ ID NO: 179082 - DNA, 122 bp, Homo sapiens
cgagctgcctgccggggctcccagcctagagttctcctgaagctgaccgagggtctccaccgccccccacccccgctcctctctcccctccccagagcaccaattttgcggggggcggctgg

SEQ ID NO: 179083 - DNA, 122 bp, Homo sapiens
cttcgttggcactggtggttcacttaaggagcttgagggaaacctcctcttccccaaattcgcaccaaatctggggccccgacttttcctggattccagccacactcggtttgggaggcagt

SEQ ID NO: 179084 - DNA, 122 bp, Homo sapiens
ttccccacttgattcaggggtgcacacggtgtgaatggggaacccccagaaatccagagtcgtctcccctgacgcccctccttcctcccccagacggagaccaaagtggagccgttcgaggt

SEQ ID NO: 179085 - DNA, 122 bp, Homo sapiens
acggcaaggattatctcaccctgaatgaggacctgcgctcctggaccgcggtggacacggcggctcagatctccgagcaaaagtcaaatgatgcctctgaggcggagcaccagagagcctac

SEQ ID NO: 179086 - DNA, 122 bp, Homo sapiens
gccttgagctttgcagcttttcttggctcccatttcctcctaaagccacgagtttaccagcgtctcttacaagtagtgtgtcgccactttaaaaaaaacatcaggaaaggaaaagggagaac

SEQ ID NO: 179087 - DNA, 122 bp, Homo sapiens
gcacccccagcccaccccagcccactccagcacccccattagcgtgtcatggaggaggatcgcgaacttcagactcacgaatcgtccacgaagcaggggtagggcatctgctggaggtagat

SEQ ID NO: 179088 - DNA, 122 bp, Homo sapiens
aggcccggtcgccctggaagccgatccctcagccccgccgcccggctcccccggcatccacgacccggtcctgccacctacctgagggagccaggccgccccaacgtcctgtcgttcggcgg

SEQ ID NO: 179089 - DNA, 122 bp, Homo sapiens
gcttgaaccactgaaatgccgcagagggataccggcgctatggcagtgattggttcacttcgcgggtgggtggttttctccgtgcgttggtccctacagtagataaaacgggcacagtagct

SEQ ID NO: 179090 - DNA, 122 bp, Homo sapiens
cttggtggccctggatcttgtggctgcaatcggttccaaacagcagttaggtcagcagtccgctcagccgaggcagctctgttcatggcgttctcgaagctcttggagcaagccggaggcgt

SEQ ID NO: 179091 - DNA, 122 bp, Homo sapiens
gcgccgctgcgccccagcaacagccccgatttagaaggctggcggcgttccagggggtttcggcgttccgggcgcgcggcggggtgggggcagggacagggcccgcgggagggctgacgtca

SEQ ID NO: 179092 - DNA, 122 bp, Homo sapiens
atctaccaggattccttctgcttcctctaacagttttcttagttgttgaacaacacaaaccgagggactgatggggagagggaagaactgcatatttttaaggtagcattgcttataaaaag

SEQ ID NO: 179093 - DNA, 122 bp, Homo sapiens
tccctaccccttgagcatctggtccatcacttcctctcataagcagatttactgggaaggcggcccacactccggggcgcggtcttcgcctcagtttgggatctgaattgcaccctctccca

SEQ ID NO: 179094 - DNA, 122 bp, Homo sapiens
cgccgtgcgcctgcccggcgggcgagcccggcgcggagcctgtgcgcctgcgcagagccgcgagttcggttgccctggccccggccacaaccttggctcgcggaatcctgggaggtgtagtt

SEQ ID NO: 179095 - DNA, 122 bp, Homo sapiens
tatagacacagccaccacgctgcaccatgtaacgggctacctccaggtggttgttcaccacggcctccatcagtggcgtccgctgctgtttgtccactgcatttatgttggctccagcctgt

SEQ ID NO: 179096 - DNA, 122 bp, Homo sapiens
ttacctcctggcgtggccactgacacatccacgtttgtctcccacacggctgggcggccccgagacctgctgtgcgtgcccttctcattggtggcatttctcaagtttgtcccctctcaagt

SEQ ID NO: 179097 - DNA, 122 bp, Homo sapiens
atgactaggatgtaccagccacctgcctctgatgtcggcgaatcctgaagcacctgcacccgaatctggggcccagggctgcccgacccccactcccatggatgatgaggagccccagacac

SEQ ID NO: 179098 - DNA, 122 bp, Homo sapiens
agagagtggcacggtacgagggatagagaggccgttacatagtgagcaggtgccccctcgcgagaacacagcaaccctgaatgcaacctaacagagcttccaaatacacgaagcaaatgcca

SEQ ID NO: 179099 - DNA, 122 bp, Homo sapiens
ccagccccctctgagggtgaaacctaacatagaacatagggactttacctttccaaactccgagaactcctcgattttaaacgcatctggcctcggggctgtaacataagcggctgcggact

SEQ ID NO: 179100 - DNA, 122 bp, Homo sapiens
caaagaatggctctgtccctcctttgaagtcctttagtacttccagttctctctcctgctcgcttcactttctatgccttgtacttttggaacttggcatggcctggctgcctgcacctgca

SEQ ID NO: 179101 - DNA, 122 bp, Homo sapiens
gggggtgggcaaggggccaggtcagactctgggcccttccccacacccatctcccttgcgcggctgccctcggcagccaaggggtgctgggtgcccgcagctctgcccatctaggttgtgtg

SEQ ID NO: 179102 - DNA, 122 bp, Homo sapiens
gccaggtgcttcatgggctcgccggcatccagcagtgcatcgctgaagttggactcgtcgcgcagctccttcccatggcggatcaggcactcgcccaggagcccccctgactgcaggtagcc

SEQ ID NO: 179103 - DNA, 122 bp, Homo sapiens
aaatataagccttcatgaaaagttctggcctgagcagggcctctaaggaatgaggaagcacgaatagctagttcaaagatcatgatccttctgggtaaatcagagaatattctcattggtaa

SEQ ID NO: 179104 - DNA, 122 bp, Homo sapiens
cttttcagaaatctgactgaaaacaaatggttgaatgtgctgctaacagagagggccaaacgatgatgtctattgtggcagctgaacaaagtgagacttacagaactggaactgctgccctg

SEQ ID NO: 179105 - DNA, 122 bp, Homo sapiens
gaaaaatccacggtgacaaggagctcccacaagagtgtagtaggaccagagtggcagggacgtcaagaaaggggggcctggatttaatgcgggggtggggtcactgcttctaagcacaggca

SEQ ID NO: 179106 - DNA, 122 bp, Homo sapiens
gaagaaggtgaatcttcagtgtgtcttaaagcatagaatctgcgttgatgacgagaacaccgtccacccaggtgtatggcacagtttgcagagaagttatgtgccatacgtattttagtctg

SEQ ID NO: 179107 - DNA, 122 bp, Homo sapiens
ccggggagccttggagctctggctgcccatgatgggggtctgctggggggcgcttggagccgccccgggctcgcgccgcaggggatagtacggcggggtcggcccggccggcggaggggtgg

SEQ ID NO: 179108 - DNA, 122 bp, Homo sapiens
cgccgctgggttagggtctccacgaccgagctggtcccgcagtgggcagtggtttgggcccgaccgagctggtcccgcagtgggcggtggtttgggcccgaccgagctggtcccgcagtggg

SEQ ID NO: 179109 - DNA, 122 bp, Homo sapiens
tccctgacctggactaacagcatgtattagcgtgacagagactaaaaagctaagaaccgccgtgcgatggccggctttgggcaccgggggtgggggctacgctacgcgtgaagggcctcagt

SEQ ID NO: 179110 - DNA, 122 bp, Homo sapiens
tccaaagcctgcaactgcacagccttctctgctccagcttctttatctgcttcagcaggccgcagtccataccgctggtgatggtgtgactccgacgttcccctggggcactggaggcccgc

SEQ ID NO: 179111 - DNA, 122 bp, Homo sapiens
gcgagggagttgcattgtgggaagggcgcagcatgaggatggccgcgggagtggcaggtccgagcgcagcccggagagccgcgggcagcgcctgggactacgggcagcgttggagcggaggg

SEQ ID NO: 179112 - DNA, 122 bp, Homo sapiens
ttaaaaagtggctgtgacaaccacccgtttaaagagacagtgattcagtggaatggtgggcgtcctcctgactttctgagccagactgaactgactcggcacaccaccaccaccctcttcga

SEQ ID NO: 179113 - DNA, 122 bp, Homo sapiens
caggtgccatgtgaacacggcagtgctgagtttcccgggtgctgctggagaggcagtttccgccatcctcagctgctgctctccggaggcgcagttccattgagtgatgcaccaagtgctct

SEQ ID NO: 179114 - DNA, 122 bp, Homo sapiens
ctgcagggcgacggctaggacctccggggacccagcagggccggccgtgggaccaagtgccgagccgtgccagggatccaattcgagggtcaaatgaaactctctgcagcttaaccggccca

SEQ ID NO: 179115 - DNA, 122 bp, Homo sapiens
agaacccgtgaggatttgcaccgtgatgcccagaagctgaggtgctagtctgggagtgtgcgtggcgtgggctggtaggtccagtggtgtcgtcaccatgactatagtcaccactactgtag

SEQ ID NO: 179116 - DNA, 122 bp, Homo sapiens
cttcatccattctctctgtcatcctggagctcagcttttggggcctgatagggagaaagacgagacagaagctttcagaactgagaagtcagaattcactggctttgttcctcactaatacc

SEQ ID NO: 179117 - DNA, 122 bp, Homo sapiens
cagagacgtcggctcctgggttctaggcggctgctgctcgcacagccagagcagttgggccgcctcccgctgcctggtgccgcccccctccccacgcggagatgtcgcctcgggtaccctct

SEQ ID NO: 179118 - DNA, 122 bp, Homo sapiens
gggttcaggttggtccccaccatccctgccatgtcccagtgcaggaacattccacctccacgcctcccttggcagagagttcttctgggaggcctggagcacacacagccgctctgctacca

SEQ ID NO: 179119 - DNA, 122 bp, Homo sapiens
gtcccatccacgaagctgtagtggggcctggctcgacactcggcacattccaaatggcatcggagatctggcagaggcccctcctggctgaagccaaatgtgggtcgcaggagccccaccgt

SEQ ID NO: 179120 - DNA, 122 bp, Homo sapiens
tttccccttgtgtgtagggccgccgtcccacccccacctcgcccgagtccggggcggccccggtgtcccctccgagcctgctgcactccacgtccccctaccagggctccagcccccaggga

SEQ ID NO: 179121 - DNA, 122 bp, Homo sapiens
gtcaagtcattgctgctcaaagtgtgttccacagagcagcagcatctgtatgtcctggagcgtgtttgaaatgcagagtctcgggccacccgcacacctactaagtcagactgcattttagc

SEQ ID NO: 179122 - DNA, 122 bp, Homo sapiens
ctctgggtttccgagcttcaatgagggctggattcagggtgtgggctgggccagccattccggcaaaaccccagaaggaatccacaggaggtggggaccgggaaggcagccgggttgcgcca

SEQ ID NO: 179123 - DNA, 122 bp, Homo sapiens
ggaaaaagtcaggaagggccttgcagaggtaggtcctggtgcggcaagaggacggttaggcgttagaagcttctagttcaggctttgccgcttcatgctcatgaggaagcgcggctcctttg

SEQ ID NO: 179124 - DNA, 122 bp, Homo sapiens
ggcgtggggggccccggggcagccgcgctcctccccgggcagggcggggaccaccctcagcggctgcccccagccccacaccctcacccaaaccgctgcctgcaagcctgcggcccctgcac

SEQ ID NO: 179125 - DNA, 122 bp, Homo sapiens
gaaatggccgcactgtgctccttggccttcatgcggagggccgcgatgctcgaggtcttgcggtccggctcgccgttgagctcgtagccattgaggcctgggctgaggctggctgctccaaa

SEQ ID NO: 179126 - DNA, 122 bp, Homo sapiens
ttttgagagctccactcaagtcccagcagccctgctcaaggccaggttgaaggctttttccgcctcccagggcggggtcagaggtgtccccacctgtagcttttagatccccaagtgctcgc

SEQ ID NO: 179127 - DNA, 122 bp, Homo sapiens
gggggtgccgtggaacttgctgtggttgcagggagtgatggagggaagtgtttgcttctccgggaaggagaggtgctggatagattcctgccggagttgcagaaataattaagagaagtagg

SEQ ID NO: 179128 - DNA, 122 bp, Homo sapiens
ggagtggattaaacgctaattcagtaatacctgaattttagcaaaacacataagtctatgcgactgagggtgggagaggctcgatttttccagtagacggccaaggagcgcgggggtcgaaa

SEQ ID NO: 179129 - DNA, 122 bp, Homo sapiens
ggcctatcgggcactgagggggcttcgaagctttatgagtgccaacaccttcggcaatgccggcttttccgttctcctgcctggggcccggctcgagggccgctgtgggcccaccaatgccc

SEQ ID NO: 179130 - DNA, 122 bp, Homo sapiens
atcgcaatttttgattcactcgacagtatttattcagctagggctctgtgccagggactacgcaaggcctgaaaattcaaacttaatctagatgcagctcctactcacacggaacttacaca

SEQ ID NO: 179131 - DNA, 122 bp, Homo sapiens
cagagccagacacactcacccatgtgtctgtgaggacagagggtggctgttctaagccaccgagggagtcacgcggctttaaggcagtagcccgcagatgtgcctgctcccaacctcacaga

SEQ ID NO: 179132 - DNA, 122 bp, Homo sapiens
aatacacagagcagtaaagactagacctggagctcccgcagcagctagagacaaaggccccgccaaatcccggaagccgtcctgtccgctccagctgcgtgcctgattggacgggtcccagc

SEQ ID NO: 179133 - DNA, 122 bp, Homo sapiens
gggctcagcccaagccagacggcgagagtcgcaccgaggtggaagctgggggcgcggcctcgccggggccaggaaaggggcggggccgggtggggcccggggaggagcctgtgcgccccgcc

SEQ ID NO: 179134 - DNA, 122 bp, Homo sapiens
ctacttccatcacttggaatccagagctcagtactagaactgtgtgatacataatcaaggcgggctacataatctggatggctcggagcaaaataaaaatgtttcttttacaaaaagcagac

SEQ ID NO: 179135 - DNA, 122 bp, Homo sapiens
gcccgccgcaggcccagccctcacgctttctcttcgcaatggactttgcagcaaccacgtcggccattggctcagctcggccctcgaccaatcagagctaaggttacttccacaccggtcgt

SEQ ID NO: 179136 - DNA, 122 bp, Homo sapiens
aaaaaaagatttttaaaaccgtttttttggttctgcaggcgaaggctgtggcggcgctcccgccggccagttcccagcagcagctcatcgcccctgctccgcgccttcgctccaggcccgca

SEQ ID NO: 179137 - DNA, 122 bp, Homo sapiens
atgaatcttgtttacttctttataatttatttttccactgttagactataagctacatgacgacaggatccttattcttgtttaatagcatatctaaagcattcagaagagtacacagtaca

SEQ ID NO: 179138 - DNA, 122 bp, Homo sapiens
tttgcacccccgccagcagtgccctcggctggacacacctgcgttgtgggcagccggcagcgcgtgacccactgtgcacctgcgccttgatgtaggggggagaccctgcagagagcgcttcc

SEQ ID NO: 179139 - DNA, 122 bp, Homo sapiens
accggggtcaggatccgggcactacgtgtaagtggctttcccggactgctgggccgtgaccgtgaggctgggacagccacgggggaggtgctggtcaggtgaccacgtcctgggctcagtct

SEQ ID NO: 179140 - DNA, 122 bp, Homo sapiens
aggcaatcaattagattggatgacatgatatcttgtactcctaacttcaagtcatccttccgtcttagcctcccaaagtgctgggattacaggtgtgagcgcctgaccttttgccatctctt

SEQ ID NO: 179141 - DNA, 122 bp, Homo sapiens
tgtgctgtgtagggaaagctgcttctctgcttgggacgtggattcctttaccctcctcctcgcctgactacttctgacgcgggtcgtcaggactccgcttgggtgtcacccgtccaggaagc

SEQ ID NO: 179142 - DNA, 122 bp, Homo sapiens
tctctacaccttccacccccccgccggggctggctgcacctatcgcttgggccacagggccgacctgtgtgatgtggccctgcggccccagcaggagcctggcctcatctctgggatccacg

SEQ ID NO: 179143 - DNA, 122 bp, Homo sapiens
cgcgcacgccccctggcggccatcgggaagcatcgccgccgcgttccttggggagagccacgcctctgggaaagctaagaactgttcacattagaagcatccacttgcacggtttttttgtt

SEQ ID NO: 179144 - DNA, 122 bp, Homo sapiens
acgcagtacaatcaaactcaaataagcacacagacaaaatctaccaataccatttttctgcgtatggttggttacccagttttcctagcaccatttattaaagagactgtcccttccccatt

SEQ ID NO: 179145 - DNA, 122 bp, Homo sapiens
ttcctgcacgggtgtctgggtgtgtgttggtgcgtctgtaatgtgtgtgtcttcctgcatcggtgtctgggtgttttttgtgtgcatcccatatcttcgcctgtatgagtatggatgtgtca

SEQ ID NO: 179146 - DNA, 122 bp, Homo sapiens
ggcaagcggtggggaggatttagccggtaaccgggcctgtcacccctaacctcggcccggcgggcactgagccactcccgcccgggaccccgccttcatagctctcgtcaggccgaatgcat

SEQ ID NO: 179147 - DNA, 122 bp, Homo sapiens
ctgcgcataatggctgttcgaagccgcggtgccggagtgagggctgagcgctgagcagagcgccctagcgcgggcctcgagggctggcggaggggaaggaccccaggaggggaaggaccagc

SEQ ID NO: 179148 - DNA, 122 bp, Homo sapiens
agccttaaagctacagtagggttagtgggctccaagtctcttgtgccccagcctcctccacggcttcgcatcccctctgcccgctctctccggagcgtgcggatgagtggagagctgggctg

SEQ ID NO: 179149 - DNA, 122 bp, Homo sapiens
ctccagccacgcagaactgtgagtccaatcagcctcgttcttttgtaaattgcccagtgtcgcgtatgtctttatcagcagcgtgaaaacgggctaatacaggcttctttcttgttttgttt

SEQ ID NO: 179150 - DNA, 122 bp, Homo sapiens
cccgctcactagcccatccagctggatagagcgcacacatgcctccagctgggtcatgtccgtcttattgtcccaaggcttgatgtccagcaggatggaggacttggccaccagcgagggat

SEQ ID NO: 179151 - DNA, 122 bp, Homo sapiens
aggctgtggagctgatgggcagctcttcagaatccaggggtccattattggtgcactcagcgtgaggctgaagctggaaggtcacctcccctaacgtgaataaaactgaagctgtgagagct

SEQ ID NO: 179152 - DNA, 122 bp, Homo sapiens
gccactgcgtcggccaatcaggaggcaggcgcccgcccccggcacggcctcctgcggccccgcaactcccaaatgccgagttttcgcgggaaaaaaatcagagcagctggcagcgcggcggg

SEQ ID NO: 179153 - DNA, 122 bp, Homo sapiens
gggcaagatttgcgtccccgccctgcccctcggctcccgcaccaggtggccagaggagctcggctcacagcgtgaagtcagtccccggattcctgggaattctcccccgtgcccagcccctc

SEQ ID NO: 179154 - DNA, 122 bp, Homo sapiens
aggaatcaacagattctaagtaaataatactttatatttgctcaggacttctgatgtgttcgcggtcactaacacaacaatcctttgaggtagtggagcaaatattatcgcctacattgaaa

SEQ ID NO: 179155 - DNA, 122 bp, Homo sapiens
ccctaggtgctcaccgtgttgccaggatcttctgctcaagacaattctgttgagtagaaacgtattactggagtaggcaatggaactcagctttctttacacctctgtggggcccatcctgc

SEQ ID NO: 179156 - DNA, 122 bp, Homo sapiens
ccggggcccggtgcccacgcttgcgccccaagttggcacggctccgatacatggcactgtcgaggatctcggtgtcctgcttggggcaatggtgacaccactgccattgctgcctcatccca

SEQ ID NO: 179157 - DNA, 122 bp, Homo sapiens
gagtctgtgcggggaggctccagccagaggggcgtcctctcgtctgccgtcacctggtctcggcctctgctggaaactctggttgaatcacggacaacatttatgaaaattgtagagaaaac

SEQ ID NO: 179158 - DNA, 122 bp, Homo sapiens
gaccctggagggactgccactcccagggttagccaattccgagaaacagtaaatgactcacgtgggagggcgcacctttcctatgcaaaccaaccgatccagtatccatacccccaatcact

SEQ ID NO: 179159 - DNA, 122 bp, Homo sapiens
cttagtagacaggggccccgggctggagatttgcttcgagtaggctagaggcgcccttggcgcaccgaagctggctgccttgctggaacctgccgcgggggtggaggttgaaaggactctga

SEQ ID NO: 179160 - DNA, 122 bp, Homo sapiens
aaaaacaaaactccggagccacgcgactccgcgctcagggggcgtgggtacggcccaccacgagggcagggctcggcgccagctctcggcaaaactaacaatatttgttaggccctaaacaa

SEQ ID NO: 179161 - DNA, 122 bp, Homo sapiens
agaaggcattcgaagcccagagaggtgaagcagttccctcaaggacacacagcaaggaagcggttgccccaggactcagctcaggtttgtgtaaccccaggaccgtgttccttgtcgtgggc

SEQ ID NO: 179162 - DNA, 122 bp, Homo sapiens
tgagactgaagagtccctagaggagaatggcttccctctccttccttctgagactagaaacgaggaaagaggctacagcttgtattgagggaaatgcaagactgaggagaaaagaaagcagg

SEQ ID NO: 179163 - DNA, 122 bp, Homo sapiens
gcccctgcaacgcttgacctcggactacatttactttgcggggcaagaagcgtgtggtcccgctccgggccgcttttggctccacttacggcgacaatgcctcctagcgccctgcgcagcgc

SEQ ID NO: 179164 - DNA, 122 bp, Homo sapiens
ggagagggtctgtgcagctgggatccacatacaactgctgggtctgctctttgaagactccgcccaaagctgaggtgctgctgcctggtaacttgctggttgctggagccaatccaaaggga

SEQ ID NO: 179165 - DNA, 122 bp, Homo sapiens
agcgacgcaaaggactcagcgctccacgacatgcctagcttcttcgggtcgtcatggagacgcccttgcacaccaacagtccttcactccttctccgggtcacgcccccgtgcttttccacg

SEQ ID NO: 179166 - DNA, 122 bp, Homo sapiens
ctaacacagtggttggtagtgcaatacatacatgttaactatttgatggattgatggaatcgatgagtaaatgccacttgagaatggggttctataggtgacaagtgtttccatttgaatga

SEQ ID NO: 179167 - DNA, 122 bp, Homo sapiens
agccagaaggccccaggagccaccagcacaagtcctgagaagggccccctgaggtgtggtcgctgccaagcatcagtgttagggctggggctcagcctgggggagcctactggggactgagc

SEQ ID NO: 179168 - DNA, 122 bp, Homo sapiens
gagagcccgggagcccgggaggaggaggcggcggcagcggcgctcgtcttctgcgggccgcgccgggatgcagtgactcagccgtctgagatctgggctagagccgctcagccgaccaccgg

SEQ ID NO: 179169 - DNA, 122 bp, Homo sapiens
cggcatttacggtaacgggggccgggctcgcggaggcccgtcggttcggtccgctctgggcgttagcaagtgatctccagccaaggcggccgccaccccttgcacacagcagaaaatgcaaa

SEQ ID NO: 179170 - DNA, 122 bp, Homo sapiens
gagcaagaccctgtctcaaaacaaaaaacaaaaaactcaaacagcctcacatgatccaggcgcccagaggctgtgggtgctgcagccttaattattattatgaccaccttcggcacggcgtc

SEQ ID NO: 179171 - DNA, 122 bp, Homo sapiens
cctccggaggcccggccactccccttttccacccccccttggctcatttccggccgccgccgctaccgctagcctgtaaggaggattcggcagagggaagaaacaacagccgccatcttgtt

SEQ ID NO: 179172 - DNA, 122 bp, Homo sapiens
ggctgggtgctgcctgatcctgggtgcctgcccccagcccgttcttgcccagggttggcccgtcagtttggggaggagccactgaaaactggaagcaaacaggggagtccgcagcccagggc

SEQ ID NO: 179173 - DNA, 122 bp, Homo sapiens
ggggagatggtgagaatcacttagttatcatttgcaaagcacaaggcataacgtctgctgcgtagtaaactctcaataaggattagtgatcattgttcccagtgaataacataatgggaacc

SEQ ID NO: 179174 - DNA, 122 bp, Homo sapiens
cacgtctaccctatttgggaaagtttaaaccttagccaatcgggatcagctcagattgtgcggtccaaccccccagccaatggggaaaggacacagaaacaggaactgcgttagggttaaaa

SEQ ID NO: 179175 - DNA, 122 bp, Homo sapiens
tctgggttttcagtgtcctagcggaatgcaagtaggcagccagcccgtctgttccctctccgccccgccccgccccgcccccgtcactgcgcttctgttataccatctttgcctgactctct

SEQ ID NO: 179176 - DNA, 122 bp, Homo sapiens
agtgccaggatccactctagtcatttcctgatagctttcaaaatctgtgactcataaacacggagacccaccagcattttctaccttccttcatacttctccttcctcacagttttaaaccc

SEQ ID NO: 179177 - DNA, 122 bp, Homo sapiens
ctgcaaacatctctgtgaactcggacaggaaacagtgttaacctgtgtttccttccaagtcggccctggcgcatgtgaactgcttgctaatactgtgtacaatcacgccgtgcaatgacaga

SEQ ID NO: 179178 - DNA, 122 bp, Homo sapiens
cgcacgtaatcgccgagggcacgtgcatgccccctggttaagagttgcaggtagcggtagcgatggacactctggatcgagtagtgtaagtgcgctgggtctcagccccggggagcgttggg

SEQ ID NO: 179179 - DNA, 122 bp, Homo sapiens
acggactccgccccgcggaagtgcgcgcccctcccgctggagaaggagggcgaaagcaggcgcaccctcccaagctctgtcaagcgtcgccctagatttgcgcgtgcgcgtttgggcgcctt

SEQ ID NO: 179180 - DNA, 122 bp, Homo sapiens
ttaatggagacaaccaagaaaagccagggctgggctgaggctcttcaagggacaggaaaccggccgactccatccaagcccccatggaaatggctgctcagggccccccacgtgcagcgtct

SEQ ID NO: 179181 - DNA, 122 bp, Homo sapiens
ctggggccggccaacgcgaggtgggtggctgcgggctcgggagcgcccagggaaatagggcgaatgcgccggagggtcgagcccttccagagagcgctgggctccagctaaacctgcggtcg

SEQ ID NO: 179182 - DNA, 122 bp, Homo sapiens
atggtcactgcatcataatggcggtcacaatgcaggtatcaaagtgcctacgtgctcccccgtgtggtgagggtggggcaaagcagggctcgcttgaccactttatttcatcctctcttaag

SEQ ID NO: 179183 - DNA, 122 bp, Homo sapiens
ctgactgcagaaactaaagcagccctgacctggcttcagccccactctaccacagtcagtcgtgcctgcccaggaattcagtgatgcctttacatacccttggtaacaggcctgctgatctc

SEQ ID NO: 179184 - DNA, 122 bp, Homo sapiens
cgactgcggccagagaaagcacggtggccagaatatagctgccggcaccacagccgctgccggccaggtaagtgccccgctctgtggggcctctgttcaggctcaggctctctctggattct

SEQ ID NO: 179185 - DNA, 122 bp, Homo sapiens
tccatgagcaggtccaggcgcgggacctgttctatgactcgattgggtcctgcccttgtccgtcatcggaaggcttacagcgcctactgttttgcagtaagatttgcaggcttagtaccgcc

SEQ ID NO: 179186 - DNA, 122 bp, Homo sapiens
tctctttatgtttacctggaggaccagcttcctgactttttcttagaatttgttcgtttccgggattgaaggaaaagaaaaaaaaaatcccccttgtcagttcatctctgtttactcattct

SEQ ID NO: 179187 - DNA, 122 bp, Homo sapiens
cgcgccactcgggccttgactgcgtacttccgcaggaggcacagcctctccttccgctgccgcttcttggtcttcaggttctccttgtgcttgttgaaccggcagcacatggcgcgtgtctt

SEQ ID NO: 179188 - DNA, 122 bp, Homo sapiens
aggcaccaccttggcttcctgggctgggggaatcttccctcacatccccttcagcatgaacggcctcggctttcccggtgggtaaaacagtttaatcactgaagccgaagcacagggttgat

SEQ ID NO: 179189 - DNA, 122 bp, Homo sapiens
accttgttcctgcagctcgggaaactcacaccgcacatcctggcgcgcaggccaggccgccgcccgggtttgaggccttgctgctcccttgctgcccccagccacccgcacactctcacgga

SEQ ID NO: 179190 - DNA, 122 bp, Homo sapiens
tctcagctgggaagaatggggtgtttggcaggacatgacttctgaggctgacttggaagacgccatgcgtacctcgctgtcctgggacagtcgctcttggaacccagctgccgtgctgggag

SEQ ID NO: 179191 - DNA, 122 bp, Homo sapiens
ggcacgcggtgggcgagggacagtgcaggtgccgggtgcgggggtctccgggacagtccccggcacgcgctggtccgccgtggggccctgcggtgagcggcgccccctggcgcgggggagga

SEQ ID NO: 179192 - DNA, 122 bp, Homo sapiens
aactgggagttccgatgctgcatcagcagcctctgtgtacagactctggcgtccctgccccgctttagcagttcctacagacgcttgacctgccaggaaaggaaagaaacctgagcctctgc

SEQ ID NO: 179193 - DNA, 122 bp, Homo sapiens
tgacgcataagagccgagcgggggaacgtgcgtgtctcgagtcgcacggagggcaaccgtcgacgggcttagcgcctcaactgtcgttggtgtatttttctggtgtcacttctgtgccttcc

SEQ ID NO: 179194 - DNA, 122 bp, Homo sapiens
tgtatttaagttcctcaaatggctcctagttatctgcatgataacatctaaactcctgagcgccacaaacaggtactccatgatctggcccctctcatcttctgccccttctctcaccattt

SEQ ID NO: 179195 - DNA, 122 bp, Homo sapiens
aggcggcggggtccgcaggcgtcgcgggacgaggagatcggagccgggagactcgcgcagcgccatggcccccattggcctcaaagctgttgtcggagagagtaagtggagccgggatcctt

SEQ ID NO: 179196 - DNA, 122 bp, Homo sapiens
aattaccatccttttcctctgctccaggctgctactaagtttaacccaggaatcacagtccgaggaaattgactgcaatgacaaggatttatttaaagctgtggatgctgctctgaagaaat

SEQ ID NO: 179197 - DNA, 122 bp, Homo sapiens
gaaagaggcataacctcttgtgccttagtgacctcacctgtaaaatgggttcataatagacgaagctcataggagagtgccaatctttagtagacactacctgtctactccatgtctgccca

SEQ ID NO: 179198 - DNA, 122 bp, Homo sapiens
gaggctggcgaagcctccagggacgcggtcagggtacccctcccactcgcgccgcggggacgcatttccagcctccctgagtttttctggtctgagccgagagtttgctcgagaactgccga

SEQ ID NO: 179199 - DNA, 122 bp, Homo sapiens
tgaggagcctgctttgcccagcctggagggcgtcagtgaaaagcagtacaccatctacatcgcacctggaggcggggcgttcacggtgagagcttctgagggcagtggtagaagaggggaga

SEQ ID NO: 179200 - DNA, 122 bp, Homo sapiens
cagaagccagcatccctctgcattttaaaatgctttaattttagagcagtttgagagtcacggcaaagctgagtggaaagtatagggttcccacagccccctactcacccctgtattttttt

SEQ ID NO: 179201 - DNA, 122 bp, Homo sapiens
caaggagcagcccaggatgcccgcctgctatctgcaaatcagacgtgcaggagtcctgatcgctgtccctagtgacgatccagaaagctgagcaacagtgccgtaacaatcagccccagctg

SEQ ID NO: 179202 - DNA, 122 bp, Homo sapiens
ggagccttccctctacagggggcaggcaggagggagacaggcctggtcggagggtgtggtcgagagcctaagctctgaaggaaactgccgtcaggattttatgaactttgttttaggtggtg

SEQ ID NO: 179203 - DNA, 122 bp, Homo sapiens
gggggtgaaagaagaggattcaaatgagccaggttgctttgtctcggggaggggggtgcacggtgggatcctctcctgagaatgactgctgaaacaataggtagttgtggcaggtggcggag

SEQ ID NO: 179204 - DNA, 122 bp, Homo sapiens
atattagctgttccttgaaaagttaaacatagcaaccgttttgttccttgaggtcacctccggaggagcggtggtaaagcctggggataagaaacgtagacccggccgagcgctgtggctca

SEQ ID NO: 179205 - DNA, 122 bp, Homo sapiens
tacatgcttttcctcagttccgcccttccccctcatcttcatacctattacagatggagtcgttgtcatgcattccttgtaaggaataattctgagaaaatcaaaatagtaaagtcacatct

SEQ ID NO: 179206 - DNA, 122 bp, Homo sapiens
ccaagttaaggggtgggggtggaggtggaggaaacaggtcagttgttcctcatgatcatccggatccagtccacatacttgcaaatataggtgtagactccagggatgccatcttgtccaca

SEQ ID NO: 179207 - DNA, 122 bp, Homo sapiens
gctatgcttgatcactctcttgtgctcactgagatgggccaggtgggactagttagtgaccggtctcagttcctggagagtccctgtcccagcatgttaggaggttgcatgtgtggtcatca

SEQ ID NO: 179208 - DNA, 122 bp, Homo sapiens
caggacttcaccactttgggagcagtttcaattcatttactcagactagaatttttatgccgaatcctactttggaggagactatgttatgatttccaaagaatgtctgcaccatttcaaca

SEQ ID NO: 179209 - DNA, 122 bp, Homo sapiens
gggctggggatgggtgggtggcccagcccggtgcccggggctgatggcaatgtgtagtcccgcctggcccggcgccaggtcactcagctcagcgcgctgcattggacctgggatggtcgtgc

SEQ ID NO: 179210 - DNA, 122 bp, Homo sapiens
tatatacttctggatggcgttaagatttcaggaatgtatattccagcacccacttgtaaacgatccagagacaagacagcacctagtataatggtctacacataaggatgctcatcatatgg

SEQ ID NO: 179211 - DNA, 122 bp, Homo sapiens
caaccagcgcttttctaagaggtgccctctagtctttcccctcggggtgcagacggcaagcggctctggaaagggtcagaggtcctcaaatggagaccaaaggaagccacgcgggcagctct

SEQ ID NO: 179212 - DNA, 122 bp, Homo sapiens
tgacatttttcagatgaaaactctcctcctgaaaggacctttgctgagtgctgggggaggcggggcgcggggaagaacggagaccgcccaggaggctgcggcactcctgggctaagtactgc

SEQ ID NO: 179213 - DNA, 122 bp, Homo sapiens
tggctgcagctacattcccatttttctctcatgacctcagccatgctggtataatctcaccgggtctgctcccacagctgctgcgtgaaggtgaggagagaattctcttcccactggcttta

SEQ ID NO: 179214 - DNA, 122 bp, Homo sapiens
gtcggcagcccctccctcccccatcccaagctctccaccgagggggccacgtgatgcaggcggacgtttcaatgctgctgcactaaatatttctggaaacttccactcctaataatttacag

SEQ ID NO: 179215 - DNA, 122 bp, Homo sapiens
cacggatgccaccccttttgtgttgccaaggcatgtgggtaccgagggctccatggccaccgtgggcctctcccagcagctgtttgactctgcgctcctgctgctgcagaaggccggtgccc

SEQ ID NO: 179216 - DNA, 122 bp, Homo sapiens
gggaggaagaaaaaagaaagaaggatagagtgtgtggtgggagggagaattggtacacagcgaggcaggaaacagaggaactggggtttcctgctgtcacccaggccctgagtgggcttggt

SEQ ID NO: 179217 - DNA, 122 bp, Homo sapiens
tcctccgaagacgttccagactcgagtcctaggacatggttggggcgggggtcatttgatcgagtggcctgtgtccttatctggaatacgggacgacgctgtaactctaactcaccctgcga

SEQ ID NO: 179218 - DNA, 122 bp, Homo sapiens
cagccacacagggtctgtggtcaggtatgttacaccgggggccctggggcaggctgaatccgaggaagtatcacaaaggaaaggagcttcctgagaagagaagaaccaagtgaaggccactt

SEQ ID NO: 179219 - DNA, 122 bp, Homo sapiens
ctctcgcggctctggaggtcggaattccgaactcaaggcgtccctcagaaggctactgggcggctcctccctgcctcttcccgctgcctgtggctcagggcgctccttggctgtgattacat

SEQ ID NO: 179220 - DNA, 122 bp, Homo sapiens
ccaccttacgtcccgcccccacatatttggattggctaatatgttttcacctcttccgtgcgattggatgactcgaccgcccctcctcaacctgaaccgtttaatatattattggtctattc

SEQ ID NO: 179221 - DNA, 122 bp, Homo sapiens
cgtgattcacctgcctcggcctcccaaagtgccaggattacaggtgtgagccaccacgcccgccaatagagtccctgttatgtcaaatgtatgcctttgtataaatacatgaaattaaaaga

SEQ ID NO: 179222 - DNA, 122 bp, Homo sapiens
ccagggctcaaaaccttaggaggtctcaggatttgagtaccattaaggctcccacagtctcggaggataggtgccttgtcccaggctaagatttcaatctctgcatgttgtttggagataga

SEQ ID NO: 179223 - DNA, 122 bp, Homo sapiens
tggaaaagatccgcctcttcctagtcaactacatggcgaccatcgatgtcatctacgagacgtatacccagatgaacgctgagcttaactacaaggtgtaagtatgcccaccgctggacacg

SEQ ID NO: 179224 - DNA, 122 bp, Homo sapiens
ccctggcgccggctctgctgtagactgcggaggggagagaccgcggggacccactcagggcgccaggcccgacctgacaccgcctggggctcgctgtcgccccgcacctccctctcggcccg

SEQ ID NO: 179225 - DNA, 122 bp, Homo sapiens
agcactctatttctaaataaacattcctaacatcagcgtggcctcaggcgctgtccctaccgcccggtattcactcagccttacgggtaagaagctcagtgcccatggccatgatcacaagg

SEQ ID NO: 179226 - DNA, 122 bp, Homo sapiens
acacatatgtatatatataggaagaatcctcggatttccctcttaggctgttgcagggaccggagcactatatgaagtgttccacagacccctatataggatctcgctatactacccaggct

SEQ ID NO: 179227 - DNA, 122 bp, Homo sapiens
agacgggttcagacactactctcctgggggtgatggacatctcttctgttcactgattcccggaggaagatttgggagattttgcctgggagcaggcaaacacctcgggctatttgctttct

SEQ ID NO: 179228 - DNA, 122 bp, Homo sapiens
cgagtcgcaggaaacaaagtctgggacgcgcaggccggctggggagggactctggctgctcggaggcctggcccggggccccactccgtggtgggggttttagggctggtccaagtcggtgt

SEQ ID NO: 179229 - DNA, 122 bp, Homo sapiens
ccttagaaacactgccaggccacgaagcgcccgggctcctcagaggcgccgctcgcagcccgtcgtagctgccccacgcccgcctggccaaggccgcctccggtgcattatgggtggggagc

SEQ ID NO: 179230 - DNA, 122 bp, Homo sapiens
cctgtgggttacagacgcaccgcggcgtcttcatccctgtgggttacagacgcaccgcggcgtcttcatccctgtgggttacagatgcacagacgcaccgcggcgtcttcatccctgtgggt

SEQ ID NO: 179231 - DNA, 122 bp, Homo sapiens
gccccgaaggtccggcggccccggcagcacctgaacccgggacccgcccctccaagctggcggccccggcctggggacccgcacacagcccctcccccgcaacgtcctacagaacggtgggg

SEQ ID NO: 179232 - DNA, 122 bp, Homo sapiens
tcactaacggatggggagcttgggctgggcacagtccagcgtactgaacccttcccccaccgtttcacctgcatacagaggtgtgtactgtcaaaaagcagcgcctccaagtctcttctggc

SEQ ID NO: 179233 - DNA, 122 bp, Homo sapiens
tccatccttcctccccctcagtcagtaagaacagtaattttaccaacctgaagttcaacacggaattcataaactttggtgctagagggggctggctcaattgggcaataggtcaaaatact

SEQ ID NO: 179234 - DNA, 122 bp, Homo sapiens
acagagcaacgacaatccagctggagcgatggttcagggtatgtgttcacccagccctttcgggacgtcgcgtgcctgcactgtgggaacgcaagtggacagccggtccctgccgtgggcgc

SEQ ID NO: 179235 - DNA, 122 bp, Homo sapiens
aggagctgtttctttagtgagtggattcaggtgactggtcatcttgggcagcacattggccgtcaacacacatttgaaaacctcaagactgggccaaaaataaaagcagtaaagtccaccgg

SEQ ID NO: 179236 - DNA, 122 bp, Homo sapiens
ggctgagttttgtcctatgttggcagcactgcattccaatgcaaagctccccagttgctgcgctttccctcccccacgtgcacggattctttctccctgccatgctgctgctgctgggggat

SEQ ID NO: 179237 - DNA, 122 bp, Homo sapiens
gagggcttcagactattaagcctatgaagagcccttgtaactgaacctggtgagaagcagcgttctcaggacctcacggtgagaagcgcattctcaggaccgcacggggagaagctcgttct

SEQ ID NO: 179238 - DNA, 122 bp, Homo sapiens
gcgacttctcgagggcagagcccactctgcctttgtgtcattgtgcctggggcagtgctgcgtgtgcagtgggtgctgaggaaatgatgcatacatggaggaccagtggatggtttaatttg

SEQ ID NO: 179239 - DNA, 122 bp, Homo sapiens
gcgcacagcaaacgggagaagttaaaccaggttccgcgacccagagcccaggggtggccccggggacacccacctgactccgcaccccccacgagaggggaggatccttgcagacctcacct

SEQ ID NO: 179240 - DNA, 122 bp, Homo sapiens
atttttaatgagaaaaatgtgagcagaagagaaatgaaatccctctccctgtgagcttggcgtcccctgcctcgctgctggccagcgctgccctggtgacagaaccccgagctggcggccgg

SEQ ID NO: 179241 - DNA, 122 bp, Homo sapiens
gtgctcccatttcctcattaaaactgttatggaattgtcatttttttgtttgtttacctacgtccaccactaaacaatgataagtttgggagcagagataacgtcttgttcccttttgtatc

SEQ ID NO: 179242 - DNA, 122 bp, Homo sapiens
gcaaaccctggaccactctctccccgggggactccgttcccgcctccagggagctgcgaacgctccttctgggacacctgttggcaagaaaccagttcaatcgtctcacttccagaaacgat

SEQ ID NO: 179243 - DNA, 122 bp, Homo sapiens
actagcttggtcaggggtaagtcttaggccatgggacataagagggtgctgtgtgtctttcgggctgccaactactggccatgctctgacacttcctgaggtcagggctgggctggagggag

SEQ ID NO: 179244 - DNA, 122 bp, Homo sapiens
accttcctccctccgacgccaccaatgaggccaactaaccaggaaccgaggtagagaggccgcacagctgagtctcaggccggtgccatcttaagtgtgggcgccgcgacgataccgagttt

SEQ ID NO: 179245 - DNA, 122 bp, Homo sapiens
tgggtgataaattgattttttttctcccatacaaaactcatgacaacatcatggccataacgctaatgcattatgaatgtatggtgtgaaatgtgccattcaaaagcacattcaggctgagg

SEQ ID NO: 179246 - DNA, 122 bp, Homo sapiens
ggagacaccaaaccctcaggaagatttactatagctaagagaaaactgcagcagaaagggcgcggctacctacttcttaaattccgtttgtggaccctcagactcttagtcccctactccca

SEQ ID NO: 179247 - DNA, 122 bp, Homo sapiens
gctctcccctacagtggggtctaagccgtcagaagtgtaggccctcatctgaagttcatacgtcactgttctgcccaactcaggcctttcaacctaggattcagggcattcttcacgaatct

SEQ ID NO: 179248 - DNA, 122 bp, Homo sapiens
gagggtattaggggatggagtgagtcagtccttgttggtattggctagaattcctaaactcggagactcgctacaacagatctgatagttggcctcagaacttgtgaattgttgtagaatta

SEQ ID NO: 179249 - DNA, 122 bp, Homo sapiens
agaattatgatcctcatcccataaccacacatatagaaaacggatggaaactgcccacaccgcagctttacaatgcctagtatagggaaagaaaagtccaagggaacaagatggtgggtggg

SEQ ID NO: 179250 - DNA, 122 bp, Homo sapiens
gcctgcccatctttcttcaagctaaggcttggacgtgtaattgtcaagctggtgctcatccgggcagacgccacagttccccaatggccaggactcaagttcagcctgaaccctgtgaggtc

SEQ ID NO: 179251 - DNA, 122 bp, Homo sapiens
ctccatctgggggcctgcttgtctgcggcgactctttagttcacaggaggggacggccggcgctgacagcttcccctttgctttccccacgaagctcctccctggcagcccctgaccttccg

SEQ ID NO: 179252 - DNA, 122 bp, Homo sapiens
tgagaagcccacagctaacatcacactcaatggcgaaagataaagtttttcctctaagatcgggaacaaggcaagggtgcttgctttcatcacttctgttcaacatagtcctagaagtccta

SEQ ID NO: 179253 - DNA, 122 bp, Homo sapiens
cagaattgcaaaagatagtttccatggttccacccacccaaacactaaaactgagagacgcgggacagatgcaacgtgctgctgtccagttccatgtgggagatgtcattgctctgccaagt

SEQ ID NO: 179254 - DNA, 122 bp, Homo sapiens
gacagtccggggctgggcgggcgccgcggcggagcagcgctaacgggctccctccccgggcgccctggggcctttttatccgcctcccgcccgcggccccccagccccgagctggccgcgga

SEQ ID NO: 179255 - DNA, 122 bp, Homo sapiens
aacctgcctgaatgccacggtgaacgagttcaaacaggatatggtccagggctttccagccgtatcatggccaattccttaatctttagagactgaaaggacatttgggtgtgcctgggaac

SEQ ID NO: 179256 - DNA, 122 bp, Homo sapiens
gtccatccacacacgctcccacctgcggcagctgggagtggcagagtcagagacgagcggcgtacccatcaacctcctctaggagcttgtgaagcagaagagcatgcccgacgcccaccttg

SEQ ID NO: 179257 - DNA, 122 bp, Homo sapiens
gcttcctgacgcagccgcaggtggtggcgcgcgccgtgtgcttggtgagcccggggagggcgggccgagggcaccctggggaccccctctccgtcgccaggcccggcggggcccctagccca

SEQ ID NO: 179258 - DNA, 122 bp, Homo sapiens
aaacgttggcttatttcagtgtgaagtaaggcaataaacggagggctaacagttccacttcgtagagctcagacattttaagaagcgaggaggccgcgtcctggaagggtgagcaaaaagcg

SEQ ID NO: 179259 - DNA, 122 bp, Homo sapiens
aaccctaccaccacatatgaacataaaaaagaagagaaccccaaccaattgcaccacgaccggatggaagagcccagctgacacaaccaagacgagtctcagtgtctagggaagcttggggt

SEQ ID NO: 179260 - DNA, 122 bp, Homo sapiens
ggtgggctgggcggccgggcgggagctgggggtctccaggacaccctggagcgagagggccggcgaccccagctctaaccctcgccagtgaccctggctctggccctcaggccctgatgtcg

SEQ ID NO: 179261 - DNA, 122 bp, Homo sapiens
ctgcaatcactgactccggctgtccccggaacatccctagaaagtgtgaggctgagtttccgtagggggagggggctgagaagccgcggggaagcctcacgaacgggacagctccaggctcc

SEQ ID NO: 179262 - DNA, 122 bp, Homo sapiens
aggctcgtgctcttcctgggagtcaccgggtcccgcagctcagggggtggaggtcacggacgccgctaccgccaactcgcaaggcctctgcttccctctgtcccaggatccaaggccctgtc

SEQ ID NO: 179263 - DNA, 122 bp, Homo sapiens
gagcagctgccccgccggcatcttccggatgaggctctctagacaacaaagccttctacgcggaagttactggtgacaggggaaggactcatgggtttttgcagcccggtgtccccaaaaca

SEQ ID NO: 179264 - DNA, 122 bp, Homo sapiens
ttaaggcccagcgtctggaattggatacaatgatgccattgtcgatggagaaggagtcaacgggaagcccagcaatctgccaggcacggatttttatgggatcccctaacgtgtggctgaga

SEQ ID NO: 179265 - DNA, 122 bp, Homo sapiens
agcagcagatggcaaagagtggggagaggggggtaggcttgggggaagggagcttctcaccggatgtaacaccacagggtgttacatgccttatgtgctacacatggacaccccagggatca

SEQ ID NO: 179266 - DNA, 122 bp, Homo sapiens
cccctagtagcagccatactactactctgatatcctgacggtgggctgtgctgtgggagtcggctgttgttttgggacaccacttggaggcaagtgattgaccccctcccccatcaatcggc

SEQ ID NO: 179267 - DNA, 122 bp, Homo sapiens
ccccaggggtaaccctcaccctaaatctggcacctgcttctccatctccagagcacaagacgtcccccacccaatgcccggcagctggagaggtctccaacaagcttccaaaatggcctggt

SEQ ID NO: 179268 - DNA, 122 bp, Homo sapiens
ctgcctggccggccgggactacagtgtctgtcctcggagtcccactcctgcctccgcactcggatcaaccctgcgttccccaccctcagcaaagctcgaggctgcgcgatttctcctccccg

SEQ ID NO: 179269 - DNA, 122 bp, Homo sapiens
tcaccaacacgatcacatggccagggcggggcagggagagcttcggctcacagcagggatcgcccggtggcaggggggatggggcttctgaagtgtggtcaggggccttatgcccggaggcg

SEQ ID NO: 179270 - DNA, 122 bp, Homo sapiens
gtgagccactcggccaaccacaacagcatacctggtgtatcctcagcaaaaacgggattccgaacgttccgaagacctctttgtggaaatgcgccactgtgacaagcatctcattctctttg

SEQ ID NO: 179271 - DNA, 122 bp, Homo sapiens
ggagggggcggggccaagcgggatagatgacacgagcggggctaagcaggtgggctcgggcgggggtgggggtgggggcgggggcgcaggcgggggcgggggcgcggacaggccaagccagg

SEQ ID NO: 179272 - DNA, 122 bp, Homo sapiens
cttgacccccgctgggcagaagctaccaaaggagaccccgcgagggtcaagggagggtgtcgtcaggcccgcgctgagccctgcaggatgctcagggccagggccccaccctctactggccc

SEQ ID NO: 179273 - DNA, 122 bp, Homo sapiens
aggagggaaagaccccagtagagaaagacagagggacagagaaggggatgcagacgcaggcgggagcacacccacagaggcgaaggaagggcgcaagaccatgagaaccacagacgcggaaa

SEQ ID NO: 179274 - DNA, 122 bp, Homo sapiens
tattagaacgttggaacatctctgaagctcaaagccctcttatggctatgtgaaggcatacgtggaggcatacgtactccaccctgaagcttctccttcaattttaatgttaatcttaccaa

SEQ ID NO: 179275 - DNA, 122 bp, Homo sapiens
tgggtttgccacgaagcagtcaccatctaaccttgagccaaagacctggaggtggtggtccgtgctgctgtttcatacttgaggagaaattatccttggtgtgttcgctttatttatgatga

SEQ ID NO: 179276 - DNA, 122 bp, Homo sapiens
gcctggaggctggagctctgatagctacctgtcatcactccccagccagtccgcggacaccgcagccaggaactgtcagaggtgacaagggaatcccgtcataatgccaaggaccaaggagc

SEQ ID NO: 179277 - DNA, 122 bp, Homo sapiens
ccgctatcagggagattatgtcctagtggggtccccacaggcaattaactgataagcaaacgaagactctcatttcatgtgattagtgctgtaaggaaaacaaaacaggataatgcaatgga

SEQ ID NO: 179278 - DNA, 122 bp, Homo sapiens
ccacaaggtcaaggcctacctgcgggtgcagccaggggagaactccgtcctgcatctgcccgaagcccctcccgccgcgcccgccccgccgccccccaagccaggcaaggagctgaggaagc

SEQ ID NO: 179279 - DNA, 122 bp, Homo sapiens
tcaaaaaacaaacaacaacaacagcgaaacaaaagggccggtcgctcagcctaggactctcgggagcggctaggaactcaatgcacatgctaatgagttatctggtaacgacgctctagaac

SEQ ID NO: 179280 - DNA, 122 bp, Homo sapiens
tgtcctcatagaggtgtgcacgggagatgtgatacaaacccagaggggaaggcagactggcggggtgcagctgcaaacccaggaatgcctggaccacctggacctggaaggggcgagaacag

SEQ ID NO: 179281 - DNA, 122 bp, Homo sapiens
atactgttattgttgatgagctagcctgtctccccaccgtaagggcaaccgcaaaatggtcgttttctctctcctgatttgcaaaagcaaacagccagcagggcggaggggttactgctctg

SEQ ID NO: 179282 - DNA, 122 bp, Homo sapiens
catgaaaaaatcagcaagaaggcatttctgggaagttcagctgaggcccttattacaagacgagaagggtccagttccctggggctgtcaaggaagatgctcttccacactgccgctcgagg

SEQ ID NO: 179283 - DNA, 122 bp, Homo sapiens
agtagcgtagctctcctgagttctccactgtgtccccagttgctggcactgagtctggcacgcagtggtgcttaatcaaccttgctgaatgactgaatttctctggctcctatatctgcttt

SEQ ID NO: 179284 - DNA, 122 bp, Homo sapiens
aaatgaatgaaatcgatgtggcagcgggcccggacgggtcggtggcgtagacgcggagcgcgcagctcacacctggcggccgcggtttccaggaggaagcaaggatgctttggacactgtgc

SEQ ID NO: 179285 - DNA, 122 bp, Homo sapiens
ctgcacgaacttggaaggaggccaccgggtgcagggcctagctctgcccctgatgagccccgagttactgggggggcagccaggccctccatcttcccacctggaaagctgagaatgaatcc

SEQ ID NO: 179286 - DNA, 122 bp, Homo sapiens
gcagaggcctggatgaagcgaggagcagcgtggctcgttgggtaggagggtcagctcggccgtgggagcggccagggcacggcctggagaggagcccatggctgacgcgagttagtgggtca

SEQ ID NO: 179287 - DNA, 122 bp, Homo sapiens
ctggtaggaccctccattggccagggcgcccgtctaggaaggagctaattccaccctgcgcgaggaggctgaaccttagcagtccttttgtggaatgtttacactagagactgaagctcgga

SEQ ID NO: 179288 - DNA, 122 bp, Homo sapiens
aaaaaggaaggggctgttcccagttgctatggtgacgaggtaggcgcgttccctcggtaccgccgcacacgtctgaagcggtctcttctcctcgttgctacggcaacgcagtgggcctgttc

SEQ ID NO: 179289 - DNA, 122 bp, Homo sapiens
aacccccagtctagttcaagtcttcaaaatccgacgaccataaaattcctgtgggcacctcgatctttcagaatccaacttccactttcctttgctgaccttctagtttgaagtcagcagtt

SEQ ID NO: 179290 - DNA, 122 bp, Homo sapiens
cttggctggggtgtcgtcattggctgcctattagaaaaacgacaggacaatgcataccaccgcctcccgactgtaaacataggggatatgtgttcacttagcatggacttctgggaggggcc

SEQ ID NO: 179291 - DNA, 122 bp, Homo sapiens
gtggttccccgtatccctgggaacctccacattcagagaggctaaaagcccacaccgacccgagccaacagaatggggaggaagcaggtgcagggagtcagcttcatcttccccttctcttg

SEQ ID NO: 179292 - DNA, 122 bp, Homo sapiens
cctccacggagcaacgcgttggggaggccaggcctgcggccaaaagggggcccggacctccgcctccaggccagggcttctgccatccccacacaggcaggctggcgggcagcaggaaggct

SEQ ID NO: 179293 - DNA, 122 bp, Homo sapiens
gcggaccccgggagggaggaggggtccggggaaagcgaccccagctccttcctcccaaggcgagtatgtttaccctgctgggcacccttccgctccgcggggaccactgcgggatcgcgctc

SEQ ID NO: 179294 - DNA, 122 bp, Homo sapiens
caggcgcagcccgcgcccgcgcaggccccgcagccggcccagccgcccgccaccggcccgcggctgcctccagaggacctggtccaggtaggaagagccgctcccctcccaccgcagcactc

SEQ ID NO: 179295 - DNA, 122 bp, Homo sapiens
ttcccagccgggtttggcaggcgagctgccggctccaagcggtcctaggcgagctggaggcggggcccggggaggggcccgacgctccggggcggagcccgggactcacggccccgcctccg

SEQ ID NO: 179296 - DNA, 122 bp, Homo sapiens
ttgtcttccaggccgaggacgatgatcccgccgggggagtgcacgtacgcgggccggaagcggaggaggcccctgcagaaacagtaaagtatcccgccttctgcttgtgtgggttgttgcac

SEQ ID NO: 179297 - DNA, 122 bp, Homo sapiens
cacttccccctgtgacctgggaaatcggggtgcgtctccagtctgtggggggcagggtctcgtccagacaggaggctgcatggtgctgcttgtagcaagtgactcgtttgtggttggcacgc

SEQ ID NO: 179298 - DNA, 122 bp, Homo sapiens
cccgaggagaggggtgtgtcaagcgaatgaagacggcagtgtgtgcctcagcgcctggtgcgtgcggagctagtgacgggtgggcccggctggggcccgtcattccttcagtgaacatccca

SEQ ID NO: 179299 - DNA, 122 bp, Homo sapiens
ctgatctgactgcagccatcggtaaataaaagtttttgatcctgttgaacccgcctgagacggtgctgtgcaggggaaagcccccgcacccacacaggaattctgctgaggtcccccctcct

SEQ ID NO: 179300 - DNA, 122 bp, Homo sapiens
gcaacacatcccataaggaaggcgtgatgattatcccatctaataatgaggatgaggaaacgggcacaggaaaggcaaataatttgcctaaggccacagaactagcaggtggcagagacaga

SEQ ID NO: 179301 - DNA, 122 bp, Homo sapiens
tctgaggcccccgcggcgtggcacggcctgggcgttggatgcagcagtgaacgggacccacgcggggactcagggtatgacgggcagaggggtaggtggggtgggggcaggtgaggcggggg

SEQ ID NO: 179302 - DNA, 122 bp, Homo sapiens
ctggccagtgctctctgcctcaccaggctgcatgagccacaagctgccacttgtggagctcggtggccctgccctcgacagccttgctggtggtcgtgaaggctctaaacacctgcatggca

SEQ ID NO: 179303 - DNA, 122 bp, Homo sapiens
atgtccccgcaggttcaagaacggcgatggatctgcaccggcaagtgaatcgcagcacgccggccactctgggcaaccttgcccccaagcaagacactaataaccacgtcagactagagtgc

SEQ ID NO: 179304 - DNA, 122 bp, Homo sapiens
gagatcgggagaggaagaaaagcagggtgggacacccgcacctaaaagtctttccgaagtcggctaggaggatggcatttctcgttatatggcttcatcgtgggactttaatctgtgctgcc

SEQ ID NO: 179305 - DNA, 122 bp, Homo sapiens
agataaatttagcactctagagcacccgaaccctacaatcttcacgagcgactctgccgccgcccaatcagcgccagatttgcgtcccgccaccaatccgcgctgagcagcggggcgggacc

SEQ ID NO: 179306 - DNA, 122 bp, Homo sapiens
aaatgggattggaacccaaatctttgattccagaacttcagctcctaactaccaggttaacgtagtttgcccctaatcctaacttgggcatcctaaggcccgtctcctatgctggattctcg

SEQ ID NO: 179307 - DNA, 122 bp, Homo sapiens
ttgtgccgccgccccgcgcttccttcccaggccctgcggtgtcctgtgttgcgcggggcgcgtctctggtccagcatcgggtaggggtggccctgctcacccagcttgtgccgctgccccgc

SEQ ID NO: 179308 - DNA, 122 bp, Homo sapiens
ctatgacatctactcgcggctgctgcgggagcgcatcgtgtgcgtcatgggcccggtgagcgccccgcgccgggaccctccccaggactctcccaagcgcctgccgacactccctgcgcccc

SEQ ID NO: 179309 - DNA, 122 bp, Homo sapiens
ccagccataggtgggatccccaagctatctacacttcagcctggccaactacaaattaagcggttatcatgatcttcctttcaggttccataatttgctagaataactcacaggattcagga

SEQ ID NO: 179310 - DNA, 122 bp, Homo sapiens
ttgaatactgctttcacttactccaaggggaacatggacttcccacagcccaggcttttacggtgtgggttcactcttgtagggtcacatgtaaaagaaccctaactggtttcttggcatac

SEQ ID NO: 179311 - DNA, 122 bp, Homo sapiens
gagtggcgcctcaaagggctgggagtgaatgactccacccagggcctggctagcagtgcgcgcccagtaattattctttcgagccattaactgagtacacacaagcgtggcccagatagtga

SEQ ID NO: 179312 - DNA, 122 bp, Homo sapiens
tccggcccgggccgccatgtcgctgtggtgagtggggctgggggccgtcgggggcctgggcgggggcgtgggcccggggctccccctcctccgtggccacagacgggcgccgggactcccgg

SEQ ID NO: 179313 - DNA, 122 bp, Homo sapiens
ccatagggacggccggctcgggtcgctggactgggacggggtgcactggcgggagccccgcgatttcctcggtttctgagcaagcggggccacaaggctcggggtcccagtgggaggtgggc

SEQ ID NO: 179314 - DNA, 122 bp, Homo sapiens
tgcgaacctgcgcggcccgatggttccatgttcttctcacaggaggagacgcgtttcgcgcgcctctggatcctcacctggtcggtgctgtgctgcgcttccaccttcttcactgtcaccac

SEQ ID NO: 179315 - DNA, 122 bp, Homo sapiens
cggcggcggcggcgggcggagtgagctgcggagcctggaatatggtcggggaaatggaaacgaaggagaagccgaagcccaccccagattacctgatgcagctgatgaacgacaagaagctc

SEQ ID NO: 179316 - DNA, 122 bp, Homo sapiens
gaccccatcaggaaagccctttggcttcgcacaagtaacaggcacgacaggctcccgagccgctagggtctgcgtaggctcggcaggcgcaacgaatggaggcgaccaaagccaggcctcga

SEQ ID NO: 179317 - DNA, 122 bp, Homo sapiens
gccccggcgctttcagagggaaggggagccaggacgcccgcggggatggctgcccagctgcgagtcacacacgagcgtcgcccacgcccggcgcccccgcactgcccatgatagggacctac

SEQ ID NO: 179318 - DNA, 122 bp, Homo sapiens
tacaaatgaaaggggcagaaatgacaaactgcgatgaaaggccataaggatgctcacacccgaatctaaaaagccctttgtgtgggccgcagccaagcatactttggcaagaaatttctgtg

SEQ ID NO: 179319 - DNA, 122 bp, Homo sapiens
attgcaggcctggccagagagacgactttagccggggtaaggggccgcctgggaaccccgcgtcccgcctggacacaccgatgacctgcagaggccacaccgtgggccacctcagctggcca

SEQ ID NO: 179320 - DNA, 122 bp, Homo sapiens
tgcggcgagggcgggtggtaaatggcaggagctgaaatcaccccaggcttggccccaagccgagaggggaggctgatgtgtatatgcagattccacccgaaggagttcggtgtggaaaacgg

SEQ ID NO: 179321 - DNA, 122 bp, Homo sapiens
acttatacacaagattccagaaagatcagataaggtcaagttggctactacatgtaaagtcgggggtggagggtgcgtgtggagaggggaaataacctttcttgaccctcctctcccctcca

SEQ ID NO: 179322 - DNA, 122 bp, Homo sapiens
agtgtgtgatgtaagctgaactaaaatcagctgtgttgaactccagccagaaaaaatgtccggcattttgttttttgggaccctaatgaaatggttacaggtctccaggtctcttggggctc

SEQ ID NO: 179323 - DNA, 122 bp, Homo sapiens
ggactggacagaggctcctctgctggagggtcagtggggagtggccctaggaacggggcccgcttgatggttcccatggtatcgtctggggagtccagctcctggtaggaggggcagggccc

SEQ ID NO: 179324 - DNA, 122 bp, Homo sapiens
gtgtattagttctcagggaatacctctaagtccttggctttctccttttgggggagggggcgggggagcagtgaaacacaaatggaaaaaaataaacatcatgtgttctgggttctgacaca

SEQ ID NO: 179325 - DNA, 122 bp, Homo sapiens
cgtcaggactatcagattattgtaatgctgcacttataacaaaaaacttagatttagccacgcaaaaaaaaaaaaaaaaaagaaaatagagtgcaagataaaaaaacacacctgattaactg

SEQ ID NO: 179326 - DNA, 122 bp, Homo sapiens
agggacttgaggacgtttgcttcccattgctagctaaccccttaggcaaggtcattcaagcgaagcaagaagagtctcatcaggcacagatggacaggctgctgcttctggccagcatcact

SEQ ID NO: 179327 - DNA, 122 bp, Homo sapiens
caacctttccagtctgagtgcccttggtctgaccgacagactagaagctggcccagcaggcgactagtgctcagccccgcccggcgggggcggggtctgcggcgtccgtgggcgccccccag

SEQ ID NO: 179328 - DNA, 122 bp, Homo sapiens
tgtgttgccctttctctctgcacttccaggaattccatctgcagaaggtgagtgacaggccggtggtgctggtaaagtctgtgctgaggcagtaggagagctgatgtcaatgacaaggcaac

SEQ ID NO: 179329 - DNA, 122 bp, Homo sapiens
ccacagaacagggtctgacccagcacgcggacggaaccttattttaacccgagacacaaacgcgcccctcttggaccctggctccggcccgaccctcagggcggccggctgtgcgaggcctc

SEQ ID NO: 179330 - DNA, 122 bp, Homo sapiens
aacccgcttcaatccctgtagatcctgtccctgcgttcaatcagggtcatgtcaggcgcccgggatggaagccagcatgaggagtcagggagagggttcctccccacccacccgacgcagga

SEQ ID NO: 179331 - DNA, 122 bp, Homo sapiens
gaaggggtattattcaaaacacctctttatcctgacctgccaggaccagttcccctcccccgtgccagctgtagttacagccctctgagtcaacaaaggggttgggcttgtaagacttcatt

SEQ ID NO: 179332 - DNA, 122 bp, Homo sapiens
taacctagaagctgcgaattacatggagaatggccacgcatggctcgggggcaacggtcccgcaacagccacagctgtctgtggctgccgagcaaacgccaagtccagcctgcggcaccttc

SEQ ID NO: 179333 - DNA, 122 bp, Homo sapiens
gccgtgctctgcgttgggaaaggagccacgggacgcgctggaggctgcagtgaggaaggacgcagaggggtccaggacaaacccaagcctccgacctggtcagcccgaagcactgtccgagc

SEQ ID NO: 179334 - DNA, 122 bp, Homo sapiens
acagaagcgggacctgggccagatccccgagaggtgggcggggcctgggcgaggccggggcggggtgcaaaggacaaggggcccggcgcggaagagaagagtcttgggctgggaggagtccg

SEQ ID NO: 179335 - DNA, 122 bp, Homo sapiens
tggtggctggcaccagggagctgggatttggggagggttcctgccattccttgataagagcggctcacactgcctacactgtctaaataaggaggtttacgctgaatacccgctttcctgct

SEQ ID NO: 179336 - DNA, 122 bp, Homo sapiens
tttcttgaaaactctggctttttgaaatatctacaactttttgcctgactctgagccctccgtggaagtggagatctgagcacccctgagcattacctgacagaaccttagtcctaagaagt

SEQ ID NO: 179337 - DNA, 122 bp, Homo sapiens
gcgggcccaggacggtgctcagcaggggcagccctcagtggatgtgagcaccccatgctccggtgcttcctcctgccagtcctcttgctccttgtctcagctgcgtctgtcctcccgcagga

SEQ ID NO: 179338 - DNA, 122 bp, Homo sapiens
tcagtccggaactcagtaacacccactccagggctgatgggggcgctggatgtatagtggcgagtgtttatctgcctaggatagcgatggctaggcaggggacataaaacagaagaggcagt

SEQ ID NO: 179339 - DNA, 122 bp, Homo sapiens
gtgtagtgttattataacagtcagtgagtcccctcgccgagctattaatcaattgctcctcgctcagttagacggaaagtgttgctctaagtatttatgggcaggtcttcaatacccgtgac

SEQ ID NO: 179340 - DNA, 122 bp, Homo sapiens
tcttactgggaagaatcatagcttcctatgacccggataacaaggaggaacgctctatcgcgatttatctaggcataggcttatgccttctctttattgtgaggacactgctcctacaccca

SEQ ID NO: 179341 - DNA, 122 bp, Homo sapiens
gtactgccaaaacgcggccctgcccaggacacacagcagaggtctggagtggggacagtgcggccagcatgtgtggggaaggaagcaggctgacggaggcaaagcagattccgaagaacaaa

SEQ ID NO: 179342 - DNA, 122 bp, Homo sapiens
cgggggaggtaaagctctgcaggaccccgatcgccacggcctgccgcagtggcctggagtcggctgccccagggaaccacctggacagcccgagggcaagaaagcggcaccagtggccgact

SEQ ID NO: 179343 - DNA, 122 bp, Homo sapiens
gttgccggctttcgccgagaaccccgagaaacggactaccggagtccctatcttgcagcccgatccccgctacccgtcggagtgccccgctgaccaggctgcttctggccgcggcggcgttc

SEQ ID NO: 179344 - DNA, 122 bp, Homo sapiens
ctctgaggccgttcctagagtggtctggcgttcaggtctcgttgtagtgtttgaggtgtgcgcagtgattaattgggagttttctagctgtggggaagtcagtattagcagggcacggccga

SEQ ID NO: 179345 - DNA, 122 bp, Homo sapiens
aataaaaggggctgagccgaagtctctagagcgggttcccaggttctccaggacaggtggcgccctctttgcccttgcctcgtgggaagttttggagtttatgtcctagcccaagacaggca

SEQ ID NO: 179346 - DNA, 122 bp, Homo sapiens
agtatctcaattcctttctcagagcctatcctgaggcccatcagaaaccaacagttcctacgtctggaattttctagaaatctggaactgctgtccctccctttgtgagatttcccgccttt

SEQ ID NO: 179347 - DNA, 122 bp, Homo sapiens
cgggagcggcgcacgcagcggatggcgtagagcaggcccaggtactcctgcagggcgcgccgacgctcacagatcatctcctcagcgaagttcccagtcaggtgcttcctgggaaactccac

SEQ ID NO: 179348 - DNA, 122 bp, Homo sapiens
gccagagactggctgggccctgggcacagaggggttaactacaaagcaaatcacagagagcgagatcaatgggttactggctgcagagagaggaaaaggcagcagcaacgcagagaggcaga

SEQ ID NO: 179349 - DNA, 122 bp, Homo sapiens
ggtcttttagcccagcagtcacatagactcagctcaggagctctgcagcacacagctgatcgaacccactcatttctagaggacaccatgtttggtaagttgggcgaaggcaagaggctggg

SEQ ID NO: 179350 - DNA, 122 bp, Homo sapiens
acatgatggtggcggggaaggcggtggggtgcgtggcgatataggcgtcgatgttcgcgccgtggtccagcagcagctgcattgtgcgcaggcagccgtggcggatggccacgagcaagggg

SEQ ID NO: 179351 - DNA, 122 bp, Homo sapiens
gggctgagccgggctgggatgaaatccaaggtcccatcctgcatttggctcctcggcaggcgtggctgtgtccccggggccctgacctcaggctctgttctctccctagaagtcaccctcac

SEQ ID NO: 179352 - DNA, 122 bp, Homo sapiens
tcccccatctgttgagacctgcttccaccaataaaagcttgcactcattctccaagcccacgtgtgatccaattcttgcagtataccacggcaagaaaccccgggatactgaaagccgtctg

SEQ ID NO: 179353 - DNA, 122 bp, Homo sapiens
cttctactgatctgtgtactccctgaggggttaacctagaatctcatctctgtggggtctcgggcctggttactctgcactcatctgtccatggttgccctactggcccattaacagacaca

SEQ ID NO: 179354 - DNA, 122 bp, Homo sapiens
gtttaggcgctcctcctccgggcggtgtgttgggagggcccaggtcaaggcgcgcgtgggcggaagcggcggcggcggcgaaggcggcggctgtcagagctggagggccgggcaccgcggcc

SEQ ID NO: 179355 - DNA, 122 bp, Homo sapiens
agcaatgtggatggcctggggactcctgggttttctccctcccgactccctaataaaccccgtgaaccttggagccagcacagactgtacttatgtctgggctgggggtgggggcggaagcg

SEQ ID NO: 179356 - DNA, 122 bp, Homo sapiens
cgcctcccggggccccgccgcgcggccgccgcagccgcacccgcacgccagcccgggccgcggcgcgctcatggggctcgcacgcctcacttcctgtctccaaaaacccggctcgcagacca

SEQ ID NO: 179357 - DNA, 122 bp, Homo sapiens
agattgtctgcttgtgaggttctcagcacagcatctaacacaaagcaggcactccctaagcgttaactattagtgttacaactattatctgacagatttagttcaatatttgagtttgcagg

SEQ ID NO: 179358 - DNA, 122 bp, Homo sapiens
cctccgcgcgggcctcccgttttgcggcgagccgggcctccgccagcctctgcgcttccgcgctcaaacagtagatctcccggctctgcgtggccgcggggctggtcaacctgctgggctcg

SEQ ID NO: 179359 - DNA, 122 bp, Homo sapiens
cgcccgctgcgccgctccgacggcccggggactgcgggaaccctgcctcccacgcgggcccgaaccacccccgggagccacccgcccgctcacccatccgtgcccgcagctctctcaaggat

SEQ ID NO: 179360 - DNA, 122 bp, Homo sapiens
aaggaggtggccatagccctttgagtggtcagcagggtgtctcagcgttcaggctgctcccggctgagaaagctgggcgcggagcagggcagccaggcgcgccagccacccccagggaacga

SEQ ID NO: 179361 - DNA, 122 bp, Homo sapiens
tccctctccctcccgcagccccaaattggaggcagcagagcctgggagcagcctccacggcggcagcggccgccccagtcccagccccagccccagccccagccccgcccccgccccgcgcc

SEQ ID NO: 179362 - DNA, 122 bp, Homo sapiens
ccaggttagaaactacagtagaacataatttctcattttcaatagttctagctaacatctcgcacttaacccttaatttaactgctttaggttacatgctcatgcttaaccaattaccatta

SEQ ID NO: 179363 - DNA, 122 bp, Homo sapiens
acccgggccggggcctgggcctgagtggccatactgcgctgctgaagctggcatcgctgccgcccttgtgccaagcactgcgcacgtcctggggcaggagagacgccgctgtgaacacctgc

SEQ ID NO: 179364 - DNA, 122 bp, Homo sapiens
aggtaaaccttctgaaatgttcagcagagtggttgcttcattaggaaggagttattcacacggcttttgagatgttttacttacaaaacagtcagtcagttatctgcttaggttttttgaga

SEQ ID NO: 179365 - DNA, 122 bp, Homo sapiens
caagggggcaaagccgaaggaggttgcagcgctggcctggtccctgcccaggcatctactcgcccgcctttgcctctgagtcctccccgctgggctgcgtggaattgatgagcttgttttcc

SEQ ID NO: 179366 - DNA, 122 bp, Homo sapiens
cgaacccctaacctcaagtgatctgcccgcctcagcctcccaaagtgctaaaattacaggcgtgaaccaccttacccggccaaagagtagttatttgtttatttgttttgagacagagtctc

SEQ ID NO: 179367 - DNA, 122 bp, Homo sapiens
agttaggtaggtgattcgttgatttcaattatgaatgccaacactttctttccctggtgccgataaatgtgctttcacaagtattttactttattaaaaagtaaataaaatttaacaatcta

SEQ ID NO: 179368 - DNA, 122 bp, Homo sapiens
ggtgggggaaggcaggactgacgcagagtgagtgtaggggatggaggcgccgactccaggcgcgggagactggcggggaaggggttggctccccacgggcagggatggtttggaggttgggc

SEQ ID NO: 179369 - DNA, 122 bp, Homo sapiens
gggtcggcggcggggaggctgacaggccttaatgggcacattgtccccttgctgtgagagcgccgtcccgccacctcctcacacgcgtcgtgctggatgagctcatgtctgaggctgtgggc

SEQ ID NO: 179370 - DNA, 122 bp, Homo sapiens
tcaagcgcgcagttgaagaggagtgcatggtttccggcatttggctgggcctttgtctctcgctcccaccagagcttggaatccgtctctgctcttctgcattctccacctcgggagcccct

SEQ ID NO: 179371 - DNA, 122 bp, Homo sapiens
cttgactatgctaacattttctttcttgtgtaggtttttccgtcgtggctgggtgaccttcgaccgcagtgttaacattaaagagatctgttggaacctgcagaacatccgtgtgagtgctg

SEQ ID NO: 179372 - DNA, 122 bp, Homo sapiens
tccatctacatatcccaaaaggtgtcccgaattaaacaggtctaaaaccaaactgacttccgccaatccccgtttcagctcctccttctgtgtgcgtgtggtggggcgacgcaggtccactc

SEQ ID NO: 179373 - DNA, 122 bp, Homo sapiens
atagtcacaaacggaagcggttccagctgactggcccctgagtgctagattcagaatctccgccctggcgtggcagcagccctttcctgcttggacattagtgcaggcccatcatttccaca

SEQ ID NO: 179374 - DNA, 122 bp, Homo sapiens
ggttttgccatgttgctcaggctgctcttgaacacctgcattcaagctctctgcccacctcgccctcccaaagtgctgtgattacagatgggacccatcgtgcctggccctaacatttttta

SEQ ID NO: 179375 - DNA, 122 bp, Homo sapiens
cctccaaagcaccttgatggagccgcaaggatgggaggcagctttctgtgacctgtgagtcgtctcagggaaatagaaggggaatccatgaaagaggcagcaagagtctcagaacattatga

SEQ ID NO: 179376 - DNA, 122 bp, Homo sapiens
ccacccccgagatgagcagatccagctggttcatgggtccctcatgcagagacgttgccacgttcatcccggggctggagctgctgcttcacactgacttacacggtgagcagcggcggcag

SEQ ID NO: 179377 - DNA, 122 bp, Homo sapiens
tcatctcccttggcaggtgtgccccggagaggcgtatcatctcccttggtgggtgtgccccggagaggcgtatcatctcccttggtgggtgtgccccggagaggcgtatcatctcccttggt

SEQ ID NO: 179378 - DNA, 122 bp, Homo sapiens
cggcctgggggcccagagtctcgcccgggcccggtaagggcagtgcgatttcgagtcccccggtttccctggcatttcctgtcccatagcttccagcgcaacagaggaacgaaaagcaagtt

SEQ ID NO: 179379 - DNA, 122 bp, Homo sapiens
cacagtgcgcgcacccactgacctgcgcccactgtctggcactccctagtgagatgaacccgatacctcagatggaaatggagaaatcacccgtcttctgcgtcgctcatgctgggagctgt

SEQ ID NO: 179380 - DNA, 122 bp, Homo sapiens
tgtgctattttccaagcccgtcggaaagcgcagtattcaggtgggagtgaccagatcttccgggtgccgtctgtcacccctttccttgcctaggaaagggaactccctgaccccttgcgctt

SEQ ID NO: 179381 - DNA, 122 bp, Homo sapiens
ccagtgtgcaatcagaggaggctttctggaggaggtgacaatgctcagagtcccttccctcgtggtggcgcgtttccccgcggggcgtgggctcttacctgctcctcctcctccctcaggct

SEQ ID NO: 179382 - DNA, 122 bp, Homo sapiens
ggtcaagggggactgtactggggtgactggtaagagcaaaggtggcgtttgggctgacagcgctaacttctggatcaggctgtgggcactgcagctgccatgagtcaggaggaggctctggg

SEQ ID NO: 179383 - DNA, 122 bp, Homo sapiens
ggaccacgcatgcccggttggcgctgatgtgtgggaaaacgacaaatggtgcaagccacacgggtcacgtgcgtctcctgtgctaatcgtggattttcatttcctccggagacccaaatgag

SEQ ID NO: 179384 - DNA, 122 bp, Homo sapiens
ccatggtgtaatgccatgaattttccacggaacaaggtgtgctctaaatgcaagagagtccgtatgccagttgagaatggcagcgttgacccagcgtaaactcattgatttcaggaaggtaa

SEQ ID NO: 179385 - DNA, 122 bp, Homo sapiens
tcggggaagtctgggtgagggccacgcctatcagggggacccctgcagtcctggccaccccggaaaggccccctctcgggcccatgctcaggcccgccgctctgctcatgccgcctctctga

SEQ ID NO: 179386 - DNA, 122 bp, Homo sapiens
tagacacacacatacacatgcacacacacacgtgcatacacagggacacgcgccgagggccgattcacagatgtgcagaacagatacagctgtgacagttgtgaaaatactgggtagtctgt

SEQ ID NO: 179387 - DNA, 122 bp, Homo sapiens
aggcgggcgcggaggcgagcgatgagggcgtcgcgggcagcgagctggtcctgcaggcggcgcagccgctgtccggcctcgtggtacagggtgcagagcgcggcagctgcgcgcggggcctc

SEQ ID NO: 179388 - DNA, 122 bp, Homo sapiens
caccaggccctccttccatgctgctcctcctgggtactttccagctccctagtctttgggcgccttgctagtcctttacacctctacaccttcaagttccctcctcatttcataatatttac

SEQ ID NO: 179389 - DNA, 122 bp, Homo sapiens
cggggcggggctgcggggtccgcggtgcactctgtaagttcaccgccggtcgggtccggccgccgcgctgtccagctcctgagaccttgctgtccgccggtctgccgtctgcgcgcctcacg

SEQ ID NO: 179390 - DNA, 122 bp, Homo sapiens
ccgggtgcggcgagggaaggcgaggctgcggcggatcatgcccatggtgtagccgccaagcggaggcatggctgccggaaggttactgctctacactggcctctcgctagcgctctgcgccc

SEQ ID NO: 179391 - DNA, 122 bp, Homo sapiens
cgtcctagtggtgctgcagcgcccggggagtcgcggaggggaggggtgaaaatgggcttgcgggactgacgcacgcgcattgggataccagatccccgcctcctgctccaggtttcccctcc

SEQ ID NO: 179392 - DNA, 122 bp, Homo sapiens
ggggacgagtcaagccgtcaggtacctacactctgagctcccggatcactgggccgacaccggaggctgctgctgttcctggtccgtcttactgtggagtgtattagactgcgggggcgtcc

SEQ ID NO: 179393 - DNA, 122 bp, Homo sapiens
aacttttgtacctcacagaacatcagcttatcaattcaaatcatctgacagtaacgtgatcgatatatggatgagggtaacagcacacccttacaagaactgtagtaccgggttgcgatctc

SEQ ID NO: 179394 - DNA, 122 bp, Homo sapiens
atctttgctgttttcaaggagtgaatttcttaccagtccattattacgctaacagaaaggcgtggatcacgagggacatcttttctgattggtttcacaagcattctgtactactgctcatg

SEQ ID NO: 179395 - DNA, 122 bp, Homo sapiens
ccagctgcgcagggcctgccaggtggcgctcggtgggtgagccgctcccgccctgccccgcgctggcctcagcacgtcggccgttgccctatcctactcggccttggcccggcctcctggcc

SEQ ID NO: 179396 - DNA, 122 bp, Homo sapiens
ggccaggaccaatggcgaagggactcctcccgctggggatcgctgaagcctcggggaggccgggccaaggagcccggggcccaaacctgcctcggctcgtcgagctcgcaagttcattgtct

SEQ ID NO: 179397 - DNA, 122 bp, Homo sapiens
agcagtgccagccaaccggcggtgcgctcgatttctcaccgggccttagctgccttcccgcggggcaggtctcaggacatggagccctccatgcctgagcctcctacccactccatgagctc

SEQ ID NO: 179398 - DNA, 122 bp, Homo sapiens
tgcagcactatcctctagccccactgcccgtatataggcctgggctatatcaccattgtccgcccttgagcctggaaggaaaatgagctgaggggttttgttttttcagaaaggaacaggat

SEQ ID NO: 179399 - DNA, 122 bp, Homo sapiens
aaccaacgaggtgtcaggctcggcaggggattgcttctgtctggggcccggccgaggttgcgttcgtgcctcgcgcgcacacgctccgcgttcactcagccaatccggtgctactcgcgcgc

SEQ ID NO: 179400 - DNA, 122 bp, Homo sapiens
ctcctcagcccttggctggtcgatgggactgggcaccgtggagcagggggtggcgctcatcggggaggctcgggccgcacaggagcccacggagggggtgggaggctcaggcatggcgggct

SEQ ID NO: 179401 - DNA, 122 bp, Homo sapiens
gccacagaacccctcccctaggctaagcagcaatagcagggtgtgaaaagtcattatttgcgagactctggtgtaaattaaaaatcacacctttctatcacacttctggcttccttgcgaag

SEQ ID NO: 179402 - DNA, 122 bp, Homo sapiens
gcggccagaggcgtggagatgcgcgcaggccgggctccaggccaccggcgcccgcccacccggagcttaagatctagagagagcacggggtcccgcctttgccacctctcatcttcccggac

SEQ ID NO: 179403 - DNA, 122 bp, Homo sapiens
caagggctgtcaaaacaagtctccctccctgtcacaacagagctgagtggaggccgccgccgccgccgcacttcctgggaccgctgcgccgcagtccgcgggcaggtggcgggtgcgcccgg

SEQ ID NO: 179404 - DNA, 122 bp, Homo sapiens
ccgtgcagccccgagcgcggcaatgattggtctcgggggaggggtggggggttgcaaacccgaggagcggtggcatccgttgcatgatgcaaaaaaggattgatttcaaaagttgcgagttg

SEQ ID NO: 179405 - DNA, 122 bp, Homo sapiens
cgtcgaagtcggggagttgaccccgatccagacccaaaaagtttctggtgccccatttcccgctctcccattcgggccaggagcaggagttccgctggtcccaggtggaagggacgcgcggg

SEQ ID NO: 179406 - DNA, 122 bp, Homo sapiens
ggcctcagtgagcagcagatgaaaagctgcctccgctgggggctaatcctctcacctccacgctcccggtggctgcctcgccctgcggctcaggctgaaggatctcggggagttttaaatgg

SEQ ID NO: 179407 - DNA, 122 bp, Homo sapiens
cctgtggattcccacgtgctggcggagctctgcaggcagctctcacgtgtgcggggtaaacgagctcgggggcttggatttccccagcgtctcagctgtgatcacctgaatgtttaaaaggc

SEQ ID NO: 179408 - DNA, 122 bp, Homo sapiens
ggttttgatgtacctttcttcaagttcaaggaaacccctccagtagccgggttggcagagcgggtctcagcaacccagcggtggctttgcagaggcgaaggcgcaatagacatgcgtgagaa

SEQ ID NO: 179409 - DNA, 122 bp, Homo sapiens
ctgtggggggactccggtcatgaggccaaccgcccactgccacgggtcacgggcatgggccggagaagcgggtcctaccatgcttccaagtaaatacctgattcccctaagtcaactctcca

SEQ ID NO: 179410 - DNA, 122 bp, Homo sapiens
aggaaacgaaactacttcccaggctggcaccctggctacaaggcagggaaacacccagggcgggaggccggccggctccgtgaatgtcgccgggaggagggagcctcctatttatcccccct

SEQ ID NO: 179411 - DNA, 122 bp, Homo sapiens
tcactgtgagggtctgcggcttcattcttcaagtcagtgagaccaagaacccaccaattccggacacactactgttgcagaagtgtgtccttgtacgtatgtttaagctgtttccttttaac

SEQ ID NO: 179412 - DNA, 122 bp, Homo sapiens
gctggctgggacgggacagagggagtcttctgctggggctggtgaggcctgaatcagccccgggggtgttggggtgggggtgtctcttgtacacgggtgtcagacccagacttccctgccaa

SEQ ID NO: 179413 - DNA, 122 bp, Homo sapiens
ccagcatgctccctctacacgcgttttctaagccgagcacgcagcactcagtccagcagacgccgaagaggctggaacgctgggaggccccctcagcataccttgtatactgagattatggg

SEQ ID NO: 179414 - DNA, 122 bp, Homo sapiens
taacatgggaataacattaggatcaaaacacccccactcatctagccagggctgtggacccgatgattactctatcctgggcctgaaattttctctcagggggaggaattcaggtatgcaaa

SEQ ID NO: 179415 - DNA, 122 bp, Homo sapiens
cagcccggccaacacagcgaaaccccgtctccatcaaaaaaaatacgaaaaccagtcaggcgtggcggtgcgtgcccgcaatcgcaggcactctgcaggccgaggcaggagaatcaggcagg

SEQ ID NO: 179416 - DNA, 122 bp, Homo sapiens
gcccgcgccccagcaggtagctgtactgcaactgtcggcccaaaccaaccaatcaagagacgtgttattgccgccgaggtggaactatggcaacgggcgaccaatcagaaggcgcgttgttg

SEQ ID NO: 179417 - DNA, 122 bp, Homo sapiens
ctccattctgccttcaccctcctccccaagtccctttcccagccttcaagcctaagctctcgccctgcccaccccgatcctgaacctgtagaaactcctccattggccagggctgtgcatct

SEQ ID NO: 179418 - DNA, 122 bp, Homo sapiens
cgacggggcccccggcaggggcaagcgcgcggcgcagcctgtggcagcaggcaaggtgggcggtgcggctgtggtggtcgccgaacccgagcacaccaagaagcacgtcaaacttgagacgt

SEQ ID NO: 179419 - DNA, 122 bp, Homo sapiens
gagaagggaggtgatatgaacaggcagaggcttctgcacgtgctttctatacagaatcagcgtagcggcccagattgtcctcctccactgccgctccaccctgggaaatggtctcaaagcga

SEQ ID NO: 179420 - DNA, 122 bp, Homo sapiens
ggaagggggcctgttacgtgggaagaggaaagaaagaatacgttttaataaacgtaaaaccgggtcttcaaggcttcaagaacaagacaatgctttccaataagccccttgccagaaagaag

SEQ ID NO: 179421 - DNA, 122 bp, Homo sapiens
attgtggctggggatggagggagatcaacccatcgcacttacagataaagaaactgaggacggagtttgtcccaactccggggccagggtcagtgtcctccgagggagtcagggaggtggct

SEQ ID NO: 179422 - DNA, 122 bp, Homo sapiens
gagaaaggcggctccgcccagcgcttttctgaggatactggagtttaaccctcccctgcgcgttcagagcgcacagcgcccagttcaccagcatgacaggcccgggtggcgtctgccctggg

SEQ ID NO: 179423 - DNA, 122 bp, Homo sapiens
tgggctttgctgccccgccagccaggggcagtccccttacctgtcccttgtcccagcagccgagaacaagactctgcctcgctcgagctccatggcagccggcctggagcgcaatggccgta

SEQ ID NO: 179424 - DNA, 122 bp, Homo sapiens
gagaggcacacggtgatggacatggaaggacccgggaggtgtggagtggtgggcccggcccgtcgcgggaaggacacagagggacataggctgccctggagaggcgctttcggacatctgga

SEQ ID NO: 179425 - DNA, 122 bp, Homo sapiens
agccctcggaactcagagcatctgaccaaacgtgacctttgggaaagtcctcttgctgttcggggggcgacctctgcgggtttggctccagctgcagaaagagcgccaaagaaatctcaact

SEQ ID NO: 179426 - DNA, 122 bp, Homo sapiens
aagcaatgcaactcctgttgacaagcttcagaacatttgatgggcatcttggcaaaacttcgttgtactcttagacttcaatattgtatccaggaatcttctactgggaattagagcagcat

SEQ ID NO: 179427 - DNA, 122 bp, Homo sapiens
aagacaatcctcctttgatcctgaaagctgctcattctcctcccttctgtagtctggagccgtctacacgtgctgtttctgtaccactgccctttgccactgcagttcactattgcacttga

SEQ ID NO: 179428 - DNA, 122 bp, Homo sapiens
gaggagctgctaaagcggcgtgagcagcagctggcagagcgcgagatcgacgtgctggagcgggaacttaacattctgatattccagctaaaccaggagaagcccaaggtaaagaagaggaa

SEQ ID NO: 179429 - DNA, 122 bp, Homo sapiens
gtggcactatcttccctgggagcctgcagggatgggtggatacccaatagctgggggccccgggcacatggacagtccccaaggacccacagagggcagtcctggaggtggctgaagggtca

SEQ ID NO: 179430 - DNA, 122 bp, Homo sapiens
ccctcttgacttcagaaaaccctgccaacccagcttctcctcagctaaacaaggtggtcacgccgaggccagaggtgcatctgagacagggagggcagcgtatcttcccgcttcttcttccc

SEQ ID NO: 179431 - DNA, 122 bp, Homo sapiens
agccgcacagcaaacacacttggtctctttcgggtcacagtgccctccttccggtttgtgcgatgatgtgttccagggcaactgtgaaaaatctgtggagtctatgcccagaagcagccgag

SEQ ID NO: 179432 - DNA, 122 bp, Homo sapiens
gaggtgtggaaagagaagcacggacgggaactggggctgggcgcggcgcttgcgggccagcgcgagttccgcgtgggtgtgggctccgcgggccccgcactcggagcagccagctggccccg

SEQ ID NO: 179433 - DNA, 122 bp, Homo sapiens
gaggaggcgcggccggggcagcgaataaccatcttcgttcacgttgtactctgcgtctttcggctcagacctcactaccacctatggtgggggtggcatttgctcttgtctccattttacag

SEQ ID NO: 179434 - DNA, 122 bp, Homo sapiens
aaaagagtcacatggacaagcatgcgatacctggttctgtgcttataaatttaaccgggccgagcgtactctttacgtcaatctctgtgtcagtcttgagggaggaaggagttgggttcata

SEQ ID NO: 179435 - DNA, 122 bp, Homo sapiens
actaagagttcatttcgtatttcaaacattcttgacagaacttttccccgtgataaccaccgtatctcagcatgcagtaacagttgcttatgatcagcttccatattatcacataataaaga

SEQ ID NO: 179436 - DNA, 122 bp, Homo sapiens
ccgccccgcgcgcgggatattgggagctacaatccacgagaggcggcgccctccgccctccggtcttcagcccggcccctggccccgcggcatttggccacgaatcttaacgcacagcctcc

SEQ ID NO: 179437 - DNA, 122 bp, Homo sapiens
ttgtatatttattatgtttctatggggatcacaacaaggcaggcacagcttagtacaaatcggtgacccgtctcaaagagccgactttggcatctgcacccccccagtcgtggtaccttctg

SEQ ID NO: 179438 - DNA, 122 bp, Homo sapiens
gctgggactacaggcacccgccactatgcctggctaatttttttgtatttttaatagagacggggtttcatacctgccattggtttttaagatcttatgtctgggccaggaatggtgactca

SEQ ID NO: 179439 - DNA, 122 bp, Homo sapiens
agtgcacgcgcccccggctggagtgagtatttgctgagctcgggtctgtgtgcgcgcccccggctggagtgagtgtttgttgagctcgggtctgtgcacgtgtccccggctggagtgagtgt

SEQ ID NO: 179440 - DNA, 122 bp, Homo sapiens
ttcccaggctggaaaccttggcccaggctcaacctgtctgagctggaccagtccaggccacgcgccttggagccctgctaaccaacagggacagccgcgaccctaggtcgtgcgaacacctg

SEQ ID NO: 179441 - DNA, 122 bp, Homo sapiens
gccccagccacctctctgtgtccttcccagcacagcgtccagcgaagtggggtcagtcgccgcgtccatccaggggcctgccctggggacacgtccctgtccctggggagtcctggccgtcg

SEQ ID NO: 179442 - DNA, 122 bp, Homo sapiens
cccgcttccattggtctttgtcgcaagggggggtgtggccacgggcctagtccctgagcccgcgcaatctctggagcgaagctagccgggcccggagccagaggacgcagctgcgcctgtgc

SEQ ID NO: 179443 - DNA, 122 bp, Homo sapiens
agccatgtcctcagctgacctgggggctgggtgaggtgaggcaccctgagacttcttcagcgtgctgagctgtgaggagggggctgggcctttggccaccacaggatgactcaaagggtgtg

SEQ ID NO: 179444 - DNA, 122 bp, Homo sapiens
ccctcagcgggctgaactgggctgagaaacactgccccatggcccgatacgtcctcaagacggacgatgatgtgtatgtcaacgtccctgaactggtatcagagctggtcttgcgagggggc

SEQ ID NO: 179445 - DNA, 122 bp, Homo sapiens
cactcggtctcggcagcccaccgacagccctccactacccgccaccatctggcctgggagcgtcgccacggtagtcctggctggtctgctggccagcacctgcctctccttcttcgtgggta

SEQ ID NO: 179446 - DNA, 122 bp, Homo sapiens
agggcccgacgtggcagagcgcgcatctccccccagtccacctcagcggctagaagcagacggaagggcaggactcacactccgggccccgaccctcatcagcccctggccctgcagctgtg

SEQ ID NO: 179447 - DNA, 122 bp, Homo sapiens
ctttttccacctgcccagcgaatccagctgcccggccttcccctcccatccaagaacccccggctcctgcctctagaattttccaccagcgctgggggctggtaaagattctgcccccctct

SEQ ID NO: 179448 - DNA, 122 bp, Homo sapiens
ttccacggctgcagacgggatgttgcacacggcaattcctgaaagggatgaggccaaggccggagatgagaaaacctcaagatcagtggggaagccccagggctcccagcccgccctcctga

SEQ ID NO: 179449 - DNA, 122 bp, Homo sapiens
tttgctatttccatggaccagatatgatgaaattattccctgggtttaaaactgggcactcgaggaggaggtacctgaagtcatttgaaggcaagtttccaatgatgctacaatggcctgaa

SEQ ID NO: 179450 - DNA, 122 bp, Homo sapiens
gcactgactttgcagctggagacagggccttgacctcagggactttggaggtgttgggaccggtcagtggggacccattctgtgggacttgggcatggagagcaggtgcgggccaggatgta

SEQ ID NO: 179451 - DNA, 122 bp, Homo sapiens
ctgtgcgcccgggtgcagctggcgtctggagcgtgctgggtctgggcttgggaatggggccggagaaggcatggaaggagagtgtgggggcgcttctcctctggttgttaaactctctgggg

SEQ ID NO: 179452 - DNA, 122 bp, Homo sapiens
ccacttccccttccacagaaatgagcatcttgctggctgaggagtggctggatgacaaatcgtcagaaaaggtgacgcgagaaggaagccaggtttatgaccacgagtgagttctttaattt

SEQ ID NO: 179453 - DNA, 122 bp, Homo sapiens
aggctctggctcacagacctgtggctgaagcagctgcagcccgagcacttgtgcagctgacgctcgcttcacggacgcttgggaggccgcggagccgggggccatcaggcagactgggcccc

SEQ ID NO: 179454 - DNA, 122 bp, Homo sapiens
ggagggccggcgccccgggagccgccgggcttggtgcggaagaggttgctctttccgaggcggcccacctgctgtctgacaagttcgactagcaagacattgtggaagctgccgctggaaac

SEQ ID NO: 179455 - DNA, 122 bp, Homo sapiens
ggagggaggaggagtggggcaggcgctggagggcccggcgcgtggggcgggggcggactgcgctccgctcgggtcggagagcggccagagagccctccttcctggctgggctcccaaaccgc

SEQ ID NO: 179456 - DNA, 122 bp, Homo sapiens
aatgcccggcaggcgcagcgtgcactgcggaagtcacgcactacatatcccagggtgggtcgcggcgaggtgggtgaaatggacgtcgctcacgcattttgggggaattctgggcattgtag

SEQ ID NO: 179457 - DNA, 122 bp, Homo sapiens
ttttcgaaatgctgaattttgctgcaaagttttcctaaagggcttggaaacggtccagaccgtgctgtcctggaagtctcctgggggctccttcttcaaacaagagaaagctggggagtttc

SEQ ID NO: 179458 - DNA, 122 bp, Homo sapiens
gggttttgtactgtctctagcatttgacacttaatatttaaacaccaccaatgaggtggacgtcctactcacgggactgagtttccaaacgggccagagagcagcacgtgagcattttgcag

SEQ ID NO: 179459 - DNA, 122 bp, Homo sapiens
taggtaagaggagctactaaagcacgtccacagaggggggactatacaaacaggacaacccgggtcaagaaccaaaacgcagggaaggttttcagagtggcaagtctaaagtaaagtgcctc

SEQ ID NO: 179460 - DNA, 122 bp, Homo sapiens
ttggtttcatattttgttttgtttgggagcagggggaatatggagcagagttcttgtccacgctccacacagctctccaaaatgatagcatctctgcttaggatggattttcaattcagtgg

SEQ ID NO: 179461 - DNA, 122 bp, Homo sapiens
ctaaccaagagcgccctgttactgtccacgtaggtgtgactgctctgcgtagacacacaccgcccccaagctgaggcaaggccactgagccaccaattccaagcaaggttcagaaggagctg

SEQ ID NO: 179462 - DNA, 122 bp, Homo sapiens
gtcagccaggacttggctcagctcctcagccaggctgggctcatgaagaggtgaggaagccggaggtacagcagctctctgctgtgccatctccttgggtccctaagaaatggtatctgggg

SEQ ID NO: 179463 - DNA, 122 bp, Homo sapiens
gcgggcgcagcggggcggcccggagcggcgcgggcggcctggagccccgggagcggcgcgcgcggtcccggcccagcggctctcctggcctcgcgctgcacattctctcctggcggcggcgc

SEQ ID NO: 179464 - DNA, 122 bp, Homo sapiens
ttctatcttccagaagcacggcctcggcctcgggtggtggagtcactgctgagcccatgacgttctgcttatattccatccctgcatttggaagtcgttctttgccaggaggaaagtgagga

SEQ ID NO: 179465 - DNA, 122 bp, Homo sapiens
cgctcgctacatcaacggacgacgcgagaccctgaacccacccggccgcgcgctgcccgccgccgcgtggtccctgtaccaggccggctgctccctgcgtctcctctgtccgcaggctttct

SEQ ID NO: 179466 - DNA, 122 bp, Homo sapiens
ggctctggcctctacagcagatcaattccacctcagcaccggcaggcgactttcctcccacgtgcccgccccgatcacttcccccaggacacccctgccgcccttgccccagcaaccagaga

SEQ ID NO: 179467 - DNA, 122 bp, Homo sapiens
cccgcacccgggacgggctgtgggcagcccgcgggagcccctctgtgcaccttcatgggtcgaggcagctttcagagcctttgagttcaggagagattcagggtagagcttcgagctgactt

SEQ ID NO: 179468 - DNA, 122 bp, Homo sapiens
aagaatttgctcatcctttcccataactcctacccactccccaatatgcccaatctcttccgaaaagtatacagaaactctccaactacaacaaatgaaagcaggtaggagaaggaaaaggc

SEQ ID NO: 179469 - DNA, 122 bp, Homo sapiens
acaagttttgcaactttttatataatggtctggtgtgattttgaatgatttggaaattctcggttggcagaaagaagataaatgcataccacaagatacctcttcataatctcttttattct

SEQ ID NO: 179470 - DNA, 122 bp, Homo sapiens
aatgaacaatgcgacaacctacatgcctgacccagggggatgctgaggctgcttttcacacggagcacagagtgtgaagagtccatacggaacatatgagaaggggaagatggaatgattca

SEQ ID NO: 179471 - DNA, 122 bp, Homo sapiens
cacagagcacgtccgtcctgcaggcaagagctgggaggcaggcgagaccccaggcaggtgcggggccgcccaggggcaccgaggcaaacacggaggcacgtaggagtccggggccatgtggt

SEQ ID NO: 179472 - DNA, 122 bp, Homo sapiens
tcacctggatcaggcgagggtcacgccaagccggctacacaccacggaaaggagcccttccgcgcttttatcccaccgaccaatcgcacagcgactagcaccgattgacaagctccacggac

SEQ ID NO: 179473 - DNA, 122 bp, Homo sapiens
gagctcgtgagtcccgcggcgcccttggccctgcccgagcggcccgatggggttggggggcgggaagaaagggtggcaaacaacgattttaaaaatccagtcattagtatttgtaggacgaa

SEQ ID NO: 179474 - DNA, 122 bp, Homo sapiens
ctgatggacccccagcctgcctctcccaggaagctgctgggctctctggagtgatgttgccgtatccctgccctggttacttcctgacatcctctctcctgttcctgccttgggtggacgta

SEQ ID NO: 179475 - DNA, 122 bp, Homo sapiens
cagcccccgctgaccccaggagccaagcaaagcctggatggacgccttcgctcctgctcccggcagcagccctgactagggacagaggccaccgggctgctgctccacccgccccaccccac

SEQ ID NO: 179476 - DNA, 122 bp, Homo sapiens
ggcaccgcggggccaagtcacttgctcaggggcacgcagcaggggttctgcctgagaagccgtaagctcacgtccctaaagctccgcagcaggggctttggatccttgtgaatttcagctcc

SEQ ID NO: 179477 - DNA, 122 bp, Homo sapiens
acctgaaacacaaggccacgggtcgctctccacagccccaggtcactcctggacgccttgcgcacccgcagccgatactccctgatcagggtgaagcggtctccaccttctacgtcacggtc

SEQ ID NO: 179478 - DNA, 122 bp, Homo sapiens
cagatcttttcagttactgcttcctattacttgtgcccagttctgtcttgcttgattagacggggagctccttaaatgcaggcactgtgcccaactcacctttgtagccgtcagagtgccca

SEQ ID NO: 179479 - DNA, 122 bp, Homo sapiens
aagtggaggttgcagtgagctgagatcgggccaatgcacattccagccaggatgataaagcgagactctgtctcccaaaaaaaaaaagaaaagaaaaagagaacaatttcactaatttcact

SEQ ID NO: 179480 - DNA, 122 bp, Homo sapiens
gtggccccgcaggggacacggccccggagcaggactcagtggagcggcgcatgggcacagcggtgggcaggagcgaggtctggttccgcttcaacgagggtgtctccaacgccgtgcggcgc

SEQ ID NO: 179481 - DNA, 122 bp, Homo sapiens
ccggaggccggggtaactggcaggtaactaggctttggagtggtattttaaaatatgtgtcgttaagctgttcgtgggctatcagaggtttaatttttgttcacagcctcaacacccggggc

SEQ ID NO: 179482 - DNA, 122 bp, Homo sapiens
tgtcccctcgccaaagggacgggtcagtagcgtcttaaagcactaggtggagtcgggtttcgtggctcctgctgcacagccttactgtggttccgaaacagaagtcagtgcagaacctgcgt

SEQ ID NO: 179483 - DNA, 122 bp, Homo sapiens
acagccatccggagggaccctgaggcctgcgagaagctggaagccaccatgctccgactgcggcgcgaccagaaaggttggcggccagtcagggtgggtggcccggtgggcaagggccagtc

SEQ ID NO: 179484 - DNA, 122 bp, Homo sapiens
tttaagtataaccataaagggactcacgcactctcaggtgaagtgcaaaaatactgatcacggtgctcaaacattctggaggagtaagcattcaaattcagaaatgtaagatgatttctcaa

SEQ ID NO: 179485 - DNA, 122 bp, Homo sapiens
agccggtgattgctctctggctgtccccggcacctcggcccccacggccgttggtccgggcgggtgagggagaaagtgagacttggtgtcatcaccatccattgtcagaaggggaggaaatt

SEQ ID NO: 179486 - DNA, 122 bp, Homo sapiens
atggagtcctgataagctccagtcattcctgtatctctgaactccagtttgtgcttactccgctcagcaaaaccactgtgctctgtttgtcctccgtgcactgtggtttagaaggtatctac

SEQ ID NO: 179487 - DNA, 122 bp, Homo sapiens
cccggttccatttcattgttggattgtggcgcttcactcctgctggcggccggcagggggcggagttcgagcctggatttttttcctcggggcctcccccgggaggccgtcccggcgtgggg

SEQ ID NO: 179488 - DNA, 122 bp, Homo sapiens
agagcagcccccaatccccttgccagccttgcctccttcctgcccctgccccgggaaccccgtctggcccagtcccagcccaaatctgaggcagctgcctgaggacagccttgtactcacag

SEQ ID NO: 179489 - DNA, 122 bp, Homo sapiens
gagggtggagactgtcttaagagtctcacctgctccaaaattacctttttccttgttcatcgtatattttgaggatggtaatatcttgattgtctaaaccaaggcaatactggcaatggtga

SEQ ID NO: 179490 - DNA, 122 bp, Homo sapiens
ctcagtttccccatttatcagtggttgcatcctaagtacctgcaccctgtccctgttgcccgtaggcccctcggacgccaatgggctcctgcccgcccccagcgtcaacgggagcggtgccc

SEQ ID NO: 179491 - DNA, 122 bp, Homo sapiens
ccagcgaagaaaatgataaaggggaaaaaaaccggccgggccgcgtgcccggcccccacacgccagcccgcggcgcctgcgcactgggccattcgcctcacgagctacttcctctgcgctcc

SEQ ID NO: 179492 - DNA, 122 bp, Homo sapiens
ggcagagccgcggggcgcggcggcccctttgtcttcctgtgcgggctggtgcggggcgggcgctaccctctaccgcccccacgccccgagcccgccgcgcgacccccgggcgctgggggacc

SEQ ID NO: 179493 - DNA, 122 bp, Homo sapiens
gcctaccctagaagaggcggagaataaccccgtagggagttaagcggcctctgcctacagcgttcctcccgcctccacggcgccgagccctgattgacgttcagccaggccaatcatagcct

SEQ ID NO: 179494 - DNA, 122 bp, Homo sapiens
ttcatgaaatgcccaacttgaaaacggcacatccagaaacacagctgctaaataggaactcgcagcttgagtgttatggcgctccagccccagcggcgttgcttatcgtggtggccacaccc

SEQ ID NO: 179495 - DNA, 122 bp, Homo sapiens
tccttgccttgtgccaagagggcccaaggcagacctgccagcagccacgagatggcgctgcgatccaggcgactccgggccctgcagccaccctccccgaggctgccccgcggaggacccaa

SEQ ID NO: 179496 - DNA, 122 bp, Homo sapiens
ctgcgcagtgactgggccctgacctggagtcctctcagggcagctctggaccctcagcggcgcgtctctcccggattgtgcagggaccactggagggtcccaggggtagaatcctgactcgg

SEQ ID NO: 179497 - DNA, 122 bp, Homo sapiens
cttagtggagaaaacccttctctccctttacattggtgaattcttgtactctgcaattaacgtgtgtgccagttctcagtaagcactcagcattgcagaatgaagtgtgttgttccaggcag

SEQ ID NO: 179498 - DNA, 122 bp, Homo sapiens
cagtctgttttgcaaggtgtgcatttccatcttgattccctgaaagtccatctgctgcatcggtcaagagaaactccacttgcatgaagattgcacgcctgcagcttgcatctttgttgcaa

SEQ ID NO: 179499 - DNA, 122 bp, Homo sapiens
cttcattccctgtggtgaaccgtggggactttcgctccaaattttcatgttaagcctcagcgtatgcatgagacacaacgagtttggaaaatcttaaatggaacttagagtcccctccccac

SEQ ID NO: 179500 - DNA, 122 bp, Homo sapiens
cttacacagcctctgaaaccatttgggtagggaggggcccgcgaccgtctatccttgtggcggtgacagatcagtagagtgaattgcaggagtcagtattgtcgagattgtaacttgaggtt

SEQ ID NO: 179501 - DNA, 122 bp, Homo sapiens
ttcatcattctaagagcaccctcatctgcctggtgataaagtctgcgcatgagtctaacacgcctatcagaaggtaaccccaagcccagtgaactcattcatgtcttattgaaccacctact

SEQ ID NO: 179502 - DNA, 122 bp, Homo sapiens
ggaggggacctcctgtggtaccaagagcttggtctcctctccagccgagggagaaaagagcgtggagtgcctgagagagtccccttgcggtgactgcggagactgccaccccttggaactgg

SEQ ID NO: 179503 - DNA, 122 bp, Homo sapiens
ccagtcaaataattcaaggcagctgtcaggctaaagttcggcgagcgacacgcggctgggcggcgggaggaaacgcggggccgggccgggcgctggagatggtccccggcgccgcgggctgg

SEQ ID NO: 179504 - DNA, 122 bp, Homo sapiens
ataccccccaggtggcatacctgttatagaggtccttagcctatttctcaacagaaacttcgtttacaaaaatagtcacatataataaacacatggattaacaaaaagatgaatccactaac

SEQ ID NO: 179505 - DNA, 122 bp, Homo sapiens
gcacctaatgtgatgctaagctgaggtctctcactggagcctcggttggaatcccctcgccgcagcctggctggtcgctggatgggtacaggaggcgagcgaggagcgcctcccaggctgcg

SEQ ID NO: 179506 - DNA, 122 bp, Homo sapiens
agcccggtgttttctaataactccctcctgccgcttcagatttggaaacgcatttcggggcgtgatcacgcagctgcctcttggcattctggtgtccctcgaggtgaaggcccctgggttgg

SEQ ID NO: 179507 - DNA, 122 bp, Homo sapiens
aaggcacatgactggggattgatcaggctgaagatgaaacagagaaagcttcccgggcagcggaggtaggaaacgccaaaaccaattactccccggcccctctggcctccagatctctcccc

SEQ ID NO: 179508 - DNA, 122 bp, Homo sapiens
tgtcaaggccctgtcaatggtgtacctaacgtgcaggctaatcctgtgtcaagccaaccccgacacctgcaaccaagcacgcctgcacctgtccccaagactcagcaggcacacacagctct

SEQ ID NO: 179509 - DNA, 122 bp, Homo sapiens
cgggacccccggggctgcctcgggcctcccgccggctcctgggggacttctccaggcaggcgaacgggtgctggggtgcaggctgctccttcaatgcatggaggctctaggcggcgattgca

SEQ ID NO: 179510 - DNA, 122 bp, Homo sapiens
ataacctcaaaatcacaggaagtgactgaaaacgtccatgttgcgtaagggaagtgaggtcggccatctttgagaagggcgtgactggttgaaaatcggttctgaacccttagcggtgagtc

SEQ ID NO: 179511 - DNA, 122 bp, Homo sapiens
gctgtgctacacttagcttggatctctaacgatattttcttcgtcttcaggatccttctccgccttcataacgctcgaatattatcttccttgcaatgcagaacttgattaagagcagcccc

SEQ ID NO: 179512 - DNA, 122 bp, Homo sapiens
aatccaaaccttcactgcggtctctagagaaaataccaaacgggaagtgcattcttagcacgaagcaaaagtcttaaattttttctttcccatctctgctgttctaggtgtctatttccagc

SEQ ID NO: 179513 - DNA, 122 bp, Homo sapiens
tgttgtctgctctgaaaatgcagtattaaatgcactagaaacggttagttaaaaccaatgcgtacaccaaatagaaatgcactgtgtagaaaagaagcaaagaactttgtgataatattttc

SEQ ID NO: 179514 - DNA, 122 bp, Homo sapiens
ttcatgtccccctggaagctcagactttgctaccttatttgcaagtagggcctttgcagacgtgatggaggtaagaggaggtcatactggattgcagtgggtttagcccagtgacgtccgtc

SEQ ID NO: 179515 - DNA, 122 bp, Homo sapiens
aagagagtctataagatagacgggatagggatcattttccttcttggacagaatgaggcacgtggcacagagaaagtaagtggcttgttcaaggtagcaggatatggctgctctaaggataa

SEQ ID NO: 179516 - DNA, 122 bp, Homo sapiens
caaccatagcggccttgtgaccttccaagccttcatcgacttcatgtcgcaggagaccaccgacacggacatggccgaccaggtcatcgcctccttcaaggtcctggcaagggacaagaact

SEQ ID NO: 179517 - DNA, 122 bp, Homo sapiens
actgtggcgccaaggataggcctggtgacccccgactctccacctccttccgaccaggaccgcacccccccggcctaacctgaccggaaactcgaaatcagtcgcccagcgatgacgcacga

SEQ ID NO: 179518 - DNA, 122 bp, Homo sapiens
tggtcagcctgctccaccaggctgaggtgctgggtgatgagaagcactgagcgggagtaccgctcagggctttcgtacaggagctgctccacctgaggaaagacatcggaccgtcagagccg

SEQ ID NO: 179519 - DNA, 122 bp, Homo sapiens
gtaaggctggtgccagaccctgctgcggcccccggcatggagctgcaggggtgtagggtacggcttcctgccaaagcagtgcaccttgcagggtaagacactgcctcttcacagggccctct

SEQ ID NO: 179520 - DNA, 122 bp, Homo sapiens
cagaggaaggatggtggctgaaggtgagccttctccagggggatgccctggagactcttgcggtcccctccacgtgttcacctcgtcagagtcaagaaacgaggagtgaaaaacacccctca

SEQ ID NO: 179521 - DNA, 122 bp, Homo sapiens
taatctggatcaaactgaattcatttgagtcattttccccgggcagccggagccagtccgcggagctggcccaggcagggggcccgagagtgggagagaaagggaaggggcgcccgggtccg

SEQ ID NO: 179522 - DNA, 122 bp, Homo sapiens
gtcactcacaagacgccccaggcaggcaggtggggatccctgtcctgcatccacaggacacgagtggacagggtctctccaacacagtccctgaaccaggacggagggtgaatgaacagcca

SEQ ID NO: 179523 - DNA, 122 bp, Homo sapiens
tgcttgagacgattgtcagagggaatcttgtgtgccctttgctctctgtgcctgtcattgcgagggtttctttgagccggtctgctgaccgtcaggcacttgagattgactcggtgaacaat

SEQ ID NO: 179524 - DNA, 122 bp, Homo sapiens
tcaaagtactttcccatccattttcttatttgatcttcttctctactttgttggaaccaccgcaggcattaataacctaatttaacagaagactatatgagcactgaaccctcccacccatc

SEQ ID NO: 179525 - DNA, 122 bp, Homo sapiens
accaacaaacaatgaatgtgggcgactgggctggtggttaaagggcttacaactccagcacgatggactgagtcctgcacataaataaggaatgtaagtgggtcagtaaaacatgccaaagg

SEQ ID NO: 179526 - DNA, 122 bp, Homo sapiens
ggggaagtggctgggggtgaagtcacgatctatggccatggtcgcttcccctgcagaaggcgggcgctggggtctccgagtgcgcagagagcggcggcggcgagtcgctcccgccggttctg

SEQ ID NO: 179527 - DNA, 122 bp, Homo sapiens
ggacagctgcttgattcgccggggggaggtgctggcactgacggacatgctttgtgtttacggatttgggtcctggaatgtgtgaccatctgaattgttcctctgcaagggttcatcccagt

SEQ ID NO: 179528 - DNA, 122 bp, Homo sapiens
ctctcctttctcttcgcaggctggacaacgttcatggctctcgggtagaacctagtgaaacggccagaatgaattctatggacaggcacatccagcagaccaatgaccgactgcagtgcatc

SEQ ID NO: 179529 - DNA, 122 bp, Homo sapiens
ttattaatcagcgtggagcaggtgaatcagctgttgcattccccgggaagaacgcgggctcggccggcctgtgctggactctggcgcccccaaatggtcacgtgggtttattacacatcgga

SEQ ID NO: 179530 - DNA, 122 bp, Homo sapiens
aaaggtgcttgcattgggattcagggaacacgcttactgggggcagtgagagggaaattccggaagagagctgttacagacgttacttctcaagacatagcctgaaggttgctgcatcagaa

SEQ ID NO: 179531 - DNA, 122 bp, Homo sapiens
tgagtgctctctaattccagtctgaacactgccaaacaccagatgttcagagtggtaaaccgttggagttctctgcaaaatctgttcatctaattgcacttgggtggtggttgtcgctgctg

SEQ ID NO: 179532 - DNA, 122 bp, Homo sapiens
tagatggtccgctgggcgaaggagccaggaacaccccagaaacccaactcgctgagttctcgtccttcgaacccccagcgcctcccgcggtgcccatggccacggcccctttaaatgtgcgc

SEQ ID NO: 179533 - DNA, 122 bp, Homo sapiens
cgcggcgcatgtgcggaggttgttgccatggagacgccggaggttgggttgggcgggttccgggaggcgttcgtccctcctacaacgtccgcagcctgcgccgcgcggtggctctggactag

SEQ ID NO: 179534 - DNA, 122 bp, Homo sapiens
gacggcggggaggggccaggtgcgcagggggcggggacagggcccgcggggcggggtccacgtgggtgacgcgcggggccacgcccccaccttgggacacacccggaagcggcggcggcgcc

SEQ ID NO: 179535 - DNA, 122 bp, Homo sapiens
atgaagaagcaggagaacagggagaagcacaagatgagaggtgtgagggaggaggggagacgcctgcacaaggctcatctagatagaaccagaggagggtgttgctggccgtgctcatgacc

SEQ ID NO: 179536 - DNA, 122 bp, Homo sapiens
gagcatgcgcaccctccgagattgccaggaattgacttctctgtggccaatgaggtgccgcgttcctccaggctcatccaatgaacttatccgatgcttttgcatccaccaatggggtttcg

SEQ ID NO: 179537 - DNA, 122 bp, Homo sapiens
ggtgctattctgagacctaatgtgcctaacccagcaagcgccgagacacggacccctcaccgcttctcacgtgcccccagccgcaaccccaccacggctgctcggtggttccgagacacact

SEQ ID NO: 179538 - DNA, 122 bp, Homo sapiens
tccttgcaagttgggagtaggaggagagaactggggagagaggatggaaggatggaatgccgctgtgttcctgctggctgagttttagtcatctataggtaaggtttttttaaaatacctgg

SEQ ID NO: 179539 - DNA, 122 bp, Homo sapiens
ccgcgtgttggggttcgcctgtgttggggtttgccacgtgttggggttcgtctgtgttggcgttcgcctgtgttggggttcaccatatgttggggttcaccacgtgttggggtttgccgtgt

SEQ ID NO: 179540 - DNA, 122 bp, Homo sapiens
tcgcgttcccctggcccgtgaccccctctgggcccactcgccccccctccgcgtggccgtcgctgaactggggcctcagtttacccggcagtgtagcccctgccccacatctcgccccggct

SEQ ID NO: 179541 - DNA, 122 bp, Homo sapiens
gagcaggctaagcaaagccagcagccgagccaggtcagacgatctaaccgtatgaagtgacgccaaagaaaaaaaaaaaaacgcccaagcttacgtagggcaagatgaaaggaaaaggtgcc

SEQ ID NO: 179542 - DNA, 122 bp, Homo sapiens
agaccctgtttcaaaaaaaaaaaaaaaaaaaagtcatgggaccagcatttgatccagggacgaaggaaaaacaagcccatgaagcaaatttaatgacctattgggcaataaaggaatatcac

SEQ ID NO: 179543 - DNA, 122 bp, Homo sapiens
tttcctcccgtgaactggaaaaatgcacaaattaaggatcttcctggcccaagttccctccgccgccctccatgttctgttcttcccctacatcgttcctttacctcctggttgaattcagt

SEQ ID NO: 179544 - DNA, 122 bp, Homo sapiens
agtggcagcgggggtgggggacagagcctcctgctgctctcggcagtccctgctgctgtccggagtggcagagcaccctatccggggccctctgggactgcgcggagccgccagccagccct

SEQ ID NO: 179545 - DNA, 122 bp, Homo sapiens
atgcttcagcttccctttcactgccatctgcggtgaagctgccaccaaactgcagattttcgtgaaaaccctaagggggaagaccatcacccttgaggttgaaccctcagatgcgatagaaa

SEQ ID NO: 179546 - DNA, 122 bp, Homo sapiens
tctatctgaagcgtggcagtcgcaagggcaagaaggagaagcttcgggacctgctgtcctcggacatgatcagcccaccgctgggggacttccgccacaccattcatattggcagtggcggc

SEQ ID NO: 179547 - DNA, 122 bp, Homo sapiens
atactttctccggccatggagatttcataattcctggtgtatgtctggaaaatctcccctcgtcgtgagtccaaaccaaattaatgtcttccagaatgacctgaggaattaatgaggttttt

SEQ ID NO: 179548 - DNA, 122 bp, Homo sapiens
ggcccagaatgtgtacttggaagccgggaacggggcctgggccttggtctctgtggctttcgtttgctctaccctgggatttgcaaatccagagtggaggctgtggtatttcactgagatca

SEQ ID NO: 179549 - DNA, 122 bp, Homo sapiens
tagttctacaacccaggctgacatacacaagtccatgaaggaagagagctggctctgacacgtgcgatattcggttgatatgcagctccaagctgcctgagcgaggaaaccttgaggaaagg

SEQ ID NO: 179550 - DNA, 122 bp, Homo sapiens
aaggtaactggccttgtgatgaggaggggctttcctcaggccagcactgggcatgcccagcgtcccctgaacacggagatgacagaagggtgcatgttgagaaaacctccactgcggccctc

SEQ ID NO: 179551 - DNA, 122 bp, Homo sapiens
gcctctttgtctcctccaaggccgacctgcccgaaggtgtcgcggtgtctggcccatcaccggccgagttttgccgcaagcaccggctacccgctcccgtgccgttctcctgtgctggccca

SEQ ID NO: 179552 - DNA, 122 bp, Homo sapiens
atctcaagtgatctacctgcctcagcctcccaaagtgctgggattacaggcatgagccaccgtgcccagccgacaacaagaatttatttctcacagtttcaaacgctgggaagtccaagatc

SEQ ID NO: 179553 - DNA, 122 bp, Homo sapiens
tacatttcttagaaggcttccccaaccatccagattaagctaattcatcttcagcgattccgttacatcaccctgttcattgttttatagcatgtatgcctatctgaaacaacattactaaa

SEQ ID NO: 179554 - DNA, 122 bp, Homo sapiens
gctggcgctcctgggccgtgtgcgggtggcaactcccctcacagtcttcatgggacagtgcggatttcacctcatacgtgcgacagacgctctgcaggagacagcggaaggaccgtctccct

SEQ ID NO: 179555 - DNA, 122 bp, Homo sapiens
gagtggagtgcttgcacattcatcagtgcccggtactggctttggatctctgatggctcacgtgccaggaaaggcgtatctctcatgggcccatgactctttccggagccttggcagcatct

SEQ ID NO: 179556 - DNA, 122 bp, Homo sapiens
tacctgagggccgatatcccaaagctaaggcttatcaaaggcctgcgaaaagacagacaccgggcaccaccagcagttggccattctcaacgaccagctgcacaagatcgtgggccggaagc

SEQ ID NO: 179557 - DNA, 122 bp, Homo sapiens
aggtttgtaagttggaaacaaagaaggcaaataaactaagatgagaaccaaatgtctacacggatgctaccaaaatctctctgttcatttgactggtgaaattctgcccgctgttggatttg

SEQ ID NO: 179558 - DNA, 122 bp, Homo sapiens
ctcacgtagcaccacccgagtgctgggcactgggaaatgggcaggtgcccgcagcaagtccgtgctgccgatcggccgtgagaagtaaccgtccctcacaacgatggggccgggatgcagct

SEQ ID NO: 179559 - DNA, 122 bp, Homo sapiens
cagctggggtcccattccacacctcaggcccttgtcacctgccttcctgttcctggcctccgccagtgatggcagggcacaggtgccaacggagtgacctcttgccaggtgtcctggggata

SEQ ID NO: 179560 - DNA, 122 bp, Homo sapiens
ggggcaggagaggttagttctattaagagttcatcaatcacccggtgtgcacttttcgctcgacagcggttcctcctacttcagagcaagtctgggccagctgggatccgaccagaaatcgc

SEQ ID NO: 179561 - DNA, 122 bp, Homo sapiens
ccttggcggtttgctgcgagaggagggcgctgggggggagcctagtggctggtgtttgggcgccttggatgtgctgtcaaactcggcaggaggggacagctgaagccagaagggatttcagt

SEQ ID NO: 179562 - DNA, 122 bp, Homo sapiens
acctcgtgatccgcccgcctcggcctcccaaagtgctgggattacaggcgtgagccaccgcgcccggccaaatatttgtattcttgtgcaccggaggatggttttcccccactgactccaaa

SEQ ID NO: 179563 - DNA, 122 bp, Homo sapiens
ttggaaggccctttcctctgctagagctgaaagccctgtctccctcgttttcttttgctacgggatccagagaaaacaccaaagggcacttactgagaagctgaaaaaaaaaaaaaaaaaaa

SEQ ID NO: 179564 - DNA, 122 bp, Homo sapiens
ccaacgaacaggaaagaaatgtcctcacgggtcctcagaccccaacggcaagcaggctgccgggagaagggaaacggagacgactctgccaccagcctggacttccgcctgcaacgttctag

SEQ ID NO: 179565 - DNA, 122 bp, Homo sapiens
ggggcgagcttcctgcagctgcagagcatcaaagacgcctgctgcacattccttcgagaacggtgaggtgatgtggtgggcctggtggagaacatgactatttcatttctggaatcttctgc

SEQ ID NO: 179566 - DNA, 122 bp, Homo sapiens
gggcagctcaagaagcagctggtgctccggatcatcagtggccagcagcttcccaagccgcgcgactccatgctgggggaccgtggggaggtgggggccagccccacacaggcgggaggggt

SEQ ID NO: 179567 - DNA, 122 bp, Homo sapiens
ggctggggacctcatcacccacatcaacggggagtcagtgctggggctggtgcacatggacgtcgtggagctgctgctgaaggtgcggcacccccactgcccaccctcagggctccccagca

SEQ ID NO: 179568 - DNA, 122 bp, Homo sapiens
gagagaagcgtatgaggaatggatgaaacacagaggcagggaactcacattcaggcaaagcgatgcctccataaccatctatgtctttcagcagctgggacagctcacattttgtgaattgc

SEQ ID NO: 179569 - DNA, 122 bp, Homo sapiens
accccgagaacttccaggagagcgtggctaatagcaggaccccgagaacttccgggagcgcgtggctaatagcaggaccccgagaacttccgggagcgcgtggctaatagcaggaccccaag

SEQ ID NO: 179570 - DNA, 122 bp, Homo sapiens
gagaagggcgcctcagaggtgactttcagcctgcgagccttcttcccggggcgccataaacgcccccaatttcccagctgctaaaggaagaggaaggtgggtctcgctggcggcttgaggag

SEQ ID NO: 179571 - DNA, 122 bp, Homo sapiens
tgggatggggagtcatgggaacctccaaatttatagtctgctgggcagaagttcaggtaacgtacaaatacccaatacctgcagctggcatctgaagtggggcaattttgaggtaatgcgta

SEQ ID NO: 179572 - DNA, 122 bp, Homo sapiens
atgatgaaaccaatctcgagtgaaggattcaatgaggcaatacgcctgaagggctgaccacggcgaaagctaatgttcattgctatcaggcggggaaagctaatgttcattgctatcaggcg

SEQ ID NO: 179573 - DNA, 122 bp, Homo sapiens
cgcgcccctccgcactcctcacgtcatttcccattcctctgtcccgccttctcttagcgccgcttgaccctggaaccatagagaatacccaagaattccaggaccagagtctcttccggttc

SEQ ID NO: 179574 - DNA, 122 bp, Homo sapiens
ggcagagggcggaaagggacagggactctgcacctcatcacatacctggtgttttcagggcggcggggctggggacgggacacttccttgctgccgtgagcggggcccacacgcgtcccagc

SEQ ID NO: 179575 - DNA, 122 bp, Homo sapiens
ttaaattcatctggaaagaaagaaagaagggaggtgaaggggcctgggaggtgatgcaggcgcccaaaggcacccaggccaaattccacccgagcagactcaccatggagccactgaaaccc

SEQ ID NO: 179576 - DNA, 122 bp, Homo sapiens
ggcccaggctctggctctcggtgcggcagcgccatctggtgccgagtctcccgccacccgcggaggtggcacgcgcccttctctcggaaccttccagagaaaccgtggcccctgctttcctt

SEQ ID NO: 179577 - DNA, 122 bp, Homo sapiens
tggtggcctcttgcctttagcctacatcctagtcatgaaacaatgttatggcttttcagtcgaacctggtcctcaaaatattcacatttcataatcatttcttctacaagtttccagtgtcc

SEQ ID NO: 179578 - DNA, 122 bp, Homo sapiens
ctccgccaatggccgggccgtctccccacggctcccggtaatgtggaaaaaattgtgtggcgttggatttataaaatatgatcaataatgaatgggaaagccgagccctgtggattggggct

SEQ ID NO: 179579 - DNA, 122 bp, Homo sapiens
acccatcagattgacaaaactagagagctggatagcatcaaagttggtggaacttggaaccgctgtgcactattggtgggaacacaggcaggggctggggcggccatgctggaaagcaaccc

SEQ ID NO: 179580 - DNA, 122 bp, Homo sapiens
ccaggcgacggggttaggagcggagcccgaggctctgcgggagaccgggggaggctgggccgcgtgggcttcccgctccctgcgccctggcctcccgcgccgtgcgccgccgcacgtagccc

SEQ ID NO: 179581 - DNA, 122 bp, Homo sapiens
ggaggaagcgccgaggggtgcgctggtgcggggcccctatctggtggtgtccctcttcaccgacgatgacaggacgcaccacctgtcctgggagtggggtctctgcatctgccaggactgga

SEQ ID NO: 179582 - DNA, 122 bp, Homo sapiens
ctgcctcgtcccgccggttgatggcctgctggcgtggcagcgcctattggcgtgctctcccgctggcgtgctctcgacagccttgtcgagaaatagcttgtgtcttcttccaccgatgtgtt

SEQ ID NO: 179583 - DNA, 122 bp, Homo sapiens
ttcaatgcccactattacttcacacagttggcctgtgacaggcaatcaggtcatcgtccacggctaccaggtgtttcatgtctactgtgacttccaggaccacaagcccttttgcgcccacc

SEQ ID NO: 179584 - DNA, 122 bp, Homo sapiens
cgggtgcagcgcagggccaccgcccccgcccgcagctctgcagcccaggcccggggagggcgggtgcctgggcggagaggtcacctaggacttcaaagagtcccgccccagaatccccactc

SEQ ID NO: 179585 - DNA, 122 bp, Homo sapiens
gaggtgcgcccgcgacaacctgggcttttcgcccccctcgagcccgggggtcgtgcgtggcgggcaggctcccaggcttggggcccggtggaagtccatctgacaaccccacccaggccagg

SEQ ID NO: 179586 - DNA, 122 bp, Homo sapiens
tcttcatccaatccaccggcgagctgcagggcgagggggtggttctttctcctgttttcccgctctccctgcatttcatctcctctgccgccatctgctccaaacccctggcagcccttcgc

SEQ ID NO: 179587 - DNA, 122 bp, Homo sapiens
gtttctaagcccaaatgagattacaaccagcaaattttaaagaagtggagctaagagagacgagtatagtaataacaagtctgaaaaactgcaagaggacacaagaattctgagtgagcctg

SEQ ID NO: 179588 - DNA, 122 bp, Homo sapiens
tgggagctctgtcaatcaacacctatttcttaagcatgtactaagtcccagatagtgtttcgttgctgaagacacagccctgacctcgacaaaggaggtccttgctctcaggaagcgttctg

SEQ ID NO: 179589 - DNA, 122 bp, Homo sapiens
tggcgcggacaccttgggatgtaacagtgttggggatcagagctcggtgcagagagccggcgccgagttaggagcctgttttaaagccatgcaacttgagtttcacacagtccgggccagga

SEQ ID NO: 179590 - DNA, 122 bp, Homo sapiens
aatgccagggcttgtcattctggaccttgctcgccccccggtatgtcgggcattcctctgcggtgataaaaccgagcgaaatctcagcagcccaggcagccacaggcgggggagtgcggagg

SEQ ID NO: 179591 - DNA, 122 bp, Homo sapiens
ccgccgccgccgccgccgccgcgtcccctcgccggctcgctggtaccggcagtgccatggcggccttcagcaagtacttgacggcgcgaaactcctcgctggctggtgccgcgttcctgctg

SEQ ID NO: 179592 - DNA, 122 bp, Homo sapiens
ccagattcccggcaaccaggccggcggaatcacgtgccatgctccaggccagcgtagtcccgcccatcttccagctgagcgtaccgggaggctcccattggactggagctgctacggaggcg

SEQ ID NO: 179593 - DNA, 122 bp, Homo sapiens
gtgagctgtctggcctctgaactgacaccaccagtggccaactagtaccacctccagtgacgtcagaggagtccagacctattcacaattcaaagccctaaaaacactgaggggttggccgt

SEQ ID NO: 179594 - DNA, 122 bp, Homo sapiens
aatggaggaagccaagtccttggaacgctggagtcaacacacttagagttgattggaacccgccttagaagagaaccttgcgctggttgccaccgcgcacctctcagggtggagcaaatcct

SEQ ID NO: 179595 - DNA, 122 bp, Homo sapiens
caggtcccgagccctgccccgcgggaaggcagctaaggccgggtgagaaaccgagcacagcgccggtgggccggcactgctgggggacccagtacaccctccgcagccgctggcccggttgc

SEQ ID NO: 179596 - DNA, 122 bp, Homo sapiens
ctggtctctcagaacctgggatacggcctagtacatgctgtctccctgactcatttatggcgaaattcacatcacactccttttatctgaatcagtgagggttgtgtcagcagctgagtccc

SEQ ID NO: 179597 - DNA, 122 bp, Homo sapiens
ctggaaccgctgctggccgagccacagccctgcggaaattctactgcgtgtggcagagaccgatgtgcaaaaggtttctggtgaatgttttatggaaattgctccaagcactaaggaaagcg

SEQ ID NO: 179598 - DNA, 122 bp, Homo sapiens
ccaatcgggagaagggaggaatctggttagcccgcctattgaacgtgacatcatttcctccgcaaccatgaagctccaggccttagcaactgaactaggccagagcaaccgaactaggcaga

SEQ ID NO: 179599 - DNA, 122 bp, Homo sapiens
aaagaccttgttactggtgtggtcaagaaggctttctgaggggctgggggcaggggctcacgcctgtaatcctagtgctttgagaggccagagcaggagaagagcttgaggccagaagttca

SEQ ID NO: 179600 - DNA, 122 bp, Homo sapiens
cgccaccttcgtttcagacgttcagttcgtttcccctacaaaggaagaggagaccggagacgggacgtttgctttgttggccgaactcttcggctgctggggatttccttcaaacgccatta

SEQ ID NO: 179601 - DNA, 122 bp, Homo sapiens
gcactggcactggcactggcacacgctatggcaaatgaagtgcaagacctgctctcccctcggaaagggggacatcctcctgcaggtaggctgccacctgccctcagtcctgcaggctgttg

SEQ ID NO: 179602 - DNA, 122 bp, Homo sapiens
gagaacccacaaacccccactgacccagttttggggcctgggtcctgagccacgtaagcacgggtgctagcggtcaagtgttcagagagcggcggcactccgggcatccaacgaggttagag

SEQ ID NO: 179603 - DNA, 122 bp, Homo sapiens
gtagacagaacagggcccgcgggaatcgagtgcagcaaaacagctccaacctcaatccaacgccagcgcccggcccgcacagcacggaatcccggggaaggcggagggcggggtccgaggcc

SEQ ID NO: 179604 - DNA, 122 bp, Homo sapiens
accaggtcctgcccatgactttccccctctcagcgccgtcctcagtggccacaccaagaacgaggccatgtcttcctgggaagggcctcagatgtcagcaaatgccctggtgtcttgggctg

SEQ ID NO: 179605 - DNA, 122 bp, Homo sapiens
ttaagtttcaacatctgaattttggaggggacacatttaaactatagcactcctcaaccacgtatgcagagaaggaaatcagagataggaagataatgtcacctaacgttcctctccctttt

SEQ ID NO: 179606 - DNA, 122 bp, Homo sapiens
cagtctgggggcggggccggagttcaagcctcggaggaagtaaatgcaaatctaagcgagcgctgtggggcggtgagtaggtagtgcggatgcgggcgcagaactacgtttcccagcaggca

SEQ ID NO: 179607 - DNA, 122 bp, Homo sapiens
ggggaaagtgttgtcattattaagaaaaacttggtgatgatagacttgtcaggtgataaacgtgaggacctaagcatggtctggaaaaagatagaaaaacaagaaaaataaaaaagttaaca

SEQ ID NO: 179608 - DNA, 122 bp, Homo sapiens
tgaatcagagacagggaggctgcaatgagccgagattgcaccactgcactccagcctgggcgacagtgcaagactccatctcaaaaataaagaggaattggaggaggaaataaatgaataaa

SEQ ID NO: 179609 - DNA, 122 bp, Homo sapiens
cctgaccctgagtactccgaccccaagtactccacgctgcactctccacgccgagcaccccggccccgagtactccacgctgcactctccacgccgagcaccccagccccgagtactccacg

SEQ ID NO: 179610 - DNA, 122 bp, Homo sapiens
tgcccctctctggacatgttggggcggtttttggggtggagggaacgcgggaagtgaaagcggaggctgggacaaggggaacttactgataaaatggaaaaaaaaaaagcccacagggccca

SEQ ID NO: 179611 - DNA, 122 bp, Homo sapiens
ggagaagcccctgcacacactgatgcacgggcaaggcgtgtgcatggagctggcggagatcgaggccatccaggaaagcctgcagccctctggtaaggtacccctggcctcccaattccctc

SEQ ID NO: 179612 - DNA, 122 bp, Homo sapiens
gaaccctgctccgttggtcagcgttactatcatctcggatcatatggagctcatgtcagccgtgtgggtggcgggtgcacagagacggtctggaaggaaacacgcggatctgaacagcagta

SEQ ID NO: 179613 - DNA, 122 bp, Homo sapiens
ctcacatgacctggattggaacttggctcagccactgactagccagacaaactcaaataacgtacacagcttctcagcacctcaccccctcattcataaaaaacagggacaatggtacccac

SEQ ID NO: 179614 - DNA, 122 bp, Homo sapiens
tattgtggtaacttttgggccaggggctctgaaaccccgaagacctccccctgggagatccgggacagctcccagagaaggtgagtcttaaacacatccgtgacaggcaataaggaaaataa

SEQ ID NO: 179615 - DNA, 122 bp, Homo sapiens
tccccgtccaaggctgctctgctaagttaaagacacccgaaagcgcttgactcaggtccccggagtccctggccagggccccagcccctcgcttgccctgcactgtgtggactctggggatg

SEQ ID NO: 179616 - DNA, 122 bp, Homo sapiens
ggccagcgcggctgagctgaaggtcttcaagtccggcagcgtggacagccgtgtccccggcgggccgcccgcctccaacctgcgcaagcagaagtcactcaccaacctctcttttctcacgg

SEQ ID NO: 179617 - DNA, 122 bp, Homo sapiens
attaagtgttgatgagatgaattgcttctaagggaaaaataagtgcattctgagttcttccgtacttgctgtaggagtagggtgtattcttcagctgaatacacattgcctggaactgagca

SEQ ID NO: 179618 - DNA, 122 bp, Homo sapiens
aggaaggatagaggatggcaaggggaagagtccttatgaccccaggcatcgggctgcctccgtgctggtgggtgagtccaagggctaaggccccaagagaaccccttagaaactctagaacc

SEQ ID NO: 179619 - DNA, 122 bp, Homo sapiens
aggagtctgcaagactctgggaagtgacattaggccagagcctgcggaatggggaagaatcgagtgttgcaagcctaaggaatggcatgcgtctaggccctgggctggaaaagccctgcaga

SEQ ID NO: 179620 - DNA, 122 bp, Homo sapiens
cggcgtcctggttgtcccagcagccaggagatccctacctgttagtgaacagttaggagtcgactgctggaagaattaattaggaacgtgctgtgctctgggcagcgcgagctcgggtagag

SEQ ID NO: 179621 - DNA, 122 bp, Homo sapiens
tttgactaaggcggcttccaggtgctgccctccgctggggcagcccactgagagagcagccgggttgctggaggaccctctgcctggaagtcttggtcctggctattcaggtcgtctgacag

SEQ ID NO: 179622 - DNA, 122 bp, Homo sapiens
gcgggtagtcgttcagttcccagcggctcgccattgttttcccaccccgcgcgttccgtacgtaaacacacacgcacacacaaggttgtgtgtgtgcgccggctctggctgcttcccgtccc

SEQ ID NO: 179623 - DNA, 122 bp, Homo sapiens
agagcagcccatctaatagagtgtcccggaggccagcgccagcgggtgctgtaaggagcccggcggcggcaggtgggaattgattgagctggctgcacttgtgtaccaggatgcagagttct

SEQ ID NO: 179624 - DNA, 122 bp, Homo sapiens
ctagagagatggcaggggccagacttcaggggcctggggatgtgtacttgcactccaagtcgaggagactgaactttttaccaaagacttggtgttctgtagaagtatgagcagatgagtga

SEQ ID NO: 179625 - DNA, 122 bp, Homo sapiens
cctggtgtatttctacattagataccacacagcagtgaacacacaatgaacaggtcaacacgtgtcattatagaactgcgcaaaagagctagtagcaggcattgtaagtgtatttatataat

SEQ ID NO: 179626 - DNA, 122 bp, Homo sapiens
tacttttgtggtaccttgctctatttttctgcaaagactgaaacccatgatttccctcttcgtcacttcagcatttctgttttcaccctgctcttctctggattcaatggatacaagtcttc

SEQ ID NO: 179627 - DNA, 122 bp, Homo sapiens
agagccccgaggcctcagaggctcctcagagctcccagtgccctggacggttccgttcagcgctctccagttctgatggttgctctcaggaggcggctggtctgaaacaattcagtttccat

SEQ ID NO: 179628 - DNA, 122 bp, Homo sapiens
ccagaaggggtggtggtgctggtggtggtcatggcctctgcggccctggcgagagcaccgcgggggtcgagaggccagccacgccgatggaagggatgtgcacctgggcgccgccactggac

SEQ ID NO: 179629 - DNA, 122 bp, Homo sapiens
ttcgtcaacatccagcagctacttgatgagcgccctccagtgggccttaggtccctatgccggcgcggggttacagcagtggacagacaggccagtccctgtcctcgaggagcccatgatcc

SEQ ID NO: 179630 - DNA, 122 bp, Homo sapiens
agaaaaaaggccccgctggaaacacatcctgtctcctcctcggtgaggtgacagtggggccgggcacagcaagggggaaggatattagaaggtgctgaaaagggagagctctcccttctccc

SEQ ID NO: 179631 - DNA, 122 bp, Homo sapiens
cgcatgttaaaggagccatgataggcaattttgcccagagcagcagggtggcaactgagtcggttacaatcatctgaactatcatcagattggaactcagaggttctgtttaaaggactcta

SEQ ID NO: 179632 - DNA, 122 bp, Homo sapiens
tttctgtgcccatgaggccgatgcttgccagcgtgtttgctggagtggtgaagggaagggcgctgctaaggttgctggaccaaatggagctgctgaatggagtggtggaccacaggccgctg

SEQ ID NO: 179633 - DNA, 122 bp, Homo sapiens
cttctgcttagagtgcattgacaaagctagccatagacttgcttaatttgtaaggaaactcggaaatgtggggagagcagacttcagcatagtggtgagccccagcctctgccacagtctgt

SEQ ID NO: 179634 - DNA, 122 bp, Homo sapiens
tttgtgaagaggcaataaaatgctaagttaaagctcagttgattttctccagatacttgccgaattcttggcatcacattctaccatgtttccaggattcagagtgtctaagcagtgctagt

SEQ ID NO: 179635 - DNA, 122 bp, Homo sapiens
aagagcagcagaatgttctgcactatgcagaggccgtttgtcggatcacgtgacagcacccgcgtgttcccccatcacgtgctcagaggttttccctacttccgggtcctctctgtcttcgc

SEQ ID NO: 179636 - DNA, 122 bp, Homo sapiens
ggtcacgtgggcgcggtctcagctctcggctggggttcgtcactgggcgcgggatttggccgccgcggggctccggagccgctcgctcccgacacggctcacgatgcgcggcgagcagggcg

SEQ ID NO: 179637 - DNA, 122 bp, Homo sapiens
gacgacaatgttgatatgagtcttttcctttcccattttggcttttaggggtagttttcacgacacctgtgttctggcggcaaacccgttgcgaaaaaggtcaaaattttgattcttttaaa

SEQ ID NO: 179638 - DNA, 122 bp, Homo sapiens
agcaacacttccgcgcacgcgcagcgcgacgggccggaacttccggcgtcctcctcgtggcggtcattttggcctctgtcctgtttgtccagcccgccagtttctgcagtggaggtcgcgac

SEQ ID NO: 179639 - DNA, 122 bp, Homo sapiens
cctccggcgggcggggcggagcctgtcagggggcggggcctaatggggcggggctgaccgcggagccggcctctccagccacctggcggcccggcagcgtcagccaggtgcgcgcccggccc

SEQ ID NO: 179640 - DNA, 122 bp, Homo sapiens
ttggagggtccctcaggtggtaatggagttcgttttggggtctcagggtccctcaccagccgtgtgactgactgcagctctttcagttaggagatgtacagggagtgagggaaatcgaaggt

SEQ ID NO: 179641 - DNA, 122 bp, Homo sapiens
catatttgctgttttacagatgaggaacgtgaagcttagtgagattaagtactttgctcacggtcccacatggcaacggtgggtacttgaacaagtgagtcatttaaactctgcaaagacag

SEQ ID NO: 179642 - DNA, 122 bp, Homo sapiens
atggtggcagaaccattctcttactcatttgcactggctgtctggtcttgccctatttcacgcagtcttagtggaaatgctgaacacagtgctttgtgctggctgtcactcaggaaaaaagt

SEQ ID NO: 179643 - DNA, 122 bp, Homo sapiens
aactgcgacctatagggggctgcctgagtgtaggttctttatgtccgcgaggggaggctccgtaataagtgacactgagctctatcaaggatcatccgatgtggatagccttcgactctcat

SEQ ID NO: 179644 - DNA, 122 bp, Homo sapiens
actttgcagcggctgttccccttgcctggagtgtgcctccagggatcctctgggctcactcgctcttcatgcaggcctctgctcagattccttctgcccagaggtcttccctgaccatctta

SEQ ID NO: 179645 - DNA, 122 bp, Homo sapiens
ttccatctcctgattgggtctggaccgcaagggggcggggtcttgaggggttctgcgggccggcattgggagccgcagaaggagggcgtggtaatatgaagtcagttccggttggtgtaaaa

SEQ ID NO: 179646 - DNA, 122 bp, Homo sapiens
cctcgacttagatttcgtgagcaaaatgggcccatgttttattttttctcgtgcgtgggccgtcgtgaggctttaaacaggaaactgggacagcacccgggctccgctacccgtcaccgggc

SEQ ID NO: 179647 - DNA, 122 bp, Homo sapiens
acaaatactgagtgccagctatgtatgtcaggctttggccgctgggtatatagttagaaccggaacgggcgtggtcttttccctcttggaacttactgactgtgggaaagttatacaataaa

SEQ ID NO: 179648 - DNA, 122 bp, Homo sapiens
tcacagagccacagaggctggacctctagcagcagaggacacagaagaacgaagacgagacgcagagctccaactgcagccagagacaaaggccccgccacatcccggaagccgccctgtcc

SEQ ID NO: 179649 - DNA, 122 bp, Homo sapiens
gcagaagttagagaaaaaaagccaccggaggaaaggaaaaaacatcggccaacctagaaacgttttcattcgtcattccaagagagagagaggaaagaaaaatacaactttcattctttctt

SEQ ID NO: 179650 - DNA, 122 bp, Homo sapiens
catgggaaaaaagaatcaaaggtcgtctagtccaactttctcctctacagattgtgaaagcgaggtgggaagtaatttacccaggctcatacaagccagtagaagactcaggcttcctctcc

SEQ ID NO: 179651 - DNA, 122 bp, Homo sapiens
ccggggaggggagcaaggaacccggggacaccttcgggctcaggctcaggctcaggccctcgccgccgcctcggaaggcccagcaggcccgggctgcgggccggcggcggggcggaggcggc

SEQ ID NO: 179652 - DNA, 122 bp, Homo sapiens
gcacaggccagagtggggtgacgtcatcgaaggcacgtcccagccttgcagagcggtgggcggggcctgcgaagaaggtgtgccgggggctggttggaggcgcgggcggcggggccaatgtg

SEQ ID NO: 179653 - DNA, 122 bp, Homo sapiens
cggagtcgccgcggaggccggggcggcggggtcttagagccgacggattcctgcgctcctcgccccgattggcgccgactcctctcagctgccgggtgattggctcaaagttccgggagggg

SEQ ID NO: 179654 - DNA, 122 bp, Homo sapiens
ttaatatagaagctgtcccaggactgtgttgtcccctgtctgagggtgcagggaattcagcgggaggggccgttctctgtccctccttcccctctccttgtcagattggccccaagggggtg

SEQ ID NO: 179655 - DNA, 122 bp, Homo sapiens
ctggggtgaagggtggaagagaaaagcagcggaatgggcgggctgtcgaacaaaaggcggcgagggaggtaccgtgcagagcctgctgggccttctgtcccatggccccgcacaccggactc

SEQ ID NO: 179656 - DNA, 122 bp, Homo sapiens
aaagtccgttcttggcggcgagggccgccgctaaactggctgctgagggcgtctctagctcgggttccagaagagagtggaatggactgagtgcttgtgagaaacttcctaattgaggctta

SEQ ID NO: 179657 - DNA, 122 bp, Homo sapiens
agaggcacctagcactagcctcctccacaaagaaggactgaaacagccagtaggtaaacacgcattgaataggggcttagggtgtctaagagagaacactgaaacttagcaggaaagtgaca

SEQ ID NO: 179658 - DNA, 122 bp, Homo sapiens
gcttgaaggccgtgccggaagctgcggaggagacgaccggcgccctagtgccagagcgcccggcgtacccggtgggactccccctacagcgccatctgctgttcggagcctggccagctgcc

SEQ ID NO: 179659 - DNA, 122 bp, Homo sapiens
ctccatggcacagtgaagattcgtcttctacagatcagatgctccaaacaggcatctcagcgcttctcagctcctctcatttatcaaccaggagaattccggcctagtcaccgtcttgaggg

SEQ ID NO: 179660 - DNA, 122 bp, Homo sapiens
ctgacggtgatgtgtcctctgaccacatatcgctaacgcaccatcatcctggtgtggactcggaggaaacaccacatggcttctcttgccaaaccacccacgtgtggcaggtggtcaccgtg

SEQ ID NO: 179661 - DNA, 122 bp, Homo sapiens
gcctgcaagcgggcgggggcggggtgtgaggcgctgcggacggggttgcgggctcggtagcggcagcttcagggcgcgagcgcgggcggtgccgaccactgcaggtaacagaggcgctgcga

SEQ ID NO: 179662 - DNA, 122 bp, Homo sapiens
tttttgaacttctaccctgaaattgctttgggccttcatttataagtcatactagaaaatcggtacattaactgaaaagtatactttatttttaacaaagaacaggattatgcaacaaaatc

SEQ ID NO: 179663 - DNA, 122 bp, Homo sapiens
ccagccgcccctaatcctgctctgcgtctcagccctgaagtcacctgaactagaaatgcccgccattgtttaccagtggaagtggcttcctgttactcgcaaaggtgtccaactgacatgaa

SEQ ID NO: 179664 - DNA, 122 bp, Homo sapiens
cgccctgccctccccacagaccagccggacaaccccagtgaggagaactgtggagtgatccgcactgagtcctcgggcggctggcagaaccgtgactgcagcatcgcgctgccctatgtgtg

SEQ ID NO: 179665 - DNA, 122 bp, Homo sapiens
tatgggatatcgtgtaagcctctttggcccctacctccacccctcactcccctgacaccccgttgtccccttgggcgaatggatcctgtacatctctttgcatccaatgaaaaccacccatt

SEQ ID NO: 179666 - DNA, 122 bp, Homo sapiens
ggagggggaagccggaggtggaaagttctaacaagaagtttcttgccccagcagccgtttcggctggggaattctcaggtaatgtttacagactgacagaggagtttagggaggggaagaaa

SEQ ID NO: 179667 - DNA, 122 bp, Homo sapiens
cctccggcgctttcttttccgaatggagggtggagaagcccgggaaggtaggaggccgggcgcgacaggtgtaattaacatgtactgagagcttctgcaggccaggaaggaattttaaaatg

SEQ ID NO: 179668 - DNA, 122 bp, Homo sapiens
gaacagccttggcgggggcggtggaggcgccaggtgagagaccagatgagatggtcccaacgaaaggatggcgtggaccacggtgggagaaacggtcccatctggacagactttggaggaat

SEQ ID NO: 179669 - DNA, 122 bp, Homo sapiens
aaagaggagaaaaaatgctctgtctcactaataatgaaataaattttaaaaatggcatgtcgtttttcataggatcagagtggctatgttttaaagaggaatgacatggcactggaagggac

SEQ ID NO: 179670 - DNA, 122 bp, Homo sapiens
gagcctggaactgccggggcagcccgacccgatccgcgagggacactgaggctgattgtccggttgcctccagagaagatgagcctgggcggagaccggcctcactgacatgcccccgccct

SEQ ID NO: 179671 - DNA, 122 bp, Homo sapiens
gaggtgtcactgtgaccctctcttggcagcgtcaatggagatgtgcgcatctttgatccccggatgcctgagtcggtaaatgtgcttcagatcgtgaaggggctgacggccctggacatcca

SEQ ID NO: 179672 - DNA, 122 bp, Homo sapiens
caaaagaactgcatgggaaagtaggaagagctgtctgcaccaagggactcctggtttccacgggaatggagtagctctctgactgtctcgttcatttcatcagacctccctctatgtgtatg

SEQ ID NO: 179673 - DNA, 122 bp, Homo sapiens
actcccctgtcctaggtagcacagcactgtaccccagtgagtaacaggactcaggagcctcggggtggaggcaggtctgggcctgggcatcttgcctcttggagtatgactaacaccagccc

SEQ ID NO: 179674 - DNA, 122 bp, Homo sapiens
cacaaatgttgattacattctaacaatcaaaagatgggaacaacgctaatgtccgtcaagcgatgagtggataaatgtgatacatccataaaatgtactattcggccataaaaatgaactac

SEQ ID NO: 179675 - DNA, 122 bp, Homo sapiens
ctgcgttgaggatgcctggccgctagctgcgcgcccccggtcagcccagcgtgcaggcaccgcactaggggggctgctgtctgcagagcacgctgcaggcccttgtctctcgccctctctca

SEQ ID NO: 179676 - DNA, 122 bp, Homo sapiens
cgtgatccgcccaccttggcctcccaaagcgctgggattacaggcgtgagccaccgcgcccggccatacatggcaagtttctacatggtgtttcagacttagctgatcaccctctaccctca

SEQ ID NO: 179677 - DNA, 122 bp, Homo sapiens
taggagtcctcactcttgtggacactgcattcccaggctcccttgccaattgtcttaggccggggccagccgctgggagatgcatgtgggagactggtggcttgggggagggagaaaccagg

SEQ ID NO: 179678 - DNA, 122 bp, Homo sapiens
ggcagtgcgggaaccggatcggcgccaaggttggcggtgggggggcccttgagggtccagcgcggacctgccgggtggccggggaagatgctggcagtggcgggggcggcgcccctgcattg

SEQ ID NO: 179679 - DNA, 122 bp, Homo sapiens
aatgagtcagtaccaccctgctcttcatggcctctctgaggtcagcacctccaggatatccgttcacccaaccaggcagaggcaaggagtttagaaagtgaaattaactatggggtatacct

SEQ ID NO: 179680 - DNA, 122 bp, Homo sapiens
tttgatgtgcagagactggtgagagattgattacaagtggagagagggggctgtatcaagcgtaattcttgggactctgtatgttgatccttaagtaaatggggttaaaggaagagatgatt

SEQ ID NO: 179681 - DNA, 122 bp, Homo sapiens
ggactctgggcccctgctaccgatgggctgggatcccaccagcggcccagaggaggcctccgcacagccgcttgtcagcctggctgcactcatctgggcccttctaggcgccacagccctga

SEQ ID NO: 179682 - DNA, 122 bp, Homo sapiens
caacaaaaggatggaaataacattgtgttgaatttttgttgattttgttaaaaaggagcgcgttgacacatagggggattttgtttctttaagttcatgtctgtttatataaagtttaggtc

SEQ ID NO: 179683 - DNA, 122 bp, Homo sapiens
cctgtgaggcagtctccgggtgcttgatgccccagggtcttttgtcctcggagttgtctccggtgtcattccgtggcaagataccaggtttttgcagagaaggtgctgagttgggaacaggc

SEQ ID NO: 179684 - DNA, 122 bp, Homo sapiens
gtattatgaagaaccagaatttcctgcaagtcaaagtgacagaggtcaagggcagccagccggagccttcctggcaccctggcttaccagccttgtggggtgccaggtgcattatcaatgtt

SEQ ID NO: 179685 - DNA, 122 bp, Homo sapiens
ggccttccagggcctcaagcggttgcacacggtgcacctgtacaacaacgcgctggagcgcgtgcccagtggcctgcctcgccgcgtgcgcaccctcatgatcctgcacaaccagatcacag

SEQ ID NO: 179686 - DNA, 122 bp, Homo sapiens
ggtttataaagaggcactgtgcctgccaagacgagcccagagtcctctcaacggctgctgcggtcacacgatctagaaacacgagtggatccaaagtgggctctcgggactctccttggtgt

SEQ ID NO: 179687 - DNA, 122 bp, Homo sapiens
tggtgggtgcccggctggcccggggcgggaaggggcggcggcgctgtggccttgcgttaccgtgaggagggccttgagtgggttgtcctggtccttggccttttgaacaaagcattgaacaa

SEQ ID NO: 179688 - DNA, 122 bp, Homo sapiens
tctacaccattattataaacaagacattcaaatcaacaataattgaagtgaagcaaagtgcgttgtcctgcacagctcagtgttctccccacatgggtttctttcacgcagccgagagagag

SEQ ID NO: 179689 - DNA, 122 bp, Homo sapiens
tggggaaaaaagaaagaaacggaaccacgcggtgtgcagccttctgagtctggcccctttcggtgagcagtgtctaaagttctgtcgcgtgttgcccacgcgtcggtggctcgctccttgca

SEQ ID NO: 179690 - DNA, 122 bp, Homo sapiens
caacctgctccccactgggagcagcaacccagggagacgccccaactcactccctgcctccggcagtacagccacagatagcgcacccaacccaccccctgcgcgggcaaggtagcccccga

SEQ ID NO: 179691 - DNA, 122 bp, Homo sapiens
aggcagctgcaggctcccacctgcgcagagaataggctgttcacctgcaacggcggctggcgccgggggaggtgggcgttctgggagaggaggagcccctggctgcatggctgtgccgtggg

SEQ ID NO: 179692 - DNA, 122 bp, Homo sapiens
aagccactgcacgtttgtaaggagtcaggttgtccacacaatggcgctattttgggattccggcttctctgcctgtgacctgctgaaaccattcatgccggcatcatgcctattggaaactc

SEQ ID NO: 179693 - DNA, 122 bp, Homo sapiens
tccctccaggctttgcggggagccggagggggaattctgagtgaccactggggcctctaccgcccaccccatccgccagtccccaccagacactgcctggagccagggtcctccccactctg

SEQ ID NO: 179694 - DNA, 122 bp, Homo sapiens
ggtgtggccgccactgctgctagcacagtggagaggcgagtgtgctgctacctgctccagcgaacccccccactctgcaaaggaggcagaccgtgaacatggggggcgggagaggctgagga

SEQ ID NO: 179695 - DNA, 122 bp, Homo sapiens
gcgaagcgcgcgctggggctacgctgggcggggctcacggcggcgtggctgtcggggggccgccgagccgcctcctccgcgctgggtgcccggctggcgctcctcccgcccaaggtgccctg

SEQ ID NO: 179696 - DNA, 122 bp, Homo sapiens
tgagcacctgcccccgagagcacctgctcttccccatccgtccctgtgcccagggcttagcgactgtcctctgcgtagtgaatctggattcccgtccctgttcctcggcggagcctgcccag

SEQ ID NO: 179697 - DNA, 122 bp, Homo sapiens
caggaagtggtcactgctctgttttccaataaccctcaaaacagaacaacaatgcttacgcgaaataacacaagccttaactattatactttgcaggctttaccatttcaatacacttctag

SEQ ID NO: 179698 - DNA, 122 bp, Homo sapiens
ctcctcacctgtggacgggcggccgggctggggaggggccgggccatgggggttggagagcggccgccgccaaggcacaaacgacacagcttgtcttcacccaccgggtgccgcggggcttc

SEQ ID NO: 179699 - DNA, 122 bp, Homo sapiens
ggcctagaatggattttttaaagtgctattcttagcagaatttaaattttcctcattacccgcttggagttaacagctagtggaaattgggtggtagggtgggaaattatgagtttatcaag

SEQ ID NO: 179700 - DNA, 122 bp, Homo sapiens
ggggtagtagagccaggtcgtagtggctaggtgagttgtctcaactaactctagtggagccgccgcagccctggaggagccgggccgcgactcgagagcgcccggcagctctccaatgcttt

SEQ ID NO: 179701 - DNA, 122 bp, Homo sapiens
cgggcccaggtggcgaggaggcgctgcagaggctttccctccgcaagggtcgggccttcgcgcctacctggacaagaacattcacctgggtaggggcagggctgggggaaaacagggagtag

SEQ ID NO: 179702 - DNA, 122 bp, Homo sapiens
ggaagtggttaggagtgagagagctgctggatatgcggagggactgggcgggtcggcttccgaatggaagaggtctgtgagaagttaacctggtgataccgatccgaagagcctatcaagtg

SEQ ID NO: 179703 - DNA, 122 bp, Homo sapiens
ggcagaacgagagaggatcagcgcggagggtggcgggcactggaccgcagaactggcactcgaggtcccaggggccggaatgcgcttggagggagagggccgctcagcgagggcgggacaga

SEQ ID NO: 179704 - DNA, 122 bp, Homo sapiens
tgttcaaagacaagcttctcagaggccctggcttcttatgtggaggaaaacttatctccccgttttgcaggagttaagaagggcaaaagagaatgacagtgcagggagagaaagcgggaaat

SEQ ID NO: 179705 - DNA, 122 bp, Homo sapiens
ctttgggaggccgaggcgggcggatcacctgagtcaggaagagttcaagaccatcctggccgacatggtgaaaccccatctctactgaaaatacaaaaattagccgggcgtggtggcgcgtg

SEQ ID NO: 179706 - DNA, 122 bp, Homo sapiens
gacgctaggactcgcggtcgccatggcaggtctgggggtgccggggggacccacctaggccgcgcgcggttgctaagagacgccggcgttgccctagaaacagacggcgtagcgcgcaggac

SEQ ID NO: 179707 - DNA, 122 bp, Homo sapiens
gccattgctttgggttcgcatttaaagtcttcggtgcagggttttacttgaggctttgtccgctcaaccgccattatggggatcaattggcacgtgaaggaggagtaaagctatatttccag

SEQ ID NO: 179708 - DNA, 122 bp, Homo sapiens
gcagtgggcggcgctgcgtgcgcccgcacgtttctcttgcaggcgcggcccaaacagccgcgctcatttatttagtgttggaggacgcggtttgtcccgttgacagcgtaatttaaagaaat

SEQ ID NO: 179709 - DNA, 122 bp, Homo sapiens
ccgaacgctcacgttaatggcgctccttcctgaaagcaaattggaaagacttcagtttgacggagccttgtcgacttccaccccgccgcccccgctcaaatgcaagcatgacttttccaggt

SEQ ID NO: 179710 - DNA, 122 bp, Homo sapiens
atcttctgacctttgcaatacttcaccaaatgtgtctggaccgcagttctcagtaggtctcgttgctagaatgttcaacaggagaaaaatactggaaatgtacttgcaggtcagaaataaga

SEQ ID NO: 179711 - DNA, 122 bp, Homo sapiens
cgaacacccggtgtcaagagatcttgctgcctccgcctcccagagtgctgggatgacaggcgtgagtcaccacgcccagcctagacacagttctgaagggacaaagggggcctccgctccct

SEQ ID NO: 179712 - DNA, 122 bp, Homo sapiens
tccgacgtccaggaaagtctttcatcctgcttctccctgccttgggccttttcccatttccgcggtcacctgtccacaatggctgcactgtgtggctcttcaggtgttcctaagacactgaa

SEQ ID NO: 179713 - DNA, 122 bp, Homo sapiens
aggaatgtaaccagctccatgcgacctttcctcttttaatttctgctcgggagcatgggacggagaaaaaacaaagcaaaatttgttccccacacggtttttggctttagcggtttggggac

SEQ ID NO: 179714 - DNA, 122 bp, Homo sapiens
atttgatcttctctactcatcccagctgccgcgtcaggatcttttctccccgggcggccacgtgcccctgtcctataggggtttgatgagagagctgccccgggctagaggagaatgagagg

SEQ ID NO: 179715 - DNA, 122 bp, Homo sapiens
gggaaccctctcggatccgagggcaggcgcagagaggccatggcacctaggagacaaacccggaggaaccaggacagtaggaaacaaaaacagcagcaaaagggacgttggggcagcccctc

SEQ ID NO: 179716 - DNA, 122 bp, Homo sapiens
agtcactcaggtgccatccagggcggcggctgaggagtggtgactggccagatgggaaggcggggaagggtctggatttgaatgagagcgagggagtgggctgcaggctggtagactcctcc

SEQ ID NO: 179717 - DNA, 122 bp, Homo sapiens
agcgattctcctgcctcagcctgctgagtagctgggattagaggcatgcgccactatgcccggctaatttttgtatttttgtagagacggggtttcaccatgttggtcaggctgatcttgaa

SEQ ID NO: 179718 - DNA, 122 bp, Homo sapiens
aaaataccagtcacaggaatacaggtggaaacctagctagaggtctccaccccttttattcgtgctctattgtgacgtccaaagcctgacccaaggaactgattcaggtagaggcgacgcca

SEQ ID NO: 179719 - DNA, 122 bp, Homo sapiens
aagactctagaatgtaccatctgtgcaacttgaggcaagttatttcacctgtctgggtctcggttttgccatgaatatgaaagctagtcgtgtcactctaggagaagcggtttgtgttggtg

SEQ ID NO: 179720 - DNA, 122 bp, Homo sapiens
tcgtccacctcggctcggaccagggtctgagcactcagcgtcatcatgtcctccagcgcgcgggcagcctcctggccctgctggagctcctctaatgtcaggccgcccagaccctcctcctc

SEQ ID NO: 179721 - DNA, 122 bp, Homo sapiens
cgtgctccgggttctccagggaggagcggtggacagcaaagagggacagctcggcaatctcgggctccacactggggagcccagtggcttccaggtccaggaagacaaaggtctcggcccgg

SEQ ID NO: 179722 - DNA, 122 bp, Homo sapiens
aaccctgcctcggaccggaaggtgtccccgaggcggtcgcggaagtagaggaagccttcgcggtccatggccagtacgtccccggtgttgtagtaaacgtcgcccgattgccgcacgttgcg

SEQ ID NO: 179723 - DNA, 122 bp, Homo sapiens
gaaagccacgaagaaaacagttcaactcagaccaaaagataaagctgatctcgaggtaaccgcgctcactaatgaagatctcgtggacccgcttgcgaggtataaagagaaacctagtccta

SEQ ID NO: 179724 - DNA, 122 bp, Homo sapiens
gaaaaacactttgcctggagaatttaacaatagtaaactaaacaatgttccaggaataaacgttgggtctatttttagtccagtggtatgcacaaggctagagtaagcctgaaggaatgttt

SEQ ID NO: 179725 - DNA, 122 bp, Homo sapiens
gtcacacggtgcagaggcagggtcctaagagctgctggacccggatccaccctcatacctcggagaaactaggccgagccgtttgaaaatgtgaacaagggcagcgttaacagacaaaagac

SEQ ID NO: 179726 - DNA, 122 bp, Homo sapiens
gctgtgcaggggctcttgggcgtggcttggctcggcttggcataacatggctcaacatggcgctggtgcccagagaacgagagagcgagccaaagctgtccgtcttgaaggcgggcaggggg

SEQ ID NO: 179727 - DNA, 122 bp, Homo sapiens
agtccccacagacatgctgcctgcactccacctgctgagctggctctgaggctcaggagacgtggccctctgtggtcccattgtctccacgtctgtggtaacccggtgcctttctagagcag

SEQ ID NO: 179728 - DNA, 122 bp, Homo sapiens
aggccacgggcctccaggtcggacacggccacagatcacggccacggatcccatcacgcccgggcttcagtctccaacacaaacacctgctgggcatcgggaaacgggaacaaactttggtg

SEQ ID NO: 179729 - DNA, 122 bp, Homo sapiens
gggagagaactgccatagcttgtctctttaatgcgcgcccccggaggcccggcgcgcccccgccactataactggagtgcatggagcaggctacgctcagaggaggaagggcgggcgctggg

SEQ ID NO: 179730 - DNA, 122 bp, Homo sapiens
tcttgggaaatttagagactgccttagaactaacaggagtgctcagtatgatttggcatacggactcttgaatgacatggactgtatataacgtatattggaaaagaatacatttgtgtttc

SEQ ID NO: 179731 - DNA, 122 bp, Homo sapiens
gacccacaaataaaggggagcgcaggggttgcggcgggactaggagcgcggcggggccggcggcagagctgtccggctgcgcggtggcccggggggcccgggcggcagggcaagcagcgcgg

SEQ ID NO: 179732 - DNA, 122 bp, Homo sapiens
acgggactctgcaggatcatggtgacgcgcttcttctgctccatcaggttgaagtcctgccgcaggtccgccgcccggttgcgaaggcgcatgtactcggggtcgtcctctgagaagcggtc

SEQ ID NO: 179733 - DNA, 122 bp, Homo sapiens
gaagagagatggggccgctggcaggggctctccgcagccaccggggatggggctgagggtcggttcctgccccggtgcagccgccgcgggcagaccgcctggcttggccgcagccacagcga

SEQ ID NO: 179734 - DNA, 122 bp, Homo sapiens
aaactgataggggaaagtttcgttttatgagcatattccagctgacaaatgaagaaggtgcgatgagactagactatccccatttggaaccttctgtgaggtgacagattatgatgtaatca

SEQ ID NO: 179735 - DNA, 122 bp, Homo sapiens
gggaaggcttcctgaattacccaggtacaattagtccctctcccttctgcgagattgtaccgttttgctcatttttcttctattctgattgacacatatttattggacacctactatgtgct

SEQ ID NO: 179736 - DNA, 122 bp, Homo sapiens
gcatatttggagatgacctcatccagccgactcatggccaaactccggttttcccgaaggcgccgggccaacacaggatctgatagtgcagggtcaacgcctacgtgggaagacataaagtc

SEQ ID NO: 179737 - DNA, 122 bp, Homo sapiens
gacgacgtgaaaaacatgtttataaaacgagcagatggtgccgagctgagagggaggtgacgcagtgactcaggaaccacaagctctggaggctgaacgagaatcggttacaggagatgaac

SEQ ID NO: 179738 - DNA, 122 bp, Homo sapiens
gcacagccatgataaagaaagtaatttgagtgagaacccacaaaagaaatgccacagaaacgataatctgtccatgacaagattaagtaacaacaatggcaacaaaaagcagatgcaccatt

SEQ ID NO: 179739 - DNA, 122 bp, Homo sapiens
cagacagagagccttgccttggagcctgctcaggacgccgggtggcccattagggcctggcgcctggccagaggccacatgacagccggcttctgcactgtgggtttgtcctgggctcctta

SEQ ID NO: 179740 - DNA, 122 bp, Homo sapiens
gcctggccagcggcttgggtttgctgcacgcacagccccagcgcggcggggtcctccgggcgcactcagcagctcccaagtctttccagcggtcagagtcgaaggactttgggagtaagaag

SEQ ID NO: 179741 - DNA, 122 bp, Homo sapiens
atactaccactcaaaaattctagaaagtgtgctcaactcttcttgcaaagtaatagctaccgaaatcatctaaaaattagtattccctatccccccatcctcctaccagcctttcaaatgaa

SEQ ID NO: 179742 - DNA, 122 bp, Homo sapiens
tcagccacatttagaggtgggaagagcatcacctcattaacgtcattctgcttttcctcacgtggtaaagacccactgagtatgacagagttcaaactccttagtgtgacattcaggggccc

SEQ ID NO: 179743 - DNA, 122 bp, Homo sapiens
caagatcaccaagacccacccccagaaccctcgctagcacgaagcccagccagtcgggtccgggtgattcctgctatgaaggtgggaaagaggacacagtctgtcgccagcattcccacttc

SEQ ID NO: 179744 - DNA, 122 bp, Homo sapiens
ccccctagtcagggcttgggctaccccaaatatcagaagtcgttgcctcctcgtttccagcggcagcagcaggtgaaatcaagttgtttaccctctaagggctgcttttcttcctggcttcg

SEQ ID NO: 179745 - DNA, 122 bp, Homo sapiens
ccccggcccccgggcgcctgggccggatgtcccgatgagagagccggcgctggcggccagcgccatggcttaccacccgttccacgcgccacggcccgccgacttccccatgtccgcctttc

SEQ ID NO: 179746 - DNA, 122 bp, Homo sapiens
cactcgccacggtgctgtggaattctctggtttttcacgcaaggtcaggcgtcctgctggcgccctctcgccaccctgccctcccgtcagaagcccggctcctcgccggggaaggccggatg

SEQ ID NO: 179747 - DNA, 122 bp, Homo sapiens
tcctggggggaaagggagtgtttttattgatcatcagatggctgcacggtgccctggagtcgtgggagtgggtcaggggaaatgtgtggctcccacgggggccgagtgtggcccccgctgcc

SEQ ID NO: 179748 - DNA, 122 bp, Homo sapiens
ggtcaccagcatggggaacgggtagctgcttcagcgcctgctggcagagaggtcgttctccgagtctgctttgccacctagtggtttgatgtggtattgccattcaccaggtagttttaaaa

SEQ ID NO: 179749 - DNA, 122 bp, Homo sapiens
tccaccctggacttgggaaacaaactcaccaacttccatgggctgctgggtgtccggtgccggaactgcacctcagcaccaacctggttatccggggtctcccactccatacgcagctgccc

SEQ ID NO: 179750 - DNA, 122 bp, Homo sapiens
ccacagacaacgtgcacgccggccctggagctcctgccacccccacttcccacagcggctcgtgcccccagcccgctggatgccccccaggcccgtccccgagggttttccgagaagtgctg

SEQ ID NO: 179751 - DNA, 122 bp, Homo sapiens
tgtctaagtgatactgtcacatccccaccccctgaaccctaaagtgcagcctagtggctccgaggtcaatctgtgaggtcaaggccccagaaagctaactgggtctactccaatcagatccc

SEQ ID NO: 179752 - DNA, 122 bp, Homo sapiens
accctggggaggcggcggggagcaggaggggtgtgtgttgtggtgaggaggagcggaagtcggaagctccagccgtcacagccacattcactgggcaagccgactgtgagccaggaagtgct

SEQ ID NO: 179753 - DNA, 122 bp, Homo sapiens
ggagggcgttccccacccggtagcggggaggtgcccagcagggagccgcctgatgaggaccgaaggggaggtccatttgccgaggccctggcgtccagcttcctctttgagcctcatctcct

SEQ ID NO: 179754 - DNA, 122 bp, Homo sapiens
ggagtccacgaaggagctggccgtgctctggcgcccccagctctcgggtgggctgcagggcgccggactgctgcagctgctagcggctgcggcggcggtggcagcggcggcccggcgactgc

SEQ ID NO: 179755 - DNA, 122 bp, Homo sapiens
tgttgatggaaaaagtaatgcgcagcggaggatacagagagaagctttcctactagaagtcgcagagctgcccgttagccgatacacatttgtgatgtaaaaatcacattttaaattataaa

SEQ ID NO: 179756 - DNA, 122 bp, Homo sapiens
aagtgtaggattttgaaacgaaattgctgatttctagttttgtgccaagtcgtttttcttcggaggtgtagttagtaaatgacctgaattcagcgctagtgatcatatctggagtaaacgtc

SEQ ID NO: 179757 - DNA, 122 bp, Homo sapiens
ctgcggggctgcgcgcctggtctaccccaatactgcggggagtgcgtcctcccgggctggcgttttggctgctactctcggcgtcgatcaattatttataggaaacttgggcaagggggcgg

SEQ ID NO: 179758 - DNA, 122 bp, Homo sapiens
gttcccattattggggtgttaggtccactattgggctggtttccttaaagtactgttgtgcggttctggtatacccttagagccgcgatccacaaagcccgtaccgccttattcagctgccc

SEQ ID NO: 179759 - DNA, 122 bp, Homo sapiens
atctcgtgatccgcccgcctcagcctcccaaagtgctgggattacaggcgtgagccaccacgcccagcgccctgcaggtcctttttaaggctgtttgcaacataaatgagacgaggcatctt

SEQ ID NO: 179760 - DNA, 122 bp, Homo sapiens
tttggctggtacccaatcaagtaggctcagaaatggagtttgtcagcactattccttaagcggagacaaaaaataccaagctcatgaaactcataggtaaatcagaatggcacttgtctagt

SEQ ID NO: 179761 - DNA, 122 bp, Homo sapiens
aaattacttttgaaagatcattgatccctggcgtaaatggtgttaagagtaagatggactcgggtagggatgctcaggaatccagtcctgtacagtcatgagcttggccatctggaagtctc

SEQ ID NO: 179762 - DNA, 122 bp, Homo sapiens
ttcccccttcttctgcctggctccctgggtattaacctcacttttgtgaggacgtttctccggagcctgtctttcttttgttttcatttgctgcaataagcataagaaagccattcaaaggg

SEQ ID NO: 179763 - DNA, 122 bp, Homo sapiens
ggtggtgaaagggatctacctggacaccgcagatgaagacttctatgctcggtttgctaccgggtgtgtctccatcccctggcagaatgaggtactgcccttccagcacagccgctttacgt

SEQ ID NO: 179764 - DNA, 122 bp, Homo sapiens
aggcgtcttgccggcgtgtcccaataaaacccggtgcgattggctcccgccttaccccatcgcttatgcctattggcttactttgtcaaaccgggcttatgaaccaataaaaaacgcctact

SEQ ID NO: 179765 - DNA, 122 bp, Homo sapiens
gggcatatgagagaggaggctctgcctcaaacactttctcaaacttttgccgaggggtggcgagaaggtagacttccaggtcccacccgatatagattaagggctggaaacacagtcaaggg

SEQ ID NO: 179766 - DNA, 122 bp, Homo sapiens
gctccttggccagcgggcgcatggccatgctctccagctcccggttcatgatgatggagccggcggccaggcactgcgggaggggacacactcagggaggggcccgggtgagggccaggctc

SEQ ID NO: 179767 - DNA, 122 bp, Homo sapiens
tggtcagatctcaaaaattgtttcttaatatggacacactgcagacacaaaaaaacccaccgcactcttggaaaatatgctatcttccatctgccctgctttatgtcaacaaggtatgagtt

SEQ ID NO: 179768 - DNA, 122 bp, Homo sapiens
ttgtcaagtcggaccaaacaggttgtttctctgcagtttccagtaagtgaccgttccagccggggctgtggctagagtgtgaaggcaaaccggtagaagccgcgccgccattttcttcccac

SEQ ID NO: 179769 - DNA, 122 bp, Homo sapiens
tctcagctcactgcaacctctgcccccccaggttcaagcaattctcctgcctcagcctcccgagtagctgggattacgggcacctgccacgacgcccagcttatttttgtatttttagtaga

SEQ ID NO: 179770 - DNA, 122 bp, Homo sapiens
taccaccattgaagtccctttccctcaggtagagggcagtcattattttaggacaggggacggtagacaaacactagcgcaaaagacagtgcttctttccgtaagagctggagtgtctggga

SEQ ID NO: 179771 - DNA, 122 bp, Homo sapiens
cctttctaggcctcagttgctaaatctgtaaaatgggtctaattggcttacatcagaggccgctggtgctgtctgctgtgaggatatgtgtcatgcctttggtatggggccagcacatatga

SEQ ID NO: 179772 - DNA, 122 bp, Homo sapiens
tggcggggccgggcgccgggaaaatggaggcgggagcggcaggagcgcctcacggccccgcgcccagccggctccctaccccctggccccgagggcgaggctaaccactcaccgcggcagtc

SEQ ID NO: 179773 - DNA, 122 bp, Homo sapiens
ggtgcgcacgcaggaagtgggaggagccggttcccatggcaactagccacccctagcacccggctgccacccaggcgtcccgaattaaaattgagcgcctcactggaggccccatagtgtta

SEQ ID NO: 179774 - DNA, 122 bp, Homo sapiens
agggtaacctcccaggggcacgccgggagttgaagtcctctctcagagggcggaggggatcgcccacctcacgtggctgctggactgatgcctttcttcgtgttttgcttccttctctgcac

SEQ ID NO: 179775 - DNA, 122 bp, Homo sapiens
tgaggcagaagtgctcagtcagaactgatgagtccagatgagaagcttgacttttaaccccggccctcggggctgcaccctaccctctgggaaacaattccagccagaagagtttacactca

SEQ ID NO: 179776 - DNA, 122 bp, Homo sapiens
ctgccctgccctggaagtggcttgtgctctgtgggtgctggcaggctccgaggccagggccgccatctgtcagctggcagagagcttccccggcagggtcccctgcctgggagcctgaggaa

SEQ ID NO: 179777 - DNA, 122 bp, Homo sapiens
attggctcaacattggcagtcattacatatttcagttcactttaaagaagttagataatacgattttgggtcatttcagagaggacatgagtaaatcaggagggagatggtatggtgaacaa

SEQ ID NO: 179778 - DNA, 122 bp, Homo sapiens
atgacagacaactttgttttatagagtctttaataaggtcaccctgccccagggtccactcgggccagaaaaagaaaggataaacagggcaaggggaccttgggtagctgaagcttgaaggc

SEQ ID NO: 179779 - DNA, 122 bp, Homo sapiens
cagccacaccccagctttccagttcctggggtcttttgccaggacagtaggtgtggagtgcgtggtgaagtggagggtggaggtgggaccaaggccgaatttagggacccccagcatgagct

SEQ ID NO: 179780 - DNA, 122 bp, Homo sapiens
tgttctcattgttcaattcccacctatgagtgagaacatgcatttggtgttttgtccttgcgatagcttgctgagaatgatggtttccagctccatccatgtccctacaaaggacatgaact

SEQ ID NO: 179781 - DNA, 122 bp, Homo sapiens
attaaggtcccggcttccggtctataagcaatcatgggaagtgcgagtctcacttccttccggatctggggcatcatggggaatgtagtatttccccgttaagaaaaaagtagtaaatccta

SEQ ID NO: 179782 - DNA, 122 bp, Homo sapiens
aacacatttattcttgggatagtttggacaatcacaaggcaattctaaggaagactcccacgacactgcctaagaccaagatttgggaaaactgattccactgatcactgaaaaatttcttg

SEQ ID NO: 179783 - DNA, 122 bp, Homo sapiens
ttcccactctggaactttctacaaatcttctccccggcagctgggcctcactgtagtgctcgggtcttgcctttgtctctgcgctttatctcggtacatttttattccactttctgggacat

SEQ ID NO: 179784 - DNA, 122 bp, Homo sapiens
cacgggggaaggggcggggggactctggggtcccctctataaggatgttaatcccattcacgagggccccaccctaccacctcagcacctcccgaagaccccgcctcctcatgcccctcaca

SEQ ID NO: 179785 - DNA, 122 bp, Homo sapiens
cgctggagaacaggacacgtgcctgtcgtggcattggggtcgggggtccgggggaggcgccgcactcagggcaggctctggagctccccgggcaccgtcccgtcctgcaggtttgatgtact

SEQ ID NO: 179786 - DNA, 122 bp, Homo sapiens
ctctgacggcctatgaaaccttgcacatcaggcagcttcttcctaaggcctgcctgactccggcgagacttcccgggagatccggaccgaccgcggaaccgagctccaagaatgcctgcgag

SEQ ID NO: 179787 - DNA, 122 bp, Homo sapiens
tcacgctgagcctggccagggtgcgatcgtggtggctctcgcagccgtaggtgccctggtcggccagtatgacaccatggatgaagaggcggtggatgtgcccatcctgggccatggacagg

SEQ ID NO: 179788 - DNA, 122 bp, Homo sapiens
ataactgtcactgccaaaagaagcctgtgaagacatagcaactaaattattagctgggcccggtggtgcatgcctgtagtcccagctactcaggaggctgacgcaggagaatcgcttgaacc

SEQ ID NO: 179789 - DNA, 122 bp, Homo sapiens
gacaccttgggtgagggcatgacgctgaaggagttcatgatgcggtctgggtactcttcccggatcttgctgatgagcagggtgcccatcccggaccccgtgccgccccccagagagtgggt

SEQ ID NO: 179790 - DNA, 122 bp, Homo sapiens
ataaaaatcccagtaaaaccatttacctttctttgcattatatataatatacatttataacgggcctggctgcgggcggcggggccgagggcagcggaggggtcaggacacctcgatgacct

SEQ ID NO: 179791 - DNA, 122 bp, Homo sapiens
aattctgggcagctccacatgttggagatgccctatgatctcaagggtcttgccttttaccggaagaaaaaaaatcactagcaataaaggtcacgttgtgctagttaagcaaacaatcaaca

SEQ ID NO: 179792 - DNA, 122 bp, Homo sapiens
cctcaccacagctgtccaggctgcagcccccagccacggcggagcaggcggggctgggaccggagaatagacgccttcatgccacagcccctggctctgggctgtgcctgggccccaccctg

SEQ ID NO: 179793 - DNA, 122 bp, Homo sapiens
cagcagcgggtctgcaagggcagtgatcagcagtggtggacggcgactgaaagctcagctcgagccagaacaagccagaacaaaaacggactagaagagtgtgaagttgcaagatttaacag

SEQ ID NO: 179794 - DNA, 122 bp, Homo sapiens
agcaggcacaggagaccttccgcgccgccggccgggcgaccccgcaggaagtaggaaggacgagcgcgcactacaagtcccagaagcccccgtttcctggagcccgcgccgtgccgcgctac

SEQ ID NO: 179795 - DNA, 122 bp, Homo sapiens
gctctgccctgagcggcgtcctcccgcgtggccctgaatctcggcgacttttttcttccccgtctcaggtatcaaactagcatggctcgcgcctcctagcaggacttggcataataaaacga

SEQ ID NO: 179796 - DNA, 122 bp, Homo sapiens
attttttttggaaggggagctaaaagaataagtcccagcaacaatttattgcattatgatcgcagatctaggctgttaatttaatttgcgtgtttgtatatagttatttcccaatcttacta

SEQ ID NO: 179797 - DNA, 122 bp, Homo sapiens
aaggtgcaataaggtgtatttctattgttattctgtatttcagagacagggcaaatccgccgttgtgacgaaagtgcagggacaaagcacaaactcggctctggtggaccggatacggaaaa

SEQ ID NO: 179798 - DNA, 122 bp, Homo sapiens
gtgtgcctccacggttcacccgcctgcatcacacactgatgtgtgcctccacggtgcacccgcctgcatcacgcactgatgtgtgcctccacggtgcaccgcctgcattacacactgatgtg

SEQ ID NO: 179799 - DNA, 122 bp, Homo sapiens
tccgatcatactagagcgctgctcctctggacgcttccccttacaaagatgtgagccaagcgtcgcctactgtaacgtgggaggggtgcgaatctcgggcgttggggtccggggtggaatct

SEQ ID NO: 179800 - DNA, 122 bp, Homo sapiens
agccgcgcaggggccactagggaggggctctggcggggtcgcaggggcgtggtctgcgggcgtgggggcgggacctcggggcctcgggggcggggcctgagggcgcgcgcacgcgtccggcg

SEQ ID NO: 179801 - DNA, 122 bp, Homo sapiens
cgtccacctgaaggtggttgggggaagaggggagcgctaagggatcctgccctgcctggccgcccaggttcctgggctccctaaacggctccgcccctcacccagcctggcaccagggcacg

SEQ ID NO: 179802 - DNA, 122 bp, Homo sapiens
ctaattacagactgtaagatccagtctttagttttctagtaaaaggggaaaaggctttaacgttgctccacatgttccagggtgttgtgaagaacaaatgaagcaatatgtcagtcctttgc

SEQ ID NO: 179803 - DNA, 122 bp, Homo sapiens
gctcctgcgaccgccctgcgcttcgtgcaccggggcggtccgttgccaaagccaggtgagcgagacagaattatctctggtctgtcccagcagggtctccagatctgaacgcatagcctcgc

SEQ ID NO: 179804 - DNA, 122 bp, Homo sapiens
ctgctctgcgctgattggccgaggcggacgcggtaccgtagagcagcagccaatgggaggcgccgaccgcaggctccggggcgggggcggggtccggagggccggggccgcaccgcccttcg

SEQ ID NO: 179805 - DNA, 122 bp, Homo sapiens
ctgagccgcaccaggaatttgggcttatctgccttccaatccagctttatctgtctcagacggttttctttgcagttgtactttgctgatcctatcacatcgattccaaccagaccccatgg

SEQ ID NO: 179806 - DNA, 122 bp, Homo sapiens
tccttattttcatgtaattatggagagaatgcagagtggcagcttcgaagaccatccctacgattgcagcacctaagtgctagggccatttttaaaatgatttttttcaaatattatgccat

SEQ ID NO: 179807 - DNA, 122 bp, Homo sapiens
ccggatgaaaagtgaaaggagagggacggggcccaagctgagggtttcttcctggtttctcggacagctcctggaccaagactcagggaacattgagacagagcgtttgtcacaggaggagc

SEQ ID NO: 179808 - DNA, 122 bp, Homo sapiens
tgaggtcttcacccccacttgcggattcccagcaaaatagggtgtgcgtgtgtgtgcacgcgggcaggactgcctggtaagaccgcccacatcccacctgcagtgactgtggtcgctttgca

SEQ ID NO: 179809 - DNA, 122 bp, Homo sapiens
agaaatcccctaagagtcaggtacggaggtcactgcagcgacttcagcgtgcagagaacgcggggacctaggaagaggacgctccagcccaactgagcgtctctgattggccgccagctcag

SEQ ID NO: 179810 - DNA, 122 bp, Homo sapiens
aggccatggcgagagagagcaaggccagcttcagtgggggcttctggagccagatgtgttcgccatggctgcctggaggtatataaagggccagggtgaggagaaagagcagtcagcgtccc

SEQ ID NO: 179811 - DNA, 122 bp, Homo sapiens
gaccaccaggcctcagccctgacgtgcccagggtggtcggggcccccgctgctgcccggccggctgctggccgggctcctgctgcacctcctgctgcccgccgcagccttcctgctggtgct

SEQ ID NO: 179812 - DNA, 122 bp, Homo sapiens
tcgcaccatctcccctacctggttggttgggttgtggggttccaggcgaccgccaggtggcgcaaccgacgcgcctgccgcgccaagctgggtggggctggactcgtccggtgatggggccc

SEQ ID NO: 179813 - DNA, 122 bp, Homo sapiens
aagacattcctgtgggccatggcacaccgggggggatcaaaatgtgtacttgtggggtctcgccccttgccaaaagccaaaccagtcccactcctgtcattggacgtttcttcccattccct

SEQ ID NO: 179814 - DNA, 122 bp, Homo sapiens
caaacatgaagctgcctttagagatggccacagttgtgccagcccctataacaacctcagcgtacccagatgttagatagacccaaaagatcgcataggcaggccacaacagcagctcatat

SEQ ID NO: 179815 - DNA, 122 bp, Homo sapiens
ctctgatgagagaaaaaaatgtgctaagtactgctgagttctggagggccacaaacactgcgtgaaaaacatctaggatgttttcactcttgttaaaaacgcatgttttagtactaactcat

SEQ ID NO: 179816 - DNA, 122 bp, Homo sapiens
atcccaagctcacgaggcggagcaaacccccgcgaccccgtggtgggggcttggggcccgcggactttgccccctggtggactttggtctgagcccgccgccctccgcgccactccaggccc

SEQ ID NO: 179817 - DNA, 122 bp, Homo sapiens
gaggagcgtctctgcccggccgccccgtctgagaagtgaggagaccctctgctcggcaaccgccccgtctgagaggtggggagcccctccgcccagcagccaccccgtctgggaagtgagga

SEQ ID NO: 179818 - DNA, 122 bp, Homo sapiens
gcgtctccctggaggggctgagtcgcagggtgtgtagggcaagtccgtggagggctgagtcgcagggtgtgcagggtgactccatggagggctgagttgcccgccgtggtcagatccctggg

SEQ ID NO: 179819 - DNA, 122 bp, Homo sapiens
attctcataaggagcttgcaacctgatctcttgcacacattcagttcacaatagggttcacgctcctaagagaacctgatgctgcagctgatctaacaggagatggagctcaggtggtcatg

SEQ ID NO: 179820 - DNA, 122 bp, Homo sapiens
agcattcatcactttttatcttatattacagtgagctcaatatctgtctatatctatcttcgactgaaaagtgtgttgaagttgagtgccgacatgtaagacattcaatttaaagctttgtt

SEQ ID NO: 179821 - DNA, 122 bp, Homo sapiens
ggttcccagctgggtgctgctcacctgctcttccctgaattgactgggtcttatggccagcgtggactggacagaaataaccaaatctgagggtagcccagggtcctgggtgggcttagctt

SEQ ID NO: 179822 - DNA, 122 bp, Homo sapiens
agatggatggacaatgagtgggaaggtgaacaaggtccgtctcactcggactgtaagtcacggcagtttctcgatccctggcccctggcacagagcaggccctcagtattcattcatccccc

SEQ ID NO: 179823 - DNA, 122 bp, Homo sapiens
aacgcgtccgccgaagttggagccctgcaaagcggggttcccttctcttaccctttctgccggccgcgtggtgcgcgcagaccccggcccgagagcaggcgccgcagtcgtggagtgcggcg

SEQ ID NO: 179824 - DNA, 122 bp, Homo sapiens
cggcgtcctctctgtggaaaacaacaggcgggcgggtgagcgggctgctccgcagcggggcgtgggcacggcctgggcagagccgggggctcttggcaacctcttgtctcccgcgcctccct

SEQ ID NO: 179825 - DNA, 122 bp, Homo sapiens
cctgcggcacgccacggcgttctaaggcctcccagcacccgcgcgtcgccgcttagaacccgcccctggtttgcgcgtcacaacacccgccaggcgccgactcagtctctaccctggctccg

SEQ ID NO: 179826 - DNA, 122 bp, Homo sapiens
cgagggaagcggagcttcagtcaagtgagcctgactcccggctggcactctctccactcacgaatgtgcgggtggttcccgcagggaaaccccagcgccatctgacttcagggagagagtgg

SEQ ID NO: 179827 - DNA, 122 bp, Homo sapiens
agccccagtcttagccacgtcagggtggtctaggagaactggatcgaagtagataccttacgggcaaaggaagccgaccacctcatggaagagtctggtgtatacaggaaaagagtgaaagg

SEQ ID NO: 179828 - DNA, 122 bp, Homo sapiens
cggcgcatctggagttgttagttcctcctgtctggagttgttcattcctcccggtgggttcgtggtctcgctggcctcaggagtgaagctgcagaccttcgcagtgagtgttacagctcata

SEQ ID NO: 179829 - DNA, 122 bp, Homo sapiens
gcctcgcctcctagcacgcatgcccctcgcctcgcctcctagcacgcatgcccctcgcctcgcctcctagcacgcatgccccattgtgcatgccaaatggctcacatggcgcaggctccacg

SEQ ID NO: 179830 - DNA, 122 bp, Homo sapiens
agcggccgaagtcgaggggcagcaggcgatcgtggctgagccggatgaggagctgccctgcgagctgggccacggcctgggccacggcgggcaggcggccttgcagcaccttatgcaggttc

SEQ ID NO: 179831 - DNA, 122 bp, Homo sapiens
cggccaagcctctgggccgacaatgggtgtgcggcggtgtaggctgagcgccctggactgcgtggcgggggatgggggtcagtgaagctgccgtctgagtctgaactccaggtgaagacacc

SEQ ID NO: 179832 - DNA, 122 bp, Homo sapiens
aacgcggtaaccaagattcctgctgagcttaggtcacagtgtgactgcaggaggaccagccgcgatgggagagtgcctcttaaccatcccagttatcaggtcccccgggggaggctggggac

SEQ ID NO: 179833 - DNA, 122 bp, Homo sapiens
ccttcctgggggaagggagctgccttctgtccctgtaactgctttccttatggcccagcccggccactcagacttgtttgaagctgcactggcagcttttttgtctcctttgggtattcaca

SEQ ID NO: 179834 - DNA, 122 bp, Homo sapiens
tatttatagttcttctggtcacatgcattttactaatcagaagccatttttgtcttgagccgtgttgccttataacacaagggacactctacctctatctagtttccagcaaaatttttcta

SEQ ID NO: 179835 - DNA, 122 bp, Homo sapiens
gaggaaggcagcctctcttacaaatcccaattcatctccagccttaccttacgctgctagcgcaaacccagaggctaaggggccctgctctcagcggcagcagcaggggcagcggcagcgac

SEQ ID NO: 179836 - DNA, 122 bp, Homo sapiens
gcgtagttgcagagacacggtctgctttccaggcttgggaagtcccagcacttaactctgcgcgtcggtgtcgctcgtttgccagccagactataaagtgcacccaacggtgtatgcgtctc

SEQ ID NO: 179837 - DNA, 122 bp, Homo sapiens
ctacgtcctcgccgttggtggtggtgatgcccagataaacgtctccaaaggagccagacccgatcttccgcaccagtttgtatttccctcccacaacgagttcggctttggagccgctgttg

SEQ ID NO: 179838 - DNA, 122 bp, Homo sapiens
ggtcagggcatggtcttgctggaaactggctatttgccaaaatgtagagaggtcaacaggcgcccaaagtcaccctgctggctttgtaaatgccacagagactcccacataaaagtccagac

SEQ ID NO: 179839 - DNA, 122 bp, Homo sapiens
tgggaagactacctgtggccctgatgctgtttcagagtgatgtgctggccattgcaaaggcgccctccagtgctggttgtggttggttttccatcaggtgcacctcacctggtaaaggggcc

SEQ ID NO: 179840 - DNA, 122 bp, Homo sapiens
catatgcgactgtggatcgcagctggggatgtgtcgcgtcccctcggtgctcagcctctgcgtatccacggtgcccataaacacagcgtccgctgctccgaacctcgctcttacccagccct

SEQ ID NO: 179841 - DNA, 122 bp, Homo sapiens
gaacctctccccagcctcctgtgcacctgctctggggcgggagcctgtgctgggtgtatccggagcgccccctgcagcccagccccaaccatgcagggaggtttctatctgagctgacagag

SEQ ID NO: 179842 - DNA, 122 bp, Homo sapiens
ttcagcaggacttgggctggagctgggctgattcattcggggctggaactcgaacgctgacgttggctcctgagccgggcgctgcctcgcgcctgattggcgggtcctcggggccgccctcc

SEQ ID NO: 179843 - DNA, 122 bp, Homo sapiens
ggtggctgcatttttccggctgcttctccccccgacctcttccgtttcttgctcctccatcgagacagcactagactcgccagctccgcttttatccggtgcccggagcctgcgcactggag

SEQ ID NO: 179844 - DNA, 122 bp, Homo sapiens
acatatctccactattttcttacatcatttgtactcttatcttgcttttcatatttttctcggtcataagccattttcttcagcaatttcttcatggctcttttatcctttttatgattttc

SEQ ID NO: 179845 - DNA, 122 bp, Homo sapiens
tgacctcgtgatccgcccgccttgacctcccaaagtgctgggattacaggtgtgagccaccgtgcccggcctggatcatgccaatcttttgcttaacaactttcaatagctccctgtcactt

SEQ ID NO: 179846 - DNA, 122 bp, Homo sapiens
tcctgcgcacctgcgggcgggcggggagcgggcagcgttagcaccgttagcacccctccgcggcgcctctgccgccagcccgcccctaacccgtcccagcacggcggctcgctcctgtaaac

SEQ ID NO: 179847 - DNA, 122 bp, Homo sapiens
gcctggccccacccggcccgccgcgccgggacagggagaccacggcgctcggagggaacccggcccccaacatcccgcgggccgcgccgcgctcagactccccagctgactcctcctctcca

SEQ ID NO: 179848 - DNA, 122 bp, Homo sapiens
agagcacactgctggctccaggcctcgccgtcctggcagcagcattccgtgtaggtggtgcggtgcccacgcaggggttcgctgcacacatcattggtgacttttttccagcagatgtccat

SEQ ID NO: 179849 - DNA, 122 bp, Homo sapiens
cggtgttgagcgagcccgtgctgttcctgaagccgtccacggcctacgcgcccgagggctcgcccatcctcatgcccgcgtacactcgcaacctgcaccacgagctggagctgggcgtggtg

SEQ ID NO: 179850 - DNA, 122 bp, Homo sapiens
tcgaacccacgccatcgaaatgactggagcctaaatccagcgccttagaccactcggccacgctacctcccgatcgtagggcttcctatgccggcatattagtgtgatgacggaggcgcccc

SEQ ID NO: 179851 - DNA, 122 bp, Homo sapiens
tgtttttcctctatcaacagtttggtgctatcagcctagcttccactggcaaatccatcacgttaagctgaaagaagtcacacctgccaggcccaagctgtttatctcaataatttccccac

SEQ ID NO: 179852 - DNA, 122 bp, Homo sapiens
tccagcagccgcgagtgccggcgtgcggggagaactggggtgctgcccgcctctgaccgccgcccctgctgggcagggaggaggaagccgcctcggacttctcttattgcagtcacggccgg

SEQ ID NO: 179853 - DNA, 122 bp, Homo sapiens
gcctgagtcagaacatatcatcaagctctgctcctattaatgacttaagagcagctgactcgattcactccattaccttctgagggaggaggcagagagcaggaacagaagctgcttagggg

SEQ ID NO: 179854 - DNA, 122 bp, Homo sapiens
gtttctgcggcgattgaacagccgagctttgcggccgggatcgcggaaagtgatggctgtcgtcccggcgtctctctcaggacaggacgtggggttagtctagcttttctcctccccacttt

SEQ ID NO: 179855 - DNA, 122 bp, Homo sapiens
gccccaggggagcagggtcaggagttcatggtgtctgtcctatgtggatttggcagccagcgctgtgatggtgccacgctgcggcctgttggcgtgcagccctctttcttctgggccagcaa

SEQ ID NO: 179856 - DNA, 122 bp, Homo sapiens
ttagggaaatatttgaaattggaaagttccagaaaatctgggatgcatggttaccacaaacggatgagggactgactatataatcataagaaccaaagctaatcaggatggccaaaagtcct

SEQ ID NO: 179857 - DNA, 122 bp, Homo sapiens
ggcggggcgggaagagagagcgcgggaaaacgtgactcctgattggccagaagtatcccgcgcctcccgacctttggccgctggcattcctgcgcgggcgggagctgcgggcgctcggggga

SEQ ID NO: 179858 - DNA, 122 bp, Homo sapiens
tagccatccgggctgcagacaccaggccttaacttccaattccaagagccctgcggtgcacgcctcttacccggcggctggcattgcagcaggtctcaggccaggcagatttacagcatatt

SEQ ID NO: 179859 - DNA, 122 bp, Homo sapiens
tgtagaggcggggaaagggaacccagaattaaggcgggctagaatggggcaggcggtgtgcgggcccgtttgtctgtttaatcctaacacattaacaaggggtgggcaatcgcgtccactac

SEQ ID NO: 179860 - DNA, 122 bp, Homo sapiens
tattttctcccattagctgtgaaatttctgtcttaagtacatcacaagatttttctgtcacgagaacatggaaagcaatcagacctggatcacagaagtcatcctgttgggattccaggtgg

SEQ ID NO: 179861 - DNA, 122 bp, Homo sapiens
actaactgcaaagaaatgcagtgaatccagacttaaccccaaagcaaacctcaccagtgtcggggcttggagtcgtgctttgaaatgactgtcattgtctggctatgtccaagccaaggagc

SEQ ID NO: 179862 - DNA, 122 bp, Homo sapiens
ggaaagtcattggaaaggcttctctctttgtttccttgtgtgggtgatttctaaaatcctcgtaacgtgctggggatcccacggaattgctgtgctccagcgctgggggattgtgtgtgcgc

SEQ ID NO: 179863 - DNA, 122 bp, Homo sapiens
gtggtctggagtctgtgcagcattttcagtgttgctctggggatcacgatacacaatccacggacgcagctcactgtagtgcagtggagtcggcgctccacccacgaaggcaagtgctgaag

SEQ ID NO: 179864 - DNA, 122 bp, Homo sapiens
atctgctctccagcatcttctgtttcctggcaagtgtttcctgctactttggattggccacgatgggctggagctgccttgtgacaggagcaggagggcttctgggtcagaggatcgtccgc

SEQ ID NO: 179865 - DNA, 122 bp, Homo sapiens
accggccagctggcgtctagctacaagaggccatgcaacagtgggagtgggtggtggggccgggcgggcaggagcagcccactctgcgggggtgtggggacagacacgcactctatggaagt

SEQ ID NO: 179866 - DNA, 122 bp, Homo sapiens
gcccagggcgaggagtggcttccaggaagcgggcggaggagcgttccagccgagtcccgccgtcgccgcggccccgcgcgctccgagcggcccgggcctggccccacacggcgtctcttcgc

SEQ ID NO: 179867 - DNA, 122 bp, Homo sapiens
gatggggcaaagcacccgagccagatggaggcggcggcggggggtggcgtggggggcgtgcgaaagaaactcggggctggcgcggaggccgagggtccttcgcggggggctgctccggagtg

SEQ ID NO: 179868 - DNA, 122 bp, Homo sapiens
gggtggggaaatgggggtctgtctccatggattcgttccaaacttagacccaaatcccgccgtgcagtgcgtccaagcaggctcccctcagctccctaggccatggctatcctatggcttag

SEQ ID NO: 179869 - DNA, 122 bp, Homo sapiens
caaccagggggccacggatcctaattggattcctccagcctagggccagactgcagcccacgggatcaagggatcagtggtaatgaggttagcaggcgccggcccccaccctgtgaggcacc

SEQ ID NO: 179870 - DNA, 122 bp, Homo sapiens
cctcacccggtaaccccgggcgtgccccgcacacagttcacccccaccgagcgcctcccccgggacgcccaccacccagcgcggccgcaccacgcgaggcttccactcccacccgcccagct

SEQ ID NO: 179871 - DNA, 122 bp, Homo sapiens
ccagatgtttcctcctcttgtttcatccatccagactgtggacctgaagaatttctgcctcgtcgtgagtagtagttttgtacatctgctggcaaagtctttctcacggcccagctggatgc

SEQ ID NO: 179872 - DNA, 122 bp, Homo sapiens
gggagcggagccgtctgcagccagtgcctgcggcggcgacttgggtgggccgaggaggcacgggggcggggaaggcgggaccgggagtaggggggcggagccgactcctgggagttggggag

SEQ ID NO: 179873 - DNA, 122 bp, Homo sapiens
cggcccaggtgccggagatgaatgagccccagcagtccaaggtgtgatgtgggaagacaccgcagagctcactcaccgggactcgcccttcctgtgctcttacagatccctctcaacaatcc

SEQ ID NO: 179874 - DNA, 122 bp, Homo sapiens
tgggaccccgtcctcaggggcgccaggcattgaagcagcctcggtcagaatctaccctgccgcttccggccccgcaacacaggcagttcgcaccgcgtctggggccggaagagccactcagc

SEQ ID NO: 179875 - DNA, 122 bp, Homo sapiens
ccccgcctcgtcctggtgacgtcacagagcaatgtccaatgggaaagcagctcggtgtcacgcacctcctatcccggcgggcaccgcctgcgccgcggcgagtgaggcgtcgtccgtactgg

SEQ ID NO: 179876 - DNA, 122 bp, Homo sapiens
tggagccgggtcctgtgtccgcagtggctgctgtcggggggtcgcctgttcgcggaggtgcggagagactccttgggggtcgagcacataacggggttcgggtgtctcgtgtgtgaacatca

SEQ ID NO: 179877 - DNA, 122 bp, Homo sapiens
gaagccagaggggacaaaccttcacgtcccatttaccgcatcccccaaaagcaacaaaaccggctaatatttctggggctctaggaatcccaatttgtaatcactgactcgcacgctctgga

SEQ ID NO: 179878 - DNA, 122 bp, Homo sapiens
tgttttggggagggtctgggaagctataggcgctggcgtactccgcagccctggccgggccgacctggggtctcccactcgtgcaggcccaactagggctggacaggcattggggggtgcac

SEQ ID NO: 179879 - DNA, 122 bp, Homo sapiens
ccgggcagcctctcatgctgccccatggccatggctcagcttttcattacagaatatcaacggaggcccaaaaagcagtgtacggagagcataaagccagccctgagcgggcacccaccatc

SEQ ID NO: 179880 - DNA, 122 bp, Homo sapiens
ctcagagagcacgtaagcacacagctgtgcatccactctgagggtgagccaccaagcacacggtgaccccggggagcgcccgaagggagtgaagtatctgaaggaaagaaggaagtgagcga

SEQ ID NO: 179881 - DNA, 122 bp, Homo sapiens
gcagaggccgccggacaaggaacgcccagggaaaccttctcagaactaactcagctccggcgctagcagcagaagccgagtctttcataattgtgcgaccaactcctccgggtgactggcca

SEQ ID NO: 179882 - DNA, 122 bp, Homo sapiens
tcatctcgggtctggggtcagaaaacatcaggttagcgctgctcacgagcccacctgttgcggtttgtaaacggacgtcacccacagagtttctcgccatgttgattctttatctcacgttg

SEQ ID NO: 179883 - DNA, 122 bp, Homo sapiens
ggtgtccactcagcagggacttctagcaccctccttcctcctaaagctcgtggcagtggccggctggggcgatgaagagctgaccccacagtgcagccaccaaggccctgacgtggcatctg

SEQ ID NO: 179884 - DNA, 122 bp, Homo sapiens
ggaggtgccttgggttcagggaagcttgccacctgcacacctgaaccaggaattgggccccggaatctcagcccctgcccaagcaggaaggatagggaccctggccctcgccaggtggtaaa

SEQ ID NO: 179885 - DNA, 122 bp, Homo sapiens
caggatgatgaggcgtgtggctctgaatgagtaaggcttcctgagtcttgacaccagagacgactatggtcccattgggaagagaaactcgagagggggagctgcacttctggctctttcta

SEQ ID NO: 179886 - DNA, 122 bp, Homo sapiens
tggcagggcgggctcgaatcaggcagggtgctcctagccttgtcaccggacaccgaagggcgtcacgggcagtggctggcggtgtccttctgagctaagctgggtcctgacctttcacactt

SEQ ID NO: 179887 - DNA, 122 bp, Homo sapiens
gttttggtcaagcagggtggtcccacaggattgtagcaccagattcttactgtcctctcccgggttagttgtgtttggacgcacatacaccactgtgtggcagtcgcctgtggcattcggta

SEQ ID NO: 179888 - DNA, 122 bp, Homo sapiens
ttagaaaagattttcaaatttctgatgtttttggtcttaacagcagattttaagattgtgcggaggttgtgtctgagagataaaggcacccaaggcatcttatatgatatgcactcattaac

SEQ ID NO: 179889 - DNA, 122 bp, Homo sapiens
atgggcctggggtggtccaataaggttaggaccaaggtggctggagcatcatgagacaagcgtggtacttagcttgcctttggttaagtcactttctctatttgaatttcagtttctcacct

SEQ ID NO: 179890 - DNA, 122 bp, Homo sapiens
cccttctctcccaggggatcagacgttctgagggccgcagatgggcgtccagccctggcccgcctttgagagccgggttcttgagatgctgccatggctggctccttctcacttgccgccat

SEQ ID NO: 179891 - DNA, 122 bp, Homo sapiens
gaggcagaagcagagaagtgcagctgctgccagtgagaaggcacccctccgtgtggagcacgtggagatagtgccaggtggctcagtgccacctatgcctgtggtgaagtgtggctggtgtc

SEQ ID NO: 179892 - DNA, 122 bp, Homo sapiens
gttcctgctgccctcaaggtcgtgcgtctgaagcctacaagaaaggtgagtcccagcttacgctgcaccatctacttgggagatttcaggcctgctgagggacctggggacctggagcctgg

SEQ ID NO: 179893 - DNA, 122 bp, Homo sapiens
ttagtcaagctacctgttgcaaagaccactttagctccctaattcctaactggtgttcagcgtccgctttgtttatacctccttatcacccatatgtcatttatagtcagatagaatgatct

SEQ ID NO: 179894 - DNA, 122 bp, Homo sapiens
gcgggcggcgggcgggggcggggctctccttgctggccctgcgaacgaacgagcactgttcgtggttagaaaagcgaagtgctgtaaaaacccgggccttcacgaaaagcgcctacggttag

SEQ ID NO: 179895 - DNA, 122 bp, Homo sapiens
cctccccaacaaacagtacctgggatggagccctagggtaatcgcagccacgggatgggtcgaggtgacaggcttcagggaccacacttcggcctttgcccgaccttccacaacttaagcga

SEQ ID NO: 179896 - DNA, 122 bp, Homo sapiens
cctctgaagaaagcaatcttttcttatttatccctgtatcaccacaacatgatatgtttgcgataaatgtttattgcatggatgtaattgagataaatttacttttctgtccttggccaagg

SEQ ID NO: 179897 - DNA, 122 bp, Homo sapiens
aaggcacctggacaccaggaaaacatgcttttcccaccaaaagctccagatggtcctgtccggtcctgtccagtcctgtatcaagatgccagtggggaaactgagtgcctgttgaggcaggc

SEQ ID NO: 179898 - DNA, 122 bp, Homo sapiens
atcctttcagtccgttgggtggtgaccagccaatgggccggatggataggacgctcctcccggagagtagtgagacccctggtgcggggcgattggcggcgggagcgatgagtggcagccgc

SEQ ID NO: 179899 - DNA, 122 bp, Homo sapiens
cggcaggggtttataaagtctcctgtaaacaggaagtgtctcagtctgatgtaactgctacgcagtacgcggacggcctctctttccgtcttcagcgggtacgtgtcttccgggcagccctc

SEQ ID NO: 179900 - DNA, 122 bp, Homo sapiens
gcctactgtgtggcattcagcatcatcttgttgctgctattcattgtggtgaagagaatacggcagcaggtaagtctgatctgggcccagagcacagaccgtaggcgcagctcatctcttca

SEQ ID NO: 179901 - DNA, 122 bp, Homo sapiens
atctctgccatgagcagcgacagcaaaaagatcttgtcctcaggcacgtcgtggtcctaccgagtgtattgggcaggtaaatcccacctctgcctgaacctgccccgcctacccagggctca

SEQ ID NO: 179902 - DNA, 122 bp, Homo sapiens
tgctggtgcccagctgcggcgcggggagccgcgcagtgcacggcaggggcagggacccagcgccccgaggccgcagtcccgccccagcccgtccctggcccaggcccaggcccggcggtgga

SEQ ID NO: 179903 - DNA, 122 bp, Homo sapiens
ttctccagtacttggcttctgtagcagtctagctttctccagcactgtgctctcaccaagcgcactttatctaacaggtagaaagcatggctttctctgccacttggttcctgtatgggtag

SEQ ID NO: 179904 - DNA, 122 bp, Homo sapiens
aagggaatccttagccataatttgagagagacactgctttcagggataagtaatgaagttcgaatcctgtgagggtccacagcagcctattatggggagctttcaagaattctgaaagttta

SEQ ID NO: 179905 - DNA, 122 bp, Homo sapiens
gcacctcggggcttcctcttcatctttccttttattcgccggtcgcttgcccttgttgggcgccccacagatggccaagacgggccggtccccggaagttccccgtctgatgatgcagggaa

SEQ ID NO: 179906 - DNA, 122 bp, Homo sapiens
ccggaggttttgtttatggttgggttcgcggcctagtgggccgcgccagagccggggcctcgatttgggagcgtggccggggcggggcttggagcagccgtaggaagggggggccatgcggc

SEQ ID NO: 179907 - DNA, 122 bp, Homo sapiens
ggttacttttctggtcagcgatgctgctcagacacacccagccgggcgcaccatcagaggcggcacacgtcaggcaggtgtgagcagctcagggctaatgaaagaaaagtgatggtgccaga

SEQ ID NO: 179908 - DNA, 122 bp, Homo sapiens
aataaccatttgttgatttaatttcattttaggaaatttcaggctgagtgcggtggctcacgcctgtcatcccagcattttgggaggccgaggcaggcagatcgcttgaggtcaggagttcg

SEQ ID NO: 179909 - DNA, 122 bp, Homo sapiens
gccagtgtgagcacacacccatcacggtgggaggcagactgagtgtgagcacccagcagacggagcaggaggctggtgaaggggtggtgttgggcacataaaggaggtctggagggatcaca

SEQ ID NO: 179910 - DNA, 122 bp, Homo sapiens
atcacagcaaccagtgagtgagtcctctggtgccctgaggaggttgtgagccacttgactcgtgtcacaaagaatggagtaaactaacaactctgaaagacaagagggtggcagcattgctg

SEQ ID NO: 179911 - DNA, 122 bp, Homo sapiens
tacgcatgcgacttcccggtggccatctttactgtgggctgaagcctgtgcgcttactcgcgcatgtgcaagccttccctcgctttcctcttccaagtagccttgcctagagcggagcctcc

SEQ ID NO: 179912 - DNA, 122 bp, Homo sapiens
gggttgattccttagcaaacttgaattactggctaaaaaatgttatcatttggcaaatgtcgataatttgagtatttcacatttcaagggatactgagattgcagctttacaaagaactctt

SEQ ID NO: 179913 - DNA, 122 bp, Homo sapiens
tggtcacaaggatgagagggagcaaggctatccccaaagtagcttggttttttttatgggcggtctcccactgcacccaacagacatgggggaagcagcacttccgcagaatccctgctgct

SEQ ID NO: 179914 - DNA, 122 bp, Homo sapiens
gtgttactacttaacactctatagagaaacagccacataactctggcatgagctgggtcacggggtgttgtcacacacccactcgcctatacttttcttgatgtgaatatttcttggatgaa

SEQ ID NO: 179915 - DNA, 122 bp, Homo sapiens
ggttggggagggtctgttctttctgtccacccctgggaagtcttgcctgcccagaactggcgcctatataggaagaaatgaagatgctcccgtgggtgcttctcccccacctcgccaccaca

SEQ ID NO: 179916 - DNA, 122 bp, Homo sapiens
gacctccccactgggcactatgtcttgtgcctgcaatcccagaactgtgggaggcagagacgggaggatcgcttgaacccaggaggctgaggttgcaatgaactacgatcccaccacagcac

SEQ ID NO: 179917 - DNA, 122 bp, Homo sapiens
atcgggcacagttagtgcggcgaataggctgcgcgtggtggcggccctttttggcacgaccgttgttccttcttttctttgtcatcttggaggcacggaccggagagagatattatttcttt

SEQ ID NO: 179918 - DNA, 122 bp, Homo sapiens
aaaggaagaaaatgtcattttccttaacctttatgtgattttcctgggttctgcagcccccgctgtttgacttactattcattcaggcaaacttttcagaaaaggctatgggaaatccagca

SEQ ID NO: 179919 - DNA, 122 bp, Homo sapiens
aacgaaacagaaacacaggtgggaaggaactgactttggttggtggcctcactccccggccgagggctacccacgcaggacagtcgcctcgctccggatgccatggacacacacacctccac

SEQ ID NO: 179920 - DNA, 122 bp, Homo sapiens
ctatttttcttggcttctgttttttaagaagagccctttgcccctctaaatgtcattgatcgttttaaagaaataaacttttaaagaacactatagacctccttcccctagggaacaccaat

SEQ ID NO: 179921 - DNA, 122 bp, Homo sapiens
tgctttgagggtgctggtgggtggcgcccgtgatccacttggtccttagggtccacgggtcgggccaggagcttgtagtcgtccccttccccaccccgtcgcctgcagtacagggtccctgg

SEQ ID NO: 179922 - DNA, 122 bp, Homo sapiens
tttcccaattctcaggacaaggcagaggagggcccctctgtgagagctttcattttgcttcgggaaaagtacattgaatcaaatataggagaggcttgcaaggtggctgacaggttcggctg

SEQ ID NO: 179923 - DNA, 122 bp, Homo sapiens
attatggtatttgcattacagtttttttcaagtattttaagccactcttcatgacagaatcgttagaattccctccgtgaatccctgtctgtggccgcgcggtggcgctcgtgggctctggg

SEQ ID NO: 179924 - DNA, 122 bp, Homo sapiens
accaagctgtcgtgaggccccgccaccgccacccaccaccacctcccactgtggagggtgcgtcccaaagctccagttaagtgagagggtagggcaggagctgggatgaccacccttcctca

SEQ ID NO: 179925 - DNA, 122 bp, Homo sapiens
agcccagtgccgcagctaatggcttcaaagcagccagccagccctgggcacctgcgttttcgctcttggagccaaccgttgccctgaggaccccgcaggcccccagccagagcacggcccag

SEQ ID NO: 179926 - DNA, 122 bp, Homo sapiens
ttctcttcctcctctttttgtcagaatatttaccttagaaaacttgtgagtactttctcccgaaatgtttatttttagaaactaaataaaccttttgtcagcataatgacctagggatatct

SEQ ID NO: 179927 - DNA, 122 bp, Homo sapiens
cacagctgtgcagcgggaccctcctgctggcccacgtggctgccagagcccatgctggcacgacgctccagcaggtcggcgtccctgcgggacacactacccgtgacatggctagcatcacc

SEQ ID NO: 179928 - DNA, 122 bp, Homo sapiens
cactgcaacacttagagggtagtttgaactgggattgaaggtctgtctggctgctttccccggcaggccccaaactggcttggatgcaattgagccagcattttccaaggtactctcattca

SEQ ID NO: 179929 - DNA, 122 bp, Homo sapiens
gagaggggcggggttaaaggagaggtgagacccggagaggggtggagtcaaaggaaggggcggagtcagacaaggcaggagtccctcaccggctgtccggctcctatacctaggacagcgcc

SEQ ID NO: 179930 - DNA, 122 bp, Homo sapiens
agataaaatttaaatgtagactgattttcttcacgattgctagggaagaaatccttacagcgtacttagaaatctttgttttaaaatgataacgctgttatgttgggctgaaaataaaacgg

SEQ ID NO: 179931 - DNA, 122 bp, Homo sapiens
attcagggactggtcacgtcatgaaggttttaggagtccagagatctgggcatgttaggacgtcctgtccaaggtcaagaacgagttttgagccttgcatttcctaacaccaggaaagaagc

SEQ ID NO: 179932 - DNA, 122 bp, Homo sapiens
tacagcactcaggaagagttctcgttttgaaacctgaagactcaatgtgtacttcactgccggggacctcagtttgcccatctgttaaaggagcatgttgaaccagaggacccgccaagccc

SEQ ID NO: 179933 - DNA, 122 bp, Homo sapiens
aagtcttcggaggaagcaggcgagcgccggcagactcataaataaggaaggctctgtccccgcgcggccgcgccaccctcgcggcagaagcctgacttcctgccctccggccttccgcacgc

SEQ ID NO: 179934 - DNA, 122 bp, Homo sapiens
tgaggagcttggatggatcccaagggccatgggagccgtgaaagggatttaaagcagggccgtgacatggccaactggatttctagcattatctatctctacaagctgcacagtggacggca

SEQ ID NO: 179935 - DNA, 122 bp, Homo sapiens
ggggggagtttttctatgttgccggtctcgaactcctagccttaagcgatcttccctactcggcctcccaaaatgccaggatcgcaagcgtaagccactgtgccagaccaccaccctttttc

SEQ ID NO: 179936 - DNA, 122 bp, Homo sapiens
aagggagcacactaccagctcctgcaggcagctccatgaaaggtgggtccacaggggccacgctagagacagagacgtattgacattcccacaataggaagaaaggaaagagcagagccgag

SEQ ID NO: 179937 - DNA, 122 bp, Homo sapiens
ggcgcagagtcgactcaggcagcggcggcggacagcgcgggctctcgggcgcgcgacctccggagaaaagcgctgcggcccctcccccgccccgcccccttccccgcctctcccgcgctggg

SEQ ID NO: 179938 - DNA, 122 bp, Homo sapiens
agcctcggaccccctcctctgccctgcctcctgatccctgtcctgcactgagcaggtcttcggtggactttatgcgcagccacctcaggatgaaaataccacgtctgcctcctgctgaggtc

SEQ ID NO: 179939 - DNA, 122 bp, Homo sapiens
gcgtaattgttagcagcatcctcctttccgctaaggagctgctcggggtggaagagtgaacggtgctggcccgtccggatcccatctgcagagggtgaaaggaggtcagtgcaactcaccca

SEQ ID NO: 179940 - DNA, 122 bp, Homo sapiens
cagcggccaattgggaggccggatcccccgctccaacggcgccgccgattggctgccaggcgagacaatgaccgaccgggggcagctgctttaaaggggaagatacactctattaagcggcc

SEQ ID NO: 179941 - DNA, 122 bp, Homo sapiens
ccccacagggaggtgttgaaagaaaggagaagcaagaggtgatattgaccagggaaatggcgccacttcctgagccagggccctggacttcctgtagttgtagaaaagtgcaggcctgagtt

SEQ ID NO: 179942 - DNA, 122 bp, Homo sapiens
gcccatcaacccgtaccgcgccaaagaagagtacgtggtccacactatcttcccctccaacggcagcagcctctgcaaggccacacacaccattggctacggcaccacgcggggctaccggg

SEQ ID NO: 179943 - DNA, 122 bp, Homo sapiens
ggtgccggctgcctcacctgctgctgctgccgctgctggctggctttctgcttggccctccgctccaggaattgtttggcaaattctttggcttccagcgtgtcccccaggcaggaacggat

SEQ ID NO: 179944 - DNA, 122 bp, Homo sapiens
accagcttggcctcctagggcataaggaatggggacagggcacagggcacgtgcttacaacggatatgcaacatggcttttggtagggccattgcagccagtggggaaacctgcgcggctgc

SEQ ID NO: 179945 - DNA, 122 bp, Homo sapiens
cagcgcctttaagcccgggctcgcgctctcggaccgtgctttcgccgcctgggagccgtccggcgcagcagtttctaggtccccactgtccccgccgtcccgccccttcgcgtcccgggaac

SEQ ID NO: 179946 - DNA, 122 bp, Homo sapiens
gaaaccttcactcgcgcagataagaagtgctaagtggtcacagggcttagaatcctgcaccgtgcatcctcaaatagctccagaaccttgacagaggcattacagagttgaactcaccagcc

SEQ ID NO: 179947 - DNA, 122 bp, Homo sapiens
atattattactttgatcatataagaaataattgtgacatttcatgcctggaaatgtatcacgggggctttcgttcatattgacactatatattactgaatggatcagttaatatataaccag

SEQ ID NO: 179948 - DNA, 122 bp, Homo sapiens
ccacttggggcgcagaggtgtttctgtaaggggacaaagggcactcctcggcgcgatgggcgacttccccagccagaaaatgagagggttagacgaggggaggaacttcctcagccacttgg

SEQ ID NO: 179949 - DNA, 122 bp, Homo sapiens
cttgcggggcgagtgtgcagcctgggttggggtagggagcgctccctctcggctgcacggcgccaggcagcaccgcagcttggcttccgaggcttttccatcagaaagaggaacattctcgg

SEQ ID NO: 179950 - DNA, 122 bp, Homo sapiens
ccaggtgcacggttccctcatcctcgcctctcagcaccacaagccccggcatgcggcgcgcggccacagtgagtgctcaacgccaggcccatggcagccctgggagcagccgcccaaagcct

SEQ ID NO: 179951 - DNA, 122 bp, Homo sapiens
tgggcccgcccagctctccccgcgccccctcggagttccgcccggtcacctccacgcggccgagctgcaagcgaccctggcagcctcagaacccaggggtcaggggctcatcgatcctccct

SEQ ID NO: 179952 - DNA, 122 bp, Homo sapiens
tggagtcggagagctccagcacgggcttggggtgccaggggaactcccggcagtcctcgtcgttcagcacctccacccgcccctgccgcgtgatcacctcgccctgcgggtccagcatgatg

SEQ ID NO: 179953 - DNA, 122 bp, Homo sapiens
cctgatatacacttgcaaaacccattttcatgctattaaagtcaatgtcacaaaccatctcgtcccagcatcgccccacaatcaccccgcaaatatgggactttgctggtatccatttgtat

SEQ ID NO: 179954 - DNA, 122 bp, Homo sapiens
tttcatcaactcatcactcatccttcagtcatctcacactgagaacaactgggagcctcccgttttcctgtttctttaacatttgtcagaatctccccaaacctctaacacctttttttcag

SEQ ID NO: 179955 - DNA, 122 bp, Homo sapiens
agcattcctggaagccacaagtctcattggctaaaactgagtcacaggcccacccttagccgcaaagaacactgggaaactttgagcactatgtctgcacaggaaatggagcttttgctggt

SEQ ID NO: 179956 - DNA, 122 bp, Homo sapiens
agagcatggccatgagcaggtccaggttgcagttgggctcattgttgtcagggtccctggcgaagcggcgaagcatggtccgcagcacgttatccagggaggtggccgtctcgttcaggacg

SEQ ID NO: 179957 - DNA, 122 bp, Homo sapiens
ggggacgcgacgccatgcagctggctgggccgagaggggcggcaggctgcaggggccccgcgcccgtgttaagaggggtctgggggccggtctggccggcctggctctcccggctcccctca

SEQ ID NO: 179958 - DNA, 122 bp, Homo sapiens
ctggctactgcgcagactccaccttggacctactccccaaccccccgccgctcctttccccgtttctccagcagagggcgcaggcccaaaggttccgccgaccccgccccagcctggccccg

SEQ ID NO: 179959 - DNA, 122 bp, Homo sapiens
gcttgaagttgaagtgagggatccagctgtggtgtgcgcggggctcctcgccgccgctttcgctcgctcgctccgcgtctcggccggaggaggaggctgtggcgccggcgacagctacggca

SEQ ID NO: 179960 - DNA, 122 bp, Homo sapiens
gaagccgtgttcgctgacttagagcggggcctctctgggctttctctgggaggagttccgcgttgccatccagacggtcgtagctccagcctgctccaccccgtcaggatcctgggctgggt

SEQ ID NO: 179961 - DNA, 122 bp, Homo sapiens
gcagagggagggggaacgccggggagaagggggagcactttgcctccccaggctctgacgcggaactttgcaaagtttctccaactcgctttgcagcgggcgggtcaccctgcagggggacc

SEQ ID NO: 179962 - DNA, 122 bp, Homo sapiens
cttcctgttcttcttccccaaattctctctggccacactgctctgtcactgggtatgagacggattaacgatcactgatttattctctcctcccttcagagttcagactgggatccagagag

SEQ ID NO: 179963 - DNA, 122 bp, Homo sapiens
gcgggaggacgcgctgagcagggcgcgagcggagagggtgcgggtgcgggaggccggcggcgatcacgacgcggctccgcgggtcccgtggaacgtcgtgctcgccgcgccgcaccgaatcg

SEQ ID NO: 179964 - DNA, 122 bp, Homo sapiens
caatacgtactagagatacacagcagacaggacaccctggctgtccgcactattctcaagcgggaatttgggacaacccatttaagagcccatcttggcacaaatgccatgatagccccaag

SEQ ID NO: 179965 - DNA, 122 bp, Homo sapiens
ccctccttgttgcgcctcaccgtggggaccaggtgagccggctctcccacgtggttgtcccgggaaagctgccccacagcctcagcatcttcagcacttaccgatccagagcctcccggcct

SEQ ID NO: 179966 - DNA, 122 bp, Homo sapiens
ccctgccccagggcgtcggggttgggtgagagaaccgccgcagccttcatctggtctgaccgtcttcggtaaaaacagaaagagtccctggcttttcattttcggggtggactcaactcctc

SEQ ID NO: 179967 - DNA, 122 bp, Homo sapiens
tttcctaagacaaaatagagtgtgtttggtccagtgtgatggagaagtttgatgcaaatccgtcttaaggaggagaatggaggctgtcatggagtcctgtggactgtttcgcaagtagttgt

SEQ ID NO: 179968 - DNA, 122 bp, Homo sapiens
tgtcaatagacttctgggcctgggacagggcctgcttagcgaagctggagagctgggaggcgttgaaccaactcatcgcccctcctcagccggcagtggcggcggcagcaccaagcgggaag

SEQ ID NO: 179969 - DNA, 122 bp, Homo sapiens
tgctttttcttgtggggatactaaatcaggacttcaaaggccctaagacatcattgaactcgccaggcacgtttcgccaccgtttcccacccgcagaggatgctcctgctgcagcccactgg

SEQ ID NO: 179970 - DNA, 122 bp, Homo sapiens
caatatcctaggactgtgccagactgaatcatgaaacaatagaactcttcttgcttgtttcgaatgtcatttatttaattccagtgaggttattacttgtgatgctgcatcatccaccatga

SEQ ID NO: 179971 - DNA, 122 bp, Homo sapiens
tatatatagtgtgtgtgtgttgtatgtgtatctcacaaagtctttatccatttatctgttcgggcacattgaggttatttccgtatcttggttattctgtataatgctccaaaaaacatggg

SEQ ID NO: 179972 - DNA, 122 bp, Homo sapiens
tcactgccaggtgaagactgatggggacgtgttcggggggtggcatggagtgaacattgacggtcaggctccgcacacgtgctgccattgaagacatcagagctgaccgacggtacgctgag

SEQ ID NO: 179973 - DNA, 122 bp, Homo sapiens
ccctggaggacgcagacttcgacggcaagcccatggtgctggtggccggccagtacagcacgggcaagaccagcttcatccagtacctgctggagcaggaggtgcccggctcccgcgtgggg

SEQ ID NO: 179974 - DNA, 122 bp, Homo sapiens
gggaaggactggcctgcggagggggcgtggtcagagcagaaaggcctggctgagggagtgcggccaggggaaaagccgaattccccagagatgttgccggagaaacagggccttgtagagga

SEQ ID NO: 179975 - DNA, 122 bp, Homo sapiens
gatattactgacaataacgtccacaagcggtgtgaccaccgtggaccgttatatccagggcgggagaggggggagatattactcccctcatcgcggggggcgtctcctccccccatgcggtg

SEQ ID NO: 179976 - DNA, 122 bp, Homo sapiens
ccaccctgcaggaggcagccatcggggaggcgcacgcgcagcagcgtgtagttgtacttgcgcagcccccgctgctcctccttctcccgcatggccttggtccgcagcacgctcagccgctc

SEQ ID NO: 179977 - DNA, 122 bp, Homo sapiens
ctggcgattggttattgcctttgtcatttaccaagggtgggtgctctggatattaagggccggagacgttcagtacttttattatataaaagttctatgcagtgttccactcgtgtgcttca

SEQ ID NO: 179978 - DNA, 122 bp, Homo sapiens
gcccaggggaccggcattagaacatcggctgatgtttcatctggtcagggaaccatccagcgcttagtacacctggcgctaatcggcggggattaatctcacaccccgcagctggcggaaag

SEQ ID NO: 179979 - DNA, 122 bp, Homo sapiens
ttttgcgtccaggcgagaagagcgttccgggaaaggcacctcataactcactcagcacagcgcacacgcagagagctcgggcacttgatggggacacgggtggcagccacagcatcagtgct

SEQ ID NO: 179980 - DNA, 122 bp, Homo sapiens
aacttggtatcagagtagaggccatttctttataaactgttcaaagagttctcaattatacgatagatcttggggaaatagcttgtttgcactgagctgtcccttataaaaaggggtgagtg

SEQ ID NO: 179981 - DNA, 122 bp, Homo sapiens
caccgcaggctcggcgaggctcggggacggtcccctcctctacgcggcctcccgtcccttcggctcctaggaggcgcggcatcctgtaccttggaaaacaacgctcttccagtcctactgtc

SEQ ID NO: 179982 - DNA, 122 bp, Homo sapiens
tcggagtgttctggaagtggcaggagcacgactcccttaactctggtgcagggtttacctcggctccctcgggacgggttccgtgcagctcctgcttcctcccttctctttcccagtgccat

SEQ ID NO: 179983 - DNA, 122 bp, Homo sapiens
atgtcttcatttttccatgtgacattccggagctttctttttgtgacaacttgactcattcgttaacccaaggaggtggatgggacaggaagaaaactgggattcccatgcctgcttggggg

SEQ ID NO: 179984 - DNA, 122 bp, Homo sapiens
ggcaggcgtccggggtgatacttgtttggttcgccagcacctcggtgcccagagcacctccgcgcctgacatctgacagcgcagaggtgggagagcggtggtgcccttagtgtgcggacgcg

SEQ ID NO: 179985 - DNA, 122 bp, Homo sapiens
gagtagagaactccttgcaactctggcagccaggttggtcatcacgtgctggaatcagctcggatcccctgccccatgctcaccttcctattttgaggctttagggtctgctgagcaaagcc

SEQ ID NO: 179986 - DNA, 122 bp, Homo sapiens
tgcctggcctgggaggcccagttcagtccgggtgtgggtcccgcttcacctccagagcagcggcagccggtaagggtagaagcggcctttggagaggggtctctgcagcggcctggggacaa

SEQ ID NO: 179987 - DNA, 122 bp, Homo sapiens
atctgttaaacagggagctcagtgtctgtttgtccagcttctcagagttgctgtgcagctcggatgtggcataggaaacagcagacacagggagagggcagcataaggcactgtagggagca

SEQ ID NO: 179988 - DNA, 122 bp, Homo sapiens
ccactactcccggccttaatactttatttaggaatgaaggaaggcgggaacacccaaacgcggttggtgtgaagcaatcgccttaaagctgaggggaatgtgtggttgttgggggtggagcc

SEQ ID NO: 179989 - DNA, 122 bp, Homo sapiens
tacggcctccacccccgccatgcagctctgcagctgtagcctgaaagcagctgcagctgccgcgcgtaaggggtggctctgggcaggaaaccacgtgcgaaccgccccacggcagggtgcgt

SEQ ID NO: 179990 - DNA, 122 bp, Homo sapiens
gcaacacaccctctgggcctcaggctctcaggcactcctacctggttgcgccgctgggcccgcacagagtttgctactgccggcacctgaaagcggttggctggttcctgcactcgctcgtt

SEQ ID NO: 179991 - DNA, 122 bp, Homo sapiens
caaccaccgaggcccggtcgcgcgggggctcctgggagccgcgctcccggcgggtcgtggcgccgcccgccctagagaatcgccgcggccctgaggaccccgttctgcccacgcgactgcaa

SEQ ID NO: 179992 - DNA, 122 bp, Homo sapiens
atgccggagacgggccggggggaggtgttagctgaggacagggagagaaacggagtgggccgcccccgtctgctgcctctcactcggggctttctatgagaggctgtggccagagaggaccc

SEQ ID NO: 179993 - DNA, 122 bp, Homo sapiens
gaaggtcgctccgaggcctcaaaaccataatcgggtctcaacagactctgggactttatacgtcgcccggtgtttggcactgagcccactatggtttggggactactttatctcggcggagt

SEQ ID NO: 179994 - DNA, 122 bp, Homo sapiens
ccaataaccagctttaactattgagtcaatactgtctaaatatttagagaaatggttaagcggcaggctcctgagtccatcaaacctggaactgtgtttaggcccaagcactctgtaactat

SEQ ID NO: 179995 - DNA, 122 bp, Homo sapiens
agctttctccacaacctccaaccatcttctaggactgccaggaggcacagaagtcatgaacgtttgcagtttccagtcccaggcaaaatctcagttcatgtcccaactccaccagtcactgg

SEQ ID NO: 179996 - DNA, 122 bp, Homo sapiens
ccgctcgccccgcgtctcagtcctcagtgatggtaaacagaatgaggaccttctcccgaccgtgatgcgcctcagccctacttcccttgtcctttcctatcataaaatcttctttcatagaa

SEQ ID NO: 179997 - DNA, 122 bp, Homo sapiens
cccactaggtaggtgttggtgccttggagggtcatgggacccgggttacagcccaacacacgcacgactcgattggacagccgctcgacgcgctgcagtacagcagccattcccgcctcagc

SEQ ID NO: 179998 - DNA, 122 bp, Homo sapiens
ttaaagaaactttttgtcaactcatgagataggtgatacataaacaactataaagagaaccgcaaagctgagtggaaatgtggtttccctgctgtcatcatctagatacagttatttctacc

SEQ ID NO: 179999 - DNA, 122 bp, Homo sapiens
gctcggaaactgctgtgtcagaatggtttgaggagtcccgagtcagagccagctttaattcgggagggatgactacccagggctggcccgcggagacgcagccgggaagggtgtggtgcagc

SEQ ID NO: 180000 - DNA, 122 bp, Homo sapiens
tcagctatgccagacttgttttcgtagctgtcgtgatttagattctgaggtacactttcccgctgcgcatacttcctttggaagacagaataaaagcagatttctgagttaattaagagtgt

SEQ ID NO: 180001 - DNA, 122 bp, Homo sapiens
tgcccattccccgaacgaataaaccccttccttaactcagcgtctgaggaattttgtctgcggctcctcctgctacattctgagtggggaaagggactaaggtggtctgaggaccccacaga

SEQ ID NO: 180002 - DNA, 122 bp, Homo sapiens
ggggagttcctgtctgtggcatgttcagcccagcgtttcacttggcaggaattctgaaaacgtgcttctcctcctcctccctcgcttttgcagcttcctgttttattaaaaattaccttgat

SEQ ID NO: 180003 - DNA, 122 bp, Homo sapiens
cagaagaaaatatataagaagagatttacctgggtaacggttaagtttcccaatctccatcgtacataatatcgaataggaatcacaagtgtgtagaggacatgaaggaaggcaaatcccag

SEQ ID NO: 180004 - DNA, 122 bp, Homo sapiens
tgtcgtgccttaaaatcatgtctggttgcgcaagtgagggaaaggattgggtaaagggggcgccaccgcaagttgctgtgcaacatccagacatcaccagacccaccacctggagcctggcc

SEQ ID NO: 180005 - DNA, 122 bp, Homo sapiens
gacaatggcgggatgggcggggacaatggcgggatgggcggggcctaggggtcggactgccggacctctcctcggcgcgtcccagcgacttttttaggcctgtttgtcgcccagcagtactc

SEQ ID NO: 180006 - DNA, 122 bp, Homo sapiens
cgaaggaagggggaagaggctcagggaccggggtcccagcgggggtcctgccccctgggccggaggctgagagcagggcggtccaggccctggtgttgctgacgtggcgggcgaaggggctc

SEQ ID NO: 180007 - DNA, 122 bp, Homo sapiens
agctggtcctctggatctcaggcactgtggtttcctcaagctcgtgctgataggcccaggcggtatacaggcggaagcacttccctgcagccacccgacctgccctgccagctcgctgattg

SEQ ID NO: 180008 - DNA, 122 bp, Homo sapiens
agcgctgccagcagcagcgggatcatagctgctatggggctgagatccaggaatctgtgtcgggactgcggggcgctgggttacatcagaggccaggactggcacctggcgcctttcacttc

SEQ ID NO: 180009 - DNA, 122 bp, Homo sapiens
ggcacccacaccccgcccccgcacgcaggcacaaacccccacaacacgcacacccccgcgcgcaggcgcaccacacccctcgcgcaggcgcatcacagacacactcgcgctcagcgtggcgc

SEQ ID NO: 180010 - DNA, 122 bp, Homo sapiens
cattttctacgcctagtgctggatctcatctcaggtgcccaacttgcttgctcttcaagccggctccttcttgggcagtgcaatctgatctggcaaaagaagcacaagctttgaatgcagac

SEQ ID NO: 180011 - DNA, 122 bp, Homo sapiens
ttcacccctgcctctcgggtaaactattaatacaaagcagcagatggtgcctgccttccccgtgctcctttcacttaggccagtaaacctggtaaacgagggagctggccaacgtgctgaat

SEQ ID NO: 180012 - DNA, 122 bp, Homo sapiens
gacatggaggtcactggatacttggcagggccgtcttgtagttgctacaggagctgagaccggataggtgggcagggcactgcagagaagagtccaagaattgtcacctctctcaagaacat

SEQ ID NO: 180013 - DNA, 122 bp, Homo sapiens
ctgcagcttcaccttctccccgttgatctccacggtccggatcttgaaatccactccgatcgtggtgatgtagctgcctgcacacacagggcagttaacgaggcccagcgcggtatcttccc

SEQ ID NO: 180014 - DNA, 122 bp, Homo sapiens
cgcagatgccagggagccctgtagtgacacgttctctgacagcaccttgccgcctgcccacgaccttgaccgtgaggagctgctatccgcaaccagcgccgacaccatgccccctcttcctg

SEQ ID NO: 180015 - DNA, 122 bp, Homo sapiens
gggtaggctgaggtggggctccccttctgctcgataaatcctgtagttggacttcctcttcgagtggaaaacccaggcgtggggctccccttccgctcagggtaagccgaggtggggctccc

SEQ ID NO: 180016 - DNA, 122 bp, Homo sapiens
tgctctcaacttgctagagtgactaactacgactctggacagatctgccatccctgaattcgtcaccatggccgtgtcttgctcattttcccagccctgaaattactgcagagtcagtcttg

SEQ ID NO: 180017 - DNA, 122 bp, Homo sapiens
gtgtaaacatgatgtgtgaccgagctggtaactgggagacacaaacagcttcgtggccagcgacagaggagcatgtagtggtctgcgttggttcctggacccttcacatccactgccaacca

SEQ ID NO: 180018 - DNA, 122 bp, Homo sapiens
tggttcacttcttccgggttaacgcacgctcccggcccctcctccgccactaccgctctccggaggagttgtcctcgagcatgcctaacaatggactaaaatgacaaaaatgagctaaatga

SEQ ID NO: 180019 - DNA, 122 bp, Homo sapiens
gggggcggagcttgcagtgagccgagatcgcaccactgcactccagcctgggcgacagagcgagactccgtctcaaaaaagaaaaaaagaagttcacgactcgagggatttatctttctctt

SEQ ID NO: 180020 - DNA, 122 bp, Homo sapiens
tccagctactcccagtatgggggagcaagcagccagcccagagacgatgtccttgttgtccggaatgtcgtggacaccggccatgggttccctctcctcgacctcctgtcagccacttggaa

SEQ ID NO: 180021 - DNA, 122 bp, Homo sapiens
tgccgcaggtctgagccagcacatacacgcaggtgcccatgaagtcgaagcggtggccatcgaaggtggtgtagtggggatctcccgacgcctggcaggtggtagagcccacggccacgcag

SEQ ID NO: 180022 - DNA, 122 bp, Homo sapiens
taaggccatgggtaatagccccccaggggttcacagatcttctggcagtgggtgtagctccgcctacattctatacaacagattccttcgtgatccagtctagggtcgaatgtcatgctttc

SEQ ID NO: 180023 - DNA, 122 bp, Homo sapiens
ggcccaccctggcccaacctacttgtatccttgtatcattaggtcattcacacaggcaggcgggagagtcctccaccagtctagggccctccagtgccttctgtctcacagggaagcagatg

SEQ ID NO: 180024 - DNA, 122 bp, Homo sapiens
gagaaggaggagcagacgcacagcgacccagcccggcctccgccaacgcttaaacagccccgcgcccacctccctcagcctaggattgggctcccagaataagcaacagctttacttccaca

SEQ ID NO: 180025 - DNA, 122 bp, Homo sapiens
cgggctctgatcctccgtctccccgtcccccggcggccggcccatggcctggcggaggcccgaaccatggacctccgcaccgccgtgtacaacgccgcccgtgatggcaagctgcagctgct

SEQ ID NO: 180026 - DNA, 122 bp, Homo sapiens
gaccctttttgggggatggtctcaggaaaggctcctgatggaagcagctgtctatatctccgtgcccagctgcggcctggcacactgagggctctcgccaagagagtggcctggtgatgctt

SEQ ID NO: 180027 - DNA, 122 bp, Homo sapiens
cgccccaccttccagactgggactctaccacgtgcgtattgcctaggacgttcccgcgcgcgcagtgcagcctgatcccattcagtgcagtgtcgtcgccaggaatgccttggggaggctcc

SEQ ID NO: 180028 - DNA, 122 bp, Homo sapiens
ggaggcggaatgaggcgcggctggagtacccctccccttctggtttgaagtctccgctgtcgcttcagcgctccagctttctccctggtctttctaacagtttcgggccacgagaaaatcca

SEQ ID NO: 180029 - DNA, 122 bp, Homo sapiens
tgggttgtgggcagtccccatggccgcctggagaagccgctggggcccgggggtgtggggcggtgtggcgggcgcacactgtatgtacctataataaaccctttggctttgacggtctatgg

SEQ ID NO: 180030 - DNA, 122 bp, Homo sapiens
aatagtctattatcctttatttttcctggagcacaaaaggatttcatagagtctggaagacggttgcacattaagcccctttaccaccatcaatgttcactttctttacttttcatactata

SEQ ID NO: 180031 - DNA, 122 bp, Homo sapiens
ggaggagagcggggtgttaaagtcccgggagaggaggcgcagagtgtgagggcatcggcgcggctcggctctaaagcaaacaggggtccgggaaccgccccttcatttgggaccggggaagc

SEQ ID NO: 180032 - DNA, 122 bp, Homo sapiens
ccatcccgttccaggtggaccctaccctccctcgcgctccctccgccggcagcacccccacgcccgcccccaaagctctggcttgcctgaaacatcttacagagtctctctccctttaagag

SEQ ID NO: 180033 - DNA, 122 bp, Homo sapiens
tgggaactcctcaggcagccaggcagaggaagccagaaagccatgtccagctgtgttcaccgggagccagtcttccatttgcctggaattctagatggtatttgggaggctgggacagggag

SEQ ID NO: 180034 - DNA, 122 bp, Homo sapiens
ctgtgactcagtgggggctgagaacgtgtatgtctaagttcccaggtgatgctgttgccacggattccacttcgagaacatcttctgtgtgccttcctcttatggattacacctcttaaaat

SEQ ID NO: 180035 - DNA, 122 bp, Homo sapiens
agagcgagggcacgtgcgggtacactccggaggaggtgggtgcgcgcgggggcgtgtgcgcgggacctcgaagtggtggtggagtgcagaccagcaaaaagtttcaaagggaaatcttagat

SEQ ID NO: 180036 - DNA, 122 bp, Homo sapiens
ctttcatccagtactcacttgaaccctgcagcagggaaactttgtcgggatttttgcttacgctcgagagtgggcgagcctgagagagaaccacttgaaccatcttgtaccgtaccagggtg

SEQ ID NO: 180037 - DNA, 122 bp, Homo sapiens
tcaaggtgtcagcagggaataaaaccgatcttcagaggcctctcttcttggcttatagatcgtcatcttctccgtgtcttcacgtggtcctccctctatgtctgtctgtgtctcatcttgtc

SEQ ID NO: 180038 - DNA, 122 bp, Homo sapiens
tgagggagcagcgcctgagcctgcccacctggaacgcgttgtaggcgaccccctggggagcgggtgctagggttcaactccactacgcagactgctagtgggatttcatttcctgcccctca

SEQ ID NO: 180039 - DNA, 122 bp, Homo sapiens
gcttgtacctgtgggcagggtccaggcccggcacgctgacctccctgaggctgccctccacgggcaccacctggggctgcccgtccctgtctttgtactggaccacaaaggagtcaaactgg

SEQ ID NO: 180040 - DNA, 122 bp, Homo sapiens
tcgcccgctccccgcggttgcgaacgcggaatggtccatgtcgagggtcccgtgggggagcggggcccctgccttcctgggaccggggacgaccaccacctacctcctcaggctgcggcctc

SEQ ID NO: 180041 - DNA, 122 bp, Homo sapiens
gctctctgccagggtcctttgagattcccacctgccgtgtgagggagctgacaccttactcgcggcaggctgtggggccacgccctgcagctgagggaaggaagaactcaggcccgctgagt

SEQ ID NO: 180042 - DNA, 122 bp, Homo sapiens
tagaggctccgcggccacccctgccgggtcctgccaagacttgctagaaggaacgagtcgcgtgccttagttagttggttcccgtcacaggaagaaacgcctttgcagtgggtttaattgct

SEQ ID NO: 180043 - DNA, 122 bp, Homo sapiens
gagccgcgcgcagcgctgccttctgctgctagtcgccatcgtgggcttccaagttctcaacgctatcgagaacctggacgataacgcgcagcgctatgacctcgacgggctggagaaagcgc

SEQ ID NO: 180044 - DNA, 122 bp, Homo sapiens
attatctttaataagaccgtgtctggttcattggtatgcttttttttttttgtcccacctcgctcttacctcagaaagatttgtcgaatgagtgaaagatgaacaagtaggccaatggagac

SEQ ID NO: 180045 - DNA, 122 bp, Homo sapiens
ctccaaaataatatcttctgtgtttcatccctacttctgacacgctagtccacacagccacggccatccactgttatctggatggctgcaggggtttgctattcttgttgtttgtttgtttg

SEQ ID NO: 180046 - DNA, 122 bp, Homo sapiens
attcccatatttctgttaaatctgaccccagaagtttccttacctctggccctgggagagcggcgcccggcccactccctgcccacattatgagccccctccttcccgcccccacctcccac

SEQ ID NO: 180047 - DNA, 122 bp, Homo sapiens
cctgtggtcccagctgccctaaggttggggttagggttagggagcctgaggagggagaatcgcttgagctcaggagttcgaagctgctgtaagccgagatcgtaccactgcattccagcctg

SEQ ID NO: 180048 - DNA, 122 bp, Homo sapiens
gactttcagtcttggctaagcccaaaggggcctccttctcgctcaactaggagaagacttcgccccgccctgatcagcccagcccctctctccggggtcagagcccgggcaggggcgagagg

SEQ ID NO: 180049 - DNA, 122 bp, Homo sapiens
cccacctacccccaccccccttccctgggaaacctacactgcaacattccagcactgagccgggggtggcccaacagatgctgcctcaagtgctttcctgactgtggctcctataccagcca

SEQ ID NO: 180050 - DNA, 122 bp, Homo sapiens
cgcgcgctctctgcccatgccgctgcagccggaggcctgcatctgtcccagccctggacgcgctgaaggtcctagcttcccagcaggggtgtcccagtcaccccccattgccgagcttcgcg

SEQ ID NO: 180051 - DNA, 122 bp, Homo sapiens
actttatgtggtggagggcattataatattttcactgaattaattgaatcttctctttcccgagcatagccatctttaacgtgaagctatcaatatcgtcctgggcttatggattcatttca

SEQ ID NO: 180052 - DNA, 122 bp, Homo sapiens
cagaagcagccgtttaagactggagtttgagtctgagctctgcctctcagtgtgtgatctcgggcatagtacagcccctctctgagcctcaagttcccagccataggtgaacatgacctgag

SEQ ID NO: 180053 - DNA, 122 bp, Homo sapiens
ggcgccctgtggatttaccctaccaattgcccagtgcgggactaccagctgcacatttcccgggctgctctgttttgcaatacgctggtgtgtctgcctaccggactgggaaagacctttat

SEQ ID NO: 180054 - DNA, 122 bp, Homo sapiens
gggatagctcgagaggtggggtggggggattacaaacctctaacagcaccacaggctgcccggggaacatctgctactacagccttgcagcccggagtcccggattttactggttcccgtgc

SEQ ID NO: 180055 - DNA, 122 bp, Homo sapiens
ctggtgcaggatatgcaggagagcatcaacatggagcgcgtggtcttcaaggtcctgcggcgcctctgcaccctcctgcaggccgaccgctgcagcctcttcatgtaccgccagcgcaacgg

SEQ ID NO: 180056 - DNA, 122 bp, Homo sapiens
ggtgatcaacttggacacagagaggttcggcactttgcgacttgcacttatcaagccagccggcttcctccctcgcttcttggttggaagtttctccatagcggctacaccagcactggcag

SEQ ID NO: 180057 - DNA, 122 bp, Homo sapiens
agatatttgaaatgatggtttcacacagactttcagcaactctactttgagggaacaaaccgactccctgaatactggtgctgaaagtttcacactagacttttactagaaagtttttcttt

SEQ ID NO: 180058 - DNA, 122 bp, Homo sapiens
tgcaacctagggactgcgagaggttaagagactacatctctcagcatgtctagctaggcgcgcaccgccgtgtccccagggcttcgcaccgcccccagacttgcgcatgctgggattgtaat

SEQ ID NO: 180059 - DNA, 122 bp, Homo sapiens
ctccagtccccaggcagcctggattctgtcggcaggagagggtctgccctggaaaggcctcggggcttctctgcaggtctcaacctggctccccctttgaacagaaccttccaaggctgcag

SEQ ID NO: 180060 - DNA, 122 bp, Homo sapiens
gggccatgtgatcttaggggaacctcctagtcttggacccaagagaagtttccagaactacgactgcagacccagggcaggatcaggaaacatggggaaagcagttgtgggttctggaccaa

SEQ ID NO: 180061 - DNA, 122 bp, Homo sapiens
cgcgactgcgaagagccctgacccgggggcgcccacgcccgctcctgcgcagcttgggggcgctggcctcagagacaccctcacttgaccccgagctcaccacagctgagctcactacaccg

SEQ ID NO: 180062 - DNA, 122 bp, Homo sapiens
caaggtccaggaaggaaagcataaaccactcaagatgtttcaccagagggagctttgatacggagaattaatggtcagaaacaaaagctgaaaatttaagcataggacattgaggcaaccaa

SEQ ID NO: 180063 - DNA, 122 bp, Homo sapiens
ttaaaaaatcatggccaggagtggtggctcatgtctaatcccagcacttcgggaggctgacgtgggtggatcacctgaggtcagaagtttgagaccagcctggccaacatggtgaaaccctg

SEQ ID NO: 180064 - DNA, 122 bp, Homo sapiens
aacagctgcaggcatgaactggatggcacaagaggctagagggagctgaagcctcctcaccgcgtccaggaagtggcacagtgacaactccgaggagactgtttcaaaggcgccagggcgtt

SEQ ID NO: 180065 - DNA, 122 bp, Homo sapiens
tcatgagtgccacctggtacaggtaggtggcgctcacgttcctgcccaaatgcagcccatcggggagtcacagtcagtccccccggcccccctcccagtccctgttggctttcggtagctct

SEQ ID NO: 180066 - DNA, 122 bp, Homo sapiens
gctatgctccttcgaggccgtaaactgacagacccgctgcgtggctgattcagtgtattgcgtttgaaaatgatgtatccattggtgtaaattacaagtaggtcaaagccgaagttaaaacc

SEQ ID NO: 180067 - DNA, 122 bp, Homo sapiens
ttttgtgattgaaatagcatttaaaaaaaaaaaaagactgacattgtggagagatacaaacgtgtatggacatggtcatctttaatctctaactgctatgacactcagagaggttgagaggc

SEQ ID NO: 180068 - DNA, 122 bp, Homo sapiens
gagatctgcagacactcttctgggccccccaagtaccgggagggagctcctggttccccccgcagccagcccaacagcttctcacgcctaccaggtttctccaatggggctcctggcccagg

SEQ ID NO: 180069 - DNA, 122 bp, Homo sapiens
ttaagagacccttcagcttctcggtgtaggtcaccagtcatgtcacgctcacaaccctttcgcctccctctaggtcaggcaccgcatccaagttaagcaaccgacgccggctccttggtgtc

SEQ ID NO: 180070 - DNA, 122 bp, Homo sapiens
gggaacgtccctcgggccgggccagggccgccgacctttgtctgcctctcgcactccctgcgccgacccggccgcccagacggaccccagcgccccaacccgctaccctcacgcctgccccc

SEQ ID NO: 180071 - DNA, 122 bp, Homo sapiens
cccgaggcctacggagcagttaccttctacggcaatttcaagggtggatggtgcgagcgccgctggggcagctggcgttctggttcttactccgtgggaaaatggccctgagcccgactggc

SEQ ID NO: 180072 - DNA, 122 bp, Homo sapiens
tgtttttttcatttttgacttggattccaccctggaaatgtcctttactgtggatcctcacggctccagagttcatggcagtcgcccggcacctacatgctgggtccggagaaagggtcgcg

SEQ ID NO: 180073 - DNA, 122 bp, Homo sapiens
cagtgacaagattcatattctgatgtagactctgttgccagagccagtgttgagccagtccgcctcttccccgggaagtgcctgcccttccctcctgttagggttggctctcgagcttgtgt

SEQ ID NO: 180074 - DNA, 122 bp, Homo sapiens
gactcggtaaattaatttgtttggaagccagtgaggtggactatgttgaggtagcagttccgcaccacgactttggagccaaagaaaaacccaggccgaaaaagcgagccttgatgtctttg

SEQ ID NO: 180075 - DNA, 122 bp, Homo sapiens
aacctcgcccccggcccctgaagcgcagcgccgcagccccagtcccggcgggggaggccgcgtcctgtactgggtcctgggacccttgagaccccacacttctaataattcagccccaccct

SEQ ID NO: 180076 - DNA, 122 bp, Homo sapiens
aagttatggaaaactgtgatgctgcagtgaaatgaaatcaggctgctatgtgtcaggctgcgatgtggggccctgtgtcctgagtcacacaccaaaacaggaaatcccctattctcatcttg

SEQ ID NO: 180077 - DNA, 122 bp, Homo sapiens
ctagagttgggcccgagagtctgcatttcacaagctcacaggggatgtgtatgctgctaccgcactttgagaggtgacagcctatgatcactaacaagttacttaacctctctaagcctcag

SEQ ID NO: 180078 - DNA, 122 bp, Homo sapiens
caaaacgctgtccgctcagagcgttgaaagggcgggggcttagagattgtccaatcagggcgccgcttcctgagctccgaggccccgagggcgggacgtttcgtcctccctgccgcgcgtgc

SEQ ID NO: 180079 - DNA, 122 bp, Homo sapiens
aggagaggaaggaaagagaataggacattaagcaggaaacatggccgctggattccgcggcgaccaggtctctacccgcccggcgtagcttaccctgtacgaccaccgactgggtcatggtg

SEQ ID NO: 180080 - DNA, 122 bp, Homo sapiens
tgtctaattcatctttataatcttaacacagtgccaggcatatcaaaggccttcaatacgcgttgattgaattaaataatgccctgttgggccagaggggaacctgactccagccctggctt

SEQ ID NO: 180081 - DNA, 122 bp, Homo sapiens
ttctccccaactctgaggttgatcagtggccacaagctcctgaaggccttgccttgccaccggcatcctgctgcccctgccacctgcctctagcctctccagaggcggaccacagctgccca

SEQ ID NO: 180082 - DNA, 122 bp, Homo sapiens
tccccttccctaaggtaaggggtcgttttcacactcaccagagctcctgcgggctgagctcgccccctcccccgacttctttgcggggcattttctcttgctggtgtattacgtgtcatttc

SEQ ID NO: 180083 - DNA, 122 bp, Homo sapiens
aaatcacgggtgggaggcaggcttggttcccgcttggttccccctgcactgggaagctgccgccccgcttcccttgctcacacagggctttgcagtagtggtggcagccgcggcagaaactg

SEQ ID NO: 180084 - DNA, 122 bp, Homo sapiens
gtgcggggagagaagctgtgcggacgccgggcccggtgataccgtcgagccggcggggtccgtgttcaggcatcctcagaacgaatcgtctttggttgtgtttggaataaattcacttccat

SEQ ID NO: 180085 - DNA, 122 bp, Homo sapiens
gatttccaccccttaccaagcagtcactaatccccctcccttagggggaagcaaagtaaacgcggaaaatggctatgcaaaaacaatttgtcaattgcagtaggcattcatagccagacgcc

SEQ ID NO: 180086 - DNA, 122 bp, Homo sapiens
caccagtggaagcggcaatggcagcgctcaactcgtgtctgccggagcacgttgtgcccacggccacagcacaggctgccacagccatccaacaggcggctggtcttgttgcaggcccggcc

SEQ ID NO: 180087 - DNA, 122 bp, Homo sapiens
agtcctgggcttggcagggacttctggggccagactatggttgtccacagtggcggtgtccgacattccagcaggtctgtgatgcctgtcccactgccaggagtctaagagcctctagtgct

SEQ ID NO: 180088 - DNA, 122 bp, Homo sapiens
aggatggaagcgctggcgccgggggcgggcggcccggcatgtagtagcggtggtgctgggcgacgtgggccgcagcccccgtatgcagtaccacgcgctgtcgttggccatgcacggcttct

SEQ ID NO: 180089 - DNA, 122 bp, Homo sapiens
aggcggcactctgcgcgctggctcgtccccccacctccccgaggcccggcctgggccggacgctcggtaccccgcgccgctctgcgctccatgacctccacccagaccctacgccctcttct

SEQ ID NO: 180090 - DNA, 122 bp, Homo sapiens
atcatcaccattgtcctcatatatgttagaccattttattgccatgtcaagctctggaggcggaggcttcttctcagtggtgtaggtctcaggaggtggtacataatttgacttccatattt

SEQ ID NO: 180091 - DNA, 122 bp, Homo sapiens
caaaaaataaaataaaatagccaggcttggttgcacatgccttattcccagcctctgactcggtggggcatcagcagtgatgccctctattcagaggctgaggcagaggaatcacttgagcc

SEQ ID NO: 180092 - DNA, 122 bp, Homo sapiens
gtgcgaggtcggtcgcggtgcggccctgggggatgggagagcggggggagggggaggcggcgtggggggaagtgaaaggaagagaaacagtcttcctgcttcaggtttttccttcttcctgg

SEQ ID NO: 180093 - DNA, 122 bp, Homo sapiens
ccggataccaaaggctagtaccagcctcatcatttttacaaccaaaaaggtaaccttgcccgctccccatacattcccactaggaggtgtcagaaccacttccggctgagaaccactggaat

SEQ ID NO: 180094 - DNA, 122 bp, Homo sapiens
tgtctgcctcagcagtctcagcagtttctaactaaagctgacttttagttagaccgaaaccgaacacatggcatcctgccaggatgacctgaagtcatcctcacgtttcctttccacataaa

SEQ ID NO: 180095 - DNA, 122 bp, Homo sapiens
tcaagctagatatccttgtatttttccattgctttagccaatgaattgtcatttgcttttcgctatgttttgttttctgctgaggccaatttgggctgggcttctgacacatgcattccaga

SEQ ID NO: 180096 - DNA, 122 bp, Homo sapiens
cattctacagacgaggaaccgcccctcccggggttgtgtaactcgcaccttgacagccagcgcaggagctgacccgcccaggcggcccctgcagaggcccagcacactcaacaccgcgaccc

SEQ ID NO: 180097 - DNA, 122 bp, Homo sapiens
gaatggacgagtctgtggtcctggagcccgaagccacaggcgaaagcagtagcctggagccgactccttcttcccaggaagcacagagggccctggggacctccccagagctgccgacgggc

SEQ ID NO: 180098 - DNA, 122 bp, Homo sapiens
ctccccatgtggcaccagcttaggggctcagtcatctgttcactgactgaatgggacccccgggctatatgttatatctcaaaacacagcatgagggtcaggcatggccactcccctcctca

SEQ ID NO: 180099 - DNA, 122 bp, Homo sapiens
tggggaggccggggcatgtcggcatgtctttggcccaaggcagcgaggacgaggcagtcccgggccaggactcagggaaggggaacttgcttgcaaagggtagaagacactcggaggctcaa

SEQ ID NO: 180100 - DNA, 122 bp, Homo sapiens
gacctagttctgcccccatcccggggggccttatttctcaggccagctgagtattagacacgataaagactctgtgggttctatcctgactcatgttttatggggggctgggtgggagggtt

SEQ ID NO: 180101 - DNA, 122 bp, Homo sapiens
tcattcatggagacttacagggaggcggggcggccctactgcagtggggaccccttggggcgtaggatgcacagtgcaggcgcccaagcctcgcgcccaccggagagcagccacggtgcagg

SEQ ID NO: 180102 - DNA, 122 bp, Homo sapiens
actcacttctggcaacatagccttcaagaattgagcagattccactgttagagagttcttcgttagtctacactacactgatttcctgcacctcccttctatggctcctatttaaccttcaa

SEQ ID NO: 180103 - DNA, 122 bp, Homo sapiens
cacatttttctagataattatgcttgttcctaaaaatagaactcttcattaagaaacaatcgctagcattactaataattatgaacatttatttagctttgtttccatttaccacatagcct

SEQ ID NO: 180104 - DNA, 122 bp, Homo sapiens
cgtcacccagggccagggggcgtggcctgaatggggcgtggccagggcgggatctgcggtcgcatcccgcccccactctcagtcccagcggccgccagacccgccggagttggacccgagca

SEQ ID NO: 180105 - DNA, 122 bp, Homo sapiens
tgaaaatatcttagttagaatgttctagcaaatgtggatgttcacctaaagcaggtacttcggaactttctccacaggaacccacagtaaaaaaaaatttttttttacatgagcatttttaa

SEQ ID NO: 180106 - DNA, 122 bp, Homo sapiens
cctgcagggagagagacacggccggcagctgcccctccctgagtcaccaaacaggaattccgggacgtctggctggccctggaaggcacggctagcttacaaacccccagtcttcaggaacc

SEQ ID NO: 180107 - DNA, 122 bp, Homo sapiens
attctaaatgtagaggaataaatgacctttataactcttattagggttaatgaaacttcccgcacaaaaacatgatgacacctctgagtgacagactttctgtgcaaagcataaacattttg

SEQ ID NO: 180108 - DNA, 122 bp, Homo sapiens
tgagaccagcctgggaaacataccaggcctggtctctacaaaaaattttaaaatatcagccgggggtggtggctgcggctgttgtcccagctattcgggggagctgaggcggcagaatcgct

SEQ ID NO: 180109 - DNA, 122 bp, Homo sapiens
agggcctgccctccggggccctgcgagaggcctgctacctctgtggggaggactgtaccccggatgcccgggcggtcccctccaggatcctcaacggcaacgccaggagcgccatgcatttc

SEQ ID NO: 180110 - DNA, 122 bp, Homo sapiens
gaattgtgtttggcttttccttttggggccatgccttggagaagatgactccttcagagccgctgtgaatattgtagatctcattatttcagataattactttgaccatccttttcaatttg

SEQ ID NO: 180111 - DNA, 122 bp, Homo sapiens
cctttcttcatctttgttctaaggaaaaaatctgccttcaggagtcctaaacaatgaaagcgctcttcattatgtctatgagtttggatagagtcctgtggcacagagaccatgcctggtaa

SEQ ID NO: 180112 - DNA, 122 bp, Homo sapiens
cccgcagccctggcaagcagaggccggcggcctgtggcgcggggcagttgtgctggctgccgggcggggctgctctgggtctgggtgcacggagaggagcgcggagtgaagcgcacggtgca

SEQ ID NO: 180113 - DNA, 122 bp, Homo sapiens
tatttcccttatgtctctgagcacaagttcactttgaccctcacaacttgcctgggagagcgacaaggtattaatctctttaagtgctgaagtcacaggtaattactcactctgtttatctg

SEQ ID NO: 180114 - DNA, 122 bp, Homo sapiens
ccctgagctgcaggaactccctcgtcacagcttaaagcactgccacactggtgacctccgcgtggattcgctcctgaaggtggagtttcaagtttcgaatagagaagtttccgtggccgtcg

SEQ ID NO: 180115 - DNA, 122 bp, Homo sapiens
tgctggctcggtgacgtccccaggtggcctctcatccagcccacaacagcctgcaaagtgcgagcctcgaccctgtagggacccacggtgctgtcacttcttgggggggtgtgtgtgtgtgt

SEQ ID NO: 180116 - DNA, 122 bp, Homo sapiens
acgctgcacatttgccactcatctgaacggggtcgagtcgcagggcgggcgccttgtaagcgtcacatttagttttgctgtgaagcgagtcaggtggtggctgtaagattacctagccaggt

SEQ ID NO: 180117 - DNA, 122 bp, Homo sapiens
ttgcaatctgcagagaggcctggcggtgaggcggaggagctccaggtcggggaaatgtcccggagattgaagggaagccccagggagagggccgctgctcgccaggctccgcaggcccgacc

SEQ ID NO: 180118 - DNA, 122 bp, Homo sapiens
ctctgaagccaggaaacccaagaggaaatgactgagcccgtctgggtccccgcccgctcgcgctcccctggccacaccctccgcctggacgcagcagccaccgccgcgtccctctctccacg

SEQ ID NO: 180119 - DNA, 122 bp, Homo sapiens
ctgcacaagacccctggacatcggtttgcttttctttgagccattcacaaactagttcctcgttcctgggaccgtccctagtgtggataaaagccaacttcccacagtctttgtcggtcttt

SEQ ID NO: 180120 - DNA, 122 bp, Homo sapiens
ggagagctcacggctgccggggtgttttggcagcgagaacaagcgagctgcgcctgagaacggccttcaggcctggcgctaaataataagtcgttgttatgtgttatgtatttatgtggcat

SEQ ID NO: 180121 - DNA, 122 bp, Homo sapiens
ttctccctggggagtatgacactccccgacgagcaagggaagtacactcactccccaggacggctccgcagacgcagaccgaagcttatggtgggagggtgcattctaggaagaggaaatgg

SEQ ID NO: 180122 - DNA, 122 bp, Homo sapiens
tctaagtcatcttctcgcagttgtccttggggttcagaggggcctcagtcagcaacacagcgtgctcctcaagagccacacccggctcgttgtagaaggtgtggtgtccctctccctctccc

SEQ ID NO: 180123 - DNA, 122 bp, Homo sapiens
ccacgcccacgacgggcccggcgctccagcgtctcctggagcctggccaccgttccttttcgtggtagctaatcccagcccacgctcttctgtctgacccaactcccgcccgggtttctgga

SEQ ID NO: 180124 - DNA, 122 bp, Homo sapiens
ggtcatccacctgcctcagcctcccaaagtgctgggattacaggcgtgagccaccccacccggccaagaggtgttaaaatctaaatcagactatgtcatgcctcagatctgaacctttcagt

SEQ ID NO: 180125 - DNA, 122 bp, Homo sapiens
tcttctggcgtccagggaacttgaacttggccctgcgcaaggcttcaatcacatgctcctcgttctgaagcttggtgcggatggacatgatgacttgaccaatgtggacccgggctacagta

SEQ ID NO: 180126 - DNA, 122 bp, Homo sapiens
ctcctgtgcccagctggggacccaggcatgacaaagccctgctcctgcggcaggggagggcgtgggggggtgggggggcgtggggagggagtggggagggctgcaggggagggcgtggggag

SEQ ID NO: 180127 - DNA, 122 bp, Homo sapiens
aagcctgagtcgaacacgaaaggaagatggtcgctgaagcgaaggggagtcatttgtgtccgttccataaatcaagactgtcgcctttcgaaaaggggaggtgtcgcagtctgacagcctga

SEQ ID NO: 180128 - DNA, 122 bp, Homo sapiens
cattctaggagccatccttgcaggaagtctgcagccactctttgccaaggtgttaaatcacgtatttcaataaacacatctatgcaagtttacattccagctcccttcatcaagcaccctca

SEQ ID NO: 180129 - DNA, 122 bp, Homo sapiens
gcctccagaggactccggggtccaggagcacgaggccttgctgcggtcaagagatcaggacgttcccatgcctgtgtcctggggttgggccgtggatgccacgttcccatgtctgtgtcctg

SEQ ID NO: 180130 - DNA, 122 bp, Homo sapiens
ggcggactgggcggggctccgagcggggactgggacccagaccgactaggggactgggagcgggcggcgcggccatggcgggctgctgcgccgcgctggcggccttcctgttcgagtacgac

SEQ ID NO: 180131 - DNA, 122 bp, Homo sapiens
acgccagccaagacttcctcgcctttaccgtggcattggggcagtttttcaggctctctacggagagagaagtgggccagtaagggagagggctagagagaggacaccagtttacatagggt

SEQ ID NO: 180132 - DNA, 122 bp, Homo sapiens
cattctctgggaaccctcgtaggttaaggtgccgggatgcacgtttgccgctttttttcccggtgaaacttgagctgtgagcccagaaaccctagggaccggagcccgatggaatgaagcct

SEQ ID NO: 180133 - DNA, 122 bp, Homo sapiens
tggcctaaaggatagagggcacagagttcccactccagaagcgacacagcacatccctgccgccccagggccctgacggccttgtgggctggcaatgcccagtcgcctctctcctgggtctt

SEQ ID NO: 180134 - DNA, 122 bp, Homo sapiens
tcgctccccaggagccaactgagtctgtgttttgccggggagaaggcgtctggatggtcacgggtaccatatacaatagtcacattgactatgacgtccttcaagtgggaaaagcccttcaa

SEQ ID NO: 180135 - DNA, 122 bp, Homo sapiens
tctgcctgtgctgggagagtctctgaccctcttagcccatccccatcattcatccagaggcgcaggcaggccgcctgccaggatagcagatcccactcagctctggcctcaacattcctctc

SEQ ID NO: 180136 - DNA, 122 bp, Homo sapiens
ctacgcccagcagaagcgtcaaggtcagagaaatcagcaaagacagaggcacgctccgaccgaaggagactagagggatgcggtggccaagccccacagggatcgggccgcgcccttccacg

SEQ ID NO: 180137 - DNA, 122 bp, Homo sapiens
catactcatgtcacaggacacaaatgagaaaccccaaagactcctcttgcctgcacttttcggctcaatcaccacacctagaataaacaaacagcataaaacacaacagcttccatttagaa

SEQ ID NO: 180138 - DNA, 122 bp, Homo sapiens
ggagcatttctttggtggtgtggggatcatcctcctcactgtgatggcctatgaccgctacgtggccatctgtaagcccctgcactacacgatcatcatgagtccacgggtgtgctgcctaa

SEQ ID NO: 180139 - DNA, 122 bp, Homo sapiens
gaccttcgcagtgagtgttacagctcttaccacggcgcgtctggaattgttcgttcctcccggtgggttcttggtcttgctggcttcaggagtgaagctgcagaccttcgcggtgagtgtta

SEQ ID NO: 180140 - DNA, 122 bp, Homo sapiens
tgggcaatgggtttggggaacaccgggagaggcacacggacagcgaacagagggagggcccggcaagcactgactttcccgcagcacgaagagatccgtctgcttgtcggagttgaggtccc

SEQ ID NO: 180141 - DNA, 122 bp, Homo sapiens
ccaccagagcggcccacacaacgcggcctctggacctgcagggagtcagagggccatccccggaggccgagataggctaagccgcccatatcccacgggcaagtcctatcctggcgttccca

SEQ ID NO: 180142 - DNA, 122 bp, Homo sapiens
agggaactccctgaccccttgcgcttcccaagtgaggcagtgcctcaccctgcttcggctcgcgcatggtgtgcgcacccactgagctgcgcccactgtctggcactccctagtgagatgaa

SEQ ID NO: 180143 - DNA, 122 bp, Homo sapiens
tcagagcgctaagtttcaaggaggcggcgctaaacaggccctctagccgggagcctgtcgcgacccgagcgaccgtgggtcgaccccgatccggaagtgacgcaacggcgccaagcacttcc

SEQ ID NO: 180144 - DNA, 122 bp, Homo sapiens
ttaaatgcagccataattagagtaatttttcatgtagcccgctgattacagcgtttttaccgtcaaagataattacctgtaattttcttccacttttaatactaaaaagccatctttattta

SEQ ID NO: 180145 - DNA, 122 bp, Homo sapiens
caaaatctaggtttggggaaagtctggtgacttttgtgagcctggggcatctttgggaaacgcctgccctcttgagtgtgcctttcagatgagtgcgaaatatcattgtcagataaaggggt

SEQ ID NO: 180146 - DNA, 122 bp, Homo sapiens
gaaggaaattcagaaaaaaacgagaacctggcaccaccacacgcaagctttccgctcggccgctgccgccaacgccgccgccaccgccgcccctgccaaacggtttcaaatccttgcgggcc

SEQ ID NO: 180147 - DNA, 122 bp, Homo sapiens
gagctggcactacaggcatatgccaccatgcctgcctaattttcgtatttttagtagagacggggtttctccatgttggtcaggctggtctcaaactcccggcctaggtgattccccacctc

SEQ ID NO: 180148 - DNA, 122 bp, Homo sapiens
ctagtgccaaaatcggccaagcagatggcactggtgcgggctctctggggacacactggacgaggggccttgcatccctgcacccttggaagcagcctgtttccgacgtctaggagcactca

SEQ ID NO: 180149 - DNA, 122 bp, Homo sapiens
ggaaatgtattccccgggctcctgcctgggcctcccctcctcctccacggcctctccttccggaatatgtagtagctgccgccttcatgccaaacaacagcaacatcaccttgtcttctggg

SEQ ID NO: 180150 - DNA, 122 bp, Homo sapiens
ccattcccaggacataaccctggacttacatcactttatgctgagaaattatttggggatcgctcctgaatcaactcaggaagaaagtctttataagattagaatccaatattcaatcaaat

SEQ ID NO: 180151 - DNA, 122 bp, Homo sapiens
cgcgccgccgccaggggtgctgcgcttcccacctgccgcaggacgcctcgagggccggtgcggtgcccactgggctgccgctcctcccggctcagagctttccagccgccgagaacgtgcga

SEQ ID NO: 180152 - DNA, 122 bp, Homo sapiens
cgtctgcctgtgtgtgtacccgtgcagacctgtgtgtaccagtgagcatgtacagggtgccgtggccagcccctctcctcctagccccctcccctgcctggccccagatgtctgcaaagacc

SEQ ID NO: 180153 - DNA, 122 bp, Homo sapiens
ctgagaatgctggatggttaaccctctctgcacccatctacaattatttgcaaagcacttcgatatgctttcacttttcccaaagatatgtgtaccagactgtctcaatgtatagcagtgtg

SEQ ID NO: 180154 - DNA, 122 bp, Homo sapiens
agcaatcctcccgcttcagcctcccgagtagctgtggccacaggcgtgagccaccacgcccggcttgagttagtgatttctgaggtgccccgttcacctgacaaaaattctgcatttattaa

SEQ ID NO: 180155 - DNA, 122 bp, Homo sapiens
ggctgcagagagctccagcgcaagggtggggggcgatgcgccagggtgggctgcgctgggcgctacctttcacaaaagaccagggaccccaacgcgcccgcgaccccagagggccggtcctg

SEQ ID NO: 180156 - DNA, 122 bp, Homo sapiens
tcccaggctacgtgcaggcctgccgcgccctgatgattgctgcctcggtcctgggtctgccggccattttactgctgctgactgttcttccctgcatccggatgggccaggagcccggtgtg

SEQ ID NO: 180157 - DNA, 122 bp, Homo sapiens
aaacattacaaacagctaaaatgacagctgcttgagagaataatcggtaagtgccacaaccgggctagaaaaggatgaaggacaagctcctgcccactcctttggaaactccacacctgggc

SEQ ID NO: 180158 - DNA, 122 bp, Homo sapiens
tatcccacctctcctagatctctccccaagcacctcagatatcccaaattaagtcatcttcgagatctgatgccccacttcccccaaggtttccatctctgtgtcatcagcactcaagtcag

SEQ ID NO: 180159 - DNA, 122 bp, Homo sapiens
ggatcagggacactcagatccccctggactgcatccgggctcccgggcattcctgcattccggtctcccagtgtcaccaggaatgcatgttttcaatagctctgggctgtagagccgatccg

SEQ ID NO: 180160 - DNA, 122 bp, Homo sapiens
ccatataaagcagttagaagtgatcataagagcaatgtagagccctgaggggttaataaacgaagtaccatgaaaggacagggattttagaaagatttgtttggctgccttgtagataataa

SEQ ID NO: 180161 - DNA, 122 bp, Homo sapiens
ctggtgtgggccagctggtgttgggtggccccagggagtcacacagtctgtacccggccccgagatcctctgctgtaactgcagggtcacaggcatcccgggagaatgggcctccaccctca

SEQ ID NO: 180162 - DNA, 122 bp, Homo sapiens
tgggcctcacgcagatgccacggctctaccctgctcggctgctggcttgtgggaatgctccgggagagctctgtggcctggtccctctggatctcagcctccatccaggaaaaagcacccca

SEQ ID NO: 180163 - DNA, 122 bp, Homo sapiens
tttgtcccctcgccggcggtgcggggagcgtaacatttgagtagcctaactctcacagcgcgcactccagcattgttttgctggaagattgttactgtggtaagcggctggtagcctgtgtt

SEQ ID NO: 180164 - DNA, 122 bp, Homo sapiens
cagacggggtggccgggcagagacgctcctcacctcccagacggggcggcccggcagaggcgctcacttcctagacaggacagccgggcagaggcgctcctcacctcccagatgaagggcgg

SEQ ID NO: 180165 - DNA, 122 bp, Homo sapiens
aacctgggtttcaacacagctgaggcctggcatagtctttctgggcgcctctggctggctcggtctgaaaggtgggacagatgcaactggggcctccccgggtgcagcgtgggtggctcctg

SEQ ID NO: 180166 - DNA, 122 bp, Homo sapiens
tcccatatccctgagttcttatgatttgcttatttacttttaaaagcatcagtgagggtccgatttatcattttttgttgttgtgcccaaaacatttgagaatctgtagttgtttagaagtt

SEQ ID NO: 180167 - DNA, 122 bp, Homo sapiens
tcttctcgtctttgcagtgggcatgttcacacgcaacccgcaggctggcggtgacggtttcgtggggcgatgtgcatgagcaggtgctcatgaagccggccccgcccacacatgcagatggc

SEQ ID NO: 180168 - DNA, 122 bp, Homo sapiens
gaaggggagtgggcaacaaggtagggactagacagagactgggaggatcaacatggaaaacgacattagcctgctaagccaccttggcagctgctctggcattgatttcagtcaagatgtca

SEQ ID NO: 180169 - DNA, 122 bp, Homo sapiens
gaattacgaggcccagcagtcgaactcccactcagcccaaccctggaagtcctatgcgggcggtgccatcccggcaagactgaggggcgggaataggccaaaaagcccacaacaggattcgc

SEQ ID NO: 180170 - DNA, 122 bp, Homo sapiens
gtttgaacttttctgatcacggggtgagagggtctttgcagttgcagagccgtggcgcggcgcctggatttccgacacactgcagcatctgcatccttgccgtcacccctcacaccccctgc

SEQ ID NO: 180171 - DNA, 122 bp, Homo sapiens
gagcgggaatgttgtaacagccctagatcaccttggaaaaatactgtttgcctgccagcccggaactgccattccaggaagcagctgctggtgaatcagcagcctcctctttccttgtggct

SEQ ID NO: 180172 - DNA, 122 bp, Homo sapiens
agtcagtgcccctctctgggtatcagtctccttattggtaaaaagaggccattggtctggcggcatggagcatcccaggaatgcattttcacacgaggaagaaacttctctccaatctgctt

SEQ ID NO: 180173 - DNA, 122 bp, Homo sapiens
ctctccagctagactgtgagctccaagcagggagtgtgtttgccatgttcaccactccagcgcctagtcctgtgctgcatctagaggatggccagtacatttttgttgaataagtgaataac

SEQ ID NO: 180174 - DNA, 122 bp, Homo sapiens
ccccagaattgaataggagagtctattcatccctctcctacttctaaaagaaacctggctcgctctctgtctctctctctctcccccctccccccctccgtgcgcgcgcgcgcgcgcacaca

SEQ ID NO: 180175 - DNA, 122 bp, Homo sapiens
cccagttgttgccaaggtggtgacgggagcgcagcgctggggacctggaggcggctgcggcgcaccagagctctcaagcatcccgccgccagcagagactgcgttcaagtcccagcacactt

SEQ ID NO: 180176 - DNA, 122 bp, Homo sapiens
tagggaacatctgaatagggggtgggctaattttgttaaatttactttttgatgcccccacgttttgttgctagtgttaatgaaatgccaccaatggctggcttaaatgtagtgctgccaat

SEQ ID NO: 180177 - DNA, 122 bp, Homo sapiens
cagcccagacccggaggcaccggagtcctctccccaccctagggcgtaagaccaaaaaaacgccaatgccagaaagaagacactgcacatgcgcagaacgtttccctagccctactccagaa

SEQ ID NO: 180178 - DNA, 122 bp, Homo sapiens
tgtccggccggtctaagcgggagtctcgcggttccactcgcgggaagcgagagtctgagtcgcggggcagctccggtcgcgtcaagcgggagcgagatcgggagcgggagcctgaggcggcg

SEQ ID NO: 180179 - DNA, 122 bp, Homo sapiens
aggacgaagagctggagagcgccaaggacgacgagcgcagctgccgggccgcgagtcggacgaagacactgaggatgctagtgaaactgacctggcaaagcatgatgaagaagactatgggg

SEQ ID NO: 180180 - DNA, 122 bp, Homo sapiens
actcaaggtgtaattttcattctatattgcccattctggtgaagacatgagtgtttgaagcgggctgactatagttttatgataagccatattttagctttaaataagaactgcattgcctc

SEQ ID NO: 180181 - DNA, 122 bp, Homo sapiens
tgtgtgtgtgtgtggtgtgcgcgcgtttgcggaggcatgaaatgcggggaaagaggctggcgcttggcagtgactgcctagaatatgatacgaatagtgatccttctttctgtctgccccta

SEQ ID NO: 180182 - DNA, 122 bp, Homo sapiens
tggcgcgctgcgctgacaatggatgaatgagagccttgagttctggatgctggcgcgctgcgctgtgaatgggtgtttgagagccttgagttctggatgctggcgcgctgcgctgtgaatgg

SEQ ID NO: 180183 - DNA, 122 bp, Homo sapiens
cgaactggcggccggtgctttggccgatcccgcgccgctgcctcgggccttgggcggcagcgccccccgcccaacccgcctctgcagcgttcctggcgtcagcccctatcctccagcttcct

SEQ ID NO: 180184 - DNA, 122 bp, Homo sapiens
aagcagtttggagcaaagaaacacacagaaggaagaaccgagatcagccatgataatggccggacacccagacagcctcccgtgcagtcctcattcccagtcacagatgggggaagaaccac

SEQ ID NO: 180185 - DNA, 122 bp, Homo sapiens
tggggtattattggcaccggttgcagagagggcctggggacatgagtgtgtggcacagaacgcaggtgttcagatcggcagcgtctggactgagcctgggagctggaaggctggagatggtg

SEQ ID NO: 180186 - DNA, 122 bp, Homo sapiens
atccgttctgcaagctaggaaatgaggctcggtattggcggaggccacactgttgagaggcggtgttcaaccccagggctgtgtgtcccagctctgcaaactcggtcacagcctctatctcc

SEQ ID NO: 180187 - DNA, 122 bp, Homo sapiens
ctgaaagctatgactctagaatcttagcaaagagtgccatctgttggaaagattcggcagcgttttgatttttacagaggcaggacaatggtcttttcagctccagtcagtaatttatcaca

SEQ ID NO: 180188 - DNA, 122 bp, Homo sapiens
gttcccgggggctgcggctgcccgtgcttccccggtccccacccctgccccccggccccccgacccagctctccggcctcagaggctgtgacaatggactatgactttaaagtgaagctgag

SEQ ID NO: 180189 - DNA, 122 bp, Homo sapiens
ctgggtgaaaaggaccactctgaccctctgtttcatcatctttaaaactggaacaatgaccgctactgaacggcaccacctaagatgtgtgtgaaacacctagtacagcacctgacccacaa

SEQ ID NO: 180190 - DNA, 122 bp, Homo sapiens
tcgctaatgcctgtaatcctagtgagacagtcaagtaaaaagggctcccaagacaatttacgagcactgggaggatggggtggaaccgcgaaaagttcgcgccatttgcagtgggggaagag

SEQ ID NO: 180191 - DNA, 122 bp, Homo sapiens
ccagctctccctcttttcagccagctttctacggaacatcaatgtaggtgcaatgatatccgggatgttggggtggttacccctcctttagcccagagtggggagcagcccagctagcaagg

SEQ ID NO: 180192 - DNA, 122 bp, Homo sapiens
gtggtcacacgtcccgtcttgggtgtggatggagggcagcccggggcagagcctcagccccgcggcccctgagtggcagggctgactcccgtcgacacgagcttagaaagtggattcactgc

SEQ ID NO: 180193 - DNA, 122 bp, Homo sapiens
ggccgcgagggacggggagggcggcggccccctgcccgcccggctctgacaggcccgggacggttcccaccccaaggccgcccagggacctcttcgttgcgaccctagccgcgggatgcagc

SEQ ID NO: 180194 - DNA, 122 bp, Homo sapiens
tttgtgtgaacaggcacgcagctgcaggtaagagacgcttagggtatccgcgaagaagaccgcggagtcaccttagtcctatgtttcccagctggctgtggaagtaggcacgatgaaatggt

SEQ ID NO: 180195 - DNA, 122 bp, Homo sapiens
ggagggaaaggacaggctccagggcttcctgcctctgagtgaaactcagccttgcttcaccggcagcgtctgctctttcattctcaccacaggctgcccagattgtaaccttggcctgcatt

SEQ ID NO: 180196 - DNA, 122 bp, Homo sapiens
gaccgagctgagggcctactgtgtgcctcgcacgcagggtggagcacggagccctgggagcgcatgaggcactgaccgagctgagggcctactgtgtgcctcacatgcggggtggagcacgg

SEQ ID NO: 180197 - DNA, 122 bp, Homo sapiens
ttcgtcctgctgcaagttgggaagaaagataataggaatgctaattccttcttgatgaaacgaccacaacacgctggagccggccttggaccctacgtttcaagattggcctgcttccagcg

SEQ ID NO: 180198 - DNA, 122 bp, Homo sapiens
aatgcggccctgggaccgtcaaccttggaccagctgcagccgacgcctggcagggctggtcgctttgcgttgaggaggctgctgtccccgaagctggccttttaatcgcacagggcaggaag

SEQ ID NO: 180199 - DNA, 122 bp, Homo sapiens
aggcttgtctagtcccacaaaggccatttgtagtttatgtgtgcccttagagctactcctcgaaggaatattatgcagctataatattatgcagctatgaaaaataatggttgctaggactg

SEQ ID NO: 180200 - DNA, 122 bp, Homo sapiens
ccccggcccgcccccgccgcacgctccgctcccgcgttaacccttccccggcctctcctccgccccctgccagccccccgcggccccgagggcattctcagcccgagttctgatttcttctt

SEQ ID NO: 180201 - DNA, 122 bp, Homo sapiens
gtatgtctgtggtatcttgattttcccatttctaaagatgaatttcacaaagccataaagcgtgaaattagagctggacttaagactcattggccgaccatcctgtgtcctggcctggccct

SEQ ID NO: 180202 - DNA, 122 bp, Homo sapiens
acccagccgcttaagcagaccatccacgaggaaggctgcaacagtcgcaccatcatcaaccgcttctgttacggccagtgcaactctttctacatccccaggcacatccggaaggaggaagg

SEQ ID NO: 180203 - DNA, 122 bp, Homo sapiens
ggctaatttttttgtagttttgagaggtgacatcgtgctggctcgctcttggcgcctcctcggcccggtgcccactctggccgcgcttgaggagcctttcagcccaccgctgcactgaggga

SEQ ID NO: 180204 - DNA, 122 bp, Homo sapiens
cctcgatgggcggggagaagcgtgggctgcgcttgcgcactgagaggcggccgaaggggccgaggcggctacgcgtgcgcggtgggcggagcgcggctctcctaccttctcgggcagcccag

SEQ ID NO: 180205 - DNA, 122 bp, Homo sapiens
agaacaaaaatgcatatctatccccctcccgttccctctgcctcccctcccaaaagaacgcgtctgcggggacagatggccctgtgtcagcgtccctgtgtgatattgatgtgaacagcgag

SEQ ID NO: 180206 - DNA, 122 bp, Homo sapiens
tctaatattacctaatgatgtccagcccatattcagatttctccaacggccccaaaaatacgtaatttttttctgattcaagagtcaatcaaggatcatacattacattttgattattatat

SEQ ID NO: 180207 - DNA, 122 bp, Homo sapiens
tgggcgggctcggctggccggtccccgccacgcaggccggtccccgccacgcaggccggtcggtgagccacttcgcaccgccacagccctagcatcgggccaccagccggggtgaagaaagt

SEQ ID NO: 180208 - DNA, 122 bp, Homo sapiens
acttcatccaatccgagcatcgggtgcgtcgtgctcttttctaggagcgtggggtgccttcgcgaataaaatctgaaggcatctctgctctcgcggagcttgttctttcttattttcaagtg

SEQ ID NO: 180209 - DNA, 122 bp, Homo sapiens
ccgcgccttggggcctttcgggggccctgcgaggtcctcggggcgcccctgccccgggtccggccgagtcactggacagagctcctgcctccagggaatctgcgcctccgctccccggcggg

SEQ ID NO: 180210 - DNA, 122 bp, Homo sapiens
ctgaggaggctgaggtgggaggattgcttgagcctgggggatagaggtggcagtgagctacgatggagccactacactccagcatgggtgacagagcaagaccttctctcaaaaaataaata

SEQ ID NO: 180211 - DNA, 122 bp, Homo sapiens
gagggagaattttctctttggtgagaggtcacagctgtcactctgctaaatcaagacagccgttctttactgggattccaaagatcttaaagagtcacccaaaaaggaatcaaaggtggtta

SEQ ID NO: 180212 - DNA, 122 bp, Homo sapiens
aagaagacctcatgctgtgaccctctagatggaagcactgtctgttgtctaagaaaagatcgtgcatccctttagagtgttactgtttgagaaaagcaacgttgaagatgctgctgatcttg

SEQ ID NO: 180213 - DNA, 122 bp, Homo sapiens
gcagccaccttgcctctctgagtttgtcctcatgtgtctctggggctggaactcggtgtccgacctggtgatgggtcaggtgtgatcaggtgtgtggggctcggtctgcatgtgcagggctg

SEQ ID NO: 180214 - DNA, 122 bp, Homo sapiens
gcccgcccctgccctgggctggcagagttcttcccccagctgcaggtagacgtgggaacccggcagggtacggagctgctggcgcggcacgctgattagaagcggcgactgcccgtcaagca

SEQ ID NO: 180215 - DNA, 122 bp, Homo sapiens
cattctcaccatgctgcaaggctgctctcggactcctggcctcaagcaatctgcccaccgcgtcctcccaaagtgctggatggaattacaggtatgagccacagtgcctggcctccctttct

SEQ ID NO: 180216 - DNA, 122 bp, Homo sapiens
agtatcggggaggatgcggagaaactgcgcccggtgcatcgctggtgcagaatcaaatggcgcagccgctgtggaaaccagtgtggtgggaggctcctcaaaacattaaacagacaattacc

SEQ ID NO: 180217 - DNA, 122 bp, Homo sapiens
gcctctatgccaggccatatgggcttggcacgtcacgggcagcagctatcacatgagagacggtgattggcatgcgtctgcactgggggagagccggctcccccgggacccgccgccatctg

SEQ ID NO: 180218 - DNA, 122 bp, Homo sapiens
ggcgagagtggggaggggcggcaaagcaaggcgaggagccatttccgcccgtggcctaggcggggcttccttctggacgccacctcacaacgtgtgttgctttccgctcctcggaacatccg

SEQ ID NO: 180219 - DNA, 122 bp, Homo sapiens
tcagatgcagatttgcccagcagcccaatggacctacttccatcccccgatgaggggctgcgcatttgttgaggggaagtcattttgttcgcatctgagagtgacacagcgacccctcgaca

SEQ ID NO: 180220 - DNA, 122 bp, Homo sapiens
gccaagaggagcggattcctgtcgtgggccagcgtgttctgcgtggtggccgggatggaccgagactgggtagatgccatcctgactgctgacgtttgggacgtgagacatctgggggcatg

SEQ ID NO: 180221 - DNA, 122 bp, Homo sapiens
ccaccactaccgatgtggctgcgccagccagggaggggaggcgggtagcgggcactgcggcgctctgcagccaatcggaagccggggttgcactggggagctctccccccactgggccccac

SEQ ID NO: 180222 - DNA, 122 bp, Homo sapiens
agcttctcattcttcaaggcccagtttagtccaggacactttacctttccctgctctccccgaagtctcccagctgggtgagtcacacctcctctgggctcctgctctatcccgtactttct

SEQ ID NO: 180223 - DNA, 122 bp, Homo sapiens
gtttcccaacgtttttcatagcagccgggcacactttggtgaccccaacgagaaacctctcggcagcagacaggagctgttcaccttccggaagcagggcctgtggcagcctgacagggaga

SEQ ID NO: 180224 - DNA, 122 bp, Homo sapiens
aatacaaaaaccagtcaggagtggcggcgcgtgcctggcaggccgaggcgggagaatcaccggagcccgaggcagggaggttgcagcgagccgagatcatggcggtacagtccaggctccgc

SEQ ID NO: 180225 - DNA, 122 bp, Homo sapiens
cttcactcctgaaatcagcgagaccaggaacccaccaggaggaacgaacaactccagatgcgccgccttaagagctgtagcactcaccgccaaagtctgaagcttcactcctgatctttaag

SEQ ID NO: 180226 - DNA, 122 bp, Homo sapiens
tacagaaaaggcactgaaactgccatttctacccaaataaccaccacacaaagatataatcgatacgttgcaagaagtgaaaaaaaagaaaaggaaaatgacagattttgtagtcttgttat

SEQ ID NO: 180227 - DNA, 122 bp, Homo sapiens
caggcaagggatccttcctgcccacccccatcccacagacaagaggatctggaaacatcacgaaaacgactgatcttcctgctgatggtgggcgagaaaaaattatctttctctgaacacta

SEQ ID NO: 180228 - DNA, 122 bp, Homo sapiens
ttaaaatgtacataattcctgatgctcctctctgatttcaaaatagctttttaggccgggcgcggtggctcacgcctgtaatcccagcactttgggaggctgaggcaggcggatcacgaggt

SEQ ID NO: 180229 - DNA, 122 bp, Homo sapiens
cagaccttagagttccttggttttggatcctagctctatcactcataaacagtagaacctcgcctcatctagttgctccctttaaagctcagtcttctcacttgtaaaatgggataatacct

SEQ ID NO: 180230 - DNA, 122 bp, Homo sapiens
atagcgagacccgtctctacaaaacagaatttttaaaaaacttagccaggtgtggtggcacgtacccatagtcacagctactcaggaggctgaggcaggaggatcacttgagccaaggaggt

SEQ ID NO: 180231 - DNA, 122 bp, Homo sapiens
cagcgcatgttccacgtgagcgtcggcgcagagctccgggtcatgggaggccagggggctcggggaccagaacgcaggcctccggctcccgctgccctgtgcagcctgccatcgttggcagt

SEQ ID NO: 180232 - DNA, 122 bp, Homo sapiens
ctgcctcactgtccgggaaacgcgtgccctcgggggagcctttgccaagccggtttttcccgaaggtgaccagatgctcctgggccactgcctctgagacctcagggaacggagatttttgt

SEQ ID NO: 180233 - DNA, 122 bp, Homo sapiens
tttctgcattcgtttcttttagagctaatggggacacaatattttgaagtttttccatttcgggtctacagcatttagtggtattttccttatagttatgttttccaaatacttctcaattt

SEQ ID NO: 180234 - DNA, 122 bp, Homo sapiens
gctttgaatttagacagtctagagctaaagaattccttctttacctagagattagctgcacggttctgttgaatgcaggtcctgggccctcagcaccagccacatgtattctgatttagttg

SEQ ID NO: 180235 - DNA, 122 bp, Homo sapiens
gggtcctcccggccggtcctgccatattagggcttcctgcttcccatatatggccatgtacgtcacgacggaggcggacccgtgccgttccagacccttcaaatagaggcggatccggggag

SEQ ID NO: 180236 - DNA, 122 bp, Homo sapiens
cggtcacagccatcgctcgcgtacgcccccggactgacgcctcccgccgggagccctcttcgaatcccgcctgcgcaactcccacgccacagccctgggccatccctgctcccgcgcagccc

SEQ ID NO: 180237 - DNA, 122 bp, Homo sapiens
atgggggatgcaggcccgcgtggctgcgcatatccaggacacaggacacagggtgggcgacgggggatgcaggcccgcgtggctgcgcgcatccaggacacaggacacagggcgggtgacgg

SEQ ID NO: 180238 - DNA, 122 bp, Homo sapiens
gactgttgctgacgacagaaggtatataaagctcctgttcagatttagaagttaaagctacgatgtgagatgtttcaggcatgtttgtagaattacctttataatctacttcaggagttata

SEQ ID NO: 180239 - DNA, 122 bp, Homo sapiens
gggaagggaggaagggacctacaaagagccagggtacacctgcctcttgtgctgagggcacgtgccagcttctctgccagtaagccttttgctagctaacatttcccaccctcccaaggccc

SEQ ID NO: 180240 - DNA, 122 bp, Homo sapiens
tttgccaagaggtagccgtgtcggggagctagagttctccggggactctctcctgcccctcgtggccctctgtggaaccctcgttttaggatctgcacgccgtttccagtcgcgcgcgcggc

SEQ ID NO: 180241 - DNA, 122 bp, Homo sapiens
gggtagaccgggcagagcgagaggcggctttggctcgtggggagcggcgacccaacccagcgcgcatcccgcaagccctcccggctgccccggaccttccccctcgctacctcggaacaggg

SEQ ID NO: 180242 - DNA, 122 bp, Homo sapiens
caggcgtgagtcaccatacccggccctcgattatcttttaagcaggggatctgacatcaccgggtcagcattcctggttggcaaaaatcaacagagctgtggtagggaccacgagctccaga

SEQ ID NO: 180243 - DNA, 122 bp, Homo sapiens
aaagctatgtgaatgaggcatgatttcctttgtcagtatcagccaggtcatcgctgaccccggagttgggctgaccttccttggccgcccggatgccgacccccaatgcccctgtagcctgg

SEQ ID NO: 180244 - DNA, 122 bp, Homo sapiens
ctcttgttgagatcacgtccattgaagtagtcctgaagcagccgctgcaccttggggatgcgggtggagccccctactaaaacaatgtcatggattttagccttatccatcttggcatcccg

SEQ ID NO: 180245 - DNA, 122 bp, Homo sapiens
gtttaaggcaactatgtgggaactagaaccccagtccagggctctttccacaacacactacgttaattatctaattaaaatctaaattgtagagtgcagaatacaaccctcttggaatatgg

SEQ ID NO: 180246 - DNA, 122 bp, Homo sapiens
gattgttctcttaagcagatatcaaactcgtagccagcatctggcagcgcctgctcccagcgctttgcctcctcgtcgcctgctgggttcaggttggcatcgtaccagccaccgaagcggtt

SEQ ID NO: 180247 - DNA, 122 bp, Homo sapiens
gtggccttgggaacagctcttagccactgggagtcttggtttccttacccgtaatatgaacgcagaggctccgagctccaagcatggtcagacttagtcacgttttcaccctgcaatggagg

SEQ ID NO: 180248 - DNA, 122 bp, Homo sapiens
caccctctaattagtgctctcatcgctgcctctggcaccacgcatgctgtaggtggttggcgtgacactggatgcctgcccctgcagtgctattaggcaccctgtggcgcacaaacaaaaag

SEQ ID NO: 180249 - DNA, 122 bp, Homo sapiens
tgtgggtgacagaggtcctgaccagacttggagacccagcaagagaggaggcatggtgaccgaggtttcaatttgggtgacatggatatactagtaccacaagagagaattagggaagaagt

SEQ ID NO: 180250 - DNA, 122 bp, Homo sapiens
gaccagacatatcagcgtccctggggaggtagtcagacacgcaggctcttcagcctactgcgacctactagaccgtgatgtgtagtttaaacaagacccgcaggtgtctggtgtgtagttca

SEQ ID NO: 180251 - DNA, 122 bp, Homo sapiens
gtatcgacgatagacaatgtgcgatgtgatgggtgctgggaacttaacgaactctccacgcgcctagacctcattggatccactttctcttgggctgtgagccggtaaaaaaaaaaggggtg

SEQ ID NO: 180252 - DNA, 122 bp, Homo sapiens
ctcgcactgcagacctcacacccattttatgttttaaaaccaggaggccacgcccctcagcggcttcaggagcccagacctttgggggcccaccttccgcagctttccattggccccacggt

SEQ ID NO: 180253 - DNA, 122 bp, Homo sapiens
gataacaatgaagaggacatgggctctgcttttaaggagctcacagcttttattcagtcacgaaacatcgattgggcacctactgtgtgcaaaaagccctgtgcttggtattgcacgggaga

SEQ ID NO: 180254 - DNA, 122 bp, Homo sapiens
ccgagcagcggcagcagcagcggcagcaccccaggcgctgacagccccgccggccggctccgttgctgaccgccgactgtcaatggagctggaaaacatcgtggccaacacggtcttgctga

SEQ ID NO: 180255 - DNA, 122 bp, Homo sapiens
cgccaaaagctttttcagttcctgcaggctgagccacacaactcacttggcaaagcagctcggcgtctcagcctcatgctgcatggcctcgtgacccccagcctcccttagctgctaagcct

SEQ ID NO: 180256 - DNA, 122 bp, Homo sapiens
ggctccacccctgggtaacgctgcagaggacgtggtcaggaaagggcaggtttccctcctcgccaaggaaggtggtagagaggtgttcagactcgccttccctccctgggcccagcagcggc

SEQ ID NO: 180257 - DNA, 122 bp, Homo sapiens
gtgcacatcctccggcagcagccctcagtacaacatctgcgagcagatgatccagatccgcgaggaccacatgcgcttcatttcggagctggcgcgctacagcaacagcgaggtgcgccccg

SEQ ID NO: 180258 - DNA, 122 bp, Homo sapiens
acggatcgggaaactgaggcccgaacgttaagggaactgcggggacgcgctgttaggaggcggcagagctggtggtaacctgacccgtgggatttcaaagttaaagcccttttcccacggcc

SEQ ID NO: 180259 - DNA, 122 bp, Homo sapiens
ggtggcaggctggggagcacagcccggttggaggcggtaggagcccgctcgccccccacccgtcactaacttgcagattgcagggcgagtgggcgtccagaggctgccctcgggtggagtgg

SEQ ID NO: 180260 - DNA, 122 bp, Homo sapiens
ccacctcccggggctggccggctgtggggagccaggcggccgcaggtaaacggcttggggcggcgccggcggcgagggcgctgcacggagggaagcgcggcgccggaggggttaaccgcggg

SEQ ID NO: 180261 - DNA, 122 bp, Homo sapiens
gacttgacaggaatgcatgagtgtgcccctatactaaggattgctgatggcttagggcggcgggatcgtcttacaaattggctagatgcgcatgacctcgatcatgtatggccctcccgccc

SEQ ID NO: 180262 - DNA, 122 bp, Homo sapiens
ttcaaagcacacgttccccgtgacctgttacctgttgctgaaccttgttccagtgcacagcggcctctcgcgcatccccacccacccgtcgggttgggaactggtcaaaaccatcatccttc

SEQ ID NO: 180263 - DNA, 122 bp, Homo sapiens
agaaataaaaatgggatgcctttaacagggatgtgaagtctttgccgccgcgccggcaagcgccgcccgggaggcagcggctggaggagcggacgggccccgcggggcccgagggcaaggag

SEQ ID NO: 180264 - DNA, 122 bp, Homo sapiens
tagcccaaagggaggggatggacagatgaccgctgaaccttgggagcctctgatttctttcgctgtgcctgatgtcattaccatgaacactgatgcccaccatgtgccaggactgagtccgg

SEQ ID NO: 180265 - DNA, 122 bp, Homo sapiens
aggtctaataacctagtcccacaaaaagagcaaaagatgagtggaggttgtcagtttgaccgcagcgagaggcaaatcaggaaagggatgcataagcagacctctgccgagcccagatgact

SEQ ID NO: 180266 - DNA, 122 bp, Homo sapiens
gccccgggtctgacgggggagtgcccgtggctcggggtaagtgggccaggcccggggacgcgggcaccttgctgctggccctcggccccacgcacctgcccttggctgccggcctggccctg

SEQ ID NO: 180267 - DNA, 122 bp, Homo sapiens
ccgtgctgtctccatagcagccgtgtcgtttcacacttgcaccaacagtgcacagggctccggttccccacgtcctcaccgggtaactggggttccggctccccacgtcctccccgggtaac

SEQ ID NO: 180268 - DNA, 122 bp, Homo sapiens
gattcattagttgaggcttttcagtttcacaacaatggtcctgagcaacagctgctggtacggcaatgctttgtaatcaccatgatgagttaccaggggttgcttgcaagcaccggttctca

SEQ ID NO: 180269 - DNA, 122 bp, Homo sapiens
ggaccttcaggtcctccccggcgccccactcagggccctgccccagcagactgtaccccacgacccagccccctgagcagggcttggatcccacccgcagctccctgccccgctccagcccg

SEQ ID NO: 180270 - DNA, 122 bp, Homo sapiens
aactaaccgacctcaccgagctgggcaccgcgcgtggctcgctgggctcagcgcctgggacggagtaagggctccacagtgttaaatccccctgccaaccaccacctgcagcgctcgacgca

SEQ ID NO: 180271 - DNA, 122 bp, Homo sapiens
ccgggcgcgcgcgcctctcagagccccgacgacgcctcactaataacacaggggtattttcggatttaaaggcaatacatgatactgataggaagctagaaaagacacagaaatgcagggaa

SEQ ID NO: 180272 - DNA, 122 bp, Homo sapiens
gcactaccatgtgctcgccagagaggatagagagtaacagttactgcctgtggcatttgccgatcttccctaacaggagtgtttccctgaactgtaaaacttcccgcaaattgcacacacag

SEQ ID NO: 180273 - DNA, 122 bp, Homo sapiens
gcctccaagtctatgcgccgaatgaaccctgactccatgggccagagagggtgcctcctccgctcacctgtctctagctggctggtcctgtccagggcttgctagacctccacgctgaagtg

SEQ ID NO: 180274 - DNA, 122 bp, Homo sapiens
tgggcaccccaaggactaaactgtagctgatttctctcctagcgccagacctcagctgcacgtgtgtgcgtcagaaccaggagtgctggaggcagagcgtattacatgaccctcacactact

SEQ ID NO: 180275 - DNA, 122 bp, Homo sapiens
aaattgaataagaattccattagaggcccacagttttagcctggaggaaagccctgataacgtgtgagaacaatctgtctcctaggaaaggtcacctggtcctgctggcagaggctctgttt

SEQ ID NO: 180276 - DNA, 122 bp, Homo sapiens
tctttctcttctgcggtggccctggcctggtgctaggactgcgcgcctcccctcagtacccgcggacaccctgggcttccctgggcccagcatctgcctggggcctcgccctgggctccccc

SEQ ID NO: 180277 - DNA, 122 bp, Homo sapiens
gtggcgattgctctcaaatacctggtacctccccgtcaccatagtgacttctaagagttacgctcccttcctcttcccgcgatacttctacgcggcacgtcatccgagtgggcccgagaccc

SEQ ID NO: 180278 - DNA, 122 bp, Homo sapiens
gggctcagatgggcacttcatcacagctgcctcccacgcgcgacgtcttcagatgggagtcgcagccccacccagagccccattacaaaggctgccagtcactgcgggccacaccaccctga

SEQ ID NO: 180279 - DNA, 122 bp, Homo sapiens
gggatgctgcttccagatccagtttttctttttgagatatagttccctatttttgtgtaccgcacctctgtttcttgtttgatacatgcatattcctgcatttgttaagattcgtttggttg

SEQ ID NO: 180280 - DNA, 122 bp, Homo sapiens
tacttgttgggagtaatatacaagtcttcaacatatcatctttttgtcttctacaccagccgcttggttactttggaagcaattatttaactctgttaaatttctctgttaacttttttctt

SEQ ID NO: 180281 - DNA, 122 bp, Homo sapiens
ggcgtagcgagcaccgcagccacgccctcgaggaagcggcccagcagcggtgacaggaagcgctcctgccacatgttctcaaggcgcacggtcaggctgttggccagcaactcctccgtgat

SEQ ID NO: 180282 - DNA, 122 bp, Homo sapiens
gggttgtggtgagggttgagagataatagctatccagtctggcctcacttaataagaaggcgctaacttaactacggggatggctgccgcggccccgtccgcgccgggcaccggctaccgcg

SEQ ID NO: 180283 - DNA, 122 bp, Homo sapiens
atacagctcatgctatgtggctgccagaggtcagtaaggaatctctactcctcgtcatcacgtgggagttcagagtgacagagtgccatcttgacaactgtctccacaatcccaaaggcaga

SEQ ID NO: 180284 - DNA, 122 bp, Homo sapiens
ctgctctacaaaccacaattgtttctcaaaaatcagcccctgccaggcacaggcaggtgacgatcctctagcactttataaaatgtgctgaagggaatcgccggaaaggaaggaattcaaag

SEQ ID NO: 180285 - DNA, 122 bp, Homo sapiens
gcataacccagctcctggcttaggaggcattggcgtctgggcacaggtgtgtgccatgaccgggagaagctgtgcgcagcctccacctgcctgccaccgttgcctctgttctgctgcacagg

SEQ ID NO: 180286 - DNA, 122 bp, Homo sapiens
tggctggagctgctttgctgctcaaaatgcaggcagagctcgggcagattcccccattgacgggactgcagcaaactgtcattcccacctgtgtcaggcgctgctggggaggaaactcctta

SEQ ID NO: 180287 - DNA, 122 bp, Homo sapiens
aatagctgaaacctccaagaacccggagaacacactttcagttctatttcgctgcagccacggttccagctcctgacacctaaggaacaaatgaaaatcttcccagagctgagaacacctgt

SEQ ID NO: 180288 - DNA, 122 bp, Homo sapiens
aatcaaagtccagaacggtcttgggcaatatcaagctgtggttcagagcacacatggtggcgtgagactgacctgggtttgagtcccagttccactgattactacctgtgtgaccttggaga

SEQ ID NO: 180289 - DNA, 122 bp, Homo sapiens
gccaagaagatcttcctcaaatattacccccgctgggtggccggctcttggtgatagattcgccaccactgggccttgttttccgctaattccagggcagattccagggcccagagctggac

SEQ ID NO: 180290 - DNA, 122 bp, Homo sapiens
gcccgggaggccgccttgggcgcccgcctcccccgccgctctccaggggtccccggccgccgcccccgccccaccccaccccgagccccgcggccacctggggtcgctgacgagcagcagca

SEQ ID NO: 180291 - DNA, 122 bp, Homo sapiens
ggcacccgggggcggtggttggagggccacagcctcctccccacggccttgctgtgttctcgttagagacttcggagagacgtctcccgcccagcggtggaccccgcagcaaaccgccttgg

SEQ ID NO: 180292 - DNA, 122 bp, Homo sapiens
gcttgcggtggtaactccatctcagactcaacaggggacgtgtctgcacagagcacacggcgcaggggttgggcggggaggacggcaaggtcaagccagctcaggggacatggtgggcaggg

SEQ ID NO: 180293 - DNA, 122 bp, Homo sapiens
cagtgtccgttgttcaacccaccatgcaccctggtagcattagcttcgtcaagcctgtgccgagtgcctgagatgatgaccgttgccacctccctgagtcacaatcgtcgtcatgaatgcct

SEQ ID NO: 180294 - DNA, 122 bp, Homo sapiens
aaatgaccaataactaagcatcttatttgagttgtaaaagaactctcatctgtgtttaaacgaacatttaaaatattcctaaaaaagaaaaacattctaaggttatttatttttttttttaa

SEQ ID NO: 180295 - DNA, 122 bp, Homo sapiens
caggaaaggagtgggagagccagccacagcccacagtggacttatttggtttacatggtccgttccgtccgaactcgcactgtaggctaaatggtcccagagccaaccccggcagccgcaaa

SEQ ID NO: 180296 - DNA, 122 bp, Homo sapiens
accgagccctgccgaacagctgagaattgcactgcaaccatgaggtaaatattttcccttcgtattcggtagtgctgttgagtcatcttgtccaatgcaaatcctgagaagctatgttccca

SEQ ID NO: 180297 - DNA, 122 bp, Homo sapiens
atatgtaggatcggtttccagctaagcagggaactccacagcgagttccctttctctccgcgtcccctcgaattgacctaaggtggatgtccctagcaccttattaattttctatcccagtg

SEQ ID NO: 180298 - DNA, 122 bp, Homo sapiens
ctgtgggaccatttgcctcggagcagcagggaagggcggcaggttccctgcctcccgtggcgactcttttcggagcaccaccctagggatgttcttctgccctccggagacgtcggtcttcc

SEQ ID NO: 180299 - DNA, 122 bp, Homo sapiens
agcacagactcggagagcatcgcgagggcggagcagtgttctccttggcacagacccgggcgggccaggggcaccgcgagggcggagctgcgttctgctcagcacagaccagggggacaacg

SEQ ID NO: 180300 - DNA, 122 bp, Homo sapiens
atagggcttctcgcccgagtgaagccttgagtgctcgataaggtggtgcttgtgtttaaacgctttcttacaaatctgacactgatgtggtctttttcctgggagaaagaacaagatgacag

SEQ ID NO: 180301 - DNA, 122 bp, Homo sapiens
gctgcgtagtccagcgtctacgccctcgcctttccctggctcctcagtcggcctggacaccgatactaggctcttctgtacagccctccagcaataccttccggggccccgcttgctgcctc

SEQ ID NO: 180302 - DNA, 122 bp, Homo sapiens
gttttaatttattcacttgtcaatcttatgaatgcctcatgaaccccagctattgatttccgtggccaatgctatttttcctgtttattataatatattgtcccattgttgccggccgtttg

SEQ ID NO: 180303 - DNA, 122 bp, Homo sapiens
ccaagtcttcacagctcactggcggttgctaaggccgctctcaccgacctctctcagccccgcccacccagcctgagttattgacatccagttcatccaatggacagaaaaaaaggccttta

SEQ ID NO: 180304 - DNA, 122 bp, Homo sapiens
aaagtaaacttcggagttccagagaggtcactcaatctcctcctggccttgcagagatgccgatatcagctccatgtgaaaactggtggggaaaacctacaagtccaggctttcacttttcc

SEQ ID NO: 180305 - DNA, 122 bp, Homo sapiens
gtccagcgccatgtctagcactgttaattctttcagtgctttcgttttgcttgggcctctcggggagggcgcggaaaagagcgcaagccagggtctaggaccacacaagtgaattcgtgttg

SEQ ID NO: 180306 - DNA, 122 bp, Homo sapiens
ccgggtcacagcggcgtgaatcctgcccgcaaggcgcgctgactcggttccgaaccctttcgcgggccctagaccccgtggagagttcacctgcccggcagccaggccttcacgcttctctg

SEQ ID NO: 180307 - DNA, 122 bp, Homo sapiens
cgagcgcgaccctcgctgcgctgtccgcccgttgagcttccctggtgagcttggaccccgcgccctcgaccatccagccccctagggccggcgactgccagcccagcaccttccggcctctc

SEQ ID NO: 180308 - DNA, 122 bp, Homo sapiens
cccgcgtcagccctcactgatgggccccgagagccagagccccgactgcaaagatggggccgcagccactggcgccacggccaccccctcggccggggccagcggggggctccagccgcacc

SEQ ID NO: 180309 - DNA, 122 bp, Homo sapiens
tggcagtgtggtgtacaaatacatcttccttggtgtcgttcctgtggatgaaaccatatccgttccttacattgaaccattttaccgttcccaaaaccttcgttgcgatgacctttttgtgc

SEQ ID NO: 180310 - DNA, 122 bp, Homo sapiens
ggtccaccccccagctcctggagtccaccctccagcccccggggttcacccaccagcccccggagtccacccaccagcccctggggttcacccaccagccccaggggtccatcctcccccat

SEQ ID NO: 180311 - DNA, 122 bp, Homo sapiens
ggaagtagcaaagacacagcatgaaggaattgagtaggggccaagcaggatgcttcggtccggagcagttggtgattccccttaacgtgagaaagataaggcatccaggtgtagggaaatct

SEQ ID NO: 180312 - DNA, 122 bp, Homo sapiens
aatggatgagcagataagcaaaatagggtttataccttcaatgggatattgtttggaaaacgaaggaaattgtgatgcatgttacaatgcaagaggaatcttaagggcattatgttaggtga

SEQ ID NO: 180313 - DNA, 122 bp, Homo sapiens
gttacacgcaggagttaattacgcttgctgctcccttttcactgaggaggtggacaactccggcctgctctctttcctttacttccaagtttaatattgaccctgtgacaggatgggccgag

SEQ ID NO: 180314 - DNA, 122 bp, Homo sapiens
tgtctatctccgtgtggtcataggtccaggagcggaacttgagggtgcagttctgctggtcgaagggaaagtacttcacctcaatcttgcaggcgctcttgtagatggcagggggcagccac

SEQ ID NO: 180315 - DNA, 122 bp, Homo sapiens
ccacttaacaatacacctaaaagagggagggaaggaaggaaggagtacggttatcacaggcgtgtggggagagggaaaccaggtctgcctagaaacccaccttctggtcctgtgagtcatag

SEQ ID NO: 180316 - DNA, 122 bp, Homo sapiens
gtacccttaagtctcgaagtgaggtgagcaagcttctctacttgctgtttcttgaccccacgctcccggtgggccacaaccaagaaagatgcctgtccttgtcctaatatggtacgtttttt

SEQ ID NO: 180317 - DNA, 122 bp, Homo sapiens
ccgatctggggcgtggcctcgggtgccgctaaatatgcgggcaagccccgcccacccttccgctccggtccggcttcctggctgctattaagatgttgcctgcggccttctgggaagtcgcg

SEQ ID NO: 180318 - DNA, 122 bp, Homo sapiens
accgacagccaacctcaactcttcctctctgcctgggcaccctggctggtatcccctgcccgaacagaccttggggatctcatcggagatgacgtagagctcctgctcgccaatccaggcct

SEQ ID NO: 180319 - DNA, 122 bp, Homo sapiens
gcggctcgcttgggggcggctgcagctggggcctctgagtcgagatcagggctccctggtcggagcctcagcccaagctctcctccagcctctaacccacaaccctctctcccttcccacag

SEQ ID NO: 180320 - DNA, 122 bp, Homo sapiens
acaactctgagcagaacaactgccaatgtgcttttgcaaaacaacattctaattttacttcggttttcataatggcaaagtgattcattagttcctattacacattgcaatttcaaaatgat

SEQ ID NO: 180321 - DNA, 122 bp, Homo sapiens
cctcttagggccgggcggtgcccgtggctcaggctgcagagtagggaagcgagcggctgccgaggcacagcggcgatccggcgggggcggaaaatggcggcggcttcggaggagctaaatgg

SEQ ID NO: 180322 - DNA, 122 bp, Homo sapiens
ttgggcaggaggtagaagagacaagaatttattgtacactttgcctcctgctggctagaacgctaatgtagcccttgcagaggcaggctctggtttcagggacaggctgaggagaaagaagc

SEQ ID NO: 180323 - DNA, 122 bp, Homo sapiens
ctgctagagcccaccgagggctgccggcacacagctgcaaggtccagctttatctgctcacgccctggacactgcccggagccccagcaagttccacgtgtccttaacaccccagccctcct

SEQ ID NO: 180324 - DNA, 122 bp, Homo sapiens
tcctgccaggcaccggcagtggctctgtgtcccacgccatcatccgcaccattgcacccacgggtcacctgcacacggtggagttccaccagcagcgggcagagaaggcccgggaggagttc

SEQ ID NO: 180325 - DNA, 122 bp, Homo sapiens
tgacccttctccacggaacctgcctcaactcacccagctggagttgaaccatttgtcctccgcttctgcagagcagccctttatgttcagacaaacaaacaaataaacaaagatgtgctcca

SEQ ID NO: 180326 - DNA, 122 bp, Homo sapiens
actgctgtattactggttcattctgggaagcctgggcccagctccagcttgctgaggccacgctacggggtccacagcgtcgactgtccctgactctaaccagcgtctcccagagcctgcaa

SEQ ID NO: 180327 - DNA, 122 bp, Homo sapiens
ggtgagcatcatccatcgaaagttcagcgccatccagatgcagctgaagcagagcacctgcgaggctatgatgatgctgcgctcccgtttcctggatgccagacgaaagcgccgtaacttca

SEQ ID NO: 180328 - DNA, 122 bp, Homo sapiens
ctggacagcagtgatgccagggcccataaagcctcaggcgcccgtcattgctgctgcctgcgtgtgctcgctcaccgcgacggcggcgggctggaggaagctgtgcaagagccaagtgtcta

SEQ ID NO: 180329 - DNA, 122 bp, Homo sapiens
gtgagttcgcggttgaacaactgttcctttactctgctccctgtctttgttagtgtttctcggggttgtttctgtaggaaggtgggggtggtgggcgtgagagacagatgtgggcttgtttt

SEQ ID NO: 180330 - DNA, 122 bp, Homo sapiens
gatttagaagagctggcgtccccgcccgcccaagcctttaaactctcgtctgccagaacccgccaactctccagggtacaaagtacagcagggacgcgggtggagcccttccaagcggcgca

SEQ ID NO: 180331 - DNA, 122 bp, Homo sapiens
gctggcatcagtagcactggcacggggctgcgtttctccaggcggtttgaaatctcagcccgaggatcagtgctcgaggggatggatgcccggttgaccctgatgtgctcattactcatggc

SEQ ID NO: 180332 - DNA, 122 bp, Homo sapiens
gagagatgatctgatccagagctgaagccactggtgtctgagtcagaggggctgctagatcgagagtccaggatgggccgggtgtccaggcgtgatcctctaactgagggtgctggaaactt

SEQ ID NO: 180333 - DNA, 122 bp, Homo sapiens
gggaggggctccaggagccttctggggctgagcctagatccggagctccgaggtgggtgtcgggggtcttggggtgagcgtcgtggcccagcgggtgctcacgtggcggcccttgcacaaca

SEQ ID NO: 180334 - DNA, 122 bp, Homo sapiens
tgcttccaatcacagcacaacacagtgacagcgaaggcatctgaactcagagggcatttccgccagctcaacaaatatttcaagcttatttagcatgatgagtcttgctctttgtttagtgt

SEQ ID NO: 180335 - DNA, 122 bp, Homo sapiens
gctcagctcagtgtgtggtgagcggcggcggcgcggccgggccggggagcgggcgcggcccggcggcctcagcatggaggacggcttctccagctacagcagcctgtacgacacgtcctcgc

SEQ ID NO: 180336 - DNA, 122 bp, Homo sapiens
ctggtttggatccccgggttactttctgtttcattttgaaatgttccctgtttctgcaaccggttgcctccaatgtcaagtaaaacgcaggactccttggagacgccagctgggcttctaag

SEQ ID NO: 180337 - DNA, 122 bp, Homo sapiens
gccacacccgaggagcaggggagaccggggggctgcggggtcagaagctccgggtgtccccggagactaggagggggacggcggggtccaggaggcggggtgggctccgccggcccaggacg

SEQ ID NO: 180338 - DNA, 122 bp, Homo sapiens
ggggccggtggcagggtggaagcggaggggcgtggccagcgagctgccaggcggcgagaacgcgctgggggaacccttggtccgctctgcgcgtcgctctaggatccccgaaaaggagcacg

SEQ ID NO: 180339 - DNA, 122 bp, Homo sapiens
cgctcaccatgccgacagtagaggagctttaccgcaattatggcatcctggccgatgccacggagcaagtgggccaggtgagttgagtccccgggcggcctgcagggcctggcgctccgcgg

SEQ ID NO: 180340 - DNA, 122 bp, Homo sapiens
ccgccctctgtctccagtctgtagatggacggcagatccgagtagaccaggcaggcaagtcgtcagacaaccgatcccgtgggtaccgtggtggctctgccgggggccggggcttcttccgt

SEQ ID NO: 180341 - DNA, 122 bp, Homo sapiens
tggctggtagggaatgctctttaataggcagcgcccctgcagggaggggactcagagtaacgattccatccgcacctgcagaactgagagcaccagaaactcctcacctgcgcgcatcatcc

SEQ ID NO: 180342 - DNA, 122 bp, Homo sapiens
cgcggctctgccgccttgctgcccctgtgagtccccgaactctgtcgtttggatccggggcgtggggactgcagggagccacaaaccaccctcctagtgcgctgggatctttgaggccctga

SEQ ID NO: 180343 - DNA, 122 bp, Homo sapiens
ccagcgacccagcgagcctcggcggaacagccgggggcggaggagaccgcccgctcccagcgcccagcccgagaggggaagtgataacaaggacatttccaggaagcttttcggagctgggg

SEQ ID NO: 180344 - DNA, 122 bp, Homo sapiens
tcagataccctagcgcacctagaacctaagcccaagggtccggaggatggagccatgagccggtcctggctccccaggactacagcacatagttctgcggtgctgaaccaagatcactggcc

SEQ ID NO: 180345 - DNA, 122 bp, Homo sapiens
tgccccaggcgtcagtgcacgccgggctcccggctccaggcaggcggggtgaggcagctccgcgaaggccactcgctggcgaccccttcccgggtctcctagccctggccgggctgcccccg

SEQ ID NO: 180346 - DNA, 122 bp, Homo sapiens
ctgccttcagaggaggctgagcgtcgtcacacgggccgggctgaggccctgggccctgaccgtgcagcctaagacaggactgtggctttaagaccctcctgacccctgacctctgcccccag

SEQ ID NO: 180347 - DNA, 122 bp, Homo sapiens
ggattgcccatccgcctgtgcccacgctttgtcccgttcctctatttttatttcctttcccgctcgcatccctctctgggacgaagtcgccccatcactcgtgggaacctcaggaaggcagg

SEQ ID NO: 180348 - DNA, 122 bp, Homo sapiens
ttggaaggagctgggtcattagcattgcgcaggaaaattacaggttattctgttataattcgaaagccaactggacagtcatgaatgcacacagatctgggccctgcattgcaccctggcct

SEQ ID NO: 180349 - DNA, 122 bp, Homo sapiens
agtttcccaaaggtcacagtcaacctagagggtgccacccacctcccttgttgggccacccggctggtgcccagaccctggccagtgacagggtagaaaaatagctcgggcgattgcgtgtg

SEQ ID NO: 180350 - DNA, 122 bp, Homo sapiens
ttctttccagcttcctctctctcgctatatgatctgtgcaaaccggctccccttctccttcggccacgagtggaagctttttgaagccctcaccagtgcagacgttggtgccatgcttctca

SEQ ID NO: 180351 - DNA, 122 bp, Homo sapiens
ggcaacgctctagacactttgagggttgctgtcagatctggcccaacctctcctatgtgacgggaaggatttcaggcatttcaagtgccccgcgcagtgactggcccggaattccgcgcgtc

SEQ ID NO: 180352 - DNA, 122 bp, Homo sapiens
gtatttaccgttcatgaagtggaagtggattaccataaccgtcttcatccacgagtcttccgatggaataggctgaggaggaagaggaagaagaggggttgtctcaggggtggcagaggcgg

SEQ ID NO: 180353 - DNA, 122 bp, Homo sapiens
ttttgtaaacaaaaaacataaaatacttcctagggatggtaaactgattcaaccagataacgcagggaaaatgcttcgcacgccgcctgacacgaacttactgtgcctggctgctgctgtta

SEQ ID NO: 180354 - DNA, 122 bp, Homo sapiens
ccagctagccctgggcaaactagtccatcttttggataaaataaacacctgcctcagaatcgcttgaacccgggaggcggaggttgcagtgagccaagattgcgccattgcactccagcctg

SEQ ID NO: 180355 - DNA, 122 bp, Homo sapiens
cacagccagggccggggcggggcaggcaggcgggggccacctctcctggcaggcggtggacgggggccctgcgcctcgtgctctggctgggagcgcgcagagctcctccatgctgtgggcgc

SEQ ID NO: 180356 - DNA, 122 bp, Homo sapiens
acacagcatcatccctggggttttgagcagagacactgaagccccgtctgatcgtctgatcgtgacagcgcacgagactaaacgtggactcagacgccttctgcaaaacacctgacccgtga

SEQ ID NO: 180357 - DNA, 122 bp, Homo sapiens
acctcgtgtttcacccgccttggcctcccaaagtgctgggattacaagtgtgagccaccgcgccctgctaaaccatgtttttaaaggttcaagggacttaagcttagagacacaaatgctct

SEQ ID NO: 180358 - DNA, 122 bp, Homo sapiens
ggaagggactaagggacggtggcgcgggcccggaccggggccccggggcggcggcacggccgatatggcatgctgtcacaaagtaatgctgctgctggacaccgcgggcggcgccgcccgcc

SEQ ID NO: 180359 - DNA, 122 bp, Homo sapiens
gaggacgtggcacagaatagcgtggaacccacgtcacagcttgcgcccaagagcatcacacgggagagaacctgcgtcctcaatgaacggcgttccaaaaaagcacaaccgcaccaagcatc

SEQ ID NO: 180360 - DNA, 122 bp, Homo sapiens
cccctactcccgaagtggcatctccactaaagctcgagatgctccaggaagttcccaaaccggctctccctgggcgcagtgcgcaccgccggcgctcccagatccctggaccacccggcctg

SEQ ID NO: 180361 - DNA, 122 bp, Homo sapiens
acaaccgtcatctccacagaggagcgacaagcctttatgcaatatggacaccaagaaaaccgccttcgaagacacgcaaggcaaaattcttgccagtgtccggaaatacccgtctctggaac

SEQ ID NO: 180362 - DNA, 122 bp, Homo sapiens
cggagacccgtgtttctgtatggaagcacgtggcgcaagggcagggaaatacttctaagacggcacaagagcggagcaatacttctaagaagagccacgcccacgctacgcctctgtgattt

SEQ ID NO: 180363 - DNA, 122 bp, Homo sapiens
taaatgtctcgttctaccacttgtctcttttgtgagaagagtttagtgaaaaccagaaaacgtaatctgtctatctactgcccaggatacaaatagttcataaggcctagtaatatactttg

SEQ ID NO: 180364 - DNA, 122 bp, Homo sapiens
tatccattcagaaaattacttcttttcagccactgctttgcttttgagccaagaggctggcgaaggccatatttaagcactgacctgcttcctgccctgcctgccccgacgcgccccccagc

SEQ ID NO: 180365 - DNA, 122 bp, Homo sapiens
agcctcattttataaatcagaccatttgacttgtctcccactaacttgtcaaagttccagcgagcaagttttagttccagaagccagatgcttgccactgccagctccctgaggtgggcgtt

SEQ ID NO: 180366 - DNA, 122 bp, Homo sapiens
gctggggcagaccaagggcggctggggtgctcatgccggtgccggcatcactgccggagccgccctgggcgcactgcacccagcgctgcttctctcgctggttctgtgccgctgctcctccc

SEQ ID NO: 180367 - DNA, 122 bp, Homo sapiens
agaagaaaaattttaacacccttcctttgacacaagctgatggcccctaagtgatgtcctcgcccagatggacagaagcccaccttcactggcaggcacccactgggaactgcattgttcct

SEQ ID NO: 180368 - DNA, 122 bp, Homo sapiens
agaggaacaggcacggagggtccttcaagtcacatgcaggcaagcgggttgctgaagaggcgagcagaggtggctctcagcagacggggttagaccagcggctcctcaggagttaataagca

SEQ ID NO: 180369 - DNA, 122 bp, Homo sapiens
cccaaatagattatcagttaatatgtgtagaggaatgcgtggtgaatggatggatgaactcgaattcaaagactgggtagctttcttactcaagatgctagttattttctaaaaaggggata

SEQ ID NO: 180370 - DNA, 122 bp, Homo sapiens
cttccagatccagtactttatcctgaccctgcagagctcaggatctgtggttcaggcctgcggctcagaggagggaatacggcacacaggtacgtgccaggccaagtgtgagggggtctggc

SEQ ID NO: 180371 - DNA, 122 bp, Homo sapiens
ggcccccgcagaggggttcagctgaggggacggcgccgacacaggctccccgcagaggggcgcggctcaggggacggcgacgacacaggcccccgcagaggggctcggctgacgggacggcg

SEQ ID NO: 180372 - DNA, 122 bp, Homo sapiens
tcccaggtccacagccggtgagaggccaccccgcccgccctctgtggccgccgggctggccgggccctcacctcgccctcggccctgctgttctcccagatcgctctgatccccccagcatg

SEQ ID NO: 180373 - DNA, 122 bp, Homo sapiens
gagccaggtgcggacccaggcggtcggacagccacggccaacgccacccggcactctacacggctgacccccccaatccatcaggactgcaaggccaaatatcacaccgtccggggcacccc

SEQ ID NO: 180374 - DNA, 122 bp, Homo sapiens
ccagccccccaccgacctactttactgtctccaaactcgggcagcccacctggcccccgacgaccccagcccctgcaccgggtaccccgacgttccatccagacccgcgtttcaccagggcg

SEQ ID NO: 180375 - DNA, 122 bp, Homo sapiens
cctcaggtgactcgcccaccttggcctcccaacaagttatgctgatcttggtaataacttcgcagagcgtgcttccatcagacatggaggatggtggggtcctgttttgttgttgttgtttt

SEQ ID NO: 180376 - DNA, 122 bp, Homo sapiens
agacttttcacacggggacaaattattacaggatatctgcgccccctgttccgagtcactcggggccatcggttacttcagcaggttctctgcatcacggacccttttgaggctcaggtaaa

SEQ ID NO: 180377 - DNA, 122 bp, Homo sapiens
tgggggctgggggggtggcgagtaaaacagccctagaataaagactacaactcatcaggccgccaccccaccaacaaaatctcttttgcgcgctcacgggcaagggtagagctcaattcacg

SEQ ID NO: 180378 - DNA, 122 bp, Homo sapiens
ttacacccccagcacgcacacaagaaatgtaacttaactgattatcctcacaaatcagtccggaaaaaattcaaaacacatgcacaggatttattttctcagaggctctgtggcatgcattc

SEQ ID NO: 180379 - DNA, 122 bp, Homo sapiens
attaattggaatgcttgtcagtatttgagttttcattgacttcaggaatagtcactaaagcggagtgaatttctggatcttaacctcatgagagaggtcaatagacctcatttgtaatatac

SEQ ID NO: 180380 - DNA, 122 bp, Homo sapiens
gggggtgcgcccactccagaaggcggccgtggtcagttcctcggagggcgcaagggatgccggcgacgcgcgggccgggagggtggacccagggctggggaggccaccgcagggcggcgaat

SEQ ID NO: 180381 - DNA, 122 bp, Homo sapiens
cttatcttagtaatttacagagatgaacttgctctctctgttgtaacaagtacaagtatacgtagcttcacattttatacattccattagaaaatggtgcagaaaaggaggatctctgacca

SEQ ID NO: 180382 - DNA, 122 bp, Homo sapiens
tctccacgtctctcttcccagccccctctttagtcaaggcctacccgagacctctggacgcggccctggccctgcgctcagcgtctcccagggtccctgctcccaagtccccgctcccccgc

SEQ ID NO: 180383 - DNA, 122 bp, Homo sapiens
cccaaagtgctgggattacaggcatgaggcaccactcccagccttaaatagcgatgttgacgatgcagttcagtataggtgcaggatcgaggtctgagctggacatataaatttggaaactg

SEQ ID NO: 180384 - DNA, 122 bp, Homo sapiens
aagggcgtttcagactttcctgtcagaagtgacacagaagtgcacatgttgctgtggggacggaagcatgccgcactagggaatccgatggccaataatggaggcaagacagaggacgcttc

SEQ ID NO: 180385 - DNA, 122 bp, Homo sapiens
ggctcgaagggggcctttatagtggatacctgtttcactcggagctcagggtctttgacgcgggaaggcaaagtctgtcttttggaaatggggaagtgggcacacagcacctgagaacagga

SEQ ID NO: 180386 - DNA, 122 bp, Homo sapiens
cgcccacttcaagcagcgcagagcagctgccggttgagtggtttggggggacgtttcctacgtggagcagacacccccagcctgtccagccccaagcctcagtgcccggggctgcagtcacc

SEQ ID NO: 180387 - DNA, 122 bp, Homo sapiens
tcaccttccttccttcagcgcccccaatcctgcccctttggttcccctctcaggtccctccggctgtggtttcaggttactccccagctgtttcaggccacgccccagcctgtgctgtccct

SEQ ID NO: 180388 - DNA, 122 bp, Homo sapiens
tcctcgggagacagggtctccagcaggctgtcgatgtcggggtcttcactcacctgccggcgatatttggctactctagacatcttggcaaaatgggctgtggctgccaggggctatcagag

SEQ ID NO: 180389 - DNA, 122 bp, Homo sapiens
gggctggcacccccgacgccccacccgccccccgtggcctagcagcagggcggggcgaggcgggtcatgcacccctaccagccagccactcccacccagccctcggctcccgcaactcgcgg

SEQ ID NO: 180390 - DNA, 122 bp, Homo sapiens
gggcaggagccgtgccctcgaggccgtgcccgccccgcccgccagcggcccccgggctcccgccaaggagtccccacccaagagggtgcccgatcccagcccagtcaccaagggcactgcgg

SEQ ID NO: 180391 - DNA, 122 bp, Homo sapiens
gagcggcctgtccgaggctacgccggcctcctggctgctgctggactgtgcttaggacagcgcccatgcctcggagggactctgtcccatgagaaccacctgtgcaaaggaacagagctgga

SEQ ID NO: 180392 - DNA, 122 bp, Homo sapiens
tactcgaggcagtgcgagaagaccagcatagcaaaaatagtttgtaccatggaatgtgagcgacaagggcctaaaaaaacaaactgaacaattcggattttgtcatctatgggtgatgaggt

SEQ ID NO: 180393 - DNA, 122 bp, Homo sapiens
gcggagcgacccattgcccggctctgccagcgcgctcctagactgcgaagcccctccctccgcgcgcatctgctcccgagtccccagccccgtgctgataggtgcagcccctggagtcgtgg

SEQ ID NO: 180394 - DNA, 122 bp, Homo sapiens
tttgggaaatgagtaacatgtagatctgtgaatagatatgtctgaggaagcaccaggcagcggaaatagctggttgcaggagcagtttgtcctgcccacctgaatcttcaggttccttcagc

SEQ ID NO: 180395 - DNA, 122 bp, Homo sapiens
gggcctggggaccggacagggagcaactggcagcagagggtgatgacagagcctgcattccggaatctgacccacaaagggctgtggcattcataggagaagccacggaagaccggcaggaa

SEQ ID NO: 180396 - DNA, 122 bp, Homo sapiens
aggcccaccaggggcaatgctcattccaagaccttaacttttaagagccctttgttccaacgttagtgtggacgatgctcttgcaggatgcctttccttttgggtcttagacaggtaattgt

SEQ ID NO: 180397 - DNA, 122 bp, Homo sapiens
cggctgaggggtccggggctgaggcagggtcatggtccggcaggacccggactgacgggtcgcgggcgggcggctcacgggtgaccgggtgaaggggtcttgggctgagggcacccgggctg

SEQ ID NO: 180398 - DNA, 122 bp, Homo sapiens
tatatgccctgagggaactaacacagttgcataggatggcaagaaacctatacatttttgcggaatgaattaataaaatctattgacttttgtgctctgcttttctcccttaactttattgc

SEQ ID NO: 180399 - DNA, 122 bp, Homo sapiens
catgaagatcccctagtaagccactgcacccagcaatggaggtgccctcacagccacgttcggcaccagtgcagagcagagcagaaagcagggcagaggggcgagtgccatgctccagacaa

SEQ ID NO: 180400 - DNA, 122 bp, Homo sapiens
agggtcacctgcccccacctccgctccatctctggcctctgctctaggactatggtgaggcgatgctaagccgtgacgttgcacaaaacagactcaaggctcaactcactggctggcctcat

SEQ ID NO: 180401 - DNA, 122 bp, Homo sapiens
tctgggacgagctccctctgggctgccaaagtgcccgggctaggtgcctaaaagtccagccgagcatgccaatgagacgtgaagccggctgggcttctgggactggtagggacttggagaac

SEQ ID NO: 180402 - DNA, 122 bp, Homo sapiens
ccgtggtggaggcagtggaaaggacctagcttctggatctatcttgaaggcagagccacccggatgtgctgatggtttggatgtgaaacacgtaagaaaagatggtaacggaggtttctggc

SEQ ID NO: 180403 - DNA, 122 bp, Homo sapiens
catcctcagccccatcaggtgggccactggggcccctggctcttcctctagagctttccacgccccgttcacctggctaaggcggggcgcaggcgtgcgtggttgatggcaacgaggaggtc

SEQ ID NO: 180404 - DNA, 122 bp, Homo sapiens
aaattcaaacagtagtctaagccctctagaaccttggtcctacttctccatctgggtactcgaagcccctaagaatatataacaatctgccaggacaccagttttattcagatattttgaag

SEQ ID NO: 180405 - DNA, 122 bp, Homo sapiens
acctcaggtgatctgcctgccttggcctcccaaagtgctgggattataggcgtgagccaccgtgcccgggctgtctattgatttcttatcagatgccaggatttggggtggtgtggaactga

SEQ ID NO: 180406 - DNA, 122 bp, Homo sapiens
tcccgcccgttttcccgctgctactcaagaaagtaactgtcccctgctgctctgtgtaaacgcggcaccttaaatgattattgcatggaccacggttactttgtgtgtctgtgcgcgctgcc

SEQ ID NO: 180407 - DNA, 122 bp, Homo sapiens
ggtcagcactccggcctcacatactgcagacggggttacgcagccgtggtctcttgaccacgctgctcttccataaagactccacaaacgactgcaaaagccgaaggctggccaccttctat

SEQ ID NO: 180408 - DNA, 122 bp, Homo sapiens
tgccatagctagcaacgggcagccggcgcaggggctcgggggagctcctcccgccgccagcgccaccccaaacacccatcaacagccatattgctgctactgctgccgccgccgccgccgcc

SEQ ID NO: 180409 - DNA, 122 bp, Homo sapiens
tgtaggccgccccacagatgtcacagccgtacatgggctccgacgcgtccacgtcatcctcgctggcctcatggctgttaggtgcctcagggttcttaagcagcatgccctgcaggtcagca

SEQ ID NO: 180410 - DNA, 122 bp, Homo sapiens
aggcgcgcggagccctgttgatgatccccggcaaacacaccgaggtctgccttctctgaacgccagcgcttgggtgcagcagaagggccccagaatcactacagtttccaccgatattcacc

SEQ ID NO: 180411 - DNA, 122 bp, Homo sapiens
cgtcagagtgggtcacctagggagaagccgggcagagctgcccccccccggcccgctccccggagcctgcagccgcgtttacccaaaccagctctcctggaaagccagcgggtgcggcgcgc

SEQ ID NO: 180412 - DNA, 122 bp, Homo sapiens
catggaatcgtggagtaatcaaaggaactcagaaaccgccccacgaaccctagattttaccgggtttctacagaaactgaagccaaggggtccagcacacagcccagggccatcccttcggc

SEQ ID NO: 180413 - DNA, 122 bp, Homo sapiens
caaggaacagacgactgttgttcgccctggctcgctctgactcatccttcctgtaactctcgctcttttgattcccgcgtggcatcctctgggctgtctttctgatacagaagccgccggat

SEQ ID NO: 180414 - DNA, 122 bp, Homo sapiens
acctgatttttgcacctgctgtttaattaaatttacaaggcagacacactccccactccccgtgatatacaaatccgtttttacaaccacagattctaatttacaagccagttgactgctga

SEQ ID NO: 180415 - DNA, 122 bp, Homo sapiens
cccgggtttctacccccgccctcccggtcctggctcaaactctcgtcacctgatcctcggcgaaagctcctatcgcgacactttgaccgtagccgttcccgccatcttgcttcctggcaagt

SEQ ID NO: 180416 - DNA, 122 bp, Homo sapiens
tgagggcagagtcaccctggagctcaggtcggacgctggtgcaatcttgctatctatccccgggcagtcagcgcgcacttcagcagactccgtgcacggagatccgggatgacctcgctgtc

SEQ ID NO: 180417 - DNA, 122 bp, Homo sapiens
tgctgctctgtattctgacctacatctgcatactgctttaatagaatggatgtttgcagacgtgactgtgatattggaatatggaaggatccatccagggtcaggaagcagcaggctggctt

SEQ ID NO: 180418 - DNA, 122 bp, Homo sapiens
gagaaccttatattgtcctgaagagaggtgatgacttaaaaatcatgctcaataggattacgctgaggcccaacttaggtgagaattttgaaagaggatgctgggaatcacaaggtccccgg

SEQ ID NO: 180419 - DNA, 122 bp, Homo sapiens
gctcttaaccactatgctatattaccttgtatggatctagggatccaggaaaatacaaatcgaaacaatgtgttgtccaaactggcaaaaataaaaaagattgacctagtcaacgtggaaaa

SEQ ID NO: 180420 - DNA, 122 bp, Homo sapiens
gaatgagctttacagtaacttggatctctacacgaaggtgtaaattcagagcaacttacccgattctctgcaacaaagatggcaaagtttgcaaggagtgaaaatcatgtaatacttcgggg

SEQ ID NO: 180421 - DNA, 122 bp, Homo sapiens
cccgcccccgacacgcctccaatcgccacacgccaattcccgtgggatgggcggagtcagcgagaggggcgtggccacagtcaaagatggagaatccatggtgccactttcccggtgatccc

SEQ ID NO: 180422 - DNA, 122 bp, Homo sapiens
accgggttcatctcactagggagtgccagacactgggtgcaggtcagcgggtgcgcgcaccgtgagcgagcccaagcagggcgaggcattgcctcactcgggaagcacaaggggtcagggag

SEQ ID NO: 180423 - DNA, 122 bp, Homo sapiens
ttggaacatgacgcacggcgccagggcacccaggccccgctgcagtcaggtctggctggacggtgccacccgacacctcggtcccccagctcccacagggggttctaatataatagagcagg

SEQ ID NO: 180424 - DNA, 122 bp, Homo sapiens
ttccaggctggctgggggcatcctcattctgggtgtgtgccagggcgcccctactctccccggtgccctgcctgaacagtcctcgtccattcatcatttttccccctgttctggttggcacc

SEQ ID NO: 180425 - DNA, 122 bp, Homo sapiens
tttttccctggacagggtaggggggtggttttgggatgaaactgttccacctcagctcatcgggcattagctagatcctcataaggagtgcacagtctggattcttcgcatgcgcagttcac

SEQ ID NO: 180426 - DNA, 122 bp, Homo sapiens
gggctctgccgagacctgacgacaagagtgtttttcctcactgtacctttcacagatggccggcataatcagctctgaattgacatgagagagagagacagggaaagatagtagggggaagg

SEQ ID NO: 180427 - DNA, 122 bp, Homo sapiens
catggtgggtgcaggctgaggccaagactcaagggcaagggtgtgtgggaggcccacccccgttaactggggcatcctcttccctggcatttacttcatgcttgtcttgtcatcgatagctt

SEQ ID NO: 180428 - DNA, 122 bp, Homo sapiens
acgtcgtctaaattgctgctctggaataaggtgatttctgcccccagattcttccctagccggtagatacgtgaagatattcccaactgtggaatggcagtgtaggtagcttcaggaaatgg

SEQ ID NO: 180429 - DNA, 122 bp, Homo sapiens
aagctccctccttggctcaaacgacaccccttggaatttacgcagatttggggatccaaacgtttacgactgaacactgtggtggagggggtaaccctgcctggttgttgactatgttataa

SEQ ID NO: 180430 - DNA, 122 bp, Homo sapiens
ctcaagccatccttccgcctcagtctcccgagtgggactacggtgtgcgccactgcatcccgtctggttctaaatttaggggggcctagaggatctggattctgagagccccagaatgtggg

SEQ ID NO: 180431 - DNA, 122 bp, Homo sapiens
agccaggcccccaaatccacctgccccatcctctgttcccaggtgatcctaggtggaggccgaaagtacatgtttcccatggggaccccagaccctgagtacccagatgactacagccaagg

SEQ ID NO: 180432 - DNA, 122 bp, Homo sapiens
ctcccaaatctagtccttgcctctgcctactctgattgtctctgaggaaatgaacaggcacgttctgatgtctggatagagcagggaaggctacgtgctatacttgccaagggtgggtttgg

SEQ ID NO: 180433 - DNA, 122 bp, Homo sapiens
atcatagctcactgcagccttgaatgccccgacttaagcagtccttttgccttagcctcccgagtagctgggactacaggcacacaccatcatgcccagccttttttttttttttttttctg

SEQ ID NO: 180434 - DNA, 122 bp, Homo sapiens
cacctcacaaaagcttttccttcaagacccgctggcagcccccaaaccacaagccatgcccggggctgtcccattaattagtccccatttgctcacatgaactctatgttttgatagggcct

SEQ ID NO: 180435 - DNA, 122 bp, Homo sapiens
gagaatgaaacctgtatctttgcaccttggcactggccacttggctccctgcttatacaccgcatatgtctctcccatacctgaatacgttctgggggtggatattttacacagcttggctt

SEQ ID NO: 180436 - DNA, 122 bp, Homo sapiens
cagcgccaggtgctcttgccttttcccactgagagaaggctgctcttttgtactgccccccgctcattaaacagcctcccccagccctgagtgcactgatgtccgcagcgccgccctactgt

SEQ ID NO: 180437 - DNA, 122 bp, Homo sapiens
atcatttttattctttggcagaggcacttgtcaaaaacctctaaagagatttcaccaactcgttttcattggaactattgggaggaggctggggagtgccgctgtgagcagtttagacagag

SEQ ID NO: 180438 - DNA, 122 bp, Homo sapiens
tcagaacatcagaaggaacaaactccagacgcgccaccttaagagctgtaacactcactgcgagcgtccgagcgtccgtggcttcattcttgaagtcagtgagacaaagaacccaccaattc

SEQ ID NO: 180439 - DNA, 122 bp, Homo sapiens
cagtgaacactcggtggaggatggggcctcacatgtgcctggtgcgggtctggctgacggcgccttagtgtggatgctttccatatcctcattctaacttaatttctcagctgtcatcttcc

SEQ ID NO: 180440 - DNA, 122 bp, Homo sapiens
attttctgcctcccaatctcagagccggcaagtcacaacacggctcctttatttgtgcaccggagaggtctgcctttctttacctcctcacgggcgataaaagacaagcaactcgggctcag

SEQ ID NO: 180441 - DNA, 122 bp, Homo sapiens
tgtgcagtgcttggctctgcgtgcccgctgtccagtagctgtggatagctcttgagctgtcggaaactggctaattcaactgaagaaatgaatttttaattattttcattataattcatttt

SEQ ID NO: 180442 - DNA, 122 bp, Homo sapiens
gctccctgggggcagcggggcattcctccccacccgggctctgaggcttttaattaaggtcgccagcggcaaaaaaatcaaaaacgtgcccgttaaacaagtttttttttctcttagaatgt

SEQ ID NO: 180443 - DNA, 122 bp, Homo sapiens
gtccgttcccacatggggagacttccatgttaacaataggttattgtagtgcggctggcccggaggactggggactgtgaaaataaattaagagtgggccggtcggagctgcaacagtcatc

SEQ ID NO: 180444 - DNA, 122 bp, Homo sapiens
aggattgtgtcctcctccaccttccctgtgctcggtctccacctgtctcccattctgtgacgatggttcaatggaagagactctgccagctgcattacttgtgggctctgggctgctatatg

SEQ ID NO: 180445 - DNA, 122 bp, Homo sapiens
atcctgataaacagattttcttaaaggaaactgtaaaccagagccagacttactttcctgcgctgagggaggggaaataaaaaagcaggcatggttgatttcccgctagcgggaacgatctg

SEQ ID NO: 180446 - DNA, 122 bp, Homo sapiens
ctaagacctcgtaggtgttggtcatggagcacagcacctcatgctgcaccagctgatagtcgccctcgctgttggagccgctgtttttggaggtggcagtagacgtggtggcagtggcgaca

SEQ ID NO: 180447 - DNA, 122 bp, Homo sapiens
gcggcccggggagtgcttcgaaactactgggagcgactgctacggaagcttccgcagagccggccgggctttcccagtcctccgtggggtaggtaaagaagggctccgtgggagagggggct

SEQ ID NO: 180448 - DNA, 122 bp, Homo sapiens
ggcagaccaggggttgtgcattctctctgggcaggcgctctgctcttgctgtatttgtttcgttgtttttgttgttgttgtttgagacagagttttgctcttgttacccaggctggagtgca

SEQ ID NO: 180449 - DNA, 122 bp, Homo sapiens
tgtgaggctggggccggcgcgtggttgcggctctgtgctcctactcttcggagctgtaagcgggctgttcttgcggttttcctgtttcagatccaattctgtggcatcactaggaagggagc

SEQ ID NO: 180450 - DNA, 122 bp, Homo sapiens
tcagcttcccaggacaggagctgtgtgtctctgcctcccttcgcgtggggcaaggggctgcgggaccagcggcctctcttctggcaggagggggggttccccggaggccctgcccccttcgt

SEQ ID NO: 180451 - DNA, 122 bp, Homo sapiens
aaggcgtgtgtgtgtgtgtgtgtgtgtgtgtgtgtgtgtgtgtgtgtgcagagacacagtcgagttagggaaactcttcgtctaggagagcctcttgtaaggtgatccgtctcctccttcct

SEQ ID NO: 180452 - DNA, 122 bp, Homo sapiens
tttgagttgtttccacatttccaccttttggctattgtgaataatgcttctatgaacattcgtgtgtaaatatctccgttcaagtccctgctttcaattcctttggatatgtacctaggagt

SEQ ID NO: 180453 - DNA, 122 bp, Homo sapiens
ttccaacaggtcatgaaaaaactgctcagcacctctctgtcttctgtcaggttagggctccgcagacggacgacagaggattatccgtagacttagatgggggttcctccgcccctctctgt

SEQ ID NO: 180454 - DNA, 122 bp, Homo sapiens
aggagcgactgtggcttcgggttaagcctctgtctttacctgtagtgggagatgtctgctcgtcacccacaggcgcggcccatgtgtgtctgccacgttgtgtcgtgcatgtgccctggtcc

SEQ ID NO: 180455 - DNA, 122 bp, Homo sapiens
acaatgctttattccattgtgaaaaaatacatgaaactaaaaacctcagtaacgcagcaacgttaaggaactgctttcctgtactctggcactagctctagcttgtggatagaatcatctga

SEQ ID NO: 180456 - DNA, 122 bp, Homo sapiens
attatcagcttaggaagccaaaaacaaaagccactctgttttcagccctgactgactaaccgttttttaaaccagcaaggacacttcctgaactttgccttcccctccctgggcaacaccag

SEQ ID NO: 180457 - DNA, 122 bp, Homo sapiens
tcctggcagaccctgctccgggccaggcgagtggtggagcttctgccttgcacccagctgcgggtcacgcccaaggggggcatctcaaagcaacacgaaagcccctaaaggaagggaacaag

SEQ ID NO: 180458 - DNA, 122 bp, Homo sapiens
caaggtgaaggagagccaacgcatgagtgacgagggccgcatggtgcaggacgaggcagacggcattcgcaggcgctgccgcgtggtgggtttcgccctgcaggccgagatgaaccacttcc

SEQ ID NO: 180459 - DNA, 122 bp, Homo sapiens
taggtctgcaccacccttttctggtattaagccaattctaagttatttgttaattactcacgtgtaagtaaaatttcccctgctagactttaagttccttgaagtggggaatttagatggtt

SEQ ID NO: 180460 - DNA, 122 bp, Homo sapiens
tgcttatgttcttcgggattctgggagccaccactctatccgtctccattctgctttgggcgacccagcgccgaaaagccaagacttcatgaactacataggtcttaccattgacctaagat

SEQ ID NO: 180461 - DNA, 122 bp, Homo sapiens
tcccctatttaagatcatggcaaaactctggcactacgactgagtgttgttttttatagccgtgatacgttaatgccagtagcatagagcaaaatatttatatgatgagtcttattcatggc

SEQ ID NO: 180462 - DNA, 122 bp, Homo sapiens
cctgtcccacacaagtggaaagaagagacgtgcaaaagaaggaaaaagcataaaagaaggcgaactgcatgggctgcatctactcacttaggagttctccgcgtctgtcttcattcattcaa

SEQ ID NO: 180463 - DNA, 122 bp, Homo sapiens
ctgagcaagatatttttcttccttttacaagttggaagctattgaataattcatgccaagcgtggaaaggctgtcttttccctggatgatgtataactaagcaggagagagcttcgagtggg

SEQ ID NO: 180464 - DNA, 122 bp, Homo sapiens
ggaccgagtctgggagagccttccgagtccggcctcctgccttcccgccatgggacggctcgccccaatcccgcgaggctcctgcgcctccgcaacccaggcccgcacccctttccccaggg

SEQ ID NO: 180465 - DNA, 122 bp, Homo sapiens
aagcttggaggcaaaattgcgcttgggttcctgttccttgcatccctcctggcttgagtgcgggagaacactttttaaagactcaccttggaaagaaggcctccgtcccaggggagaaggag

SEQ ID NO: 180466 - DNA, 122 bp, Homo sapiens
tgcttctctttattcccaggtgttccaaagatctcaatttggtgtgtgttcctatgcatgcgtatatgtgtgtggtgtgtgtgtccccaaacaactccccagatgccttgtaggcctgtgac

SEQ ID NO: 180467 - DNA, 122 bp, Homo sapiens
gcgcaaggaggccccggcagagccgcgtgcagccacaccccacatgtggagttgttaatccggcagttgttcagcaggttctctgggcctcacctccaaatgtgttacttctggagggaaag

SEQ ID NO: 180468 - DNA, 122 bp, Homo sapiens
gcgcgcttcgaacctgcctcgcggacacgtgaacagaggctgtccctgggaagataagtgcgctttcccgtaaaatccgggaaatttgccttgaggaaagtttccgttcttgttacttgtcg

SEQ ID NO: 180469 - DNA, 122 bp, Homo sapiens
ccctttccttcaagccgcaggaatcagagcaggctgagagcccccagccagaatggccagcggtggaattgctttgtcaagcgcccgaggtcatgcttggtgcccagccgagcccatggcct

SEQ ID NO: 180470 - DNA, 122 bp, Homo sapiens
tatgagctgtaacactcaccgcgaaggtctgcagcttcactcctgaagccagcgagaccacgagcccaccaggaggaacgaaaactccagacgcgctgccttaagagctgtaacactcaccg

SEQ ID NO: 180471 - DNA, 122 bp, Homo sapiens
gagcgttattcccaagaaggcgagggcccccttcactggtctcactgaacatccagtacccgccacgggtgggtcccgctggccggccgacctttgatcctgtatccgtgtgttctcgatgg

SEQ ID NO: 180472 - DNA, 122 bp, Homo sapiens
ccctgagaagagggcccagtatccctggggcctcagtccatcagccgctgctgcaccaggcgggaatagaggtcctgtccctcctagagctgggcaagcttctgcagcttgccctcctggag

SEQ ID NO: 180473 - DNA, 122 bp, Homo sapiens
gtgcgcctggatcgcgtccggggtgggcggaagaagtacaagcggtgccagaggtggacccgctgcccttcccgggcgccttccctgctgggcccctggcagtcgctggaggcccccagaag

SEQ ID NO: 180474 - DNA, 122 bp, Homo sapiens
ggacatttgaaacttggtaagactggtctttggaacttgcacactccatttgagtggaagcgtggcctgatcacccatggcgtgcctgtaccggcactttggtttttgtttttgacttgact

SEQ ID NO: 180475 - DNA, 122 bp, Homo sapiens
cccccacatgggaggctcctccctctcttcgtggcaggagtccccgatgactgtgagtgccgcaacggaggcagatgcctgggcgccaacaccaccctctgccagtgccccctgggattctt

SEQ ID NO: 180476 - DNA, 122 bp, Homo sapiens
ccgggtttagagctgtacgaagacacacagctaatgaaaaattgtggaattctcagagcccgtgaagcctagcccacggatgcgaggtttggaccactgagggaacgcgcatgcgtgctagg

SEQ ID NO: 180477 - DNA, 122 bp, Homo sapiens
ccctcacctcccaaacagggcggctgggcagaggcgctcctacctcccagatggggcagccgggcagagatgcctgtcacctcccagatggggtggctgggcagaggcgcccacttcccaga

SEQ ID NO: 180478 - DNA, 122 bp, Homo sapiens
gcggtagagtcctcggctcgcgtcctgaggtgccgctgctagttgtcttagcgaggagggcggaacggaaacgctcaggccctcttaatgcactgctagacttgaaagaatcacactgctct

SEQ ID NO: 180479 - DNA, 122 bp, Homo sapiens
ttcaggcccgtccatccgtggatgatggataaacccagtgtagtccgccatcccttggagcgtcattcagccgcacacaggaagacacgctgcaacgtgcaggacccctgaaaacactgggc

SEQ ID NO: 180480 - DNA, 122 bp, Homo sapiens
cactctttttgtagaaactgcaggtggatatttggacctctttgaggccctcgttggaaacgggatttcttcctataaccctagacagaagaattttcagaaacctcattgtgatgtgtgcg

SEQ ID NO: 180481 - DNA, 122 bp, Homo sapiens
cgcgtccccctgtccgggtcacaatggcagctcgcgactgggaaatagttgcctcggaagcgggagccccgggccgcagcaccgtccccatcgccccctcccggcacgcaccttctccaggg

SEQ ID NO: 180482 - DNA, 122 bp, Homo sapiens
caagcatgtgaagatgctctgcttcctccatcatcagggaaatgtgaatgaaaatgacaacgagacaccaccacacacctctcagaagggccggaacccagaacattgacaacacccaatgc

SEQ ID NO: 180483 - DNA, 122 bp, Homo sapiens
ctgcacaccgcaacctgagacatctcagcatattctaggaactagtaatggggacgcttccgactcgctggggaagggagatgagggcctctagctctccatgcccagtctctcatcatcaa

SEQ ID NO: 180484 - DNA, 122 bp, Homo sapiens
ttgcagttggctgtcctgtgacccacatatacttagcaagtgtggacctgcctgatccaccggcaaaaatagaaatccctctggccatgcgtttgtgggtttcagatgttgtgcctgccatc

SEQ ID NO: 180485 - DNA, 122 bp, Homo sapiens
aattcctgcgatgtctggggcgcggcggtggctcctccccgcccccaccacggcctccgccggcattttccggctaggaggcccgccagcccttcgaagaaccggctccacgcgcggacggt

SEQ ID NO: 180486 - DNA, 122 bp, Homo sapiens
aagtgctgggattacaggcgggagacaccacacctggcctaaattttttttttttttagacggagtctctgttgcccaggctgtcgtgcagtgacacgatctcagctcactgcaagctccgc

SEQ ID NO: 180487 - DNA, 122 bp, Homo sapiens
tgccggcggcttccagggcggctgagggaccgtggccaggaacatgggctcgcagagctacgggagaaggatcgagactgtctgcacattattagaagccagcctgtttccttcttcagccg

SEQ ID NO: 180488 - DNA, 122 bp, Homo sapiens
ttgaaattgcaagggtggggggggggggatgagggataacagattacttaatgggtacaacgtacactgggtacctgggtgatggttacactgaaatccgagacttcactacataatatatc

SEQ ID NO: 180489 - DNA, 122 bp, Homo sapiens
gccatggccggtagccctgcctcagttcgtgggagagaacacacccctgaacgtctaccacgagtgacatccgtccattaggggcaagcaccctgagatgtgtgtccttgagtaggaagctc

SEQ ID NO: 180490 - DNA, 122 bp, Homo sapiens
catatgggccagcttcattttcatcacttttatttaaatcaagacacatgctaataaccacgtactttcatttggcgttgctgtaaataataaaaagtatgtgcggttaggagtgtgctcac

SEQ ID NO: 180491 - DNA, 122 bp, Homo sapiens
aaagacccccaatcctcagtaactcatctcctgacaaaagaccttgcgaaactgccaaagcgccacacttcggctcgcgattgtgaggaaattggttgaggaacggagtgggacgcccatgc

SEQ ID NO: 180492 - DNA, 122 bp, Homo sapiens
gggtttctagggttcccttcttcttattcctggtgagttttcttctttctctgaagaacccgttcagacaaaagacagcaagaccaaggtatgaaaaattgaccaggggttctggtctcagc

SEQ ID NO: 180493 - DNA, 122 bp, Homo sapiens
cccctcaccttcttcctgcacttgcttcacagctttgctgatctcggccttcaggacttccgtctcatcggctgtcactgcagctcccaccggcaccactgcgggcagagtcgcagggccta

SEQ ID NO: 180494 - DNA, 122 bp, Homo sapiens
acatccagcctgcgtcgcagcccatcattgcaatcaagtggagacagagtcggtgggagacgtgacttatccagcccacagggactgctacctgggagacctgtgcaacagcgccgtggcaa

SEQ ID NO: 180495 - DNA, 122 bp, Homo sapiens
tgatttattgcaggagatgctgtttactctgacagtctcaaaaacacccattaattgttccgggtcccttttgtgcttcttgacttccccgtggggtgtttcacatagatgttattgagtat

SEQ ID NO: 180496 - DNA, 122 bp, Homo sapiens
cgcccctctgcccaccggtggttggaggccgcggcggctgcgcgttgagtcgtttcctgccggttgacctgagcctacttcgcagtagcaggaccgctgctgtggagctggtcgcaggcggt

SEQ ID NO: 180497 - DNA, 122 bp, Homo sapiens
ataattcacagtataaagtttcaagagaagggacgtggatgaccgtttaaaatgcttctgcggcaagatgacagacgtagagcagaagaagcggaccttccgcaagttcacttaccgcggtg

SEQ ID NO: 180498 - DNA, 122 bp, Homo sapiens
aagaataaaaagcttttaaggtatcatatattgttttttatagttcctttgcttaactgacgttttggtttgctaaaaaactaccaatcacatcagattacaagtactttcactgtaaaaat

SEQ ID NO: 180499 - DNA, 122 bp, Homo sapiens
cgtccccttaggattcccgcccaccgcgcgggcgcgcgtcccgctctcgggggcagccgccgggcctgcatttcttgcagccctcaaggcccctcggtgtcagcgaaagagccctcatgttg

SEQ ID NO: 180500 - DNA, 122 bp, Homo sapiens
ctggtcagctaggaacagcgtctgctcactaaatacctactgcttggctccaggtaaggtcgggactcaggaaaacagacatacagacaacgactggggtcggcggggctcccccacccaac

SEQ ID NO: 180501 - DNA, 122 bp, Homo sapiens
tgtaaggtgattcataaacacactaaatcttccttaggtctccctttcactgtcagggtacgcatatagattttccttcctccctccaataccggtacgcatcctctacaggtggtgcattt

SEQ ID NO: 180502 - DNA, 122 bp, Homo sapiens
caggatttcatgaagtatgaagctgataaggcgaagtttcttctttggtttcggaacacccggtgagccagatgcatcctctggaaccagcctctcttagtaatggcagtctagaagtttaa

SEQ ID NO: 180503 - DNA, 122 bp, Homo sapiens
gccatcgctggcttcactctcctttagcaccttgtagatgtccatgcacacttccaccctcgcgccccacacgcgacgcagccctaccctggccagcagctgtgctttgctgcgggttccat

SEQ ID NO: 180504 - DNA, 122 bp, Homo sapiens
ctttcactttgacagggagctggccgggcacgcagggaactgtacacccagctgacaaagcggcagacacccaggccggggtgagcgagtgtgggtgaggagtggcggctggccccagggtc

SEQ ID NO: 180505 - DNA, 122 bp, Homo sapiens
gttaaaatcaagggtccccactagggcagacgccaagaggacggtatcagcacaacagctcggcccccaggaacagaagtctctctgccaccttctacctcgaattcctgagaattcttcgt

SEQ ID NO: 180506 - DNA, 122 bp, Homo sapiens
cgggcaggcgagctggacgggcggggcaggcgtcctggttgtgacgcacgccaccgcgggcgtgcgcgtccccgcttagcaccggccctcagtgcgcttgcgccactagatgacccgccccc

SEQ ID NO: 180507 - DNA, 122 bp, Homo sapiens
actcagacctacttagtctgggtggggctttgacacaagtgtaagcttctggtgagcgagcgtcaggtgcagccaacgctagaaatttctggcttttgagctctaagaccttgaacaagcct

SEQ ID NO: 180508 - DNA, 122 bp, Homo sapiens
agaacataaggtactttggagtttattgagaccttttgcgtagaactgaatgaacaaagacgtgttatgactcagtgactcactaaaggaaatgagtcataagatggtgtatttagttgttt

SEQ ID NO: 180509 - DNA, 122 bp, Homo sapiens
ggaaacaaggttcttgcagcgagggaggctctcggctatctccgccgccggcgccgcggccgccgctgctgcattcagcaccccgggcgagtggacagctcccacccagaccccgcgcgtca

SEQ ID NO: 180510 - DNA, 122 bp, Homo sapiens
tactcaatttaaacttttacctgcgatctctcttcctcagacccagggtcacgaacttgccgtctaacctggcaggtcagtaaaaccttaccccatcaggtcttcatctgtaagatgagaag

SEQ ID NO: 180511 - DNA, 122 bp, Homo sapiens
ccaccctcagggagcgcttgtgctcggagggcttctcatttccccaataccacattaaatcgtctcatctgaggaggatccacagagctgtcttctatggtaatctggagaaactggagtac

SEQ ID NO: 180512 - DNA, 122 bp, Homo sapiens
acaaaaaagggggcacgtaagctgggatgctccctagttgctgggttgctctacagtaaacgaggagtaattgacaaggctcactgttggctatttcaggcctattagggggcatgaggaaa

SEQ ID NO: 180513 - DNA, 122 bp, Homo sapiens
catcactgcctgagctccacctcctgccagatcaggagcggcattagattcttacaggagcgcaaaccctattgtgaactgtgcatacgaaggatctagattgcgcactccttatgagaatc

SEQ ID NO: 180514 - DNA, 122 bp, Homo sapiens
aaaaaattctagaccgaagtgtacggcagtgccatctggtggcaagtggtacaaagacaacgctgaggggtagtgactcctgtagcagcagagacgccttggagtttaacccccaccaacca

SEQ ID NO: 180515 - DNA, 122 bp, Homo sapiens
aatccccgccctccgcaccctggatatgttttctcccagacctggatatttttttgatatcgtgaaactacgagggaaataatttgggggatttcttcttggctccctgctttccccacaga

SEQ ID NO: 180516 - DNA, 122 bp, Homo sapiens
gtctgttcagattcttgaactttctttcgattgtagcatttctcctttcaggatacagtacgggatcctttctggaatggaggtcttatgagctgctattgaacacggcaggtgagagaatt

SEQ ID NO: 180517 - DNA, 122 bp, Homo sapiens
aatgagactgaaatgcattttgtgattcactgtacaaatattgaacatctgttccgcgtccggaatgtggcggtcactgccgataccaaggtgggaaaccatctactctccagccgttcaca

SEQ ID NO: 180518 - DNA, 122 bp, Homo sapiens
cctcgcttcctgggtccctagaggggtggcgtactccgctttctcctgcccccaagtggccgcacccctccgcgggacgcttggttgggtccagggcggggcgggcgggcgctccccgtact

SEQ ID NO: 180519 - DNA, 122 bp, Homo sapiens
ggcttcagcctggaggagctcagggtgagtactggcagcgctgcggtgtcaggaaggccccgaagtcccctctgttggcctcagtcgcgtgatgacattctccggaatcgctgtacggcctt

SEQ ID NO: 180520 - DNA, 122 bp, Homo sapiens
ggagcagttgggattccgaggtagccagttccgctggactgaaacctgggctgagaaacacgtgcagaaagccgccaccaaggcatgcgtaaaggcctccctctcccccaccctccgataag

SEQ ID NO: 180521 - DNA, 122 bp, Homo sapiens
gctagcgctcgcgcctgcactcgcggggtcggccttccttgcctgtgggcggacccgtcgcgtcgactccttattggtggcgttactacgcctcaaggcgtttcttccctctttgctgttcg

SEQ ID NO: 180522 - DNA, 122 bp, Homo sapiens
taagaggcagttggctaggtggtagacagccccttccacatcctgcttccacctaatgcacgctgaaccctgcaagagaagctggcccactctgctgctgttggcgctcatctttggggcct

SEQ ID NO: 180523 - DNA, 122 bp, Homo sapiens
agtgatggtttacagtagtgtagtacctaagatcattttcctgaaagccaaaccaaacaacgaaaaacaagaacaactaattcagaatcaaatagagtttttgagcatttgactatttttag

SEQ ID NO: 180524 - DNA, 122 bp, Homo sapiens
gactcaccacaaatccagattctgctgtgcgtggccgtcaaatgtgaggccatctggggacgtgtcacggggactggggtggacataagtcacctttctagctacctgttggataacctttc

SEQ ID NO: 180525 - DNA, 122 bp, Homo sapiens
tcctgtccatttccacatttttctggttttacagctctcacgcagagcttgatttcataccggaagctagtcactggcaggaagtttacggaagaagaaaaaggtaaaaaaatgtgccgggg

SEQ ID NO: 180526 - DNA, 122 bp, Homo sapiens
cccaggcttctccagctgacagtgtccgcctgtccttttgtccccgtccagtttgaggagcggccggagtgtgggctgctggtaggcagcctgctggtcctgggccctcggagggaggtgag

SEQ ID NO: 180527 - DNA, 122 bp, Homo sapiens
acgaccactcagctttctttcatttagcccagtatggagcacctactgtgtgcaaggcaccgggctactgagaagcaggtaacatacctgcccttgcactctaaatgcagagaagataaaga

SEQ ID NO: 180528 - DNA, 122 bp, Homo sapiens
caggcgcggagctaaacccggaggtgaagcaactacagctggggccacgcccacagactccgggctgtcggggcgggcggcactcgcgcttccagcctgggccaaccaggctgcttgaggct

SEQ ID NO: 180529 - DNA, 122 bp, Homo sapiens
acattgactttgcgcttcaagtatttgcaggttattaccttagtttttactccctttgtgcgtgccgtgattatcttggtttaaactcgtatgtggcaagaaattttttaatgaatgtttaa

SEQ ID NO: 180530 - DNA, 122 bp, Homo sapiens
ttcttttctaattattcccttattacatattacctgcctcacagggttgttgtgagaattcgatgaacagtaccagtgagtactaagtgtcagccacttgagaatacctggagtgactagtt

SEQ ID NO: 180531 - DNA, 122 bp, Homo sapiens
agagtggttcttctgtgtgttcagaagcatctgtgaagcactcattcacatgtgttagtgcgttgagtgcagagcaaagtaagatgaaaggatgcagtgcctgctccagggatacccagtct

SEQ ID NO: 180532 - DNA, 122 bp, Homo sapiens
catcttttccagttaggacagaaacaagctccctcctcagctagcacgcccgctccagtccggttttagccgttccttcggaagagtaagtcagttgaatgtcatcgaagaagctcctgatt

SEQ ID NO: 180533 - DNA, 122 bp, Homo sapiens
cccaggccgggcccagcctggtggagcgtccaggtctgggtgcgaagccaggcccctgggcggaggtgaggggtggtctgaggagtgatgtggagttaaggcgccatcctcaccggtgactg

SEQ ID NO: 180534 - DNA, 122 bp, Homo sapiens
tcccctttaccccactctgctgggcctctttacctgtcctctcctactgtctacaggtcccgaacattagaaaatagaaaatgtgatgatctttgtgtgtctctgtaaaatgtgtgtatgtg

SEQ ID NO: 180535 - DNA, 122 bp, Homo sapiens
ttacggaacctttggtgtcggggcttggaagtctccttggcgccggcttctgggcccgggcgaagctggtgcgtggcgccggggtggaggcggctaagtcccagggacttctgccctgcgcc

SEQ ID NO: 180536 - DNA, 122 bp, Homo sapiens
gcgccccctcccttggacaggtaccgccttctgagttgacctccgaaaggtggaggacgtcgcaggccagaacccagctctcctaggagactggctgccccttaggctggctggggaggtgt

SEQ ID NO: 180537 - DNA, 122 bp, Homo sapiens
agatcaaggcagtgagaatttaaaggacagagactagacaggagagatctcagagagtaccggagatctacagaggatccgcctttagtctttagcagagcagttatcagtacatgaacgag

SEQ ID NO: 180538 - DNA, 122 bp, Homo sapiens
caagaatgctcggggctcacatgtcagaatgcagccttggtcatgactgatcctggccttcgtatggttctgctacctgtgtgcctgcccgtcttccccaaaatctatgtggtcctcgaata

SEQ ID NO: 180539 - DNA, 122 bp, Homo sapiens
agccatatagatcaaaataatcaattgaattgagagttcagaaataaactcttacatttacggtcaactgatttttaacaagagtgccaagatgatctactgggatgtgggagggagggggt

SEQ ID NO: 180540 - DNA, 122 bp, Homo sapiens
tccctgtcgcagaagctgccactagtccccggtgtactctaaccactgaagcggccgtgtcggggactcacgcgcttcccattcagctctggatctggaactggccccttgtctgaattctg

SEQ ID NO: 180541 - DNA, 122 bp, Homo sapiens
actatgcggtctggaggccagtcagggtgacgactggccactagctggcgtgataaccggcgatacacatctttgtcctgccagttgcgcacccacacaggtcgccagtcctcccagtcgat

SEQ ID NO: 180542 - DNA, 122 bp, Homo sapiens
ctccgcctcaaaaaaaaatttatacaatggcttttccattttcctggccaacattcacttcgactttctaaaaaagctcaacccaaaagaaagacagggttggtgtttaacacttaaacagt

SEQ ID NO: 180543 - DNA, 122 bp, Homo sapiens
ttccggacggaagtcctggaggccagcagccgtgtgggacgagagacacgcagggtggggcgactgcggtgcctcaggcgggtgagatgagcaccatcaccgggggccggagcaggtgagat

SEQ ID NO: 180544 - DNA, 122 bp, Homo sapiens
caccgaacagctccacagggagggtagtgcccaaggctttttgcctcccctaccatgtcccgcacttcctgaatgcagctcaaaccaggagcagctcccccaggattctggcctgcttcacc

SEQ ID NO: 180545 - DNA, 122 bp, Homo sapiens
aggccgccaccccccaccccctcctccctgcacacaaaagcagcataaattaaccgtcttcgggaagccgagcctctgccagccctgagctgggaagaagcagctacctcggaggcagggcg

SEQ ID NO: 180546 - DNA, 122 bp, Homo sapiens
cccccacctgtgggctcctgcgcagaccgagcctcccgaccagcgccgccccctgctccacggtgcccagtcccatcaaccgcccaagggctgagaagtgcgggcacacggggcaggactgg

SEQ ID NO: 180547 - DNA, 122 bp, Homo sapiens
ccagctaaaatgtgtctccagcaggcaactgctccaagaccacgtgctgaaggaactagacgtcggtgttcagtggagatgttcattgttgggtgggtatggtggctcatgcctgtaatccc

SEQ ID NO: 180548 - DNA, 122 bp, Homo sapiens
gaagggacaaagcgagcagggtaagagctcgagcccgacccctctcaaaaaatatagacccggaacgcgcgcctgcgcagaacgaatcctcccgcgcacaagccgggcggaagagctggggc

SEQ ID NO: 180549 - DNA, 122 bp, Homo sapiens
tgcgggagggccgggccagcaggcggaactctattccgggctgtccagacacacgtggcccgagtgcaggtcggctccctggacctggatgtgcatgtgagggaaactcagagtgggtgttg

SEQ ID NO: 180550 - DNA, 122 bp, Homo sapiens
tcagctgcgacgcaagagctcaagaagtgaactggctcccattggcacggcagaaggagccgtggtgggactctgatgtggagccgccttgagctgcagagccaggactctgcacagcacct

SEQ ID NO: 180551 - DNA, 122 bp, Homo sapiens
gaatccgttctggttcaaggggtagttgagtgctaaacttctgggaaattgtgtctatcccggattcgcgcttcaccatggaatccagtcccttctccagggcttcacccacgctccctgtg

SEQ ID NO: 180552 - DNA, 122 bp, Homo sapiens
acagctgaaaccatggagaagggtgctttttaacagggttcacctgttctgaggactctgcgaccacaagcacttggccgctgtcagcaggctaggtgattacagcattagatcatgcctct

SEQ ID NO: 180553 - DNA, 122 bp, Homo sapiens
cgacgtggaggaggatgaagagtccgtgttcatcgacgccgaggagctctgcagtgggggcgtaaaggctggcagcctccccgggtgcctccgcggtgaggaaggcgtctgcccgggggatg

SEQ ID NO: 180554 - DNA, 122 bp, Homo sapiens
tagtcccagctactcaagaggctgaggtcggcaggctgaggtatgagaactgcttgaacgcgggaggtggggttgcagtgagccaagattgcgccattgcactccagcctgggcaacaagag

SEQ ID NO: 180555 - DNA, 122 bp, Homo sapiens
agaggggtgcagacagaaccatggtgttgggcaccagacagacctgcgttctgatggcatcgccgccacttaccagtgacgtgaccagagcctctctgagtcttaataagactttgcaccca

SEQ ID NO: 180556 - DNA, 122 bp, Homo sapiens
ctcctagtttacagatgttgtgacctaggcttacaatgggcctggggtctgaaagcgggacgtgggctgcgggggtcaaagagccggtttggtggaggtcagcgccacagcgcgccgtgcca

SEQ ID NO: 180557 - DNA, 122 bp, Homo sapiens
cgggaagagcagcagcggagcctggaagcgccaggttgggaggacgcggagcggagggagcgtgaggagcgcgagcgcctggaggcggaggaggagcgaaggcgtctgcaggcccaggccca

SEQ ID NO: 180558 - DNA, 122 bp, Homo sapiens
attaaatttggaccggtttaaaattgcattttgacgtgacagacccaaggctcccccagacgccctcaggcctcggggagcttacccggcatcagagggactaaaaggctgccggtgtagtt

SEQ ID NO: 180559 - DNA, 122 bp, Homo sapiens
caacagctgcgtcgccgtgtttctatctagattggctctggggagaggaggcagggagctcgtcctgtgtgggccatgccactcttgtgcagaggaaagtgatttaagacaagagagaagtc

SEQ ID NO: 180560 - DNA, 122 bp, Homo sapiens
caaaattttacatttattgcacatctactgggctacctcatttaaaccacctaaagatcacgtgaaataagataccacttcataactcatattcagagggtttaaaccatacgcccaaggtc

SEQ ID NO: 180561 - DNA, 122 bp, Homo sapiens
cggagccaggcccgagcgactctccgggccccaagtaccctgcctcccaagcttcgcgcccgcagtccttctgccccggatgcccatgccctggctccccgggccaccaggccccgcggccg

SEQ ID NO: 180562 - DNA, 122 bp, Homo sapiens
tgacccggggcctggggcttgcctctgtgggcgcctcagtgcgagtttgcgtatgtcgtgcgtgcttgcgcgcgacgccccttcgcctgcgctcccctctcacgtgactcggtgccgcgtgc

SEQ ID NO: 180563 - DNA, 122 bp, Homo sapiens
ttttgccccaaccgccgcgggtctgagggcgggatcggcagactcggctgccagatctaccggagtcctggctaaggaccagggtcactcctggtccagctctcccggttcaggggttcctt

SEQ ID NO: 180564 - DNA, 122 bp, Homo sapiens
agcgtgagccaccacgcctggcccaattcatctcttaagagttgcccagactgaaaatatcgtgtggcttacataacacacacgtaaatcctgtcactgaatcctaccattttttttatttg

SEQ ID NO: 180565 - DNA, 122 bp, Homo sapiens
atcctttaacagaaacaagtcagcaggacacaccctgccttgtaaagatctccaagccatcgagtgaccaaggcaagatgcagaacaatgtatggtgcaaaaataaaaatagaccactctgt

SEQ ID NO: 180566 - DNA, 122 bp, Homo sapiens
gcggacgtggacccaatctgtccgtccttacaagtttcccccaggggcaggacctagacgcgcggcgcattcaggttctcctggaccgtagtggtagtcgctggcccgagttagaggccagc

SEQ ID NO: 180567 - DNA, 122 bp, Homo sapiens
tatggtgggtggggaggctcctgttcccctccctgttggcagctctgctctgctctgctccggcctgggcagttctgatcggttttcaaggacattctaagtgttcgccataaaccctgggc

SEQ ID NO: 180568 - DNA, 122 bp, Homo sapiens
aaagccatttcccagcaggtagctcatataattctcatgaggagatctgtgtaaggaagtcggggcagatgaggatatgtagagactcagagagaggatgagtgatttgcctgggtccacac

SEQ ID NO: 180569 - DNA, 122 bp, Homo sapiens
gtgcccagtcccatcctggtggctgcagagtgcccagctccagggacccccaactttgggcgcgggtcgagcaggagcagtggactggggctgcgcagtcacctggggcctggggcagaccg

SEQ ID NO: 180570 - DNA, 122 bp, Homo sapiens
aaactggctggggtgcaggaagagcgggtgcccgttgaagaactgttggcccgccaggcccggggcgaagccgaggccaggcagggggccctgggccaggtgcgcggcggccgcgtccgtct

SEQ ID NO: 180571 - DNA, 122 bp, Homo sapiens
cgggatgggggagcccagcagtgcccactgcacgcctggtgacgagtctcccctcatctgcgcagctcagtttgctcagtttgctcttcgtgacacgtgactcggcaaggggagcaggagga

SEQ ID NO: 180572 - DNA, 122 bp, Homo sapiens
gttgggaccaccgggctaggcgggcgccgtaggagagacgctaacacaccctgggaaggacgccttgtgtatctcatgctattaaataattgttaaatattttagccgggagcagtggctca

SEQ ID NO: 180573 - DNA, 122 bp, Homo sapiens
taaggatgaaacaaatggcaacaagaacaaccacaaaactaagctgtggatggtatttaccgttagattcaaaaccccttttgcattcacagaaaagtcttatcagatgataaagctcttta

SEQ ID NO: 180574 - DNA, 122 bp, Homo sapiens
acgatcattttaacgcatacggaacagttgaaaacagtgcagtgaacacctatatacctccgcctaaatcagacaacctagcactttgccatttctgctcgtcactctctccccacctgtag

SEQ ID NO: 180575 - DNA, 122 bp, Homo sapiens
ctttccaggggtcactctggcttcgactccgtcgctctcaattcgtcaccaggaggaagacggagctggctgcccagcccaaaggcccatgaggggatgcagttatgggctctgtcgccgtg

SEQ ID NO: 180576 - DNA, 122 bp, Homo sapiens
tcatcctgggggttgcatggggggtgtcttctctgcatggggggccagcgccccatgcaccggtggccacaagcccatgctgggcactgccccacgaccctcgcccctcgtcagtgctcagc

SEQ ID NO: 180577 - DNA, 122 bp, Homo sapiens
gagattctgcatgccttcgcatccgagttcccgctctctaaggccaggtgcgcgtggtttcgaatgcagagtgtgctcccgcaaaccacccgagggctcggaattgtgagaagcaaaggtgg

SEQ ID NO: 180578 - DNA, 122 bp, Homo sapiens
gaacatacgtctacgattatgccactcttcagatttacatcttgcagcgacttcccactgcgttagaacggaagtaagcccatgacgggggccctcccaactctcagacctcacccgagcct

SEQ ID NO: 180579 - DNA, 122 bp, Homo sapiens
aaaatggcgaggcggggtcggcaggcggaggcggggccaggcgggggcggggccaagggccgcagagcctggcgcggagccggcgagattttggtggggtctcacctgttgcgtgactcccc

SEQ ID NO: 180580 - DNA, 122 bp, Homo sapiens
tccctggctccacgccaagggagggcgcgccaagtccttcccactcgtgcacactgggggcgccgtcaggacgcaacccagtccaacttggatacccttggctttagttctcggacacttct

SEQ ID NO: 180581 - DNA, 122 bp, Homo sapiens
gccgggctggggatgcgttttcggttttgccgggcgagggtttacgttctgggcagccttcgtgggtgggacgtgggcggggttggggtcagggagggggcgaccggggcgagcgtccctgg

SEQ ID NO: 180582 - DNA, 122 bp, Homo sapiens
caataaaacaaatcgagttcatttaaaaaatcaaacacagccctggtgggacacagataccgcagcagtagtgtggacggtgcatgagtcgttaagatgtggcatttcaacctagtaattta

SEQ ID NO: 180583 - DNA, 122 bp, Homo sapiens
gtggggtgctgacctcgtgcctgggccctgggctgcccaggaaggtggtctggcgggccacggcctcctgctgcaaggtccgcaggatcccgtcttgctcaaactgggcgatgtccttcagg

SEQ ID NO: 180584 - DNA, 122 bp, Homo sapiens
caacttgttcatttctttcttcaattattggtctaactgtatcagaacctcttctgtcaacgtccataattgagaagcgacagcaaagacagtgtttattgtggaaggagagactctagaac

SEQ ID NO: 180585 - DNA, 122 bp, Homo sapiens
tcacgaaggctggcagctacaattcgggcgaagtccaccggcccatctgcacctgagcagcgatactggcccaacagactccaagtgcctggatttgcggtgctaaacctgaaggccttacc

SEQ ID NO: 180586 - DNA, 122 bp, Homo sapiens
catcctatcctctctccgaagctcctttgttgttgtcctcagtactcccaggttaatgaccgagacaaaagtggaatttcctaatttccttgaaaagggccaaaaataccgtcagacaggga

SEQ ID NO: 180587 - DNA, 122 bp, Homo sapiens
aagcaccaaattgtacaaagcagggacgacactgtgtgaggagccattccataaatctaacgctaagcactgaacagtgcattctgtttaaggcaaaaggcgatgtatccagtcagttcagc

SEQ ID NO: 180588 - DNA, 122 bp, Homo sapiens
gaggccgggctctaactgctcactatcctgctggactttgagattaagatggggaggaggcgctaaaaggggaatcctggagtggtgactgcccatggcttcaggcaagccccagagctctc

SEQ ID NO: 180589 - DNA, 122 bp, Homo sapiens
gggcgggcggcctcacctcggtgtcgcggcaggtacacctgcaggtctggcttgcggggccgcgtcggcgcgggcgtgtgccgcctcctcaccttctccttggccgcctgcttcaccttctt

SEQ ID NO: 180590 - DNA, 122 bp, Homo sapiens
gtgtccagtgagctgccggcctgtgcccagccccctctgaagccgcagccacacacagcccggcctgcctcagaggggaaacccgtgtccagatggccagagagcagccacgacctgccggg

SEQ ID NO: 180591 - DNA, 122 bp, Homo sapiens
taagagagaaagttcggttctcagagaagtacgtacaacttacttctcttaagacagctccgttttcctaaagacagtttatgaacccccaagaacctacaatgttccctggagccagttta

SEQ ID NO: 180592 - DNA, 122 bp, Homo sapiens
gaggttttaagaggccgttgcaccctgcaataaagtgcgggacacaggaatcttggtcctcggggcacccccttccctcgggggggtttcgccccccgcactcacggcccctgagcccgcgc

SEQ ID NO: 180593 - DNA, 122 bp, Homo sapiens
atggtggaaaagttggcaattaataacttctaagaaaactgaactaatgaaccaatcctgcgtgtgctatgtgtataacctccttctcactattaacagatttgttccaaacttatataaga

SEQ ID NO: 180594 - DNA, 122 bp, Homo sapiens
ctcggggtggtggggtgggtggggtgcgggcacgccctcccgcggaggcctataagggtgcgggggggacggggcccaggaggggagtggagcctcaccagccacgtcctcatggccctgct

SEQ ID NO: 180595 - DNA, 122 bp, Homo sapiens
taatgaaactgcaaattaaaataaagatcattatttgtttgccttgctctatgcagattacgtgaaaaccaccctcagagtaagaacttcatctagggttgagatgtattgttaaagtttct

SEQ ID NO: 180596 - DNA, 122 bp, Homo sapiens
aggcattatccaatgagggacgctgggccggaaaccgtccaatcaggcacgcagctggagcgaaccacatggtttctgggggcctttgtttctcgctgcagcgggagctccaggtttatcct

SEQ ID NO: 180597 - DNA, 122 bp, Homo sapiens
cccgcgggggtcctgacaggtctctgactctgatgccttctgcagccctagcatggcccccgcgggaacttgtgggcacctcgcgggccggattgcacctctgaagcctaccgctttgtacc

SEQ ID NO: 180598 - DNA, 122 bp, Homo sapiens
ggaccacgcgtaggggtgggggctgccgagaagcaactagtggcaagcgggactcagagccgcgcgggaggggagctagtggtgacggaacagagcacagtaagaaaagcagggcaagaagg

SEQ ID NO: 180599 - DNA, 122 bp, Homo sapiens
tggaattattgtgtgatataatcaagacatttacctggctctttaaatcagttggtttgccggctacagtgtaggtaaagagtatgtcataatggacaataaaaagttgtttacatacctca

SEQ ID NO: 180600 - DNA, 122 bp, Homo sapiens
ctgccggacttttaccatttctctgtgatctggcctaatgtggacaagtctgtatttccgcgctgcaggcccttctctgcagcggggtggtcagcacttggcctcctttgtgtctcaagctg

SEQ ID NO: 180601 - DNA, 122 bp, Homo sapiens
attgtctgtctccccctgctcacaccacccccattcgtgtgtgagctccaggagaagggccggggttgctgctgctctgtgagtcatgaaccgtccccaccccctagtctgtcctacaaatt

SEQ ID NO: 180602 - DNA, 122 bp, Homo sapiens
gcagaccaaatctcagaggatgggaaatgttttgtggttttaaaaattctaaaataacttcggaacaacatagggtgcccttgacataagaaatatgctaagaaggtgttttacgaacgcag

SEQ ID NO: 180603 - DNA, 122 bp, Homo sapiens
tgtctctccgtgcgtgtctgtgtgagtctgtgtgtctctctgtgcgtgtctgtgtgagtccgtgtgtctctccgtgagtgtctgtgcgagcctgtgtgtctctccgtgcatgtctgtgtgag

SEQ ID NO: 180604 - DNA, 122 bp, Homo sapiens
tccaaaagcttccggaagagcgggcagggtcctgcacagctgttcattcacccgcgagtacgtcaagcatacattgggcaccgactgtgtgccacgcccgtcccggcagaggccctggggac

SEQ ID NO: 180605 - DNA, 122 bp, Homo sapiens
aagagagcaagggaagagtttcttctcggtgtctctaggactttgcccagcagctggccccgccccctccagcgctctccgcctagccccgcccccaggagatttccggcttctcggtactg

SEQ ID NO: 180606 - DNA, 122 bp, Homo sapiens
tatatttttaaaaagccttaaatagttgacatcatccaaaaagtttggttgatctacttacggtcattgtacatacaaaatggtctgactgaggcacacaggatgactccagtataaataaa

SEQ ID NO: 180607 - DNA, 122 bp, Homo sapiens
caaaaggcctaaggaacaccacccaggggtagccttctgttctgggatacagatttttttcgtttctctaattggcccgcctctgcgaatgtggatgtaaaggtcaagctcctttctcactg

SEQ ID NO: 180608 - DNA, 122 bp, Homo sapiens
atcatcctctcccttgctggaaattagggacaatattgcagggtggttgtacacagcctgcgatagtgggagcagtatcatcctctccccctccggatattgggaacaatatcacagaaggg

SEQ ID NO: 180609 - DNA, 122 bp, Homo sapiens
aggtggagggggcagggtgtgaactgagctggggctggctctggcatctgagcttgttaacgaccgactgggctagaggcagagtgggccgcaccctgaccaccacctctgtcccccactgc

SEQ ID NO: 180610 - DNA, 122 bp, Homo sapiens
cactgcctgatggccagatggcctgtaggaagagctaccagggcttccagacctgtggaacgaagaggatggggaaaaggcagagggcactgagtgtccctttaaaaactaacccactgaat

SEQ ID NO: 180611 - DNA, 122 bp, Homo sapiens
cgtgcagaactctgtgtgccatagaaaaaagtggggaaagtcttcgaggccttgagtcgacgagcaaaaacacaactttcctgaggcagagagaaaacagaagggaaaaacaatgtaataaa

SEQ ID NO: 180612 - DNA, 122 bp, Homo sapiens
taattccttttttttcagagtccagtcttggatgtaatccaattgcgataagaagtcactcgagtatagacacctggcttattctttttaccacatccatcaccccagcttactattccaac

SEQ ID NO: 180613 - DNA, 122 bp, Homo sapiens
agcgagtcgtccccagaagcttacatccgctgcctgcgcatgggctgtcgctgcattgaacgtgagtagctccttcttggtggaggtcaggctcgcagcaaattgaggataaccatgtggtt

SEQ ID NO: 180614 - DNA, 122 bp, Homo sapiens
ggcagcgaaaaagtcgctctgcggaagccctggagaacttctggaaggagttctcaggcccgcgctacttttgtagtgcaggaagcaggcggggcgcggagaggaggtagaaacgcggagct

SEQ ID NO: 180615 - DNA, 122 bp, Homo sapiens
taaaagataagaaatgctacatttgtatagggcactcaccatgaatggagcttgcaggaccggaagttgctctgggtgaatcaataagtcagtggtgactaaatgtaaaggcctaggacatt

SEQ ID NO: 180616 - DNA, 122 bp, Homo sapiens
catcccacccctcccagcccgcgccccctccggtcctcgcgctccccggccgccacgtcccgggcagttcaggaaagcttgctaggtttccacgccggaaagcccaaggagaaggagccagc

SEQ ID NO: 180617 - DNA, 122 bp, Homo sapiens
ggaacaggggcggggaagggccttagcactgagagccgaaaagtataaaacgattagtttcggcgtcaggcgttttgaaaggctttgcaggtcctgttttctgcgtaatttttccgtgatta

SEQ ID NO: 180618 - DNA, 122 bp, Homo sapiens
tgttctctcccgggccctgcctctcggtcctctgcagcggggaggacttcagcagctccccgggacgcccgttgcgaggacaccctgggcctgtgccctcctactagcaccgccctcctcgt

SEQ ID NO: 180619 - DNA, 122 bp, Homo sapiens
ttttcctgccagaaggttttcaaaagaagcgcagaaggaggagggatgggggaacccctacgaattccttgagaacaagaggaggcccacaaaggagagagagggagggagggagggaggga

SEQ ID NO: 180620 - DNA, 122 bp, Homo sapiens
gggaaatggtgacactcactctccggagtttgtgagaactgaggacataggggcgaggcacgacccgcaccttgcatttgtactgtccgccagcaaacatctggcccttcactgagagggaa

SEQ ID NO: 180621 - DNA, 122 bp, Homo sapiens
taacatctgcagagggtcagcaaatcacatggcctaatctgcctgtgggtggcaagctagcggcctcctaaagatgtccactttctaatgcccagaactagtgaataggtgaccttacatgg

SEQ ID NO: 180622 - DNA, 122 bp, Homo sapiens
ggctcaggatggagggcctgtgggcacggagcttttccgagtgcctcccgtctccactgccgccacgtggcagagttctgctccccaccaacctgggcccagcctctgggctgaggcaaaga

SEQ ID NO: 180623 - DNA, 122 bp, Homo sapiens
agacacccacagccactaaggatttaggcatttcaaagcatccttaatacataaaaatatcgagaaaaaggctttgatataataccaacactacacataggaaaaccactacccccaaacat

SEQ ID NO: 180624 - DNA, 122 bp, Homo sapiens
agtaggaacaaaaaccatccattgtgaataaatggaccacataccacacagagcagcagtcgggagaagaaaagctttactgggagaaaatacaacaaattccagagtgcatggtttttagc

SEQ ID NO: 180625 - DNA, 122 bp, Homo sapiens
atttttctccttagagcatggaaaaccaacacatagtagttggagttgtgccctgaacatcgcctgcctgctaaatgcagagcacttagtcatgcccatgaaacagacaccccatgtcgtca

SEQ ID NO: 180626 - DNA, 122 bp, Homo sapiens
cctcggaatatggcaagcggttgaaataatggcctcagtttctatggcatgggtgcaaatcggtctgttagagctcacagtaaagagctttgtgaaacactgtgccaatcagcagtttccct

SEQ ID NO: 180627 - DNA, 122 bp, Homo sapiens
ctaggaaataatctctctcctccctgcaaaatctccatgtcgccccctcctttccctattcgccattacacaggtgggcagggccaggcacatccttgcagcctggacctcacatgttcgga

SEQ ID NO: 180628 - DNA, 122 bp, Homo sapiens
ttcgattgtcagtggctttgaggcaaaggattttggaagggaaagcaaagtgattgtctacgaagttgggcttagtatataataaagcccagtcatttcaaccaagaaccttaaagatgttg

SEQ ID NO: 180629 - DNA, 122 bp, Homo sapiens
tgctccgggaaccgcggcctggtgggacgagggttgcggaggacgggtcaggagcgaccgcgtttcaggcccgtggactccgcagcccagacggtccatccatctgcaccgaatcccttcgc

SEQ ID NO: 180630 - DNA, 122 bp, Homo sapiens
cccactccttttcagtccccatttcaccttcacagcctcagggaacttgaaaagactgcgcggtcacaaatcgggatacacaaacacaaacaccttgctgagctctctggcctccccttcct

SEQ ID NO: 180631 - DNA, 122 bp, Homo sapiens
ttccttcattcccataccactctgaacttgtgcgcgtcgtgtgaggtgttctcccaggggcgctccgtgagggccggggaccacctggggccgggttgctcacgagccgggcacagtgcact

SEQ ID NO: 180632 - DNA, 122 bp, Homo sapiens
ataggaagtgaggcatcgtcttctatatgctggagccacattgagacccagcacagaagccgaaagtcccccagaaaaccaacctccatcctttatttgcatttttcgaagaatgtgaaaag

SEQ ID NO: 180633 - DNA, 122 bp, Homo sapiens
cactcagccgtttaagaaataaaagcaaaaccatcacgtgactgagaccgtgtgtgtgaccgcagcaaagcgcagcgtgtggatggatcagagcccctcggtgcagctgtctgcatcttcca

SEQ ID NO: 180634 - DNA, 122 bp, Homo sapiens
gagagagagccgaggaggaagagggagagggcgaggcgcgcctggcggccgggttggctgcggccgcccagaagctcctgccagtcctcccaccgactacaccccgggaaggaggagcttcg

SEQ ID NO: 180635 - DNA, 122 bp, Homo sapiens
gaaggacactgctgatgaagacccggtgagccaaacagacctgttcccgctgctggcggccgcgctgctccgaggccgcctgctgctccagcagctcccgcagctgctcctcctcccggcga

SEQ ID NO: 180636 - DNA, 122 bp, Homo sapiens
ctgtcctattttactactattgaccctgaaggccatcgaggagggcacgctggaggagatcgaagaggaggtccggcagaagaaatcatcacggaagcgcaagcgagacagcgacgccggct

SEQ ID NO: 180637 - DNA, 122 bp, Homo sapiens
ctgaaagtgaattcagatcataaaattgcttgggaccatgtagcctccacagacttcactcggagcagagccatcgccttctgcgtcagggagggagcacaaaggcctatgctcatgtctac

SEQ ID NO: 180638 - DNA, 122 bp, Homo sapiens
ccgacgctgccgtcctactggtgcagccagcagcgcctgaatcagcagctagcacgacagcgagagcaggaggcccggcttcggcagcagtgggagcagaacagccgttacttcaggatgtc

SEQ ID NO: 180639 - DNA, 122 bp, Homo sapiens
tgcctcacctgtccagaccaaagagtcctagtgttcacaggtgtcttttcagtgacagcccgcttctcatctgatcaggccattgccctactccacaagacgtgcccactctctgaaagaaa

SEQ ID NO: 180640 - DNA, 122 bp, Homo sapiens
tgtagttgcacaataaatagttgttaggtgaagggaagtggcagccactttcataaggatcgtgaacccttagacttactgacagacagttggcacggtcctctgctgacaccccttcaaag

SEQ ID NO: 180641 - DNA, 122 bp, Homo sapiens
attccttccatgctccaaatcccgtgccccgtccacgccctcccgcagagggaggagcgacgggttacgctgtcgcccaggagctgaaccgcgcgaggaccccatccatcagattatatggc

SEQ ID NO: 180642 - DNA, 122 bp, Homo sapiens
aaaagagagagaagcataaaagcagacaaagcagagtagacaaaggcttaggaagggaagcgtaagacaggtcctaggagcaataagtcacccagaatgaccgtagcataagagttgtgaaa

SEQ ID NO: 180643 - DNA, 122 bp, Homo sapiens
acgccatgatttcagttgagtcagcctctaggcagctagagattcaggtctgtccttgggcgagaatttattatatttcttatcttagaaccaacttcatactgtgatgtggaagcttaaag

SEQ ID NO: 180644 - DNA, 122 bp, Homo sapiens
gtttcagtttcaaattacatcaaacatctaaattgggaatcccagctcctccaccaccagcgcatcaaaggtagatattcaaagcagtacttatttacaaacggcgatgcaaatctgtcccg

SEQ ID NO: 180645 - DNA, 122 bp, Homo sapiens
ctagcacgtggcgcttggtcaaaaaggtccaatcagctagagactaggccagacccagggcggaggcgggagctctgcgtggagtgagttccgggttggtttcctccagacccatgcgctcc

SEQ ID NO: 180646 - DNA, 122 bp, Homo sapiens
ctgagcgggcgggggagagggccctctgggtcctgcgattggcaggctgagtcgggctgacgtgcggtcacaaccaatggggaggaagggagggacacggcgggggattatggcgtcgtgga

SEQ ID NO: 180647 - DNA, 122 bp, Homo sapiens
agcaagaggcccccagcacggttgagtggtgtggcccctcagtcctggcttagaagaggccgatgcctggagcttacatgagcaagagaaggagttggggccacctgtgttgtcgttgagca

SEQ ID NO: 180648 - DNA, 122 bp, Homo sapiens
ctaagatcctgctctcagagctccggggcaatgcaaactaagataagaaaccagctcctacgttgctgcagcccatttcttctgggtgggaaggcaagaccttcccatttttttcaaaagaa

SEQ ID NO: 180649 - DNA, 122 bp, Homo sapiens
ggtggggagggcggggggatttcagagattgaaaacagagcagcccttgcccctcagctccggagctcatctgacttgagttagcgacacccccaacccccccccccacacctagtcgtcta

SEQ ID NO: 180650 - DNA, 122 bp, Homo sapiens
cactcttgagcagcagggagtttcatcagtgccttttaacttagctgggcacaccaggagcgattctgagatggaagcatccagaggtgagggactgtgtttagagaatgttcccaatttaa

SEQ ID NO: 180651 - DNA, 122 bp, Homo sapiens
caacatccaatgctgctaaagccagagaggcacagcaaggtagaggcagagacagggaagcgatattttcctcatcggccttggaacatcttgtctgttacttgcaagcttataaacataca

SEQ ID NO: 180652 - DNA, 122 bp, Homo sapiens
gcgtccgctcagagggtgggagacggcccgtagaagggcgcggagtcagcggaggagcgacggccaggcggggagtgaggaaactcctgccccagcacccacggagcccactccggtggtgc

SEQ ID NO: 180653 - DNA, 122 bp, Homo sapiens
gctagcaatagaaagggccctctggaatacagcaaaatgttgtaggtaatggcttgtgtccggaacatctcaggaagttttatgaatgttaatttaattgtgcaataggcaaggaaagtcag

SEQ ID NO: 180654 - DNA, 122 bp, Homo sapiens
agggcttaatcctttccaaccacaaggacctttgatccctgtgacagagcccaaggatctcgctcccgcgggcggggaggtgcagctcacctactaggctcaggtgcaggcacgcaagggtc

SEQ ID NO: 180655 - DNA, 122 bp, Homo sapiens
ctattaaacttttttctttttttctaaaaactagctgggcccaaagtttcaaacaacagccgggcacacatagctagctggtcgatgaggcagcacccagaatggccgctgtcttgttaagc

SEQ ID NO: 180656 - DNA, 122 bp, Homo sapiens
accttgtgatccggccgcctcggcctcccaaagtgctgggattacaggcgtgagccaccgcgcccggcccaatttctaaattttaaagctactttaagaggaagggtcttgaatatactgaa

SEQ ID NO: 180657 - DNA, 122 bp, Homo sapiens
aagttcaatctatgtggttaaatagggaagcagaccataagatgtatgcccagtggtgcacgttgctgactcgcaagctatgtgcaggctttagcatttagtgtggtgatgtgtgccctcta

SEQ ID NO: 180658 - DNA, 122 bp, Homo sapiens
cggggcaggccggcggctctgagtggggggcctgccaagcccacacccacccggaactcgcgctggcccgcaagcaccacgcgcagccccgattcccgccggcacctctctctccagacctc

SEQ ID NO: 180659 - DNA, 122 bp, Homo sapiens
agaggaaggccgccgggcaccacgtccaaccctgagtggaggattcacaggttaaaggaacgtcacagcccagccacatccaccaccaagaagacagcgttgaccacaggctgagccagccc

SEQ ID NO: 180660 - DNA, 122 bp, Homo sapiens
gtgtaaagcacctagaaccctgccagattcaggggacacagcatcctgccgttttcctgccgtcccccgcccgccacacagtaggcgctccagtggctcggggcatctaccaggcaggccgc

SEQ ID NO: 180661 - DNA, 122 bp, Homo sapiens
gacgctcaggccaggagttggggccatgcggaaaagatttacagttaagccaattggggccgaatacagccatccaaagtttgcaggtgtaaatagtgcctcgaattattgttttcttcctt

SEQ ID NO: 180662 - DNA, 122 bp, Homo sapiens
aagagcctcttggagatccggcagctggacccggacgacaggagcctggccaagtacaagcgggtgctgctggggcccctgccaccggccgtgggtatggcaggggtctaggcttggagggc

SEQ ID NO: 180663 - DNA, 122 bp, Homo sapiens
actccgcaaactcccgttctccctcccccctcccccttgccattccctttgccttccgggcgccaagtctctctggcctccaaggtgaacccaactccccagcgcgccccgggttcccgggt

SEQ ID NO: 180664 - DNA, 122 bp, Homo sapiens
tgaccagtgggctcacagagtcctctgcatctggggacggactacacggaatgtcacgcccgctgatccaaacactgcacggtctgagcctcttcctttatcaggcattctagaagatgctt

SEQ ID NO: 180665 - DNA, 122 bp, Homo sapiens
gaggagctggagttgtgtaggtcaagacggcgttaagcgtgctctctgcagatggaacagcgcatgcatagtccctgcagctgaaaggaatgtggcacgtccagtttaagggacttgaagaa

SEQ ID NO: 180666 - DNA, 122 bp, Homo sapiens
ggtcgcctctggacagggacctggagcaagctctggacagggctctggtatgggttctggcgaagcctcggagagcagcggcggagccggcggcggagccggtggtggtggcggcggcggcc

SEQ ID NO: 180667 - DNA, 122 bp, Homo sapiens
ggggcacagatgtggagctgactgcggggaggcctgagtcccgccacagccacttcccaccggttccaagcagcccgggccactctctcagtgtgtcggacccggcacactcaccatttcta

SEQ ID NO: 180668 - DNA, 122 bp, Homo sapiens
acagaaagttagaaatttgattggaacgcccctcgcccccgcccccctgccccctccggccgcgcacggttgatgtacaaaagcataaatggttagccccaaaaagggagtaaaaatgtcac

SEQ ID NO: 180669 - DNA, 122 bp, Homo sapiens
ggagcttgtaggggacgaggcgtagggctgggatccggctcccaggtgtgccgaagctggcgcgcgctcttccgccgcgcggaaagtgccgcggcaaactcgcggtgcggagctccaggcaa

SEQ ID NO: 180670 - DNA, 122 bp, Homo sapiens
cccacacattagcaagaaagtcctgctgaagtcatccctgctgtatcaggtgagtgcagacggactggaccctgagaaggcaggtgaaagacctggttttagtccaaagccagttttagaaa

SEQ ID NO: 180671 - DNA, 122 bp, Homo sapiens
agctctccacagtgcaattgatcctttagcaccaagtctgaaatactacacacactgtctcgtgagctctccacagtgcaattgatcctttacagcttatttttatggctgcatgatattcc

SEQ ID NO: 180672 - DNA, 122 bp, Homo sapiens
ggccgggcgcccgagtgggcgatcgcggagcagggtcggggccagaggccgcctcccttccggaggctctcacctgccacagccaccgcgcagcttagctgcagcgtctgcctggcaggcag

SEQ ID NO: 180673 - DNA, 122 bp, Homo sapiens
ctgccgccgccgcagccgctgccgccgcagcgaagaggccatgttgtgtggtgtgtggggcggggggaggaggaggagggagtaaagcctagagaggagacgggagagagacaccacacaca

SEQ ID NO: 180674 - DNA, 122 bp, Homo sapiens
ctggggtgctagggagggcgccatctgagtagttcggaagaactgaacatgatgagttgccggctgcttcctgagtccttggggaagcacacgcaccatccacttagcactggagcctggct

SEQ ID NO: 180675 - DNA, 122 bp, Homo sapiens
agcagtctcttttcgctcccatggctctgggactctgtccggactagccctgtccgcgctcggctacatccggcccgcccaccagctcagaggcagagttctccgcggtgtctcctagggtt

SEQ ID NO: 180676 - DNA, 122 bp, Homo sapiens
taaaattttatctatgaatatttgctgacttaatgaagcaaacaatgaagaaaaaggtaacgattatttgccaatggctgcttgaggtggcagattttcagcgataaccaagagaaaaaaaa

SEQ ID NO: 180677 - DNA, 122 bp, Homo sapiens
ctgtgtggtcgcagtgctgccatggacctgggacccatgcgcaagagttaccgcggggaccgagaggtgccgccgctagggccaggcctcctgcaggggcgggggaaaaggggtccccggag

SEQ ID NO: 180678 - DNA, 122 bp, Homo sapiens
tctattatgtgccaggcatggttctagatatagtatatcttgatttaagtagaacatttgcgattacgttacatatacccttgtggaataaaggagcaaatatagctagaagattgtaacgc

SEQ ID NO: 180679 - DNA, 122 bp, Homo sapiens
gggtgtggaggcgttggagcatctgagtccaggggaacagcttcggggggattgcatgtacgccccacttttgggagttccacccgctgtgcgtcccactccttgtgccccattggccgaat

SEQ ID NO: 180680 - DNA, 122 bp, Homo sapiens
tcctcgatgtccatcagcacgttgctatgcaggtcaagctgctccagcgcaggcatgtcccggaaggtgtggcgggtgaggcgagtcagactgttctccgccagtgagagggtatgcaggct

SEQ ID NO: 180681 - DNA, 122 bp, Homo sapiens
gcccaattccctatttgctacttcactgggctcctgaagcctgctccccattccttttggcgcatctagttctgcaaatcctctagctgtggcccccctgctgtctttggcaggaagcttgg

SEQ ID NO: 180682 - DNA, 122 bp, Homo sapiens
ggcagagctctttatgagagcggagccttctggtggggggctttctctgtcagtgagtggcgggcatgaatggaatcctatcaggggctctgggccagtgaagacccttcttcatgtgtttc

SEQ ID NO: 180683 - DNA, 122 bp, Homo sapiens
aagacttcccacccaagctaaattgttgtagggacaccagggtggatttgagcagcatcgcgaagatctcttcagctgagatgtacatcccgggaggcagcagccatgcacccagcatttct

SEQ ID NO: 180684 - DNA, 122 bp, Homo sapiens
cgctggcctgcgcacagtgaggtgggaagcacagggcagacgtccctccgtccaccacagcgctgacccgtgtccacgacacggacacactgtggcagacgtccctccgtccaccacagcgc

SEQ ID NO: 180685 - DNA, 122 bp, Homo sapiens
agcgggacttcattgggacttaggcaaagactacctggtctctggcgcccacgtggcccacgttgccatggtgacgtcagaacagcgtggagacgtcacctgacggttgccgcggtgacctc

SEQ ID NO: 180686 - DNA, 122 bp, Homo sapiens
ccggcccctccctgctccgtagggcacgtagacccggatccccagctcccggaccccttccgactgctcccttcgccactcgcgcggcttccactcctggactcggcctccacccctgggct

SEQ ID NO: 180687 - DNA, 122 bp, Homo sapiens
gttgggcacgtcactggatcccccagagaccccgtttcctgtgtaaggaaggcccttttccgttcacagcgacaccgactgcgcgggggctgtttcccgctcagactcacgagctacagctg

SEQ ID NO: 180688 - DNA, 122 bp, Homo sapiens
tggctctgtccctggcaaggccaggcatggagctgagctcagactgtcaccggactcacccgggacagcaacatcccagtcgagggcccaggtgtgggccactgccggatgctgagctggga

SEQ ID NO: 180689 - DNA, 122 bp, Homo sapiens
tacttccttgcatacaagtggtaccactcaaaatgcagaattcagcggcctcaaaagtcccgcctcttccaagccccgcccaccgcagtccatctttaggccccgccccaattcggctcagc

SEQ ID NO: 180690 - DNA, 122 bp, Homo sapiens
gcctgtgctaggcctgggttgccagaggcctgggtttctgctggtttcaccatccagccacgtccctggggccgggctgacccatgtttaccttcagccccaggttcagctccttgagcgaa

SEQ ID NO: 180691 - DNA, 122 bp, Homo sapiens
acataattaacagcgccccaaggaaaatcccgcgtatgtcagtaggaagcgttcttgatgcggagcgaaggctacttggcggtgttccggctctctgactctgaagggcctgcccgtgttcc

SEQ ID NO: 180692 - DNA, 122 bp, Homo sapiens
gaaaagacaccagagatctctttccctccatatatacacagagaaaagcccacatgaggacgaggacaaagcaagaaggcgactgttgccagcctggaagagaggcctcaccagaaaccaac

SEQ ID NO: 180693 - DNA, 122 bp, Homo sapiens
gagtcagaaatgcagcacaggctgcaattttgctaaattctatagtcttgctcacaataccgcagcaggatggctgcttttttggctgagctaggataaaaggtagtgctgggccttggctt

SEQ ID NO: 180694 - DNA, 122 bp, Homo sapiens
cgcggcgaccaccatcaccgtccgtcccgtccccttcctggtgaccacggccgccgccgccgagcaactgacactgactaacaacaactaactaactactcgccgcggccgagtccaccgcg

SEQ ID NO: 180695 - DNA, 122 bp, Homo sapiens
aaaaaaatccgtcatttctcagcaaacatcaggaatgctttttcctcttttaaaagagaacgatacaaccaccaccaccatcacccccaaaaacatacattttccgaaaacacactaggccc

SEQ ID NO: 180696 - DNA, 122 bp, Homo sapiens
gggctcagtgggtcccgggagtgggtggggcttgcatgttgacgggcagcgcgaggggcgcggctttagtccagggggcggagcctgaccggacctgggtttttcgggcggctggcggactt

SEQ ID NO: 180697 - DNA, 122 bp, Homo sapiens
gcatgaatgtgccctcagtctgggtggacgctgcacacccagatgggaggttgggggggacgccgaggtggagggaggagggccgggccccagccaggaagctctgggcgtgggcagggctt

SEQ ID NO: 180698 - DNA, 122 bp, Homo sapiens
gagcagagccggctggcctgggtggggcttttatacccgccacatcctccctaggcgaggcgaggcccgccccgccccgccccgcctcccccttacacggcccgctcccaccccaagtcagg

SEQ ID NO: 180699 - DNA, 122 bp, Homo sapiens
agcggtggcctggaggggaatcttgatcctgggccagccacctgtcaagaggaggcggagcgtcatgcctctggaagactggatgaatattctccaggagcctgacgaaggcgtgagtaata

SEQ ID NO: 180700 - DNA, 122 bp, Homo sapiens
ctgtctgcatgcactggaattgaggtctgtggatgtgcctttcctgacaatatttcttcacgcttgctgcccactggtgctgtgagggcacaataacgaatgtttactttgcccttgcactc

SEQ ID NO: 180701 - DNA, 122 bp, Homo sapiens
cgaactgcagcagtcggagccgatccctggagcccagcgcctagggcggacccgcgggagcgtctcttggtaaccgttgctaaggagaggaagcccgggaaggagctttcgcgcctgcgccg

SEQ ID NO: 180702 - DNA, 122 bp, Homo sapiens
accggccactgagcatagagcagtggcaagctcgcgcggcggagtgggaggcgcagagaccgaaagcactgcagcgccagagcgcgggctgaccaggctggcgtgaccgctttcccgacgcc

SEQ ID NO: 180703 - DNA, 122 bp, Homo sapiens
aggaaggaagaggtatagaatgatctgagggcagggagcctggctcttgtcagtagcagacgcgctcagtcccgccaaggaaggcaatccccaacggggcagagtgtgtctcatccctgcct

SEQ ID NO: 180704 - DNA, 122 bp, Homo sapiens
ctccccctccgcacacacaggagcccagctgcgattccctctgctccacaggagatgcagcgagcaccaaagagccttcctccaggattaagcctgatgcagaagtggttacactgactacg

SEQ ID NO: 180705 - DNA, 122 bp, Homo sapiens
agagccttccaacctcctaagcctcattgaacttgaaaagctacaagcttcctttctttccggagaccctctggcctcttcgcttacctctttcatcgaagccattgttaggggctgcatta

SEQ ID NO: 180706 - DNA, 122 bp, Homo sapiens
gaaaccctctccccacagcccctctcgtcattagcatggcaatgaggagtttctgtaattcgacttggaggggcggatgagccctggaaactcagagctcgccggaaaaggccgggggcggc

SEQ ID NO: 180707 - DNA, 122 bp, Homo sapiens
ccccggggtcagtcaggtgtggggtgtctgtgagggtcttccgtctcccctctgactctgcgtccgtggctctgtgcagatattgaggagaaaggcgtccggatgaagctgacagtgattga

SEQ ID NO: 180708 - DNA, 122 bp, Homo sapiens
ctaatggacactccatcacctgcattattcactgtgaagaaactaaataaagccagcaaacggtgtgctctttgccatccaggagcctcagtccaaattaattttcatgaaactcagattct

SEQ ID NO: 180709 - DNA, 122 bp, Homo sapiens
cgggcccgtcgcggtagtgaattggcgcctgacgattgcgcggcagaggctggcgagcagcgctgggctgaagccgacccggcaccgcgcggcgcccggatccggagctgccagcagcagaa

SEQ ID NO: 180710 - DNA, 122 bp, Homo sapiens
ccgagcgtattgcggttctccgggagggttatattggttcccattccacagcggccgcaacgtgtcgagagccgtaagtaaagtgtcgcaaagcagaaggaaggcgggagtcccgactgcaa

SEQ ID NO: 180711 - DNA, 122 bp, Homo sapiens
gctgaacgcctttccgtgtgtttttcaccacggctgttcttcccgcatgagctccctctccgtgtacaccctgagtgcgcttcgcgtgtttctcagtgagtgcttgttatcactaatgttaa

SEQ ID NO: 180712 - DNA, 122 bp, Homo sapiens
atctttgcttttttgtacttgaaataattctttcatcaatttctttcaagcaaacaagttcgagacctccctcaacaggccacctttcttgtgaaaagctgtttacaagatttcgattcaaa

SEQ ID NO: 180713 - DNA, 122 bp, Homo sapiens
cggcagctctacccaggagccggggtccccgcccagcctggcttcctgtccagcagagggcggcaggcctctctggcccgctccgtccggaggccctgcacccagtggccagcagagggcag

SEQ ID NO: 180714 - DNA, 122 bp, Homo sapiens
tttttttttttttttttttttcttgcagggaatgggcctggagccgtgagccgtccccttcgctaacccccaaccccgccttctcctgctcctcctctcttcactcttcctgcctctcggct

SEQ ID NO: 180715 - DNA, 122 bp, Homo sapiens
gaggccagcggggagcctttcctggctccctctgttttctctcactgtagaccaaagagccgcttgtgtgatattaaagccactttagaaagcatttgtgtttatttatgtttttgagacag

SEQ ID NO: 180716 - DNA, 122 bp, Homo sapiens
cctctgggtccggaatcgcgggcaaagatggcggcggccaggtgttggaggcctttgctacgcggtccgaggctttcattgcacaccgcggctaatgccgccgccacggctacagaaacgac

SEQ ID NO: 180717 - DNA, 122 bp, Homo sapiens
tcggctgtgacagtgaagggcagggcctcacctcggctgctccttgtgagttgtgggccccgtgtctgtgcccggccgccctgcggtgctcaccagccttctgaacgaggagctggacagga

SEQ ID NO: 180718 - DNA, 122 bp, Homo sapiens
cagaagggaccttgttgtggaacgggacggccaaggtacgctgcccctttaagttccagacgccccgcgtacttcccctacttcttcttcttgagatagccccgcccatctacccgaagccg

SEQ ID NO: 180719 - DNA, 122 bp, Homo sapiens
tcatgttttgaagtaagcacccagatcgacctgtcgggcagtgttgggagaatgtctgcacgtaggcgtggtcacgtccgtccctgttgcctgcgctgctccgagaagccccactctgacca

SEQ ID NO: 180720 - DNA, 122 bp, Homo sapiens
atggggccgcagctggtttaccggggattgccgcgccgcagagcgaacgaattgggaacacggctgctgggctaagccctgagggctctgctccggggctgctccctgcgtttcggacacgc

SEQ ID NO: 180721 - DNA, 122 bp, Homo sapiens
tctctcgagaaattggaagctctggctctttgtggtcccttcaagacaggcaggtgtccccggggctccccataaatcgctgtcctaacccctgccctccctcctgccagctccctgtctgg

SEQ ID NO: 180722 - DNA, 122 bp, Homo sapiens
ccacatggccttttatgacttaacctcagaaatcaagctgggtgcggtgactgctggatgcggtggctcaagcctgtaatcccagccctttgagaggctgagttgggcggatcatttgagac

SEQ ID NO: 180723 - DNA, 122 bp, Homo sapiens
ccgaaaggcttatttccctttcaactactctgagcggccaacagctaaaagagaaagcctcgtgccaggagaaagaagggttgatctacacccagttactagcagacaactgaggttccctc

SEQ ID NO: 180724 - DNA, 122 bp, Homo sapiens
cggcagggaggggcgcacccgggagcgcacccgccgcccgccctccctgcgctgctgccccgctgctgggccagactccagcgggcccgcctggcatttcacaggccaaaatcgaacagaac

SEQ ID NO: 180725 - DNA, 122 bp, Homo sapiens
aatctgtaaataaatttgtgctcaggatcatgcttaaactattcttctggaactttttctcgtgtaagtggatgtgatctctcatcaaaaatatccagggatctatttgcatctctgttctt

SEQ ID NO: 180726 - DNA, 122 bp, Homo sapiens
ccctcgggctctggggaccgctccacagcggggcctcccggaattccctgccggtctccgcgggcacacttggctggctgctgcgaccaaaactaccttcgcgtggcagggtcctccctcct

SEQ ID NO: 180727 - DNA, 122 bp, Homo sapiens
acaccatcttctcccaccttgggaactgttacctggagcagcaccttcagagggctggggcgtggccagaatggccaggagccctgctagggccagaagcagcttcatctctgcagtgagac

SEQ ID NO: 180728 - DNA, 122 bp, Homo sapiens
atccgtatatcgaagatgtatctgcacatccctattcattgcagcactacttacaatggccgagatttggaatcaacctcagtgcccatcaacagacgaacggataagaaaaatgtggtgcg

SEQ ID NO: 180729 - DNA, 122 bp, Homo sapiens
gcgggccaatcggaagaggccggaggggcggggcgggcagtggccctgggaaggcgggtccgcggcctcgctccctgacttccgggtcgcggtgcttgaagggagtgttccgtcgtttccgt

SEQ ID NO: 180730 - DNA, 122 bp, Homo sapiens
ttctgggtctcagatttcagatttcaaacttgttgcctttcacaatggaaaaaccacgcacgtactttaaaaaagtacttgttgatgataaactcacataacaacatggatagaatgacatt

SEQ ID NO: 180731 - DNA, 122 bp, Homo sapiens
agacgagagtggggactctgcctgtcattacagagcaatgggaagccgagggcaggttctcgcaggaaggataggaattattctttgaagatgcttgtggctgctgggtagagagtggagtg

SEQ ID NO: 180732 - DNA, 122 bp, Homo sapiens
ccctcactccccacctcacccgctgtttctcagcaatgcctttcctcaagaagatgcaggcggggcccatggggaactgcatggaggggtggggtggagctcgcagggcaccagtctcaaga

SEQ ID NO: 180733 - DNA, 122 bp, Homo sapiens
cctccctccaggcgcccgcccacccaggagagcggcgcaccggggagttttgatatcccccggagctcgctcgcgctagggcagtccttttgactttttaaaccaaatttgaacacaatccg

SEQ ID NO: 180734 - DNA, 122 bp, Homo sapiens
tctgtagggtggctttatgtggtactcagccaggcacagcagccctgccatcagaccttccgccacaaattcgaaatccagcatctcaggttcactccaatagtgactcttattctgtacaa

SEQ ID NO: 180735 - DNA, 122 bp, Homo sapiens
gaggaatgatccctccttagcggaagagagaaaaaagatggaggatggggaacagagttgcgaagaagacagcggtgacaaggcatgtggcctcggccttctagagcactgaggattctgtc

SEQ ID NO: 180736 - DNA, 122 bp, Homo sapiens
ctgggggtgggtcctagaccacctggggcagagtttagaccagccagggctgggttagaccggcagaggtgggccgtgggctatctgggggcaggacctggaccatccagggccgtgtctgg

SEQ ID NO: 180737 - DNA, 122 bp, Homo sapiens
catggcaacagtgacgcagaggactcccgtgcatggtgcttctgaggagacacctgtgcacgcaggtaaggacgcagtccacagcctccacccagcccgcctctgtcctgctcccaaggcca

SEQ ID NO: 180738 - DNA, 122 bp, Homo sapiens
tgacaatgggtgggctttgtgatctttgcatctgctgcgttttgctcatttgctcaactgcgcattgcctgcataggttctgtttagatggtgtttgatttttgctgacttccctccctccc

SEQ ID NO: 180739 - DNA, 122 bp, Homo sapiens
tgggagccactggttttactcagctgcatagtgtcccagcctgtgttgggattactaaaccggtcccccacagatggacagcatggctgcctccaaattgtgggcattagttttataggtgg

SEQ ID NO: 180740 - DNA, 122 bp, Homo sapiens
ccataagctcttgcgtccgccttcgacgtgactcctcacgtttcggcgattcagaattggcggggatggagtttttatgaagtctcccgctcaggctctccaagaacagggagaagttaaag

SEQ ID NO: 180741 - DNA, 122 bp, Homo sapiens
caggggatggcacagagatgtggggtctgagcctgcaggcagaggaaccagcaggaggcacggccaccacgaaggctggagctggggcactggcagtgggagtggagagggcacaggggcca

SEQ ID NO: 180742 - DNA, 122 bp, Homo sapiens
ctcgcggacacaggactaggggagacctggggaaggctcagggtggcacggcctcgcggccgtgggaggcaggctggcggaggacagggcggggcggccgctcacccacctggttggtgacc

SEQ ID NO: 180743 - DNA, 122 bp, Homo sapiens
cgagcgagagaaccggtaaggtaacaggctaaaagggcgtcgttgatttcttggctgcagcgacagaggcgggagacacacccctagcgtcggtctgaaacactacagcagcgaattctacc

SEQ ID NO: 180744 - DNA, 122 bp, Homo sapiens
tctgccacacacattgtttcacatctcagatctcacatcttctctacctcatggggttaacgtctttctcttaggacgcaaacacttgaaagaaaagttgaacttatgatgcagaagcaaaa

SEQ ID NO: 180745 - DNA, 122 bp, Homo sapiens
gctcggcagaacatgagctgcttacataaacactgcctcagagacacctgcagtgtgggacgcagggagtcggaggagggtggagggagaggcagaaagctgcagggtgagagaacggctcc

SEQ ID NO: 180746 - DNA, 122 bp, Homo sapiens
ggccactgcagggtgacagtggaggtgtctgttgtaagtggcctgctcaggtgctgaagtcgatatgtctccagtgtaaggttgctgaacatcaatatttaaaagcaatttatcttgctgcc

SEQ ID NO: 180747 - DNA, 122 bp, Homo sapiens
gatctggcataattacctttccagaaaactattgagagatgacaacttgctagcagccttcgctcgctctccgcgcctcctcggcctcggcgtctcgggtcgcgctggaggagcccttcacc

SEQ ID NO: 180748 - DNA, 122 bp, Homo sapiens
cgattcgctttagcccgcctggtagcccttccatggtggtgcacaggcgcgtgccaagcgcggcgaccactccgcctctgccgtcccacctgaccgcagaggagacccccctcttcctggcc

SEQ ID NO: 180749 - DNA, 122 bp, Homo sapiens
ccctgctggtgaaccgggctccaccgagaccgcattccctggcttcccaggccctcttcccgctgccagctcctccaaaggctaaggaaccagctccaggtcgcttcccaacgctcagctgg

SEQ ID NO: 180750 - DNA, 122 bp, Homo sapiens
agggctgcctccttccgactgggccttcttatctgggactgttgagggcaacaggccttccgaagaccagtgaagaaggaggccctgcaaacaggaggctgacagggtaggaacgaggccat

SEQ ID NO: 180751 - DNA, 122 bp, Homo sapiens
ccaacaggcaataaggacccagcggattggccgaggataggccagtcccctgggcagcagcgccgcgccgggactagaggggaacgtgaggagagctgcggaaagagatccagcctggctcc

SEQ ID NO: 180752 - DNA, 122 bp, Homo sapiens
ctcaacacgaaggcacctggccgggccggagcagcagccgcggggccggcactggggccacggaaccccgggccagactcaggcctgggccagctcggctccggcctgcagggggcgctgcg

SEQ ID NO: 180753 - DNA, 122 bp, Homo sapiens
cacgaagaggcacacgagggtgatgaccagccacgaggcccgcagccgccggggccccagcgcactgttcttggccacaccaatggtggctcccagcagcaggcagctgcggtacaggcagg

SEQ ID NO: 180754 - DNA, 122 bp, Homo sapiens
cgagctcgcccttgctgcccggcgttcaccagcgccagggcccctggagtgccgccctcccgagctcgcccttgctgcccggggttgtgtgctgccttcacggccaacttggtttttgtttc

SEQ ID NO: 180755 - DNA, 122 bp, Homo sapiens
tttggtgttattagcactattgccatcactgccttccagaaaaattttcctctgttgtaccgcagctttagatgctgcttttcttttcccttgaataccaccattgtctttcttagtaatct

SEQ ID NO: 180756 - DNA, 122 bp, Homo sapiens
tctccgtggaaaatcaaccagacccaaaacagaggtcccgggtttggggataccacgccgcgcgcctgagcatccgggctccatttctccaggcgacatctgcgggaagggagacctaaagg

SEQ ID NO: 180757 - DNA, 122 bp, Homo sapiens
aggccccggcccgctggccccgcccaccgtccgcggctcctccccgccccgtggcccggccgcggctctcagccccgccccctcgacccagctcggagcacgtgcgtcctccggcctagcct

SEQ ID NO: 180758 - DNA, 122 bp, Homo sapiens
tgaaggatgagtagacggagcagaagcagtaaagaggatgcacgttggaagaaatgaaagcgaatggaattgtagcaaacacgttgcgtttactatgtgccaggcactcttctagacatttt

SEQ ID NO: 180759 - DNA, 122 bp, Homo sapiens
cccggaggtctctgggttgtcacggagacaccccaaacatcgagagctggtctgggcagccggccaatgcacggctcccatcactgccaggctgtgatctcccccttgtccccttgtggcca

SEQ ID NO: 180760 - DNA, 122 bp, Homo sapiens
cgcagcccgcgtcagaacttagagggccaggcagggtcgcgcgcatggcctgggcgggctcgcggcgggtcccagctgggacgcgcgcggcagccgagcgctgctgccggctctcgctcagc

SEQ ID NO: 180761 - DNA, 122 bp, Homo sapiens
ctgctaatgtgccttctacagcgtctgctcggcagaaaaccaagtgtgcggacgagataacggcattaggagcaggaggacaaagctgatactcggggcagtgagacatggaggcttaaatt

SEQ ID NO: 180762 - DNA, 122 bp, Homo sapiens
actcatttggattttgatcctcaatgaaataagctgaataaatattaatattcacattgacggaagagaaaactcaatctcagagagggtaagatttcaaggtcatagcaaatcggtggcag

SEQ ID NO: 180763 - DNA, 122 bp, Homo sapiens
aagcagagcaagcaggattctgttaccggaagctgcagcacacaggcatgctgcctactccgaggtggttgcggtgtgtttctctcgcccaagaggccaggtcagggctggtggttcatctc

SEQ ID NO: 180764 - DNA, 122 bp, Homo sapiens
attgtttgtagtttttatgtgatgtctcacaaatagcctaattagaggcaagcttgcaaacgggcagttatacaggaagagacttaaactcactaaactgttatataaatagaaagttcaaa

SEQ ID NO: 180765 - DNA, 122 bp, Homo sapiens
gacatcccagagacgtctcacggcccaaccatgacagggacacagccagcctggccgggccgcctccacctgcactggaacacgctgggctcaggacttctgcccgggactcggcccaggcc

SEQ ID NO: 180766 - DNA, 122 bp, Homo sapiens
tctgtcactgtatgcatgtgccctgtgtggtccgcagtgcacagagtcttttgtgggtagcgtgcctggtttatgcttgggtccccacaacccacgaccttgtgcgaatggtcagtaaagaa

SEQ ID NO: 180767 - DNA, 122 bp, Homo sapiens
ccagggctgccaccaaggagctggggggattcccaataggagctccgagcttcactttctcgtcttctccccgcgcccctcccgtcctgccgaccccaggtgtcctgtataaccagttcctg

SEQ ID NO: 180768 - DNA, 122 bp, Homo sapiens
gtggctatgactggctgccgtccagctctgggcctccatctgataggatggagttctcagcggtgatgtggctggaggctggctgcaggcacggctgcctcaaaggctcctgggaagcacta

SEQ ID NO: 180769 - DNA, 122 bp, Homo sapiens
cacggccgtggatggggccggggccggggtcgcggccgtggatggggccggggccaagaccgcggagttcgcggaggcaaggcccaggataaggagcggatgcccgtcaccaagctggacgg

SEQ ID NO: 180770 - DNA, 122 bp, Homo sapiens
cttttacccaaagcttggtcaggagccctgagctgcgattggccgacgggtagaccgtcccgggtggcggagacacgcgctgattgggcaacagcgaccactttctcttcccatctctggtg

SEQ ID NO: 180771 - DNA, 122 bp, Homo sapiens
tggagatgtgatgtggctcgtgaattcctgcggaaactatctctaggtccttcaggtgaccgcacagccccgggcagttgccctggagcccaggtgtggagtcccagccctgcctctgatgc

SEQ ID NO: 180772 - DNA, 122 bp, Homo sapiens
ttgatagcagtaaaagtgactattgtccccaaagctttcttgtcgaatgcctgtgaatttcgagggtgggaataacacactcatggttatcatatgaaacctatttgtggcaagatagtaga

SEQ ID NO: 180773 - DNA, 122 bp, Homo sapiens
aacacggaggcactttgcacccagtaaaatccaactgaaaaaatgtggggcttggtcctccgcactccccagtatctggtcccagcccgcctacgacccccatctcctcccctgagacattg

SEQ ID NO: 180774 - DNA, 122 bp, Homo sapiens
ttagactccgcgcggggagggttcggcgtgtgctcgcattgctaggaggagaccaggtggcgcaggctgtgctcaaaccaggaatgactacatcagggagccccagggctccggtcttttca

SEQ ID NO: 180775 - DNA, 122 bp, Homo sapiens
ccgcagcagaaggagaaaggacagccaatcaggataattgtggccacccacgggaagccacgggtccagtgacacatgtgatgtgacggcggggttggcatgaagattgaaggtatgggtat

SEQ ID NO: 180776 - DNA, 122 bp, Homo sapiens
gcagcgcactccagtcttcccaggctagcggctgcagggagctccggcccgcggcccctccgcctcaagtctgggagctgccggtcccactctgtctttgcctatggggattcgagagtttc

SEQ ID NO: 180777 - DNA, 122 bp, Homo sapiens
ccaaccggagaacaggctgagaacctggtggggttctgtttgcctggttactcggggcagcgggttccagcctgcagcgcgcccactggttggggttctgggtgttgggggcaagcaggggc

SEQ ID NO: 180778 - DNA, 122 bp, Homo sapiens
tgaaccacagcccagacttggggatgcaccccaaaggctcccagcttcctcggggccacacgggttgccaggctgttgtgtaccagtgtctgggcaaatctccctgccctggctgtcaccca

SEQ ID NO: 180779 - DNA, 122 bp, Homo sapiens
gcggcggcggcggcgggggcgcgtccctgcggagtctcggcccggccccgccgcctccgccggaagaaacctctccgactcgggcagcccgcctggttcctcagacctgccgcggcgacccc

SEQ ID NO: 180780 - DNA, 122 bp, Homo sapiens
aactgcttcagattcgatctgttaggctgatcatagtattaactacaattcccagcaagccgcggagccaacctgggcctctgccggcctctgattggatacagtagccagaatgacgactc

SEQ ID NO: 180781 - DNA, 122 bp, Homo sapiens
agcctccgactggcccctgccttgacctctccaccggagccgcgccgccgcgccgggggccgttcgcctcttttgaatttcaacacgcgggaggggcgcgcctctccagtccgcgcgcctgc

SEQ ID NO: 180782 - DNA, 122 bp, Homo sapiens
gcatagtctgccaacattgtctgctgggggtacagagagagcctccctctccctgtgtctcgagttcagcacctattccaccttagtaagcctgtgaggctttccaggcatctctcccaagc

SEQ ID NO: 180783 - DNA, 122 bp, Homo sapiens
ggacggcgaggacggcgaggacaccgaggatggcgaggacggcgaggacggtgaggacggcgaggatggcgaggatggcaaggatggctggcagccagcaggggctgggagaggggtgaagg

SEQ ID NO: 180784 - DNA, 122 bp, Homo sapiens
aatcaaggtgaagctgaggtttgagccttacttaaaggctgatattttccactctaactgcggacagtactgtagcactgttatagtacctgctctgaatgttagtctagcaactcagggtc

SEQ ID NO: 180785 - DNA, 122 bp, Homo sapiens
gttggcgggtgtggcccggcagcagagggtttttggaatgcagggtgtggccctctaccacggcaaaaaagaaatgagtcagcccgttcagtcctaaccaataagcatgttcagtgtcggtt

SEQ ID NO: 180786 - DNA, 122 bp, Homo sapiens
gtgcaccaaccactggccacgtggttataagggtctgggcctgtggaatgaagcagaagacgtcatcgtgaaggaatcagtttcaggtctcgcgagagttggcacatgccacgcgagggcca

SEQ ID NO: 180787 - DNA, 122 bp, Homo sapiens
agagtcacagctggagcctgaactctgcctcagtgtcttccccacttgtgcctttgtcttcgcggttctgcctattatagcctttcctcccttgctgcttggcaaacttctacttatccagt

SEQ ID NO: 180788 - DNA, 122 bp, Homo sapiens
ccttttgccagttccttccaccaaacccgcttttggggtccccatcgacctggattccggcggagacactgtctgtgactccatcaaagtttcctcatgttctctgggcctcagtttccacc

SEQ ID NO: 180789 - DNA, 122 bp, Homo sapiens
ttccaggctccattaggggtgtccagcgccttcttttgccctaggcagcgccctgaagaacgcgtcggggcctcggttcgcggacttgaggagtggaccgaccgagcgctgtgcgtaaaagg

SEQ ID NO: 180790 - DNA, 122 bp, Homo sapiens
agggcattcctcgactctcccacccctggggaagagggcctggcccaagccctgagaacccgttcccacctccacaggcagtgccagggactccaaatagggtgctgaaattccagaagtct

SEQ ID NO: 180791 - DNA, 122 bp, Homo sapiens
cgtgaaatgtccagaacagtcaaatccatagtgtcagaaaacagaggttgctgaaggctgcggggttaggagaaaatgagagtaactgctaataagcacacggtttctttagggggtgatga

SEQ ID NO: 180792 - DNA, 122 bp, Homo sapiens
tgaagtgtggtgtatgcgtgcagaggcatatcatccagccataagaagaacatgctacaacgtggatgaagctggaaaacatcatggtaaaggaaagaagccagccacaaaaggccacatgt

SEQ ID NO: 180793 - DNA, 122 bp, Homo sapiens
gctctgcgcgctgacgccctgtcgtccccgcagaacgatcgccgcggccggaagagttggcgctcggggcggactccttggaactggcttagcgcacccatcccaccttcccgcaccctggg

SEQ ID NO: 180794 - DNA, 122 bp, Homo sapiens
ttattcacttccatgtacatgtcccgtagtgaactatgagcacctccagaccttaccctgcgtttggtcgccttgctctcctctctgcagctggcacccaatctttccaggctgtctctagg

SEQ ID NO: 180795 - DNA, 122 bp, Homo sapiens
taggaaagtttcatggaaggcttgcaagaggatgtgaaaattacattgatttttaaagaacgaggaggaattttttaggtagcccaagtgggacaggacatagctggtcctggagaacatgt

SEQ ID NO: 180796 - DNA, 122 bp, Homo sapiens
gcacatgttttgggaatgaggtgggcgaccatctttccttgcttcccactaccccgcccccgtgggctgcaccaaaggcgagtgtagaattaaacactgatactgaaatagggagtcaaggt

SEQ ID NO: 180797 - DNA, 122 bp, Homo sapiens
ttctcctccccaccccttcggcgcgcgccttcccgccccccgcgccgccccagccgcgagcgccctggacacccactccgcagccaggctccggagcccgcccccacccacccgccgggggc

SEQ ID NO: 180798 - DNA, 122 bp, Homo sapiens
ctagacgtgccggtggcgttcggccggtgtctgagcaacacaccgatcctgatctcgcaacgcaaagacagaccaagcgccgcaaagaagttgtagggctgcgagatgctccagctctgccc

SEQ ID NO: 180799 - DNA, 122 bp, Homo sapiens
tggtggggttgacgatggccacatcccgggcacctctggctgctgcaggcctcccaagaccgcttcacacttctgtgccgaccaggccaccagccagcgttgcctcttgcagaccactcggc

SEQ ID NO: 180800 - DNA, 122 bp, Homo sapiens
atacactgcatggaaatacacaggtaacatttttaaacagtggggacaaaattttaagtacgtggccagctgttggttgtcttgtggtcattaaagacaatgttaagaatcaggagtactta

SEQ ID NO: 180801 - DNA, 122 bp, Homo sapiens
gaggctgtgaaaatccaggagacaacatcaaagcgttgttttccaacacactggcctgcgcgccctacgctttatgcagatgagggatggcgcaagcacaggcctgcgcgcagggctttagg

SEQ ID NO: 180802 - DNA, 122 bp, Homo sapiens
ggtcccatcactccaaatccaaactcagaagcagacaggtcttcagtatgtgtccagagtcgtagcccttcaccccatcattctctcttacagtacagaaggtcatacaaaaatgtgggtta

SEQ ID NO: 180803 - DNA, 122 bp, Homo sapiens
ggacgcggcgcctggcggggccctgggaggctcggacggggtcctggcgttgagctcggccggcccggagcgcggacccagccgcaggggcggcgatgggcaccgagggacccccgcccccg

SEQ ID NO: 180804 - DNA, 122 bp, Homo sapiens
cacccatgcataccaaaggaaagaggagatatgctccagaacttcaggccacagtctttgcggcccagagttgaaggactggacttaaaaatccaccatctatccccagatcctgttaggga

SEQ ID NO: 180805 - DNA, 122 bp, Homo sapiens
tccagacattctcgtgcctcaaccccgcgaatacctgggatgacaggcgcgctactgaaccggtacatttttgtattgtagagccaagatttcgccacgttggccaggctggtctcgacctc

SEQ ID NO: 180806 - DNA, 122 bp, Homo sapiens
ctccagccccacaagggcgtcttctttggctggccaggcggacgggacgggggacgggggcggggactggcgggaggggggcgggacaggctcgctctcctcctacttagcgagctcccggg

SEQ ID NO: 180807 - DNA, 122 bp, Homo sapiens
aggtgcagcaggcgtacctggctgggtactggggaggtgttttaaatcctgtcttggccacgtttggatgggacagttgggcactcacgtcctgtgccttgcctttctccagctcggccgcc

SEQ ID NO: 180808 - DNA, 122 bp, Homo sapiens
agttttcagcatgcctgtctttcctactagagctaaaaggcagggtctgagcgtcttacgcgcctccatcttcaaggcgtagcacagtgactgaaaaaaactgacgttgaacgtgcactaaa

SEQ ID NO: 180809 - DNA, 122 bp, Homo sapiens
tttggagactcctaaacctaagccataagaccgagtcttaaaaatactcaactagccaggcgcagtggctcatgcctgttatcccagcactttggggggccgaggtggggggggaatcaccc

SEQ ID NO: 180810 - DNA, 122 bp, Homo sapiens
ttttgaattttaatctgagatactttttcactctgtaaggctaattgctctttctcctaccgtgctggaatttcagaggatttttgaaatatgtgtgtttgaaattggtttcctgattttta

SEQ ID NO: 180811 - DNA, 122 bp, Homo sapiens
ctatttcagttagctagcacatagcagtgactgtgaatgaatgaatgaataatgaatgagcgaatggtaaggaactggagctttggaaccagatagattctgggttcaatacccgactccac

SEQ ID NO: 180812 - DNA, 122 bp, Homo sapiens
tgagctaattaatactagtaatctacctgcaacagctgcagcgaggactctgtgaggtcacgtgggaaggagcttggcacagtgtcaaggacgcctccttgaactgagcttaggactctgga

SEQ ID NO: 180813 - DNA, 122 bp, Homo sapiens
cgggggctgcttgtctgggctgcaccgggtgggcggcgggggacgccggcaggagggagtcgggggtacccccgccggcctgccctgagccccctgcccgggtcttctctccttaagtgtcc

SEQ ID NO: 180814 - DNA, 122 bp, Homo sapiens
tgcaggcgcgcgccgccacgcctcactggttttcgtatttttttggtgtagacggggattcgctgtgttggctgggctggtctccagctcctaaccgcgagtgatccgccagcctcggcctc

SEQ ID NO: 180815 - DNA, 122 bp, Homo sapiens
cagggcactacttatgtgcttatggtgacgcttgtgtaaacagacctacggcatgacagccgcacaaaagtatggcacatacaagtgtgcacagtacagaatacctgataatgataattaac

SEQ ID NO: 180816 - DNA, 122 bp, Homo sapiens
gatcaccttgacaccatctggactgttttcactcatttcttttgtttgcgattttctgttcggtgaaaaggtggcagttgaaggttggattacatgaacattgaatcaggggcatgctttgt

SEQ ID NO: 180817 - DNA, 122 bp, Homo sapiens
gttctgggacagagtctggaaagctggtcttcaggctctcagtcccaggctgggcaggcacggtcacttcacttcagcctttcagtccctctctctctgcctgtgggaatctggacacattt

SEQ ID NO: 180818 - DNA, 122 bp, Homo sapiens
ttcttcaatctccctcattttgataagaataacctcaaagaaagcttattatcgaccccccgcccccggtcccctaccaccatacacacaccacatcagacaaagttagtctgattagattt

SEQ ID NO: 180819 - DNA, 122 bp, Homo sapiens
cagcagccatcagtcaagggtgatagatgagggtcatcactgcgcaaagcgctcacctttcgaaaagaaaacatcatatggccgccgtccacctcccatagctctcagcctcccacttctca

SEQ ID NO: 180820 - DNA, 122 bp, Homo sapiens
gactcctggatttggtgagagtgctttacaagcaaccatgtgtgttgtggctgatcaaagcgctcagaatccaggggaaggctgagatggctccggagcaaatggcagtgagtggatggaga

SEQ ID NO: 180821 - DNA, 122 bp, Homo sapiens
agcagtttttaactcatcattttattaaagattcctgatgctacctctgcctaagacattcgcagcaagtgaaaatgttaggtcttggctaacatgagcattctttagttctcaggaaagtc

SEQ ID NO: 180822 - DNA, 122 bp, Homo sapiens
acaaatatttgttgaatgtatgaataaatctcagagaggcattgaatcacggtggtgaaacgtggactctagaattaggaagtcatactttgagtaacagcactatctcactggatatgtga

SEQ ID NO: 180823 - DNA, 122 bp, Homo sapiens
tgacagatttatgtgaggacagatggccattacaggctgaaggctgacaagaggcagttccgagcattgttaacacacttgcacaaactctcagcagtgcagctcggtgcagaatgtaattc

SEQ ID NO: 180824 - DNA, 122 bp, Homo sapiens
agctgtgatccacctgcaccgtgacccacaggggcctgcgggactgtggtgttgggtgtccgcgcctcgttactgggggactgtgtggtgttggggtgtccgcgcctcgtttctgggggact

SEQ ID NO: 180825 - DNA, 122 bp, Homo sapiens
ctcagtccatgagtatagctttgtaaaactataccttaagaaaaacccttggccaggcaccgtggctcacgcctgtaatcccagcactttgggaggctgaggcaggcagatcacttgaggta

SEQ ID NO: 180826 - DNA, 122 bp, Homo sapiens
caaactcctgacctcagttgatccacgcccttcggcctcccaaagtgccgggattacaggcgtgagccactttgcccggcctgtatttttacgttttaataaatccccgtatttttgttaaa

SEQ ID NO: 180827 - DNA, 122 bp, Homo sapiens
tgggctctgtgttcatttccacccatgctgccacatgggagtgaaatcttgagagcatcacgttatctctctgagtctcagtttacttatctgcaaacatggttattgatatccatgccctg

SEQ ID NO: 180828 - DNA, 122 bp, Homo sapiens
gtattagcgctgtgatcttgagcaaattacttaccctctctgtgcctaaatttcctggcacgttgtcaatgtttccccgaaacaccccccaaaccccccccgcaaaacaaaaaacaaaaaac

SEQ ID NO: 180829 - DNA, 122 bp, Homo sapiens
cccgggcccgctccctgcaggggcttgtgggccgggggcgggtccaacaggcccggggggcggacccgcgagaggacgcgcgcgcgcggctccgggagcggcctctagcggcggccacgcga

SEQ ID NO: 180830 - DNA, 122 bp, Homo sapiens
gtgctgcgaggtcttcccaccccttccctaccccgcccgccccctggccttcctgattggcgagaaacactacaacaggaacagcagtcctcgccctccactggcctggccagccgccgctc

SEQ ID NO: 180831 - DNA, 122 bp, Homo sapiens
gataacgaccctcaacagcggcggagagggagcagccagttggtgtgtctcagaaaatcccgctgagttccgaggcctcctagatgtggaatcttactgagagttgttcccaggtcagagaa

SEQ ID NO: 180832 - DNA, 122 bp, Homo sapiens
ttcccgagacacttcatagtgttaagaagagaggagttgaaagttacttaagcagccacccgaggctggaggtggctcacagcaccctctacacaccgcacaggttctccgggaagggggtg

SEQ ID NO: 180833 - DNA, 122 bp, Homo sapiens
ggccctccccaggcctctctccccgaggctccagccggctcccccttccatcctccccagcgcactggcccgtctgccctcctcgctcaagtctccacccggtagatttaaaaagtgaaaag

SEQ ID NO: 180834 - DNA, 122 bp, Homo sapiens
ttcagatctcactgtgccctttcactttccttttcaattaagcttcctgtacagctgcctcggctccttctcttagaacactctagagaactggaaatcatgtaattacttttgtctccaaa

SEQ ID NO: 180835 - DNA, 122 bp, Homo sapiens
cggcgcgggatctgggtctggggatgtggtaccggctgctggcggcggccggcagtagagcggtggccaggccgctggccttgctgtggcgatgtggtggcccaggaggcggcaggacggcc

SEQ ID NO: 180836 - DNA, 122 bp, Homo sapiens
gtgactgtgtcaccataccactgcagggcagctcccagacagggaatggcttcagggaaacggagggagagaaaaaaaggaatcagcagtttccaccactttctctagcttgcagcagactt

SEQ ID NO: 180837 - DNA, 122 bp, Homo sapiens
agccttgcgggagaggaggagcagaggagcagtcttagggtgtcagaaccacccggatgccgcaccaaaaaacaggaaaaatccaagtcctgcgagaggcagtcaaaggtatctgtgcatcc

SEQ ID NO: 180838 - DNA, 122 bp, Homo sapiens
tttaatgggcaggtctggaggtgaggtatgccgtccgcactcaataattacttgcaggatcggattgtttctccagtgggtggggactgcaggatgtagcattgagtgagcctggcagattg

SEQ ID NO: 180839 - DNA, 122 bp, Homo sapiens
agaacggtcctcaaatagaagctctcctagtcagttggtcatctgacctctgactatatccggcctatgacaccagccagctcctgctttctgtcttgtaagagcactgctggaataaacta

SEQ ID NO: 180840 - DNA, 122 bp, Homo sapiens
aaaggggaagagggaaagaaaaaaagaaaaatgataagaaaaatgctaactaaggtaaaacggatgatgatggggaatgggcagtcacaaatgttcacagaaaataggtcagttagtaagat

SEQ ID NO: 180841 - DNA, 122 bp, Homo sapiens
caggtgtgagccactgtgcccagtcccgagatcagtttgggcaacatagtgagaccccatcgctacaaataataaaaaattagccaggtatcgtggcacacgtctgtagtctcaactccttg

SEQ ID NO: 180842 - DNA, 122 bp, Homo sapiens
gggacagctatgtgggccgttgtaagcagagaaggtgcccaggggacagcatcacaaggtcggcgctcaagggcagtcctctgttgtacaggtcccccatttcctcccaggcagtggggttt

SEQ ID NO: 180843 - DNA, 122 bp, Homo sapiens
attcccggctgtcccagccaggtgggggcctgacagtggcagtgtctgggtccgactgtccggcctctcaggcagggtcagccctgagggtcctggaaggttgggaactgcctggggagacc

SEQ ID NO: 180844 - DNA, 122 bp, Homo sapiens
agaggctccgccccacccgcctgccaacacgctgtcactcagccttagccctgcccaggccggccctcggcccgtcagaggcctccttcgtgctgtcactcagcccttgccccgccccctcc

SEQ ID NO: 180845 - DNA, 122 bp, Homo sapiens
accctcagcgactacacagctcctgtactataaagaatatttcagaatggcttcggtagccggcagcaccttcctcctctcgcagcagagaagtgttttgctctggaaacttgactggagcc

SEQ ID NO: 180846 - DNA, 122 bp, Homo sapiens
gggagaggggaaaagcccctcgtgggtttaggatactggaatctgggggttcctgttacacgcaggcaaaccccgtcagccactctgtaaactgctgggccttgctctcacccagattctgc

SEQ ID NO: 180847 - DNA, 122 bp, Homo sapiens
ggtgcaggggggcatggccctgccgcctcccccgcacggccacgaaggggcggacggcgacggcaggaagcaggacatcggcgacatcctccaccagatcatgaccatcaccgaccagagct

SEQ ID NO: 180848 - DNA, 122 bp, Homo sapiens
cagcgggcgtccgcggtgcgatcttccctagcgcctcgggtctggcgccgccatcttcctcggtaacaaccagtcgcctgaggcgtggggccgcctcccaaagacttctgggagggcggtgc

SEQ ID NO: 180849 - DNA, 122 bp, Homo sapiens
agtgcttttcaaaagtcttagatttgtggggaaacaaattcaagtgcccccttagcttggcggcctgagcccttccaagtcaggtctctgctacgtccccagcaccatatccacacggccct

SEQ ID NO: 180850 - DNA, 122 bp, Homo sapiens
tccctttatggcagccgtctgagggacagcagaagcgtccttctggggtcactcagaccacgcagctcctggagcctcggatcggctacttcagacacagacgtctctgagtcgtcaatgcc

SEQ ID NO: 180851 - DNA, 122 bp, Homo sapiens
cccacagagcacaggtgaggcagcagaccgggtggggtcggtgtcgcgcctgcgcccgcccggacgcctcgggcccgcccgctccgcaccctggaaacccctgcactcagccccccggcgtc

SEQ ID NO: 180852 - DNA, 122 bp, Homo sapiens
agtggacactctgtatctagctactctcgtggggccttggagaacctttatgactagctccgggattgtaaatgcaccaatcgacacctgtatctagctaatctggtagtgccttggagtac

SEQ ID NO: 180853 - DNA, 122 bp, Homo sapiens
ccttggcccgtggggaaagtggcggtgtctctgcgacctgggcaagcaggagcgcagccgcgaggtagtgggcacagcgccgggcccggttttcatggacccggagaagctgatccagttac

SEQ ID NO: 180854 - DNA, 122 bp, Homo sapiens
tggtggtcgcgtccatcttcaagaacagctcgttgtgctcatctgtgaagccttattaaacgtggacgttgttttctgccttcccaggattcttccttcagtgctgaggcaggtcgggctca

SEQ ID NO: 180855 - DNA, 122 bp, Homo sapiens
gccgcgcgagccgagcctctggcgggcggcggggcgcaccgcagctgtgcataagaagggcgcgcggcacccgggacgcgcgcgcacacgagcacgcgggaggccgccgcgcggacgcgctc

SEQ ID NO: 180856 - DNA, 122 bp, Homo sapiens
ccaagcctctcagactcagcagggtgggtgcagcgcctgaggctctgagcatcagcagggcggggtggagcgcccgagcatctcagcatcagcagggcggggtggagcgcccgaggctctga

SEQ ID NO: 180857 - DNA, 122 bp, Homo sapiens
ctacgcttggtaagttcaactctctttcacagccctctccacagaaagaactctggagttcgttctcggatttcactaaacgaatactgccatccttgtccattctcggaccccttctcgca

SEQ ID NO: 180858 - DNA, 122 bp, Homo sapiens
cgctaccgtcaagggcaggccgggcctccccgtcttggtccaggcccccatgctgactctcgtgctgggagtcggctggtccggttgccccaagaacagccgcctctacctttaggcagaag

SEQ ID NO: 180859 - DNA, 122 bp, Homo sapiens
ctgctggtgaaatacctacaggaaggaatctagcattactcagctcctgaaaacctcttccgcccttgcagaagtgaaaggtctgctacagcggaagcctggtaattcaagattatactctc

SEQ ID NO: 180860 - DNA, 122 bp, Homo sapiens
gaaattctgaaccccagacctggaaagttcaaagctgaaataaaatcgccccttgttttgcgagctgctgcctcctatgtgccctcaggcaggtccattccctcctggtctcagtctcccca

SEQ ID NO: 180861 - DNA, 122 bp, Homo sapiens
ctcaaaaaaagagtcataacaacaacaacaaaaatgcaggtggccaggcttggtgactcacgcctgtaatcccagcactttgggaggccgaagcaggtggatcacttgagctcaggagttca

SEQ ID NO: 180862 - DNA, 122 bp, Homo sapiens
gtgggtcacaacagcgctgtcacaggatcactgataacagcatgacacattcatagtcaccgctcagcgccgtcacacaaacggccccgcccccactcagtcccgcgggcccaatcggggac

SEQ ID NO: 180863 - DNA, 122 bp, Homo sapiens
tggactgactgcaggggcttgtggttcaccttggctcacacatctggtgaggcctggcctcgtgggggctagggaaacgagagcccctctgtttgcacatcccttactctccctccataaag

SEQ ID NO: 180864 - DNA, 122 bp, Homo sapiens
agtggaactaaggctcattctaaagaatgtgcccaagatcacacaccgaaggctgcaaagcgagagtcaaacttggaaccctgaacctgcacttgtccctttacactgccctgcagcatgga

SEQ ID NO: 180865 - DNA, 122 bp, Homo sapiens
cccggggatgccggccggaaagcagggccctccacagcgcccaggccccccagccccggccgcccaccccgggaccctggcccacagggagctccgtggggccgcccatctgggccgggcgc

SEQ ID NO: 180866 - DNA, 122 bp, Homo sapiens
ctgctgaagatcatcaatcctaggaacaacattatctttacaaatacccttcctcagaatcgcttgaacccgggaggcagatgttgcagtgagccgagacagtgctactgcactccagcctg

SEQ ID NO: 180867 - DNA, 122 bp, Homo sapiens
ttcatcatagtcttcaagttgagcaggctaaggagaaggaggaagaggaagattggtcttcgctgtctcaggtggtagaagtgggagaaaatctgctcataagtagacccctgcagttcaaa

SEQ ID NO: 180868 - DNA, 122 bp, Homo sapiens
tagcaggtgatcaaactcaatcaacagctccaaaaagtttacattacccaggagcaaaaacggacctgctgtgtttctactacctctgcaactcattccccagtgggaggaaaggtaacaac

SEQ ID NO: 180869 - DNA, 122 bp, Homo sapiens
aatagagacctcactcaatcacttcatacttcatttcacaatgaggatctaggtgcagaacgcagtggggaccctctttgacagctgccctggcttggggccttgagataagctaatcattg

SEQ ID NO: 180870 - DNA, 122 bp, Homo sapiens
cctgagagctatggctgataaatgtcttcattgcctcagagaattgttctggggccgtgacgctctccagcattgcctgaattccaaacggaactacatgcctttgtgactttgaagattaa

SEQ ID NO: 180871 - DNA, 122 bp, Homo sapiens
ctcaagtgatttccctgcatcggcctcccaaagtgctgggattataggcatgagcctccacgcctagcctcaagtggtcctcttgagtcaacctagactacagtctatgctagagaatgttt

SEQ ID NO: 180872 - DNA, 122 bp, Homo sapiens
cggggcctttgccaacagccaagtaagtgagacattttggaaagtggatcctccagcccccgttaggctcccagatgacaacatcccctgctctcatcttgaccacaacctcatgaaatacc

SEQ ID NO: 180873 - DNA, 122 bp, Homo sapiens
agagttattctagtggaacattttacattagatgcaatctaagaaaatggcttatagcaccgaggactcctttggaagcagccagggcttggagtggggagagacaaacgggacagggggag

SEQ ID NO: 180874 - DNA, 122 bp, Homo sapiens
agattgttgggttgagatcaaatgtgaagatggccaggcagccttagcttgtggtcaccacggcaacagccagccctgcctcgggctcgagagtgacacagcagttctggagccggacccct

SEQ ID NO: 180875 - DNA, 122 bp, Homo sapiens
gccctgctccaggattgggccgtttccgtcagtactctctctgattggctgtcccggtttcgcccgagcaggagatggggagtgaacccctttactgccaatcagcggttgccgctgcctaa

SEQ ID NO: 180876 - DNA, 122 bp, Homo sapiens
cctaagtgtcctcacaggtgaattgagacactaatatgcacctcatagggttgcaaagatcgaataaaaatttgaacaatcggccgggtgcggcggctcgcgcctgtaatcccagcactttg

SEQ ID NO: 180877 - DNA, 122 bp, Homo sapiens
aaaagttgacctcacagaagtcgtgagtagatcgatggtgacaggagccggggagtggcacggggaggaaatggggggttgtccatcaaaggaccaaaatctcagatggacaggaggaggag

SEQ ID NO: 180878 - DNA, 122 bp, Homo sapiens
ttctttaatccccaccccttttgcctttcagcattaaactgaagaaaagatgtccctgtacgatgacctaggagtggagaccagtgactcaaaaacagaaggctggtccaaaaacttcaaac

SEQ ID NO: 180879 - DNA, 122 bp, Homo sapiens
acgcctcctcactgctgctcgagggtaggcaggagcacgcggaccccgtgggggctgaagcggggctctgctgcccgccctgcgcaagctcccggctctggttgctggtccacaaaatcggg

SEQ ID NO: 180880 - DNA, 122 bp, Homo sapiens
cacaaaacacagaaatgggggttctcacactacagattaaggagtgtcccaggccgggcacggtggctcacacctgtaatcccagcactttgggaggctgaggcaggtggatcacctgaggt

SEQ ID NO: 180881 - DNA, 122 bp, Homo sapiens
gccagagtgcccagggctcaaggctcgcatcagcaagtgctcaggctttatttacaatgccgacactgcagggaatgaacagcctccatctgggcctctctggtcaaaaccacttttttgag

SEQ ID NO: 180882 - DNA, 122 bp, Homo sapiens
ggccaagactcagggagacactgagacagaacgcttggcacaagagtagcggggtcagggcgaagtcccagggcctcaagcgtggctctcagggtctcaggccccacaggcggtgtatgggt

SEQ ID NO: 180883 - DNA, 122 bp, Homo sapiens
cccgcgcgagacgctgtctgatcgggctccctagagtggggcccggagaaaccagaacggcgggggcagcctcacgccattttgcacgccctgaggcgggtgctggaggccaaggggaatgg

SEQ ID NO: 180884 - DNA, 122 bp, Homo sapiens
cagagaagccagggagtattgctggggaggggagggaatgcggccacagacggggccacccgcccaccgagagagcccgctcttactgtataactggaagaacaagccccttctacctccca

SEQ ID NO: 180885 - DNA, 122 bp, Homo sapiens
cacgaaggcggtggcatctgtcatcactatttacggtgcagcgatcagggcaagttgacccgcattaaaaggcctaatcatgctggtctccgtgaaacggaagaccaagaggaaggtactaa

SEQ ID NO: 180886 - DNA, 122 bp, Homo sapiens
acacacacacacaccaagacacagacagcagggctgtgcgtgcacacacacacacacacccgagacacatatgcctggggtctctcttgagtatatgatgagcaccaaagcagaggtcaggt

SEQ ID NO: 180887 - DNA, 122 bp, Homo sapiens
gcccgcacggccgccgcgcacggcccgagcgcagccggcagcccccggcccagccgccgccgccaaccgcaccccgcccacctgctgcggggcaccagccctccgcgcacccgcctgccggc

SEQ ID NO: 180888 - DNA, 122 bp, Homo sapiens
gcgttccagcttcttcgtaacgttcccacaccgtgcagcaagcggagggaagagaacttccggcgcccccacctaccgctccccagccgtgtcccgctgctctaaatctgcagacttgatcg

SEQ ID NO: 180889 - DNA, 122 bp, Homo sapiens
cccagaggcagatcagaccccttagaccctgacagctgctccttctttcaggagtgtgatcgaccctcaatctctctggctgtctgtatatcaagactgaatcctgaccctctaaataaaca

SEQ ID NO: 180890 - DNA, 122 bp, Homo sapiens
aaatccgaaaattattcccgatgtggtggcgctcacctgtagtccagctactccggaggccgagacaggagaatcacttgaactgattctcctatctcagccccgccccacccccccccccc

SEQ ID NO: 180891 - DNA, 122 bp, Homo sapiens
cggacacccacttgggaacctcacggttcagatccagggacctgctccccgggagtccagcgtccttgcaggggcctgcgatgccttgtgcggcctgggccgtgctgcttggcgtctgcacg

SEQ ID NO: 180892 - DNA, 122 bp, Homo sapiens
gccagttctgccaggcggtggaatcctgaatggatgttaccgtttcttaaacgagcattacgcttttttgcttcttcccccaactcttgtttgtacccggttatcgtcctcatatctgggag

SEQ ID NO: 180893 - DNA, 122 bp, Homo sapiens
cccagggtgcattggggagttcgcagccttgctaaagtagagggtgactgccattctactcgcgaggtccaaggaccccagggctccatgagggtgttttggcctcgctgggaggggcgggg

SEQ ID NO: 180894 - DNA, 122 bp, Homo sapiens
gccaggcccaacgtctggtagtagtctttacccatgaccccctcctgcggcccgccgacccgctgtcgccgtcccccggctccgccgccgaccagtcccggactctatatacccgtccggcg

SEQ ID NO: 180895 - DNA, 122 bp, Homo sapiens
ccgaggcgcgcgcagccggcccgcgggcgagggggaggagagggcgggagcatgggggtgcgaccccaaatcacatcggcttggcgggggaggattccctcctcggtggccgcgtgggcgcg

SEQ ID NO: 180896 - DNA, 122 bp, Homo sapiens
gggggacgccgcagcagggtactcgggtccagggcgcagggaagacccggggatggtgagcgttccagggtgccaagtcccgtgggtctaacgggcttgttggcgagcgccgcgggctctgc

SEQ ID NO: 180897 - DNA, 122 bp, Homo sapiens
gcctatcctctgtggcttttgttctctcatctgcaggccttctcccctccatgaagtgcgcgggttgccctggagatgcccagctgctctgcctatcacaggctaaatcagtctgattccct

SEQ ID NO: 180898 - DNA, 122 bp, Homo sapiens
tctgggggcctcaagggagggcccaggttccgggggccatgggtgggaaggggaaggacccgggtaaggccttaccccggttccggcgcagccgtccccagtggtaataacactcctcgtcc

SEQ ID NO: 180899 - DNA, 122 bp, Homo sapiens
ggatccggggatgggcagcgccacccggcccgctccagagtcagcatgggtaagggcgcccgcctgccgcagccggggcttgggcccctcaccctgttcccgaccatagcccggccggggtg

SEQ ID NO: 180900 - DNA, 122 bp, Homo sapiens
ggaacaacttgctctcttgctaatgtaaatgactcataactaagagtaggtgagatttgtcgactggggaagagtatttcctgaacctgcaggaatcagatggtgattcacctgaaggaaac

SEQ ID NO: 180901 - DNA, 122 bp, Homo sapiens
gccgccacggcgcaaaataaactacaaaactacaagcctttaccttttcaaacacactgacgcgggccagccccagccctacgcccgcaggggcacgcagaaaagacttagttaccacggcc

SEQ ID NO: 180902 - DNA, 122 bp, Homo sapiens
tgacagttatgggtggctatggccaaaagggggctgggcgcggaaactagagctggggaacgtgggcagggaaccggtggacgtggaattcccagtataatgttgccttatatacacttact

SEQ ID NO: 180903 - DNA, 122 bp, Homo sapiens
gtgtggggaggcctacccagctcacggaaagttccccccttctcaagggttgggcaacaccgcctttgccgcagcgtccccgtactgagggggccgggcacctgttggggcaggagctgccg

SEQ ID NO: 180904 - DNA, 122 bp, Homo sapiens
ccgccggagagtagcgcgtagggaggaccgagcctcgtttccaaggaggggcaggggaaccgaacagggtggattaggaattgggctttccaaagctgtgcagagtttcagggaagggcaga

SEQ ID NO: 180905 - DNA, 122 bp, Homo sapiens
aggaaagcagtttcagaacaatcagtgatgacagctactgtgaatccactattcaacaggcgccccatcgcttgctcatgggctcctcaccatagctctaagccacaggagctattttcata

SEQ ID NO: 180906 - DNA, 122 bp, Homo sapiens
ccaggcatgcaggggcggggtgcgtgcgcaggtgggtgctgctatctccttcatgtgatccgagcttgggggcggggcaggggctggggagagtggtgtcaggtggaggcaccctggaggcc

SEQ ID NO: 180907 - DNA, 122 bp, Homo sapiens
gccgggcagaggagcgggtgggccgaggctgggacatcgcctccgaaagctgccgggacgcggcggcttcctgcagagcctgcgcctgccggatccccagaacacagaagcttctcggacat

SEQ ID NO: 180908 - DNA, 122 bp, Homo sapiens
tcggtagccacgtttggccggggcacaactccctggaggccctgcccccctagacggccccgagcccttttggacctcatccggctagtttaaaatgacaatgacagaggcgcgtgaccgaa

SEQ ID NO: 180909 - DNA, 122 bp, Homo sapiens
acccaggtggagaatgggccgtacagggacagatccaaccacctaagactctgaagaagccgccccgccctccccaccgggcctgcctgctccgcagtgataaccgtggcagtcacaatggt

SEQ ID NO: 180910 - DNA, 122 bp, Homo sapiens
tgaagaagcgctggtgtgccgaccagaactggccccacagggacttgcgcgactccaggccgatccagtcggccgcctgctggaacacgttcagggcctcggcccactgcaatgacacgtca

SEQ ID NO: 180911 - DNA, 122 bp, Homo sapiens
cagcggctggggtctctctgccccttcgcgttgaagagcaagtcggcagcccaaggaaggcgcgatggccgccgggcccggccctgcaatgcctggtctctggctcggcgggtccagctcac

SEQ ID NO: 180912 - DNA, 122 bp, Homo sapiens
ctggttcggaggctaagtaagtatttaccttccagtttggggctgacggggcgggggcagcgcgaaacgaaaattgcgtctctcttcctctctctttctcctcacaaatatttgggggtcac

SEQ ID NO: 180913 - DNA, 122 bp, Homo sapiens
ttaagtgaatgtaatacgaaaaatgaatttagaataaattaactcaattttctcagaatccggttgacaaaaatgaagtcaggtaatgtcaaatactggccaaagatgtgaggacatgagaa

SEQ ID NO: 180914 - DNA, 122 bp, Homo sapiens
caggcgtgcttcctgcatgtcactggggaggccatgctctctctcgtgtatctggactcacgacgtccacccggctcgtctgtattccgtctgggtggacgtgacactgggctgctccactg

SEQ ID NO: 180915 - DNA, 122 bp, Homo sapiens
gagaacgctggacaggctgcccaggacgcgcctggggaagcttcgagactgcaacacacacgagagcctcctggaagtgtgcgacgactataatctgaacgagaacgagtatttctttgatc

SEQ ID NO: 180916 - DNA, 122 bp, Homo sapiens
ccgcttcggtgcacgccatttgccaggccatgtgctccaggagctgggcccggagcctagcgagcccgagggcgtgcgcgaggcgctgcgccgagccttcttgagcgccgacgagcgcctgc

SEQ ID NO: 180917 - DNA, 122 bp, Homo sapiens
caggcgtgcgtccctccccacgtcctggtgaggccagccatgtttctaggagtctcaggccgactcagtgtgtagtgagagaaggtaaacgtaggggaaagaaaattaaaatgctcaaagag

SEQ ID NO: 180918 - DNA, 122 bp, Homo sapiens
tcagccaccatctccgtgtgaagaaactcaaacaacacagtatccgccatgccccctcctcgcacgcctaaagatgcgcccagcgcttccagctctcattggccaggcttggtaagccacgc

SEQ ID NO: 180919 - DNA, 122 bp, Homo sapiens
tttgccagcggcgctctccaaaatgtgccaaaagctgtgcttggggcactctctcgaccccgccccgggcagctgttcccattttgttcccgccttccctcccctcaccgcagtccctcgta

SEQ ID NO: 180920 - DNA, 122 bp, Homo sapiens
attcttcttcttttggtcaaggtattgactattataaactctagccataaagggcaaaggcgaatgaatcattccttggggatgaaggcattttccaggttgttatagtgtaggcttataca

SEQ ID NO: 180921 - DNA, 122 bp, Homo sapiens
cctccttcccgggcaatcagctgctccaagccaagcccacccctgccccctggagggaggcggctccttttaaggctgcttctgggaatttccactccagagccagaaccagagaccccagc

SEQ ID NO: 180922 - DNA, 122 bp, Homo sapiens
gtcggggaagcggggggcggagttccgtcctctgatgattggctctgcgcggatgggctgcggctgcgcccggccaacccgcggcgtgttgctatgtgctgagccgaggggataggtgcggg

SEQ ID NO: 180923 - DNA, 122 bp, Homo sapiens
ccattttatccaatgaagagtgtggaagaggagtgatatggtttggttctgtgtccccaccgaaatctaatctcaaattgtactccccacatgttgagggagagacacggtgggagtgattg

SEQ ID NO: 180924 - DNA, 122 bp, Homo sapiens
ccacaccaatccttgttaccttccgccctcaagatgaccttagcagttagcgtcaacctccgcactctatgacctttccaaaatgatggtgaacgtaatacgcaccacactctgaccttctc

SEQ ID NO: 180925 - DNA, 122 bp, Homo sapiens
ggaaaatatgccaggcatggtggctcatgcctgtaatagcagctgttatagcagccaaaacggactaagacaactgtattgctgagacacagtgaaaggtcattcaagatcagggggtgaca

SEQ ID NO: 180926 - DNA, 122 bp, Homo sapiens
gatcctggaattttctccctgagaacctcttcagaaaaattgcagaagggagagaaaccccgatagtcttatttaatgatttccgaggctcagcaagctaaggaaggaaatggatcgttttt

SEQ ID NO: 180927 - DNA, 122 bp, Homo sapiens
agctattggtttcaggacccctgcatatgccaaaatccttgcatattcatgtctggcagtcggccctgcagaaccacatatatgaaaaatggaccttctgtaaaggccatttcacatccgca

SEQ ID NO: 180928 - DNA, 122 bp, Homo sapiens
cacagggaggcaaaaacaagcacgcacagccatgctcggagcagccccatccgtgatggccgagaggcggtggaaacagccccaacgcacatccactggtgaatgaacaaacaaaacgtggc

SEQ ID NO: 180929 - DNA, 122 bp, Homo sapiens
cccttgaggaatcatgttgctttggtgccggctgtctggtttctattccatatcctgtgccgcacccttcccccagccacagtgacatctggaggctctgaccacagctggcaggctctgtg

SEQ ID NO: 180930 - DNA, 122 bp, Homo sapiens
gcgagggggctggaggaaatgtgctccctcccacgatgaaatcctccagggcagctaatgcgggcgagtgagatggccaggtggagaaggcaccacaggacgttctgtgcgatgttccctgg

SEQ ID NO: 180931 - DNA, 122 bp, Homo sapiens
gcacggtcacccaccaggacgacgcctacggcctggagatccaggaggcagccagcaggacgtgctgcgctattgacagctgtcctaataacacccggacattcattatgtatggagtggca

SEQ ID NO: 180932 - DNA, 122 bp, Homo sapiens
tgcccacagtgcccccttttctctagccgaatctttttcgaacagcccgggaaaggaaaacggattcacttgctgattttgttcacggcggaagcaccatgttccgttcctttttcaggttc

SEQ ID NO: 180933 - DNA, 122 bp, Homo sapiens
tgtaaggtagctattattttccctgatttgttgggtaagaaaggctgagtctcaggtaagcggcctaaggttgcaagagattgtgggcgagctggaattcaaaactgcctaggcttaactcg

SEQ ID NO: 180934 - DNA, 122 bp, Homo sapiens
agagagcgagagaggctgagacactaaggcagaggccacggtctttttgtaacctcatctcggaagcgacattgctccatgtctgccgtaatctcttgttagagatgaatgactaagtccag

SEQ ID NO: 180935 - DNA, 122 bp, Homo sapiens
gacttcattaccacctttattatcatctccctatattcctgtccctggccatggctgatgcgcaccatcaccgctctgatagctaatgtaagaagtccaggccgggcgccgtgcctcacgcc

SEQ ID NO: 180936 - DNA, 122 bp, Homo sapiens
atggcgccttcctcgcagggcagaggatcacgcgggttgcgggaggtgtagcgcaggcggcggctgcgggcctgggccctcggccccactgaccctcttctctgcacagctcctaagccact

SEQ ID NO: 180937 - DNA, 122 bp, Homo sapiens
acgtggcgtcgtgtctagttctctcacacatggcgccgtgtctgcttccctcacacatggcgtcatgtctagttctctcacacatggcatgtctagttctctcacacatggcgtcgtgtcta

SEQ ID NO: 180938 - DNA, 122 bp, Homo sapiens
ggcggcgccccggacaacgccacccgcacaggcagagaccaagtcaggtctcaggtgtgccggcgtggcctgggcgcggaccggcggccggagcccgggccaccctcgtcgatctctccgca

SEQ ID NO: 180939 - DNA, 122 bp, Homo sapiens
gggggcgcaggcgggctccagagccaggcctcggacttcgcggggaaccaaaggcaaaatcgcggcgtccggggcgccggcgcacaagtcctgtcccgcgcccgctgcgggagcggagactg

SEQ ID NO: 180940 - DNA, 122 bp, Homo sapiens
cgcctagacgacccagcccaaccccacccacagtgcctggcaacctagaccagtcagggacgcggcaggaaatggaagagcctccgcaagaggctctggctgaacccttgaaacatgaaagc

SEQ ID NO: 180941 - DNA, 122 bp, Homo sapiens
ttagctatttctgttaccgttttgctagggtggccaactcctactcatcctgggagacaccgcatcacctcctctgtgaagacttccttgttctactcagacaaagcttttggtttttggtt

SEQ ID NO: 180942 - DNA, 122 bp, Homo sapiens
ccgggcagtgctgtccacatgcacacagccggggccaccccgctttctgggggcatctgccggcaccaaccaggcctgggcctgtggttagggcctgttccacagactcattccaggcaagg

SEQ ID NO: 180943 - DNA, 122 bp, Homo sapiens
ttccaagctcgctaaagctatttaaagaaactaattcattacccatgatttatgctttagcgccccaaatattccagtgatccagtcagaccaggtataatctaatctacatcctcagatcc

SEQ ID NO: 180944 - DNA, 122 bp, Homo sapiens
tgaggaataataatataagagtatctacctcctagggttgttgggaggattagatgaactcgtgcctgtcaggcactcagacctggcctgtattaagcactcatcaggtgttcacaggtatg

SEQ ID NO: 180945 - DNA, 122 bp, Homo sapiens
acccctcgctggggactaggagacacacggacggggagtgcggggcaggcggacggggagcgcgaggcaggcgcacggcgcggcgcgcggcgttaggcggcaggtgcacgggcgggagacct

SEQ ID NO: 180946 - DNA, 122 bp, Homo sapiens
tgctaggaggggagggccagggccgctgggagatgcgcatataaactgcaggggctaacacgggccagagtcgtccagggccgctcagctgcagaggcctgagaatcctgacagcgggagga

SEQ ID NO: 180947 - DNA, 122 bp, Homo sapiens
ggctgattttttttttttttttttttttgaggctgctagaaaaagtcagcagcagcattgcggtattgagtctacctctggtgctgcttttgcaaaggcagctggcagcgagtctcaccggt

SEQ ID NO: 180948 - DNA, 122 bp, Homo sapiens
atacgatgcccacctcccggaagagcacattttccagtggagtaaaaatttgggaaggaacgacagtgggtgtcacaagacagactcgggtgacctcctgcaacgcggagtcaggaaaagca

SEQ ID NO: 180949 - DNA, 122 bp, Homo sapiens
aaaaaaaagaaaagaaaatacttgatggaaggctgccatcaccatgctgcaaaatctccacgcccctgctgcccgcacctgtccttcctccctccctcctcccctggcctggggaagcccct

SEQ ID NO: 180950 - DNA, 122 bp, Homo sapiens
gagcgcttagtaaaggacggaagttccacgtgtttgtgttgagcaactgcaggtggtgggcggagacaccagcgccccgccttctgcatcctgccttccgtattggctgaagggccggcggc

SEQ ID NO: 180951 - DNA, 122 bp, Homo sapiens
agcaagtgctgggcctcggggcgtgcagcgagccgggctaagggcgaggagggtggagagcgggtgttttacgagcattaatttgtgaagtgtaagcatgtaaaatatagtatagtacaatt

SEQ ID NO: 180952 - DNA, 122 bp, Homo sapiens
catccagcaggtggtcacctcactcctccctggcctgagcactccgtcccgcatccatggcggtggctttagggaaatctctgaagttgagcacggggtggacttgccctcctgagtgaatg

SEQ ID NO: 180953 - DNA, 122 bp, Homo sapiens
taaatagaaagatattgtcaatgtatgtgtcatcattgtaaaaagttaagtggttatggacgggaaaatcacatctgttcttaccagttcattcttggtactatgactcatggctgattata

SEQ ID NO: 180954 - DNA, 122 bp, Homo sapiens
tctctccggtgtccgcccctcggtcccgtgtctgtgtcgccctcgtccgtgtctgcctcccgcttccccgcctcgcgacttgagccccgcccgtacctgcttagggcgctgccctcgcccgc

SEQ ID NO: 180955 - DNA, 122 bp, Homo sapiens
acccaactcccggggagtaaaggtgccaggatttgaacccaggcagctggactccaagcccgtgcttagtgacttgcccatggatatccagccggtaagtgcagaattgggaagagtccagc

SEQ ID NO: 180956 - DNA, 122 bp, Homo sapiens
ctcaagagcggcacttacccgggggtgatggcaggcgggatgaccaggagggccagcagccgggcctggtgcagagcctcggccaagtgggtgagcatgtggatgaggcccctgcaagaacc

SEQ ID NO: 180957 - DNA, 122 bp, Homo sapiens
aatgcaggtgcccctccttcagctcgtgacatgccacatcaccgtgggactcactgcccgcgttcaagaacaaggatggcccagatacatcgcatgcacacgtcaccgtgacgacagccatg

SEQ ID NO: 180958 - DNA, 122 bp, Homo sapiens
gctgcacagagagaggtaccctacttggctgctggggagccggcggtgactcaacctgggcgtggggacacagacttccatgcttgcgggaaggtcccctggcagatcgaccatctgcaagt

SEQ ID NO: 180959 - DNA, 122 bp, Homo sapiens
atgcggctcctccccccgggaaggctgggctggagcccaaaggccgggattgaacaggtccgcatggtccttgcacactcagaccccaagtgttctgcgccctgagttgaggtatccaccca

SEQ ID NO: 180960 - DNA, 122 bp, Homo sapiens
caccactttgtcaccatgtggattcgagaagtcacctctcggagcaggtggttcctcttccgggagaagaggcatctctgtccctacctggcatgcagccaggctcagacccactcgcccag

SEQ ID NO: 180961 - DNA, 122 bp, Homo sapiens
ctcctctcctctcagctgcaaattccgacccacgacggcccaaggcacagaccttcccgccggtactctccccaagaaatgagaaacagaaatatacagaagctccacttcctagtccgcca

SEQ ID NO: 180962 - DNA, 122 bp, Homo sapiens
ctgtcagaatgcctctccgccttccggcaggcgggagccgcatgcgccccctagtggccgcggccagaagctgtcacatcccatgggcgcaggcgcctcagccccgcaaggggcgggctgga

SEQ ID NO: 180963 - DNA, 122 bp, Homo sapiens
acgccgccctatgcccagaaatacatgtgcacgtgcatgctcacaaacacgtccggctcgcgtcccatactgacaggctggacagtctccatgtgagaacgcgcacggacgggcacacacaa

SEQ ID NO: 180964 - DNA, 122 bp, Homo sapiens
acgactgcggggcggggccggagcctgggacaggcgggacctgaggtggtggggcggggccggaacgtggagtgggcggggcctgaggctgtggggcgggaccggagcgcgggatgactggg

SEQ ID NO: 180965 - DNA, 122 bp, Homo sapiens
cggagggggcccggggcctggggggcgtggtgagagctcagaggggtctcgccaagcagccggctggcgctgaggggaccgaggaggggtctggggcgaaaggaccgcgagagggcgcccag

SEQ ID NO: 180966 - DNA, 122 bp, Homo sapiens
ggctccccggcaggtgagagaaggaaaatctcccactgctgtaattgctgcctcgggccgcgtgaccgcccgcctccagtcttttgtggagggaacccaggatcctgaaatcctcgtggctg

SEQ ID NO: 180967 - DNA, 122 bp, Homo sapiens
tacgtgccacagccctggggacaccaggaagtcctatggcttggggttgggctctcgctgcgctggggaatccaatgtgctcctgggtcacggggaaggtactcaggtggagcaatgcactc

SEQ ID NO: 180968 - DNA, 122 bp, Homo sapiens
caaaccattattcattatctctgggttgtgttggctcaccctcagccggctggagcgccgcggcttctcctgcagccagctatattgtaatcagtcacattacagagaaacgttcctggagg

SEQ ID NO: 180969 - DNA, 122 bp, Homo sapiens
caggagccacgactcccgggagagcgcagggaggggcgtgggtgccccttcgcccacctccgcccccgtcacctcgacagctgtcccgctcttggaattcattggcttcctctacccggcct

SEQ ID NO: 180970 - DNA, 122 bp, Homo sapiens
acgtggtgtacagcggcctggagaacgtcaagcgactgacggatggcaagctggaggtgccgcactttgacagcaagggcgaggtggaggagtacttctggtccattggcatccccatgacc

SEQ ID NO: 180971 - DNA, 122 bp, Homo sapiens
cttgtatttttttgttttttgagatttctggtttatgtcctttagagagtggggtaggagcgtaaagactgtataggttgcctatgagcaggtccatacaatagcgttcccaagtctgccta

SEQ ID NO: 180972 - DNA, 122 bp, Homo sapiens
ccctgcacctttaaatccagactgcgtcagggagtcccgccccagagggagtgcggctgtcggctggggggcgggacctgcccttcattggctgaaccgcgcagtattttggcacctgtgcg

SEQ ID NO: 180973 - DNA, 122 bp, Homo sapiens
ccacgctcacgcgcagagggcgggttcagcaaacacgtgctcccccttgcggcgggaccgcgaagctcccactgcgtcgtcgactcagttgtctcgcgaggtttgttgcttggtcttggagc

SEQ ID NO: 180974 - DNA, 122 bp, Homo sapiens
ctattatttaggattctcctaaaggctaaaaatccaaattaccacaccgtttgaaacagtcgttcagtcgcaaaatacctgcactggaagcagaggctgataagcgttgttgtgttataatg

SEQ ID NO: 180975 - DNA, 122 bp, Homo sapiens
tgcacctgggtccatggggtctgcggggtctgcggggtctgcctggcctgtgggttctgccggtggggcttcaggagtaataaagtgtcaccctatccttgtagttctcttgtgccttcagt

SEQ ID NO: 180976 - DNA, 122 bp, Homo sapiens
tgcccgcctggcgctcagctctgcggatctcaggggatggagtggcaatctcattgctcccgcctctcctgacccctctcgccttctcctcgagacccgggttaagtgggcagagggctccg

SEQ ID NO: 180977 - DNA, 122 bp, Homo sapiens
gaccggtttgcacgtgcatttgcacgagtgcatgcaggtgacagggttcgcgggtgcatgcgtgcaggagtgtaagagcaaacggcacaagatacccttgcattaacagctcatgccgcagt

SEQ ID NO: 180978 - DNA, 122 bp, Homo sapiens
ctgcctcaggtaaagacttctagggttcagtaggtctcagtcgatccctctgagaaaggccgcaccctaaatgcacagactctgactctaaggggatggggtcggggaatctgcattttagt

SEQ ID NO: 180979 - DNA, 122 bp, Homo sapiens
ggcctcaagtaatccatatgcctccgccttctaaagcgctggggttacaacatgagccaccgtgcctggcagaggcctttcttttaaataatgagatgttggtggaggctgtccttctcaca

SEQ ID NO: 180980 - DNA, 122 bp, Homo sapiens
cgcccccacccccaccgcccccttttcttcagaagagaccggcacatggcaggaactgtacgttccttttgctgagacttgaggggctgcccagatacatttactttttcctgtggtaataa

SEQ ID NO: 180981 - DNA, 122 bp, Homo sapiens
ctgtgacttacattgttgcaaaagtcacaaaattatgatccaaaatggcaaacatgttttcgtgaagttctgaatgaaacacaggacaatcgtctcttgattatacaataattacattcctg

SEQ ID NO: 180982 - DNA, 122 bp, Homo sapiens
acctccccaggtttcatggatgaggaaactgaaggtcgtcctgactcaggctcatggctccgaccccggcttctgtggttggagggcagcaccttacttagactcccagcgcacgtggagca

SEQ ID NO: 180983 - DNA, 122 bp, Homo sapiens
tgagtgtggaaggggctttagtaatagttcaaacctttgcatgcatcagagagtccacaccggagagaagccctttaaatgtgaagagtgtgggaaggccttcaggcacacctccagcctct

SEQ ID NO: 180984 - DNA, 122 bp, Homo sapiens
cctcaagatttgagccggtttttacagcaccttctctgcagttgatcagcagggctgaatcgcgagtttgggagaggagatttgtggctggaactggcgctcacattggggagggaagacct

SEQ ID NO: 180985 - DNA, 122 bp, Homo sapiens
accattggaacagaacagaaattccaaaagcagaccacaaaatcattgaaatcaataaaccgagtaaagcagattgccctctctaatgtggtgggcttcattcaattagttgaagttctgaa

SEQ ID NO: 180986 - DNA, 122 bp, Homo sapiens
gccggctgacaggagacaggacacagcacagagccccgcgccctctgaggcgggaggcttcgttcctgcaccagcgtggcttgccctttggacgcggcgaggttgtgtgttctctgcttttg

SEQ ID NO: 180987 - DNA, 122 bp, Homo sapiens
cctccctcctgacagcacttctaccctagccgggcccagcccccgagcagtgcagcctcccgagtgcagagtgcagcccctgcccgccctggcccagctgcccatgtctaccctgctggatc

SEQ ID NO: 180988 - DNA, 122 bp, Homo sapiens
ggccagcaccttgatccagatgctcctctctgggcagatggaaggacagggccagtgctccgcagccgccgccagggcctttatacgctcaccggcagcacctccccaccggcttctcatta

SEQ ID NO: 180989 - DNA, 122 bp, Homo sapiens
gagccgctctctcgatcgagccctggaggaggcggcggtcactggggtgctgagcctgagcggccggaaactgagggagtttccccggggagcggccaaccacgacctgacggacaccaccc

SEQ ID NO: 180990 - DNA, 122 bp, Homo sapiens
gtgcccgcccccgagcgaggggccggggtggcagaaaggccggcagttaagcttgctccccgccgcccccctcgggctagcctcccccggccccctgcgctcctcgcgctgccggccggggg

SEQ ID NO: 180991 - DNA, 122 bp, Homo sapiens
gcagcgctgaagggaaagaaaaagttgggattgttcaataaagttggtgactgattcagtcggattaattccgccctggtggtcttgtgggaatgaagataactagcaggatagtctaagaa

SEQ ID NO: 180992 - DNA, 122 bp, Homo sapiens
cctggtcccgcggcagcagccccttcttggggtgcatgtgccgacacaggcaggtgaccccgcacaacgcgaggatgctggtggctgtgcccagcgtggcgcccagcgcgatcacaggcacc

SEQ ID NO: 180993 - DNA, 122 bp, Homo sapiens
ggtggtgaggttggccttgtcttcagaacacccagcccggcccacccaccccttctcccccgtgccagtctgccctgtgcttttcgagtcccggcaagctcacccccaccctgccattgtac

SEQ ID NO: 180994 - DNA, 122 bp, Homo sapiens
cctgggtcatgcaggggacagtgtcttattaggccagcatcaggactggttgaagtctggcgcttctaacacagtgggaaaatgagcatagtaatcacaataaagaaagacatctgaaaggt

SEQ ID NO: 180995 - DNA, 122 bp, Homo sapiens
agagggcagcagcctcggggcctttggctgcatgcccagtgggcacaggatgtgtgtggacgggccacagagtgggccgccctgcagggctggaagccgcagggcagcagggtataaagggg

SEQ ID NO: 180996 - DNA, 122 bp, Homo sapiens
acacacactccctttctccctttctctccataaacacgggcccttggaagctcagacagccgcccacaggcccctaagtagaaaagggttggcccctctgacacaccagactccatccctga

SEQ ID NO: 180997 - DNA, 122 bp, Homo sapiens
gaaccagcctattcttagcttgctgagctgtttctctctctttttttttattccctgagacggagtttcactcgttgcccaggctggagtgcaatggcactatctcagctcactgcaacctc

SEQ ID NO: 180998 - DNA, 122 bp, Homo sapiens
taccccttactcctctgcctcctgcttgctcagctgggattgggagctgttggcgccagccgcgacccccaaggacggccggattcccctcgagagaggaccccgaaggggaagccgcacgc

SEQ ID NO: 180999 - DNA, 122 bp, Homo sapiens
tcggcgcacacaatgggcgtgcggcagcagggaggcaagcccctctcggctctaggtggccgcaggtgggcctctgactggccgtggggtgcaggcggcccgctggggcgggaaggcagaaa

SEQ ID NO: 181000 - DNA, 122 bp, Homo sapiens
acctttctcatttttgttcttacacaagcaagtaactggagaagcaggccagagtgcatacgaggatttaaacatggttgtatctgtggtactttagatgcaactttaccctgttcatttga

SEQ ID NO: 181001 - DNA, 122 bp, Homo sapiens
cacaccattccccgtcagccccttcccgacccttgcacccctggatcttctgctgagtatcggattggtctgcgtccaagagctcctcgcttggccagcaggggctgcctggagaaggggag

SEQ ID NO: 181002 - DNA, 122 bp, Homo sapiens
gccggcctccgcgtaaccttgtttctgtatgtctttctctctttttccttttgcgctaagcgtttcctcacttctcattcgttcgccaaaccctcccgcctttacagttgaaaaaccagaca

SEQ ID NO: 181003 - DNA, 122 bp, Homo sapiens
tacgagtgtcgggttccgagactggcgtgcccgccggcctctccctctgtgggcggcctccgctcacccacgagagcagctccggaggcaccacctcggggaagccgactatgctggggtga

SEQ ID NO: 181004 - DNA, 122 bp, Homo sapiens
gtggcttcccgaaagagctggggccagcccctgggccatagtagcctcatttcgtcggcacgtgtgcctgcacaaaacatcaccatgtggccgaaagaatccatcctccccacttaggaatt

SEQ ID NO: 181005 - DNA, 122 bp, Homo sapiens
atggaggtcggggagaacacgccgctggagggcagctgggccccctggatccctaggtggcggctgccagggagagcccgctgggtactcacactgctgctgacactcaaggagctgaggct

SEQ ID NO: 181006 - DNA, 122 bp, Homo sapiens
cttgtttaatccgtggaggacctaggggatccctgtttagacccctgcaggctgcagtgccgctctgctccggccttagcgcctccccgcagctcagaggatgggactggggtccagctccc

SEQ ID NO: 181007 - DNA, 122 bp, Homo sapiens
cctgccgccgcagccgccgccgccgcctcggttccgcgtcgccctgcccagcggaggccacgcccccgcatcagaccacgcccccgtagcccggaagccttgatagtgcccttctctacctg

SEQ ID NO: 181008 - DNA, 122 bp, Homo sapiens
agcgagactccgtctcaaaaaaaaaaaaaaaaaaaacaatcctgcttgagtagacatcttcgatcattccagatctccaactgaggcagtcccattccccaagaaggaagaggacaaaactt

SEQ ID NO: 181009 - DNA, 122 bp, Homo sapiens
ggggtgtcaggacaacacccaccactgcaggcccccttgggaataagcggcaagaagcttcggggtccagtttgcaccgagcccctccagcggggacgcctctttcatttctgcaccctgcg

SEQ ID NO: 181010 - DNA, 122 bp, Homo sapiens
ccctgggtgctcctgcactctacacacacaagccggctgtggcacctgtcccctgaacgacgctgggcgctcctgcactctacacacacgagcctcaacaggggacagaaacaccatgaatc

SEQ ID NO: 181011 - DNA, 122 bp, Homo sapiens
ccataaactaagtaccagccaatattaccactttgcttgacagagccgtctccaacagcacgcacccacctctcgagcgggcccaccagctcagctttccaagctcgctcacctgcgtctct

SEQ ID NO: 181012 - DNA, 122 bp, Homo sapiens
accccgtcttctcctgcctttggacataagaactccaggttttcaagccttcagactccacgagttatgcctctggctcttctggttctcgggcctttagactcagactgaatcacaccatc

SEQ ID NO: 181013 - DNA, 122 bp, Homo sapiens
gcagtatctaaaactctggtcccatctgcagccactgttcctaatcctaagaacgtctgccgtgcccaggtgttgtcgggggcaggggacagcagcacaaactctgcttcctggcatgatgt

SEQ ID NO: 181014 - DNA, 122 bp, Homo sapiens
cgtgcagcccggcgcgggccgctgtccacagtgggaggtgctgaaagcagggagcgggtgcgggggcggcgaggcggaccgctgctccgagcgcccccctcctcgctccgcggctcctccag

SEQ ID NO: 181015 - DNA, 122 bp, Homo sapiens
gaaatggaatatgccctcataaaaaatggcggcggcgcgggtactcgacctttgcccctacgcagtcgtgcccaagacaacgcccccggtatctccagtccgcgttctctccgtaccctcat

SEQ ID NO: 181016 - DNA, 122 bp, Homo sapiens
accagagagggaaaggggatgggtgagtcacagcaacgataccagtaacaatagtctctccggaacactgggtgagcccttgcaatgcagcaaactgtatcccggtcatctcatgtgagcct

SEQ ID NO: 181017 - DNA, 122 bp, Homo sapiens
aagcctggctcaggggcgatggcgtgggacggcgaccccgccctgcccgtgctcccccagcgcctgaagcaggatggagatgccctggtctgcccccggccaggctccctggaccctttggg

SEQ ID NO: 181018 - DNA, 122 bp, Homo sapiens
aatttcccacgaagcctgtcaggtcctctggtggggtcagagctccagctgcaggggcgccggcccttctgcctgatccctgcaggacgctggatgatccctgacgccttctgacctctttt

SEQ ID NO: 181019 - DNA, 122 bp, Homo sapiens
tcacactcccaacacttgtaaggcttcgctccggcgtgaactgtgcccgggacacacaggcgtgtcttccggaagatcgttttaccacttctgtctctagcgggtttctcctttgtgtgagt

SEQ ID NO: 181020 - DNA, 122 bp, Homo sapiens
gccaggaggggagggaaggggaggcggggagagcgacggcggggggcgggcggtggaccccgcctcccccggcacagcctgctgaggggaagagggggtctccgctcttcctcagtgcactc

SEQ ID NO: 181021 - DNA, 122 bp, Homo sapiens
tgagagtcttataccctgatgttaccttttttgtctgggtgcattttggttaaatgtccacgctgccccacttccttacattacttgaagattctgttttacttcttacattgtgatatcct

SEQ ID NO: 181022 - DNA, 122 bp, Homo sapiens
agcatgcctgggagcgactggccatgaaggatgttcctggaaaggtacagtcttccttcccgagtgtcaccgaggtggggcagagccagtctgtgcctaatactgcaccagaggctcctgac

SEQ ID NO: 181023 - DNA, 122 bp, Homo sapiens
ccatggttccagccggaaaaagaggaagttggcgcatgcgtactgtccacttaaagacttcgcgagagaagccccacgactcataggtgtcttagaataagccggaaaagaatccagaacta

SEQ ID NO: 181024 - DNA, 122 bp, Homo sapiens
catgactagctctggtcagtcccagctccgcactcagccacgagggactcccagggtccccgggccccgacgccctgccctgacgtggggtctccacaaaacactcacccttgctttctgca

SEQ ID NO: 181025 - DNA, 122 bp, Homo sapiens
gccgcgccctctccggggaaagccctgcgcctcccgtgcggcgtctgttatggtggatgccgccggcagagagcgacactgtggactaagccgtgtcctccaaagtcataggtgaggcccca

SEQ ID NO: 181026 - DNA, 122 bp, Homo sapiens
cgccgatcatctcgggagattgaggccctgactgtcaccaatccggcctgggcggcggggcggggagctgggtggctgtgtggctcctaggcaggcaccgcgacccgcgccatcacccggtt

SEQ ID NO: 181027 - DNA, 122 bp, Homo sapiens
gttctcaggaaatgaatggggggcaacccggggaactgttgtacttgcaaatgacttacccggatcacatgatgcgctaaatgtagggtgggccggtgggtggaggctgccgagttgcgagc

SEQ ID NO: 181028 - DNA, 122 bp, Homo sapiens
gggaatcgcagggcctggcacatggagaagctgccagggtgaggctccccatacaccccacgcgccctgcccaccacgaggcctgtaccctctgggcagcaggtgccgcgcgcccccgggta

SEQ ID NO: 181029 - DNA, 122 bp, Homo sapiens
agattgagccacagccatgaagaagaccaggtatctgcagtttggggctgggagactggccgccaatgaaagctgtgatcctagtggcaccatgtctgaatgcctttctcaccatggcttta

SEQ ID NO: 181030 - DNA, 122 bp, Homo sapiens
gctaagtgagagactttcagcagctcacatccccaccatggaattatgcaaatctgaccacgctggatcctcccaacccctgggaataacaaagggagctgctgggagactgtgacacagaa

SEQ ID NO: 181031 - DNA, 122 bp, Homo sapiens
gcgactcccctgtgcatttctcagaagaaaggtcccctaaatgcttacggccagtgagctcgaagagcacgcggtcattgaggcccagccgcagctctggcattcctgacagaaacaccttg

SEQ ID NO: 181032 - DNA, 122 bp, Homo sapiens
agccctgacctcccgacgcgcccatcctgaccactccgggcccagcggtgcaggagggcgcgcgtgaggtcgtcactttttagcactacctcaccggaaaaccagcaaagcaaaatcctgtt

SEQ ID NO: 181033 - DNA, 122 bp, Homo sapiens
ggagagaaaaagaaagaattagtttagtgtagcgaatggtagctatttgcagctcacccacgtgtgctccgaaggtcaaaaccctacatcagcaatttgtagcaagctcttgagctcctcta

SEQ ID NO: 181034 - DNA, 122 bp, Homo sapiens
cttgttgtcctgccttctcttcctcaaaggagatctcttgaatattgccttttccctctgcgccctgcctaaggcctagtctgaaagaagtccgaccaaataacctgaaataatgcggattt

SEQ ID NO: 181035 - DNA, 122 bp, Homo sapiens
tgtgtaggcgggcccaatgggagcacagcagcaggaagtaacttccagacagtgccataccgccaagcgcatgcgccaaacaggctccagtgataaagcgcctgggagatgtagtacccagt

SEQ ID NO: 181036 - DNA, 122 bp, Homo sapiens
aatacgcgcgttcgtgactcagtggttggtctgcgtgttcagagctgcatcttgtggtggcgctgaagcaacgctaggcatttaccaaactcacaaaaacgcacacccaacgctatctacca

SEQ ID NO: 181037 - DNA, 122 bp, Homo sapiens
ggggagggggcggtcagggaaagcaacccccggggctgcccaggggctgggcaggggcctcgggcgagggcaagacgccacccaccctcctcagtgacgctgtccaccacagagcccgagcc

SEQ ID NO: 181038 - DNA, 122 bp, Homo sapiens
gtcttggaatgaagatgacaatgggaatagtaacatgcctcctgcactgtactgctaatacgatgcttcacttaccagtgaactctcttctaatcactcctttgattgggaacctctccaat

SEQ ID NO: 181039 - DNA, 122 bp, Homo sapiens
ggtggtgcagacctcccacaagcaggcgaccgtgtcttggcagccacccgcgagcagggccggcacccacccacgctgcctgctcttccgaggcagggaggcgcctctgcaccggctcagcc

SEQ ID NO: 181040 - DNA, 122 bp, Homo sapiens
cctagatcccttgcatgcggggttcacagcagagttcgtgctcctgtgagaatctaacgccggcactaatctgacctgagtggcgctctggtggtcacgtgagcaacggggaagcggccgta

SEQ ID NO: 181041 - DNA, 122 bp, Homo sapiens
agagatgccaggtcccaggctggacgtggagcccaggtcttgagagttttcagcaggctccggagctggggtcacggtcacgacagctaccggagcctcacaagtcccagaggggcctgtgc

SEQ ID NO: 181042 - DNA, 122 bp, Homo sapiens
gccgcctgcacgtgggctgtcttcacaggtctgatgtgaaaattcaatcacgacgttaaccggctcgagagagcgccggcctagaggctcattatctatttattttaccaaacgcgaattga

SEQ ID NO: 181043 - DNA, 122 bp, Homo sapiens
gctttatccggagtccgcagggggctccccgggcgctatcccaccctctgggctccagctcgtgttgtttcagacgttcccttcaggcacaaatgcactaagaagccctcgccaaggagtgc

SEQ ID NO: 181044 - DNA, 122 bp, Homo sapiens
aagctagcaagggctcatccccacagctatgtgaacaaccaagcactttgcaggagacagcgtgggagaccgcaagctttttggaaagtaatctggcagtagctattaaaattcaaaattaa

SEQ ID NO: 181045 - DNA, 122 bp, Homo sapiens
caaacagcagcatccagaaacctgtgtggatgaaagattctaatcaccaggtacaacctacgcgtctttttggaagtgggtcgggtcttctgcctacaacctgtaggtaaactgtttttaca

SEQ ID NO: 181046 - DNA, 122 bp, Homo sapiens
ctgacccttgttggccaagggcatctttgatggtacaagcagaggctcgggagaggctcccgtcacacactacaggtcccctccccagggcaggggatttgggctccatgagctccttgagg

SEQ ID NO: 181047 - DNA, 122 bp, Homo sapiens
acagcctctcttaccagtccatggagcccagagctggcggcggcagtgagggccaagtggcggtgataaaagagccaggctttataaaggaggtgacaggcagtgccaaagggggaggtgaa

SEQ ID NO: 181048 - DNA, 122 bp, Homo sapiens
cctggtcagtgtgaaagattctcaaagaatctcccagcctagctaatccatgaccctcagcggggaggaagtgttaacaatttagtttaaaactcacactctcagacaaatgcatcaaaaac

SEQ ID NO: 181049 - DNA, 122 bp, Homo sapiens
ttctcctttccaaatttaagatcttgtgatctttattttgacatatgagatttccctagccggtttttagtccatccctgaaagactgaatggttagatctttgatatctttctcaagtacc

SEQ ID NO: 181050 - DNA, 122 bp, Homo sapiens
caccccaaggccccggcggtggccaagtgtccgcccatgcggtgtaaaggggaagtggaacgcgtagagaaggattttggcagctctgcttgcctggaattccagtcctagaattctaaatt

SEQ ID NO: 181051 - DNA, 122 bp, Homo sapiens
ttctatgtcacttccgtaccggcgagaaaggcgggccctccagccaatgaggctgcggggcgggccttcaccttgataggcactcgagttatccaatggtgcctgcgggccggagcgactag

SEQ ID NO: 181052 - DNA, 122 bp, Homo sapiens
ggaagatccgctggtatttctcctgctcagatcctaaagattgatgaagctaggaagagacgcctccttaaagccgaactccacctcatcccggatcacgtgacggcgtcccgcgagtagcg

SEQ ID NO: 181053 - DNA, 122 bp, Homo sapiens
aaatactaaaataagagaagtgccttcagaaagtgacaggcactgagagccagaatgaatcgttcgctactaacaacctgtttgaagcagaaaattttgctgcattacacgaactgaattta

SEQ ID NO: 181054 - DNA, 122 bp, Homo sapiens
tgattaaaataaatcccccaggtatatttcaacactctaggttaaaaagtaattgccagccggttgcggtggctcatgcctgtagtcccagcactttgggaggccgaggtgtgcggatcaca

SEQ ID NO: 181055 - DNA, 122 bp, Homo sapiens
cacaggattgaaccacgttctgcagcaggacttctaggagccttttaaggcgctgagcatcgtctcccaaatttagctgaccatgggacaccttctcatctcccagaggaaccttccaggcc

SEQ ID NO: 181056 - DNA, 122 bp, Homo sapiens
tcggagaatctcggctgcgctatccctcctgggcttttgcgatgccaacgcaggcgtcgacgactgcagtttccctgaaatagtcggagcaaaggagagaaaagcccagttctttcaccttg

SEQ ID NO: 181057 - DNA, 122 bp, Homo sapiens
gcggggggaagaataagggaagtttgctccctccggctttcgccctttgtgctcttttatcgctgctgaaatccacatcaaaggtgggcttgttggatcgtgctttctcaggcaaaatgagg

SEQ ID NO: 181058 - DNA, 122 bp, Homo sapiens
aagttgctttttaggggtctgcgcgctctcgcctggctgctgggaaggagggctgggaggcgctgaagcgagggcagatctgagtgtctgtaggagttgctattccaaaaaaaatcattact

SEQ ID NO: 181059 - DNA, 122 bp, Homo sapiens
ggacctgtttacactgactttatttttactgccagctttcaagttggaagagggaaattacgtttaaaggtcagcaggtgagcagaaggattcctgaccagccattcctgtgggtgtgtgcc

SEQ ID NO: 181060 - DNA, 122 bp, Homo sapiens
tcacagggagaaagactgtgtacatcatacgactagtcacttgtgcttccatgcatactgcggggcgggggttcacaatacttttaacttagggagtttgggggccaatggaaaataagtgg

SEQ ID NO: 181061 - DNA, 122 bp, Homo sapiens
tcccaaagtgctgggattacaggcatgagccaccgtgcccggcctgtgatgccttttattcggtatcttttgaagagttttctggaaatgatttcacacaccatgatggggaacttagatag

SEQ ID NO: 181062 - DNA, 122 bp, Homo sapiens
ccaacatctggctaggccagggcaaagggacctgggccatgacctgtctgttttataaaccgaaatcgctgcagcccttgtcttggcatgagggtttcatggtagagcacgatgcctgctgg

SEQ ID NO: 181063 - DNA, 122 bp, Homo sapiens
tcttcttagggagcccttgtcttgtacacgatccagcatctgaccccaccttgtccccagcgcctgtcaccctgctgggaacccctgtttttccagacctggaacttctgtttctccaatac

SEQ ID NO: 181064 - DNA, 122 bp, Homo sapiens
aaagtggagaggccggggttcaacccagcagactcctgcagaccgggcctcggtcggagacgcgagcccctagcctagctaggttccttcgtcgaccttgagaaaggggcgcggatccgtgt

SEQ ID NO: 181065 - DNA, 122 bp, Homo sapiens
agcactgacttggaagtcagacctcatttccagggtcacatcgccagtcgtggccttgcgcggattacctaacatcaagtctcaatttcttcacctgacaatcacctcctaggattgctgta

SEQ ID NO: 181066 - DNA, 122 bp, Homo sapiens
ggaggtaactgggcgagggccgcgcagggaagggctcagcaggaggtgcaggccacgggccgctgctgagaggtcctcaccccgggcccccttgttcccgcaggacgtgctgtggctgcagg

SEQ ID NO: 181067 - DNA, 122 bp, Homo sapiens
cttgttaacatattttctaccagaaatgtattttcctgggtgactcatggcattaggacacgttggtctaggcacagggggaaaagtgacaggaatccctgaggctccaactgggggcctga

SEQ ID NO: 181068 - DNA, 122 bp, Homo sapiens
ggtctctcatggtctctctctgactggagttggggaaggatatttggacacctggacatgcgtgtctgcatgcccctgggatgtgctctctagaaaagcactaggcacgttcatttatccac

SEQ ID NO: 181069 - DNA, 122 bp, Homo sapiens
ttgaggctggcagtgtggagaggccaggaggccaccttggaaggcccgaggccaggtggccgaggcagagggtatgaggggcacccgctggcctgtctgcatcagctcccctcaggtggagc

SEQ ID NO: 181070 - DNA, 122 bp, Homo sapiens
agaagtgtttcaagtggtgaccagcagagggcagcagtatccaccgcttcccgcagagcacggcgtgcggaggtagactgtcttccggtcccacccggagatggggaattctaggccaggtg

SEQ ID NO: 181071 - DNA, 122 bp, Homo sapiens
tgggggtatgtggccagacacacccctccattaacacatgggttggctgaacagaagtcccgaagctggcactgctcacctgaggcagaggacagagggagccgtttctagcattgtacgaa

SEQ ID NO: 181072 - DNA, 122 bp, Homo sapiens
tgcgaaaaacacacctaaaacaaagtgaccttgagtgaaaggacagaccaaggcggacagcggctctgcagtgacctcgagtgaaaggacagaccaaggcggacagcggctctgcagacgct

SEQ ID NO: 181073 - DNA, 122 bp, Homo sapiens
gcagaaacgcggggcggcctctccccatccccgtgtagttctccgggctgaaccgttgggcgcctatttgcagaaaaggcagctcctgagcctcaagacagactcgggggccaggcgtgcgt

SEQ ID NO: 181074 - DNA, 122 bp, Homo sapiens
atttggccgtcccgcacaacctagctcactgatctgggaactggggccctcccagagaagcgggcccttcccccctccccagtgagaggctggcgccgcacttggggccggaggagtggggg

SEQ ID NO: 181075 - DNA, 122 bp, Homo sapiens
ctgtgctcgggacacggtgacctggatgcaggggggcggggtggctgtgctcaggctgcccggggtcgaccatcagcagaaacaaaataggatggaagaggcagagaggccaggagccacaa

SEQ ID NO: 181076 - DNA, 122 bp, Homo sapiens
tgaccctgggattctactgaagcaactttttcccaaagaagtaagacttcctgggtcaggcgtttcatagctcttatgtcttcaggatcaaccagttgcatttgcaggtcctagaagtcaaa

SEQ ID NO: 181077 - DNA, 122 bp, Homo sapiens
cggcacccctggaagaaggcgaccccacgccccccctgcccggctcgacccaactgacagcgaagcaggatgcagttggtgtcctcctggctggccacccagctcagcgagtcgcccagcgg

SEQ ID NO: 181078 - DNA, 122 bp, Homo sapiens
ggtgacattcccatccttcacaggggagcattattctcaaacagggatgtatgagtctatcgaactcagcacttgtatttcattgtttgtatctggtgcattattttatacaagtaatatgt

SEQ ID NO: 181079 - DNA, 122 bp, Homo sapiens
tgcggggggagacacacaaagacatgcgaagaggggctgaacgaggctcgcgcacaaagacgccggggcgcacggcagctggggctgcacccaccgcccccgcgccgcgccgtgccggggcc

SEQ ID NO: 181080 - DNA, 122 bp, Homo sapiens
cgaagggagcatttaagactagtcgtaatttctcagtacccttttcagtctgggctttttcgctttctcgtactcggaatactgttagtgagcccttcgtcctatgcttttctctgttccct

SEQ ID NO: 181081 - DNA, 122 bp, Homo sapiens
gctcggcgccgcgcgcgctccgccctcggcctcctccgggcttcggctccccctcctggccgtcgaggctactgcgcccagccaggccacagccacgcgcccacccgccccctggccgtggg

SEQ ID NO: 181082 - DNA, 122 bp, Homo sapiens
cccctacctcatgtcctctcatttgggggattgctccgtgctgtccctttctctcaaggccgaagttgggaagtgagaaaccatgtttttaacttgtggctgcttttgctgctgctgctcct

SEQ ID NO: 181083 - DNA, 122 bp, Homo sapiens
tgtcttcccacttccagcaaattcggatcagccaggcgggctttgcatgtgtatcggaatcgttgctcatagtggccgccgttgtcagagatgttgacaggtgtccagggtgtccagggcgt

SEQ ID NO: 181084 - DNA, 122 bp, Homo sapiens
cccagttgagagttctgcgtgttttccgtgttctgatttgactctgaccaacgtgggggtcgagaggctgcatctcacccgcgccgtgggtcttcttggctggacatctaggtggagcgggt

SEQ ID NO: 181085 - DNA, 122 bp, Homo sapiens
aaacaacagccagccatgtggctaaaatgtaaataaatacagccttcccgacttgctgtgcgagggaagcccaggaggagaaacggacatgtcccagttgctctttgaaatggccagatcca

SEQ ID NO: 181086 - DNA, 122 bp, Homo sapiens
tttttttaaacctctgagcattaccatcaacattttaacaatagtaatctcggcagaagacgaattagggttgttttgaactttcttctgcgtgcttacccttttttcttcagtaccctgca

SEQ ID NO: 181087 - DNA, 122 bp, Homo sapiens
tctgaaccacccctcccctatggtatataagccctaaggggctggagtgatggctcatgccggtaatcccaatgcttttggaagttgaagctggaggattccttgaagccaggagttcgaga

SEQ ID NO: 181088 - DNA, 122 bp, Homo sapiens
ccgcggcggtctgggacgcgggtgtcgccttccacgggacttgggtccagggacccaagacggggatctgggaggagggggatgcccttggggcctgagacccgggcggtttccgaagcgaa

SEQ ID NO: 181089 - DNA, 122 bp, Homo sapiens
ctctaaagctgacttaaccacggaaagccttagaacctttgcagagcgatcaaaaggcaccgcagcgtgcagtgctcttcaggactgggcaggaacatgaaaacaggactgagcagggcaat

SEQ ID NO: 181090 - DNA, 122 bp, Homo sapiens
agatggctctgcgcccggtggggacccgagagccgcctgcctgggtgcccaggcggggtccggctgcagtgaagaagccccccagctctgcagtgtccctgaggggaggcgaggcgaggcga

SEQ ID NO: 181091 - DNA, 122 bp, Homo sapiens
gcgcttttccgttgccacggaaaccaaggggctaccgctaagcagcagcctctcagaatacgaaatcaaggtacaatcagaggatgggagggacagaaagagccaagcgtctctcggggctc

SEQ ID NO: 181092 - DNA, 122 bp, Homo sapiens
accttgtgatccgcctgccttggcctcccaaaatgctgggattacagacgtgagccaccgcgcccagctccaaagtgctgggaaaattcaggatattatcttgtcagttaagattgcctgta

SEQ ID NO: 181093 - DNA, 122 bp, Homo sapiens
gcacggcggctggccgtaacgcagggagcactacagctggcggtaatgcagggagcacggcggctggcggtaacgcagggagcactacagctggcggtaatgcagggagcacggcggctggc

SEQ ID NO: 181094 - DNA, 122 bp, Homo sapiens
tgttcttgtgtacatagagccaactgcaaagaactaagacaatcctgtgactgtgagactcgaggaagcttgttactgacagctaaagtgaatgctataattgtgttgctacaaagatgata

SEQ ID NO: 181095 - DNA, 122 bp, Homo sapiens
gcttgtttctcgctcgtctatacgcaagcggtgagtcagcattgcttgggcaccaggctgcggagcccagtccgctagaggagagggaaggcaccgggtggctctctgagcctctgctcaga

SEQ ID NO: 181096 - DNA, 122 bp, Homo sapiens
ggcggcgcgcgccatgtcgttcagtgaaatgaaccgcaggacgctggcgttccgaggaggcgggttggtcaccgctagcggcggcggctccacgaacaataacgctggcggggaggcctcag

SEQ ID NO: 181097 - DNA, 122 bp, Homo sapiens
agacttcacacgtgtccggaggaaaagaacagctcatagccaaacttagccttgggtgggcggaagtggagctgtgagcaagacggcctttgcctcctaaggggtctgtccacaccacagct

SEQ ID NO: 181098 - DNA, 122 bp, Homo sapiens
ccctcagcccctccgggcacacgtgccgcctgaccgggcgacccttttcagttcggcaaacgtcgctcccttcattttgggactgaggctgcagcattggaacaaaagagcattatttcaat

SEQ ID NO: 181099 - DNA, 122 bp, Homo sapiens
agccacctgggttaaggatcacccttcaacatcacttctcagagctccttgctgcagaggcggaagctctcccagatcaaaggtgcctcatgacaaagaccactctgtgggcacatgacggc

SEQ ID NO: 181100 - DNA, 122 bp, Homo sapiens
agtcattttctctatcggcttaatcatttcatttacttctgactccacccaaagtgcttacgtcccttaaacatgaggttccagaactgaaacatagtccttcaaggaaccagagagaagcc

SEQ ID NO: 181101 - DNA, 122 bp, Homo sapiens
gcaagccgggaggagagagcgggagactccgggaggatcccgacgcaggtccggagggtgcgcggcccaagagaaggccagcgggaccacagcgcggctacgcggccggccgcagtcttcac

SEQ ID NO: 181102 - DNA, 122 bp, Homo sapiens
ggctggagtgcaagccgcggccgctgcataagacctgctccctcttcatgcgcaacatcgcgcccaacatctcccgggccgagatcatctccgtgagtggggacccgtggagtcagggcagg

SEQ ID NO: 181103 - DNA, 122 bp, Homo sapiens
ctcccggaatgcagcggggcctatcgggcttgcgattgcccggaggacggcatgctgggacgtgtggtttctaagcgactggtactcattgtctgcattgcatcctgggattggtgcttttt

SEQ ID NO: 181104 - DNA, 122 bp, Homo sapiens
gcaaagtcacagaatgtaatggaagtcctgatggttacagagtaagtgaaagggtgcctgcgctgacgtgagagaaaggaatctgtaaacagtggaaacactgtgggagtttcccatggtga

SEQ ID NO: 181105 - DNA, 122 bp, Homo sapiens
attggcccagaaagaagacggtcgcgccctatgtactccgggattggctagagcgagccgcgtcccccctcacgccaaccactggtaagcgaagtgggcctcgctctcccgggttagcagcc

SEQ ID NO: 181106 - DNA, 122 bp, Homo sapiens
attgggcgccagggtggggaggtccggccatggggcaagagagctgttctcgtgaggccacggagccatccccgggtcgcgcgtggggcggtagggaaagaaggaaggagggggtctcccaa

SEQ ID NO: 181107 - DNA, 122 bp, Homo sapiens
ctcctgttgaattccaggacagactgagcaacccaaaggagcctgctgtcccatcaagcacgtggcagtcggggcatcccatggacaatggaaccgtgcattgtgagtccatgtgatgaacc

SEQ ID NO: 181108 - DNA, 122 bp, Homo sapiens
tgtaaaaatttttgaggtaatgcttgttcaagttcgcttaagtgttcactcagcccaacacgcgggttgggcttgaggttcggcacccgggcagcctcaccccccgcgtcaggcgcgcgcac

SEQ ID NO: 181109 - DNA, 122 bp, Homo sapiens
gcggcggcggaggagggacaggtgatctcgcccacggggagggcgtggccgtgggcggcgcggggtgccaggaagaaggggtgtcggggcggggaggaggaccttggggggagcgccggggg

SEQ ID NO: 181110 - DNA, 122 bp, Homo sapiens
ccccgggccttgccctgctcgtcgctccgccccctgcccggcccctgcccggccccgccccgcgcccgccccctgcccgcgcccgccccgccccctgcccggcccctgcccggcccctgccc

SEQ ID NO: 181111 - DNA, 122 bp, Homo sapiens
cacaaacacatgcctgagaccaaaccagatcagctgagccagctggaatcagctgaaccacgaagacatgtgggaaacaaatgattttttttctaggatatagaggttaaactggtctgtat

SEQ ID NO: 181112 - DNA, 122 bp, Homo sapiens
gctgttggtctgagagctgcagcctccgccattactgtttatcccacacagaaaaggccccggaacttccgggatcacatagttccggtccagctgctgggagaggactgagaggcccggcg

SEQ ID NO: 181113 - DNA, 122 bp, Homo sapiens
ccatgtccttgagcacctccacagaggagcagccaccccaggaagtagctgcagactctacggggtgataccctcaaagggtgaccagggcatgaccgacagctcgaaggaagcaaagaggc

SEQ ID NO: 181114 - DNA, 122 bp, Homo sapiens
tgagacgcacacaagagcaggcatttgaaacacctccaaggttcagatagatatttgtctcgaaggcccacccagcaaaattttagatcctcaaatcaaattctagaagcagtctttttttt

SEQ ID NO: 181115 - DNA, 122 bp, Homo sapiens
gacccatcccggggatccccgtgggcaccatgtggcggttccgagtccaggtacctgcagcgtcccggggctccaggggccacgcgggctcatcctgcttttctgggggcagtttctcctgg

SEQ ID NO: 181116 - DNA, 122 bp, Homo sapiens
gcgccactcctcccgctccgcccccggctcctcccctcctgacggaaggcctgggacctgcgggacactgatctgggacgctgggactcagcatacacacacctggcggtagaggtgatggt

SEQ ID NO: 181117 - DNA, 122 bp, Homo sapiens
tctctgtgcttctgtgaaggaagaaagaaaaattatcagaagatgatttcccacaggcagcgtataaacatttgaacaaagggacccataaacataaacaggcaataattgtagaatttagg

SEQ ID NO: 181118 - DNA, 122 bp, Homo sapiens
acgagcacgtggcacaggctgccccctctgtgttttgtgtggctcgctgtcctggggccccgaggatacagcccaaaagggtctgcctgatctcctgtgccatcttgctttgtacctggcaa

SEQ ID NO: 181119 - DNA, 122 bp, Homo sapiens
gacagtcccactttccaatcattccctataccatcactctattttattctaaatacttatcgttacttcaaattatgcaatttacatgtttaagtatgtactgtcgctctccctcaaccaaa

SEQ ID NO: 181120 - DNA, 122 bp, Homo sapiens
ctactaagtcccctgttcccgcagccggacgatagtgaagacgctgttgccctgggattccgatgaatctcctgaggcctcccctggtcctccaggcccacgccggggggcgggagctgggg

SEQ ID NO: 181121 - DNA, 122 bp, Homo sapiens
aggttccaaagggcccggccacagctcacatcaggtggcatctttcacagccgtttactccgccgactgtgtctagagagctctgtggcccaatttacacaaaaaggtcctaatttacacac

SEQ ID NO: 181122 - DNA, 122 bp, Homo sapiens
atggcaccattgatgctattgtagatggccaagtctagctcctcaaggcgggccaggaggcgatactcatgctcctttaaggagtgatacagctgctcaaactcccaaacaatcttctccct

SEQ ID NO: 181123 - DNA, 122 bp, Homo sapiens
ccaggagcttgcctgacaggccctgccccgctgcagactcccagccctgctgggtaggatcgctgcaggcctcccgcctctgtgctccggtatagtctcggagatgcccgttgacgaagaag

SEQ ID NO: 181124 - DNA, 122 bp, Homo sapiens
gccaagactgacttgggggatagccctctggcatttgagcatgttatgaccagaggggttcgcccacctgcacctagcctcaaggccaaagccatcaaccagactgcagtggaatgtacctg

SEQ ID NO: 181125 - DNA, 122 bp, Homo sapiens
aagtaaaaagctcgatgctaaatcttgtcaaagacattgcaaatctccatagatcgtctgcgaaaccacagctttcatgttttgagcgtaagaccctggggctggtgctgtaacccctgccc

SEQ ID NO: 181126 - DNA, 122 bp, Homo sapiens
cagcgcaccgagcccagtggagagctgagccgcaggcacccgcgtctccaggatgataggcgacattgcaagaaatctctacacctagcagctcagggggctccaagcagagcagcaagttc

SEQ ID NO: 181127 - DNA, 122 bp, Homo sapiens
aaccccgctttgtaggtgcaggaaacaggagacccagaagtgtaattccttctagtgacccgcctaaagagcaggtcaaaggacaggaaggagatttagatggtttaaaatctcacagcgga

SEQ ID NO: 181128 - DNA, 122 bp, Homo sapiens
gcgggagggatgttcactgccggggcccacatctggtgccagggctgggcccaactgggacggccactggggctgctccacgaggcatgaccctcccacagcaactggattcccagtgaagt

SEQ ID NO: 181129 - DNA, 122 bp, Homo sapiens
aagcacgtgaatgtgtaacctaatggttgcttagtagtgccagatattgctgcattgtcgcgtgcagtctctgggagcctttactaaggccaggctctgtgggcttcaaggtcacaaacagg

SEQ ID NO: 181130 - DNA, 122 bp, Homo sapiens
ctgtgatcatgggcgaggggcgggccctgaacgtctccatggtaacctggggacacgactcgacatcgcctgggtaacccggagacgcggcgggcgttgaaaatgcaatggggcatgtggga

SEQ ID NO: 181131 - DNA, 122 bp, Homo sapiens
agggaagcagataaaccctgtccctgccttcacccttctttggggacagttataggctgacggtctgaactttgggagagacaggacttcggttatccctctccactgagggctgccaccgc

SEQ ID NO: 181132 - DNA, 122 bp, Homo sapiens
cgccccgtctgggaggtgaggggcgtctctgcccggcccccccgtctgggaggtgaggggcgcctctgcccggccacccttcatctgggaggtggggagcgcctctgcccagcagcccttcg

SEQ ID NO: 181133 - DNA, 122 bp, Homo sapiens
gccactcacggtggccagggtggggttatgctgatgagcacggggaggccccgcgggcggcggcggtgctcgcagccgaggtgccggcggggagctggccatggggaggcgctgcagggggc

SEQ ID NO: 181134 - DNA, 122 bp, Homo sapiens
catattatccgctccctccctgaatatttagaaaacgtcacagtggggtgtacacccctgcgatattgggagtaatatcatcctctccatccaggaaatgactaacaaggtcacgggggggt

SEQ ID NO: 181135 - DNA, 122 bp, Homo sapiens
ctccgccctggttcccggccgtccctcccgttccccctgcactctgggcccctcgtctcccgaggaaggtcacgagaaccggcccaacgtttgcgcactttgaagtttttttttttcttaaa

SEQ ID NO: 181136 - DNA, 122 bp, Homo sapiens
gagggggagcctgggacagagcaggggttcagagctggagagattcatcccaacttactccgtggccatgatgggctcagccctccatatgctgacatacccaggggtctgtcctgatggtt

SEQ ID NO: 181137 - DNA, 122 bp, Homo sapiens
ctggatacattcctaggctcggatggctgcggtcagaccatttgtttttggaggtttccacgcataagccgtggcactccagccgcacctgcctcccgccggctgccccgtggggaaatgga

SEQ ID NO: 181138 - DNA, 122 bp, Homo sapiens
tccagggggcgctgctttccgcgactgtcttcccatgattctcgttgggcagaaaagccccgcccgcttatctgccatttaagccagcgccccttgagaatggactacaactcccacaatgc

SEQ ID NO: 181139 - DNA, 122 bp, Homo sapiens
tatttcactacctgcctaaaagctgctttattttacgtaattggtgttaagccacagaaacgggccctaatgaacccactttcaatactaatggaaaaatacaaactaacagaatctgtgtc

SEQ ID NO: 181140 - DNA, 122 bp, Homo sapiens
ccagcagggacaggttctggggatgcagcagaagcagtcagtggtggcgggcccagcccccgcccctggctcgaggacttcaggcgacccacccggactccagctcacccggaacacgggca

SEQ ID NO: 181141 - DNA, 122 bp, Homo sapiens
ctcactattggccagggctccaggactgtgcctggcctcagccagtaaacggcctgtgcacgtgcacgccggagcctcccgattggccaacactccctgatcacgcacggccttcctgcgcc

SEQ ID NO: 181142 - DNA, 122 bp, Homo sapiens
gaagcgcacactgggggtcagggccttttgcctggggctcatgggtggggtttagtgatccgtgaagctactaaagttgtataaaaaaattatggataagttcatatatgcatccttcattt

SEQ ID NO: 181143 - DNA, 122 bp, Homo sapiens
aacactcaagtgcccctctctggtgcgagcacaggaattgtgctataaaagttgcaccaacgagcagttcagtttaaagtgttcagaaacagaatgttctagcacatgtaagtggcccattc

SEQ ID NO: 181144 - DNA, 122 bp, Homo sapiens
ttaacgccactccttgacttggtctgtatttttcttctattaccatgggaagcctttttacgattcttgaacaacccacgtttactctaagaatcatctagtaatattttgcatttcttctt

SEQ ID NO: 181145 - DNA, 122 bp, Homo sapiens
aagcctcctcctgctgctctcaggggccctggccctgaccgatacttgggcgggtgagtgcggggtccagagagaaacggcctctgtggggaggagtgaggggcccgcccggtgggggcgca

SEQ ID NO: 181146 - DNA, 122 bp, Homo sapiens
aagatgagggaaactttcccagcagttaaacaggggtagtcatggaaggcacaaacatcacgcctctcaggttattacctctgtcccgctgccaaacatgatgtaagaaagcagaagtgagc

SEQ ID NO: 181147 - DNA, 122 bp, Homo sapiens
aaaaatgtcatcattgtttcagttcttttttttccactttgagacagagtctccctctgtcgcccaggctggattgcagtggagtgatcacagctcactgcagcctcaacctcctgggttca

SEQ ID NO: 181148 - DNA, 122 bp, Homo sapiens
gttccctccaccgaaagtgtgtctcaggaatctcgggtcgggatctgggttgcgggtgctcggcagaagacaaacccagcacttttcttgctaactgaaaaggcaagcagcttttctctcct

SEQ ID NO: 181149 - DNA, 122 bp, Homo sapiens
tctggcgctggagccaggacctggcgttgggcggtacttggacagcggttcttgagctctcgcggttgccggtagattgttgccagttgccagttgccagtcgtttttcggaaagctggcag

SEQ ID NO: 181150 - DNA, 122 bp, Homo sapiens
cccacatctcagacgatgggcggcagggcagagacgctccttacttcctagatgggatggcggccgggaagaggcgctcctcacttcccagactgggcagccgggcagaggggctcctcaca

SEQ ID NO: 181151 - DNA, 122 bp, Homo sapiens
tagagggtaaagtatgggaggctgtccggaaagtggcaacaatttcagagcgccccctgccgaaggttaccgaaaactatatacaaaggttctagtgtcggaaatttcataggtcttcaagt

SEQ ID NO: 181152 - DNA, 122 bp, Homo sapiens
aagtttgtagtttaatgaataattatgcggttctgacatccagcccttctgtgcctcacacgcggggacggcagctcgcagactctccctgaagtcttcggaggaagcaggcgagcgccggc

SEQ ID NO: 181153 - DNA, 122 bp, Homo sapiens
ctctttcttcctctccctcaaggtgcaatatgcttctttgcggacttgcttaatttctgtcgccagaggacgcgagaaggccagcctggtcctcagcacacagcccaccccgcacctgccag

SEQ ID NO: 181154 - DNA, 122 bp, Homo sapiens
ccgcgcttggcaaccatgggttcaaagcaggcgcagggaagcttccggagggtgcctggacggcagctaaatggttggggcctggctcctggctgaccctgtctcatcccgggtggccggct

SEQ ID NO: 181155 - DNA, 122 bp, Homo sapiens
aaaaaaaaagatttagctgcagatttagtctcacagtttgaagcacgcattcaccctctgcgcattactggctacggtggtggctgacactgctcaaataccccaggctcctgcctcccgac

SEQ ID NO: 181156 - DNA, 122 bp, Homo sapiens
gaagaggcatctgagctacttgagtaagaacgccgggaggaacgatgcgaggaatggcgccggccagaccttgagcggctgcgggaatgctcactgcctgaatcttcctcttcttcttcctc

SEQ ID NO: 181157 - DNA, 122 bp, Homo sapiens
ccgcagccgccccggtgccgccgcgcagctgccgcctcggccacccagagccggtccagccgctctccgcctgccgccacggcccagccggcccagcccgatcccagcatgcccggccgcgc

SEQ ID NO: 181158 - DNA, 122 bp, Homo sapiens
ctcactgccctggacacagcagatgtcactcagtcaccctgaactccaccagcttcctggcgaagcctgatatttttgtagggatgaccctgtttcaacaccaggaatgataacagacatta

SEQ ID NO: 181159 - DNA, 122 bp, Homo sapiens
gttctttccccagctgcagtgtgtttagggggggaacgaggccccaccccctatccctatcgcctctgcctttataacggctgctactctctgagcacctgttgagttctttcaccttccag

SEQ ID NO: 181160 - DNA, 122 bp, Homo sapiens
ttcttgccgaatatctcagggactctgtgcggtaagggctgcaggtgtgacctcactctgcgccaggagatccgggtggtaggcagtgttttggagggtgctcgtccagacgagagagaggc

SEQ ID NO: 181161 - DNA, 122 bp, Homo sapiens
ttggggttttggaataaacactggtccaaatcctcgcttcatcatttagcagttaaaacccgttaaataggataataatacctccccctaggagattttgtgctggttaatgagataatgat

SEQ ID NO: 181162 - DNA, 122 bp, Homo sapiens
cagccgcggtggcggtggcggcgcagagctctgtgctccctgcagtcaggactctgggaccgcagggggctcccggaccctgactctgcagccgaaccggcacggtttcgtggggacccagg

SEQ ID NO: 181163 - DNA, 122 bp, Homo sapiens
aagctccctcctcccttccaaagccacagctgtgagacagaaagccagggtgaggggccacgtgcagctttctgcctcccgctgcctttggaacaggagtttcaccacagcccctggtggcc

SEQ ID NO: 181164 - DNA, 122 bp, Homo sapiens
ggtctctatctgtaaaagagatccgcatctctggtatttgatgctggagagaaaaatgtgcggcctccgcccaaccttgagtttcctgctccaccgcgccctctcgtggttaactggactca

SEQ ID NO: 181165 - DNA, 122 bp, Homo sapiens
ttctctggtagcttcgttcctccccgagctgcaggcggttcccacccggggcactcaccacgtgggacctcatgggttctaaaggtaaaatacacgctggatcccaaagaagtaacgggaaa

SEQ ID NO: 181166 - DNA, 122 bp, Homo sapiens
ggagggcggccagagcacggtaaatgccccagaagtttggcagattaggccaaccttgtccgctcgcctgggggccccggacctgcactggcgggagaccgcgaaggcgcggggacgcagag

SEQ ID NO: 181167 - DNA, 122 bp, Homo sapiens
cgcggagcggctcgtcccggagtgctcctgggacttgggatctgtgtgctgagcctgaatcggggctgcccctccttccggcggctcccagagacctgtttcccattggcggaatgggcccg

SEQ ID NO: 181168 - DNA, 122 bp, Homo sapiens
aagcccccactttgaaccaagacctacgcagcttggctttctggacttctccggtgggagcggtcagttgcccccaagctgtgtgaggctgctgtggctcttgtcaccagcgtgccgcaggc

SEQ ID NO: 181169 - DNA, 122 bp, Homo sapiens
atttagaaaagacttcttttatctcttctatagtttctttaaacatgaaaccataattttcgccaatgtcaagattagctctgtcttttgcatgctttcgttgtgcattttgtcaactacgt

SEQ ID NO: 181170 - DNA, 122 bp, Homo sapiens
tgcagtgtttttctaggcctagctccttacatttaacataatgttttccaggttcatctgcgttgctctaaatgggactgtttcattattttgatggctgaagaatatttcctagtgtatgt

SEQ ID NO: 181171 - DNA, 122 bp, Homo sapiens
tcatacaatacttttagttattttgtgcatgaaaaaaagttttgattgcatttttgactgcgacctggcaaataagatcaggtgtggaattttccacttgtggcatcatgtcagtgcgcaaa

SEQ ID NO: 181172 - DNA, 122 bp, Homo sapiens
ccttttctttctaaacacaggtgacgggagaagctggcacctgctgccgtcataaccagccgtgccagtcggctctcggcggcaccatcccagccagggtcccgcagacgcggccactcacc

SEQ ID NO: 181173 - DNA, 122 bp, Homo sapiens
gaaaagtagttgcagaacaattcggtgcccgctgccgctcgttgtgctgaggacgaacggcgctgcgggcctggctccctatggcggctccctgctcgcgcttcactccaaggggaacccac

SEQ ID NO: 181174 - DNA, 122 bp, Homo sapiens
cccccaggaagtgttacagttctctctcattcccgccatttacagccgagcgaacgagggcgtgtcacaactcattcggtcccgctgcctagatgggcgagccaaccagaagcgtgctgctg

SEQ ID NO: 181175 - DNA, 122 bp, Homo sapiens
gccgcagatctgtcctgctttgacaaataacccgctcagccttcgggtttatggtttttccgtgcgccttccttcatgtggttgggaaccaagctctggtctccagagctgtgtggggctgg

SEQ ID NO: 181176 - DNA, 122 bp, Homo sapiens
agaaataacaatactggctttcagaagctgtgtgggacggactgtgagctggcctgtcctcgagatagaacacatttgttcaataaattcttcacctcagggtggaagtccatggaattcaa

SEQ ID NO: 181177 - DNA, 122 bp, Homo sapiens
tagagcctcgcttctacaagatcaaataaatgaccatggaagtgtctccaccttagatagcggtctgaaaaactgctctggtaacaacacaaatataatccaaatataaaggggaagaaaca

SEQ ID NO: 181178 - DNA, 122 bp, Homo sapiens
ctggagggccccggcaccccccacagcaaagggggcagtggccacagccccaggctgggacgccagtgtggcactctatccggggacatggggagtcccttagtttcctcccttatcagtgg

SEQ ID NO: 181179 - DNA, 122 bp, Homo sapiens
cagtctgcaccacccagtccactcccacatccccgactgagccgggtggtctcttccactcgagccagctccacttccctgaccaaggtttgcagaagccccccaccccgtcaccgccgtag

SEQ ID NO: 181180 - DNA, 122 bp, Homo sapiens
acaaaccacactcacttcattttcctgggcaagtcttaaaatttcatcgagtgttacaaacgtatcatttcctctgactgcatctttctccataaatccaagatgaatatctgttgcaacta

SEQ ID NO: 181181 - DNA, 122 bp, Homo sapiens
agaaagttctgcaccccgccccctctgtctgcgctcccgctcctcccagcccctccctcgcggcggggcgggaccaatcgctccccgagccgctcctgacccacctaccccagctctcgcgc

SEQ ID NO: 181182 - DNA, 122 bp, Homo sapiens
ggaccagctctggccgggagcgggagatgaatggtcgtgcggtgtcctgaccagctgggccgttagtactgttaggtctcagtttcttgtaaagcaatgtctaagacgcatcaaaggaaaaa

SEQ ID NO: 181183 - DNA, 122 bp, Homo sapiens
ctcgcgccgggaagggtttcgcctcccctggtccccgctttttttttttttttctgcgtccggttattgcaaatgcattcagtccagtagcactagcccaggaaatataagccaccggctca

SEQ ID NO: 181184 - DNA, 122 bp, Homo sapiens
gatccttttgtcttttgcaaagaaggcagctgggcagctgataggaacaacattcagctccgtgagtacttctgaacttctggtgaatttgagcaggataattgaagggctttggggggttg

SEQ ID NO: 181185 - DNA, 122 bp, Homo sapiens
caaaaaaataaagcttctataccagggaaacggacccagaccgcttaccgctgttgattccggcagcccgcttttattctcttctctggcaccgcccccccccccccaatcctgctgattgg

SEQ ID NO: 181186 - DNA, 122 bp, Homo sapiens
actgtaaactccgtagaaatatttcaaacatttaaaaattcaaagtgacggcaattagcccggcagaaacaaatctgactgtgctttccttgtcccttgaaagtgtcattgaagctcctgtc

SEQ ID NO: 181187 - DNA, 122 bp, Homo sapiens
agatgggcgcaaggctccggactccacggtgcagactgcacctcgcagtctccccaggtccgcgcagcagccacgcttcagccagaatactgggatcttcagtggcaggaggagtaatcaga

SEQ ID NO: 181188 - DNA, 122 bp, Homo sapiens
cgacgggaatggtcctgccgtccagagtggggacgttcactgtgtgccacacagagcctccgggaggctgatcctggaaggataaatgacatcagaaccatctctcttaaaggtattgtgtg

SEQ ID NO: 181189 - DNA, 122 bp, Homo sapiens
tattctggaagaggaacacatagtctcaagactgtagagttaggatgagtttattaggatcgatcgatactgtctgtgacagagatgctcagatacagaagaaaatactgggtgcctaaggg

SEQ ID NO: 181190 - DNA, 122 bp, Homo sapiens
ggaattgggattcgagggagaaagaaggttggtgcagccccttgggatgagattggcagtcggccagaggatgaacatagatatttcaggcagaagggcggcctgtggttttcattatgttg

SEQ ID NO: 181191 - DNA, 122 bp, Homo sapiens
cttcgccccgccccgatgtcgtcataaaagcacgccctcaaccatcctcaacaaaacacccggatggagtcgcacttcccgagtctcgtcagcctctcagagtcaggctgggcgcgtgacag

SEQ ID NO: 181192 - DNA, 122 bp, Homo sapiens
agcattgcttcatccagagcacttaaccaatgctgggatctccaccaagtgtccagtaggcgaaggagccggagggcagtggagcgagcgcactgggggctcagacccaccccggacacgcg

SEQ ID NO: 181193 - DNA, 122 bp, Homo sapiens
ggcagctcccggagttctcaagccctccagtcaagcggggcctcttccctcctggccttacgtaaggcattctctgaatctcggtgcagaacttcctatttcaccgcattttattctcgtgg

SEQ ID NO: 181194 - DNA, 122 bp, Homo sapiens
cgctcttgtcttcctgggggggtcctgaggtttcgggcttacaggacctgccctctgagtcgccaggatatttcgggggcacactctccttgacgtctggcattttgctgatggtatctggg

SEQ ID NO: 181195 - DNA, 122 bp, Homo sapiens
tatgcaagccaccttctccccactgggcttggagcaccttagggcaggcccagggtcaaccgcccttactggcaatctcattactcagattatttctgcttaatgttgacatcaaagagagc

SEQ ID NO: 181196 - DNA, 122 bp, Homo sapiens
tatctaattttcacatagttacaatcttagcatagacaagactttataatcttttttttgcgtctaatgttacataagccttttttttccacacccacttcacatttttaaaccctaatgtg

SEQ ID NO: 181197 - DNA, 122 bp, Homo sapiens
tgaatgagtacagggatgaattagctaccacatctgccttgacaagttcagttggccaggcgctgtgactcacgtctgtaaccccaacactttgggaggctgaggtgagaggattgtttgag

SEQ ID NO: 181198 - DNA, 122 bp, Homo sapiens
cacgcggccccatcagtctccgtgggcggagcgagggctccgggaggcagcgtcagagcgcgcaggcctggagggcgcgaggccgagaccacacagattacccccaaagtcccggaggggca

SEQ ID NO: 181199 - DNA, 122 bp, Homo sapiens
ggagaaagaggaaatccaatggtagcggtggcgggctagctgagccagcactgcccaagccggcccttcctggcgggatatccgcagatcagaggaatgtttatttgttcatatgggagctc

SEQ ID NO: 181200 - DNA, 122 bp, Homo sapiens
cctctttaaaatttgacctctcataacctaacatagttcttccccaatatgggcaattgacgtttcctgtattttacatgaagtgctataaaaatgtgactccaagccaggccttttcagtc

SEQ ID NO: 181201 - DNA, 122 bp, Homo sapiens
gatgacgcgagggttcaggaggtgcccaaacttaaggtgtgtgcgctgcccgtgaccagccggcccacagcggcatcctcagggtgggggccaagatcctgactttcgatcagctggccctg

SEQ ID NO: 181202 - DNA, 122 bp, Homo sapiens
aataaataaacaaacaaacaaacaaactctttcccatggtgattggcaaaaatctagattcgggctgttttgtcagcctggggcctaaagtgacaacggtccagaatagagctcccagcaac

SEQ ID NO: 181203 - DNA, 122 bp, Homo sapiens
catcctcattcagtcgtaggtggtactccttcattgtgaactcaggccgattgtcattaacgtccagcacagtcacggtgacactggctgaggcagagagtgggggtgagccatggtctcga

SEQ ID NO: 181204 - DNA, 122 bp, Homo sapiens
aggggtgcgtcctctaggcacctttctgaattccgttttccttgtacaaaattgagataacgggtattccaccggtgggtatccctgctctttttcttttctttttgagacggagtctagct

SEQ ID NO: 181205 - DNA, 122 bp, Homo sapiens
atgcgagttctagttcttcaaacaagaggccacgggaggagcaacggccacccaccatcccggggatcctcattcatgatttgaaaccactctaagcaggttctggggtgttcggcagaagc

SEQ ID NO: 181206 - DNA, 122 bp, Homo sapiens
gaacttgtccctgtaactctcacagcgacagggcctctctgcggtggcagtgttgggagacgcgatgagagtgtcatccgctgtgagttctgcggtgctctggtcccccgtgaagacatcgt

SEQ ID NO: 181207 - DNA, 122 bp, Homo sapiens
cggagccagcagtggcagcccccgtgggtccccttccacactgtgggagctttgttctttcgctctttgcaataagtcttgctgctgctcattcttggggtccacactgcctttacaagctg

SEQ ID NO: 181208 - DNA, 122 bp, Homo sapiens
tcaattgctaagaaatacctgtggctggtctgtaaggccactccagggtctgcccacccccggcggtggctggcaaagggaggcctaaaccttcctccatctacgcgggtgggtccctcagg

SEQ ID NO: 181209 - DNA, 122 bp, Homo sapiens
tgtgcggggcctggcttgtcctggctcagtggggtttggggcaggggttgtgcggggccccggcttgtcccggctcagtggggtgtgggacaggggctgtacagggccccagccgcaccagt

SEQ ID NO: 181210 - DNA, 122 bp, Homo sapiens
ggggagcttccggatagcgaagcacgtggaggttcctggagggtgtcctcccagagaggacgtggaaccttcccgctcccaccgcgcacttgccctgtgtatctcttccctttggctgttca

SEQ ID NO: 181211 - DNA, 122 bp, Homo sapiens
ggatgtggttccccgctgcggcgtggccctgctcggggactccggtcttgccctgtgctacggaactgcactgtgcctggcctgacatcctacccagcacactcacccaccgcgggtgcctg

SEQ ID NO: 181212 - DNA, 122 bp, Homo sapiens
tagagaaaaacaaagctgtgggtgaaagattcctcagacatggttaccccccactccctgcgttctccagtttctcaggtgttcatgtattttcactgtcggtcatagtgagctagtttgat

SEQ ID NO: 181213 - DNA, 122 bp, Homo sapiens
gccctgctcaacaactgggtggagatccgcttggacgcgcgcaagttcgtctgcgagtaccggcgcccggtggccgagcgcgcccaggacatcggcatctggttccacatcctggcgggcct

SEQ ID NO: 181214 - DNA, 122 bp, Homo sapiens
gcccggcccctcggtgctagagcagctgggacccggggagaggtggcgggtgtctgggcacggtgcacttccgagcatagctgggcatgccagacccagcgtgctggtgacaaagcccaccc

SEQ ID NO: 181215 - DNA, 122 bp, Homo sapiens
cgagacgctgcagaaaacatttacagtcactagagggctctctctcccttaagcaaaaagcgcagcaccgcccgcgcgcggtagtctcggaaccccgccgccgggaggccgctggcagctcc

SEQ ID NO: 181216 - DNA, 122 bp, Homo sapiens
ggctttttagtcacatgtccatccactgtttcaatgtaacatgcatctaggcaaggttaacgattaaatggttgggatgaaaggtcatcctttacggagaacatcagaatggtagataattc

SEQ ID NO: 181217 - DNA, 122 bp, Homo sapiens
gcctccttgtgagcggctcgcggtacggtctcccctgcagcttgctttagaaagcggggtcgccacaccaacaggtgctttaaagagtgccaaggcggtggcaggctccccgctgttatcaa

SEQ ID NO: 181218 - DNA, 122 bp, Homo sapiens
ggtttttgctgaggactccatggatattcactaagtagtctcacaatgacctatgagacccgcacttatcatcagaacactgggcctcagagagtttgagtcacttgtcctaagtttcccag

SEQ ID NO: 181219 - DNA, 122 bp, Homo sapiens
ttcgaaatcacacggttttactcaacagggctcctagcccttctgtctctgctcctggtgcgtaagggcggtgtgtggggctctgcgcctgaaaccgctctctcggaaggtgggaagatgcc

SEQ ID NO: 181220 - DNA, 122 bp, Homo sapiens
aaccggacggcttaaaagcggggcgggggaacgcttagagcccgtagagggacacggaggcgctgggtgaagagtcagggatacgcaggcttcgaaaccccctcggccgctccacccagggg

SEQ ID NO: 181221 - DNA, 122 bp, Homo sapiens
tcgggtggagtgaaggtcacgtcgccatggtgagttttgctctgtgttgcattaagtctccgcttcccaggtccccgccgcttctgtccctgggacgtggggtccccacagacctggaaatt

SEQ ID NO: 181222 - DNA, 122 bp, Homo sapiens
ggcttagataagaccttttgctttattaaatgcaagcagtctttgcttttccaggcaccacgataactgaaatttgtgcatattagaacaatgtcttcactttacacagttctaataagcac

SEQ ID NO: 181223 - DNA, 122 bp, Homo sapiens
ctgtcacactcgcagccagaatcccctcggatggactcttgcaaacctccagccccatcccgggatccgtgcgtcttctacagccaccacttgggccagcgtccaggacgcccaagcgtaac

SEQ ID NO: 181224 - DNA, 122 bp, Homo sapiens
gaatggggctcggggagggtcagacggtctattgggctcccagcctgaggcctccctccccggcccgtaacccctcctgccgctggggccctcctgcctttccctgcacgccactccctggg

SEQ ID NO: 181225 - DNA, 122 bp, Homo sapiens
gggcaaaggccctaaggtgaaaaatttgttgtgtttagggaatagcaaggtcagtgtatccgaaatctagtgaccaaaagaaggaatgataggaggtgaagtcttcagcctcaataagaagg

SEQ ID NO: 181226 - DNA, 122 bp, Homo sapiens
gtaggtgattgggagtcatggctgggaagagctgaactcctcatgttctcatggctgatccgagagccctgggtttggaagcagaacacccacctgtttagagctgtgattctgtcacttcc

SEQ ID NO: 181227 - DNA, 122 bp, Homo sapiens
gagtcagcatcctgacgcagcctaaactttacactcactccctgctctccagaatgcacacgtctgcctgtgcaaaaacgacaagcagagtcaggtgacctcagctaacaggaatgtgggca

SEQ ID NO: 181228 - DNA, 122 bp, Homo sapiens
gaatgccagggttgccagggttgactgagcttgcccaggttttattctgattgtctctagcgtgccttggtgacctaatagcaatgtggcatgtctatagctgagatgataagccactttca

SEQ ID NO: 181229 - DNA, 122 bp, Homo sapiens
tagagatggggtttctccatgttgcccagtctggtcgcgaccttctgggctcaagtgattcgcttgcctctgcctcccaaagtgtagggattacagatgtaagccaccatgcccagtttctg

SEQ ID NO: 181230 - DNA, 122 bp, Homo sapiens
tcatgtgacatgaccaaagatgatactctgtaaacaaggcccttctgaccggactcagtgcgtgtgatggtgagtgcaatgaggaagggtggatattgactaaagactggttgttgttgttg

SEQ ID NO: 181231 - DNA, 122 bp, Homo sapiens
aaacaatccgaattcacttccgatttgggatcccgcagcaggttgtccattttttcaaatcgagtctcaaaactgtccccagtcgacatgttgctgctgctgtgacaatgccctcttaccag

SEQ ID NO: 181232 - DNA, 122 bp, Homo sapiens
tgatgctggagctgtgatctggatcttaaatctctcagtttagccttttctgttttctaccgtattagtcctacaatgaaaatgcacttctctgtctttaaatttcagacgttgtctccatg

SEQ ID NO: 181233 - DNA, 122 bp, Homo sapiens
cgtgatccacccgcctcagcctcccaaagtgctgggattacaggcatgagccaccgcgcccggccgccaggagttcattttttacaaagtgcatatccagcaagtgccccagaaagcagtgc

SEQ ID NO: 181234 - DNA, 122 bp, Homo sapiens
ataaccaaggagcactttgccgttcccggcgccttcagatacagaatctcacctcacccccgtgctcactcccttcagccgggccaccctaagagcagcacagagcctgcagaggcccctgg

SEQ ID NO: 181235 - DNA, 122 bp, Homo sapiens
agacctgaggaatgacgggggaagaagttggcaaactagaaggagaaatcattttgtatgcgatccataaatgtctcagccaaggaatgagaatagtcactttgctaaaaacctaagataaa

SEQ ID NO: 181236 - DNA, 122 bp, Homo sapiens
ctccgaccctcaaatctccactagtctctacccagaaacacctgtgcccttcaaggatgacgccactgctctaaatgagctgtccctgaatcccaaaccaggaacacctgcagccatccagc

SEQ ID NO: 181237 - DNA, 122 bp, Homo sapiens
attcagatttgccaagatttataaaatgattgcaatgtcatgctacaaagaaaagaatatcggcctcacagaactcagtaaaaataatatcagccaggcgcggtggctcacgcctgtaatcc

SEQ ID NO: 181238 - DNA, 122 bp, Homo sapiens
tttgtgcccctttctgtcaccaccgctacacccacccagagttaactactacagtcacatcgaattccccttgctagttttgcctggttttgatatttatttaaactggaattgtataatag

SEQ ID NO: 181239 - DNA, 122 bp, Homo sapiens
tgaaatgctgcagtgaatctcaaagataacaggcacccggctaattctattgggttaacacgtccatgctggctgtgcaggcttatttaagtaattgcctgactgtgaatgaacagaggtat

SEQ ID NO: 181240 - DNA, 122 bp, Homo sapiens
aggagcgcgaaagaaggtagcggcggcggagttgagggtcaagatgcagtctgcgccacgcgctgcatccatcctccccgattctgcgccctcaccgggcgtccgccctgagctgcggggtc

SEQ ID NO: 181241 - DNA, 122 bp, Homo sapiens
ctcccaagcctaagtttcttagaaagtttaatgtctaggattgaccataataaacacttacgtatagttcatctctgcctaacagagctccactatcaacttcctcattacacaaagtatat

SEQ ID NO: 181242 - DNA, 122 bp, Homo sapiens
ggtagacgccgaaggcgcccaggccggcggggtaggcgggcgccaggcggccccgcaccacggccatatcctccagcagccgcgcccgcagcgcctccagctgcccggccaggcccccgggc

SEQ ID NO: 181243 - DNA, 122 bp, Homo sapiens
cggcaggcgcgggacgatctccacggagcagcagtggcagaagtaccgtccgggatgcggcgacgcctcggccatggccgccgccacctactccgcgccgcccgccccccgcgcggcacccg

SEQ ID NO: 181244 - DNA, 122 bp, Homo sapiens
ccaggtggccgccctgcaaggggacctggccagcctccgggcagagctgcagggccaccacgcggagaagctgccagcaggagcaggagcccccaaggccggcctggaggaagctccagctg

SEQ ID NO: 181245 - DNA, 122 bp, Homo sapiens
catagaaagcttttagggttctggatgatacagagcacagaaacattttgacatttatttcggagatagtaggaactagtgatgctttcccagtgattggttatatgcataggcaaaacttg

SEQ ID NO: 181246 - DNA, 122 bp, Homo sapiens
aaacagcctaacacctcgcgttattatgaaatgagaggctggtaattggaggctaggctccggacttgctctgagaaaggccagctgtgctgccgcaccaggatccggcttctttggtttgt

SEQ ID NO: 181247 - DNA, 122 bp, Homo sapiens
ctggcgccccagatcctaggtgagttgtagccttgacttcagcagcactctgcgggtccccggcgctcctctgggccagggctgacccaggaacacagttctccgaggagctgctggcaggc

SEQ ID NO: 181248 - DNA, 122 bp, Homo sapiens
gcaaggagaccatcacagtaatccggcgtgagagtgccgaggcgtagctgctggaatcatcgcccatttttctaatttgcagcctaggagctgatcgtgcaaccctgttagggagctaatat

SEQ ID NO: 181249 - DNA, 122 bp, Homo sapiens
gtaacagatccgaacacacttgtcatcagtctgacaagtgactgacaccacgcgacgactcgggccgcagtggagcttcctggtgttggcactcgctgcgcagcacactcaagtatttattg

SEQ ID NO: 181250 - DNA, 122 bp, Homo sapiens
aaggccacgtggaagcctctgttcgcttcgtgcacacgattctgcacccacaaacagccacggtgctaggggtttccacatggtgtccccttgacgctcacagaactccggggaggctgtga

SEQ ID NO: 181251 - DNA, 122 bp, Homo sapiens
gctaaatgaataccacaacatatgccaccagaaaagtgcgtgtgtgccatttcaaacacccgccgtcctgctgctccgcgctgccgaatctgctcctctctcctctggccccgcgtccctca

SEQ ID NO: 181252 - DNA, 122 bp, Homo sapiens
caggcgattttcagaggttggaaaatgcgtccttccctttccctcagtttgtggcttagacggccacgtccaagttactttatcaggagaaatccttaagaaacagtttcactgtgaagtgc

SEQ ID NO: 181253 - DNA, 122 bp, Homo sapiens
cacttctgaccacaaggctgttctcagaaggaaggcagtagagaatggttctacactgtccgattcgggcgctgtacccagcgctcactctgagcctcatcaacgaacagctgggcctgaaa

SEQ ID NO: 181254 - DNA, 122 bp, Homo sapiens
gctctgttgcccaggctggagggcgtagggctgcctctgctcactgcaatctccgcttcccgggttggagcaattctcctgcctcagcctcctgagtatctggcattacaggcacctgccac

SEQ ID NO: 181255 - DNA, 122 bp, Homo sapiens
cactttgcggcccagccccgcagaggacaccagcccggctttgctaagtggcctgcgaggcgggcctgcggctgaaatggccttttgcgctggctctcagctttgttcatctttatttggcc

SEQ ID NO: 181256 - DNA, 122 bp, Homo sapiens
gttttagaaagcaggcagaagccaagacgtcaggaagggttgcgagggcccgggatccggcggccacagggatgggaggggcgaggagcgaggggcggagtggcacctcccacaacgcgctc

SEQ ID NO: 181257 - DNA, 122 bp, Homo sapiens
ctcccgccgcccggaggtcatgtgagcgcagtgccggagcggggcggggcgaggcggcggcgcgcagtgcctactagcaattgtagtccttgccccaccttggcctggcgaagatcccgccc

SEQ ID NO: 181258 - DNA, 122 bp, Homo sapiens
tcacgttctcccttggtgcacgcttatccggaaaccaggcagccaggtgtcttagcgtcccgctccccgtcattcagagccggagccgggtgggagaggagatgaggtgcgcccggagtccc

SEQ ID NO: 181259 - DNA, 122 bp, Homo sapiens
cgagacgccgcttttgatgtcgtcaggctctctggtccccgggagtggactcgggggctccgagtgcagggctcacactgtgtctttgagggctggtcacccacccaggcacacctgtggcc

SEQ ID NO: 181260 - DNA, 122 bp, Homo sapiens
tcccttaaacctgttgggcggttcattcctttgagctactgtacatgctcttccttctgccggtaatgccgttccctcccctattgtcttgtccgcctgaagggtttatcagagtctctgga

SEQ ID NO: 181261 - DNA, 122 bp, Homo sapiens
acttcaccgggaaggtgaagacccctttccattaagataacaaacagaacctagaaggcccgtagcatggtggcttagaacatgtgggccttggatgggatcctgccaaggggtgtgtgacc

SEQ ID NO: 181262 - DNA, 122 bp, Homo sapiens
tgagtgagcctccgccatccagcatgacaaactgtggccgaccgcagctgtgccgtggcacgatggcgaggaagccagccccaaggaaacactgaaaacacatatcacgccaatgccgtgtg

SEQ ID NO: 181263 - DNA, 122 bp, Homo sapiens
cgggcacattagatgacttacccacagtcaccttgctagttagtggcaaaacaggtaccacgacccattatctggcctcctcaccagtgctttttttttttttttttttttttgagacggag

SEQ ID NO: 181264 - DNA, 122 bp, Homo sapiens
tcaatagtgtctgggcagcatctcggggaaggaattacaactttgcagaaattccagtgtcgggcagtggctgtagatcacttctgatttgacagtcctcttacagccatgttctctaagcc

SEQ ID NO: 181265 - DNA, 122 bp, Homo sapiens
caatgatcttgttacaaaggtgatcaaaggcttcctggaaatcgccatagacgctctccccgattattgtggggtgaaatgtctcagtcattgggttctctgaacattcataaaagagcaga

SEQ ID NO: 181266 - DNA, 122 bp, Homo sapiens
ttccccgctctgcggcccggccggtcggggtggttgagtggggtctgtggagggaccaagcgccaggcctgagacagccccgagcgaggcgacgaggagcgcgcgcgccctctgcaggcgct

SEQ ID NO: 181267 - DNA, 122 bp, Homo sapiens
ttggcttcaccctcgatgttctagtttcctcatctataaaaaggataatcgtttccgcttcgtggggttaccatgacgattaaaggagctaacacgtgacaaaagctttaaaaaatgggtgg

SEQ ID NO: 181268 - DNA, 122 bp, Homo sapiens
acgctggagcgtttaattggcgttgaggaaatcagctgcggagaatcagcagtcgtttcccgagcgtcggtcgtgctgggagctgtggcgaaggccccggcggtaagcgattcccgctggac

SEQ ID NO: 181269 - DNA, 122 bp, Homo sapiens
cttgagagaggggggcggggcacgagaagttctggtcctttaagtgggcctgtctcgggccgtctgttatggcgcctggctctttctatttcggtaggttttgcgctgtctgtcgcttgtgc

SEQ ID NO: 181270 - DNA, 122 bp, Homo sapiens
ttctgagcaggtgagggagtctgcggtggggcctggggagaggcgcccagggttagggtgcgggcgcgggacagggagtgttgtccacctggcagaccttcactaaatgcagcagtggaggg

SEQ ID NO: 181271 - DNA, 122 bp, Homo sapiens
tgtggaacacccctgttggagccgatgtcttttctggcgtagccagatcccagaaagcaacggcttcctctgcgaacaaatatggtctcttctcagaaaacgactcagctagtttcctttac

SEQ ID NO: 181272 - DNA, 122 bp, Homo sapiens
cctgactcagagccttcccttcccatcggcaggcctcccctccctgcccacagtcacatccgcaagacgcccgccgacgtcacaccccaccgcaccagccacactggccgatgtcacgggtg

SEQ ID NO: 181273 - DNA, 122 bp, Homo sapiens
ctgaaggttatataaagagaagttccctacaccacttctgtctttgcctgctgccatccacgtgatatgtgacttgctgctccttgccttctgccataattgtgaggcctcctcagccacac

SEQ ID NO: 181274 - DNA, 122 bp, Homo sapiens
ccagttgggtttacacctctcggtggtacaatagcccggagcccatgggtatccgctagtcgctgactctgaaatgcgccggtctgcgaggtaataatgaccgttgcttgcggctgtcaggg

SEQ ID NO: 181275 - DNA, 122 bp, Homo sapiens
acgtcctataaaggctctccccgaagcacgtgactcctctccgccagaccgccgccgcgccgccatcatggacaccagccgtgtgcagcctatcaagctggccagggtgaggtgggggcccg

SEQ ID NO: 181276 - DNA, 122 bp, Homo sapiens
gtcggccagcttctcccggagccggcccttcagcgtctgctccgtcagcgtcagcggcggcgggtaggtgactttatttttcaagatgcctgggaggaggagacacggcaaggtcaagtccg

SEQ ID NO: 181277 - DNA, 122 bp, Homo sapiens
aaatgagacagaggccatcttcctgccgtcttttctacttggcacgctcacttcgtgttccggagtcatggatagcctcatgggtattgagaggaaattagaggcaggagctagcagaggcg

SEQ ID NO: 181278 - DNA, 122 bp, Homo sapiens
gggatgacctttggtctgcttcccagcattcacctgcagtcaagctgctcccaaggagctcgttcaaagagggggcgacttaggcagacactctggtcatgatctaaccatgttaattaagc

SEQ ID NO: 181279 - DNA, 122 bp, Homo sapiens
ccgaagcacagaagcgtctgtttgctctgcctcctcggcctcccaatcaccccatcttcacgtggaaatgcacttcccaggagcgtgttcgctgtgactgctgccttcccatggctatgcgt

SEQ ID NO: 181280 - DNA, 122 bp, Homo sapiens
ggcctcccaaaatgctgggattaaaggcatcctgttactaatttcacaggattttagaaacgcaagcagcgttgtggagtcaatgggggagggcaaagaacaggaggagagatctgtgagaa

SEQ ID NO: 181281 - DNA, 122 bp, Homo sapiens
tttctctcttcacttcataccaccctaaatgcacaggagagaagacccacaagagagaaacgcacaggagagagtcacatacagcagataactagaacaataggtttcattctctcccagac

SEQ ID NO: 181282 - DNA, 122 bp, Homo sapiens
ggcgttctccccaaggctgcccgcttggctgcgcggctgaggcgagttgaggacccagcccgtccccaactctcctcacccctccgccccccgctcgcctcacccctccggcccccgccccc

SEQ ID NO: 181283 - DNA, 122 bp, Homo sapiens
ttaccatgaagataactcaggccgtcggagaaagtggcctgcccaacgcaggtgctagagcgcgaaccaagagaagtcgatcctcctggtctccccggctgcctggtgagtggcagaccaca

SEQ ID NO: 181284 - DNA, 122 bp, Homo sapiens
gctgactcttggagttgtaaatcttatcgtccttctgataacacacttgtaataagttagcgtcctattcaaagtgaattgtaaaactgcctcatttaatatggcatctgtgtcattaaaac

SEQ ID NO: 181285 - DNA, 122 bp, Homo sapiens
tggttttcagcctgggtggtattgctccattagggatggtttcaggtgtcccatgacaggcgggttactactgatgttactgatgtagtaactagcagggatcagggatgcaacatgccaga

SEQ ID NO: 181286 - DNA, 122 bp, Homo sapiens
aaggatggtgactgtgagccgcctgggacctgagctgcctgggactgtgactgaggcacccggggtgcctcttagggccttgggtttgggcccatggctagatgagccttggtgattctgtg

SEQ ID NO: 181287 - DNA, 122 bp, Homo sapiens
aatttgctagttttagtctatgctggttataggtcaaaaggcctatcaactaaataaactcgatctggactatcattgaaatgctttccatctggaatgccttcctttcctttcacattacc

SEQ ID NO: 181288 - DNA, 122 bp, Homo sapiens
ttgacgcagacggtcagtaaagctcccaacttctgtgcccattggcacccaggggacctgcggtgaagggggcagggggcggcgctgaatgcgggcaggtgtacgtttgccctcaggaggtg

SEQ ID NO: 181289 - DNA, 122 bp, Homo sapiens
aaaagtccttccttctcttcccttctggaaccttccaaagaggctagcctcctgagagggcgtctcctgggaatgcctgtgatccaggcaaggcacctaaatcagccaataaataattagtt

SEQ ID NO: 181290 - DNA, 122 bp, Homo sapiens
aaccaatgcggtgcctggcctgttgacccgggatgtttctgcaggcaaaccacaggtagccgggctcgggctatgacgcctgagcctgccctgctaccacgtggccacctgtgtttccatac

SEQ ID NO: 181291 - DNA, 122 bp, Homo sapiens
gagggaaaggtggcatctcctgaactgagcaacacacaacttgccctttgttgattcaaacgagcacccggcacaggtagggacccagctgtcccgagccttgagcctgaaccactgcgtct

SEQ ID NO: 181292 - DNA, 122 bp, Homo sapiens
tatgccctgtaccacttcaggaatctgcagagagtccccagtagcaagaaggctctcttgcgccacatgcgccccctcagccttggactttccatcctccataactgtaagaaataataata

SEQ ID NO: 181293 - DNA, 122 bp, Homo sapiens
ctctcagaaatcacagccgggatcagcgtggatttaaccatttcctcattacgggagacccggcagcattctctttcacaacttcttctctcacaatattgccatctccagatgccatgtca

SEQ ID NO: 181294 - DNA, 122 bp, Homo sapiens
gcagaagcagggggcactggcgcaacaggctcgcttccgtcaccgccatggctcgaagtccggagaaacacagaaaagctctagacctgctgggtcctgcacatgcgcagtccgctggcgct

SEQ ID NO: 181295 - DNA, 122 bp, Homo sapiens
ggcgtcctagagctagaggctaagaagtctcatgcctgaagcagatctaggcatttaacacgcagaataagctaggtgggttttcaaggagctgctgaatatgcatgagaggcagcaagaga

SEQ ID NO: 181296 - DNA, 122 bp, Homo sapiens
ggccctgtgacagcgactgtggcggtctggaaagcgtgggcctcggtcattgggcacgagcggtcacgtgacagcgggttcctccaggccagcgctggtggttgagtgatgtaatcacgtgg

SEQ ID NO: 181297 - DNA, 122 bp, Homo sapiens
ggggacgagctccctctgaggtgccggagtgccagggctaggtgccacaaagtccctaagcgagtgccattgagaactgaagccggctgggcttctgggtcgggcggggacttggagaactt

SEQ ID NO: 181298 - DNA, 122 bp, Homo sapiens
aacaaaacataaacaaaatatgtaagctaagttcagtaatataacccatatattttttctcgagtaagatgaaaggcacatcagtggctcttaagcactggagtccctactcacattccaac

SEQ ID NO: 181299 - DNA, 122 bp, Homo sapiens
ctttgcctacaactttggaaatgctggggtccctggtgtggtaagaaactcaacatcagacgggtatgcagaaggatgttcttctgggatttgcaggtacataaaaaatgtatggcatcttt

SEQ ID NO: 181300 - DNA, 122 bp, Homo sapiens
ataaacacttggctcagtgaggatagttattgtttagaatcacattaagtctagctttttcgtcatgtctaccacatgaaacaatgaagagagaaaaagactcaaggtgacagaggacagtg

SEQ ID NO: 181301 - DNA, 122 bp, Homo sapiens
gtgagctgccagcctgcgctctggatccagccgggcgcgtcccctcccaccctcgcgccgcggctgtcgccggccccggcccccagtgacgcccaggctcgcctcctgcctgggttccaggg

SEQ ID NO: 181302 - DNA, 122 bp, Homo sapiens
ggccccatcgtgaatgaaaggggtccagcgtcttgttgccgggccgtccagccagctgttcgtacctaacactgctgcagggaggggtccgggggacttggcatctgcctctacgtgtgttc

SEQ ID NO: 181303 - DNA, 122 bp, Homo sapiens
gcctgcgactgagaacagggaggcggcacgccttggggaacgagggcccgaggccatacgcgctaatacaggccagtgtcggcgtaaactttctccgttaccggcccggccgcgaccgccat

SEQ ID NO: 181304 - DNA, 122 bp, Homo sapiens
ccagcccagcactgtcctttaaaaccagaggctgtggattcacctcatgtgtagacagtgcgacggaatcaccggggtgatgcggataatttcagaacaaagctggtgctgggggctggggg

SEQ ID NO: 181305 - DNA, 122 bp, Homo sapiens
tcgaactttaaagtccgcttctttgtgttaaccaaagccagcctggcatactttgaagatcgtcatggggtatgtgagcagtttcatttgtcttttttcgcatagcattttatgtttggact

SEQ ID NO: 181306 - DNA, 122 bp, Homo sapiens
agttgcccatactcctttcctggtgttctctgctattgtatgttgtttgttcattgtactcgtacaggttgtgagtctacttgtgtacgtttatttgttttcttgtttattcttatctagac

SEQ ID NO: 181307 - DNA, 122 bp, Homo sapiens
ggggagctatggctggaatgatgcagggagaggaaggaataaaaatctagaagttggactcgaggaagacttcagaaagtacttattggcctggaagagagcagtttgatggactgggaaga

SEQ ID NO: 181308 - DNA, 122 bp, Homo sapiens
ctaagcacagcacctgtacatgctcaaggagtgtgagctgccattattacaattacatgccggcttaacacttccacagatgacatcaatgaaggtaaatgaggaaattagccaatggagtc

SEQ ID NO: 181309 - DNA, 122 bp, Homo sapiens
tcgggcgcgtttagcctcgacctcgggccagcccgcttgccgcgccgtggccctaaggagcggctgccctgctggaccgcatccaccagcagcctggctctgccgctatcgaaggaggcttt

SEQ ID NO: 181310 - DNA, 122 bp, Homo sapiens
gtcgcctgcggccgagggcaggctggcgggacgcgccggcggcggggaagttggttattgcgaagtgccgtggctgccggcgggcgctgcgggactctctgcaatgggacccgagcagctct

SEQ ID NO: 181311 - DNA, 122 bp, Homo sapiens
atgtcacatcctttaaactgacttcctgcctcctaggtctctgccctgcctggtttagatcgaagtgattaaccttctcccgggagctcggggagggaagtctggctgagccctcttgccct

SEQ ID NO: 181312 - DNA, 122 bp, Homo sapiens
agctgccgccgccgccgccgccgccgccgccgccgccgctgccgggggaggggcggccgccgcccgcctgcgctcagagactcacgcagccccagtcccgccagtccgccaacacagtagtg

SEQ ID NO: 181313 - DNA, 122 bp, Homo sapiens
ggagctccgggacgagctgcagcgcttccccggagtcatggagaacctgaccatcaggtacggccgggtctcgggcattggcactgtccacggcggcgttagactcctggtcggaagtgtgg

SEQ ID NO: 181314 - DNA, 122 bp, Homo sapiens
aatacacacacatataggtaggaccaaatttattctacaaatatgcatctagattgcagacgtaaattctcatcaaccaaaaacaccaactttcaaaacaaacagtcccataatagaaatta

SEQ ID NO: 181315 - DNA, 122 bp, Homo sapiens
gctcttcctgggggtgcctgctaacaaggcactgccctggatggactcaaatcacgtcttcgccaggaccctggcttggggaggccctcccctccagcaccctggcttacccggctccagtt

SEQ ID NO: 181316 - DNA, 122 bp, Homo sapiens
cggaaccctgccgcatcccagaactgccggagctccctgtccctgcggcctcgtggcccccggagggaagcaccgtcttgtggctcctggagactcgatagagaacatgatgggcaaaaatg

SEQ ID NO: 181317 - DNA, 122 bp, Homo sapiens
gggaggcgttgggactccctgcggggcccgaccccctggaccccactgatctgaacggggcgcacttcgacccggaagtttacctggacaagctgcctagagagtgccctctggcccagctg

SEQ ID NO: 181318 - DNA, 122 bp, Homo sapiens
tgtgggaaatgtagtctgcactttctaagggagcggcgcgagggcttgtgggaaatgaagcgtgcactttctaagggagcggcgcgaggacttgtgggagatgtagtgtgcacttttcggcc

SEQ ID NO: 181319 - DNA, 122 bp, Homo sapiens
cagtactgccttgggaggttcttttagtcacttgaaataacaaatgcaacttgttggtgtcgtgacacttagccactactttattgggatctgaaaagcctgataataactagcatttttgt

SEQ ID NO: 181320 - DNA, 122 bp, Homo sapiens
ggctccggcgaatgcaggcagatggtggcctcggacgtccacgcggggaaagccctgagccgcttattcagttatatccatggcatttagcaagaagaaggggggaaaagcacaacttgttc

SEQ ID NO: 181321 - DNA, 122 bp, Homo sapiens
gctgaaaagcctttcaccctcacgtggtttcttttttaaccagtcatcaagcgaggctcgcgcgcaggccccgcgttggaaaatggcggggaagctgaaacctctgaatgtggaggcgccag

SEQ ID NO: 181322 - DNA, 122 bp, Homo sapiens
agccgcagtcccacccgctgctggcaatctgaatgaggagccgcgctatttttacctccccggctgcaatcctttatatttacatgcaggaagcaaatatataagggattaagaaggagatg

SEQ ID NO: 181323 - DNA, 122 bp, Homo sapiens
cctgaaatttcttccctggcccgctgtcaccttcaggataaattctcaactccttacaagcggttgaccgtttgcttggggcttcacctttcccagccccagtgttctgtgagttccatctg

SEQ ID NO: 181324 - DNA, 122 bp, Homo sapiens
aattccagtgttagtcaacctttttccctgtaaatcctcactgtgagtgaagggtcacatcgggtctgggctgacgcatgtgcgccaggaaaaatgacccaaaagttctgtcctctcaggtc

SEQ ID NO: 181325 - DNA, 122 bp, Homo sapiens
tctcgaactcctgacctcaggtgatcccgcctcagcctcccaaagtgctgggattacagacgtgagcctccgctcccggccttagcacaaggattaaatgagatgtttatatggcgtttggc

SEQ ID NO: 181326 - DNA, 122 bp, Homo sapiens
gtgcagctcggatccctgggttcagcggaggtgggtgccgaagcccgaactgaattggcacgcaggtccctgcccagcgctgagccgcgcctcgggaaagactgaaagctgcccgtgccgct

SEQ ID NO: 181327 - DNA, 122 bp, Homo sapiens
tggccagatttatcttaaagctggtggtttgggcatgtaggcagtgacagctgaccacatcgctcttgagaggtgactggccaatccctttcttgattctgatagaatgtgttctgtttcca

SEQ ID NO: 181328 - DNA, 122 bp, Homo sapiens
aaccggttgaaaccggttcagactgggagattccatctcggttgagttttcagcccatggcgccgcggagcgtttggaacctgggcctccgcccccagcccgccctcctattggtcagttcc

SEQ ID NO: 181329 - DNA, 122 bp, Homo sapiens
aaggtgcctcggcaaagttcacactccccttcgcgcagcacccgggaggtgggcggtgggcgccgttcggctgggcaggccggccaggttcctgccatgcacagtacacacgtggtgccagc

SEQ ID NO: 181330 - DNA, 122 bp, Homo sapiens
gaggtttgttgttatttttaactgcatgaagcagtgggtttgtttgtatcttgtcactcacggctgtcagcaaaacttaggtgttgctaaaccagaccacacccatgaattatagtgcctct

SEQ ID NO: 181331 - DNA, 122 bp, Homo sapiens
ctggtagcgagcccataggtgcgcgctgaggtcggcgccgctggtgggtgcctgggcgggcgcggagcgcgggacgccggggcagtgggcgccgggacccggggggccgcacccagggcagg

SEQ ID NO: 181332 - DNA, 122 bp, Homo sapiens
cgaggcatttagtgtttgctaaatgaattaatacatgctcattccttctagatggcaccacgttagcatctcttctccctgaatgccctgtcactcattctgcatccttgttcaccactatg

SEQ ID NO: 181333 - DNA, 122 bp, Homo sapiens
gatatttaagactgaagtggggaaacgggagggaaaggagcccttatcctggatgttagacgctattaaggaccatgctattttgtatttgtgagaatgatattgaaggtaaggaggtcctt

SEQ ID NO: 181334 - DNA, 122 bp, Homo sapiens
aaaaaacacatagggccaggcgtggtggctcacgcatgtaatcccagcactttgggaggccgagacgggaggatcacttcactccaggagttcaacaccagcctggccaacatagtgaaacc

SEQ ID NO: 181335 - DNA, 122 bp, Homo sapiens
ataattcattttataaatttcagtttaaagcctgcgttgaggttaagaaaaattgacgttcggtctgtgaacttaatgtcaagctccagaaaaactctgggcagcacatgtttagcaattaa

SEQ ID NO: 181336 - DNA, 122 bp, Homo sapiens
cggcggcaggaagcggccgtaccagggctgggggtcactgcggaagggctggagccatgacgcccacgggcccccgctacagggtctaacaactttctcccggctctgcccctctctcaggc

SEQ ID NO: 181337 - DNA, 122 bp, Homo sapiens
agtgcaccctccgcccctaacaaagggactctgattttgtttttgaactgcccagtggcacgaggtgctccttaaaattctgctttgcaaacatttttttatttcacccaccaccattagaa

SEQ ID NO: 181338 - DNA, 122 bp, Homo sapiens
tcgtggcctctgctttcgtggcttcctccccttcgttcgtgagaactcgggacatgtacacggagctttccacacaactcaagaaacccagccttggggctctgtactccccaggctgacat

SEQ ID NO: 181339 - DNA, 122 bp, Homo sapiens
tccttggggtttaagacggagtctgacattgtatctgtctccggttctgcagcagcttagcgacatcagagacaattgaagcaaagggcccacttatggctgacagctgaccctgcagccca

SEQ ID NO: 181340 - DNA, 122 bp, Homo sapiens
cgctccgttctgccttaccacgccgccccccagcgtccgccaattaggagagcccggagccggatccactctcagcctcaggaagcagcagcctccgctccgcggcgggtgtgctcggcagt

SEQ ID NO: 181341 - DNA, 122 bp, Homo sapiens
gcctggaaccccaaatacgtaggtccttccggtgggaacctgggaagtcctgggacccctcgggcttggtctggcccctacggtgccatccggtgcccgacgacccatgcggtgcacattca

SEQ ID NO: 181342 - DNA, 122 bp, Homo sapiens
atagtaatgtcattacggtgccaccacctgggaccccatgatgggaccctgtgactttgccgtggactcagacctcagccttgctctgtgtagaggaagctggcctttccttctctactgct

SEQ ID NO: 181343 - DNA, 122 bp, Homo sapiens
gagaggtgctttaactttggtgcacataaaagtcactggaaaatgtttaaaccacagatccgttcctaagtccctctctagagacaggttccctagggctggggtgcagctcagcattctgg

SEQ ID NO: 181344 - DNA, 122 bp, Homo sapiens
gtgtcatttgaaaacacccatgtttctttcacaggcggaccataggtgctgcctatcgcccgggaaataaaacatgtagtttatgagtgcaaacaaggaaaaagttcaagcacaaaaacaca

SEQ ID NO: 181345 - DNA, 122 bp, Homo sapiens
gcggaaggggcgtggtctcgggaggggccccgaggggtgggcggggccgggagtgcgagccggacggggcgcagcgaggggaccggttggtgaggtcctggaggctccccgccaccgagggg

SEQ ID NO: 181346 - DNA, 122 bp, Homo sapiens
aaacccctgggaaccactaatctttctattgtttctatagatttgccttttccagaatgtcgtatctttggaatcatacagtatgtagccttttcagaccggcatctttcccttagcaaaac

SEQ ID NO: 181347 - DNA, 122 bp, Homo sapiens
cgccagctgatgcgggtgcgcgcgcagctgttgtttactagccggtaactgtttcagagccgcggcgcgcgcagggttcgcgctgccggggctggcgccccctccccggcccgacgccagag

SEQ ID NO: 181348 - DNA, 122 bp, Homo sapiens
cacagtgtccgtagcccagaaggaggttaaatactttcacttctcttttccccatttgggcggagccctttctgagtcagtctgtcggccgacttcctgcttggggcctgggcagccacact

SEQ ID NO: 181349 - DNA, 122 bp, Homo sapiens
ggatctctgagctcgtgcagtacttcttctataaggtaggagggtcgccgctccccctcacggtgttagcaacaggtcacgcacagggtggcacgacccttgtctgagccacttgatgccac

SEQ ID NO: 181350 - DNA, 122 bp, Homo sapiens
ttattagtgaattttaacagttttccgtttcttctggacgaactgtttgcaattataatgcgaattacggataatactctgatattattccatgccgttccgttgttgcctacaaagttcgc

SEQ ID NO: 181351 - DNA, 122 bp, Homo sapiens
gagccaccagcgcccccctggaggcggccgcccggagcgggatggagcggggccggtgtgcgttttagctgaaagcccaggttttttcttgaatggaatttgaggaggcgcagagaggagaa

SEQ ID NO: 181352 - DNA, 122 bp, Homo sapiens
gacttatgcaaactgttgtgatatttgcacccatattctaaaaaggaaccccgtgcatgccgacccctgcccacacaagcaagggggtctggagaaagtgagcatttgccatgaaagcggca

SEQ ID NO: 181353 - DNA, 122 bp, Homo sapiens
gcagagggtctaattgagctgactaacacaagccaccggcagatgataaaattgaaagcgcgcactgtaacacacactcactggggcctccagagctgtaaacgctcaagcctagacgctgc

SEQ ID NO: 181354 - DNA, 122 bp, Homo sapiens
gcttctgtctgcagagaccaataagactgcgggcccttctcctcaacccaggcgcccagccgtccctgggcagatttgcagtttggggaatgtgctcggagagttcccctccccatcatgtg

SEQ ID NO: 181355 - DNA, 122 bp, Homo sapiens
gggggcctgggggagctagcggggcgggacccgagcggggcggagagtggcaggaggaggcgaatctccgcgctccggcgaactttatcgggttgaagtttctgctgtcgcctcccctttgc

SEQ ID NO: 181356 - DNA, 122 bp, Homo sapiens
tcccactttatgcgctgaaggccttttccggtcacgtggaaggctgtgagcaggcgccagcgcccgtacaaaacactggtagtgttgcaaacgcaacgtttaggaactcatgagcagcctgt

SEQ ID NO: 181357 - DNA, 122 bp, Homo sapiens
cacagcggggagggttcacgtctgtaatagaatgggaaactgacagtgttcccaagaaaacgaagagccgaagaacggaagcccatacacagttgctagtgaatcctccgtgatttaaattg

SEQ ID NO: 181358 - DNA, 122 bp, Homo sapiens
ccacagcctcaaggaggagacggcgaggcccggcccccgctgtccctggtgtaaagaagtcgccgtagccgtcgcggccgggactccccgggctctcgcccttcaggtttcgttgacactca

SEQ ID NO: 181359 - DNA, 122 bp, Homo sapiens
aactgaagaggccaggctcctccccgctgcaaaaggcgcgaacttcccgaagctccaccccgtcttcccagcgaacaggtgggcactgttcagagagaatcggtcaggaaagggggcgggct

SEQ ID NO: 181360 - DNA, 122 bp, Homo sapiens
agggtgcttttaagttactttaaaaaaagcctacaaaatattttttttcttttatttgctcgagttcacattaatgatggtcacaaggctgccttgttgggcaggcgtattgcccccagttc

SEQ ID NO: 181361 - DNA, 122 bp, Homo sapiens
aaggattcttaagcaggggttttccaatctgtcccttgaggaactacccctgaggcaaggcgggcaggcccaagctgcgatgtggagaattcgatgtccgagcgacctcctcggaggagtgg

SEQ ID NO: 181362 - DNA, 122 bp, Homo sapiens
tgagtgagcatgctacctagccggggaaactgagcattatccacagaactctgtcagccacggatcggaagatcccactcacctacccacgccacggggtctagggtcccaaccctggagct

SEQ ID NO: 181363 - DNA, 122 bp, Homo sapiens
tcaaacaggctgtgaagaagctctatgacggtgatgtggccgaggtcaccaccctgattccgcctgatggagagaagaaggcatgtgttcgactggctcctgattacgatgcgttggatgtt

SEQ ID NO: 181364 - DNA, 122 bp, Homo sapiens
acatcaacgcctgagcctggctctttccgtggtgttgggtgtgactgcagcgacttatttcgatggctgtgtagtatgccattgcaagagcacactccgatatacttaagcggcgtgctggc

SEQ ID NO: 181365 - DNA, 122 bp, Homo sapiens
atgtctccttgctctgattccagagcagttattttttatgtattcattcaacaaatttagcgtctgtaatatgcccagcataggccataaatgatgacactgacaagaccccaagttggaga

SEQ ID NO: 181366 - DNA, 122 bp, Homo sapiens
ttgaaccagggagtcagaggttgcagcgagccgagactgcgccactgcactccagcctggcgacagagcgagactccgtctcagaacgaacaaagaaacaaacaaaccagatgactgggaga

SEQ ID NO: 181367 - DNA, 122 bp, Homo sapiens
gatcccatctcggatcactgaacacctctggcacactgaactcctgcagttccttggtgccgtatcattttatgttctgccttttgtatctgctcttcattatttgcaatgccatgaatccc

SEQ ID NO: 181368 - DNA, 122 bp, Homo sapiens
aggcccacgttctaacctggaatggaacctgcgttcccaccctggccgcccgggtggactcggggcctccagggccggccgcagagatgcagccctgtccctggcccccctcctgtgactcc

SEQ ID NO: 181369 - DNA, 122 bp, Homo sapiens
caacagcccagcctaccacaaagagaaagctaaggcctttaattccctgggttctcgagacgtcactctgcggcgtatgtccaggcgagctgtgcgtcagttccgttcctctgcttgtgcct

SEQ ID NO: 181370 - DNA, 122 bp, Homo sapiens
aggaagggaggaaggaaggaaaacaaacaaaacaaagaaaaagaaaggaaggaatgaagacgtcagccagaggtcgttctgagcaaattatttgcgttcatttttgtaattcttaccacaac

SEQ ID NO: 181371 - DNA, 122 bp, Homo sapiens
atgcaaagtgccacacccaggaaagagccatgtggcctagcccatgtggccaaacagccccggttccctcctgggacctcagcagcccagactcatgagcttgcctgccaagctgtgcacca

SEQ ID NO: 181372 - DNA, 122 bp, Homo sapiens
tggtggctctcgcagccgtaggtgccctggtcggccagtatgacaccatggatgaagaggcggtggatgtgcccatcctgggccatggacaggcgagagtcgtggggcaggggctgcccacc

SEQ ID NO: 181373 - DNA, 122 bp, Homo sapiens
gctgcttgaagtcaggatccaagtgaattttagctttgctgatccacagcacttagcaaacggctggcttgtgggaagggctcaatgcacggcagctgagtacgtaaaaaacaggtgaattc

SEQ ID NO: 181374 - DNA, 122 bp, Homo sapiens
cccctggccaccctcttcttctggttttgctttcccccaggggatcctaaagcttggtatcgccccaggaagaagagagtcaagtgggtgattcatcctactgaccagagggggatattgag

SEQ ID NO: 181375 - DNA, 122 bp, Homo sapiens
taatgctattccctcccataaatttagaattcactcaagtgatcttggtttatgcttagacgtggttcccaaaacttgggtattataggtgaaaagtttctggatttttgacttcattaatt

SEQ ID NO: 181376 - DNA, 122 bp, Homo sapiens
ggccaggccgcctttggttttccggatcctgccgggctccacactgcccctcccccagcccgccgacccctcagagccgccctgtgcgcgcctgcccctcacccagcaccggcttgtccgcc

SEQ ID NO: 181377 - DNA, 122 bp, Homo sapiens
cgcttaacagtgtctgattccgtgaggttgaaatcgaggccggggggcacgggtgtctctcggggcggggggccagcgggcttcgggcgctgtttgatggtcaggttcccttcctctgcaaa

SEQ ID NO: 181378 - DNA, 122 bp, Homo sapiens
attgaatattgaacttggttttcaagaaaaatctactatatatctgctcttggaattacacgcttgtgcctaacgtggaagacccacctgtttggattcaagacctgtggaaaggagacaat

SEQ ID NO: 181379 - DNA, 122 bp, Homo sapiens
gggccaagggacagctggcatcctgctggggggtcaccctatctctggggtcgaatgtcacgaagggtggcctcctgaggtgggaaggcccattgtcgagggacctgtcccaggattttgtt

SEQ ID NO: 181380 - DNA, 122 bp, Homo sapiens
ccctgctttcacaatggcctcccgcctccagggagacagccgggcagatgagttaagagccgcgttcttagacttaggagtgtgacaagcatgaactcaaataactggtctgccgtttgcta

SEQ ID NO: 181381 - DNA, 122 bp, Homo sapiens
cctccttggggtagaggcccaattcggagagggcttggccccaggtctagcccatatggtcgtggttggtggggagtcaatgcagaacctccttttccggggccaggccatgggggtcccac

SEQ ID NO: 181382 - DNA, 122 bp, Homo sapiens
gcaaaggtcaaatcaaaataacaaacacgcacgacgtcttcgatcaccttcctgtaaaaccgggtttctagccggacccatgtcctcacagttcctgaatcaagttcaccgtctgtgcaagc

SEQ ID NO: 181383 - DNA, 122 bp, Homo sapiens
ctgcccacctccacgtctgtgcctcggtggggaagctggtccaaccagtaggatggcagtcgtcaggggcccagagtggctgacctggggccctttggctccccctggtgacgcctcacaca

SEQ ID NO: 181384 - DNA, 122 bp, Homo sapiens
cccgcgctccccggtccggacagaacttgggcccctagagtcacccagcgcagaaacgcgcgggcacactcacactggggagccatgaatttgtgcttcttggcctcccctgcctcctccca

SEQ ID NO: 181385 - DNA, 122 bp, Homo sapiens
taacatttcatgaagtactatatgctaaggccctgcacaatgcgtttcctgtgctgtcttcgcagacatcctgtgagatgggtactgacacatccctgtgaagcacagtgaagctgagagtg

SEQ ID NO: 181386 - DNA, 122 bp, Homo sapiens
tagggagagggaaggattggggaggggtgaaggaatcctccgaaaagcgatggaaagtgacggagaaaggcagaagcaaacccactgggcgccaccccactcccgtgtcccgagacgccccc

SEQ ID NO: 181387 - DNA, 122 bp, Homo sapiens
tcctacccgctctctcaaaatccatgttcagtggcaggatcatccaagaccctgatggggcggggggccttttttcgtctaggatggtatctgaatggctttaagggtagctttcttctgat

SEQ ID NO: 181388 - DNA, 122 bp, Homo sapiens
agaagcatctggaacttctgtgggggcacatggggcagaggggaaggggaacaggcagaacgagtcagctgcctttgaaagctccacgagggacctagcagaaattcattcattcatccgtt

SEQ ID NO: 181389 - DNA, 122 bp, Homo sapiens
tttctactgatggcattcatctgcacgctcgcacagcggagcagctaacctttaggacagcgcccggggcagagccagctcggagccagcgctgcacagctgtgaggggccggctttaggct

SEQ ID NO: 181390 - DNA, 122 bp, Homo sapiens
ctcatgggggcggggcctggacgcagtctttgctcagtcggcttcctgggttcctgcctccgccctccacccagctgggtccccgcctgggcagagccctgttttcgcctgagctggtctct

SEQ ID NO: 181391 - DNA, 122 bp, Homo sapiens
tttccccattggtcatttctcacagacctacatctcactggctgtcttctcctgtcctagcgaagggagcccaaaggagggggcagatggggagggtctggaagatgttacctctggcagtg

SEQ ID NO: 181392 - DNA, 122 bp, Homo sapiens
gtaatggcgccctgagctaagacactaagcggaagaagccagtgtgaaaggacagcatcccgtatgttggacatgcccgcgatggtgaatcttacgtgtctacttgtccgtctgtggggtgg

SEQ ID NO: 181393 - DNA, 122 bp, Homo sapiens
tacccaggaactgaccctgctctctcctttccctgttagacatggtaagtgtgagtttagcgctgctgtccggatgggttggtagcagacagggtggagtagggttaagcacactggtcacc

SEQ ID NO: 181394 - DNA, 122 bp, Homo sapiens
agcaaagatgaattgtatgatcagccattttgtgagcagatatttccatcaagtaagagccggtcagcattctagctgcatgcctccactgatgccaaggagtgtggttttatcttgttgag

SEQ ID NO: 181395 - DNA, 122 bp, Homo sapiens
ggccaacattccctctgcccacattaaagggctctcccctcttccaggatggcctgtggccgggtctggctctttggtgacagtcagagcccatgcatgaaagcactgtgcatggccagccc

SEQ ID NO: 181396 - DNA, 122 bp, Homo sapiens
atgaaaagagtcctggagattgattgcacaactatacaagtgtacttaacactagtgaaccgtacacttaaaaatggttacaatgctaagttttatattatgtgcattttaccacaaaacaa

SEQ ID NO: 181397 - DNA, 122 bp, Homo sapiens
atagaggttactatgaaaaccaatgtgtaaactcagtccaaaataagtatggttataaaacgtctttgctcattcaataaatcctttttgagtgcctactttgtgccttttgttgtttattc

SEQ ID NO: 181398 - DNA, 122 bp, Homo sapiens
gttcagattatgtaaaaggtgtcactagtagatgtctgagaaataaaatactgattttaccgtagaatgctttttaactttgaagaattagggttaggtttcatatctaaacaatgatgaga

SEQ ID NO: 181399 - DNA, 122 bp, Homo sapiens
cccggtggctgaccttgaaaagttgcaatcaacacctgactgttgattactgttgagactcgggggagcccagacgaagccccacactcctcactgcctttgggtgggggtggtggccttct

SEQ ID NO: 181400 - DNA, 122 bp, Homo sapiens
gagaacttcctcctccttggctctccccacttacttcctgataacctggtagaggtctcccgcgggcggggagggggaggcgtagcaactttaggcaacttcccaaaggtgtgcgcaggttg

SEQ ID NO: 181401 - DNA, 122 bp, Homo sapiens
ggtaagatgtcactacacagccgaagggcaggaatggcatccaaagcagacagcacagcacgagcaaggcctggtatagaaaatggttatttaagctggagcagagggcatgtgaagtggga

SEQ ID NO: 181402 - DNA, 122 bp, Homo sapiens
gcgggacagcgacagggaatccggccgcacctgtgcctgcagtctcattgctcggaacggcgcgccactgtgacgtgtcaggccccgcccctgactctcctcatagtgcccccgcctccttg

SEQ ID NO: 181403 - DNA, 122 bp, Homo sapiens
gtgaggcaagctacaaaggaagtgtgaggaacaccctcgtgaggaaagctgcgaaggaagcgtgcaggaaacacgatggacccccggaaaacgaaggtgaagaaaggaacgtggtcaagtca

SEQ ID NO: 181404 - DNA, 122 bp, Homo sapiens
gggcgtcccaagtgtcccccattccatcccccacccaggtttctccggtgcgccgctcggcgaacctccgggagctacttactaaagaagaggcggtaattctgcgagcagggctggccgcg

SEQ ID NO: 181405 - DNA, 122 bp, Homo sapiens
cactccatcaggagggcggaacctgctctgcccggcagccccatgtgggccggtgagccccgcctcgctccgtctaagctgcagcaagcaacactggctcctgcctgacgctgcctccacca

SEQ ID NO: 181406 - DNA, 122 bp, Homo sapiens
gggtgggttggggctgatctttaaggaattcccgactttctcttcgaggtagatcgtcatcgtggtcactggtgccacggggcctcagcgcagcttctgtcttaagctcctgggcctcctta

SEQ ID NO: 181407 - DNA, 122 bp, Homo sapiens
ccagcaccacctgtcaccaggggcgaagcctggaccctgcggaggcggggtcgggagcttcggagttcaggaggcggggcccggtgcggggggcggggcttgtgaggggcggggtcggggac

SEQ ID NO: 181408 - DNA, 122 bp, Homo sapiens
ctctgaataacacatttcatttctgcttcaaacctcctatgctgtctatcgctgttttgacgactgcatagctcaacagaaaaatgcgtcccattgacgtctcaataataagtctgattagg

SEQ ID NO: 181409 - DNA, 122 bp, Homo sapiens
aggcgggcgatgggctgctgcctctcgacgccccccttgcccgctacaatcaaatatacgcgtatctgtgtatcggctttctaagccaacagcccagtcctggggtcagccctcccctccaa

SEQ ID NO: 181410 - DNA, 122 bp, Homo sapiens
aaaagtctcttaaataaggtgatacacaaatttcagagaacaatttcaacattgttctgtcgaacgttatactcagtcctgaaccacattactttcctgtctacgtttcatttcctgggggc

SEQ ID NO: 181411 - DNA, 122 bp, Homo sapiens
cccagtggactacaactcccggaaggcagagaagtggactacagctcccagaaggctgcgcgacatacagccagcccggtgctctcgtgaggcgtgccagtcagattccgcgggagagcggc

SEQ ID NO: 181412 - DNA, 122 bp, Homo sapiens
cagaggtaagcaggagacactgaatcaggctgcgctgggcaaaggcagagattctcggagcgtctgcacatgatggtatttgcgtgggaagccagggcagcagtgaagagggtgaaaatggt

SEQ ID NO: 181413 - DNA, 122 bp, Homo sapiens
tagagtcaagcttgggcaacatagtgagacctcatctctgcagaaaatgaaaaaagaaatcggtcaagcatggtagaatatgcctgtggtgccagctactcagcaggctgaggtggtaggat

SEQ ID NO: 181414 - DNA, 122 bp, Homo sapiens
acgcgcgatccttgaacttgaatgagcctatgcataggagcctgttaaaagccaaattcgcgggcggatcacgaggtcaggagatccagaccatcctggctaacacagtgaaaccccgtctc

SEQ ID NO: 181415 - DNA, 122 bp, Homo sapiens
tgattgttatctgggagcctcttgacatgctattgtgattttattccaaccagggcaaaacgtgtcatggagagccgttgcttggatataatgattggcacattagattcactgctcaaatg

SEQ ID NO: 181416 - DNA, 122 bp, Homo sapiens
gtttttggatattggaagcagccgctgattacccttgcaaagaaatctgtaaaatgtgcacgtgaatgtctgagatgctctctcaggcctctagtccttctgtatctttcctttgcagccct

SEQ ID NO: 181417 - DNA, 122 bp, Homo sapiens
agtctgagggcaccccccctcccgtactcgtcagctccatctcgcggaggaaaacgctaccggcaccctcagctccgcccaagggccgcgatctctacaggggagatgaaaagccggcgaca

SEQ ID NO: 181418 - DNA, 122 bp, Homo sapiens
cctttcctggtcaaggaaaggggtgacagacggcacctggaaaatcgggccactcccacccgaatactgcgcttttccgacgggcttaggaaacggtgcaccaggaaattatatcccgcacc

SEQ ID NO: 181419 - DNA, 122 bp, Homo sapiens
atatatggcagaagacaaaggcctgtgcatggagatggaaaattacaagagcatcattcccgccaagagtggattccaacagaagtatcaaccagagagaattcctccacagagtagcttgg

SEQ ID NO: 181420 - DNA, 122 bp, Homo sapiens
aagcagggatcctcatccctgccaacgactcccttccctacaactacattaaagttattccggaggctcccagcagtgtgtggcttagttaagggtctgacaacgtccctattatcagaacc

SEQ ID NO: 181421 - DNA, 122 bp, Homo sapiens
ctcagagccaaagacatcaagaggatcctggacagcgtaggcatcgaggcggacgacgaccggctcaacgaggttatcagtgagctgaatggaaaaagcattgaagatgtcattgcccaggg

SEQ ID NO: 181422 - DNA, 122 bp, Homo sapiens
gtgaaagcagcctggggccttcaccaggagcagatgctggcacctgtttcttgtacagcccgcagaactgtaaaccaagtcaatctctttttcacaaattccccagtctcaggtattccttc

SEQ ID NO: 181423 - DNA, 122 bp, Homo sapiens
ggcaggcacgggcatggcaagacaatagctagctgaggaaagaagcattttaaaacagagcgagaccctgtggtagaggatggtgaaaatggggcctagccatcttaattgaaaacccaaag

SEQ ID NO: 181424 - DNA, 122 bp, Homo sapiens
cgaacccgggccgtggctctttcagcaccgaatcctagccactagacaaccatgcagatgcggaaagctgctttctctcccttcttcgacctgaagcgacactttcctgtgctctaggagga

SEQ ID NO: 181425 - DNA, 122 bp, Homo sapiens
agactacaactcccggagtgctctgggaacggagccacgggagctacaggcggagggacccgagggcgggctttccgggtgtgtgtttccggcgtcggcggccgcggccggggacggtgtga

SEQ ID NO: 181426 - DNA, 122 bp, Homo sapiens
aatcacttagacattcatctgccaaacattcactgagcatgtcctgtgtgccaggcaccacgccaggctgaggatttaagtggagaacaagtcggagctggtccttccttctggtccaacag

SEQ ID NO: 181427 - DNA, 122 bp, Homo sapiens
tgcaggattggggaaggcaaggaatgaggccactagagacaatgcacttcatcaaaggaccgacttccttcttcactccaaaggaatttcatctaagctcccacctgccgccgagtggaagc

SEQ ID NO: 181428 - DNA, 122 bp, Homo sapiens
cagacacatacatagcaggacacatgcatacacacgagaatgcttgggcacacacacagtcgttgttatgggtggaaaggaggacaatggatatttattagaaaagaagatttattagaaaa

SEQ ID NO: 181429 - DNA, 122 bp, Homo sapiens
cacttgaggagcccttcagccctcggctgcactgtggaagcccctttctgtgctggccaacgccggagacagctccctcagcttgcggggaggggtggagggagaggcgcgggcgggaaccg

SEQ ID NO: 181430 - DNA, 122 bp, Homo sapiens
gaacgccgcctctgccgtcccctcacttgccccgtgcccccaccgcagggctgaaggcgacggaaccgagcctttgtacccccaccagccccgttccctggcgtctcccggccgccgggctc

SEQ ID NO: 181431 - DNA, 122 bp, Homo sapiens
agtgattggatcacgggggcggctcccccacgctgttctcgtgacagtgagggcgtctaacgagagctgatggttttaaaagtggcagttttgctcatgctcacttccccttccgccatgat

SEQ ID NO: 181432 - DNA, 122 bp, Homo sapiens
tggtaccagtcctctgctgatactgagggatgactgtactaaaacccatttttcattctacggacctttctcattgttttgcatacattaattcatctaatcctcattcttatgaacttggt

SEQ ID NO: 181433 - DNA, 122 bp, Homo sapiens
ggggaaaaaaaaaaaacttgaaaaataaccaagcactcgctgcacataaaacagctgctgcgtgcagaccacttggtgcagccacgacgcgggggagagtgaagacgggcaattccggggcg

SEQ ID NO: 181434 - DNA, 122 bp, Homo sapiens
gagaggaagggaatttgtcatgcagcgtcagtggcttcacctcgcaaagcagcagcaggacggccccgtggcgagaggctgtgcaggcggtgcttgcatctctgcacaggttggctgtgagt

SEQ ID NO: 181435 - DNA, 122 bp, Homo sapiens
ctcggaggaggctcggggacggaaggcgtggggtgagtgggctggagatgcaggcgcgcccgtggctgtgcagcccagggagacgcccgccgccctcccattgattggccatgagggaagga

SEQ ID NO: 181436 - DNA, 122 bp, Homo sapiens
gatactatctagtactctactaaaagcattactatattggcaaagaagctgcagacacaacgcggtggggaaatgcatatgctgttatgaacaatgggggccctaaaggcagctggggccct

SEQ ID NO: 181437 - DNA, 122 bp, Homo sapiens
caaatagataaacacagaaacacaaacactaagggaggtacggctggaatttttctgcaacgtgtacaattcaatgtactttcacttttcatttcaaccctcctcagtggtttcctcccagc

SEQ ID NO: 181438 - DNA, 122 bp, Homo sapiens
ttccaatgcttctgacagcagtagagataacacagataggagggatttaaagaacgtcaccgtagctaagatacagagaacagcataggggttaagcaaggtccaatatgggactagctttg

SEQ ID NO: 181439 - DNA, 122 bp, Homo sapiens
atacaactaaatgaggactggactttcagtcgctgcaaactcctgcataggaatcaagaacgctggggacataaatattgtttttatttcttattttggtggaacactttgactttggaaga

SEQ ID NO: 181440 - DNA, 122 bp, Homo sapiens
gagagctgggcacggacctcaggggccaggtgagcacggagctctggctccgaggtcagccgggatctcccaagtcacacagtccacactcgcaacaactctgtctgcttctggtattccag

SEQ ID NO: 181441 - DNA, 122 bp, Homo sapiens
ctctggtaaaagttttgactctcagtcgtataaatcttctgaaaagacaagtgtccactacgagaggaagtatcttctctctcaaatgccactttcagcccctgtttaaattaatatggctc

SEQ ID NO: 181442 - DNA, 122 bp, Homo sapiens
gaaccttcctttttataagactgaaaaccaagcccatgtgacgaaatgactgtttctttccgccttttcgtaccccccacaaatttttccctcctctccccttaaaaaaattgcgtaagccc

SEQ ID NO: 181443 - DNA, 122 bp, Homo sapiens
ccccctatgcgcccaggggggctagacaagaggggggaagctgaagcccgatgcccacgacgcccccagtgcggatcctcagcccctgtggctgatagcgggagctccactccagggtgcac

SEQ ID NO: 181444 - DNA, 122 bp, Homo sapiens
tgctgctatctggaggccaggtgggggagctcagaaactgagatgcctgggccagacccccggtgtgctggaggcagtgagggccccggctcaggccagtcttctgggcactccttccacag

SEQ ID NO: 181445 - DNA, 122 bp, Homo sapiens
ttccgcattttctcttcccctttcccagcgcttcctccagcacccgaagccccaaccctgcgggtcaggaactccctagtccccaagtctagggatgagatgggggaaggagagccgtcagg

SEQ ID NO: 181446 - DNA, 122 bp, Homo sapiens
tctccccgaaagatcaaagggagattccgatgcaggtctccaggccgctgagtaaagcgtcgcctaacttgccctccattgatccccaggatgtaaagctctacttggcgtcttggacagcg

SEQ ID NO: 181447 - DNA, 122 bp, Homo sapiens
tttttaaggtgttagacctagatttggcattaatgtttttgcctatggcctattctagcacgatttgttgaaaaagactgtctttctttcattaaattgtatttgcacctatgtgagaaatt

SEQ ID NO: 181448 - DNA, 122 bp, Homo sapiens
ttctgacagatgaggcgctgctgcccaagggctgtctggccttgagcctcatctgaccctcgctggtcccagggcggcggcgtgacctgccaggtgatcctagccgggcatctctgaggcat

SEQ ID NO: 181449 - DNA, 122 bp, Homo sapiens
gccctgctcagcccaatctcactggctggttggggaaactgaggcccggacagaaaacatcggcagctgaagaagtcccagaagaagagctttggctccagaactgcacagcccaggttcaa

SEQ ID NO: 181450 - DNA, 122 bp, Homo sapiens
ttctttctgtgactccagcgtgagtcaggcacacatgtgatttgggagggacaacagaaacgcccagtcccctccctcaaggaaataagccacattaggtagatccacagtctgcctatggc

SEQ ID NO: 181451 - DNA, 122 bp, Homo sapiens
agcgagtagtcgatccgcttggtcccccaccagcgctccaggactgcgcggccatggcagcgagtcaggatggcctcctgccccacacccatctgcctgggcgctgggtgctcttccctccc

SEQ ID NO: 181452 - DNA, 122 bp, Homo sapiens
cgccgccatcttggtcgtgtcctctatccgctgccaaacgacaacagaggggccggcagacgtgagcaggccccgcctccaccggcgcgggccaatggcaaggcgcgccggctgcgtgaccc

SEQ ID NO: 181453 - DNA, 122 bp, Homo sapiens
atgaaaatgaaggacgcggacaccaggacaggaatctcctggttcttagagaatttatttcgccacaaataattggcaaacgggatctcgctgtattgctcaggctggtctcgaactcctgg

SEQ ID NO: 181454 - DNA, 122 bp, Homo sapiens
cttctgagaattgtatcctctctgtttgtgaatctgttacttaaaaaaaagaaaacaatgcgtttaagaatcagtactaataagtggcagtggagtcatgctgtctggcaaaaataaaaaag

SEQ ID NO: 181455 - DNA, 122 bp, Homo sapiens
ctggtgggcgctgctggcgctgcagctgcacttgctccgggcgctggcgcaaggtaggtgcgcgcggggtcgcgggccgggggcgtcgcctcggggcgcggaggcgcgaacttgagcagcga

SEQ ID NO: 181456 - DNA, 122 bp, Homo sapiens
ggctggcaccacccgactttctcctgcccttgggcaggggcccccagctgagccacctaccgaatctgggctcgggccgggcccctcggatgtccctctgcatctgcagaactcggtccttc

SEQ ID NO: 181457 - DNA, 122 bp, Homo sapiens
aaaggaagcagaacacctttctgagccagcgtcgtttgtcgttcggttctggcctctatccgtccgtctgcacgctaggagctcggtgaccggcattgtcagctcaagatgagattgtattt

SEQ ID NO: 181458 - DNA, 122 bp, Homo sapiens
tcagcccaaatgccaggactcgagaagtgtcgacaaggttgaggtaagatgttaattccacggagccacagggggagggtgggcgcacaggcctctggtgcagacgctcagaagatccttac

SEQ ID NO: 181459 - DNA, 122 bp, Homo sapiens
aaaggaaacattaagatccactgtgagctgcgcggaggtttaacgatttcaaatgaggcccggctcgggtgaggacctgacaattccccgtcaggatggcagatgacggctaaaattacccg

SEQ ID NO: 181460 - DNA, 122 bp, Homo sapiens
ccccaagcttttgccaagaactttatgggtgtagacctcaccctcaccccccaatgcttgcggtttgtacagctgggatccagagaagcgtccagcgggccctagaggggcagacacctcag

SEQ ID NO: 181461 - DNA, 122 bp, Homo sapiens
ggtctttccagggcaactcaggtggccatcgcggtgtgtggcgggcagcagggagatcgtcgtggtgcgtggcgggcagcagggagatcgtcgcggtgtgtggcgggcagcagggagatcgt

SEQ ID NO: 181462 - DNA, 122 bp, Homo sapiens
caacatgcccaacaaaagcgtcctgctctacacgctctccttcatttacattttcatcttcgtcatcggcatgattgccaactccgtggtggtctgggtgaatatccaggccaagaccacag

SEQ ID NO: 181463 - DNA, 122 bp, Homo sapiens
gccacttgctgcgcaaagcgcgcgggcccagccggtctcgtgtcccccgcccgtgcgccgcgtaactgactggcacactgagcgcgctcaccgatcttgacttgctcgcggtagctcttttc

SEQ ID NO: 181464 - DNA, 122 bp, Homo sapiens
ctggaggcgggccgtgggtgcggggtgtggagaggaggctgcaggcggagtgcccagctgcgtggcctggtggtggagttggggccgattgttcaactttccatattgcattgtctttagag

SEQ ID NO: 181465 - DNA, 122 bp, Homo sapiens
gaagttccgcctacttcccctacctctgtcaatccgaccacgacttctccttgaaaaccacgactcctgacacagtagttccgcctcctcagaggcccccgggatgaagtgacccagcagaa

SEQ ID NO: 181466 - DNA, 122 bp, Homo sapiens
tcctgcccgcaatggaatgttcagaacgcgggacctccttgggttaggatttctagaccccgggatcgtcgtggtgagatttaggatttctggaccccagcgtcatcttgatatgacttagg

SEQ ID NO: 181467 - DNA, 122 bp, Homo sapiens
gaatggggtggatatttcccaatacagctaaggaattatcccttgtaaataccacagacccgcccctggagccaggccaagctggactgcataaagattggtatggccttagctcttagcca

SEQ ID NO: 181468 - DNA, 122 bp, Homo sapiens
ggctgaaggaggatccgaaaggctgatacagcggggctgaggggggatccgcggggttggcgggggctgagaaatgaccctgtagttcacagcaaaatggagtaatttatgtcacaacgtaa

SEQ ID NO: 181469 - DNA, 122 bp, Homo sapiens
tttttccctcccgtgctgctggttgtaaacttgattggcattggctgcgcccactgaccccgacgctgagtccgctgaagatttaaggtggatccgagaagctgcagcttcaggcggagtct

SEQ ID NO: 181470 - DNA, 122 bp, Homo sapiens
tagtctctggccctcggctcccaggaacgctgccggagcaacaccgccgtctaggctggacgctgagagaggatcgtccacgactcacttcaaggctgaaccaagaaaacacagtaaaggaa

SEQ ID NO: 181471 - DNA, 122 bp, Homo sapiens
gacagcctcggccgatgggaatagggggaagtccgacactgagcaacgaacgcattcccgcgcctccaaaacctaggccgggggcgctggaaacccttaccggcacccggccaccgcggcag

SEQ ID NO: 181472 - DNA, 122 bp, Homo sapiens
cgtattcagatacctagaaacaggaagcccagcattccacatagggccacatgaggaagccgtagggtcaggaggaggcagagtaaggaaggaacatggcaaggcaagcacccttattgtgg

SEQ ID NO: 181473 - DNA, 122 bp, Homo sapiens
tggatggcgagtgtctgggagctggtttggtttcttctcggtggaccccggggtgccaagcgctctgccttcacttggtgtggctttgcttacagcagcttcctacaatctcatgtgtgtcc

SEQ ID NO: 181474 - DNA, 122 bp, Homo sapiens
gtgcttcagaaggcgtgggcaccctgtcccctttgcagatggggatgcaggccctggtggcggtggaggggagatgggggcagggacgttgccgggcagaggaagctgggtgagtgtgcact

SEQ ID NO: 181475 - DNA, 122 bp, Homo sapiens
ggtgccaagcccgctttcccaaaccaacagacccaaagtttccccggagccagagggcaccgggcgcacggctgagcctgcaccaatgtctgtgggccctgcctcgcccacctcctcgccct

SEQ ID NO: 181476 - DNA, 122 bp, Homo sapiens
tgcccgggcggtcgcggacatcatctttaggctgtggatgccttggccggggtctccagacgctgaccctccagggttggaaactactgcctgcttgccacgtcgtgccgccaattgtgctg

SEQ ID NO: 181477 - DNA, 122 bp, Homo sapiens
ggctctccgagggccttggggttgggatccctaggtgcagcccgttgacagtcggccccacggccatggacgtcctttccccaagttagctgagcgcctgccaccgagatcccccgagcctg

SEQ ID NO: 181478 - DNA, 122 bp, Homo sapiens
ctcctgaatgtgggcccagattggtggctcaagtctggaaccctagcagtgttgaaggatcgcctgagcccaggagtgcaagaccagcacgggtaacagaaagagatcctgactctacacaa

SEQ ID NO: 181479 - DNA, 122 bp, Homo sapiens
ccctgggccacaccaggctgggggtggccgcagctgcagtgcagctgatcctagtagtgacgacaggggacagcccccaaacagagacggggtggccagcggtgccaggccctggaggtggt

SEQ ID NO: 181480 - DNA, 122 bp, Homo sapiens
gaaatggtttcagtttccaacttccttaactgaaaagcatcaatatgatgaccatattttcggaatccaaagtggatttaacataggcttgtcccctgaaatacaagggcatattatcatga

SEQ ID NO: 181481 - DNA, 122 bp, Homo sapiens
cgcgaggctctgctcccgggaagtcgcagcggtttcactgcacccactcgcaccttcagtcgcgtgggcaaacctcccggcaaagggctccacagctccagttctccccggcccagccccag

SEQ ID NO: 181482 - DNA, 122 bp, Homo sapiens
gggaggcctaggtgggcgaattatgaggtcaggatttcgagaccatcctagctaacataacgaaaccccatctctactaaaaatacaaaaaattagccaggtgtggtggcacgcacctgtag

SEQ ID NO: 181483 - DNA, 122 bp, Homo sapiens
ttgggttcaagtgatcctgccacctcagctaccccagtagctgggcctacagacatgtgccgccatgcccagctaattatatttttattagtagagatagggtctcaccatgttgcccaggc

SEQ ID NO: 181484 - DNA, 122 bp, Homo sapiens
acttgatagataataatgacacaataagttgcagttgatactattatcaattccatgctacgtttacctgcataaaaatgccattcaaagttcttgcctctctgaaagatgcttaatgacaa

SEQ ID NO: 181485 - DNA, 122 bp, Homo sapiens
cgggacctgcagcccgccatgcctgagactccaccccgcctgccatgggctcctgcatggcgcgagcctccccgaagagtgccaccccctgctccacagcgcccaggcccatcgaccaccca

SEQ ID NO: 181486 - DNA, 122 bp, Homo sapiens
atcctcccatgtcacagggactacaggtgcaagctgccatgcttggcaatttctttgaaacgtttagtgattgtagtcacagaaaatgtgtgtttttccattttggtttacacgcatagttt

SEQ ID NO: 181487 - DNA, 122 bp, Homo sapiens
ggccagcggactcgggtgagggctctggctgcgtttggggttgcccaggccactgcccagcgtgcgccactcggctctgcgctctgcgctcggctcacgaatcgcaggcttcgcgccgggcg

SEQ ID NO: 181488 - DNA, 122 bp, Homo sapiens
tctagcgcgggagggcgaggcaggcagaatgggaagctccaggggacggcgaggaagccgcgctggcccggcagctctacccaggagccggggtccccgcccagcctggcttcctgtccagc

SEQ ID NO: 181489 - DNA, 122 bp, Homo sapiens
tcagaagaactaaagattcttgtaggacttaggtccgaaatgatatatgtgatgatctttcgggaggtgatagcgtatcctcagctgtaatcccataataagtaccatagtaacattccatt

SEQ ID NO: 181490 - DNA, 122 bp, Homo sapiens
acatggcaccagcatgcatttgttcattcattcaataatgtgaatgaacattaaacactacgatgtgatgggctttgtcacaggctgtaagtggcttcaggtccacatgaaaggagagcgaa

SEQ ID NO: 181491 - DNA, 122 bp, Homo sapiens
tggcactgttgccctatccttccccatcccactgctttccatcgcctggaacctactcctcgtccccttggaagttttgtttgcagcagttcccagtactgcgctgcacgccacgcccccgt

SEQ ID NO: 181492 - DNA, 122 bp, Homo sapiens
acctatgggacagcgcgtggctgtgccagcatgccagctgccttggcgggaggctgatttcggctttcttgcagcagtgttacagcagaggcgcctgttaccgctgaacccattaagtgtaa

SEQ ID NO: 181493 - DNA, 122 bp, Homo sapiens
acccaagcctgaaagtgatggcctaggcgggagggacaattacaggcctgcgctccgtcccggggacagaacgccgtcccctgccatccacggctgagtgcccggcgtacacgctgcagagc

SEQ ID NO: 181494 - DNA, 122 bp, Homo sapiens
ggagaacatatcaatatggagaacagagctttgcttctggaattcgagaaaaaccatgaacgaatctatcagtttttctctgatacagtgtgcccgagtgctctgtgaagaatccttttcca

SEQ ID NO: 181495 - DNA, 122 bp, Homo sapiens
cggcagcggttcggaccgcagcggagacaaacaaacgcgcacacaaagcgggtccgcactcggctcagcgcggccccagctagacattccccggcctttatcgcatgccggcaggttggccg

SEQ ID NO: 181496 - DNA, 122 bp, Homo sapiens
aggtggccttatgcaaataaacaggcacagttgacccttgaacaatgtgagggttaggggcgccaatcacctgcatagtcgaaaatccacctataacctttgactcccaaaaagcttaaccg

SEQ ID NO: 181497 - DNA, 122 bp, Homo sapiens
caggcggaagcgactgcgaagggcacgttggaggtgttccaggaaggattcgcatctggacgttgggagagatagggtcggatgggtcaggacccgagggagttcctgggcaatgggcaaag

SEQ ID NO: 181498 - DNA, 122 bp, Homo sapiens
gccctcgacattggggcctttgttagggaggcagggcgggggactgcgtgtctgggccgacgcaggcagggctgctcaccggtcgccgatccagcccgcgttgcagcgcgtacacttgccgg

SEQ ID NO: 181499 - DNA, 122 bp, Homo sapiens
gccgccgccgccgctttcctggttgctgtctccgggagtgcggggcccttggagccggctcgcgtgggagcctgcagcccggcgcggagaggaaggcggtcgggtgtgacagcggccggggc

SEQ ID NO: 181500 - DNA, 122 bp, Homo sapiens
ccggggcagctgcatcgccaatgcggaagaggtggatgtacccatcaagctctactgtaacggggacggcgagtggctggtgcccatcgggcgctgcatgtgcaaagcaggcttcgaggccg

SEQ ID NO: 181501 - DNA, 122 bp, Homo sapiens
gaaccagaggtgtcattcggcactaccaggtctactcacccatctgtggcaggtttcttccggagtatgcttggccgtggcgatgagccctgggcgggagcgttggtgctagcactctggct

SEQ ID NO: 181502 - DNA, 122 bp, Homo sapiens
cagggagcagctttgtagttttcagtgtctaacatcttcactgtgagcttgggttccacacgtgtgtatgcgtttgtgcttgggagggggtgacaactacaagatatgagagaagggtggtt

SEQ ID NO: 181503 - DNA, 122 bp, Homo sapiens
aggccacccctttcctcctggctgaccccaattccaccagaggaggatgtttgccagggacgccgagtccagctgctggcctcggcattagacaacccccagccccagcccctgccatccct

SEQ ID NO: 181504 - DNA, 122 bp, Homo sapiens
ggcgccgccggccggcacttgctgggcttgatcggaggctgaatcccgtgcgtggaccgccgttccctcttcgcgggattgttggccacgacagccggtctccgtctctttctcgtttcccc

SEQ ID NO: 181505 - DNA, 122 bp, Homo sapiens
ccggctgtggctgcgggagaggaagggtcaaggcgtcagggaccagcagcctccgcggcgcgcagcctctgcctgccctgattctgccagccgcacccccgtcttcaccatccctgggcccc

SEQ ID NO: 181506 - DNA, 122 bp, Homo sapiens
agagctttggagaacagacctcagtagcaccaacactccaggatcaatgctacaaagacacgggttacaactaaactggagaacatggccaaggatgggaactcagcctgagcagggctgag

SEQ ID NO: 181507 - DNA, 122 bp, Homo sapiens
aaagttccaccctggcttcctagactgctacagctccaagaaaaatcctgtgcgcacaaacggccgccgcctttggcgtctcccgcggattagaccagttaggaggtctcagtaggctttta

SEQ ID NO: 181508 - DNA, 122 bp, Homo sapiens
agcactctaacctcgggtcagtccctcacttggtcagtgagtacagtctgaaggaccccccggggcagggtggctgagaacctgcacagggcctggtcaggagggagtgagggcagggcctg

SEQ ID NO: 181509 - DNA, 122 bp, Homo sapiens
ttcagtgcacagatcttttgcaacttcagtgcaaagcatcggagctaatcgagaccaaaacgtctttctatgtaaacgccctgctgtgatccggggagtgcactgctgagtggcggggtcag

SEQ ID NO: 181510 - DNA, 122 bp, Homo sapiens
aagccagggttctctgtttatttcccacgagatttgcctggtatcaccagagtccaggctcgttcagtgcccgggtcagaaagcccccatcagctgggacacttctctaagggaaaaggaga

SEQ ID NO: 181511 - DNA, 122 bp, Homo sapiens
cggcgcgctggtagctgaagcaggcttctgctatgtccaggtggccgaggggcagcgggtcgtgggggttcttgaagtagcagaggcagcagcggcgcccgtccaacacgaaccgacggctg

SEQ ID NO: 181512 - DNA, 122 bp, Homo sapiens
ccccgcgccgcgctgggcattttttctgggaaacttctcccggggtccgcagggctgagccgggcgggcaggaaaagcgctcagcgccgggaggctgcgaccatccgggaacttcgccgaga

SEQ ID NO: 181513 - DNA, 122 bp, Homo sapiens
agcagggaagttatctaaaaacaccaactttcgttaaaagaaagcagcgacctcctctggcgttcacccccgaaggaaaaaggaatttgagaaactggcgccccccaatagatgtataatcg

SEQ ID NO: 181514 - DNA, 122 bp, Homo sapiens
ctgggtgtctggggtggctggccgagcaaggagttctgaggccggggagaggagggggaccgaggtgctctcctgcatctggttcctagatcctggtgaacaccgcgccggagccagggaag

SEQ ID NO: 181515 - DNA, 122 bp, Homo sapiens
ggagaagtcagatgagcagatcccgcttgatatcccgaaccctcccttccgggagccctgcgaggatgcgcgcatcagcccattctacggctaagaaaagtggagcgcagaggccgggtgcg

SEQ ID NO: 181516 - DNA, 122 bp, Homo sapiens
tgaagatttattagtaatatgctgcctttggaagatgaaaacaaactagtgccaaggaggcgtattcttcaatatttggaatagacgtgttctcaagacaatggcttcaaaggtctcctgtt

SEQ ID NO: 181517 - DNA, 122 bp, Homo sapiens
atttagcaaatatttgttaaattttacagatactcagttgttttcttttctctgctcacacgcagtgtcgtggcagcaggcacagtcttgagatgcagaaggacagcggcgagcttgtggac

SEQ ID NO: 181518 - DNA, 122 bp, Homo sapiens
aaggtgaggaagtaacggcatctgtacaccagatggcagcagccacacacacatgataggcgaggtgcctgcctgtcttcttcccaggtcagaaacccctgaagtgggaactgaagacagtg

SEQ ID NO: 181519 - DNA, 122 bp, Homo sapiens
caacatggtaaaaccccatctttactaaaaatacaaatattagccacatgtggcggtatgcgcctgtaatcccagctactcgggaggctgaggcaggagaatcacttgaacctgggagatgg

SEQ ID NO: 181520 - DNA, 122 bp, Homo sapiens
caagaggcgtgataaagcagccccttatcgcagttttcctttcaactgcctccaagtgagcgccggccggggctgggcctgtcaaggccaagcgtgttcctttcatgtcgccctgggttcct

SEQ ID NO: 181521 - DNA, 122 bp, Homo sapiens
ccgcggatgcctgaagtctccacttggcccagttccttacatggtgtacccaggggaggccggggaggtcagggcccgtagccatccgtagatcccggggcggccgcgcaccggcatatggg

SEQ ID NO: 181522 - DNA, 122 bp, Homo sapiens
aaaaagcaacaccgtacacttttctctgtaaataatttaatgactgtttaaaaacaacatcgctggcctcagaggttggtgcttttgtgctaatgcaagggaggcaggcagtgtgggctcag

SEQ ID NO: 181523 - DNA, 122 bp, Homo sapiens
tgggattccctgcgcagccaacaacagaaagaagaaaaccagctcccacacagagcctcccggctgcgcagacctttcccagcacagcggattgccagctccgagacccgggactcctcctg

SEQ ID NO: 181524 - DNA, 122 bp, Homo sapiens
ctgcgggggcggggaggggacttagtggccgggcccagcacgggcgagagtggccggggacggacgggcacgcgctcaccgagttgtccgtgagtccctgcaggatgacgggcctgacgaag

SEQ ID NO: 181525 - DNA, 122 bp, Homo sapiens
acactttaccttcagaaaagaaacataaaaatcacgacagtaaggaacggggatgggaggcgggcagaggaagcggcccaggccttactctgccgttctgttactttgtatgtttggaggct

SEQ ID NO: 181526 - DNA, 122 bp, Homo sapiens
agctttccactcctgccacttcagacctcagcccagggatgagctcacgcgaaacgaaatcgctctccctgcctcctccctcctcccccccgcccccctcacccactatctccctgacgcag

SEQ ID NO: 181527 - DNA, 122 bp, Homo sapiens
ccgtacccgtgcgcagaggacgaggagtgcggcactgatgagtactgcgctagtcccacccgcggaggggacgcaggcgtgcaaatctgtctcgcctgcaggaagcgccgaaaacgctgcat

SEQ ID NO: 181528 - DNA, 122 bp, Homo sapiens
acagtttctaactggaccagtgagtaagggagttcgttatctaaaaaggatcctgcattccgcagagcgcagcgaggtgagagtcagggcccggcctgggaccggaggtagccggacgagtt

SEQ ID NO: 181529 - DNA, 122 bp, Homo sapiens
tttctgaggggcgttccagcgctacccgtggaacacgtggtggacaggcctttggttccacgctccacagtaagcaggtttttagtgattcctttgttcactttcattcattcatgctcata

SEQ ID NO: 181530 - DNA, 122 bp, Homo sapiens
atgtggggagggatggagttggaggtgcatgctctcagagctggtaggggtggcccgtttcgtcccgtgtgtgaactggagatgagacccggcgcctgcgatcccgcagaccgcgcccggcc

SEQ ID NO: 181531 - DNA, 122 bp, Homo sapiens
aacaatatttatttttacagtcgcagtgagatttcaggcctcagaaatgtattctgtaatcgtttgctttcacacaggttttcttggtcatggccaagatttgagaacagcaagtgttttgg

SEQ ID NO: 181532 - DNA, 122 bp, Homo sapiens
acccacgggctccgctgtgctctgccgccccctagcggcgcctcttccaatcagccctcccgctcttcagcgacatcccatcttcgttgatgtgactgggagggactctgtatcctgaagca

SEQ ID NO: 181533 - DNA, 122 bp, Homo sapiens
cctttctgagtcttccacgcggtgggggcgaaggaggatggagctagaacgaagcctcagcgcgtgccccgcacaaacatggcagcattcccagcagccctaaaccgcccgacgcgagcgcg

SEQ ID NO: 181534 - DNA, 122 bp, Homo sapiens
ggcagctgaagcaggaggatctacataggaggctgaagtggatagcttgaatctaagagtcggaggttacagtgaactctgatcacaccactgcactccagactgaacaacaacagaacaac

SEQ ID NO: 181535 - DNA, 122 bp, Homo sapiens
cttcgctctttgcatcttaactgcaggtaattggcgccatcctcccggaagggcaggtcgcggggtgggccccagtagctagcgcgtggtcggggctgaagctaggagatccggcagtgagt

SEQ ID NO: 181536 - DNA, 122 bp, Homo sapiens
acaggggacaggttgggggaggtagtggctgacgacgaagcagagacgttttcctccactcggagccccaccacttccccaggctcagaaccaagacagtgccttgtgtgtggcgcccaggc

SEQ ID NO: 181537 - DNA, 122 bp, Homo sapiens
agccagtttcctcgaacagtcaacagggcgcagacacagcgcacaggttccgtaatgtggcgctgtccggcagagaacatggccgcgcccttatggtgtttattcgcgtgggccgccatttt

SEQ ID NO: 181538 - DNA, 122 bp, Homo sapiens
aggacggccgccaacctctaccggggcggagttgctgatgggtggacgagtgggcataggcgggggtaacccagctggatggcctgagtctcaagcgagcaaggatttttaaaggcaaatgg

SEQ ID NO: 181539 - DNA, 122 bp, Homo sapiens
gaactgtaatctccataatccctacgtgccaggtagggacctggtaggaggtgattggcccgtggtggcagtttccctcatgctgttctcgtgatagcacgtgagttctcgtgagatctgat

SEQ ID NO: 181540 - DNA, 122 bp, Homo sapiens
gaagccagacagccaatgatcaaggggaccacctaccaaaacccctccttctgcagagagcgcacgtggtccttgcagagcacaaacgagatttcagccttcaccttttctccctcttcaat

SEQ ID NO: 181541 - DNA, 122 bp, Homo sapiens
cacagctgtgcgtgtcgccaaccccaaaccctcctcacaggatgcagagcgcattgaaaacgtttgccgtggatgagacctcggtgtctggctacatctaccacaagctgttgggccacgag

SEQ ID NO: 181542 - DNA, 122 bp, Homo sapiens
gtcacgcggccgggaacacagggaggcggggggctccggaggcggcggctgggaggaccccgcgggagggcgccggggaggccgcgaggaccgcgccggggggctgcgcccaggcaagctgt

SEQ ID NO: 181543 - DNA, 122 bp, Homo sapiens
cctcagacgcctccccattcaggtccacttccaaccaggggactcccgaaccgccccgaacgcagcagctccggatacagtaaggcaatcagctgcccagccattcaactccgccctccgct

SEQ ID NO: 181544 - DNA, 122 bp, Homo sapiens
cgattcaggagagcctaccctaggcccgaaccctgcgtcctgcgacggagaaaagcctaccgcacacctaccggcaggtggccccaccctgcattataagccaacagaacgggtgacgtcac

SEQ ID NO: 181545 - DNA, 122 bp, Homo sapiens
ccattctaacagtgttctcggtattgaatcggcgctcaccgcagatttaagaaaggacatcgattctaacagtattctcggtatcgagtcggcgctcaccacggattaaagaaaggtggatt

SEQ ID NO: 181546 - DNA, 122 bp, Homo sapiens
acccggcccaatcccttacaactgcccaggactgctcctgagcagccgctgggagacagacggcaaccaggttgcccctctttgctccaggtacctctctcccctcagttagcaggcctcgg

SEQ ID NO: 181547 - DNA, 122 bp, Homo sapiens
aaagggcttcaggaggcaagagctgtttttcaaacccttccccttgtgcaaaattactttcgccagtgaggaattttcagtaatgagctgtctgtttgcacaactcttcagtgcatgtttgc

SEQ ID NO: 181548 - DNA, 122 bp, Homo sapiens
ggtgaccccgcgtcctggccaggactgtttgaccgggcctagggggagccgcctgcccgccgccaccagcatctccgccgcctacttgggcctcctcggggctcctggagccgggccgagag

SEQ ID NO: 181549 - DNA, 122 bp, Homo sapiens
tgatggcgaggagcaggaggtcccagtggtaggcagtgcccttcaccagcctgcagcagacgggcactcgtggacagagccccacagcagaggcccgggccccgcccaccccaccctcaccc

SEQ ID NO: 181550 - DNA, 122 bp, Homo sapiens
ctgtctttccttctgggaggccaaggcgcagctggccaagagctgcaaggtgctggtagacgcgcttcgacacaacgccgccgctgctgtgccattttttggcggcgggtctgtgctacgcg

SEQ ID NO: 181551 - DNA, 122 bp, Homo sapiens
gatttgtacgcttgcctccgctgtttccaaaggagtcggtggctcgaagtgcacgggaaacgttgtcaacagacaccaaagccgaaacccgcggattagcatattgtcctcaaaacaattag

SEQ ID NO: 181552 - DNA, 122 bp, Homo sapiens
ggccctcctcctttagctgtgggcggggctcaggggcgcgtgcgtcctgccctccctgtgcgcgcgccgccccagcatgccccgggagcgcgggcggcgggccccttggtcctcaggcggcc

SEQ ID NO: 181553 - DNA, 122 bp, Homo sapiens
ctttcctaacttgccaaccagaataacagccagagtcaatgggaaatgtttaggtggtaccgaagttcattcctcaaatattttacctctcacgtgcaaagcactggctagatcctgcagaa

SEQ ID NO: 181554 - DNA, 122 bp, Homo sapiens
tggtgggattccagcctcagggtggccgagctgcaggtgcagcacccggcctccaggtggcgccaatctgcttactttgaggtggcctcttgacaagcagctgagctgcacgcagtccctca

SEQ ID NO: 181555 - DNA, 122 bp, Homo sapiens
actcctgacttctcacaatggggcgtggcaccagcaatcagaagggtaaaggctgtgggtcgaatcagaaggtgcatcatacgtatgccgagatcagacgcctgtgacacggccaggaggtg

SEQ ID NO: 181556 - DNA, 122 bp, Homo sapiens
gctgggaaccgacaagtgtgacaactcctccatgtccctgcagatgggctacacgcagggcgccaaccagagcggccaggtcttcggcctgggccggcagatatatgaccccaagtactgcc

SEQ ID NO: 181557 - DNA, 122 bp, Homo sapiens
aaacctgctgaccttccagtctatggtctccatggtgttcttaaggtgtctcaggttctccgggaagctccccttcagtggcgggtacaccttcagggggtcagcattctacagggtagcag

SEQ ID NO: 181558 - DNA, 122 bp, Homo sapiens
gtggggcggtgttgtcaggaggcaaagagagactcaaatctgaaggtcagaggaacggtccggagtgtgggagaccagagaccgtcagtgtaatcttggattttgattcctttttaccactt

SEQ ID NO: 181559 - DNA, 122 bp, Homo sapiens
tgctgagtgacgggcagggcgagaggctggagatgctggagcgggactgactgtataggtcgtttacttcctcactgagccggctttgtgtccgctctgatcagggccccggggaggtagca

SEQ ID NO: 181560 - DNA, 122 bp, Homo sapiens
ctgtgttcaacagagcttactctggccaggcccagcctcagctcctcccatattcctctgcggatggagacatcagggacagttagggtcctaaacctatcaggggtagataagactctgta

SEQ ID NO: 181561 - DNA, 122 bp, Homo sapiens
acaaagacacattgagttgatttttatttgtttttctgttccagaaacttcatcaagttacgggcctggtctaagaaaacacattgcaatctattttggcagacttctttcaaataaaatac

SEQ ID NO: 181562 - DNA, 122 bp, Homo sapiens
gccgactgaaagacaaatgaaacccaggaatatctggttcttacattttagctttgactccgcccctgggtcccctcacctacccggaccccaagcaagccctttgtgtgtgtcaaccatca

SEQ ID NO: 181563 - DNA, 122 bp, Homo sapiens
caaaaataatgctaagtctcactttgcaaataccattcagagagccgtgccaggttgctgcgggaatgatgcaagttgccactcactgagcaccagcatgtgtggggagctctgttcttaca

SEQ ID NO: 181564 - DNA, 122 bp, Homo sapiens
tgtcacaaaaaaaaaaaaaaaaaaaaaaaaaaaaaagtatggtaatttctccattaacttcgatgctgctgtggtcttgatccccagatcaatgcaatgtcccggaatggcttccatttgcc

SEQ ID NO: 181565 - DNA, 122 bp, Homo sapiens
gacaagtccccagaggctgggacctgttcagggagcagccctgcggatgccaggtgcccgcgccctcagggtctcgaggtccgaggcccccgtccccgtgggcaccgaaacgcgagcggccg

SEQ ID NO: 181566 - DNA, 122 bp, Homo sapiens
aatctcttccctgcacacgaaggagactctgctctaacatgtggatctgactatctctcacgtacagtctcctccctgtacgtgaaggagattctgctctaacacgcggatctgactatctc

SEQ ID NO: 181567 - DNA, 122 bp, Homo sapiens
ccgcctcctgggcggaagagccaattgggccgcgagttgtggtttaaaccaggagtgcgccgcgtccgttcaccgcggcctcagatgaatgcggctgttaagacctgcgtgagtgaatggga

SEQ ID NO: 181568 - DNA, 122 bp, Homo sapiens
gtgtggtggggaccccgggggtctggggcggagaagaccgaggctcggagcctcacggggcgggcccgggcccttccgcgtgggctcagagctccacagacagctgccttcctgtgcctcca

SEQ ID NO: 181569 - DNA, 122 bp, Homo sapiens
catgattctgaagtcagagattccgtccataggaacagtaggggtgcagatagtcactagcgctacgtgactttcagttagaaggaagtgggttaaagtgtagcctgacaaatgctgagtta

SEQ ID NO: 181570 - DNA, 122 bp, Homo sapiens
ggcgaggaagaggaggattaggggagtccccgggggactgctcaatacagatacggtggacggacgtgtgttctcttctctgaaagccgtggggagcagggggcatggtgcacacagaggct

SEQ ID NO: 181571 - DNA, 122 bp, Homo sapiens
gtctaaccctcacatgtgctaattaactgcaaatgccatttctgggcttcacacacattccgtggctttcccttttctgatgtgacttccctcccttaccccacacctccctgcactgtccc

SEQ ID NO: 181572 - DNA, 122 bp, Homo sapiens
tagcgactgggacgggcctgggccgctgagttagaggcagtggggcctgggggctgcagacggcagggacggtgccccaggacgaagatcggggagagccgagttccagggtcgccagcaga

SEQ ID NO: 181573 - DNA, 122 bp, Homo sapiens
ggcaacgggatggggcaaacatctctgtgggtcagacgctggccttcgtggccaagtcaccggtttggcactcctccgcggatggccgtggtggtggcattgcggccaatcctgcctgggct

SEQ ID NO: 181574 - DNA, 122 bp, Homo sapiens
gtcccgaagcgaccttgaaatccctcagccacccagaggaggggtcattggagttgaagtcgggccccttggcaggagcggctgtctcccaaaatgttccccttcagagttctggtcccttt

SEQ ID NO: 181575 - DNA, 122 bp, Homo sapiens
gctccacaccctgttctgactccacagtctctctctgatgacagctcggagggcttccctcgggccgacaccttcctggagaccctggatgtatccggcaatcgtggtgcagaagaggggcc

SEQ ID NO: 181576 - DNA, 122 bp, Homo sapiens
ggcttccctgactcctcagggcctcaggaaggtactaccactggctggacccactgccctcggtgggacctattggaaggagctggagtggacagctctagctttcagtctgcctcagcacc

SEQ ID NO: 181577 - DNA, 122 bp, Homo sapiens
ggtcccggggctggcccgacgcctgccagatgaggaagtcctcgtagaaggggtcggcctcggccaggggccggtcccaggggaagtagcccgtgaggaggcagaagagcaggacgcccagc

SEQ ID NO: 181578 - DNA, 122 bp, Homo sapiens
gtcaagaggggcgcggctgcgtaagagcacacagacagacacacacagatgcaggcaggccggcaggccatccaccggcagaatgagccagaatttggacggtgcggtcagagaagacccca

SEQ ID NO: 181579 - DNA, 122 bp, Homo sapiens
tgggcctgccagggaccaaatcccagagtccgccgtgtggggtgagggccatttggcacccggctgaggggcctggtcagcaggctcctgggcccgcgtgctggagttactggcggcctgcg

SEQ ID NO: 181580 - DNA, 122 bp, Homo sapiens
agactgagtctcatatcctaagatcttttaaaactcatttccctaccgaagggtgtcattcgtaacgcggcgtggggctgggggtgtggatttacggagaaagaggtgatcacacttcactg

SEQ ID NO: 181581 - DNA, 122 bp, Homo sapiens
aggatgctgcgggggatgagctctcggtgctgccggatgctgaagtgccacgtctttatccgcatcatgtcgtcaaacatgaactccaggtacaaccggccctccacacacacctggggaca

SEQ ID NO: 181582 - DNA, 122 bp, Homo sapiens
taccgcctggaggccactgatctgtaaaagggatctctacagaagatagggatttttgatcgccagagaagaagggatatgtgagatccaaacgccgaaggaggaaagcaggctccgtggtc

SEQ ID NO: 181583 - DNA, 122 bp, Homo sapiens
gtgcgccccctggcgccgggtccgctgggcggggtggtgggcggggacggtgggcggaggcggaggcgggaggcggagccccggggttgggagtgcgggggtcgcggcgcagagtgggagcc

SEQ ID NO: 181584 - DNA, 122 bp, Homo sapiens
tggctgccagagcgagtgaggggcgcagaggcggcagagagcggagagccccggtgtctccgcgagggcggcggcggccagcagacggcgatcgaggcgcgcgccacggcacggccagcgca

SEQ ID NO: 181585 - DNA, 122 bp, Homo sapiens
aagctaggctctctctgcagcgtgccaagcaccactttttgagtctaggagatcagcttgcgtcccttgtgggctgagggccttggctagggagaagggcaggggttggcttccactgccgg

SEQ ID NO: 181586 - DNA, 122 bp, Homo sapiens
gctcagggcgcacacctggtaagcgcagcgcctttttctttctcttgtctgtagttaccacgaatataggataccactggagcccctcccccagtgcagggatggagagcgatcaagcaaag

SEQ ID NO: 181587 - DNA, 122 bp, Homo sapiens
tgcgtcacgcgagggggcggggctgccacgggcggaggtcgcagccggaagcggaagaggcgctcggagcggggagtggggcctagctgcagccggagcctgggagacggtaagtgtgggct

SEQ ID NO: 181588 - DNA, 122 bp, Homo sapiens
atgattttcctcctaaagcctcctttgctcccagcttcagaagcaaactctgcaagggtacgagtgtggcaaaaagagaaatggagatttctctcttttgctgcaatcccaaggcgtcaacg

SEQ ID NO: 181589 - DNA, 122 bp, Homo sapiens
gagacccgaggccgtcagaccgcctgtcaagggctgtcctggagcctggcaccttcccctcgctccccgtctgacccccagaggccgtgctgtccaggctgaccccgactctgagccatcgg

SEQ ID NO: 181590 - DNA, 122 bp, Homo sapiens
ctatcttattgctgtaaagagtcggttctgtcagtcttgggatctctattttaatgttaacgctagtcagttgtgtctaaactacaacagggagagggtataatgaggcaagacctatctcc

SEQ ID NO: 181591 - DNA, 122 bp, Homo sapiens
tctgattatctatgctttccatccctaaaaccaccaacacatagaggctactgaatctcccgaagggcctcggtgatgggcctgggcaggaggaggcccctgcagcctgtgggtggtgcatg

SEQ ID NO: 181592 - DNA, 122 bp, Homo sapiens
gctgcgctgcccgctgcggccggcaggggtagtccacggacaggcctggaggaggcgggacgggggcagggccgggaacctgggcaagccaataaaggctgcggcgcgcggctgcgcgggac

SEQ ID NO: 181593 - DNA, 122 bp, Homo sapiens
gtgccaggccacgcgggcctgctgggccagtttcttcccagactttctggttgtgagccccgaatggggccctggggactaggggaaggcattctatgccccggtgaggggcagccccaagg

SEQ ID NO: 181594 - DNA, 122 bp, Homo sapiens
gaagtcagcagaccctggaggaagacagaaaaggcctggagaaaaggggccgtcaccctccgctagagagaaagaaaaacctccagtcacggaagcccaggattttacacacaagtgtgctg

SEQ ID NO: 181595 - DNA, 122 bp, Homo sapiens
tcccggaacggagagttaagccagccagattgcctcggaaaaactgggtcatgtgcaggtcgccacctttgggtcaggggagaaaaggcgaagtcaggcgtgcaacccagcatcgcccaact

SEQ ID NO: 181596 - DNA, 122 bp, Homo sapiens
ccaaggcctctccaaatagcacgcgaaagcaatttctcatgcccctgggagagaggtaggcgtggctttatggatgtgataggcagaggacttaatattctgcattaacatctccttctctc

SEQ ID NO: 181597 - DNA, 122 bp, Homo sapiens
tgtgcattttggctcaggaatgtgccagcccaatgctggccaaatgagaaaaggctgctgcggcctggagaacacagcctcctgggaggatggtggctgttcccttgtagcttaggagagta

SEQ ID NO: 181598 - DNA, 122 bp, Homo sapiens
ctgaggctggggtgtccacctgagtccgtggagggaggagcgactacggtgcggtgggggcgaggccactcagggctttgtgacctagacagaggatttatgtgggtgattagctgtcacgt

SEQ ID NO: 181599 - DNA, 122 bp, Homo sapiens
agggagcgcggggcgcgggacccgagggaactttgggcgggcctgggctagggcgggtgccgcgcgggcctggggacaggccggggttcccaaggcctggaagagccgcccgctccggctct

SEQ ID NO: 181600 - DNA, 122 bp, Homo sapiens
caacagccccagcaccacccgcgggaccaaatgctgaagctgggagcggcgacagggaagcgctggctcccagaatggaggtaacggctgctgcggcctgggaggcttacccggaattaagg

SEQ ID NO: 181601 - DNA, 122 bp, Homo sapiens
tgccgcccgcggtggagacgggatgcgctcccgggtgtggggctgagggacgggcgccggcgtcgggaccctcctcacgccgcatcctcgcgtcgccaggcccggcggccccgggacggggc

SEQ ID NO: 181602 - DNA, 122 bp, Homo sapiens
attgggcagggaggggagggggaagactcaaatcagaggggctccaagatggccagtttgcggagggcctaactaaagaggtcaagagtttggcctttactccaaatgaaggaatccaatgg

SEQ ID NO: 181603 - DNA, 122 bp, Homo sapiens
gaaaattgggccgcctccacgtccagccattctccagcggccgggtttttcaaaacgctgcgcccagcgtctcgcgaggaccctccccccgggtcccccagctctgccgcggccgcgcccag

SEQ ID NO: 181604 - DNA, 122 bp, Homo sapiens
ttgggttcgctttccatcagccatgaacagcgggacagcccggcagccttgggcttccagcgctggcttcatcgccacctccctgccttctcccacttccgcattcttaggtgaaatgggga

SEQ ID NO: 181605 - DNA, 122 bp, Homo sapiens
taaagccgttatccactgttatcaggaccaggtagtctcgcccaactgggacagagcggtcgcccgaggaccggatctgcgcggcgcagtggcctaaaaaggaggccgagccagtccctagc

SEQ ID NO: 181606 - DNA, 122 bp, Homo sapiens
agcctaaggcctacaggcggcggcggtccctcagcccactgggaggccgggacgacagcccggtgtcccacagggcctctcagagcctgaggagccgcaagtcccccagcccggcaggaggt

SEQ ID NO: 181607 - DNA, 122 bp, Homo sapiens
ccaaagcaaagactccatcctactcctccccccacctctggaattccacctcccttgttgcgcccatcgctatggtgacgggcgctctcagtacactgtctctacaggccaggaaagagttg

SEQ ID NO: 181608 - DNA, 122 bp, Homo sapiens
ttcgccctttgtgctcttttatcgctgctgaaatccacatcaaaggtgggcttgttggatcgtgctttctcaggcaaaatgaggtcactttcttttctggtttccactgcaccccaacgctg

SEQ ID NO: 181609 - DNA, 122 bp, Homo sapiens
cgggggtgcgggggcggggagggggccggggtacgagcgtgtcggctcctgcctccgttgcggctgttgctgacctgaccagcttgaggcttgcgccaccctggtggcgctggttgggggct

SEQ ID NO: 181610 - DNA, 122 bp, Homo sapiens
ctggagaaaggagatggggagagtggaagaatcacagaccatgtgcagttctgagaaccccggtcaggtcagctgggaaatgtggtgcaaagatcacccatacgcaagtccatggagaccga

SEQ ID NO: 181611 - DNA, 122 bp, Homo sapiens
gcttgttcagggaaggaggctgcttcactgttgccacaggggtggtgaaccagttctgtccgcttcactccctggtgttcgcaaggcagttttcggaatcagaaactctagaggaatttgag

SEQ ID NO: 181612 - DNA, 122 bp, Homo sapiens
gtgagggcgcctgctgctcccgggcagtgctttccccaagtagtccgatggctgcggctgcgccgaggcgccctactcaggtaattgtggcgttttctgtgccctcaggtcacctcatcgtc

SEQ ID NO: 181613 - DNA, 122 bp, Homo sapiens
tcagctccactgggaccctgggggctgcagtgaccgtctgcttgttctgtgctttgttttcggtttccccgtgcagctcggattgggaaaatgaaacggaggaagcaagatgaagggcaggt

SEQ ID NO: 181614 - DNA, 122 bp, Homo sapiens
tttaattaatcaggttttaaaaatactaagtgttcctataagatatacacaccacttagacgtgaatacttcctaaaaacaggcagcacatgagcactgctgaggggcattgtgactgcatt

SEQ ID NO: 181615 - DNA, 122 bp, Homo sapiens
cctaaactattcgggctgtgttttgactcagcgagctcaaagtgggagggcaggagagctcgctttttaaaagatcgacagcgccatctaccggtaagagcgcccaactcccttgctaagga

SEQ ID NO: 181616 - DNA, 122 bp, Homo sapiens
tcaagaccagcctggccaacatggtgaaacccttctctactaaaaatataaaaaattagccgggcgttgtggtggacacctgtaatcccacctactcgagagattgaggcaagagaattgct

SEQ ID NO: 181617 - DNA, 122 bp, Homo sapiens
acccacctggcctcccaaagtgctaagattagttacttgataagaacatcccaaggaaatcgaaggcgtgagccactgcgcccagccagaagcacaatcttttgccccttctgttacaaaaa

SEQ ID NO: 181618 - DNA, 122 bp, Homo sapiens
aagactggactcctgggggtttggccctgggccaggacacctgcggccacctctcccacgcggccccaaacgggaccccagatccagccactgccaaggctgcaggagtagcccccctgccg

SEQ ID NO: 181619 - DNA, 122 bp, Homo sapiens
aggcttggggtcctgcagcctgctgggtgattccccctccccgcactcccccaatcctgccgctctgtcatctgctgtaccacgtgcacagtaccagggatccagaagagaaggctggttgc

SEQ ID NO: 181620 - DNA, 122 bp, Homo sapiens
ggtgaaggctaaacagtttccgtgacaggcttagcacggggcctgggagacccaagcgcgcggcaagctcgggtcctctctgtcggcaggtcctcacccttaaccggacccttgcgccgccc

SEQ ID NO: 181621 - DNA, 122 bp, Homo sapiens
gccttcccttggagtacagctggggtcacggatgagcacggagatgcctctcacactccgcggcttcaccacccacctggaggggactagaattcgaagtgcccgcgaaagaagcaaggttc

SEQ ID NO: 181622 - DNA, 122 bp, Homo sapiens
tgctgctgatgttttccctgctgcttttggtcacagatgagtctcctggcattgggcagccgcaccccagccccactctgcctggcattgctcctcttcagctctcaaaggctctggccctg

SEQ ID NO: 181623 - DNA, 122 bp, Homo sapiens
gagcatcgatatcctcgtgggcaagtctaagtgtcagacaataagcggaggagcggcgctcggagcgcgttggccccgctgtcagtcttgcccagattaacaacttcatctgagcctttgtt

SEQ ID NO: 181624 - DNA, 122 bp, Homo sapiens
cgcagcaccaactgctccccacaggtgcacagcgtggtgctgtcagagcgggacctgcagcgggagatcaaggcccagctggcccagctgcccgattccgcgccgggacccccgccccggcc

SEQ ID NO: 181625 - DNA, 122 bp, Homo sapiens
ccgctttggccacgggcggaggacacagggggaggtgactccggaccactgcaggttggtcgtgaagcccactccctccaacacctccggagcctctcccctctcactgctgccctccacac

SEQ ID NO: 181626 - DNA, 122 bp, Homo sapiens
gctgccggcgctcaccatcaaccctaccatcgccgagggcccgtccccaaccagcgagggcgcctccgaggcaaacctggtggacctgcagaagaagctggaggagctggaacttgacgagc

SEQ ID NO: 181627 - DNA, 122 bp, Homo sapiens
tgaagggagtagggcatgaagggtgtgaatgggccacttcctgaacctctcccctccagtcggagggcttaccaggatggagagagagagagagaggtgtgaggcatgaagcttccccaagt

SEQ ID NO: 181628 - DNA, 122 bp, Homo sapiens
acgatggctccgcctttctcctctgtagggagcatgcagttaagccttgccagcagagggcgctagagggccatcgcaggaggaaggaggcttctggttgcatttgtttttttgtttgtttg

SEQ ID NO: 181629 - DNA, 122 bp, Homo sapiens
ccgcgtggccccccgagccgcccagacccccgccccggcagcagctcctccagcggcgcgcggctccaacgccccagagcagctccggccccgcgccccatagccgcgccagcctcggggca

SEQ ID NO: 181630 - DNA, 122 bp, Homo sapiens
cggtaggcctctctctgggtcttcagaacagctctctccccgcttctgctatcttgctgacgcacgctgatgacgtaagccgccttgcgccttgggactgggcctgagaagggaggagttat

SEQ ID NO: 181631 - DNA, 122 bp, Homo sapiens
tcccttttgacggttggagggagctgctcagagcagaagcaccgagcccagcaccgctgccgccccacctgttaaatccacgtgagtcccatacacatgtgagaaggaaacaaacaatggag

SEQ ID NO: 181632 - DNA, 122 bp, Homo sapiens
gggcgcgccgcgttcccgcctctttcactcaacccgccaatcaggctgcgggaacgctgccgtggtagccaataagaagacagaatgccgttgcactacgctagagggcgggaggaggcgga

SEQ ID NO: 181633 - DNA, 122 bp, Homo sapiens
agctggggccgtgggggtaggggcagggctgggctgtttccggtccatctcgacatcccccgctctgtccttggcgtcaggctcatctccagacaggcagagcgtgatgctctcttcctcat

SEQ ID NO: 181634 - DNA, 122 bp, Homo sapiens
tgctttaagaatactcgggtgtcctccagctccttccacattctccaaccatcgctccggcgacccttcgacctggattcgagcctcggtcggggagaccctaacccagcggcgctagagga

SEQ ID NO: 181635 - DNA, 122 bp, Homo sapiens
gcagaaagcaatgcaaagtgactgctgtaggagcagctgctgaagctcatttccctcccccgatgcctgtcacattcttgggcaatatttcagaagcttactcatcctgccactcacttccc

SEQ ID NO: 181636 - DNA, 122 bp, Homo sapiens
tggcacaaaatcaccgccgcgctccagccttctccgccctctatggagaagccggagtaacggcctcagaaccgcagtgccgcatcacaccccacccctcgccgcccgccagcgccgcccgc

SEQ ID NO: 181637 - DNA, 122 bp, Homo sapiens
ctggggagaaaggctctgtgtgtatgtgtgtgtgtgtgtgtgtgtgtgtttgtgtgagcacgtgtgaggtctgagggcttcctgtcaaaatgaatttgcatgtatttgactttgaaaggaaa

SEQ ID NO: 181638 - DNA, 122 bp, Homo sapiens
gcgaaggcggcggcgcggcaggggttcagcagaggctgcagtgtgcagcggcggaggctgcgcgcggatttctcaatcagggccgcgcgctgaggtcttaaaggcaccggcgccagccgagc

SEQ ID NO: 181639 - DNA, 122 bp, Homo sapiens
gtagttccgactgtggcccgtgtatccttccacctccttttgaaccctcctaggtctcctcgccccgcccactcgctgggctgcagcttcctaccgttccgtactttccactcaacccggta

SEQ ID NO: 181640 - DNA, 122 bp, Homo sapiens
gagccgagggacccagcgcaaggcgggagccaagcgcggctgctttaagaacgcggagagcgcgcgcccgccgccagctggcccgggctgcgcgcccccgccgccaccgcgcgccccctgtt

SEQ ID NO: 181641 - DNA, 122 bp, Homo sapiens
gggccgaattaccaagggcggcgactcagctccatcctctgccacattgtatcccatgaacgttcctgagacccctgtcctgccgggtctctgggaagcgctgagggggtcagggagtaagg

SEQ ID NO: 181642 - DNA, 122 bp, Homo sapiens
accattgcagtcccaagcccttcacttgttgtaaataaatgaagtcattgccctgacccacgctttcttcctgagcaaggctgctcctcacgtggggtctctgaagtgagtcagagaaaaaa

SEQ ID NO: 181643 - DNA, 122 bp, Homo sapiens
acagaagaaggacttccttttcttcagtccttcctctttacttcttcagaaagcatgtgccgatagggagtggaaaacatccacacaggaaaaaggacgtcattctagattcctgactccag

SEQ ID NO: 181644 - DNA, 122 bp, Homo sapiens
actgtccatctctaaattgggcagcaatagaagccacgagccttcacgacattccgacatcgtcaccttttgtttgaaagaaggcaaaagaagtacgacagtgtatccttggattctgaaag

SEQ ID NO: 181645 - DNA, 122 bp, Homo sapiens
cagtgccagagagggacgaaccagggtggaagcgccaggagcagctgcagggagccctcacgcggaccacgcactctatggccgtagggagccgctgagagcgagaagagcacgctcctgcc

SEQ ID NO: 181646 - DNA, 122 bp, Homo sapiens
gccacctctctttttgcatagccaacaccggcctcttaggatcacctgggtcctgttggccgacttggaggtgctgccttttcaatgacaaggcgtttgttatgtgtaaagaaaggcgttga

SEQ ID NO: 181647 - DNA, 122 bp, Homo sapiens
aggttagagtagaacggagggatcagctcatgaattcaggatagttccctgggcgaaggccgctactcaccatataacagggagcaccagcatctcacattccctacttctctgccaaacct

SEQ ID NO: 181648 - DNA, 122 bp, Homo sapiens
caagtttcaaccattctaactcatcagaattttccaaattctccatgcctttgcacatgccgttccctcctggaaatgtcccattccccacccacagcaccctgaccactcaactcctatgg

SEQ ID NO: 181649 - DNA, 122 bp, Homo sapiens
cgcagcgattgggcggtggtgtgggagccccgggcaccggggagaacacgtgctgttctgcgccttctttgggatgcatcacgcggctcccgagcccagacttcgtccaggccggcgggaag

SEQ ID NO: 181650 - DNA, 122 bp, Homo sapiens
caacttttttaaagtttcaggatgcctttctcgttctctaggccctgctgcactggagcccggagccgtcactcctctatacttctggtgatttccgcattgattgcagattccaaggcaac

SEQ ID NO: 181651 - DNA, 122 bp, Homo sapiens
cttcatcaaaatcctctgaaggatgttgatttttgtttatcaggcagtcagtttggttaacgtcaggatgcgagttctgtcttgcctttttgtggtggttccagtgtcagttcagttctcaa

SEQ ID NO: 181652 - DNA, 122 bp, Homo sapiens
tgggctctcaagtgatcctccctccttagcctcctaagtcaagccttcacaaacaaactgcggtagccagtgtggggaagaagaggatgagcggtttagcccctttcttcccctgctggtct

SEQ ID NO: 181653 - DNA, 122 bp, Homo sapiens
caaggtcatcagctagaatatagcagggctgggattagaacccaggtctgtccgggtccacggtctgatctgaactcggcttcagttggtctggaatgcaccggctgcatctgatgatctta

SEQ ID NO: 181654 - DNA, 122 bp, Homo sapiens
gtgcttttccaacctgccaaagatcgtctgagcctcttagcaagcactcgtttatcatagcgagcctaggaggagggcgccaagcaaaacactaggtgtagtcttctcgagtagaatccagg

SEQ ID NO: 181655 - DNA, 122 bp, Homo sapiens
catcctttttcaccttgtaagtccttcccagtgccgcctctccactcccctttccttcaccgacagcgtctctaagatgaagccagagctcatttgaacggtttaaacttgcagaggggcta

SEQ ID NO: 181656 - DNA, 122 bp, Homo sapiens
cgccgcggtcgccagcgactactggtacatcctggaggtggcggacgccggcaatggcagcgcctggcccgggcgcgcagagctgctctcctcgcactcggggctctggcgcatctgcgaag

SEQ ID NO: 181657 - DNA, 122 bp, Homo sapiens
ctccgccccaggggagctccgggacaggcccacctaggcagcctgccggcgcagacccagcgagggaaggccagtctcgggcctccaaccggacacgcgctccccattccgggctctcccac

SEQ ID NO: 181658 - DNA, 122 bp, Homo sapiens
aaagataaaaatgcccccagcagaaacaatgaatagcaagcacacgcgtgccaccccacacgcggaagtcacacaaagctgatcgggtttcgtgtgctcctcgtgttccacggagcacctca

SEQ ID NO: 181659 - DNA, 122 bp, Homo sapiens
tcccctcctctggctgccttcactcgcctgtccgccccagagctcgctttccctcccgggcggctgtaccgttgtgggctacgttcagagaagtcccactattgccatgagcagggacataa

SEQ ID NO: 181660 - DNA, 122 bp, Homo sapiens
cattgcctctccgacagctcaaagagaaactgcagtgatttccacatcacagaaactcaacgttaagtctccacattcctttcctattacacctgcctgccacctgcagagatgtactcatc

SEQ ID NO: 181661 - DNA, 122 bp, Homo sapiens
ccttacttcacaggtgaggaaactgaggctcagacaagatgagtgactcgttcgaggtcacggagagaggcagtggcaaaaatctggattcgagacgaggtcacttccctgccttcagggct

SEQ ID NO: 181662 - DNA, 122 bp, Homo sapiens
tggtcgcctcctcgctgctgggttgggatttcagctttaagctcagagggaaggtggtaccgtccctggctcttccaacagacctctgaatcttgagattctgaaagaaaggcttgtcgttt

SEQ ID NO: 181663 - DNA, 122 bp, Homo sapiens
cctgcatggtccctgtgcgcgtcccggccgcggggccatcgcccgcctcgtccgcccgcccgaccacttgttaaggctccgcccggcgctccccgcgcccacgccccatcccgcgcgctcct

SEQ ID NO: 181664 - DNA, 122 bp, Homo sapiens
tgcatgaggagcgctcattatcctcgccggagccaacagcacctgccctccgctggagaccgtctttgcttagtagagccggcctgaccacagggaggggcaaccaccccaaggtcatgcca

SEQ ID NO: 181665 - DNA, 122 bp, Homo sapiens
agcatttcactagacctctgtctgtgtcggtccagtgtctttagccaaggtgagcttgctcgtggtgtgaagtgtgccacgaaaatgggctttcctgcactccacaaatgagagtgcttagc

SEQ ID NO: 181666 - DNA, 122 bp, Homo sapiens
cactataagaagcaacgatttgctactcactgttccgagttcttagcacggattaactcacgcatcacgatcttcaggattcaaacacaggcaggcagctccagagagggggcatccttaga

SEQ ID NO: 181667 - DNA, 122 bp, Homo sapiens
taatgatttattaattgattgaaagagggcgtcccaagaaagggacttgcgtctatgttgcgacgacatctttattgcaagggcaagaagcacatcccagacctttttgaaaacatcaggga

SEQ ID NO: 181668 - DNA, 122 bp, Homo sapiens
gcaccatcgcagccctcggtgtcaaggcctctctgagtcgcgctttgccttaccgtacctcgtttctgggctaggatattttgaaacacttttgtctattagctttatctaaaatagctaaa

SEQ ID NO: 181669 - DNA, 122 bp, Homo sapiens
ggtcgaggccccattctccaaaacaagaagtgagcctctgggagctgaaatctactactgcgaatcataatagacaccacccccgccccacctcctccctaacaatcagttaggaaacgctc

SEQ ID NO: 181670 - DNA, 122 bp, Homo sapiens
aaatgggtcatttcgcttggagagaggcatctggcgacatcggcagaaaggctctctgcccggtagacggtgaacaaaacccacaaaaccagccagccaacagcgtgcactaaacacccctc

SEQ ID NO: 181671 - DNA, 122 bp, Homo sapiens
gagccggagggcggagcgggagcgcagggcggagcacgggaggcggagcagggagcgacccgcctgccgccgccgccgaggcccgcctgccccgcagcgccgcgccccggcaccgcctgcgc

SEQ ID NO: 181672 - DNA, 122 bp, Homo sapiens
acatttgactgttaattcaatcaacaggtgtttctggacctatagcaaaatgtgtaattgcgccttattttgaagtagaaggatatatttgtttggtcacttggcatttgtgaggtacttac

SEQ ID NO: 181673 - DNA, 122 bp, Homo sapiens
aggagctaaagggcttccccaaggtcacacgttcagtgacggagaggcagggtggagctgcggtctccagactccattccagcctctatgggccccgggttgcggggggtcaccaatttgca

SEQ ID NO: 181674 - DNA, 122 bp, Homo sapiens
gcggcgctgcccgccggctccccgctcctggcccgcgagcgcccgacctcagggcgcaggcgtaggtgcatccggctttcccgccacgtgacctctcagttgctgacactagatagggcgtg

SEQ ID NO: 181675 - DNA, 122 bp, Homo sapiens
gcttggcggctccgggaggcggtggccgcgcggggccccgcccgcggctagggaggcggccgccctggcccgagcctgctgcccacggccgcggcactcagctcgcactccttcagcccggg

SEQ ID NO: 181676 - DNA, 122 bp, Homo sapiens
ggagattactaatgaatcctgcctagaagcaggggatggacaagatgacctcaaggttgacgaggctataaaatccacagtatagagctctgctgtggctctgtggctcccgctgcccttcc

SEQ ID NO: 181677 - DNA, 122 bp, Homo sapiens
aattcccctgtcttgataaattgtctctgcctaggcagtgggcaaggtgaacctgttgggcggttgcctctctctcccattctctatgcatacacaccaaggtaagaccatgtgaacacata

SEQ ID NO: 181678 - DNA, 122 bp, Homo sapiens
ggaaggagtcaaaggggccctgggccaccgtccatgagaggcccactgagtccgaggtcacggccgccaccgccagctcccccaggcggggctccaccggcagtggtgtgggcaggggcgct

SEQ ID NO: 181679 - DNA, 122 bp, Homo sapiens
acgtcagcttgagctctgggcaatttcagcctggcagtctcgcggcccggggaggggcggcgggtgtctgcagacgggctctagggcccagcggccgggcgccacggcgggggtggagtgta

SEQ ID NO: 181680 - DNA, 122 bp, Homo sapiens
ccttctggaggctctaaggagaatctgttccttctcttttctagttctagaggccatctgcgttccttggctcatgtccttctttcagcaatggcatcatcactctgacctttgcttccatt

SEQ ID NO: 181681 - DNA, 122 bp, Homo sapiens
taaagaattgtttagcgaaggaataagaaaatgtgatgcttggaagaaaaaacacactgccgagaggccttgcgctgagtgtgctgaacaatagacaacctctaaggatgctcgcctgcaat

SEQ ID NO: 181682 - DNA, 122 bp, Homo sapiens
ctagtatctgtgatatgctggttttcctattccttgaactaccttgaagttcctggtctgcggacataaggtggacttttcggcactcccattttcgctgtgtctacagcactttgggaaga

SEQ ID NO: 181683 - DNA, 122 bp, Homo sapiens
ccatatggggcggctttatggcccggtggccggatccggacgagaggaaggatgacttggcgctccacccacggcaaccattcgggaccacttccctggcctacaccgttgcctgtccgggt

SEQ ID NO: 181684 - DNA, 122 bp, Homo sapiens
acctcagttgatccacctgccttggcctcccaaagtactagggttacaagtgtcagccaccgtgcccagctgagatctgatggttttatacttgtttgacagttgctccttcacatgttccc

SEQ ID NO: 181685 - DNA, 122 bp, Homo sapiens
gcaggacggagcaagggcggtcaccggaggaaaggggagctcgggggtccagccagactgcgccctttcccatcagggcctgccgctggcctgctacgcatgcgcagccgcagcgctcggct

SEQ ID NO: 181686 - DNA, 122 bp, Homo sapiens
gcgtgtccccaatgtccgggctccagatgagttcctcggtcagcgccggcaggaaggcgtcggcccccaggggatctgggaaaaccagaggaaaggtcttgagatggatccccatctcaagg

SEQ ID NO: 181687 - DNA, 122 bp, Homo sapiens
taccggccctcagcttgggtgcatctcctccaccagctgccccgcgccgacttccagctccgcccggtgcccagcgttttcgcgccccaagagcaggaataccagcaggtgggaccgggcgc

SEQ ID NO: 181688 - DNA, 122 bp, Homo sapiens
ccccagcgccgggaaggcagctccgcggtgacgccgggcggccgtgccggttacctgaagcggggcgagtccttcagacactcctcgaaatccacagtcatcttcatcctgcctccgcctcg

SEQ ID NO: 181689 - DNA, 122 bp, Homo sapiens
gggggcggtggcattggtggcagcagaaagcccagcaggcaggcagtgggtacaaaggtccggtaggtggccaggaaggcgggcatgaagctggggtcctgctcacggtctccaaacaccaa

SEQ ID NO: 181690 - DNA, 122 bp, Homo sapiens
gtgtcaccagtgacttactggtcagtttaccataagggtccccctttgtgagaaatgaggcgcgtctggggtggagggacagaatcgacttgcaaagtgaggcttatgtaacagaggatgcg

SEQ ID NO: 181691 - DNA, 122 bp, Homo sapiens
attttttatttttttgagatagagtcttgctttgcccaggatggactgcactggtgtgatcgcagctcaccatagccccaacccctggggctcactcaggtgatcctcccacctcagcctcc

SEQ ID NO: 181692 - DNA, 122 bp, Homo sapiens
ggctgatcagcgttgagttgcccatcagcctcaggggaatgtccttgcagtgacgtgcaccgtggaagcattgcactgtccaatcctgtagtgtttccctcttttgggggacccaggattca

SEQ ID NO: 181693 - DNA, 122 bp, Homo sapiens
acagaaacccacacacctgcagggaactcactttccacaaaggtgccaagaacagaataacgatcacagggaaaggacagtctcttccgtaaacggtgctgggaaaactggctacgcatcgc

SEQ ID NO: 181694 - DNA, 122 bp, Homo sapiens
gcaggtcagtgggtgtgcgcaccgtacgcaagcagaagcagggcgaggcattgccttactcgggaactgcaaggggtcagggagttccctttcctagtcaaagaaaggagcgacagacagca

SEQ ID NO: 181695 - DNA, 122 bp, Homo sapiens
gttggagtgaagcggcttccttgcggttgtgtgggtgtcccaacctgggtcgagataccccgcggttcaaaggctcccccgcagtgctttttaaattgacatatgcagtgataacctgcttt

SEQ ID NO: 181696 - DNA, 122 bp, Homo sapiens
ccaactggtccagcttctggtgtctcccctcgctcaattaaaagccagctcctctcctttcggcttccccacggtgcctttcgggatttgtagtcagacgcgcttcagccggctctaaggag

SEQ ID NO: 181697 - DNA, 122 bp, Homo sapiens
attctgaagatgtgtcacttcctgtttcagactcaaatcagccacagtggcagaagcccacgaaatcagaggtgaaatttaataatgaccactgcccattctcttcacttgtcccaagaggc

SEQ ID NO: 181698 - DNA, 122 bp, Homo sapiens
tgtgtctgctactcctttgttacctcatctcaaacatgctcctccgctttccagatccctcgggccacaggtctccctgctgtttctccagcccggtgctgctctcctgccactgacccttg

SEQ ID NO: 181699 - DNA, 122 bp, Homo sapiens
tgagttgaaaagaggaagaggtcatttggtcgtgtctggattcctgagctgggccccagccggctctggcgccctccccggggtgcgctccgccagccgtgcgcctccggagctctgcccag

SEQ ID NO: 181700 - DNA, 122 bp, Homo sapiens
tggagataggcggccacaccatccgctgcctgcaccccggacaggacccaggcgagggcgcgggtcagccgcagctccaggacttgctgtgcatgagagtccagcagggcgctgcagcgttg

SEQ ID NO: 181701 - DNA, 122 bp, Homo sapiens
tcgggaagcccgcccagacccctggacccgcgcagcactccaggcgcacccctattaaagcgcaccccaagccatttcacatgttctgtggcaatgggccaggatccccatgagactcagaa

SEQ ID NO: 181702 - DNA, 122 bp, Homo sapiens
cggctctaggctctggagtcccgggagcagtgaggggccacccggggcacaggaaagggccgctaggggagggccgggtgcactcggggtgtctgggccgcgggtctgagggatgaggaggg

SEQ ID NO: 181703 - DNA, 122 bp, Homo sapiens
agggagggagggggcggggaaggccgcaccgccgcgctcgggagccgccgccggatcccacgcagcctccagctgtcggggaaactcctgcctgggcgcacgtgaccctcgccggccaacca

SEQ ID NO: 181704 - DNA, 122 bp, Homo sapiens
ggagcgagggggcgtggcctgccttgtcgcactctaattgggctttcgcaggaaagtgggcgggcgcggggcggagcttccgataacaacactcggagctggggctgtggctatttgttgct

SEQ ID NO: 181705 - DNA, 122 bp, Homo sapiens
gatgagccgcagacaaaactcctcagacacggagttaaagaaggaaggggtttattcggccggaagtatcggcaagcctcctgtctcaagagcctagctccccgagtgagcaattcctgtcc

SEQ ID NO: 181706 - DNA, 122 bp, Homo sapiens
gcacccgtcgggaggcagcaacggcgccacgtgcagcacgcaggtttccatgctgacccgcgtcagcccaggtgcccgccgctcctccagcttccaagccgaagtctccctggtctgaccac

SEQ ID NO: 181707 - DNA, 122 bp, Homo sapiens
gagctttccaagtcccaatttcttctgcttttacagttcagcctagttagttgtcctccacgccccccgccccacgcgcgtttgcgttttcttaataaacccacagcaagacctagggcggg

SEQ ID NO: 181708 - DNA, 122 bp, Homo sapiens
gtcatatttaaaaagtggtagggtcaatgaacagagaagctctcgatggtttcaagacagcgtctggatattaaagttagcaagccacaagccaccagtagtggtcagggagtaggagacta

SEQ ID NO: 181709 - DNA, 122 bp, Homo sapiens
tcaataaagtcacctattcattcatacgatggtttttcctctaattctctcaggtaggcacggcccccaccaggcgccatggactggaagacactccaggccctactgagcggtgtgaacaa

SEQ ID NO: 181710 - DNA, 122 bp, Homo sapiens
gtgtgtgggacctgaaggtggtcgtaaggctccgcgtgcggctcgtgcccatggcgactgcgcagaagacaggcggggttttttttctccctctaacattgtattacgatcattttaacgca

SEQ ID NO: 181711 - DNA, 122 bp, Homo sapiens
gatgccgctggaactgagggccacggaagaaagggggtgacacttggtcctggggagtggcgactgtattgtctgtctgcagcatccctatcagcgctaccgttgttccacgcacacaggga

SEQ ID NO: 181712 - DNA, 122 bp, Homo sapiens
tctactgcaaagctgtgatctttcttctgcaaggaattgcctctttcctaaacctcctggcgcctggttcccagcatgagaacttgtgactaaatgtaggtgacgggggcctatggcggccc

SEQ ID NO: 181713 - DNA, 122 bp, Homo sapiens
cacacatcacccactgctcgcaaaccagacataactgaggccaagtccggacgtggccagcgaacacggagggccagtttcacctgcagagttccaaggtccactcgccctctgatggtgtg

SEQ ID NO: 181714 - DNA, 122 bp, Homo sapiens
acacccccctccaatattaccacatttttatgatgaggaaaacggaggcacagagaggctcggtaaaacaatcaatgttacacagctagctaagcataggggtcaggactcagactaggcta

SEQ ID NO: 181715 - DNA, 122 bp, Homo sapiens
ctggagagagccgccaaaccctttgctgatgagctgagactgaccggggaactgtgatctcggatgtggttgaggatcaaaatcaaaattatagtcgactcttaaagaccaagtaggctcta

SEQ ID NO: 181716 - DNA, 122 bp, Homo sapiens
agggtgaagagaagccattgccacttccccttctggactcccagaaccgtgaggtctgggcggcaggagaaaccgctccatagactgactctaattcagagcctggaccgcctcctggagga

SEQ ID NO: 181717 - DNA, 122 bp, Homo sapiens
tggcctctgggggccacttccagccagtgcagtgctgtgcgtcccacgccagcctttccccgacctctgcaccagttccctccacacccggcccatgggcatccggccccagccgctcattc

SEQ ID NO: 181718 - DNA, 122 bp, Homo sapiens
accatcggtgagaataaatctcaatgaggcaaaaaattataatcaaagtcgttagtatttcggtcacaaatattgccaagatgagtttgttgttatagccatatcctggaacttcttttgtg

SEQ ID NO: 181719 - DNA, 122 bp, Homo sapiens
acctccagcgggcagttgccttgtgctggtggcttaggaaccggagcccgtcgctccaaccgttgcagctccacgctccagcccaaccgcggctctgaaggattgacccgccctggcgtgcc

SEQ ID NO: 181720 - DNA, 122 bp, Homo sapiens
cctagctgtgcgcattcctggaatggggcggatgtcagtatccacgcgagggtgtggaggcgacgctggggaagaagcagttcccgtgtctgcgacctttgtgaatcccggccatccgtcta

SEQ ID NO: 181721 - DNA, 122 bp, Homo sapiens
gtacgggcacgcgcacggggatagtgagttccatggaggcatcctgtagtagggaacccgcgacggtgacgccacagatggggtgcggaggctctggtggcccccaacctccatcaggccag

SEQ ID NO: 181722 - DNA, 122 bp, Homo sapiens
tgatactatattggtgaacgcatgtggtggcactcctgtaatccgaacacttttggaggccgagacgggaggattgcttgaggccaggaatttgagaccagcctgggcagcatggtgaaacc

SEQ ID NO: 181723 - DNA, 122 bp, Homo sapiens
cgccgctgccatattgggttcttactgtacaggctgccgctacggtcatgtgaccgctcccgcgcggccgtcactactgtacgcagccggccgcgcgaacgagcgcgggcgcgcccccgcct

SEQ ID NO: 181724 - DNA, 122 bp, Homo sapiens
ccggccccggcccaaggccctgcaggtgccagagggcctactgagcaatggggtgaataacggctcctaacccctttctggggtgtgggcaacagtggttggctccaggatttccattttac

SEQ ID NO: 181725 - DNA, 122 bp, Homo sapiens
ctttaatctataaaaatttcatgcacacaacctgataaaatacatcagagtcaagacatccgatttaagtattttaggcatatttaataaataacttcagtaaatagcactgtaaaaagtga

SEQ ID NO: 181726 - DNA, 122 bp, Homo sapiens
tagcaggctgccatgtcgcgggaggcgggctcatgccgcgtgggcacaggggcgagggcgcggtctcggaagcccaagaagccacactacatcccgcggccctggggcaaaccctacaacta

SEQ ID NO: 181727 - DNA, 122 bp, Homo sapiens
acaagaaaaagatattttaaaatattgctccattaatgggggactctctacttcccccttcgaaggggctggctttcttctaaaaccctagactctggagcataatttgaaaatcagtgggt

SEQ ID NO: 181728 - DNA, 122 bp, Homo sapiens
ggataaaagtgaatgaatagttaatggatatggcctctgtagatagaagaaagtgatcatcgaggacccagagaactgctgaatgagtttgctctgatccattgagacaagaagaaaggaag

SEQ ID NO: 181729 - DNA, 122 bp, Homo sapiens
gggaggaaggctctcaagtgccacgaaaattcccaaagcagcagagggcttgtatggaaacgccggttattcgtccctacccggcccccgccccccgcccccccgactgcccctgccgtcgc

SEQ ID NO: 181730 - DNA, 122 bp, Homo sapiens
ggtggggcctgggtttgcttcttacgcctcctcctctccgggacgagggggcaatgagaccgttcaattaaatgtttaattgagaattctggtatggtttctgggaggttagtcacagctgt

SEQ ID NO: 181731 - DNA, 122 bp, Homo sapiens
aagatggcgccgcgggcatttcttccactgcccgtctgagggaacgctaagtagtgtgtccggcgccgtgttccaggtaactgggccaccgtggccggggaacgcagacgcgccaccacctc

SEQ ID NO: 181732 - DNA, 122 bp, Homo sapiens
gggagggagggaagatgaccggaatgtcctgctgaaaactcagctgagttcctggcagtgcgtgacgtcaaggcactttaaatgcccctgatacagctccctcctgcccgctctcccttttc

SEQ ID NO: 181733 - DNA, 122 bp, Homo sapiens
ttaacagcgttggtcaggctggctccgactgtgcgcgtttcctcttgagtgcacctgccccgggctgttgtgcagtcgtgagtgtgtgtgtgttcattcacgtgtatactatctgtaaatac

SEQ ID NO: 181734 - DNA, 122 bp, Homo sapiens
agcccaggcagaggctggctgcagtctgggggctgtcggcctccacgcctcctatgctggcgttccttcttcctctctccgtctccctctcacgctggtgccagctcgcctgcttttttctt

SEQ ID NO: 181735 - DNA, 122 bp, Homo sapiens
attttttttaattaaaaaattagtcaggcatagtggtgaagtgaaaaagttcccttatcccgttcatagggcatgcgatgggggtgtggctcgcttcttccatgcccagctgctcaaacctc

SEQ ID NO: 181736 - DNA, 122 bp, Homo sapiens
cacctgagccccacggcggccgaggccaaggagaaggctcgagccatgcgagtcaacaagcgcgcgccacagatggactggaacaggaagcgtgaaatcttcagcaacttctgagccccttc

SEQ ID NO: 181737 - DNA, 122 bp, Homo sapiens
gtacgcccgcccgtgctcgcgtataagagacgcgatgtcctcgcgcatctcgttgatgaccgggagcaggaactgctcgaaatcctcctcgggctccagcacctccacttcctcaggcgctt

SEQ ID NO: 181738 - DNA, 122 bp, Homo sapiens
cgagcaggagtcaaagggcagcccccagggtgcgcactggcagcgctagggaggatcctgcggcgggcccgtctgctgcgcacagcccggccctgaaccctagggcgcctctgacactgcgg

SEQ ID NO: 181739 - DNA, 122 bp, Homo sapiens
gtgccacgtggcagccatgctctctctgctctggggaagaaacctgcttctggctggctacgccctgcacctgtgctcccctggtgtgcttggtgtgtgcatgtgtgtctgtgtgtgcttga

SEQ ID NO: 181740 - DNA, 122 bp, Homo sapiens
ggagcggaccgaccgctccaaggtgggccgcctggggcttggggcgggcggggcagggtgcgtgtggggcctcgggccgtcggtctactcatttctgatgttaagaataacgacagcctggt

SEQ ID NO: 181741 - DNA, 122 bp, Homo sapiens
cccgggatgatccttcagacatagtcctcaggccctggggctgaccagtcatcttggtgtcgagagttattatttcttgccatgtcagatagccttgaagtgttgatgcattgccaggcagc

SEQ ID NO: 181742 - DNA, 122 bp, Homo sapiens
ggcaccgctcctgttgctgcgaccgccaggggtccagtccgccggccccatccgggccttcgtggtgccccacagccacatggacgtgggctgggtctacactgtgcaggtaggtgccgacc

SEQ ID NO: 181743 - DNA, 122 bp, Homo sapiens
gcgggtcgcgccgggccgggccgctagtgcgcatgggcgggcgtcctcggctctaactgccgccactttccacacgctgggagggccgttacctcagagatacccgtggccggcatgttggt

SEQ ID NO: 181744 - DNA, 122 bp, Homo sapiens
tactcaggaggctgaggcaggagaatcacttgaagccaggaggcggaggttgcagtgagccgagatcgtaccactgcactccatcctgggcaacagagcaaaactcggtctcaaaaaaaaaa

SEQ ID NO: 181745 - DNA, 122 bp, Homo sapiens
tgtgatgtgtgcgttcaactcacagagtttaacctttgttttcatataaccgattgtaaacgctctgattgtcaagtctgcaagtggatattccgacctttttgtggccttagttggaaacg

SEQ ID NO: 181746 - DNA, 122 bp, Homo sapiens
cctggcgcggcggccggacccagcccgccggagggcgaggagctggacatggactgaggccgcggcggccgggagaggcgcgtagccggcccgcggccgctcgctcaggctccgactcacgc

SEQ ID NO: 181747 - DNA, 122 bp, Homo sapiens
gtctcagtgactgccgtggtgaccggtggggcttgtagtcacctcggaattgttaggcgacgaaaaaaactactcaccccaggtgtccctgcgtcagaggcgggtttctctcctgtctccct

SEQ ID NO: 181748 - DNA, 122 bp, Homo sapiens
atctggggacgtgagcactaggctggggtagcacatggactcccacagagccgaagctcacgtcactggtgcggggtgcgggggtggggataccgcgaccacctgaggctgggttcccggac

SEQ ID NO: 181749 - DNA, 122 bp, Homo sapiens
gcgggctcacgtggacccagtgtggggagcatcccctggggagtgtggagatgctccctgcgaggccgggagagtgggggtccgagaagacggcgcccacacgtagccctgaccgcgcgccc

SEQ ID NO: 181750 - DNA, 122 bp, Homo sapiens
catgatgtgctgtggcatatctttgaggagagccaagaaagagtcatttattccttggggcgtgaagtcattcagcctggtggggcccatgtgactcacctagcctcaaaatgtcatcttta

SEQ ID NO: 181751 - DNA, 122 bp, Homo sapiens
cgggtcggcaaggctatatttaaccagctatatttgctgtcccactcacttgtcccaacccggccccgcccgccacccctccccctcagcagcctgtcctgtcccactggggccgcgccgtc

SEQ ID NO: 181752 - DNA, 122 bp, Homo sapiens
gacgttcccctttcacagctcaggagaccaacctgtgcaggatccacgactctggccccacgtcgggccgggcatctctttcacgcagcagctacatgtcacatttccttttctctattctg

SEQ ID NO: 181753 - DNA, 122 bp, Homo sapiens
taaccaagagagctcactccaacttcaaaactgtgtgtaccatctccacatctttctgcacgtcttccccaatctctttactgatcttcaagtactctgccacagggcaggcaagcagcgag

SEQ ID NO: 181754 - DNA, 122 bp, Homo sapiens
tcaaagtccagggagcggccctggaaagccgtagcagaggccgtaaaaaaaagtttaaagcgtgaagcgaaattccacacccatccagcgctcatgccacaccgctcgccctcacgcacgca

SEQ ID NO: 181755 - DNA, 122 bp, Homo sapiens
attattaacatgtacaaagaaccagcttttatcttggttgacttgcctccattgtaaggtcggttttctaagtattatgagaggagttgatagagtatcccagaaagcaggataagaagtga

SEQ ID NO: 181756 - DNA, 122 bp, Homo sapiens
aaagaaaatattcctcttatttgtgacaacatggatgaatctggagaacatcatgctaaacgaataagccaggcacagaaagacaaatactgcatgctcttaattatatgtggaatgcaaaa

SEQ ID NO: 181757 - DNA, 122 bp, Homo sapiens
gtcagtctccggggaggggcgccctgggccggggtaagggagctcccaggcccgggatctcggctcaccggaccggtaccgcgcagcctccaactgccgttccatgcaggcgggcgcatttg

SEQ ID NO: 181758 - DNA, 122 bp, Homo sapiens
actaacaagattactgtagcacgcctattacaactctgttacccccagcccattactgtccgatgtcatttggaaccttggggaagtcacattcctgaatcgcatctgaacagcagctggaa

SEQ ID NO: 181759 - DNA, 122 bp, Homo sapiens
gaacacttcagtcctctaaaggtacttccctgtgtccacccaaactgctctctaaccgaacgcaagcaaggggactccaatgctctcaggccatgaactaatgaggagcttcatgcctgccc

SEQ ID NO: 181760 - DNA, 122 bp, Homo sapiens
gttgtgtgtttttgtggaatatggtggagaaggctggagtttgcagtgggggcagggtgccgaggacaagcaccctgaggttctggcttctcagccaagggtattaggaaaccaaatgccac

SEQ ID NO: 181761 - DNA, 122 bp, Homo sapiens
cgcctcgcagatgtccgcgccccggttacgttagacctgggaggcagaatccacgccctgcgctcacgggcccacgcacgcacagctgaactttgcagtcagtcaccatagttccagatcat

SEQ ID NO: 181762 - DNA, 122 bp, Homo sapiens
acgggcgaggctgttgcgctgcaggtgcccccacggtcgcgatgcggggcagggggatgccggtgggtatcatccctccacgtggagtccgcgcacagtaccagcccccacacggagggcgg

SEQ ID NO: 181763 - DNA, 122 bp, Homo sapiens
gccttctcctcggctgtggagccctggtggggggtctgcgcccggtcaccatgacgacgccggcgaatgcccagaatgccagcaaaacgtgggaactgagtctgtatgagctgcaccggacc

SEQ ID NO: 181764 - DNA, 122 bp, Homo sapiens
ggacaatcagcgctgaaatcttggcgttttgctgctgcgggcgtgagcactgggggcgttcgcccagcaccttcttcgggggctctttgctttgtctgtagaggttacgtgatctgcgctcc

SEQ ID NO: 181765 - DNA, 122 bp, Homo sapiens
tcaggcgcttactgtagctcacaggtccctcaggcctagcgtgctgggtacaagcactcccgcggctccccgactttgggtatttttcgggggtgagggcatctcaggctcgcgttacgggg

SEQ ID NO: 181766 - DNA, 122 bp, Homo sapiens
aatgtccatttcatagtacgtacaaaggaaacttagtgctctaggtttaccgggcctaatcgtgtttatcctgccccttcctggcacattccccaggggaaaaggcaaacccagactgctca

SEQ ID NO: 181767 - DNA, 122 bp, Homo sapiens
ctgcggatgagcagacttggaggactccaggccagagactaggctgggcgaagagtcgagcgtgaagggggctccgggccagggtgacaggaggcgtgcttgagaggaagaagttgacggga

SEQ ID NO: 181768 - DNA, 122 bp, Homo sapiens
gcgcgggtggaattcccgcgatctgtctcattccctgcgccgccgagaaaagtgagatcccgcgagactcccagggtatggtctctcaagagccctggaaacgtgtgtcggcgccgccggat

SEQ ID NO: 181769 - DNA, 122 bp, Homo sapiens
gtgatttgggggctttgtcaggaaagtggagcctcacggaaaagcatactggctaaaacacgcggcttcttcatcgactcaatctaatcatccccttggtgttcgtctgtgagaccccaggc

SEQ ID NO: 181770 - DNA, 122 bp, Homo sapiens
gcaccctcaaggaccatcaacttctcggttacccttcgcagccccgggggatcctgggctcgcgctagtggctgactgggaagctaagagtggctgggcaaaacccaagagcctccagtttc

SEQ ID NO: 181771 - DNA, 122 bp, Homo sapiens
gtaggtgaaaggacaaaagccagacacatttcaacatgagggacccactgacagattgtccggtgagtagctcagtgtggtttgtgtgcctgcgtgtgaggagggtggagggtggatttgta

SEQ ID NO: 181772 - DNA, 122 bp, Homo sapiens
gcttcagacaagcttccctcttcctcctccacgaccagaagcggaaaggtgctcccggaccgaaagggaaagaaggtccagcactgccccgcttgggaaggcacccacaaccagtctaggga

SEQ ID NO: 181773 - DNA, 122 bp, Homo sapiens
tggaggcctcgagtccggaggtgaaagatggaaaggcctgagggtgggcgctgtagaccccgctcccggtgacaagccccacactgacactacgccgaccaccgagaagtgaggactccaca

SEQ ID NO: 181774 - DNA, 122 bp, Homo sapiens
ggccacctcccggcgggggctgcggcggacggagcacacccagagtaaagttaaccaggccggtgtaaagcatgccctgaaaacgggcgatccttatatgcaattgtttgtttgtttgtttg

SEQ ID NO: 181775 - DNA, 122 bp, Homo sapiens
acagcgctgcccaggggtggccgcctagtacacacccacctggccgagctgtacctggcacggcccatcctggactgagaaactggaacctcagaggaacccgtgcctctctgctgccttgg

SEQ ID NO: 181776 - DNA, 122 bp, Homo sapiens
atgaaaggattatcccatcccaaaagccaacactgctgaggtggagaaacccagggatctcgccaatgagatgaaatcttccaaccagcagacttcttggcacctaccttcttcccatccct

SEQ ID NO: 181777 - DNA, 122 bp, Homo sapiens
ctgggcggtccagctgcccctaggggccaactccagcggctattttggggctggacatcccgcagcttttcaaggcgtgcctttggtttttttaagaagtgctatctaaaggaaaagctgga

SEQ ID NO: 181778 - DNA, 122 bp, Homo sapiens
tgggatcataaaagagcaggagagaaaggcttctgggggctctcggaagatggatgtcaacgcagagttttcaaggctgagtacgggttagccaggagaaagaagagaaggtggagagagca

SEQ ID NO: 181779 - DNA, 122 bp, Homo sapiens
cggtttgcccccaggcagcagaacaggaccgcggccggagcaggatgtgaggaggccagccgtgcccgcgctgtcacggtgtccacagatggtgtgtgagccactggttcagggactgcaga

SEQ ID NO: 181780 - DNA, 122 bp, Homo sapiens
agtgccttcgtccatggcgcttagaattcagatttgatagctgatggcacccaagcactccggcacgtttcatccaccggcacgaggggccgaagccgggcccagtcagtcttgcccacctg

SEQ ID NO: 181781 - DNA, 122 bp, Homo sapiens
ctgaaactggccccatttcgtgggctccatcgtcccaaacggcggggggtcagtggccaccgtactgggcatggcaaggtccttcgtggttcaataccgaacacgggcaactccttttcatc

SEQ ID NO: 181782 - DNA, 122 bp, Homo sapiens
tggctctccccacagcccccctcccaactcccaaatcccccggcgtcggagatgaggccccggatgctgccagtgttctttggggagagcatcaaggtgaacccggaacccacgcatgagat

SEQ ID NO: 181783 - DNA, 122 bp, Homo sapiens
tttgccaggtgttccaaattttacataaactcgtataatactgtaaaactggaccgggtgcggtggcttacacctgtaatcacagcactttgggaggccgaggtacacgatcacttgaggcc

SEQ ID NO: 181784 - DNA, 122 bp, Homo sapiens
agctgccccttcagggtgttggctctaggggcctgcccgggggacctgctgagaacagggcgcaggcgccataagagaatgggaagggctgggccgggtggagcgcagagccatgtggggag

SEQ ID NO: 181785 - DNA, 122 bp, Homo sapiens
cagtcaggccagcccagccccggaacctctcttccagtgcttgaatttccgccggtacagcgtggaaatgggcaggcaaagcgacttccggctcactccgcttcaagtacccgccgcttctt

SEQ ID NO: 181786 - DNA, 122 bp, Homo sapiens
ctgcctccccggcgccccctcctcattcatcctgggagatgaatttgtcgccttattggacgccgaggccagagccgtgtgagggggctcggccagcgctgtgcattttcttcatgcatatt

SEQ ID NO: 181787 - DNA, 122 bp, Homo sapiens
ccctctacgccccgaggggaatcccagggaaggttcccagaaatactacagtgaggagatcgcgggttggaagtcccagcacctgagaacacggtgctggcgctgggctcaagatttggctt

SEQ ID NO: 181788 - DNA, 122 bp, Homo sapiens
gagggtaaccgcaagacacaaatttcgtgttctgcaacacttgtgtaggcttcacacacacgtgcctccggggccgaaaacaggcgacaccatagcacttgggcactggtgtcacccgcttc

SEQ ID NO: 181789 - DNA, 122 bp, Homo sapiens
gcacgcctgacgacttctggaagtgcctctcggttttcgccatctgactgcgattgcctccgcgtctctcctctcattgtgtctcaagggtgtagtttaaaaattcaattcagacgaagctg

SEQ ID NO: 181790 - DNA, 122 bp, Homo sapiens
gaaggtaaggtttaagagtattaacacatttcagtcattgactcttataattgatataagcgtagggattttctaacaggcacacgcttgagatatgacactctaaggaaaaaagggagagt

SEQ ID NO: 181791 - DNA, 122 bp, Homo sapiens
tttgatagtatattgccagtttgtttaagacaggtatgattaactgcatcttagagaactcgtctgtcctggactgactgaagaatttctgcactttgccatgttccatttttccatggaaa

SEQ ID NO: 181792 - DNA, 122 bp, Homo sapiens
gcagttgcaaaggccctgaggtgggacaggaggcggttctcatgctacagcgcggggagccggagggtgaggggtcaggtgcccgctgagggcccggggctgtgctgctggccctgtgctgt

SEQ ID NO: 181793 - DNA, 122 bp, Homo sapiens
gatacttaatcacctgagatctcttcagtactatttatctggcataatctgataggtgcccgtccaattatttgctttgaatagatctatttctcaggcttaggggaaatagccattgatgg

SEQ ID NO: 181794 - DNA, 122 bp, Homo sapiens
ccgccccagacaccaccccgcctcgtgctctaagccccgcccctctctctggctttaggccgctcccaagcccagagctgctctgcgcaagcgcgaccgaccgagcagctccgaggagtccg

SEQ ID NO: 181795 - DNA, 122 bp, Homo sapiens
ctgctcagtcgtggccagcaggtcaaggtcgtatcccagctgttgcggcaggtcagtagccgagacttgtcctcgccaccccccaccaggcacgtctgtggccccctccaggcaatggcatc

SEQ ID NO: 181796 - DNA, 122 bp, Homo sapiens
tgacaattgcgactgacttagaaggtcctgaggagtgttttgacctgaaaatgagcccagcgtgatcaagggaagactgcagagttagaggtgggagcactgaggcggtggcagatgggtcc

SEQ ID NO: 181797 - DNA, 122 bp, Homo sapiens
gggcaattgtacaggtgggtgggctgaccatgttctgagcaattagcttggaacttgccccgaatgtgaaactgatactttctgcttttgttagaggccagaaatatcagcctttatttaaa

SEQ ID NO: 181798 - DNA, 122 bp, Homo sapiens
atctttcctagaagttccggtgtgagctgatttccagccattggggctgatcctaaaatacgttgttaggtgtaacatagaagtcaaaagccacatttctggaaactttggaagcacaaggg

SEQ ID NO: 181799 - DNA, 122 bp, Homo sapiens
tactggcttcattacacttgtacagccgagttcttcccgcattactgctgtttaatagaacgtgattagtcatcgccgagaagaaagcatattagccgaggaggtagtcacgcggcacgcgc

SEQ ID NO: 181800 - DNA, 122 bp, Homo sapiens
gaggcgggctcagctccagggcctccagtgcacccagctccccgcccagagtgccggcgtcgaagatggcctcccagtcaaagttgcctttgaggggttccagctcaccctgctcctccggg

SEQ ID NO: 181801 - DNA, 122 bp, Homo sapiens
gagggaacacatatagaagggattaaggggtagttgatgactctttgggaaaagagggtacgggagaagcaaggggaagaaagacatctatttgtcaaagagcaaaggcaaggcaaagctgg

SEQ ID NO: 181802 - DNA, 122 bp, Homo sapiens
ttctcctttttgtataagcttcaaatgtcacttccttaggaagtctttccccaccgccatcgtttctatgccctgcatagcactgaagctttaaaaaattatatttacttgttcactgtccc

SEQ ID NO: 181803 - DNA, 122 bp, Homo sapiens
tccccctcaatccttgtgctcaagccatgctggcctcctgctttagggcctttacacttgcggtaactactacctagaatgctcttctggatatctgcctggccggctccctcacttccttc

SEQ ID NO: 181804 - DNA, 122 bp, Homo sapiens
gtagtcctagctacttgggaagctgagatgggaggatgctttgagcccaggagttcaactcggcatgggctatgatcacaccactgcattacatcctgggtgacagagcgagaccctgtctc

SEQ ID NO: 181805 - DNA, 122 bp, Homo sapiens
tgttgagcagggtgctgtgcctgaggtagagcatgagaaattccagttgctccattcaaacgcttctccctgccgacccatgcggtgtgagccgctgcccgccctctgcccggtgtgctgac

SEQ ID NO: 181806 - DNA, 122 bp, Homo sapiens
ctggaggaaataagagacggggctaggttgcctttcctcctttgaaccccctggtgcagccggagcccgcgccccttaaagtgatctccagttgtccgaaaggcccgccagggatctggcga

SEQ ID NO: 181807 - DNA, 122 bp, Homo sapiens
ccgaaaggaacgagggatgatggggctccgggctggcggttagcacctgagcccccatcccggggcggcggcgccgggctcacctggatggccaagggcaccagcgccccctgggggctgag

SEQ ID NO: 181808 - DNA, 122 bp, Homo sapiens
agagtagtaaatcaattcaatacactcacacttctgctgtgctcccaggactacgagaagcgggtagggggcgactcccggcctctttcacttcgtaaaggccttcaactgggtctctcggt

SEQ ID NO: 181809 - DNA, 122 bp, Homo sapiens
tcaggcatggcgagctgcaggtcgtgagccctgcccagcgggaaggcagctaaggccccacgagaaattgagtgcagcgccggtgagccggcactgctgggggacccagtacaccgtccgca

SEQ ID NO: 181810 - DNA, 122 bp, Homo sapiens
aatgaggaaaacccagaaggggcggacggagggcaaagtcggcccaggacgatcttcaggcgcaccattctctcgccctggagggacagggaagggcggaagcggagggtggctgtccagcc

SEQ ID NO: 181811 - DNA, 122 bp, Homo sapiens
gtcacagtccctgcagcagagaggcagcccaaggctctgcaaatcactgccacttcatcacggctgcagccacccttgtgcaggccccagctcgaggtcttctcactcgatgctggtatggg

SEQ ID NO: 181812 - DNA, 122 bp, Homo sapiens
gatcagagctgtttccaaggactttctgaagccccacaagaaggccctctgcgtccgtcgcgcatctccggcctggcggggcttgcgtggctcacacgtacacgcatttctacggccagggt

SEQ ID NO: 181813 - DNA, 122 bp, Homo sapiens
gttcagcccgaggtggacaagaaaagtcccaccagggactggagcagatggggcgggctccggacccctgcctggtccaccatctgtcttgccagtcggtccgtctacccaggcagcccctc

SEQ ID NO: 181814 - DNA, 122 bp, Homo sapiens
gctgcgctgaccaatcgagtgtggcgtccatcgactggcgtctgccacggcaattagcgacgcgctcccccgcggcggtcgccccggcaacccagtgctgtaggttgccgtagaaaccgtgg

SEQ ID NO: 181815 - DNA, 122 bp, Homo sapiens
ggccttccccatccctcccgtcttggggaccgagggcaccatggctttatgttccatcaccgatgagttgcacagggattcagtccttccgctgttcaggccgggtccttcaggctcagggt

SEQ ID NO: 181816 - DNA, 122 bp, Homo sapiens
tgggggcaagagggagaagccaagaaagacagcccgggcgagagggcgaaaccccgggcacgcagcacccccagcaacccagacggggccgcgaccccagacagcgcctctgccaccgccct

SEQ ID NO: 181817 - DNA, 122 bp, Homo sapiens
tcgcggccaccattttgcctccttaatgaggacgcaggaggacggtctggaggtcacagccgctgcctccgagcttcccggtcctccgaaatgcctgccccgccgccggctagcgccgcgca

SEQ ID NO: 181818 - DNA, 122 bp, Homo sapiens
gaagtcatgtggattccatccatgaacgtgaactttttattgtggtttgtccgttccgagcgctccgcagaacagtcctccctgtaagagcctaaccattgccagggaaacctgccctgggc

SEQ ID NO: 181819 - DNA, 122 bp, Homo sapiens
ggggaggggcggaggggcagaggggcggggggacgggcggcgtagccgggcccctccccgcgccctgggcgggtcccccgccgccctagcgcctccgccgccacctccccgggctcggcgct

SEQ ID NO: 181820 - DNA, 122 bp, Homo sapiens
cagtagaggcagtgctggcccatggttctgccggaggcgcctccatgtttgcgggtgcaccgcacgccttctccctctctgtccccctccccctccctgtccttatctttcccttctgtctc

SEQ ID NO: 181821 - DNA, 122 bp, Homo sapiens
gcacttgtaaccccggctactcgggagtctgagccaggagaatcacttgaatccgggaggcggaagctgcaatgagcggaaatcaccagactctgtcttaaaaaaaaaaaaaaagcagtggg

SEQ ID NO: 181822 - DNA, 122 bp, Homo sapiens
ctccacgatgcctggctaattttttgtatcttttgtagagacgcgctttcaccactgcgccgggccaattgttattattttttttatggaagacggggcccgtgaaggccagagggccaacg

SEQ ID NO: 181823 - DNA, 122 bp, Homo sapiens
gttccagttgcagagactccactgccagagctcagaccacagcctacttccgggcgccgacgggagctcgctcactgtttactaacgtgaagtttgtattctttgtttggaacgctgatgat

SEQ ID NO: 181824 - DNA, 122 bp, Homo sapiens
tcattctggacagccctcccgtgaaccgtccctgtactggcacttgttgctggggactgtcgctgtcctctccctccccgggccaggtgtgtcctggagggcagggaagcgtcttggcacgc

SEQ ID NO: 181825 - DNA, 122 bp, Homo sapiens
aggaaccaggtgtcagaccccacttggaccttcgtgctgcattgtgcctgaataaccacacgagggcgccctcgcaccaacaaagaaacatgccttcaaacgttctcccaaagctagagcga

SEQ ID NO: 181826 - DNA, 122 bp, Homo sapiens
aaactcggggctcgcgactccccaggatctgacagtctggttaatgtccgtcattggaaacgaccactgaccggcgccaccttttactccgcggaaacagcctgccattcgcgccccgggca

SEQ ID NO: 181827 - DNA, 122 bp, Homo sapiens
ttcgtgacaagtgagaatggcagccgcaacacgtacctggtacactgcgagggctgtgcccggcgccgcagcgcaggcctgcagggcgtggtggtgctggagcagtaccgcactgaggagct

SEQ ID NO: 181828 - DNA, 122 bp, Homo sapiens
cgtgtcccctcgggtgtccctgtttactccgagcccgggagcgaggtgggggcgggtcctcgcggtccctccccaaccccgccccctccttcgcaggccccaatcccagtccggtcttccaa

SEQ ID NO: 181829 - DNA, 122 bp, Homo sapiens
cgggagccggcgaccacttccagttgctatggttacgagttgcaacctccagaaagaattcgtggtttcacccgggaaaacagctccccggattaaacggataggtttacacatactgatcc

SEQ ID NO: 181830 - DNA, 122 bp, Homo sapiens
catccccctatcctggctaatatgagtgactcttatttctttattaattataatgttaaccgctatctagtcttcctccatttagataagatttattaagatatgcaaccttagaattatac

SEQ ID NO: 181831 - DNA, 122 bp, Homo sapiens
agagtgaggcagtgttgcaacagcgggacaggaagagctggaggaggaggccacaggaggcgggaggaggaggcccaacgttctttaactctttgtagtccagtcacaagcacaggagtccc

SEQ ID NO: 181832 - DNA, 122 bp, Homo sapiens
cgggcccgcctcgggctgtccggcccgggaggcgctcaccatgcagcccgcctgctcggccgccctcatggcagacccccactgccttctcatggcctctaggccggacactcgggagcttc

SEQ ID NO: 181833 - DNA, 122 bp, Homo sapiens
gcgccaggcagggatggaatcatcattctcattgtatagatggacactgaggctcgagaacggaaacgacttcttttgagttgggtgcctctccccccttgccaggcagccgcctttctctg

SEQ ID NO: 181834 - DNA, 122 bp, Homo sapiens
agggcctgcgtgggatgacctcaggacttgggcgaccacagactcaggttttaacctggtcgccgagcagctcatgaacttggccgcatttctcctctctctcggcctgtttcccatcagca

SEQ ID NO: 181835 - DNA, 122 bp, Homo sapiens
ggcgccgagagcgagtgagggctgtgaggactgccagtatgctgtcacgtctcagtgtcacgcagactacttgcaggcaggagaaaaagaggctgcacagcacggcttcctgccagtcaaag

SEQ ID NO: 181836 - DNA, 122 bp, Homo sapiens
ctccttggccgcccttctctgttcactgggccttgatacatgattctctgaactgaaggccgcaccatcactcctctctgtttagtgcagcccgagattacactggcttttttggcagtcac

SEQ ID NO: 181837 - DNA, 122 bp, Homo sapiens
ggacacggaaggggaaacagaggaaggaaccacgagtgtcccgcaggtgcaagtcctgaccggggctatcttctcaagacacaggcaagttgttgggtggttggatagtcaagaggctggca

SEQ ID NO: 181838 - DNA, 122 bp, Homo sapiens
gtggctggggtggggcgaggatcggaggcggggctagagacggggaccaagtccggaaggcgtggctggggaggggcgagacccggggacggggctagaggcgaggcccaagcccggaaggc

SEQ ID NO: 181839 - DNA, 122 bp, Homo sapiens
aataaccctgccagccttagggctgaatggttaatgaaagctctagcatactgaatttagcggtgaggagaaatagtgtattagggtcacccagctagtaaggggtgagtctgggaagtgtc

SEQ ID NO: 181840 - DNA, 122 bp, Homo sapiens
aacacacagatctgcaaggcccaggcacagactgaacgagagaacctgcggatcgcgctccgctactacaaccagagcgagggcggtgagtgaccccggcccggggcgcaggtcacgacccc

SEQ ID NO: 181841 - DNA, 122 bp, Homo sapiens
gtcacaggttgagggggttctttccccgggcggtttggggtattggagtgaggtcaggggcgtgcccttggagtgcgcggccgctgtgacctctggccccttacccacattttactttctgc

SEQ ID NO: 181842 - DNA, 122 bp, Homo sapiens
ccgcacctggctaatttttgtattttttgtagagacagggtttcaccatgttgcccagaccggtcacgaacttgtgagctcgagcaatccacctgcccgacctcccaaagtgctgggattac

SEQ ID NO: 181843 - DNA, 122 bp, Homo sapiens
gcctgctcccctacccctcagtgccccttctccatacagcgcctccggttacacggggaacgcacgcgagtcacctagcacgatcgccccctcacccaccgcactcagcatcgctccacaca

SEQ ID NO: 181844 - DNA, 122 bp, Homo sapiens
ttgcagtggattgacctgtgcaaaaattggactctcaagctgctagccccagtgtcagcacgagctcggccgagttcatttggtcgcaggaacaagggggtcgccaggagcaagagcggagg

SEQ ID NO: 181845 - DNA, 122 bp, Homo sapiens
gagggggaagaaaccaccccaggcttaaagttaattaaccagcaaggctttactttccaccgccctcctgcaggctcttgcctcggcgcctcccttcccgatcccggctcgccccagacttg

SEQ ID NO: 181846 - DNA, 122 bp, Homo sapiens
gcagcatccctcccgggctgccgcagaccatgatcccggcaggatggggcagggtgcagccgcgcagtggacgccaaaaggcccgctccgccgtctccgcctcccccgctgcaagtggacac

SEQ ID NO: 181847 - DNA, 122 bp, Homo sapiens
ctgaactcccaaagtttgggctcactcctgccatctgatgagctgaggagacacatttggcgatttcttgctcttggtcctcccccttctccagggccattccgacagtgaccatccagaag

SEQ ID NO: 181848 - DNA, 122 bp, Homo sapiens
ctcccctcggcgggacctagaaactgcgcggaaccaaagctcgagggcggctcgagtttgcggaccgcggggaggaagcgcccgccggaagcagtcgcaagacctgagcatggcggccacca

SEQ ID NO: 181849 - DNA, 122 bp, Homo sapiens
ataccattttgattgggtgagggggcgggtagcaggatggccctagaccctgcctatggccgtttcctcgtgatataaatttcttggccggggctcttgcagatggagctgctcaccctgtg

SEQ ID NO: 181850 - DNA, 122 bp, Homo sapiens
cgcagtgtgttcccatctgtgccgcagtgacctgggagaggccacgctgaagattgtgggcgtgaccacggaagatgacggcatctacacgtgcatcgctgtcaatgacatgggttcagcct

SEQ ID NO: 181851 - DNA, 122 bp, Homo sapiens
tcccaatcccccaaaaacccgtacacacgttttaatttacgttaggaacggctctcccagcgggggaaggtgacctgcatcaggtggttatcttcgaatccacccgatacgatacccacgcc

SEQ ID NO: 181852 - DNA, 122 bp, Homo sapiens
ggggtgctgcagctgatgccccttggtctcctggtggtggaagggaaatgggactagatacgagattggcatctaagccatacaaaaaagctgtctcagacaggttgggccagtaagcacaa

SEQ ID NO: 181853 - DNA, 122 bp, Homo sapiens
tgacctacctcgttgatgaaggagtgggctccctgtgggctgagcagcaggatggcgcggcgaagcgtgtcccggtagcgattcagctcctctgtcttcatcgtggtgaagaggctggtgaa

SEQ ID NO: 181854 - DNA, 122 bp, Homo sapiens
aagaaataaggtcttgttctgtggaggtcagactttgtttattggaaatcagccctatcccgcctggttctggttagagacagaaacacttacttgactctagtcagacataggcatgggtt

SEQ ID NO: 181855 - DNA, 122 bp, Homo sapiens
gaggcaaaaggcaacgctgagtctgcccagaccacgcccacgacgggcccggcgctccagcgtctcctggagcctggccaccgttccttttcgtggtagctaatcccagcccacgctcttct

SEQ ID NO: 181856 - DNA, 122 bp, Homo sapiens
acctcaggtgatccacctgccttggcctcccaaagtgctgggattataggcatgagccaccgcaccctgccaactgtctgacttatcttaaaaggctaaggacctggtttgtttgtcaaatt

SEQ ID NO: 181857 - DNA, 122 bp, Homo sapiens
gctcagctcgcctgtccccgcctttcccaccctccctcccaactcaccctagttgtgaaacggtgcccaatttttccagttgtttcacgtgagcctgtgttcgttatttagaatccatgtca

SEQ ID NO: 181858 - DNA, 122 bp, Homo sapiens
gggcttgcagggacaaggcgaccgactgcgctgagctgcttatttattgaaaataaacgacggaaaagtctggccttgcctctgtgcaagcttggaggcctgggtcgccgctgtggacaagc

SEQ ID NO: 181859 - DNA, 122 bp, Homo sapiens
ggggaactgcagttttgccaagcgtctacataagaccgtgcggcggctggtgcccggctgcgatgtccgcttcctccgctccgaggatggcagtggcaaaggtgcagccatggtgacagcag

SEQ ID NO: 181860 - DNA, 122 bp, Homo sapiens
ttggccaccctcttagtgtcaaaggcagaagctatgagaaagaaggataggagagggatgcggaccagttttcaaatccggcaggaggagcaaggtcctggggagcatgtggtggaaggtga

SEQ ID NO: 181861 - DNA, 122 bp, Homo sapiens
accaggattggctgacctgtggctcgccgtggcagcctgtcccgcccctgcgtgccacctcgcaccttcctaaaaccccgaggctgcccgccatgttcagggccacctggtgtgaccgtgga

SEQ ID NO: 181862 - DNA, 122 bp, Homo sapiens
ggactgaaacgagatcattgctaaggaaaatggcaggtcacctttctttcagactcaatgcgaggaaggaatcttgcctctcgtctccttttacagtacagcgctgaggtgggggcggggaa

SEQ ID NO: 181863 - DNA, 122 bp, Homo sapiens
tcatccactccacaagcatccgtgaatacaaagcttgtgtcagacactgggccaggtgcacgcatccaaaggtgaatgaggtttaatctcatcttcagcaagcctgaggtctagagaagcct

SEQ ID NO: 181864 - DNA, 122 bp, Homo sapiens
cctggcatgaaaacatgcccaggctgggcccaggccactccctggcagaggacttgaccacgctgcctcatgacatagcttacaggaaggaacaggccctccctcctcacatggctggttga

SEQ ID NO: 181865 - DNA, 122 bp, Homo sapiens
atgctgtttctctaggtcagcaactaaacccagaaaacgtttattgagtgaatgatgaaacgacaggtgaatagatgaacgcaaggtgtcgagttaactattcttctacacaagtcctagca

SEQ ID NO: 181866 - DNA, 122 bp, Homo sapiens
ctcacctcggcggctccaccaccggctctgtgccgccgccgccgccgccgccgccgaccacggtgacagctccctgagcgcccgcacttccggggtcaaactgcgattccgcaggagcagac

SEQ ID NO: 181867 - DNA, 122 bp, Homo sapiens
caacgttaaaccaatccccaagcgcaactctgcctcccccacaccccacccgccgcgccgcgcggagccgtcctctagcccagctcctcggctcgcgctctcctcgcctcctgtgctttccc

SEQ ID NO: 181868 - DNA, 122 bp, Homo sapiens
acaagtgtcacttccaggttgaaatagtggattccccagactcacctttccctggtacatcgaccaatggcattatatggaaatggcaatgtggtgcagcgactgcatggagctcatgtcag

SEQ ID NO: 181869 - DNA, 122 bp, Homo sapiens
gctataggccccgccccgctgtaggccccgcctgctataggccccgcctgctgtaggccccgcctgctataggccccgctccgctgtaggccccaccccgcaggaaacctcgccccgctggt

SEQ ID NO: 181870 - DNA, 122 bp, Homo sapiens
agtggggaaaaaaagagactagaattctcagcagaacttgaggaatccaatggccagtaacgaagatgcctcccagagtctcctggccatgttccatccctcccctcagccaggtactgggg

SEQ ID NO: 181871 - DNA, 122 bp, Homo sapiens
ctggcgactcccagcctcccggctcggcgacacctatgccttaaatcgcgagtgagaccacgccggggaaaaagtttcataaggtggaatagaaaaggcaccaggaaacttgggactgagca

SEQ ID NO: 181872 - DNA, 122 bp, Homo sapiens
cctgtctctactaataatacaaaatactaataatacaaaaattagccgggcatggcggcgcgtgctagtcccagctactcgggaggctgaggcaggagaatcgcttgaacctgggaggcaga

SEQ ID NO: 181873 - DNA, 122 bp, Homo sapiens
ccagggctctctccctgcccccaggccagtcacaaccagggaggccttcagaaagactggcgaggcctcccttggacgtcagaacacccagtgacctaccctgagagactctaggcagtgag

SEQ ID NO: 181874 - DNA, 122 bp, Homo sapiens
tcgtcagggtggttgtgataaagaaattaaacagcgtttggtttgcaagtaagtgcctggcgcagaggagactcgggaaatgacaatgatcgtgcgaaaacccatgacttctggccagcagg

SEQ ID NO: 181875 - DNA, 122 bp, Homo sapiens
accaagagtgcagaaagaaacaagcactgtgccaggatgtaggagtcaagcctcagactccggaacaaagtgggaggattgagagccagtgaagccagtccatcagaatgccaagctggtag

SEQ ID NO: 181876 - DNA, 122 bp, Homo sapiens
cttgcagaaagctgcccggctccccacggtggccctgcgcgcgcaccatcctcgcggtctcgcttcttcgccccggaaaactctatgaggggcaccccagcctcagccgggttaagacaagt

SEQ ID NO: 181877 - DNA, 122 bp, Homo sapiens
cagcccggccgggctgcaggttctgagcgagggggcggccgtgcctcactctgggcgggacgcggcctggtgcagggacgctcacttccagtggcatttcccgtcttacacgatgagcttca

SEQ ID NO: 181878 - DNA, 122 bp, Homo sapiens
ccttcagccaatcagcggccccgcgtggggagggcgtatgctctcggcgggctagagcgccgctgaaacccgctcctcgttctacttggaggacttgttccagccagcgctagtgcgtgagt

SEQ ID NO: 181879 - DNA, 122 bp, Homo sapiens
tggtcatgatcttcatcctgtcgccagcgttgaggttccccatgagcagcgtgatgagtacgttcagctggctaatctgcgggggagagtgccttcgatgagacaccacgggtgcccacatg

SEQ ID NO: 181880 - DNA, 122 bp, Homo sapiens
cttcccactgtcagcctgtgtttacccatccctgcttctccagactgcataactccgtgtcggctccatcacccggcatccctccccgggattttaagagcctggccctagcgcgggctcct

SEQ ID NO: 181881 - DNA, 122 bp, Homo sapiens
ccgtccctgtagcagacactgacgtgttcccagaactacaggatggtgctctcggtgaagcgccccagcaaaacagtctccttaatcttcgtttgtttatctaattgagagcccccagagcc

SEQ ID NO: 181882 - DNA, 122 bp, Homo sapiens
ctgggctgggagcacaggaaggtccccaggactctgtggtcatcagtaagagagggcccacgtgtatatgctggtgaacagaaatgtcaaccttttcaaagtctgacatttaagagaaaaaa

SEQ ID NO: 181883 - DNA, 122 bp, Homo sapiens
gggctgaggcggcccccccccactcttctgctactggtcactttctctccgttttccagccgcttcctgtgccgaccgagccgccctctggagcccgccacccctccttgtcccctctgtct

SEQ ID NO: 181884 - DNA, 122 bp, Homo sapiens
gaagagtcttggcccccagtgttgagactgattcggcgtcctgaaataacaacccgctgccgaggcactccactcggaagggcgtgagagcctgacctctgaggctgaaattacagaccacc

SEQ ID NO: 181885 - DNA, 122 bp, Homo sapiens
cccagccgctagcactcatcttaatcgtatatttacttatctggctttcccaccagactgcgggctcttcaagagtaaatgccatgttttcacctttatttccccagtttgtggcacattct

SEQ ID NO: 181886 - DNA, 122 bp, Homo sapiens
gcgggaagcgggcgcggtgaccgaggtgcatcgagtcacgtccagtgctcgggccgtggtcgcctgcctggcaccaggactaagcgtttctatcggtcgccttcctccacgctgcgggctgc

SEQ ID NO: 181887 - DNA, 122 bp, Homo sapiens
ccacaaattcctcgggaaatacacagagaagatcccgctgccacttggcctttcccacggcgtggctgcccctccccggcctcccttgggcccggctggagcgcacagcgcgggacgccccc

SEQ ID NO: 181888 - DNA, 122 bp, Homo sapiens
acctcccaagaccctccctgggcccttttctctgacactttgttgttgttgttgttaagacggagttttgctcttgttgcccaggctggagtgcaatgccgcaatctcagctcaccgcaacc

SEQ ID NO: 181889 - DNA, 122 bp, Homo sapiens
agcccagagctgagaggcgccgggacgtgccggggaagttgtggacgtccagccagaggacgctggcgggcgggtggatggacaggacggacggccattgctgggcccagccccgcccctct

SEQ ID NO: 181890 - DNA, 122 bp, Homo sapiens
gagacatgaacctgtgctttttgggggcgggacagttggctggccaggctggtttggctccggccagtgtctggatagttaccaagccctattaatgttttcacctttaaattgttgtgtgt

SEQ ID NO: 181891 - DNA, 122 bp, Homo sapiens
ctagcacagttaggagcccaggtattgggcctggtccagcgtgttcccatagtaaatatgcgtgaatgtgctgagtgcttgagtattgattcatttatttacctgtttggctgttgctgtga

SEQ ID NO: 181892 - DNA, 122 bp, Homo sapiens
gctcgccgtccctttagttctgcccacttcgcctccgggttgtcagggcaaccgtagcgacgccggccctggctgagaggcgttaggagtccgggggttcgcccgcggaggccggggagcag

SEQ ID NO: 181893 - DNA, 122 bp, Homo sapiens
ggctcccatagtgttaggagggggcgagagtgctgtttatcgtcatttgcctcggagcttcgagagagggtggtattttgcttttccgccccgcatcctccggaactccctgcaccggagag

SEQ ID NO: 181894 - DNA, 122 bp, Homo sapiens
agggaagatgatagccaattgaatggaacatccattcgggggcggggtcaaagggggacacgcccccgttccgccccctcgttgcaaactacacttcccattgtgccctctcgcgcttcctg

SEQ ID NO: 181895 - DNA, 122 bp, Homo sapiens
actttagtgcttcatgtgcatcattgttttacacaatcttctaaggtagatatcattatgcgcagtttcagttcacaaataagccagattcactgagtaaacagcacaacctaggttctgag

SEQ ID NO: 181896 - DNA, 122 bp, Homo sapiens
ctaggtgtgtgcctgtgtgaactcctgggtgtgtgtgtccacgtacaccctgtgagtgcacgctaggtatgtgcatgcatctgcaacgcttgtatgtgaatgatctctaggtgtgtatgtgc

SEQ ID NO: 181897 - DNA, 122 bp, Homo sapiens
ctacaggagaaagtgattcagcagtgcacgtgcgcagggccgaggggaccctgggcctcccgggttcactgccacaaagcaccttgggcccatggggtccagccgaaggcagcagggaggct

SEQ ID NO: 181898 - DNA, 122 bp, Homo sapiens
atgcggctccctcctgatggcaccaggcatttctaactattgattggaaaagggctagggcgaaatcctggcctgacagctggggctggaactactgtggttttccattctgcgtggtcaga

SEQ ID NO: 181899 - DNA, 122 bp, Homo sapiens
atagcagggatgggacatgggtcttcctggggcacaaggaggcctctggtgccaaggtggcgaggcagtggcaggatgtcttgcgggagggtgtccagggtgggtttgagggacagcctggg

SEQ ID NO: 181900 - DNA, 122 bp, Homo sapiens
caaatcctcagggtagacgtgtgagcttagtaaatgagaggaatagcggacgaacctctccgtgtgtttgtgtctcgagtgccctcatctcaggagcaattttaataacttaacagttgcgg

SEQ ID NO: 181901 - DNA, 122 bp, Homo sapiens
gttactatgttactgtttctagttgttggttttgtttttacactagcctcatcctattctcgccccttctcataagtaataacaactacttttgactttcttaagcagaaccataaagcccc

SEQ ID NO: 181902 - DNA, 122 bp, Homo sapiens
ggaataaggttctgcggatagtgcaggacattggctctgttcccctcaagtcccgcggtccggaatcccgagctcgggtctttttctcttgccgctttgcccggtggttgcagggttcgtgc

SEQ ID NO: 181903 - DNA, 122 bp, Homo sapiens
cacgccgacggaaatttccttggcctgtccgtttgtttcgctttgtttctggccctgccacggcatggcccaggcctcgggagcctgtccgtgtgcagttctctgcaccttgtccgctccct

SEQ ID NO: 181904 - DNA, 122 bp, Homo sapiens
ttgtattctctcccagacctgccatgacagcctgaatttccactgctcagatttatgtgtcgtatgtcctggaataactgaactattggttattttctataaatactccatatttttcagtc

SEQ ID NO: 181905 - DNA, 122 bp, Homo sapiens
ctcggcctagcaggccaggggcagccgggtgtggggaggcggggaggtgtacggcggacacgcactgctcctgattatctccattctgcagagtggccggaaccttggccccacccgggccc

SEQ ID NO: 181906 - DNA, 122 bp, Homo sapiens
gggcactgaaataggagaattccttgagcccaggagtttgaggttgctgtgagccgtgatcgcactacggcattccagcctgggcaacagagtgaaaccctgccttaaaaaaaaaaaaaaaa

SEQ ID NO: 181907 - DNA, 122 bp, Homo sapiens
cgtccacggctaccaggtgtttcatgtctactgtgacttccaggaccacaagcccttttgcgcccaccatgtcttcacctaagagatcttcaaagcccagtatgtctctggcacccagtgga

SEQ ID NO: 181908 - DNA, 122 bp, Homo sapiens
agggcggcgccagaagctttgctggcattgaggagtccgggattggctcggcctccattgcgccccagcccagccccctccctaatttcacccggccctgtcccgctgggcccacccgatga

SEQ ID NO: 181909 - DNA, 122 bp, Homo sapiens
ggagtccggcgagtcgctgggggaagtcgagcagacacccagcgctgccggaactcggggcgcgcatcccgcaagtcggaacccggcggatcggatcccgcagatcggagacggggcctgga

SEQ ID NO: 181910 - DNA, 122 bp, Homo sapiens
aactaatctgactttcgcctccaccggggccaccaaccccatctacaggagccctggggtcgcaaccgtaatggctggcctgtgagccttatgccccccgcaacccctctctcggcctcagt

SEQ ID NO: 181911 - DNA, 122 bp, Homo sapiens
ggttcacatctcccaccatgcagctctcttcggtggcgcctggctgggcctgccacttctcggcatccagcacaatgaaggtacactctgaggaggaggtgacagggctatcacacacactc

SEQ ID NO: 181912 - DNA, 122 bp, Homo sapiens
tctaacttgtgagcagatctcacctctgctccttcgcctcaatgcggggacaggagtgagcggaggatgcccaacacctctgtcacctgctgactcccgagctgccttctggatccccacac

SEQ ID NO: 181913 - DNA, 122 bp, Homo sapiens
ttcctagggaggttataaatagcggtctcgtgcagatgccagcgggtggcagttagttgccgagcaagggacggcaccggtggcagtagccgtgacaccagtggctttgggtgaggtcacgg

SEQ ID NO: 181914 - DNA, 122 bp, Homo sapiens
cgaccccatacatttactgtccccaatttacagatagggaaactgggcccagagggaccccgaggtcctagaaaggacagaagcggtgccatgccttagctggggtcagctctgacagtctc

SEQ ID NO: 181915 - DNA, 122 bp, Homo sapiens
gcgccgcgcccggcctccgcctctccctcccggttctggtggtagtcctggcaaccgcgacgctgtgctaaggaatcccgcctggaccaccccgccgcccgggaggccccctccacctgctt

SEQ ID NO: 181916 - DNA, 122 bp, Homo sapiens
ttattctaattaaggctcaatttaaatccttcccacaactcccaattaaatggggagaaacgtacttgaggtcagggtcagagttccttgactctgtatccagagaaggaccagaacacagg

SEQ ID NO: 181917 - DNA, 122 bp, Homo sapiens
aaaaattgcacttacataaatagataaggcatattatttgtattatctgctgacaacatccgtgatgtgtgcatgtgtgtgctgcgtatgcacagagcttcctcactataatttcaggagct

SEQ ID NO: 181918 - DNA, 122 bp, Homo sapiens
gctgtcactcagggctctgaaggcgaggcggggagcacggtccaatcaggagcgccggggcggggccctgccaacttttttcggggaaggagacggctgcaagcccgcggtctcttgttgct

SEQ ID NO: 181919 - DNA, 122 bp, Homo sapiens
tcccgccccgaggagcccgccctacactagccagacgggggagcgggaccaagagtgaggcgaaaggttcacagttataactgcgccgtgggctggaaaggctaggagtcaggatgtgattt

SEQ ID NO: 181920 - DNA, 122 bp, Homo sapiens
gttttttaaaatctgaaacattctagttgcaaatcccattactgcctctatagaatcctgcggttttgattttatctaatcccagcatttaacagcaactgggcagctctgctatatccggg

SEQ ID NO: 181921 - DNA, 122 bp, Homo sapiens
tcagaaacacacacactggggcattcacactcttatgaggcatgccgatgctacaacggtcgcccacatacactctgggcaccagaaacatacaggccccttagaaatgggcttgggagaag

SEQ ID NO: 181922 - DNA, 122 bp, Homo sapiens
aggccggcctcacctgtgctgtttgaggaaagatgggcctaccatggtgcatgccttctgcgaagcaggcacttgccacctttaacgcttcgcgtgtgtattttactagctcttgaggaaga

SEQ ID NO: 181923 - DNA, 122 bp, Homo sapiens
ctgcagagccgcggaacctgctaaggtgaacctgccacagggacggttactcactctcaacgtgtgcaaaggcacagaaggggccgcgcgggcagtacccggtttggcgcatgtcgttgcat

SEQ ID NO: 181924 - DNA, 122 bp, Homo sapiens
atgagctgtgccttaaactacatatcctacctccatgagtgaatgaataagtgggttttccgcctgcatctatgtgttaagacctattgtttgcttgtattaattgtagtcctgggataaaa

SEQ ID NO: 181925 - DNA, 122 bp, Homo sapiens
ctccagaatggggaaaggtccggagtcttgctgaatggcaactatagcactgcagccattcgagtgtgacttggggcatcccaaccccatgcctggactcctcattacccactcctccagtc

SEQ ID NO: 181926 - DNA, 122 bp, Homo sapiens
tcagtgatacagatgttttgatgaatgcctatgggagagaagatagttagagccagattacggaagaaaactatgcataagaaggccctagtgtatacttctgagatctggagcaaatgtgg

SEQ ID NO: 181927 - DNA, 122 bp, Homo sapiens
ggcgccacggggctgcgggccaccgtccgggcgaaggtctgcagcgcctcgtacttggagcgcagcgcgtcgagctccagcttcatgctggcgttctctgaggccagcttctccacctcctg

SEQ ID NO: 181928 - DNA, 122 bp, Homo sapiens
cttcccttgttggaagttcacagggtgcggaggcatcattctctactttctcctcttccccgcccctttttccctgtctcctcccccagcccctcccctgcttttcttctccttcccctcct

SEQ ID NO: 181929 - DNA, 122 bp, Homo sapiens
ccctttgggggcgggcctcgggacagtggacgaaggtgactctctggatggaccagaatacgaggaggaagaggtggccataccgttgaccgctcctccaactaaccagtaagttaagactg

SEQ ID NO: 181930 - DNA, 122 bp, Homo sapiens
aaaggccaatctgcctggccccatgtatccattaaacaaactaagggtgtagcctgtatccgtgagataagtgctgtgtgctttcagagggccaacatttaggtgtctaacacagtttctta

SEQ ID NO: 181931 - DNA, 122 bp, Homo sapiens
cgacccagagcaaggttactgcttggtctttgggaggaagttcagaagaaagtctttggccgtattaatagtgttaggttttactgtgaccatgtcattctcagggatgtttgtatatcaaa

SEQ ID NO: 181932 - DNA, 122 bp, Homo sapiens
gccactcccggcttcaatacgttctccccagaacccaaacttgggtgaagtttcacctcccgcggggcgcaaggagacgaagccgggaggctccgcgcagcggccgcgatggcggcaacggc

SEQ ID NO: 181933 - DNA, 122 bp, Homo sapiens
cctccggctcctgtggccgcgcgctggcctggaggctgacctggaggctcatctggaggccgagctgacccggcaggccttgcgcgggcaacatggcggcgcccggcgagcggggccgcttc

SEQ ID NO: 181934 - DNA, 122 bp, Homo sapiens
agggttaagaggtgcggggagaggggagtggcttggaggggccccgagatcgggcctcgccggaagcgcccctcctgatcgccagagaacgcagccccaagggagggcccaggcccgccatc

SEQ ID NO: 181935 - DNA, 122 bp, Homo sapiens
cttttaggagacttcagccaagctctttgaaagtaggaggaagttcctgcaggtgagtctcggcagacatcggggatggaacctaggctgacttattcattgtggctttgctggtgcagcag

SEQ ID NO: 181936 - DNA, 122 bp, Homo sapiens
agctggtttttcaaaagtcatggcgtgtaactgtccgaacagtgaacttcggagatccaccggaggggcgaggccacagctcgaccgcgagcacctgagcatcctgcaccgcctgcgacggc

SEQ ID NO: 181937 - DNA, 122 bp, Homo sapiens
cgcggtgagtgttgcagttcctaaaggcggggtgtccggagtttgctcgttctgatgttccgatgtgttcggagtttcttccttctggtaggttcgcgctctcgctagctcaggaatgaagc

SEQ ID NO: 181938 - DNA, 122 bp, Homo sapiens
cgcagcgagcgagggcagaggccagcagaggcgaggagtggatgctgcagggccgcaggccgggcagagaaacgcataccgggtcgctccctgcttcgccgccgcctcctggcagggccagc

SEQ ID NO: 181939 - DNA, 122 bp, Homo sapiens
catgactgtgacgttagccacgcagtgacggctaaggctaagccatcaaagacctccaaccggacatgttgcgatgctcacttttggaaagtagccaccgtgctgtgaggagggcacgctgc

SEQ ID NO: 181940 - DNA, 122 bp, Homo sapiens
agcctcaggtttctttagtctggctgaaccaaaaggagtttctgcttagctaggcagggccgggggacaacagcttctgcgagtctgcgattgtggcggccggtatattcggcggtttacgg

SEQ ID NO: 181941 - DNA, 122 bp, Homo sapiens
cccaaatccagtccttctccgaccaccatcacgactcccacgcctagaatgcaagctccccgagggcaggggtttccttggttcgcagatgtgcctttggcaagatcctggcccataggaga

SEQ ID NO: 181942 - DNA, 122 bp, Homo sapiens
gtgttgatgtttttctggatttgggggtttattttcttattacacattttgaggaaaaggcgcattgaagagagcagaaggtgtcataggcagtggaagtctgatctttctttgcaactcaa

SEQ ID NO: 181943 - DNA, 122 bp, Homo sapiens
cccgccccactcctggagcctccggtgtgtgagaggcacctttccttggggtcaggggcccggactctgaagccggcctggctttgcctgtgggccccgatcctcccagctcgagtccctcg

SEQ ID NO: 181944 - DNA, 122 bp, Homo sapiens
ttcagtgggactgccccgttaccagcatcactctactccagtgtgtgacagaaaagatttcgtcctcaacttcaatgggatttcttctttccatccctcagctagcgggtcgtattatcacc

SEQ ID NO: 181945 - DNA, 122 bp, Homo sapiens
ccagtttctatctcctcatccagggcttgcgggcgaggcctgttttaagtctccagtaaccgagcggaggcccggcaggcgcgacccgggctgcgtacgtcagagctgcctccgaagtggta

SEQ ID NO: 181946 - DNA, 122 bp, Homo sapiens
tccggcgtcttttgtggggcgagtcctggcgagggtgtccgccgtcaggtgcacaggccccgtgctcccctctgttcggcaggagatcggggacttccacaggcgggctgggtctgttccca

SEQ ID NO: 181947 - DNA, 122 bp, Homo sapiens
cacgatgacttcacgtcagtgccagcatatgcagccgtggaatacagtgagcgctctctgcggctgacagcaatagcggtgatctaatttacccggcgactggaagaaactctttgtacagg

SEQ ID NO: 181948 - DNA, 122 bp, Homo sapiens
agggaacaatcaagcctgcattttttcctgtggatttttattactttttgtaccccctatcgagttgcagattatccaaaaagaacagaatgccatttacaccagctgttcttacagttcca

SEQ ID NO: 181949 - DNA, 122 bp, Homo sapiens
tgacggaaatgctgggaagacctctgtggccaaaagcagacccaggaggacttttgtggccgagagtggacccgagaggacctctgcggctgagcagacctgggaagacatctgtggccgag

SEQ ID NO: 181950 - DNA, 122 bp, Homo sapiens
taccagcagcttgtattctgcacctggaaaagccacaggcactcaactgcagcccatgagcgcagccttggattctttaccctgcaaagccataggggcaggactgctcaaggcctggggag

SEQ ID NO: 181951 - DNA, 122 bp, Homo sapiens
ttttatttgctgcagaattcccaaagaacattcagatccatatacatgagattcctgctgcgtttagccatacatttgccagacttgtgatgtcgtttattccctgtgaaagctcaagtgca

SEQ ID NO: 181952 - DNA, 122 bp, Homo sapiens
ccgggaccctcgcctcccacacattgtgaggcgtgaattctctttgggtaggctctgggccggggccatcctcccgcttccctggtggagcccttctgtgacagcggtcggctccatggcgg

SEQ ID NO: 181953 - DNA, 122 bp, Homo sapiens
ctgaaggagcttagagacatgacaactgaatgtagtgtgtggtcctgaactggttcctttcgccataaaagactaacattactgggacaattggcaaaacttgggtggagtctgaagattag

SEQ ID NO: 181954 - DNA, 122 bp, Homo sapiens
ccgggagcacacagcctgggtggtgaaggcctccctgcagaagcgtcccgacggccacatcgtgagtgtgaggtgaggagcgccgatatttagcagccgttctgctgtaaaaacattatttt

SEQ ID NO: 181955 - DNA, 122 bp, Homo sapiens
ccgtgtgttaagcacattcatgttgctgtacaacagatctgtggtctctcctctaacacacgagcaccaggacagacggcatagctgtcctcggcgtggtaggtgggtgagtattcagcagc

SEQ ID NO: 181956 - DNA, 122 bp, Homo sapiens
actctttaattttttgttttaagatatgtttttttgcacggcacctaaatttcagaggatcgcgttagtcacactgaaaagctaaagctttgactcactgatttgtcacttaattcatatca

SEQ ID NO: 181957 - DNA, 122 bp, Homo sapiens
ccgacgagaagaaagccgaggggaagcggaagtgccggatctgtttgggtcacgtgggggcggatgtcgacgggtgccgctgagaaccataaaacttctggccctgctgccaggactttccg

SEQ ID NO: 181958 - DNA, 122 bp, Homo sapiens
ggggacttccaggcacccaccagctgccagttgcgtgtgtctgtgagcagattaaccatccgaaacaccgcttgggtcggcttcttccctactcgcaagtcctccacggctcccttgtcgga

SEQ ID NO: 181959 - DNA, 122 bp, Homo sapiens
agggaagtgcgcggtgccacggaccgacacagttcgctctagcatctgacgctcggactccgcgccctcagccggatcccagagcccttccattcgccaaccgcccactgcaaggcatgagc

SEQ ID NO: 181960 - DNA, 122 bp, Homo sapiens
aggagtgataactgctttggtttctgcttcctgggcaatgttaagtgcctgcaaagggagcgtcacaatgctggatgatgaaatcctttgtaacctcaaaaagctcaggaatcagagacact

SEQ ID NO: 181961 - DNA, 122 bp, Homo sapiens
cgggggcagctttcgcggctcctcccctagccccgagccccctcgcgccccctctccctgcgtctcattcaaagctgagtggggaaggcagacagaccgagaagtatgggagaaagttgctt

SEQ ID NO: 181962 - DNA, 122 bp, Homo sapiens
ccccgcccactccagccctgcccctcaccttctggtccctgggtctgcagaaacaggaggcggggtcagaagcgcttagaggtagccccacccatcctgccccacccctcaccctctggtcc

SEQ ID NO: 181963 - DNA, 122 bp, Homo sapiens
cggccatcagaggcaagcatgctggatcccagagtcgaggagactgtaggacagcagtcccggagactcccaaggggatgttgggggtgtaactgattatcatggaccactttgtaaatatt

SEQ ID NO: 181964 - DNA, 122 bp, Homo sapiens
ccccagtagctgctcttggcagcatggccggcagagggcaccctctaccttccctagcttcgttctctgggtcccctcctcctcctcgcctcccctccaccccggtccctcatccccgctct

SEQ ID NO: 181965 - DNA, 122 bp, Homo sapiens
aatgtccccgaaaactgcgtgctccagtatcacttgaatgcccaccgggttccggaatcacgagtctccagagctgtcccttcgccccacggctcacattccaggtctgcccctcagtgact

SEQ ID NO: 181966 - DNA, 122 bp, Homo sapiens
caaactgtggtctttggcagagatcgccacatcgtcggacaaggtcaaggacgggggcggcgggaacgagggctctccatgcccaccgtgtcccgggcccatagccgggcaagccctaggag

SEQ ID NO: 181967 - DNA, 122 bp, Homo sapiens
ccttgcatctgcatgcatgcagccttggcgttttctctagaaaaaagagaggttctacctcgtgcatgaatacaggtggaggccaagaccagcattaacaaaggctgtgtgtttgccatgga

SEQ ID NO: 181968 - DNA, 122 bp, Homo sapiens
tgaaacaggctgctgggacttacccagagtttctgattcagctgatctagggcagagtctcgctctgtcacccaggctggagtgcagtggcaccatctcgactcacttcaacctccgcctcc

SEQ ID NO: 181969 - DNA, 122 bp, Homo sapiens
cacatgcacacacacacactcacacactgtgggcacactacatgacatgagaccaaaactcggctagaccaggctgtggtcccgctcttcctcccccaacatgcaggtcctttaagaccctc

SEQ ID NO: 181970 - DNA, 122 bp, Homo sapiens
gatttcccgggagggggccaataccaaattttagggctgttaggctctgagcagtcccttcgtgaccggataagtcagagacccggggtttgagccttgcccggcgctgagcggagggccca

SEQ ID NO: 181971 - DNA, 122 bp, Homo sapiens
aaaatagaaatggacaaagcagaaagggggactccaagcagctagacttacatgacgatgcgatgaaggccaacactgctttacccagcccttaagctcctatggagttaggatctggagga

SEQ ID NO: 181972 - DNA, 122 bp, Homo sapiens
ctggggccaacgtcctgactttcggggccggcagcaggctgaccgtgctgggtgagttttcgcgggaccacccgggcggcgggattcaggtggaaggcggcggctgcttcgcggcacccggt

SEQ ID NO: 181973 - DNA, 122 bp, Homo sapiens
tgcggtttcctcccctcctgggggaggggatttcgctggccaccctgtgtcgtcgctgtgcgagctgtatcaccagtggcaacttctgcatttgcctcgcttagcttgtgtgttttcgcctg

SEQ ID NO: 181974 - DNA, 122 bp, Homo sapiens
gaggtgtgaagactggagagtggcggggccccgcccggtgcgtacttgggggtcagtgcccgcgaccgcagggcggggcggcgggcacgacacccggtgatgtccagggaactcgcggacct

SEQ ID NO: 181975 - DNA, 122 bp, Homo sapiens
ttatggtttggttgctgataagtactctgcaaaaagagtaggataaagagcaggaaaagccgaggggtgcttacaatttttaaaaaagtgttcaggaaagctctcatcataaaggtggtgac

SEQ ID NO: 181976 - DNA, 122 bp, Homo sapiens
cagcaacacagggccaagtgggtaccaaggcacatgccctgtgttattttctagttataacgaagtacagtttccatgtggctggtgatgaaagagtcaggtcaatttcagaaagaagagtg

SEQ ID NO: 181977 - DNA, 122 bp, Homo sapiens
gggctacagaggaagaggcaaagatagggcgtaccgttggtggcctgagtgtggttggaacgctggatcaaggtattcaagttgttgttcaatatagcaatgttagccagcccgccctgagc

SEQ ID NO: 181978 - DNA, 122 bp, Homo sapiens
aggcggggcttccgcttggggcatggaggctgtacctcttacgtcacttccgtaaacaaacggagctgcggaggagcgggtcccgggatgtgaccggggctctgcttgtggctgcggcggtg

SEQ ID NO: 181979 - DNA, 122 bp, Homo sapiens
ctccatgcttcatctaatcagtcatcagatcctataattctaccaccttaaaagtttcaccgtttcttccgtccagtcgcggtggctcacgcctgtaatccctgcactttgggaggccgagg

SEQ ID NO: 181980 - DNA, 122 bp, Homo sapiens
acaggttggtccggcgcagcaaagggagcgggtgcggcggtagggcctctccgggggcagcgcgagggcctcccccggggcagcgcgggccaaggcggggcctccagagcgggggcagcaga

SEQ ID NO: 181981 - DNA, 122 bp, Homo sapiens
tcacggattcaccctgcagctgggatttacctgctgggggtttatgtcactccccgtgagcgctccagggtttctcctttgtttttttgaattaaatctctacatcctcctggtgtgcagtt

SEQ ID NO: 181982 - DNA, 122 bp, Homo sapiens
cattcacaggtgagagacagaacaatgtagtcaagtcagttcatcagcatgttggcaaatcggagtcccaggcttggagaagacctttgcagtgaaggcatgtggaaagagaatgtggcaag

SEQ ID NO: 181983 - DNA, 122 bp, Homo sapiens
ctcgggagcctcccacagccagcccagagaaagcagccacctgctagaacaccgcacttccgcctccctcgccaccaccccggaagcgctcgccgccgaccaggaagaagaacccgcctcgc

SEQ ID NO: 181984 - DNA, 122 bp, Homo sapiens
acttaacaggttgtaaccaggacttatatgcaacagtataagactatttggaaagttttgcggttgattttgttgttgttttattgttggtaccattagaaatgaaaacttttatatgaggt

SEQ ID NO: 181985 - DNA, 122 bp, Homo sapiens
ggtgcgtgtcatccgtgtggcaaaagcacacacgtatagctaccggcgggcacgtgtgcgcgcagccccagtaaagtctgccatgaatatttattgggcagtggaagaataaatgacaggtg

SEQ ID NO: 181986 - DNA, 122 bp, Homo sapiens
gggaaaagcctttttaaaacatcttttacgttgcttaaacctacagtttcgaaagcattccgaaggctaaagtgagaaataagcccaggctagggagaggagaaacgaagttcacgtcctag

SEQ ID NO: 181987 - DNA, 122 bp, Homo sapiens
aacagtctgttcctggtggcgttcggaaaggccagtcacacttgccacccccgttgtcatcgtccctagcttcagaaagcactggagccaggttgacatgcggccgatgagtctttgttcaa

SEQ ID NO: 181988 - DNA, 122 bp, Homo sapiens
tttaaagatagggtctcactttgtcgcctaggctgaagtgcagtggcatgaagtgcagtgcgaggctcactctagcctcgaactcctgggctctagagttcttcctgcctcagccttctaag

SEQ ID NO: 181989 - DNA, 122 bp, Homo sapiens
tagagcatataaaaggcaccttgctgggcatgtctcatactagcccaccagactcagagacggaaccagagacgggccagagcatccccctcctccaccatgaaactcgctgtcaccctcac

SEQ ID NO: 181990 - DNA, 122 bp, Homo sapiens
agaaaaatgggcaagagacatgaaaaatacttcacaaaagaaattcagatatttaagaaacgtggaaaaaaaagtgcttaaccttattaataatctgggaaatgcgaattaaaaaaaactag

SEQ ID NO: 181991 - DNA, 122 bp, Homo sapiens
tggctctcagacccgcagtgaggtctgacgtcatttcctgccgtaagtatacagtgcctccgggtcgcggtcattttgagcccctgtctggatgacttcttgcggctgttctacccctcccc

SEQ ID NO: 181992 - DNA, 122 bp, Homo sapiens
cgttccctgagcgcctagcaggctgcgtttgtttggctttgaagccgttatccccttgtccgcaatgagaggtgctggtgtcaggcctgtgtgtctgtgatgtgacagagcgggactgagct

SEQ ID NO: 181993 - DNA, 122 bp, Homo sapiens
ccacaggaatctgctggggctctgccctctggctggggcaggtggaactggccagattggcggtggggggaccactgtgcttgccatagggactggcccagctgccccacaggggagcacat

SEQ ID NO: 181994 - DNA, 122 bp, Homo sapiens
ctctagatatataacagagcatagacaggagaggcattctgttcagtttcatctgtggcccgaagacaagagatgacacagaattgtgccaaggggcaggacagaaggaggagtcagccccc

SEQ ID NO: 181995 - DNA, 122 bp, Homo sapiens
gatacatgctaaagtattcaggagtaacatgacactatgctaccttctcccaatcggttccgtaaaataaacaagtgtatataaagaatgatagcaaaaagaaaatgtaaatgttctgagga

SEQ ID NO: 181996 - DNA, 122 bp, Homo sapiens
gcaatgatgtaatttgatctcttcgggccaccgtcgctgagcatgcgcaaataaacgtggcgggacgtatgtgtcatggcgctctccatctaaagtctgtgcagcttccggagagtggcggg

SEQ ID NO: 181997 - DNA, 122 bp, Homo sapiens
tggggattccagtagccaggttggtacgggacggcatcataacaggctgacacagcggagcgccgcgccaggccgcccgcacacccagagctcgcccacggttggcagcgcccaaggttgca

SEQ ID NO: 181998 - DNA, 122 bp, Homo sapiens
catcttggccgccgccttccccgcgcggcccgatgaacagcggcaccggggccacctgcgcgagctggcccatgtgctgcaatccaagcaccgggacaagtacctggtgaggggcggggcca

SEQ ID NO: 181999 - DNA, 122 bp, Homo sapiens
gcacccgcctcacacacgtgcaatgcaacagcaatgcaccgcggggccgcccgcctctctcggcccccacacccgccaccggcccgggagcagctgtccagccctcctgatgcagggcctcc

SEQ ID NO: 182000 - DNA, 122 bp, Homo sapiens
agctgatttgcagtctcgccgcattgcacattcagccttctttccctcctgctgaattggcgtcagctcatcagcagcaacctgaaaatagcccgtcttcctggattcatgtcttctgagct

SEQ ID NO: 182001 - DNA, 122 bp, Homo sapiens
ggcgccgacaggtcaagtgggagaggcactgtggacttggggcccggggatgctacactccgccgttcccgtcgaccctgtggtttcccggcggcctgtgtctccgaggcggtagacagaca

SEQ ID NO: 182002 - DNA, 122 bp, Homo sapiens
cgcaggcgggctcaccaggccgtctgggtccacgggcggcacaggatcctccggaaggcacggcggaagtcctggttgaagatggtgtagataacagggttcagtgagctgttgcagtagcc

SEQ ID NO: 182003 - DNA, 122 bp, Homo sapiens
atgatgccatagaaatgaagagtcatatagatcctgccttgaagtgggagagggctgatacgggagacaagtgtgtaaataactatgaacaagcttgcaaacatagaaacagaggtgcttat

SEQ ID NO: 182004 - DNA, 122 bp, Homo sapiens
ttggacggccgcccctctaagcttctcccatcccgggtccaggaccccgtaaaatctgagcgggccaagggcctccgcccccaccctccgccccgcggttctcgcggtccttaaccttctct

SEQ ID NO: 182005 - DNA, 122 bp, Homo sapiens
gaagtcgaggcaggcgggtcacttgagggacccaatagggttaagaaccactgacgtggccgggcgctgtggctcacgcctataatcccagcactttgggaggctgaggcaggcggatcaca

SEQ ID NO: 182006 - DNA, 122 bp, Homo sapiens
cgtctctgatggtgacatccaaacaataaatatgcaataaatagcgctcctgggctgggccgggccggctgccttcaaaccccactcggcccctaccagtcttctctggccaggacaggcct

SEQ ID NO: 182007 - DNA, 122 bp, Homo sapiens
gggcctatgcaggggtagggcagggacgtggccgttctccctaccggccctgctcctcctcgtcccaggatcctgtccactgctcaggcagcatccaggctgcctctgtcggaacgccacct

SEQ ID NO: 182008 - DNA, 122 bp, Homo sapiens
cccgtctagaagcgggtttttctgagcaggcaggggcttcaccagtataggcctctgtgtcgatgtcgatcttgttgatggtcttgccgtcgttgtctacggcaaaagtgaactccacctct

SEQ ID NO: 182009 - DNA, 122 bp, Homo sapiens
gacgaaaggagtatattcaacaatgactgtttagctcagtggttctccaccttggcaacacgttagaatcacctgcaacaatttcctgatgcctaggctgcaccccagaattaaattataat

SEQ ID NO: 182010 - DNA, 122 bp, Homo sapiens
tgagaaaatacattttggctattcccctacttggacagagggtggaaatcccaggcaccgcgaaatcgaaacttgctaggactaagaagccaacgacgcgcgaaaccgtggggtcctgcgac

SEQ ID NO: 182011 - DNA, 122 bp, Homo sapiens
gcacggtgttcgcgctgtgccagtggcgcgggctgagctcggcgctgcgggctttggaggcgcagcggggccgggagcagcgcgaggacagtgccctgcgctccttcctggccgagttgagc

SEQ ID NO: 182012 - DNA, 122 bp, Homo sapiens
aacccctccgctacccactgctgctgagccaccgggtgtgtctacagctagctgggtcggcgtgggcctgtggggtgctggtggggctgggccacacccctttcatcttctctttgcccttc

SEQ ID NO: 182013 - DNA, 122 bp, Homo sapiens
aggaaaagagggcactaaaatcttttcagtttggggcctgataaggttttactgtagctccgaatctatgtcatgaccactgttattacactttaaagggatcccaatcttgggatttgaca

SEQ ID NO: 182014 - DNA, 122 bp, Homo sapiens
gcccggctgcatttgcatgtcggtttagtcaccgccgccggcgcctacttcctctaaggccggggctgactttcaggaaatgatgccggccccgtaagtcagggcaattaccggcagtgcga

SEQ ID NO: 182015 - DNA, 122 bp, Homo sapiens
acatttccaatgaaaagactgagacccaatctaagcgcaaatgcttggtattatcatttacgtacattacattgtatccccctgcaattctgcctcctgccaaaactttacagtgtacatca

SEQ ID NO: 182016 - DNA, 122 bp, Homo sapiens
agcccttagcaactgagggcccaaacccggccccctactccctcaagtcattggttagcacgctctccgcccctgacccgcccagcgccgtcagcacccagctcttccgtttaccgggttgg

SEQ ID NO: 182017 - DNA, 122 bp, Homo sapiens
cggggggagccgagattagagcatcagcctgagagaagcggtgcttctggttctccgctccgcctcggatctttcagcgaggcctcgggccagtcatctcgccgcctcgtacctcagttttc

SEQ ID NO: 182018 - DNA, 122 bp, Homo sapiens
gccaggtgggagtccgtcgctgtgtggcctgtggtctcggagtctgttctcctggagtctcgcatttgcacccccttcttcgcagtccccctcccatagacttgctctgggaagcgcctctg

SEQ ID NO: 182019 - DNA, 122 bp, Homo sapiens
ccgctttgcacttacttcaaaatgtgccttactccctctggtgggaccatttaactccagcgcgccacccctcccccgctctggccgctcccgtctgccccgctgcctcggcccacgtgatg

SEQ ID NO: 182020 - DNA, 122 bp, Homo sapiens
gggatgggacgcgggcccagcggggaagggagaggcagggccaggtcgggccacgcgtgacgcctcccctgcctcagggcccccagcaggtggatagcgcccagcctgcagcgggaggccca

SEQ ID NO: 182021 - DNA, 122 bp, Homo sapiens
ggagagagcccgccaggccagctggcgtggtgccctggcagccccagactgcagaccaggcgccccgggcagcgggagggggtgctcccaccccagaggcctggaaatggaaagttaggagg

SEQ ID NO: 182022 - DNA, 122 bp, Homo sapiens
cctttaaaggcgcgggacccgccgcccgcggaccgtcaggctggagggagctggtccctgcgctccctgcgccctggggatgcccctgccgccctgacgcccgccagcctgagccaccggcg

SEQ ID NO: 182023 - DNA, 122 bp, Homo sapiens
ctagtctggcctcttcattttatacataaagaaagctaggcacagagagattaagtaattcgcccaaggacacccagctagtgagaggcaggacaaacagcagaacctagccaagaatgatt

SEQ ID NO: 182024 - DNA, 122 bp, Homo sapiens
taaaaattaaaaaattaaaatgagggctcccgaaagttaaatctgctaatctttcagcttcgttactatcctgatccaaaggaagcagactgcagcaccagttggctgactttggataagta

SEQ ID NO: 182025 - DNA, 122 bp, Homo sapiens
gccccagcacccggctccggaaatgccagggatgcagggagggcagaattgttttccctgcgcgtcgcgtaaaaacgtgccaggttctgcttgctggaaccgtctaaaacaaccggaacccc

SEQ ID NO: 182026 - DNA, 122 bp, Homo sapiens
ttcggctcacaggagctcccgcaccactgatgctgctccagcagtgtcctgctgctagaccgccctcccccatgtcaaagcgaaacgtgctcctgagctttccaccgcgatgcttcctaacc

SEQ ID NO: 182027 - DNA, 122 bp, Homo sapiens
cacctggcctgttctttataaattacccagtctgtggtattttgttgcagctcttacagccgcctctaggcaggtgttgttatctcccctcaagaccacctggaagggtgtagtcagcactc

SEQ ID NO: 182028 - DNA, 122 bp, Homo sapiens
attataacacactagctccgggggccgagtgaacatcacttcacacaaaaacagggacaacgtctgtgaccaccggagatgaatattagtgaaagaactgactctcccgattcctctattaa

SEQ ID NO: 182029 - DNA, 122 bp, Homo sapiens
caccctctcacggaaaggagcattttcctggatctccggccatcctctcgtggaaaggagcgttttcctggtgtttggctgctgcaagtttctgacagtcgctcaggaggtgtcgcgccatc

SEQ ID NO: 182030 - DNA, 122 bp, Homo sapiens
gcacgcacgcgtgaagaatgaatgaatgaggggtcgtccctttgcacacacggaggtctacgggccgcagagtacctacagcatggccaccgcaagcgcaactaaaatccagggcttgtcgc

SEQ ID NO: 182031 - DNA, 122 bp, Homo sapiens
ataagctgagctcctcaccacacgcacatgcacgcacagacacatacacacacacacactcgctccttggcacgcagacacacacagagctttgctattcttcggctaatgggattggcacc

SEQ ID NO: 182032 - DNA, 122 bp, Homo sapiens
tggggaccatgtccgaagtgaaaacagctgtctgttgttcccatttttcatcagcacttccggatccgccccacacgatataatttgattcaactggtaactcccgttgccagatgaaatgt

SEQ ID NO: 182033 - DNA, 122 bp, Homo sapiens
tggaattagttaaggatctgcagatgagattctcctggatcaggctgggccccaatccaacgaagagtgccctcgtgaggcagaagaggagagagacacgtgccggagaaggccacatgagg

SEQ ID NO: 182034 - DNA, 122 bp, Homo sapiens
gagaacctctacaagtacttctacgccatctccaacatcgaggtcatcggcaggtaaggccgggggaagccctggatgtcacctgcaacctgggatgctatctgttacctgggacgttattg

SEQ ID NO: 182035 - DNA, 122 bp, Homo sapiens
ctgggggcggccacactgtggggtcgggcaggtcgcacccttcccccagctgaagagcagcgctcagaagagcccttcccccaccgcagcggctcctgggtgggaaagaaacaaaggccggc

SEQ ID NO: 182036 - DNA, 122 bp, Homo sapiens
agctgccgtaaggctggaggagcttgcggttgggtccacccgcctctgggcaggccttagcgttcacccgcggtttctccctgactttgaacccaaactccctaccccgcaagtccttccct

SEQ ID NO: 182037 - DNA, 122 bp, Homo sapiens
tgctggagtccgagccgcgcctcggcctccgcccagggcagccttgcccaccgcctaccgcgactgctcctcgtcaaacggcaagccttgggccgcagcggaattcctgaggcccgagtcca

SEQ ID NO: 182038 - DNA, 122 bp, Homo sapiens
ctctagcccaatataaataatagaaattaatttgtcagccagcacacgcagcccaggcggcgcagtagcgagctgaggaggaaagctggtcgaaataattattcttgacttacgaaatcatt

SEQ ID NO: 182039 - DNA, 122 bp, Homo sapiens
actgtatctgcaggtgaggtccagagtgtgcagtgcataagaaaatcctacagaaaatgccgttaacttacttggatgaaatgtttttcctttgagggggaggaagaggtggtaaagagggg

SEQ ID NO: 182040 - DNA, 122 bp, Homo sapiens
cgcctcgcgcggcagattcgaagctagggcggggcccgcgggctgaggcagcggctgtggcggcgacgctgggcgtgaggtggcggcggccgcgccctggttgggtccccactgctctcggg

SEQ ID NO: 182041 - DNA, 122 bp, Homo sapiens
aaaacctaattaaggccaattgtagtggctcgcgcctacaatcccagtacgttgggtggccgaggcgggcagatcgctggagtgcaaggagttcaagaccagcctggtcaacatgatgaaac

SEQ ID NO: 182042 - DNA, 122 bp, Homo sapiens
gtcagaacacacccctaaatacgaccttcaccccctcttccagacacacaccccctgcgccgaagcacagagccagacagtagccggggaattcgattcacagggagagccagtctgggttt

SEQ ID NO: 182043 - DNA, 122 bp, Homo sapiens
aacacatcctttcacaggcaaggacactgtgggccaaagatcagggagctctgcctaagacgtactagtctagttagagacatagctagttatggccatcccagaactaagaacccagtcct

SEQ ID NO: 182044 - DNA, 122 bp, Homo sapiens
gtgatccgcctgccttggcctcccaaagtgctgaggttacagggcgtgagccaccacgcccggcctataaaagacatttttaaaaaatgataggagaatacaagaaagtacatttgtaatac

SEQ ID NO: 182045 - DNA, 122 bp, Homo sapiens
gtgtggaacccgttctcggggcggtggggaccagggaggcttggaacagcaggtgcatggcgtgatcggattgtgtcttaagaacatcccgtagccgctgtgggtaggagagatggggatac

SEQ ID NO: 182046 - DNA, 122 bp, Homo sapiens
tgcttcttgatgcgtccggcaaaaaatgtacaaaccaggcaagtttaaggcaaggccccacgaggggagctgttggctttctggcataattttaagctccgcaccaaggatcctattttatc

SEQ ID NO: 182047 - DNA, 122 bp, Homo sapiens
agctgtatccaagcgcgggccgtcccctcctgcgccgtgctctgaaggcgggaaggcgtgcggctgcaccagccaggggcagacgaagaccaccagcctgggacccggcagcccgacctgcg

SEQ ID NO: 182048 - DNA, 122 bp, Homo sapiens
tcgggggccacccctctcagccccatccggctcctgagcagctttgtccccagagggccccgggtcattcctctgaccaaccaggcacggcgcaccctgcatgcaagcctgggcgggtgctg

SEQ ID NO: 182049 - DNA, 122 bp, Homo sapiens
taaagcttaggagggcgactgtgaatggacacaggagccagcaccctcggggcctgacatcgccctcctcagccctccagcacctggtctggcagtttagtatgtgacctttctccctggga

SEQ ID NO: 182050 - DNA, 122 bp, Homo sapiens
ttcttccgatcctgagtaaccaagattggaatactgaccccttcaggaggcagcccatgccgttttttcccaaccgctctaatctgccccaaatgcttccttatatgaatccaaatttgtct

SEQ ID NO: 182051 - DNA, 122 bp, Homo sapiens
ccttcattagctgacaaagataatatctacctcttaaggatgatggatgggacggttgaacgattaatatttgaagaggcttagaacagtgtgtggcatggagcaaacgctctacagcagtc

SEQ ID NO: 182052 - DNA, 122 bp, Homo sapiens
tccaggttgtgcttgccctgccagtgtgggagcagggggcaggggcaccctggttctcagcgcagacggcaggagtcaagaaggcagcagcgagcagtcacaggtattcagggtcctgacga

SEQ ID NO: 182053 - DNA, 122 bp, Homo sapiens
ctagctcaagctttactgaaagcaatgccatgcagtcagtgaatcaaatgcataggccaacgtttcagtcaataccagaaaaagaaaagaagaaaaagaatgtggtaggctaattttccttc

SEQ ID NO: 182054 - DNA, 122 bp, Homo sapiens
tccaagcagcttttgccaggagtgggagcgcaccgtccctgcccagtctctccagttgggcgttccgagaccacctatgtagggtattcggctagcgctcaattaaaccgaaacaccgtcgc

SEQ ID NO: 182055 - DNA, 122 bp, Homo sapiens
ggtgggggtggggggcacaaaacaaacccagatcagatcccagttcctctgctcactcaccgtgtaaactcaggcctcagtgttcccatctataaaatgggatccatgatatgaacctgtgg

SEQ ID NO: 182056 - DNA, 122 bp, Homo sapiens
gatgcggcccggggcggcccgggagctgagcagggcccccgcgccggcccctccgggccccggcctccagagccgcagccaccgccccgcccccgagagacatgacttccaagccgcattcc

SEQ ID NO: 182057 - DNA, 122 bp, Homo sapiens
ccgccccgcagccccgcggtccccgcacctcgtcctccaggagcccgaacacctccaccgcgcaagttgccatttccgaacgcttccagcaaaccggacgcgctcgcccccgcccagggcag

SEQ ID NO: 182058 - DNA, 122 bp, Homo sapiens
agtccccgtggctcagggcacctctgcgcttgggcagagaacccttgactcaccttccaccgtgccctgacccctggtgtggaaactagcacagttggatccgtatcacgtgtcacggggct

SEQ ID NO: 182059 - DNA, 122 bp, Homo sapiens
gcagaataatcccccgtggcactggtttgccggcagagcagaatgtttgagacctcaccccgcagccacgcgcgggcgtaaatcgttctcagcacgagaaacacaaaggccgcaggatcccg

SEQ ID NO: 182060 - DNA, 122 bp, Homo sapiens
tatttatatacatatatacacacatatagtcaatgccaaaagtttatcttctgttcccctcggcgccaacttatttcaacaacgcgagctttgcttagaaaatcaattccacatctttaagg

SEQ ID NO: 182061 - DNA, 122 bp, Homo sapiens
ctccgggagccggcttccctcccgcctgcctcggcctggacccggcccagctgctgacctcgggaactcgagtgcccccagggacgcagacaatcaattagaattggcagcgcctgcctaag

SEQ ID NO: 182062 - DNA, 122 bp, Homo sapiens
tctcagatctcctctctaatccccttctgttagctgatttccagactgactatttgctttcgcattagataatagccttagagaaaacaattatcattttcttttattctctttgtttttct

SEQ ID NO: 182063 - DNA, 122 bp, Homo sapiens
ctcaccccagcttcacttcccccagcccttctcagacagccactgtgcaggctttggcagcgggggtcacacactccacccgggaggccaaagctgcctgcaggtcagtgccgcccactgcc

SEQ ID NO: 182064 - DNA, 122 bp, Homo sapiens
ggtggatgacttccttccagacgcagatgaggaacgggtggatgacttccttcgggacgccgatgaggaacgggtggatgattccttcaggacgcagatgaggaacgggcggatgacttcct

SEQ ID NO: 182065 - DNA, 122 bp, Homo sapiens
ctactgaaaagagcctcctgtgagcacagggctcgcagtaagtgggggtgacggtggtcgcgccggcagcgccgccttgggcctgcgggaggcgcccgagaggcaggggcgaccacggcggc

SEQ ID NO: 182066 - DNA, 122 bp, Homo sapiens
ccgccctttgcatgaaccagaacaaaatgttgccttattaggtgacttcgtgccggggtgcgggggctgcttcctgtggtgctgctgatctgcaaaagctaaacatttagactctgctccac

SEQ ID NO: 182067 - DNA, 122 bp, Homo sapiens
cccaccttgcgggtgatgttgtgcacgtaggggcacgtgttgcaggagaagcggtggcagcgttgtccctcctccacgatcagcccgttcccgcagccggggcagaacagcagcatggtctc

SEQ ID NO: 182068 - DNA, 122 bp, Homo sapiens
gtgagccattctaacaaattatcagaacagaggaaggggttataaacatccccccacccccgatttatagccagtcagtcagaagtacaggtggccacctgggacttggattggtgtctgaa

SEQ ID NO: 182069 - DNA, 122 bp, Homo sapiens
gaggcgggtggatcactaggtcaggagttcgagaccgtcctggctaacgcggtgaaacgccgtctctactaaaaatacaaaaaacatttagccgggcgtagtggcgggcgcctgtagtccca

SEQ ID NO: 182070 - DNA, 122 bp, Homo sapiens
gatgagcatgtttgcttaaaattctatgcatgacatatatgcattgagaaaaggatgttacggttttctttgcatgagattaatccaagtggtttttattttctgctttgaacttctctgta

SEQ ID NO: 182071 - DNA, 122 bp, Homo sapiens
ccaggtgtgaaaagtgaggctcagggagctaggcagttgcccaaggggacacagcagtgacggctctgggacgaagcccaggtgtccagacgcgatggcctcttcccgcgttctcggcgggt

SEQ ID NO: 182072 - DNA, 122 bp, Homo sapiens
aggagagattttaaactttctggcacgtttgcaaagttacacaagccgttctggcccggccgcccctcagctatttgttcacgtaatgcgattggaaacgtgcaaggcggacagctcctcgc

SEQ ID NO: 182073 - DNA, 122 bp, Homo sapiens
acccctggggtaacaacccaccagttccctgtaaaggctcagtgcattgggcagctcagccggggccggtacccttattaacataacaccaccagcccagcacagtgcggactgtcagtgct

SEQ ID NO: 182074 - DNA, 122 bp, Homo sapiens
ccagttgttagccaaaaataaacaccattcctcaaccatatatgtccaccggcccagagtcggggaggaggagaggaggcaggtcagccgtcccccggctgcagctgcactcacatgtggcc

SEQ ID NO: 182075 - DNA, 122 bp, Homo sapiens
gctaagtcatgtttaacagcctcagaaattatcttgtctccgcgttctttcttctgccggcgagccaggtaatggtaacagagcgaaactccccagtcggaacttctgggttgcagcagcct

SEQ ID NO: 182076 - DNA, 122 bp, Homo sapiens
gcgcaactgtctgaggtggaagcccacacggaccacagctccaggaagccgagcaagaaacgaatcgccggaataccaggccgcggccaagcaataaccttaagtctcaggcgactgccgcg

SEQ ID NO: 182077 - DNA, 122 bp, Homo sapiens
ccgggcagagtctggcggctcctggagcacggaaggcccacaagcgtacccgtggggccgcggccaaggctggactttgagcccaggaccccaggaccgcccttagaaggctgcgccggccc

SEQ ID NO: 182078 - DNA, 122 bp, Homo sapiens
aagatgactcagtacatcacggagctctccgacatggtccccacatgcagcgcactggctcggaagccagacaagctcaccatcctccgcatggccgtctcgcacatgaagtccatgagggg

SEQ ID NO: 182079 - DNA, 122 bp, Homo sapiens
gtggttcatgcctgtaatcccagcacttcgggaggctgaggtgggccgatcacctgagaccgggagtttgagatcagactggccaaaacagtgaaacaccgtctccaccaaaaacacaaaaa

SEQ ID NO: 182080 - DNA, 122 bp, Homo sapiens
cagggaacaaacagctgcccttagaaatgacacgccctgtgggcaatggcggcgctgggacgtctgcagccgcattcactgccacagagaacggccaaagtatggccaaatcccaaatgcaa

SEQ ID NO: 182081 - DNA, 122 bp, Homo sapiens
gcttggaaggaaactggaaggaaaagaagctttaggagagagaaattgtgacctcctttccgcaggttgctatcgccacaggctttccacaagcttctccctgggcggccaccccagaggct

SEQ ID NO: 182082 - DNA, 122 bp, Homo sapiens
tctgtaacagacagctgtctcctctgtagtttaagtgtgctttctgcttagctcatgctccgtgagtcatggaatcaatacaggaagcacacagagccagccacactgcagattccgaggag

SEQ ID NO: 182083 - DNA, 122 bp, Homo sapiens
agtcctccgcatacaacctgcttcaaaagcccaggagaaaagcagtcaccttgactctagcgcctcggtccttaggggtttggaaaacgccaggaagcccaaggctacccggcacgcgctcg

SEQ ID NO: 182084 - DNA, 122 bp, Homo sapiens
ggaaaggtgaattccctgaatttcactgggaggaaggtaaatcctgccctctctgacatacgggatcagtttggtctgaactctgaggtatggagttgcatggagtcctcccagaagaggga

SEQ ID NO: 182085 - DNA, 122 bp, Homo sapiens
gaggaacaagattccctggacacctccagtgagatcaggtgtctggaggttgctgagcagcgcaagctcctatttacgggcctcgtgtcgggggtcgtccttgtgttccccctgaattccag

SEQ ID NO: 182086 - DNA, 122 bp, Homo sapiens
tagaaatttcagacctgcttctcctggcattattttctaaattccacctcccagtagaggcgtggcagctaaagcttcacattcattttcctgatggagcatttctgcatattaaacagcag

SEQ ID NO: 182087 - DNA, 122 bp, Homo sapiens
tggggaaaaggcccagcagcgaaaccaactagtccaagccaggcaaggaaccgtcctagacggctggtgggaacaaccgcgcagctgctgtggaaaaagcccggcggttcctcaaaccacga

SEQ ID NO: 182088 - DNA, 122 bp, Homo sapiens
gcccgaactgcttgctgccttcgctggggaaggcgcaggaggcgagccggcgctggtggtcgctccacctggcaggaggaaatgataaccatgataaggaacgtgatgatgatgatgatgat

SEQ ID NO: 182089 - DNA, 122 bp, Homo sapiens
gcaggaggcaggtgtgtctttattttgcttgctgagtccctgctattaaattgtcacttgcgcttggttctttatatgtgttacttttaactctttattccttctagatgagtgtgaggtag

SEQ ID NO: 182090 - DNA, 122 bp, Homo sapiens
atgatactgctgccctcggactgccgaggacacaaagccaggcctaaaaccctgggaaagcggggtcagagtcctgcgtccgcccttcccgcacccccggcaccttttccttctcctcacag

SEQ ID NO: 182091 - DNA, 122 bp, Homo sapiens
gagcgcgaggtggagcgcgcgccagctcccttcggtgctgagtgcttagtgctgggatctcgtgggtctctgtcggctttccagggctattctctcgccagtgagtcccacttcggaagcac

SEQ ID NO: 182092 - DNA, 122 bp, Homo sapiens
ctcaccgccaatcttgtacacgtcctgcagcggcaggcgcaggggcttgtccgtggggcgcgtggggggcaggatggtgtccagggcctccagcagggacacgccgcttgcgttgccctcct

SEQ ID NO: 182093 - DNA, 122 bp, Homo sapiens
caaggagccttggtttactgaccccagcattaaaggggcagatttccagcccactcccagcggacctccttccaagtgatggagtcccagtcacttcacacttcaggcatctctctgccctt

SEQ ID NO: 182094 - DNA, 122 bp, Homo sapiens
caacaccggaaaaggaagcaaaggtcgaagttcatccgcggccctgaggcctgtgggaaacgtagtccaacaacgaaagagccctgaagctcaagcggagcccgctggccgcaggggccgca

SEQ ID NO: 182095 - DNA, 122 bp, Homo sapiens
gaggtctggttgcagtgaggggctggctctgtgaatcctgagctggtgtgtgcctcctcccggaggagggagctgcaccacatgccccgtggccttctgggcctacttgtggccaaatgaga

SEQ ID NO: 182096 - DNA, 122 bp, Homo sapiens
gctcaccggagctgcaggacagggccacgcagagccccaggagggcggcgagcttcatggcgcgggggctcggggcgcgcggggaacctgcggctgcccgggcaaggccacgaggcttctta

SEQ ID NO: 182097 - DNA, 122 bp, Homo sapiens
tgccccgtttcccaaactcccactcaccgggcagcggcggagctatggccagggactagacgctgcgtctgaggacgcgtccccagcttgtcgacccggcagaggcggctagtccacaacca

SEQ ID NO: 182098 - DNA, 122 bp, Homo sapiens
ccctggtgagggaacgagcacctccgtgccgcccacagcctatgagggaccaagcacctccgtggtgcccacccctgatgagggaccaagcacctccgtgctgcctacacctggtgagggac

SEQ ID NO: 182099 - DNA, 122 bp, Homo sapiens
caactcccaacagatctatgtgaccatctaatcacgggatatacaaatataaaaaacccacgctacaaggttctcaatctacaaggatcaacacaaaatcaagaacaacaaaaacaagaaca

SEQ ID NO: 182100 - DNA, 122 bp, Homo sapiens
cacgcacgcagctgctggcccggctgaggctggcggctagggagaggcgccagggggtcgcgcacaggaaggtatcggtgcaccctgagcaaacactgctcgcttccaacgctcactgggaa

SEQ ID NO: 182101 - DNA, 122 bp, Homo sapiens
catcccccaaggcttgccatacttctctaggaggcttcagccttggttaactgtggtgcccgggctaagcagggctgtcttgcctgtgggatggggctaatcttgtcttagaactcccctgt

SEQ ID NO: 182102 - DNA, 122 bp, Homo sapiens
aaatgtggtatattgcaaactgcagctttcacatttatggcatttgtcttgttgaaacatcgtggtgcacatttgtttaaacaaaaaaaaaaaaaaaaaggaaaaaccaacctgcatggcct

SEQ ID NO: 182103 - DNA, 122 bp, Homo sapiens
actttttgaaacgaagagagcgcgataggaagtaggaaagggtgggcgaggggccctgggcggctgctttcgctctgcgcgagttgggtctttgtgatataaaattcgccgagcgccgcgag

SEQ ID NO: 182104 - DNA, 122 bp, Homo sapiens
aagagggcggaggagggagaggaggagggcgatgtgggaaaggaggggtgttaaggggggcgggggaagtcatttatgcagagcaggagctgctgccattgccactcagaatcctcgcgcgc

SEQ ID NO: 182105 - DNA, 122 bp, Homo sapiens
tgattctaatatgcagccaggggtgtgaaccattggaatagacattggaataggatcattcggtccttcttcactgattgaagcttaagccattcctccaaggtccccagagcccagtgact

SEQ ID NO: 182106 - DNA, 122 bp, Homo sapiens
agagataataggtagaaagtcacacatacctgtgtacatttgttaggatatgtccctgctcgttgagaggagagagtttttttgatagttatggggtcttaaatccatttcaggattgagta

SEQ ID NO: 182107 - DNA, 122 bp, Homo sapiens
ttaggagaatttcgtggtggagacccttttgggaaatccacgtgcacacctgccaaagggcgggtgctgcctccaacatcacgtatgtgaccctctccatcgagggcagccccagaccctgg

SEQ ID NO: 182108 - DNA, 122 bp, Homo sapiens
ccgcatctcccctagttcccgagatagactcgcctgtaactggatcactccttgcaacctcgggtagcgtgtgactggagaaatgagggctggagccgtggaccatccgagggcccctcccc

SEQ ID NO: 182109 - DNA, 122 bp, Homo sapiens
agctttctgtatcccaagctcttgcccggtgtacgggaagaatcggatcatacgtgggctcgaaggatgaggcaaggttttattgaggggtggaggtggctctcagcgagatggatggggag

SEQ ID NO: 182110 - DNA, 122 bp, Homo sapiens
cggaccgagggggtccttgaaaggcaaggagcgccgccagctgcaggccagggaggtatgcggggcgggagtcagcagggggaagtcagctcccgcgaggcagccggtctcggggctccgcg

SEQ ID NO: 182111 - DNA, 122 bp, Homo sapiens
agatcactgcgtttttctagtaaggcccccatggaaagcttagcatgcaggcacgtgggtcgtggcctccctcttgagtgagctgaaggatttaagaactgtcagcttcctatattatagat

SEQ ID NO: 182112 - DNA, 122 bp, Homo sapiens
gggaggagatattttgcaacatcaaaatacttacttaagattgcttgaaaaggccaggcgcggtggctcacgcctgtaatcccagcactttgggaggccgaggcgggtggatcacgaggtca

SEQ ID NO: 182113 - DNA, 122 bp, Homo sapiens
ccactcacggcactggcaccactcttcctgatggcactcgccaagttgatgggggttgcccgcttccgggagggcaccgcgtctgttgcacctggggctggtttccgaaactgaaccttctt

SEQ ID NO: 182114 - DNA, 122 bp, Homo sapiens
ggatccccttctttgttttatttagtgattgtgtccctggccaggcctctttaaaattcacggcttcgggaataataaataaataaaaagaaacttcacagcttcattctgaaggcatagat

SEQ ID NO: 182115 - DNA, 122 bp, Homo sapiens
gtgtgagagagcagaagatagcctgtgagccagtgctctagaaaacatcatgtaggaggccggtcacggtggctcacgcctgtaatcccagcactttgggaggccgaggtggatggatcaag

SEQ ID NO: 182116 - DNA, 122 bp, Homo sapiens
catttaacagaaggggaaaatgaggcaccaagcggtaggggcaagtcagggcatggaccacggagctggcagagcaagttggggaagtcccagaggtaccctcctaggcagcgcccgccccc

SEQ ID NO: 182117 - DNA, 122 bp, Homo sapiens
aagcaggtccagaagtccaggaagcaagccaggcctggtggtgaggggttgccatggcgacgactcatctggtgtccacaccacacgtctgtgtgggtcgcaggctggcatgtctgagacta

SEQ ID NO: 182118 - DNA, 122 bp, Homo sapiens
ctgctgggtgttttcagcatttcagtttggcaataaacataaaaagtctagtaacacaggcgtaagcctggaatgttcagtgactggtcactgtcaggaataattattacaaaagagcagct

SEQ ID NO: 182119 - DNA, 122 bp, Homo sapiens
gattggctggacggtcgtagctgggctataaaagagacccctacaggcttagcaggaagacgctcagaggattctgacaatatctttaccggagaagaggcaaagtacgctcaaagccgaag

SEQ ID NO: 182120 - DNA, 122 bp, Homo sapiens
ggaggctgaggcacgagaatcgcttgaagccggcaggtggaggttccagtgagcctcgatcgcacctttgcactccacctgggtgacagtgtgagactctgtctcaaaaaaaaaaaaaaaaa

SEQ ID NO: 182121 - DNA, 122 bp, Homo sapiens
ctgtgaaatggcactcattctagctttaatgttccaggattcttgattgtggatgagccccgaagcctgagttcctgtatcttacaggctttgcttatgaaaatcagccagggtgattacgt

SEQ ID NO: 182122 - DNA, 122 bp, Homo sapiens
cacaagtatgatgatactttcttttggaagttttggagatttaatcatttcagatgtagacggtcagttctaggtagggtgaccaactggtcccagttggctcaagagtgtcttgattttaa

SEQ ID NO: 182123 - DNA, 122 bp, Homo sapiens
gcccgcaggtggggctccctgaggacacggtgaagcgctgtgtgcagcagctgggcctggcgctggacttcatgcacgggcggcagctggtgcaccgcgacatcaagcccgagaacgtgctg

SEQ ID NO: 182124 - DNA, 122 bp, Homo sapiens
ggaacatctacctcaccaaccactgttaagactgaatcaaagggcagcaggcggactacccggaatgaagaaagcaatcaataaatgtggattgtgtcatccttgtctctcttgacggacgg

SEQ ID NO: 182125 - DNA, 122 bp, Homo sapiens
ggaaggaagatgaaactagtataagctactcttgacattatgtcagggatggttttgacacgttttgcagcctccacctggaggtggggaacgtttcctgtgtcgtccccagagcagagtaa

SEQ ID NO: 182126 - DNA, 122 bp, Homo sapiens
gaaaatctcaaaaaaaggtttttactgggtacataaccagtctatacctgtgagacagggcgcgtattttacctctgctctacccacataaccagtaacagaaaagagaattttaaattacc

SEQ ID NO: 182127 - DNA, 122 bp, Homo sapiens
gaagcttcagcagagcgaagcctgccaagcgttcgccgtcagaatctgaaggaacccgagcgagcaagaagagtgcctgacccactccacagaagcctgtccagaaatggaggagtcagcgc

SEQ ID NO: 182128 - DNA, 122 bp, Homo sapiens
ggttagcgagtgtttgcgggctagtggtggacggctgcctgcttctttgcttggggaccacggtcttcttggggacacaggcttgtagctcaaggctgagcctgtgtctttctccacagagc

SEQ ID NO: 182129 - DNA, 122 bp, Homo sapiens
gttaaacacctaaaacctgaaccctgaaagccctggcgggcaggaggggcggagaggagtcgttcactatactaagccgagctctgggcccagagcaacaagagtcgctgaggcaggcagga

SEQ ID NO: 182130 - DNA, 122 bp, Homo sapiens
gtgaaccaccgtgcccggccagagcacgagctttttaacctctgttgaggaaacggggaccggtcacggtagctcaggcctgtaatcctagcacttcgggaggctgaggcgggaggatcgct

SEQ ID NO: 182131 - DNA, 122 bp, Homo sapiens
gcaaaacaaggcttttcttcaagaccaacctttctatccatgatgttaaatctgactgcccgtagtttaaagaaagccggggatggagtgggggctagcatcgatatggctttccttccgat

SEQ ID NO: 182132 - DNA, 122 bp, Homo sapiens
cttcctctgagggtttgcttttatgtcactagtccaacggcaactttcttgatggtttcccgtctctagtctcacattcttaagtccgcccctccataccagacgcctgagtcatttcccta

SEQ ID NO: 182133 - DNA, 122 bp, Homo sapiens
tggtatttcatataggtcttagtgaggtccaatcatttctgtcccaaatgagcaagcatacgcctagccacttagtctttttgtttgaatgactgtctcccttgaaaagtgtagcagtttta

SEQ ID NO: 182134 - DNA, 122 bp, Homo sapiens
gcttggaagtggatccttctccagttgagccttgagctgactgcagccccatctaatgctcgattggaactgggaaagacccagaagcagacaacccaggctagccctgcccagctccctgg

SEQ ID NO: 182135 - DNA, 122 bp, Homo sapiens
caggaaaggggtgcagccaaaatcaaactcggttccacttggacgagcagtggggagattcgctgtctaaacaactaaggagagtttttaaaaccacttaccagaatctagagtgggaatta

SEQ ID NO: 182136 - DNA, 122 bp, Homo sapiens
gctggacttagagagtcaagcaggcccatagttctagagtgacccaaagacagaggccatcgatggaaatgaggaagaaccctccggccagaggaggggctggtccatcaagacgtcatggg

SEQ ID NO: 182137 - DNA, 122 bp, Homo sapiens
tgctcttctaggtgatcttgtacgaactagagaacttccaaggcaaacgctgcgagctctcggccgagtgccccagcctgaccgacagcctgctggagaaggtgggctccatccaagtggag

SEQ ID NO: 182138 - DNA, 122 bp, Homo sapiens
atattgattcctctccatggaatttatgaaagagcttcgtcttttccccaatagtcacagcgatgggggctgtcgctgatccaaaaaaggcaaacaggagtttataaagttgtccaagggtc

SEQ ID NO: 182139 - DNA, 122 bp, Homo sapiens
tcagtaaacagtagaatcatgccaacctaatctgtgttaaaatgcttggaatgtgggagccgctgatgatgcctcttgtctgtgtgtctgactgaatcctttcttttctcagagcagcaaag

SEQ ID NO: 182140 - DNA, 122 bp, Homo sapiens
gagcacctaaacacttatattgtaggtatattgaggttctcttagaagtacatcctccatcgcctcttcaagaacctgaggcagctgaggtgcaaagaaagcaacgggcttttcacgcaggc

SEQ ID NO: 182141 - DNA, 122 bp, Homo sapiens
cttggagagccagccccatcggggttccccgccgccggaagcggaaatagcaccgggcgccgccacagtagctgtaactgccaccgcgatgccgaaggcgcccaagcagcagccgccggagc

SEQ ID NO: 182142 - DNA, 122 bp, Homo sapiens
agccctgccaaaaagggggcctcggagttgggggtaatgtgcccaggagcagaaatctggcgaccgtggcgctgcaatcacagctttcccgtggtttcctaagtggtggcggtgatttgttt

SEQ ID NO: 182143 - DNA, 122 bp, Homo sapiens
ggagaaactaggccgagccgtttgaaaatgtgaacaagggcagcgttaacagacaaaagacgtcatggctagtcctcactagacttgaatggctgagttacgaaaactccctctattgcaaa

SEQ ID NO: 182144 - DNA, 122 bp, Homo sapiens
cagggacctaccagcagcacccaccacccaccagaccccaggccagggacatagcctgttcgctctctgcactgcagcctctgagtgtctgtgctttgattgatggtatcaggggaagcggg

SEQ ID NO: 182145 - DNA, 122 bp, Homo sapiens
ctatggtcaagatgtgtgcacgctctcagcttcctcacctgtaccctgcagacaataatacgccaacaacactgggttgttatgagaataataaatccaaataaagcacttatctggaaagt

SEQ ID NO: 182146 - DNA, 122 bp, Homo sapiens
gctacgtgcttcgagtgcgagatcaccttcagcaacgtcaacaactactacgtgcacaagcgcctctactgttcaggccgccgtgcgcccgaggacgcgcctgccgcgcgcaggcccaaggc

SEQ ID NO: 182147 - DNA, 122 bp, Homo sapiens
ggctgtcgggacatctgtcttctatacctaataaagtcgcccgacgcagaatgaactcctcggcatcgctttgaatccgggctcacatatggttgctaattagctggctatctcttggagtt

SEQ ID NO: 182148 - DNA, 122 bp, Homo sapiens
ggagttcgagactagcctggggaatacagcaaaacctcatctctacaaaaaatgtgatggcgcacccctgtagtcccagctacttggggcgctgaggtgggagaattcactggagccagaga

SEQ ID NO: 182149 - DNA, 122 bp, Homo sapiens
cttcttttctctgttccctgtccaggccctcagtttcactctagagaggtgctatccctccgtatatcggatttctccctacctcgttgaacttgttcactccctttgagccttttgagcct

SEQ ID NO: 182150 - DNA, 122 bp, Homo sapiens
cagtggccttcatatttctttttcaaaagccgctctagctcctccccaaacaggtctgcccggcgccggggcagcttgttgtacaagtaggagatgatgaagttcagggccactttgatctc

SEQ ID NO: 182151 - DNA, 122 bp, Homo sapiens
ccagccaaggccaacacggcgcagtggcattctattcagcctgctgtggaaaaaagatggcggcgccctttgtgcccattatagctgagagtggagccttagctggagcaccatgggcacgg

SEQ ID NO: 182152 - DNA, 122 bp, Homo sapiens
cctccacgttggggggttgggctgaaagtcctaaccctctaatcctgcctaggtgttgctcgtaaccagccccaaccttcctaggtgctgccagccagcagtcagttcattcatgtgcaaaa

SEQ ID NO: 182153 - DNA, 122 bp, Homo sapiens
aaaatccaatcagggcgataaatggcggggggcaggacgtggtggtctccaggctggcttcgtgcgttcttgcttttgtcactgcccccctgttacatggggggggggtttaatttggtttc

SEQ ID NO: 182154 - DNA, 122 bp, Homo sapiens
gactcccgtctgccaaggtttttattgtggtcccgcggggcaggaggtatgcatggcatacgtaagcagagagccggaggcagccatcggcacctagaacggtgcagagttggcccaggagc

SEQ ID NO: 182155 - DNA, 122 bp, Homo sapiens
gatatccagacttcaagtgcccattccttcccggtgttcagccactgcattgatactccacgagggcctgcaacacactgctctggagaggcgtcccaccggggcaaattccttcccgggag

SEQ ID NO: 182156 - DNA, 122 bp, Homo sapiens
ccctttggccaacacaatcacaggagggctttgaagtaagatgcctgcatcccggaggagcgcattttccagaggctggtgcagggcaggcaagaacacacggtgtcataggacagccccgg

SEQ ID NO: 182157 - DNA, 122 bp, Homo sapiens
accagctgatcttgcctagtcctcatttcctatcccatgtgatgacttttgccagtgacgcggaaaaagccagtttaggtcttagggaaaataaataaaattttaaaaagctagtctaagcc

SEQ ID NO: 182158 - DNA, 122 bp, Homo sapiens
cagtgcatatcgtgcccatctacaaggaaacctggaggctccacaaacaactttgagtcccgggagggcggaggtggagagagattctccgcttggataagggcggctggatagccgagtac

SEQ ID NO: 182159 - DNA, 122 bp, Homo sapiens
tgaaaacttcatcttcttggtgtctcatgtcctcattctcccctatatgacatgcaaaaacgatctttctttgaaatccctctgggaagaagcatgtttattgaaactgtccttcagcctta

SEQ ID NO: 182160 - DNA, 122 bp, Homo sapiens
aaagttaggaagggcgcggaggcaacgtctccaaagtggtgactgtgaaggcagcctttgcgctttcctaggagagggatccggacccgcagtccggaggcggggcctgcggcggcaggtgt

SEQ ID NO: 182161 - DNA, 122 bp, Homo sapiens
tgtgtctctctttgaacacctttgctgagggatttgctctggtaccttaactccagagaacgtaaaggtggatgctataatgccgggcgtcaaagcgatttggtacgcagtaagatgatagt

SEQ ID NO: 182162 - DNA, 122 bp, Homo sapiens
tcgacagtctgattgctgagaatagtcttcattctgaaacacaaacactgggggtgaggccgacgcaaggcccgtttttccaccaaactacgccgcacagagctccactcctactggagact

SEQ ID NO: 182163 - DNA, 122 bp, Homo sapiens
ttcagcctgttcctcaatttcccaaagcatctctttcccaggtgtgggagcagtcaagagcgctgccctgtgaaaaacctatgacctcataaatgctggaaggaacgagccagatttctgca

SEQ ID NO: 182164 - DNA, 122 bp, Homo sapiens
accgttaggccaagcgaggaaatggcggcggagttcggtgggctgggaggtgtcgcagcgcgcacttcatttgttactgcgtgaactgagctccgagtccagaaaggaggggatggggtggg

SEQ ID NO: 182165 - DNA, 122 bp, Homo sapiens
aactcttcccagtgcgaactctgctgtgagtgtgtgcggggaggcgcgcccgcgctgagtcggcggcgggtagccactccatgcccttgtccgatggtttgcaactccgattttgcacaccg

SEQ ID NO: 182166 - DNA, 122 bp, Homo sapiens
accacagttgccactaggggacactgctctcactgacaatgttcacctggcccctgaaagcgtgtgagtttgtaactcctgctttgccacccagggactagcaatttagaataaaacaaatg

SEQ ID NO: 182167 - DNA, 122 bp, Homo sapiens
cagcctgtcatgcctgagcctcccctccccgccccccacgccctgccgtgggctcctgcacggcctgagcctccccgaggagcgctgccccctgctccgcgccgcccagtcccatagactgt

SEQ ID NO: 182168 - DNA, 122 bp, Homo sapiens
cagctgcttcccaagcattctctctttctacccagacatctctagctcaacatgtgtgcacggaatttgccacttcccctgctggactgtcctcccacagtagccctctgctctgcgctgtc

SEQ ID NO: 182169 - DNA, 122 bp, Homo sapiens
caacccccaggcccaggccccggccgccccactccctggacgcggaccccaatccagctgcgacagggacccgagtttcgacagagcctgcatcctccaccggcccttcttaccgaagccgg

SEQ ID NO: 182170 - DNA, 122 bp, Homo sapiens
acggagggaccccgaggcggagctgggcccagggctgtgccgcacttgtgcacagagtaccggcaggcaccaatcgcccggcggtggccgcactaaaggggcccggggctgaaagcgggaag

SEQ ID NO: 182171 - DNA, 122 bp, Homo sapiens
gctccgtcccgtgggtagccaggtaggtagttattctgcccgatgatgaggtcctcctgacgcccccgcgaaagggagggatgccgggagtcgctgccccagggcccatttagccttcgctg

SEQ ID NO: 182172 - DNA, 122 bp, Homo sapiens
aggtgcttcgactgggaggagggcgaagagtgtaagggggcggaggggcgatggcagccacgtgatctgttgctatcacacgtgaccgcttgacattgctctgaggagcagaggtgtggcta

SEQ ID NO: 182173 - DNA, 122 bp, Homo sapiens
ctgagcttaagggtttgctcctaaccaccatgctacactgcctccctagaatatgtaacccgcattcaggacagcctgccatgctgaaacagattgggaggtggtgggtttccaatgagcag

SEQ ID NO: 182174 - DNA, 122 bp, Homo sapiens
cctgaactgaccacacagttgagaggaagttgaggcctagaagagcgcgcaacagtaagccgtgtcggcaccagactctgttggtcctactgacacctccagcgttagaatgactaaggctc

SEQ ID NO: 182175 - DNA, 122 bp, Homo sapiens
ttcagagttgctgaaggagtttttaacacattcatattaccagccggatatggtggctcacgcctgtaatctcagcactttgggaggccaaggcaggcagatcatctgaggtcaggagttcg

SEQ ID NO: 182176 - DNA, 122 bp, Homo sapiens
taagtctctcctggccacgctctgaaaggcaaaaatggcaaaaatcctccttcaaggcaccgctccctcgacgcgcaccgccactccgactccctcaaaacattggtcgcaaagcccccccg

SEQ ID NO: 182177 - DNA, 122 bp, Homo sapiens
ggggcctctaaagaaggtttcccacaacagcccttcccacccaaggaccaatgaggtgctcgcctaattccgggaggggcccaaaagggctgtcaggtccaggaggccaaaacgggccagag

SEQ ID NO: 182178 - DNA, 122 bp, Homo sapiens
aatgtcacagctctagggatgcttaagtctcacccagtgacctgcaagttcttcaacagacgggaaattgagaaccaggattatagcactcagacccctatggactgaaaaagtggctagtt

SEQ ID NO: 182179 - DNA, 122 bp, Homo sapiens
tccgcgaagggcggcacgggcggggcggtgcttgttctcccgggccccacttaccctacccgggaaggagcacagaaaaaatgtaaaaactcgtttagtttgaaaaatcaatgtagaatatt

SEQ ID NO: 182180 - DNA, 122 bp, Homo sapiens
gactccaaacatttatcccatgacttggtcatcacacctcttactttctgtctatactcacgtcctcccacaaaccaaccctttttttgttaagagagagggtctttggccagtcgcggtgg

SEQ ID NO: 182181 - DNA, 122 bp, Homo sapiens
atgcatgccgagctacctccagacaaagtgatccagcttctggtacattctgaaacaaaacgacctcaacaggcaccattccaaggctgtaattatgatggcaacatagctacaccctctga

SEQ ID NO: 182182 - DNA, 122 bp, Homo sapiens
ggctcagagaggtgaaatgtcttgctcaagtttccacgggaagttgatatggtttggctgcgtcccttcccaaatctcgtcttggattgtaatccacgtgtcgtgggagggagccggtggga

SEQ ID NO: 182183 - DNA, 122 bp, Homo sapiens
caacatggtgaaaccccatctctactaaaaatacaaaaattagccaggcatggtagcgcacgcctataagtgcagctactcgctcgaggctgagataggagaattgcttgaacctggggagg

SEQ ID NO: 182184 - DNA, 122 bp, Homo sapiens
ctctccccttcccccagtctcctccctccgctccggagactgctcgctgggcggcggggccggagtcgtcgcagccacctcattgcacaacccggcttcccaactgtttacacagcccggcc

SEQ ID NO: 182185 - DNA, 122 bp, Homo sapiens
taagagacagcagcccctgcagccctgcatttctcttcctccatcctgctgactggaacacggatgtgaaggctagagctctcagtcaggaggaagagaaccacaccctagaaatgacaaag

SEQ ID NO: 182186 - DNA, 122 bp, Homo sapiens
ggtgaaaggtaaagcttcaactctgcacagtaatccagggaagcatcttcttcaacgggacgcgagccgctttctcctgtcgctgtgggtttcatttgtggcgacgtctctgcaacatccat

SEQ ID NO: 182187 - DNA, 122 bp, Homo sapiens
gcctccacgctgttcagagaaagctggcttagcaatgttgtatggtttttggatgcgctgcgttactcatacatgagaagaaagtttcaagggttagcaaatagggtcacatccagcagaga

SEQ ID NO: 182188 - DNA, 122 bp, Homo sapiens
cccacctccacccccactgtcctctgaactcagagcagcttcagcctcagagaacgtctgcgtgatcctgctctccccagctccagatcctccatggctccctcacgccctttggaaaaact

SEQ ID NO: 182189 - DNA, 122 bp, Homo sapiens
cgtccgtcttcctcttgatctcactgagccggggaggcttgtgtttcctcacagcggtcccgctcccctggctctctttcttcctcttcaaggatcggcagggtacgttgggtgtcatcaga

SEQ ID NO: 182190 - DNA, 122 bp, Homo sapiens
tcaggggtctcggtcctgcctgcttcccctccacggcccctcgctgcctgtagctcctcacgccttagtccagctccatctgctcattccctggagtgcaccctcagctgccttgtccctct

SEQ ID NO: 182191 - DNA, 122 bp, Homo sapiens
attcccaacgcccccacccctcccactcctgggcccctgccttctgcggatccctgaactcgaggcctggcgcggattgcagatactcagtaaatattcgctgaaagagcaaataaaatgaa

SEQ ID NO: 182192 - DNA, 122 bp, Homo sapiens
cccacagagtgacctttttagagtagccacacacaagactgtaccagcatagaactgatgcgaacagggagcagctttgttcaaagtgaaggtcactatggcatggacttcccctactgaaa

SEQ ID NO: 182193 - DNA, 122 bp, Homo sapiens
tgttggccaaagagaaaagtctcagggacagagaggtagtgagctggtggcagacagtcccgagaggcaggctctcctcatccagaccctctggcatctgccttggctggttaaagtgggag

SEQ ID NO: 182194 - DNA, 122 bp, Homo sapiens
ctaaccgtatcacttactctctctagccttccacctgcgagctccacggctcctttccctcggagaccaggccagccactgcacctggggggattttcacagcctgggaacactcggggctg

SEQ ID NO: 182195 - DNA, 122 bp, Homo sapiens
gatgcggaaaggacctcatcctctgctgtccctttcgattggcccgggactgggcgaagccgggagctgcagggaggggagccccggcaccccagcctctgcccaacctcccccagcacggc

SEQ ID NO: 182196 - DNA, 122 bp, Homo sapiens
cccccccgccgccagcacgcaccgtgcacgccctgcccccacgctcagagctccgtggcacgcccccccagccccacgaccctgagtgcacgctcctctcacctggcccggttccgcgcgct

SEQ ID NO: 182197 - DNA, 122 bp, Homo sapiens
gggcactaagagccagagtgtgtaagggacatcccaagtcacacagttaataaatgctaccgagttgatactggagcctaggttttctgacaaggctcaagctgcaccctaaaccatggaga

SEQ ID NO: 182198 - DNA, 122 bp, Homo sapiens
ggggagagggttcaggataccgcggacaagtccagacgcacaactctcttctctgcttttcgcaggaacccttacactagcgctgggtcaaagaagcaggtctcgccgtggccccgccgcag

SEQ ID NO: 182199 - DNA, 122 bp, Homo sapiens
agagaaaatccattaacaccttagtgcccatgacaccaggtgagttgatcgggctacttgcgagagggacatgtgagtgagcgtggagagctctgagtaggctgaagagctggatgtggggg

SEQ ID NO: 182200 - DNA, 122 bp, Homo sapiens
gtaagtgtcccacaggagtttgttcggtgcatagaacaggcatgtgtacacgactgttcacgtatgtccgtgtttgggtgcgagtctacgtgtagtgtggctgtataaggaccagttcctgc

SEQ ID NO: 182201 - DNA, 122 bp, Homo sapiens
caaccacacattttctcatttgaaaaatttttattttggcacccacttgagtacctggcacggtggggctgtcctctatgggggcaatggagtattagtgagggcattgtggccctggcctg

SEQ ID NO: 182202 - DNA, 122 bp, Homo sapiens
atctaggtcacacctggctcttggctgccatgtggcttattaacagcttccagtggaagtcgcaataaacagtttttggtaaatctcaccactgtttcttgtttctcctgccctgaatggat

SEQ ID NO: 182203 - DNA, 122 bp, Homo sapiens
cgcggggctgtgcaggggcaaggcgcaggtggggctgcagggtgtgggacctccctggggcgctcctgttcccccgggtgcggttctcgccctcttcacctggactccaccccttctaaaca

SEQ ID NO: 182204 - DNA, 122 bp, Homo sapiens
tgtgtgaacattcaaaggaccccaccaccgggaagcctaagaggctgccacggaaagtcccggtatatttgaattgcaaaacacagcctggggatctcaatacatctaatttgggacatgtt

SEQ ID NO: 182205 - DNA, 122 bp, Homo sapiens
tccctcggaggggcggggcggggcggggccgggtgttccatagcatgtgtgtctcggatgcggaaggcagttttgcttgggaaacaagctccttccccggggtcatcactcacggcctccat

SEQ ID NO: 182206 - DNA, 122 bp, Homo sapiens
agcagacttctttccttcagtattacatgtcaccctgcccacaccacagtacttcagactcgagttccctctctcgtattcgttctccctcagttgtatacacacacggacatacgcaaacg

SEQ ID NO: 182207 - DNA, 122 bp, Homo sapiens
ccaccagctggggaagagctgagcgaaaccgccccggggtccaggcgttttgccacgagtcgccgtgcgacaagttggggtctcccttgttctcccacctctctgcaccaaaagctcttgaa

SEQ ID NO: 182208 - DNA, 122 bp, Homo sapiens
aaccagcccctccctccagaagctttctctaaggttgccagaaggtgctaagatctgaaccgaggtcatcttgtcccggggtttccaggcagcgtcccttgtttgggggccctctgagatgc

SEQ ID NO: 182209 - DNA, 122 bp, Homo sapiens
aagttagaaaatcggtatcacacgaaaacagtcatttcccctttaaggacctcagtgggccgggagccagccttcccgcaccttttccaaaatttccaatccccgcttggcattttctgccc

SEQ ID NO: 182210 - DNA, 122 bp, Homo sapiens
cctttatcaaagagcagctgcgaggggcgggaccctcggaaagaaaccccactggggggtcgtggtcagggagacagcccccaggatacccgctaacgaccgagacgcctggatcatcgctg

SEQ ID NO: 182211 - DNA, 122 bp, Homo sapiens
atttaggactatggaagaatgttttagtcagtgaccagccgcgataatgactgataagggcggttagtgataagcgataaggacaggtacagacataggaccgctggctgggctcatccaga

SEQ ID NO: 182212 - DNA, 122 bp, Homo sapiens
agctccgtcctcccagggggcgctgcaggcacgtctgcttgggcaggggcccggcggaagcgccgctctaggctgcagccgcgcccccagccgtatttccgcgggcgctgagcactagagag

SEQ ID NO: 182213 - DNA, 122 bp, Homo sapiens
gggtgaccgcggcttcccgggagcagacctctgtgggcactgtgaggcggaacggagcggcggggcaggagctgttctgggcaggtgaaggcaggctggtggctgaaggacctccttcttat

SEQ ID NO: 182214 - DNA, 122 bp, Homo sapiens
gagttttggcggtgccgcctcccggtgcttgcccacattgcagatgaccctccggcaacccgagacgtccttctggcagggtccaagcactcacccccttgccacaggcgccttggcccagg

SEQ ID NO: 182215 - DNA, 122 bp, Homo sapiens
gtgtatttttatttctaattgaatactctgggcactggaagaggctgggctgtgcgtgtgcgaactcagtcgaccctgcccagaggtgtccatgacgtacccgaatgtgacggaacccggaa

SEQ ID NO: 182216 - DNA, 122 bp, Homo sapiens
ggccaatcagcatacagataatatgggttaatttacatactgtatttctattggatgagccgaggtaaagccttatcttgatgtcacagtcgttacacaaagccctatgttggtaatactga

SEQ ID NO: 182217 - DNA, 122 bp, Homo sapiens
aaacaacaaaatgcagattatgatagttgcttgggtgtaaaagactatagaaaactcaagcgatgatggatagtttataataaactaaaaattgagaaccctagggcaggattctagttctt

SEQ ID NO: 182218 - DNA, 122 bp, Homo sapiens
tgtctgtggcagttggggataggaagtgatggtccatgactgacaggtaatatgaagagccgggttaaactgagctgaactgagctaaaatgagttgagtagagcttagttgaaccaagctg

SEQ ID NO: 182219 - DNA, 122 bp, Homo sapiens
tgtgagccaccttgagaaatatgtgtctgcagatcagggtctctgtggctcttgggccttcgcagtatgcactgctcgtagagatcctcagtgcatgtttgtggaattgaggtaaatgattt

SEQ ID NO: 182220 - DNA, 122 bp, Homo sapiens
actccatgttgctgtacttgtagaagccaaacgacatcttctgtgccatgcgggcggccacgctcacctgggggccggcgcggggcagcctgagtcagggaggtggcgatggctccatgggg

SEQ ID NO: 182221 - DNA, 122 bp, Homo sapiens
gccgggagctgtagttctctggtagcttcgttcctccccgagctgcaggcggttcccacccggggcactcaccacgtgggacctcatgggttctaaaggtaaaatacacgctggatcccaaa

SEQ ID NO: 182222 - DNA, 122 bp, Homo sapiens
caggggggaagaatgtactcgtcataaagcacatctccgttgtagttgacaatgctacatcgagccaaggaactaacatgcccctttggtcctgtgcccaccatctcacagtcaattgccac

SEQ ID NO: 182223 - DNA, 122 bp, Homo sapiens
atgactgggccatcccagtgttcttatttctatacattccgaggttacccctcagcaaaacgccagaggctggcagacacagcggagcatcctgcagtagggatccgaagccgtggaatctc

SEQ ID NO: 182224 - DNA, 122 bp, Homo sapiens
taaggtgagcaacaccgattcaggtagtttaagttccgagaggaaccagggcagcctcagcgggtagcttagatacttttcttagatactctctgggcagtggcctgaatgctgagtgggag

SEQ ID NO: 182225 - DNA, 122 bp, Homo sapiens
ttaaggcaggagaatcgcttgaacccaggaggcagaggttgcagtgagccgagatcgtgccgttgaactccggcctgggtgacaagagcaagactctgtattaaaaaaaaaaaaaaaaaaag

SEQ ID NO: 182226 - DNA, 122 bp, Homo sapiens
gaggtgcagtgagacggggccgtgggtagaggtggggctcccacacaggcttgagaaccccgagatcgcctccagggcccctccgtgagcatgcccatccccggtgctccgccatcccacag

SEQ ID NO: 182227 - DNA, 122 bp, Homo sapiens
acaaaacacaggctttcttatagccctaatcaatcagtccctctgaagaggattccaccccgtttcttcaagtagtcttggggcaaaaaactatggctgactattcccatttacagggctgg

SEQ ID NO: 182228 - DNA, 122 bp, Homo sapiens
cgcgccctccgcaccctgggaccccgcgtctccggactcccggctccggaccctgctgcccgggactcccggatggacagtcctgccgttgccctgtccccaccctggtcccagacgggccg

SEQ ID NO: 182229 - DNA, 122 bp, Homo sapiens
cccagggggggcagcattgtggagaacttgatatttagttactgatgctcttccaggacacgaaaagaacccatctttgaatatcaatgattttttttttttaagtactgttccggggagaa

SEQ ID NO: 182230 - DNA, 122 bp, Homo sapiens
ctggaactgtgacacaggagattttggcataaggtatttccagctaagggcagtgctcagcgacatttgatgtctgagtcactgatgacctttgctcttcagatttccagcttgttggctgc

SEQ ID NO: 182231 - DNA, 122 bp, Homo sapiens
gatgggcagccgggctgagatgctccttacttcccagacgtgatggcggccgggaagaggcgctcctcacttcccagactgggcggccgggcagaggggctcctcacaacccagacgatggg

SEQ ID NO: 182232 - DNA, 122 bp, Homo sapiens
aagataactccaagaactgcgggtggatggatggatggatggatagatagatgaatatatcgttctactcacttccaaatggtaagaatcacagggaggaaagtgaaagcgattcgagcccc

SEQ ID NO: 182233 - DNA, 122 bp, Homo sapiens
tcctgggagcagggccgggggagggagcaggtgtggggagagcagaggggttctttgcaccgggaaagagctacagggctgaatggggctcctgagagtatctcaataggagtgaaaccagc

SEQ ID NO: 182234 - DNA, 122 bp, Homo sapiens
cctcccccagtccaaacatggggaaaactccaagcgcctcccctaccagtagtaagaggccgaatatgcaccagccgatcaccagctccgccgaggccgcgccagaagtcgccatcttcgct

SEQ ID NO: 182235 - DNA, 122 bp, Homo sapiens
cataactgatatactgaccacaagtgagggccgctttggtgggcttcaaggggcacaggccggtgtggtggccagggctttcccatgagaggccctcctccccggtgtgaagacacccacat

SEQ ID NO: 182236 - DNA, 122 bp, Homo sapiens
atcaacctaaatgtccttaatttgacccagctcactataatgccattaacataacattagcgttgtggttttaggcacctcccaccatgggtttcacttaggcattcaaccagttggagtca

SEQ ID NO: 182237 - DNA, 122 bp, Homo sapiens
gagagttgggctgcgggcggcagcggcaggcgaagaatccagcgcggggaactcaggccccggcggtgcacgaccccccacagcccccacccgcccccgcgctcgcgcaacaaaacttgcca

SEQ ID NO: 182238 - DNA, 122 bp, Homo sapiens
tggggcgcacgggggacgtggagcagctgctccactcgggccctgttttcaggactttctcgtccgggtgcgcggaggtcggcctggtcccaggaaggatttgcaggcctgtggctgggtaa

SEQ ID NO: 182239 - DNA, 122 bp, Homo sapiens
aatctctaacagagccggaatcagatcctaggtttctagattctcattccaagagactaacgcgggagcggggaaggtggctcctgggcagtcaactgactgcacatttccgcccaaggcgg

SEQ ID NO: 182240 - DNA, 122 bp, Homo sapiens
tcattcttaaggagtttacaatctgtagagagggccaggcatgtatattatataagtgaccgactgatgaataaactgctgataggccctaaaataacagatacaaagtagagagataggag

SEQ ID NO: 182241 - DNA, 122 bp, Homo sapiens
aaagagcttgtcgctgcggtgttgctgttggagactcgattgttggtgacagcgaaagaacgataacaaaatgccggagcgagatagtaaggctcaggccatccgttatttcttccccatgg

SEQ ID NO: 182242 - DNA, 122 bp, Homo sapiens
gggccagggcacagcagaaactctttgctgctgtctgcgaacagcatgagaaggacagcacgctgcactgaagttgggaccccaggggtctcgctgggtctgtgagtggcagtgcactctgg

SEQ ID NO: 182243 - DNA, 122 bp, Homo sapiens
gtggagaggcctcttgcctttgtgcttacgcgccacacggtctccatctgcacaaatttccgtgtgcagtagacagttattccccagtcctttgacggaggtgtcccctggaatgcctaccc

SEQ ID NO: 182244 - DNA, 122 bp, Homo sapiens
gcgggcctattaaggcctgaggctaggacgtcgtgaggaagacccgggatcccggccctgcggcccctgcgggctgctgctggtgggtaccagctttcgttgttaggcccaagtctggccag

SEQ ID NO: 182245 - DNA, 122 bp, Homo sapiens
gaggaacgtcttgcccaccctagaagactaggaaagaatgctggaaataaaagcacccaacggcccagggcgcactcctgctaattctccgtgctcagctaggagggagccaggttttcaca

SEQ ID NO: 182246 - DNA, 122 bp, Homo sapiens
ggggcaacgcccctgagggacggggacggcacccagcaagctctgcccggggcggggaaacgcgagggcttagtggtttcctcggtgagaagcttaaccaggagtccccgaaagcagtgagg

SEQ ID NO: 182247 - DNA, 122 bp, Homo sapiens
ccctggctctgaacatcattcagaacaggaacatggggaagccagcccagcctggtgagccgggtggggacagggaggagggttgggaatggcttggctgtgtgggaggtgggtgtggtgtc

SEQ ID NO: 182248 - DNA, 122 bp, Homo sapiens
ctatgcagcgatctgcagtcctctacactacacagttattatgcccaaaaggctctgcctcgctctcatcactgggccttatgtgattggctttatggactcctttgtcaatgtggtttcca

SEQ ID NO: 182249 - DNA, 122 bp, Homo sapiens
tctcagaaaattgaccgattagatggtgcacacatcccagagttgaccaaaaaagctcagcgacatctagtggctccttcccacccagcactgatgaacatcttaaagaccaaaaaagctca

SEQ ID NO: 182250 - DNA, 122 bp, Homo sapiens
agggacaattgcatcagggtgctgggctccgggaagaactcagaggacttggctgacgggcggatgggacagtgattggtgccgagaatgggccagagaagcaggtctgcctggagcaggca

SEQ ID NO: 182251 - DNA, 122 bp, Homo sapiens
ctgggccatgagaggaagacttgcccccggccaacaagtatccgagagctggaaaggccgcgtgagcaaacagacaaaacctgcactcgcctcccttaaattgaggggaaatcctggagaaa

SEQ ID NO: 182252 - DNA, 122 bp, Homo sapiens
ccatgccagaaacgtcagcccacagatgctcctagaggaagatgcagcggacacgaagggcggtatgagaacaggagaaacacagacagctgccgccaccaccggctcacacgcagcctccg

SEQ ID NO: 182253 - DNA, 122 bp, Homo sapiens
atctttgttcttaatattgccacatcttaagcatgagccagttggatattctgtactgcccgtaaaagccaggagttaatttactgctgcaaaatactcttctctcaccaaccatccttgct

SEQ ID NO: 182254 - DNA, 122 bp, Homo sapiens
gctagggccttcagcactcagcggtttcttctacgcaatttctcagtttcaaataaagcccgtctgcggggcaatttcggtaagggttcctccctccattaggcccggagcaggggtgggtg

SEQ ID NO: 182255 - DNA, 122 bp, Homo sapiens
taggcaacctttcagctggaaaaaacgcctgtgcagaatggttctggcaagaattcaccacgtgccgggtgctgtccctgcattatttcaagccagagcaatcctgtgtacaaacacgtacg

SEQ ID NO: 182256 - DNA, 122 bp, Homo sapiens
cacccaggtgtcccttcatggagatgaactcagtgacttcccacaagaagccactggctacggctctcatcgttcttgttctttggatgaagaggctgagtcactggccatgtggctgggat

SEQ ID NO: 182257 - DNA, 122 bp, Homo sapiens
ggcggcgggcgcgctgggcctgctctggggctcgctgttcggcggcggcctggtggagggcgccaagaaggtgacggtgaccgagctcctggcaggcatgcccgaccccaccagcgacgagg

SEQ ID NO: 182258 - DNA, 122 bp, Homo sapiens
gtagagaaacctatgcgtgacctcctgcggcagccgcaggcagctgaccgcaaacagcctcgcccgtgtcccggagcagttgtgccaccagacgtaacactggatacttgtctccgggcccc

SEQ ID NO: 182259 - DNA, 122 bp, Homo sapiens
gaacagaactggtcaaacccgttgggaaggcctgggctgatgtgtcacccctgaaggtggcgtcccttattttagtcctccagcccaggacccagctgcctgctctccctatcatgacccag

SEQ ID NO: 182260 - DNA, 122 bp, Homo sapiens
acagtgttgtggttaggaatcgggctctggaatgtgtttgtagcttcgcactgccttgtacgagctatgtgaccatgagcaaaccatttaactagtatcagccctgtttcccatttgttata

SEQ ID NO: 182261 - DNA, 122 bp, Homo sapiens
ataaaatactggacacataaacccagtacgtgatataaatattatttttaagtaaatgtgcgtgtgaggggatggtttgaaaatcatttcatctcagggaagtctttttcgtggatcaaaac

SEQ ID NO: 182262 - DNA, 122 bp, Homo sapiens
actctgcacagtatttgaacccagaagtcccccggaagaaatgcacattgaacccaggcccggtggagtcaggacccaaaatcacaggcgattgatctcggggactgtaagccactgttcct

SEQ ID NO: 182263 - DNA, 122 bp, Homo sapiens
ggccttcgcccaggtgcagccgtagggactgcggctcgtcagcctgacgccatcaagctgcgccccagccagccagtcaatggctgtgtccagagcttcccgcctcgggctcagcgtaggtg

SEQ ID NO: 182264 - DNA, 122 bp, Homo sapiens
tgagctatccaggtgtccttggagacaggcttctggtgcaactgtccagttgtccaatatcgggggctgattttgaggggacactgtctggagcggggtgggagtttggggcacctgtctcc

SEQ ID NO: 182265 - DNA, 122 bp, Homo sapiens
ggcgggagggaaggctccgggtgggcgaggaactttgtaaagcgccccgaggaggcagcgcgcggagccctacgcgcacacacagcggcacacgctcacacccacacacaagtcttcccggg

SEQ ID NO: 182266 - DNA, 122 bp, Homo sapiens
aaaaatgatcatctctcccatcagagcactgtttgatgatgttgctggaggaggtgtaaacgcctgttgcatgtccttggccatcacaggccgcactcgtgtggagttttgtgcacctccaa

SEQ ID NO: 182267 - DNA, 122 bp, Homo sapiens
ttgggggagcagggaggaggtcgccagggctctcctctggcgcgggtgtcttggggtccccgggtccaagcgctgaacctcccgcctggggccacgaagctgttggtggcgcccccttctgg

SEQ ID NO: 182268 - DNA, 122 bp, Homo sapiens
ctcggacacagcggctgcggggggtgggggttcccgggaggccgaggccccgaattcgggcgccgcagggaccaccaccgcgatcttcctctgctccttggccgggcccagcgactcccaaa

SEQ ID NO: 182269 - DNA, 122 bp, Homo sapiens
tattaaatcttacataacatacagccaaaagcattagaaatccactgccagatatcctgacgcaccatcctgaaaatatgtctgatacataccactaacatatataacaaagtatggcattt

SEQ ID NO: 182270 - DNA, 122 bp, Homo sapiens
ctttgttgtttgctcagagtacaaagaagaggccttctccgggttcttagcagacgagcgcgacctctccgaccagggagacagacaagaggggaggttatgaggtcacctgggagaggtgt

SEQ ID NO: 182271 - DNA, 122 bp, Homo sapiens
ctccaggcgagtacggggctggcgggcgcagtgctgcctttctgctctgtctcttgatcccgcttaggatctttgtggctcctctgagtcttcttagagaggccgtgaaagatgggaaaggc

SEQ ID NO: 182272 - DNA, 122 bp, Homo sapiens
gggattggcgagttgcaagaaatatgacactccgcgtttctgggctgcccggcccagcggcgtccgtccagcgtcccaccctactcctccgcttctaactccggctaagaaagtcccagatt

SEQ ID NO: 182273 - DNA, 122 bp, Homo sapiens
acctcaccctggttctgcggctcttagcagatgaactacaactcccaaaaggctatgcagcggcgggcccgcggagaaaagcgttttctctttggtgatcaacgcgaggatgttgccgcaaa

SEQ ID NO: 182274 - DNA, 122 bp, Homo sapiens
gcacttcccgagccctcgtagcactcagaggtcgcatccacacctgggatgcctagggggcgcctcctggccgggtgtcccgggaccctgcgaacgcaggagcagaatgacgaaggtgacga

SEQ ID NO: 182275 - DNA, 122 bp, Homo sapiens
gacatggggactggagaagagaatgccagcaagcttcttgatgcccagatgcaccccgaacgccaccacggggctggtcccccacaggacatgcagcgtccagacctggcctgggactgccc

SEQ ID NO: 182276 - DNA, 122 bp, Homo sapiens
ttcccagagccctctgaagagcagagagaccctagagaaaagcaaaataccaactgtcctcgagtccctgccactctagagtttcatgaaaccagaaacattcagggatggtatggggtggc

SEQ ID NO: 182277 - DNA, 122 bp, Homo sapiens
tgcaggtacaaaaaaaagagattcttagaacaataaatggaaagctagaagagtaagaagcggaagacaacaaatatgtgctgttcaggtagcttcctctggattaaaagtacaattaccaa

SEQ ID NO: 182278 - DNA, 122 bp, Homo sapiens
tagtcattgtatttaacaagctgaagttaacttcatagggaaaaaaataaattaaatgtgcgggtgtctcaggaaacttcattttctgagtgaatagccaagttgatgcacatcaccagaat

SEQ ID NO: 182279 - DNA, 122 bp, Homo sapiens
ggctctcacaaagcctcctgattttagtaggctttccctggaatgacccagattccttttcgttaccttagttaaggcaccccctccccgtgcagggtcagggttggaaaactaccgcgctg

SEQ ID NO: 182280 - DNA, 122 bp, Homo sapiens
gtattacttaaataactaatagttcaggtactgcactaccgttacatacgggaaagtacacgatctggacctaggggagattaccgtttaaaggcgaatctggcacgtgtacacgcacattt

SEQ ID NO: 182281 - DNA, 122 bp, Homo sapiens
gatttccccatagaagtcctctttgaaggtatgcaggataagcgtgtccatggacttcttcgtattcttgtggtagagggtccatcctatgctcaccaccacctaaaggccatctccacttc

SEQ ID NO: 182282 - DNA, 122 bp, Homo sapiens
cgtaaccctctcggtgccagagcgggtaaatgacagcttagccctgaaggactcttcccccgtctaatcactttattttcctcttctaccaaacctaggcagttggatgggtaggggcttgg

SEQ ID NO: 182283 - DNA, 122 bp, Homo sapiens
cgggtgacacctgctgggagcttggcgtggacaccccagccacccccagcccagcccagccggagcaccctacccctgggcatccccctggccatccagcctcaccatgtccaagaggggca

SEQ ID NO: 182284 - DNA, 122 bp, Homo sapiens
cgagcttgccaagcatgcgcagtagcggcgggttggtttgagaagccgccagggagccagcgcggcgacctagctggctggggcaggggaggggcccgccttatatgggagctgcgtgggga

SEQ ID NO: 182285 - DNA, 122 bp, Homo sapiens
ccacaaccccagcctcacaccaccagcccatttatctggaggacccctagtctgagacagcgccaagaatcctgaataagccataggatggcagaggcccattgccaggtggggaatcccat

SEQ ID NO: 182286 - DNA, 122 bp, Homo sapiens
cggcgcgcggcgagccggaagtcacggtggagatcggagaaacgtacctgtgccggcgaccggatagcacctggcgtgagggcggggcccagggctgggggcggggcggagctcagggccag

SEQ ID NO: 182287 - DNA, 122 bp, Homo sapiens
gctctcaggactggaaggtggaaatttaatctacgaagttcccttaaactgcataagcttcgggacctcttgattcactgatattttctggtggacccagggcttattcatgttaaaacctg

SEQ ID NO: 182288 - DNA, 122 bp, Homo sapiens
agtgctgggattacaggcgtgagccaccacgcccagtcatgaccattagttctaaatgtgcgctgagattgtgcatagggaagattcctatacttggtcgtaatttgtaacttttaaataga

SEQ ID NO: 182289 - DNA, 122 bp, Homo sapiens
gagtaatcccaggcttttgtctgttgccttggcattactttttgttaacaactactgaaccgaattggtaccatttttaatgaaagaatgacatcttgtggcataatgctctaattgcaata

SEQ ID NO: 182290 - DNA, 122 bp, Homo sapiens
acgtccccgtctgcagagctgctctccttagtgactcatgacaaggcacttgctgggaagcgggagagcaggaggagagaatcagagggagattaggataagaggtgtccctggctctgaga

SEQ ID NO: 182291 - DNA, 122 bp, Homo sapiens
ctgacggagggggtgccctccggctccagccccgactcccaccgtctccccggtcggtcgcggcgctcggatccagaggaattcacttaccccagccccagccgggatccgggccaagcacc

SEQ ID NO: 182292 - DNA, 122 bp, Homo sapiens
aaaatgagagtccagagaagccccggacggctcggggcgctaatggaaacacatggctgccggctgcgggcttgtcagcttcccccggcgctgccattcccgtctgataatccggcctgcca

SEQ ID NO: 182293 - DNA, 122 bp, Homo sapiens
acacagtgagactctgtctggaaaaaaaaaaacaaacgaaacaaacaaacagaaaaaaaacggtctgagacctgggaacagtcttcagttttccaaaggctattacacagaagcaagcctca

SEQ ID NO: 182294 - DNA, 122 bp, Homo sapiens
acgccaggaaccgccctggcctgagggagggcggcacccaagtctttattagcgaagtcacgttcgagtttgtgttgcgtgccgggcgttacgccgagtcctgcacctgcactgtgtccttt

SEQ ID NO: 182295 - DNA, 122 bp, Homo sapiens
cccacagctattaaatcacttaaagtctcagatattagaggtcattatttccaggacaagcggacagcacgctctccgaacttgacccacagtccacggatttgtaccatgcgtggtgtgag

SEQ ID NO: 182296 - DNA, 122 bp, Homo sapiens
ctgcttctgtttcgcggatgtccgggaggtgcagtggctcgaggtcacgctgggcttcatcgtgcccttcgccatcatcggcctgtgctactccctcattgtccgggtgctggtcagggcgc

SEQ ID NO: 182297 - DNA, 122 bp, Homo sapiens
ctctcagccaggcgggtgagggtctgtgccggcggggcatgcgacccgccaggcaggtgtcggagccctcacaatggtgcacctggcgtgggcgtcaggcctgcccattcagcccggaacaa

SEQ ID NO: 182298 - DNA, 122 bp, Homo sapiens
tggagaggcggtttggctgcggcgcccagagccctagagacttgtggagttgttgaatgacgcctgtttagagtaaaacatggctgtgatttttggagtgccgctgctggtccctgctggaa

SEQ ID NO: 182299 - DNA, 122 bp, Homo sapiens
ccaggatgtggggcggctggaagtctcccgtgttgctggtgggaatgcaacagggcagagcggttgtggaaaacagcctgagcctggccacagacatacttcccagatgaaccgtgggctca

SEQ ID NO: 182300 - DNA, 122 bp, Homo sapiens
atgtcctaatgcagaaaccgggccttcctgcagtgggccgggtcagctcggatctccgcgcggtcctgagtcgccgcccccaacccagccaaggattaatttaggcgagctatcccgcccgc

SEQ ID NO: 182301 - DNA, 122 bp, Homo sapiens
caaactcctgacctcaggtgatccacccgcctcggcctcccaaagtgataggattacaggcgtgagccaccgcgcccagccttcatttagtactgtctaatgatgttttcatactgcaagga

SEQ ID NO: 182302 - DNA, 122 bp, Homo sapiens
cacgtggtaaataaacttgtttagaaacacctgtaaagcttaaacgcgtgctttcttcaacgcgtttggaaactctaacccccttctcttttgtacttttgcttgctgtccactacagaggg

SEQ ID NO: 182303 - DNA, 122 bp, Homo sapiens
ggctctggtccgggggtggtccctggcagagagggggctgggcagaagatgggatgctggcgctgagatgcggggtattcggagacccccaggcccccacctcagagcccgctgtgctctag

SEQ ID NO: 182304 - DNA, 122 bp, Homo sapiens
tgcagtggtggaagagaagaaaccctttcattactaaaaagacagggaaggatgcctttgcgggtcgaaaacatggttgaaaattcaatttaactgaacaccaagccactgtgcttcttgtt

SEQ ID NO: 182305 - DNA, 122 bp, Homo sapiens
atgggctggagccgctttggggaggcccggctgggctgtgccccacgattccaggagttccgccgtgcctacgaggctgcccgtgctgcccacctccacccctgcgaggtggcgctgcactg

SEQ ID NO: 182306 - DNA, 122 bp, Homo sapiens
tgggcgccggggcggagcggcctttgctctttgcgtggtcgcgggggtataacagcggcgcgcgtggctcgcagaccggggagacgggcgggcgcacagccggcgcggaggccccacagccc

SEQ ID NO: 182307 - DNA, 122 bp, Homo sapiens
gcgggtcacattccacagatgcagagccccgctggacaggatgcgatgccgggggccgcccgctggggaaggccagaataagggacctggcaggacctcccatccccgggacccctccccat

SEQ ID NO: 182308 - DNA, 122 bp, Homo sapiens
ttgacgtttgctctatactcaccactccgatgtttctatcttccattctgatttggatcccggatgagctcccaaaatgaaacagctccactgtctagggtatataccctggttctttacca

SEQ ID NO: 182309 - DNA, 122 bp, Homo sapiens
ctgtagaagtttgagggtaacctctccaaccaagccccacctgagggacatttgagtctccggcccaagaatagcctagcctgctcgaaaccagctttgggcccgactcgccgaggtgcagg

SEQ ID NO: 182310 - DNA, 122 bp, Homo sapiens
aaagttgaaatcgtatttgttaaaactgtcatgttgaatttgtggcccagattgttttcccgaggcctgctgggccagagctcgaatgccgctcccagctgcagacaccccagcccaggaaa

SEQ ID NO: 182311 - DNA, 122 bp, Homo sapiens
gctcccgcccccacgagcacgcggccgcgccaagcacacggtatgggtgtagactggacccgccccctaaatccaggagaccatcaactatggaaaggagatctagggaacaccgtcttgaa

SEQ ID NO: 182312 - DNA, 122 bp, Homo sapiens
tgtctggcggcgccgcagagaagcagagcagcactcccggttccctgttcctctcgccgccggctcctgcccccaagaatggctccagctccgattcctccgtgggggagaaactgggagcc

SEQ ID NO: 182313 - DNA, 122 bp, Homo sapiens
gtggaggaacagaggcagtactcacggggaggccggggggacctccaggaccaatggggccggatgctcctgggataccctaggaagggtagtggctggttcaactgggtcctcctcccaca

SEQ ID NO: 182314 - DNA, 122 bp, Homo sapiens
gcagcggcgggctgaagggctcctcaagcacagccagagaaggcatcggggctgaggaggcgcctgagagcgagcaacggctgccagcacgctgtcacctctcaagagtacagtggcacaat

SEQ ID NO: 182315 - DNA, 122 bp, Homo sapiens
gctcagtcaagtatctgagagcgtccagaatcagctcagctggcctccttttcacttgctcgtagcatggccttacaaagttgcaaagacctgctggaatcaaggcctcatatttcagaata

SEQ ID NO: 182316 - DNA, 122 bp, Homo sapiens
cccagcttgggggaaggagagcggcgcttatcgaagtgtggtcgacctccatccgcccaccgagcacttgggacccgctgcacatatccagagcagggaaagctgtggctttctcgggggag

SEQ ID NO: 182317 - DNA, 122 bp, Homo sapiens
aacaaagggaaggcagaatctttcattcacacgatttatccgcgcccactgggtgcactacggtcgggcattggcgacccaggagcgactgacctgccctcatggggcttacggtccttagc

SEQ ID NO: 182318 - DNA, 122 bp, Homo sapiens
tcttaagtacctgcgctcagctagagctctcccggagcattttaaatactgaatgccgagcggagaagggaaacagagtgtattaatccccactccggttgccggtgtctgcaagcctcctc

SEQ ID NO: 182319 - DNA, 122 bp, Homo sapiens
acaggcacagtcagggcgtcgcgtgggcctactgtggcaaaggagacgtccgcgcgaatccggtcctggggaaagggcagttccaacaacctttcatccagaagcctgcacagccaatgcga

SEQ ID NO: 182320 - DNA, 122 bp, Homo sapiens
atcctcaagctgctttatcaccttccagcaatgaagacaatgcagaatagcagactctggcgaagttgttcaccctgagcagtgcatgaaacattcctttctggctaaagtttagaaatatt

SEQ ID NO: 182321 - DNA, 122 bp, Homo sapiens
ccagccccactaggggttacgagcttattcagcgtcccacaactgggaggtattagaagccgggtctgtgggacctaaaaacccatgcttgtcccactcactctagcactgcccagtctaaa

SEQ ID NO: 182322 - DNA, 122 bp, Homo sapiens
actgcctccccctacagccctttcaattccttggccttcagctgctgcggcagcagccgtcgtcccccctcccttcgcccacttgcccctcgcctcggaggctccggtgtgccgccttggcc

SEQ ID NO: 182323 - DNA, 122 bp, Homo sapiens
gccctcgctccccgccgcctgacgggaattgtagttcctgggagaagccgggctgcctcacgaggcactaggaactacatttcccggtgagagagcggctccggccggccgcgcggtaccgg

SEQ ID NO: 182324 - DNA, 122 bp, Homo sapiens
tactgaacagtatcgttgctggtgggtgccctgcagtctgcatttggcaaactggcatagcgagtcccatgccgtgtcgagcctgagccccacgtttcataagggattagggtcactggagc

SEQ ID NO: 182325 - DNA, 122 bp, Homo sapiens
acattgtccttttcaaaacaagcagccagctggaatgattcaaacctctgttcagcacaccgttaaaatgcagcttccttcttggacacgagaattacaccagggagcagaccgagtacagc

SEQ ID NO: 182326 - DNA, 122 bp, Homo sapiens
tacatccgtgagtaaccagaagccctcacccccaaactcctaggccgccgcggtcactttcgcaaaaatgaagggtcggttcactgccaagtggcctttcagttgtccattgcccagcccag

SEQ ID NO: 182327 - DNA, 122 bp, Homo sapiens
aagagcgaaggaagccaacagagggtagcaaggttttgcgggggcggtttcaggagatgacgtggtggacaacagggagaacaggtcgggggggagcctcagggtgccagctgagtcccagg

SEQ ID NO: 182328 - DNA, 122 bp, Homo sapiens
gtcctcacctgtgtcaccctcgaccccgccggtcctcacctgtgtcaccctcgaccccgccggccctcacctgtgtcacccctcggggctgaaaccattttaagtgctcacctgggtgcctc

SEQ ID NO: 182329 - DNA, 122 bp, Homo sapiens
cacggtcctatgagtgctgtaaccttgggcgtgaatgtgagctgttcctctgtacacccccggtgtgaatgctggtgtgtgaatcacgctgtgttctctcagttgcctggtgagttttggca

SEQ ID NO: 182330 - DNA, 122 bp, Homo sapiens
gagctgcctggcacgcaggagagccgtgacctcaccagagcacacaggcaccccggtacacggtacacgcagacgcatgtctgccatgtgctccgtcaatccacccaataccccctaagact

SEQ ID NO: 182331 - DNA, 122 bp, Homo sapiens
agtcgcggcggcggcccagatgcagaggaccacagcgacacctggctcttctttgagcggcgtccagaggctgccttcccgcgactcaaaggagcataggggaacctgcaggggcgtggccg

SEQ ID NO: 182332 - DNA, 122 bp, Homo sapiens
gaatgactttctcactgcgttattcaaggttattttaagctccgtgtgaagttcgtgtcgcgttgcctctggctgggactggtatgcgagcctcatttcaggaaacacggcgttctttccct

SEQ ID NO: 182333 - DNA, 122 bp, Homo sapiens
gtaaggaaacacattaaaagaaagaaatggccagtttctcatctttcttaatgcatcacacggatcagatccaagcacaaatctctcttaaagagcttggataagcaccacatggtgccgag

SEQ ID NO: 182334 - DNA, 122 bp, Homo sapiens
agaatccaatcaggttctccttctttactacttgatgacttctttaaagataaataagcccgcggaccaagaagtgggtacactggctcggttaactctctctccccagaaatttcactact

SEQ ID NO: 182335 - DNA, 122 bp, Homo sapiens
ggccgcgctacacctacttcaaggtgcccacggagcgcgacctggtctactacgaggcctcgcccaacttctgcgagcccaaccctgagacgggctccttcggcacgcgcgaccgcacctgc

SEQ ID NO: 182336 - DNA, 122 bp, Homo sapiens
cgggagagtgcccagtggccactccttgggaaaggatacccagaggctaggggctcccaccgcccccacgcagcgcccaggggtgcagggatggggggcccggctgtacctgcggctgcccc

SEQ ID NO: 182337 - DNA, 122 bp, Homo sapiens
cacccctccactaataatgattaaacccgttccaccgcgcctgtgcagggtcccgggcagcgcgagcctgcgtggggggaggggagaagagggcaaggggaggggacaagagagctagcggt

SEQ ID NO: 182338 - DNA, 122 bp, Homo sapiens
catctatcttattagtactgtccttctagaaaaccctaactaggatgggtgagtgcggggcgggcgtggggaaggaccgggctcccctcgcatatggttggagagaggtgaaacgcgcccag

SEQ ID NO: 182339 - DNA, 122 bp, Homo sapiens
gaagctaacatgtttgggacagtgagccagccaggttcccgggaggcctcctgcttccctcgcctgactgcacttacgccttctcggagactgacttctcctttgcttcttaccatgaggct

SEQ ID NO: 182340 - DNA, 122 bp, Homo sapiens
tttgctcttcaaatgcgctaccaagtgccatgctttacaaacagataagcgcttcaaatgcgctacaaactggcgcttcagatgcgctacaagcacgcttcacgcgggcgacaaactgatgg

SEQ ID NO: 182341 - DNA, 122 bp, Homo sapiens
cccgtctgggatgtgaggagcgcctctggccggccgcgaccccgtctgggaggtgaggagcgtctctgcccagccgccccgtctgagaagtgaggagaccctcctcccagcatccgccccgt

SEQ ID NO: 182342 - DNA, 122 bp, Homo sapiens
aagcgcccctgacccccagggcgcaaggtagagcgcccccagcccaggcgcggggccaggcgcctctctccaaggtgctgcgcccccagccgagagcggtggggtacactgggaggacggcg

SEQ ID NO: 182343 - DNA, 122 bp, Homo sapiens
cgacagccaccccttggggcgcgcggctgcagttagggtaagggtcccagtgcgcaggcgcgctcttgttcgcggtccccaactgacgcgcccgcggcgggaaggagagggggccgccggtg

SEQ ID NO: 182344 - DNA, 122 bp, Homo sapiens
aaccaggggctgttcctcatggaccctgggtgtgctctaccagggggctctgccagcagccggaccggggccacggagatgctgctgagctctcttctctgccccattcgaggggtgacacc

SEQ ID NO: 182345 - DNA, 122 bp, Homo sapiens
gctccagcacctcccggttgttcatgcctgcaaagacaagcgcagtgagagtgggcaccccggggatccaggccctgaccgccgcacttgcagatcccctttcttcttctttgcgtctgcat

SEQ ID NO: 182346 - DNA, 122 bp, Homo sapiens
ccccaccttctagaaacctgactaattgaattactgggagtgccgaggcgccctctcctgcgccggagcccggcagccacgtgtaaccctttgggtgctgaattccgtctgggctaaggaat

SEQ ID NO: 182347 - DNA, 122 bp, Homo sapiens
gaggagggatatctggatgccgaggggagttctgccaggggggcggttggagaggagtcccgccgctgggcagtcagactgcaggaaaagaccacattcctactccatgcccgcctctggct

SEQ ID NO: 182348 - DNA, 122 bp, Homo sapiens
accaataaacatactccccatggccctgtcccactctccacggccctgtcccactccccacggccctgtcatactccccacggccctgtcaaactccccacggccctgtcatactccccacg

SEQ ID NO: 182349 - DNA, 122 bp, Homo sapiens
cctgctccatagtcccacagctccatcacctcacagccttgaaggaagtggtagggatggcgcactcactggtttaggtaaatgagtaggaagcagccccagatggagttgctttatgatta

SEQ ID NO: 182350 - DNA, 122 bp, Homo sapiens
ccgtgcttgcagtttcctataagtagccggctctcggtgccagcctcagcctgacttcagcgctcccactctcggccgacacccctcatggccaaccgttacaccatggatctgactgccat

SEQ ID NO: 182351 - DNA, 122 bp, Homo sapiens
tgccagctggcgccgaggaactcagcggcgtggggcgagccctggccctggtgggctcagcgggtcgctgctgccactgcgggtccagcgtcccctccgtaagccccaagcctgtggggcct

SEQ ID NO: 182352 - DNA, 122 bp, Homo sapiens
gcccgccccataaagcgctgcccgcctcgtccccacccccccaacccccgcgcccgccctcggacagtccctgctcgcccgcgcgctgcagccccatctcctagcggcagcccaggcgcgga

SEQ ID NO: 182353 - DNA, 122 bp, Homo sapiens
cggcctgggagcaggatcccgggggaccgagcgcctgagctgacccctgggcctggcttccgctagccgcctagaactctgcctaggatgcagcaggcccagctcggggggccgagaaccgc

SEQ ID NO: 182354 - DNA, 122 bp, Homo sapiens
agaagtgattttgaaagggttacgaaaaacacagctgttggtgcactcctatagcaaaggcgctctgcagaaagaaagaaggggggagctgtgtgacatctatattaacctttggctgctca

SEQ ID NO: 182355 - DNA, 122 bp, Homo sapiens
ggtcgaggggctccacggaggactccatttacgttacgcaaattccctaccccagccggccggagagagaaagccagaaacctcgcgaccagccatgggccacctctccggaaaaacaccgg

SEQ ID NO: 182356 - DNA, 122 bp, Homo sapiens
agaaaaaaaaaagggggggagagaaaaaaaaagaagtcacatgtccgggttatacgtatgcgaagagaagcagcagaaggagaaaaaaattaaggcgagcaggaggaggaggagaagcagcg

SEQ ID NO: 182357 - DNA, 122 bp, Homo sapiens
atgctgtgccgtgctgctgccatagtgaggcgaggccctgtgccatgcctgggggaggggcggcaggagactggggggccgcgtggcgtgtcaggctgcggccagtggggagtgccgaccat

SEQ ID NO: 182358 - DNA, 122 bp, Homo sapiens
aatgttctggaattaaatcgtgctggtggctgcacagccttgtgaatccattaaggttcacgcagaattgtacaatcaaaaagggtagactcaatagagttatagctcaggaaagctgttat

SEQ ID NO: 182359 - DNA, 122 bp, Homo sapiens
ggcggcgctgcggatccagggggtcggctgccaggtacaggtgaggacattgcgggaggccggctgggagccttttgtgcggccccagggacgcgcaaattctgaccagtcctccatgtctc

SEQ ID NO: 182360 - DNA, 122 bp, Homo sapiens
agagcagtagcaggtgttttgtaaagagaatcccctcccttttcacaaatggtggaacaccgactttgtccatgaacttgttattcagtttccagaaattatatccaggttagaatgccact

SEQ ID NO: 182361 - DNA, 122 bp, Homo sapiens
tgagaccttgtctttacaacaaagaaacacacacacaaaaactggctgggagtggtaacacgtgcctatagtctcagcgactcaggaggctgaggtgggaggatcacttgagccccagaggt

SEQ ID NO: 182362 - DNA, 122 bp, Homo sapiens
gggctcgggctccgctccgagctcagtgggcgtgcgagcgagcagcgcctgagtgggtttcggggagggggtcatactccccgaaaggcgatttattcaaggcttgtctcttccactaatat

SEQ ID NO: 182363 - DNA, 122 bp, Homo sapiens
ctacatgttacagccttattttgtagttgtttagcatggggtgggggttgaaaggagaagcggctgaattgaccccaggagctacagaaacagtcacaagaccagaatagtgaataaaatgc

SEQ ID NO: 182364 - DNA, 122 bp, Homo sapiens
cctgggcaatatagtgggaccctgactccaaaaaattttaaaaatttgttgaggtggtggcgcaagcctgtagttccaacaactcaggaggtgggaggatggcttgaaagcagggagtcgag

SEQ ID NO: 182365 - DNA, 122 bp, Homo sapiens
aagggaatcagggaagaacacctccacctactacctcctccgaccccagctccagctctccggctccccactgaccaacatccaaagggcaagaaagcttgatgacttggcctttacaagtc

SEQ ID NO: 182366 - DNA, 122 bp, Homo sapiens
tctctctctcataaagaagtttcacacgcctcccgctcctcctgttgtgtgaccgctacgcgcgccgctaccgtgctctcccggctccaagcgcagaccaagagttccgctgccagcaaggc

SEQ ID NO: 182367 - DNA, 122 bp, Homo sapiens
tcacccggagtcgggatgggtcttgacaggatgcccgggcgacgctgctcacaccgagcccgaagtggagtcctggtttcggggacccttccgcactccgagctttgcacctcacccggcct

SEQ ID NO: 182368 - DNA, 122 bp, Homo sapiens
ttctacaggcagataaaactacagatataaaatataagttcagccaggtgctgtgtctcacgcctgtaatcccagcactttgggaggccgaggcaggaggatcacgaggtcaggagatcgag

SEQ ID NO: 182369 - DNA, 122 bp, Homo sapiens
ggcggcgggcggcgggcggcgggcgggggcggggctctccttgctggccctgcgaacgaacgagcactgttcgtggttagaaaagcgaagtgctgtaaaaacccgggccttcacgaaaagcg

SEQ ID NO: 182370 - DNA, 122 bp, Homo sapiens
caaaagtttacttgaagtgaagcccctcctggtttcatactccatgaagcaaaccagtcccgtccgtccccgtgtgtccagttcccagaggatgcgcctgggggctctgggaagttccctcc

SEQ ID NO: 182371 - DNA, 122 bp, Homo sapiens
gcacacagtggggccaacactacggcttcctgagctgtccagcaggtttctgcttctcaacgcggccctgcctggttctgtaagagcaggagcaggagcaggtgattaggacgtctgcgcag

SEQ ID NO: 182372 - DNA, 122 bp, Homo sapiens
aattgcttgaaggtgcagccgagcgaaattcaggctcggtggaaggtagttacaaagcaacgccttaagacaggcaggagtgtgaagaattacataaacagccagttagatctcattagatt

SEQ ID NO: 182373 - DNA, 122 bp, Homo sapiens
cacagagccaggtcactagcacctttataaagcctgggtcttccaccgtcgctaagttcccgtccttccctcctctcctgattttctctccctttaacttctcccttccccatatcagtctt

SEQ ID NO: 182374 - DNA, 122 bp, Homo sapiens
cctcgaatcacagagcaagaaggtgactacaggtaaaatttgcaccaggtctggctgattcgtgaagttgtcaggcagctttctcaccctctcaggtgatgtgtcctaggaaccaggcacca

SEQ ID NO: 182375 - DNA, 122 bp, Homo sapiens
tcgcccgtcccgctgtcctgcagctgcagcagcgcactgacggagtcaagcgtgtcaggtcggggtggattgcagagaatttgttataataaactaagaggccccttgccctgccccccaac

SEQ ID NO: 182376 - DNA, 122 bp, Homo sapiens
ggacagaggggcaaaggaacctggcagagcgagcttgggatgccgcggcccctttaagagcggcggcggcggcgcgcgctccgacggctacccccgggccccgcccctttcccgtgagccct

SEQ ID NO: 182377 - DNA, 122 bp, Homo sapiens
catccttccccaccccttccagatgtagggggggtgggggatcccctccgcgataggccgcgagggttgacgcggtcccacgaccccctcccacgatccccagaggtgcagcgggcacaccc

SEQ ID NO: 182378 - DNA, 122 bp, Homo sapiens
gcgaaggtgctgacgctggacggcatgaacccgcgtgtgcggagagtggagtacgcagtgcgtggccccatagtgcagcgagccttggagctggagcaggagctgcgccaggtatggcccag

SEQ ID NO: 182379 - DNA, 122 bp, Homo sapiens
tacctgtgataaacagaaaacaactaataaaggtttatcccgccctcaccctcttaaacccgcttcacagacctggctgaaactcacatccaggcgaggcgctcacgtgacccgttctaaac

SEQ ID NO: 182380 - DNA, 122 bp, Homo sapiens
ttgccccttgatgaacaaggctaacctgctgagcctttgaagcaaggaactggagatggtcgttttaggggtttatgttctggattccagaaaacatggaaacagggccaataaatgcatct

SEQ ID NO: 182381 - DNA, 122 bp, Homo sapiens
cctcttctcttagatataaaaactgttttttttttgttttttttttgtttgtttttttcccgtctggagttggcaggaggccaattactgggactatgtacaatgcagttttcacaaggaca

SEQ ID NO: 182382 - DNA, 122 bp, Homo sapiens
agtaagtggcaagcccgattcagatccccgcaatctgactccagaagccagcaggggttccgcagatgttggctgaatgaatcactgaattaatgaatgtgtgctcagccacccacacacac

SEQ ID NO: 182383 - DNA, 122 bp, Homo sapiens
gaagtggggcaaaggtgaggctattccccggggaccttcgagtaagcccgggccgcggagcggcagagacaaagctggccacccgctgatgaccgagctcagactgtactgtctcacagccc

SEQ ID NO: 182384 - DNA, 122 bp, Homo sapiens
tgtggaaggctctcaggagcgggtcggcgtctggttggatgcgggttcgagccgcgtgtacgtactggagggagatggtcagactgggccgggaatccacctcacagccaggcgccggccgc

SEQ ID NO: 182385 - DNA, 122 bp, Homo sapiens
aaattagagatgcttccttgcttgatttttaagtataaattaaattacctttaaaaagtacgtaaggttaggagtgaaaaaaatcctgtttttaaaggacttcacacaccctttgtttcttg

SEQ ID NO: 182386 - DNA, 122 bp, Homo sapiens
ctctggcctgaggggcctgtaggacaacccgagcttgggctgccactgcctgaagctctccgcaactctggaaaccttccggtgtggggccaccccctcccaccatgctgacaattcctgag

SEQ ID NO: 182387 - DNA, 122 bp, Homo sapiens
ctggaatcagcctggctcctctgagtggggagtggtgttgagaaacctcgatctagacgccgggcatgctccatgctcccggagtgtcttctcccatcaccgcaccctccggttgatgtgtc

SEQ ID NO: 182388 - DNA, 122 bp, Homo sapiens
actcccccggcctccttccgcggagtaaggaattgcatgtaaacaaaggactatttgcagcgccccccgggcggcgcgaggccggggcgagaggggcgcgggcccccggggaccggctgcaa

SEQ ID NO: 182389 - DNA, 122 bp, Homo sapiens
ggtttcctgctaaacggaaacagagcaaaggccacgtgccctccccagctgaatctaccccgggaggactcccctgactttataagccatgaacactcagagcagatgttcaacaggaaggg

SEQ ID NO: 182390 - DNA, 122 bp, Homo sapiens
cctctgtgggctcctttgcggcccgagcctccccgacgagcgctgccccctgctccacggcgcccagtcccatcgaccacccgagggctgaggagtacgagcacatggcgcgggactggcag

SEQ ID NO: 182391 - DNA, 122 bp, Homo sapiens
ttttgctttgtatctcctctgttccagtgtatattcccctgacacactggacctcacttacgaatatgtttaaatatgaaattgttggcaatttcaacatggcaatagcagagcccttttga

SEQ ID NO: 182392 - DNA, 122 bp, Homo sapiens
aaagcagtgaggcggtgtccgcggtggggcgttcccccgccccacgctcggggcccagaacgcaggatccacaaccacatactgcctggggacacggttccctccccaagaaggcgtcctca

SEQ ID NO: 182393 - DNA, 122 bp, Homo sapiens
ggaccccgtcaacatcgcgccttctcattggctcctgcgtctcaaccaatgggctggggccgttctggccctagggtcgccttagcaaccggcctcctggggcttccctttttagtccgccc

SEQ ID NO: 182394 - DNA, 122 bp, Homo sapiens
cccagtcaacagactgaagggcccgaggcggtggcttttgcgtccttagatccaaactggcgcgtcgaagttgctttcctcgctttgaaaactggtagactcctgatgggggcaggatttaa

SEQ ID NO: 182395 - DNA, 122 bp, Homo sapiens
gaagcccaacagaccctcttttcacaaagatgggccaggaccccagactttgggggtacacgagagaggaaacatcttaccttttttttgttctttgagatggagtctcactctgtcgccca

SEQ ID NO: 182396 - DNA, 122 bp, Homo sapiens
ggcggcggtttgttcccgccgggtccctcagcggaggcgctacgcccgcccctgtcgcctcgccccaccccgcccagggagctccgccctagcccgcagctcttccgccttaggcagccgct

SEQ ID NO: 182397 - DNA, 122 bp, Homo sapiens
gagcctccagccccgccccgtctgcccgcgcagggccttctggggcttgtagtcctaaaacgactaggtctccccgcaatgcccgagaccgaggacaagaagactacaacccccagccgtct

SEQ ID NO: 182398 - DNA, 122 bp, Homo sapiens
gtgcacggttctttttattttttaatttgccaagggtctcctttcctcgatctgctctcacggctaccactagcaagctgcctttgcgcttgccctgcaggtccccagcgcgcgcgcaggcc

SEQ ID NO: 182399 - DNA, 122 bp, Homo sapiens
tcggtgtctcttcttgtctcccggtgtggcgcggcgcaggtgaaggtgtggttccagaaccggcggatgaagtggcggcactccaaggaggcccaggcccaaaaggacaaggacaaggaggc

SEQ ID NO: 182400 - DNA, 122 bp, Homo sapiens
acatagaggaaaacgggggtgggttaggggaacacttactcttgtggggccctgcgctggcgaatgtcaagcctccaggttcacaaatggctggaggtgctcggggttagctcccgagggcg

SEQ ID NO: 182401 - DNA, 122 bp, Homo sapiens
cctgtctgcgccctctggcggtggcggggtggggggctgttggtgcgggagcgcctgcgccgctgtcgctgtagaaggtcgagcggtcacttgttccttcgttcattcattcactcatccat

SEQ ID NO: 182402 - DNA, 122 bp, Homo sapiens
ctctgcggttgagtgggtagtgaatgtcgaccagagactccaccaatcagcgagcgctctcggaaggcccagttgagtgagacggcagggagggcggggactgaggcagtggagagccctgt

SEQ ID NO: 182403 - DNA, 122 bp, Homo sapiens
tgcccgcaggagacggaagatgcatgggtttcctggcgcgcaggttgggtggaggctcagcgtggctctgtctggccaggctaagtggtttgcagtgcctgtctcatttcagacatttgctg

SEQ ID NO: 182404 - DNA, 122 bp, Homo sapiens
ggagagaaagcacccagggagaaaaagaagaacgcgatgaggaagcaacgtgagtgtgagcgaggaaaactaagcgcctctgtgggccacggcgtctctgactttcttctcggaattgcagg

SEQ ID NO: 182405 - DNA, 122 bp, Homo sapiens
acgcctctgtactgtgcctacaccacgtgtggctccatgctccgcacagtgaggctgccacgtggccctgaggttgcttctgctgttcgtggttgccctgggtgtctcctgcctggaccctg

SEQ ID NO: 182406 - DNA, 122 bp, Homo sapiens
agtaagggattccttaagaaacaggcgcaagcccttatttcgtagcatctaattcctcaccgggtgtggaggggcctgtttacccaatgcccccgcgaagtcatagtttggtggcatacagc

SEQ ID NO: 182407 - DNA, 122 bp, Homo sapiens
atatgaagaactccttcaagtcagcaagaagacaggcaagccgagaggaggacgggcaaacgacctcaacagacactttacagaagagatatccaggccaggtgcagtggctcatgcctgta

SEQ ID NO: 182408 - DNA, 122 bp, Homo sapiens
tacgcgagaggcgggggctgccgggcgcttgcgcgttgttcctgacgcttagggcggtcgcggggcgcacatctgtggttgtctgctggtctcaaaagtgttctctgtggctccgtgggaag

SEQ ID NO: 182409 - DNA, 122 bp, Homo sapiens
gcctgcaccctgactcccgcagacaaaggtgggatgcgccccatttacagctcacagcaccgaggctgagaagcccaaacagcagtcacccagcacctagtattgtcaccgggtgttacttc

SEQ ID NO: 182410 - DNA, 122 bp, Homo sapiens
ctggccggaactaggctctcggtgagctgggcggctccggctgcaaccttgtgggagtcgcgtgtgtagtgcacggtgcattctctcttatatatcctgtccggcccgtttgaggtggacag

SEQ ID NO: 182411 - DNA, 122 bp, Homo sapiens
ggctgccgacctgccctgtgattgggaacatcccctgcgctgcgagagtggttttcctcacgctacctggctgggccatctgggctgcaacacaccagcatcatcggctttccatgcacctt

SEQ ID NO: 182412 - DNA, 122 bp, Homo sapiens
tctgcacacgggcaaatgtgcacacaggcatcctctcctctgcacacaggtgggcgtgcacgctggcatagtctcctctgcacacgggcgggcgtgcacgctggcatcctctcctctgcaga

SEQ ID NO: 182413 - DNA, 122 bp, Homo sapiens
gaactcgaatgccattctccctccttcggatggacagcgccccgcgtgcccgcacacacccggttcacttacctgaggcatctgcggatcgttgatgtcccagctgagctgcatcccgtagg

SEQ ID NO: 182414 - DNA, 122 bp, Homo sapiens
tttgacatttcagctccacccatagcacacccactcaaggaacatataaatgaagagatccgctcagttctcagacaagatttttcaagcaagatgaagtccatcatcctctttgtcctttc

SEQ ID NO: 182415 - DNA, 122 bp, Homo sapiens
cttctccatagaccatcacactgggacttagggcttcaacatgtacattttgggtgacaccgaggagtcagttatgaaaaaggcactgggagataggtagggagatgtgcaaggccctgagg

SEQ ID NO: 182416 - DNA, 122 bp, Homo sapiens
agataagtttccttaggaataaacatggagaatcaaaatccaccaaatgcctggatatctcggaaaagagatcaaactgaaataagtgagtggacagaacagccaatgtgggtctgacagag

SEQ ID NO: 182417 - DNA, 122 bp, Homo sapiens
ctgtcttggcagctaaggcgacatcccgagcgtcctggggccaccctgctctccagggcccgccatcctggaaaagaaaggcgaactacattacccagcaggcctccagccgccctctttcc

SEQ ID NO: 182418 - DNA, 122 bp, Homo sapiens
gtgggatgggtctaggtgccagggccagagcccaggaggggcactgagtaggggcctggccggcctctcccttgcaccggagcaggggtgcctggtgaaacggacaatctgatgctctctgg

SEQ ID NO: 182419 - DNA, 122 bp, Homo sapiens
cctactccccggtgcatcttgggatcagggcggggccctgagcgccgccatgcttttgtacggcaggatcgcaaagcacgccgggaccggttggtttggttttgaagacgtggatggcggga

SEQ ID NO: 182420 - DNA, 122 bp, Homo sapiens
ctggtgaggagtctgtcaatttctccagcatcattgacttttattttcagaagtcattcccgaaattctgaggtcaagctaacatcctttccctgttactctttttacttcctatttttaca

SEQ ID NO: 182421 - DNA, 122 bp, Homo sapiens
cccacacagaccaggctgaccacatacagggtgaccgccacctgcactctcctcctaaatcgtcccggcagtcacgttccaggggcagtccagatctcccatcctgggagggagaagaaggg

SEQ ID NO: 182422 - DNA, 122 bp, Homo sapiens
cggcgggttccactgcgagtgttgggggaagccttggacagggccttctttgaggctccccgccgcagaaggctgttccctagcttcttgggtgtgttgaggatgctgaaggccatcgactg

SEQ ID NO: 182423 - DNA, 122 bp, Homo sapiens
acccttttaatattcagctccccgacaccagaaaagaatagcaaggaactttgcagctctcgctgacgtaactcaggcagtagcccagctagtaccgtaatctcctgctgctaccgtattac

SEQ ID NO: 182424 - DNA, 122 bp, Homo sapiens
ctgcctcccgggttcaagccattctcccgcctcagcctcccgagtagctgggattacaggcgcccgccaccaagcccggctaattttgttttttgtatttttagtggagacagggtttcacc

SEQ ID NO: 182425 - DNA, 122 bp, Homo sapiens
tctgccttacacgatttggatttctggcccggaacacatacctgattgagcttggagagccgattctcagcttgtctaatggtctgctggtgaagttcagtcagttttcctatcttcttggc

SEQ ID NO: 182426 - DNA, 122 bp, Homo sapiens
ctcacctggatgaagagccaggaggtgaccagggccaggctgctatactgcccattgaagcggtagtgataggcatagaaggcgaagtggtagagatagaagaacctgcggggcggggtgag

SEQ ID NO: 182427 - DNA, 122 bp, Homo sapiens
gtaccgcggccgtcagcagctttgtaccgctgggtccggaatcctctttactccctaaaccgccttctcaggaggccggtgtagagcaggcagcgagggccgggggcactcacgggtcgtgt

SEQ ID NO: 182428 - DNA, 122 bp, Homo sapiens
cacccgggcgccggggccctcgcccttccgcagccttcactccagccctctgctcccgcacgccatgaagtcgccgttctaccgctgccagaacaccacctctgtggaaaaaggcaactcgg

SEQ ID NO: 182429 - DNA, 122 bp, Homo sapiens
cgccacaaatgcacactccataccacgtatacacacacggagtttctctgtccttccccccgtgttctccagggctgacctgtctccgtgtgcatttgtgacacgcaggcaaagctaaggga

SEQ ID NO: 182430 - DNA, 122 bp, Homo sapiens
tggcagggctttgtccagagctagaatagacagacaggcacaggtcagaggcagggctgccgaggattggtcccctcaccagcagcctgcatggctctctcaagccataggttcaagttctg

SEQ ID NO: 182431 - DNA, 122 bp, Homo sapiens
attaatttaacaatcctggataacgctggtttttccttttcaaaacctgcaaaacaaattcgttaggataaaaaaaaagaagaaacgcacatgcacacacgcatacacacacacgcacacag

SEQ ID NO: 182432 - DNA, 122 bp, Homo sapiens
ttaaaattattaggataatagatctcgtgtcaagaattcttaccaaaatgaagcaaaattcgcacacaaaaaaagaataagcaaggatggattccagtccccagtcctcaaatgaagggttg

SEQ ID NO: 182433 - DNA, 122 bp, Homo sapiens
caggccagggtcgctcgggggcgggcaggttgggtttttgctcaagcacgtggggtgagccgccctcccgggcctctcccctcccacttcggggagctgctgagggttgcgggtcgggcggg

SEQ ID NO: 182434 - DNA, 122 bp, Homo sapiens
agcccgccgcccagccctccccctgggcggggacccgcccgccgtcagcctaggttgaggcgccctgcgtgtgtctataactttgtgctgctgccgcggccgccctgctcgtggaagggagg

SEQ ID NO: 182435 - DNA, 122 bp, Homo sapiens
gtgtcggttaaccccacgagcacgtgaacttcctatgggcacacacccaacatacattagcgattaggtgattgaaaatgttgcccacaaaggcaaaattttatatatgatgacatcaccag

SEQ ID NO: 182436 - DNA, 122 bp, Homo sapiens
aacacattcatttgtttgacaaataccttcccaaaactattttaaaacacagctgctgggcgggacgcagtggctcacacctgtaatcccaggactttgggtggccgaggcgggtgaatcac

SEQ ID NO: 182437 - DNA, 122 bp, Homo sapiens
atagtttcggaatacagcacccgttctgcctggccgactgccctggtcagcacaggcactcgctctccagtctgtcgctaagctggatttgatttttaacgctttacaaagagctttgacat

SEQ ID NO: 182438 - DNA, 122 bp, Homo sapiens
gaagactaaagtgagggtaaatctaattgataaagaatcatattagcaaggttagggagacgcttggtcatttgtatggtttggataatgttgtttttaatctgtgttcagatgtgattacg

SEQ ID NO: 182439 - DNA, 122 bp, Homo sapiens
ctcctggctctggccacccagtgagcgccgaggccccgggaagtggtgcccaggagcaggcgcccttgccagtgggaggccggcagaaggggctgtgtggtttgggccagtgtttcacacag

SEQ ID NO: 182440 - DNA, 122 bp, Homo sapiens
cctaggtgagtgcctcggagcagttccacccgggcccaggggtcgcctctgctgggaagccgttccacccgggcccagggttcgccttgccggcctcggtgcccctgctctgccttccctgt

SEQ ID NO: 182441 - DNA, 122 bp, Homo sapiens
ccaagccctgccccgcggggaggtggctgaggcccggcgagaattcaagtgtggggcaggcgggctggcagtgctgggggacccagtgccccctccgcagctgctggcccgggagctaatcc

SEQ ID NO: 182442 - DNA, 122 bp, Homo sapiens
agaagacggggacctggagtcccggctggtggattaagcctgcgaggataaactctgtcacggaggaggagttctcggcagccattctcctctaggcaaagctgtgaaggaaaaagactcag

SEQ ID NO: 182443 - DNA, 122 bp, Homo sapiens
gtcagctggaacggtcctgccggatggatcgctctttgagagcgtacactcccgcgtgcgcgacaccaggcggcccgtaggttccaggtgccgagcacactacctcctcagtttacctaagt

SEQ ID NO: 182444 - DNA, 122 bp, Homo sapiens
tttcctccacccacatttgggctgtcactgatatgcccaagggcagtcctggcagcaccacgcggctgttactgtcattgtaccatactgtattcagcactcactagaaacagggtataggt

SEQ ID NO: 182445 - DNA, 122 bp, Homo sapiens
ggcgctgggctttcttccctggcagactccgcagcgcctgagatgtggacgccttggaggcggagggcccaagtcatctttatgagcagcaaaagaaacccaaaactttagctggtttctcc

SEQ ID NO: 182446 - DNA, 122 bp, Homo sapiens
ggtgccttgtaaactgtgaagtggcatgcacttggcacactgaggtgtcaggatgcttaccgtctcggctggtcagtacacaggattatgaagatgacaagggcaagccccgcttgctttac

SEQ ID NO: 182447 - DNA, 122 bp, Homo sapiens
ggccaggtgaagaaccccggctacccgcagtcggaggggctcctgagcgagtgcctgatccgccaccagaaggagctaggcaacgagtccaacttcagtgacgcactgctggatgccggcga

SEQ ID NO: 182448 - DNA, 122 bp, Homo sapiens
cctgggggctggcagctcccacccctccgggggcagcctctcctctagggtctctgtctccgcttccccgagaagcctctaaacccgagggctgggcctccggggtcagcttcgggttttcg

SEQ ID NO: 182449 - DNA, 122 bp, Homo sapiens
acaccatcctctcccataagcacccatgtctttgaatatgaatgtatttgtaaaataccacgtttcatgtgtgaatatgtgcttttactgtacatagtgctattgtgcaataggtcttatgc

SEQ ID NO: 182450 - DNA, 122 bp, Homo sapiens
gtctttataataccagcatgcaacactctgcatgatacatattagacactcagtaaaacacgtggaatcaatggcttgcttatcggctgactggtatacagtctgtttcttctgcatcccct

SEQ ID NO: 182451 - DNA, 122 bp, Homo sapiens
ttacatcaaagggtctgtccgctgtgccggctgctgcaggggatggttggagagcctccccgaccaagcatcttgtttcccaagtcgggagaaggagaatttgagaaatggggacttgggcg

SEQ ID NO: 182452 - DNA, 122 bp, Homo sapiens
gagccgcactcgacccagtgttttttcttggaaattaaacggtttcggtgcagggagccccgaggtttcacaccaaggcaaggcaccccccagggcaagaagaaatgggcgtcccagcccta

SEQ ID NO: 182453 - DNA, 122 bp, Homo sapiens
aaataaatgaaatgaacatggtccccgcctcctcccattctctgaccaagaccgtgtcctcggttggtggtcaatacaccaagacacctgctttgagatcttgactaagcagaagagatatc

SEQ ID NO: 182454 - DNA, 122 bp, Homo sapiens
tggtatgatcagtatcaaactgcctgacaaacatcaaaggggtggacttgtctctaagggcgaatgctcaggagaggggcagcattaattaagcaaccgtggctttggcttgaagggtagtc

SEQ ID NO: 182455 - DNA, 122 bp, Homo sapiens
ggtttgcccttccctcatcaccctcaccctcgttctttctcggtttcccgcttccctctacgcggcggagaccaccaccttaccgctcgcacttaagatctcagacccacgccggaggccgg

SEQ ID NO: 182456 - DNA, 122 bp, Homo sapiens
gggacaaccattctatattgtattcttgagtctatgggttaagattaaggagtttggcgccgcctttaaggataagaatcagaaagacttgtttcaggtttcaggagtttacaatagtggtt

SEQ ID NO: 182457 - DNA, 122 bp, Homo sapiens
actacactaggctgtccccggccaagattgtgctgaggcggcacctgagccaggaccacacggtgcccggcaggccggctgccagtgagctgcattcgaggtgagtgccctggtggggctgg

SEQ ID NO: 182458 - DNA, 122 bp, Homo sapiens
agaggcggaatatgaggctggataaagcccagttttgcctgcaatggcattcctgtctcccgtcccaggaccccagaagattatgactaccagaaaacacgccagtctttgccctgatctgg

SEQ ID NO: 182459 - DNA, 122 bp, Homo sapiens
gcgcgctttcactggcttggttgtccgtccatcttactctcgtcaccgcctccgggctgtcgcccacccgcccctcctgaaaggtcgctgtcaccacagccaatggaggcccggagacgggg

SEQ ID NO: 182460 - DNA, 122 bp, Homo sapiens
agctggaggcagcctgtgatgaggggaatggttagtgctttggtggtggtggcagttacacgaatctacacgtgtgataaaatgtccttgcctgaagtgcatgcgtgcacacacacacacac

SEQ ID NO: 182461 - DNA, 122 bp, Homo sapiens
cgctgcctgcccggggaccccttttcttggcagagaggatactgacatcggtctggaggccgtacgtcagtcccggggatgtcgggatcagccttggaggatgccctcgatctttatccttt

SEQ ID NO: 182462 - DNA, 122 bp, Homo sapiens
cagcgccagcctcagcgttggcatcgccggggtgagctggagacacgggccagttctctgcgtgatgtgttcaccaccccggggtgaccgcgtgaggacagcggccgcaccccgacactgct

SEQ ID NO: 182463 - DNA, 122 bp, Homo sapiens
tgaaaagcattaagctcagagacctcagagtcatctctgggcaaaattagtgggcgaaaccgccttgggaatccgcccacctcctcttcgtgccttttttttctttttttgctgatggcagc

SEQ ID NO: 182464 - DNA, 122 bp, Homo sapiens
ggcccgggggcgcgtcaaggtgactaggcatgcgggagatggggcgggggcttgagctgccgtggggcgcttagttttgagtccgggtggtgcgcctggctttggggacagcccggggcacg

SEQ ID NO: 182465 - DNA, 122 bp, Homo sapiens
catccttgaacctagttgcactgtcagtcggcccctcatgcctgagcagatgggaaggttcgtcccctgccctgcagcaagagggccccatccaggaggcacccacagcaggggcagtgcag

SEQ ID NO: 182466 - DNA, 122 bp, Homo sapiens
caaaagtgggacggtgaggtggggagcccaaaacttggcagttaagaagatccatcttcacgcaaaacagacactcactgtacctcctgccaaagccagtactcatgcccctcagttgtgac

SEQ ID NO: 182467 - DNA, 122 bp, Homo sapiens
ttctcagcagaggtgtatggtggagggatgcacggcttcctcctccagcccctctcagcccgtggctgaatagggatgaaaccctggaaggcctgaagccccaactgctatttaagaagggt

SEQ ID NO: 182468 - DNA, 122 bp, Homo sapiens
ttccagttcacggttctccttctccaacagccgggacttctcctcctcgttgttgttggtcgatgaccctgtcttcatggtgtcctgcgcctccgactgccattcccctcgggtgatcagcc

SEQ ID NO: 182469 - DNA, 122 bp, Homo sapiens
tcctccaccttggggttcccagggcagtcaggccccatgttcctgcaccgtgggggtccccgggcagtcgagccctgcgttcctgcaccgtgggggtccctgggcggtcgggccctgcgttc

SEQ ID NO: 182470 - DNA, 122 bp, Homo sapiens
gcactggccagagtgggggaaaggggaactggacccagccatggctgccggcagtgcaagcgaagccagggccatgggcacagctgagcctcagggccatctccccccaggcaggtgggccc

SEQ ID NO: 182471 - DNA, 122 bp, Homo sapiens
cctgcaacccttttacttaacagtatgctatgtggtctttaccttccttcccaaacccaccgctcctctaccctccagcccccacacacatacacacatacacacatacacacacacacaca

SEQ ID NO: 182472 - DNA, 122 bp, Homo sapiens
aatacgggggggagcggggcacgacgacgccatcaataacacatctggtataccagctggcggcaagggcagtggagagaaaggaagcccgggaaggcagcagcccatgtgagcgtgactgc

SEQ ID NO: 182473 - DNA, 122 bp, Homo sapiens
cccctgttgacaccgccccagggcacgcaggccccaccaggcccgctccggagactttcacgtccagggccagccagcagccccgggctgcgcccccgcgcccacccccaccagggcccgcc

SEQ ID NO: 182474 - DNA, 122 bp, Homo sapiens
agcagtttacctgcaacctgaaagaaaattgcagccttacaatgttgctccttagactctcggagcatgaggacttgaagaaagccaggctttgcactttttattggtccaactcattacta

SEQ ID NO: 182475 - DNA, 122 bp, Homo sapiens
acattttcaactttttctgcggtttccgcccgctgtctctgacccgaaagtgcccccggacggttacagaggacacttaagtggtttgcaaagcctgtggtaggggaggagggtgtagaagg

SEQ ID NO: 182476 - DNA, 122 bp, Homo sapiens
gcgagtcaggcgcgggcccgggtaagtaacgccggcatgtggagtcacagtccccggccgcgcgcaggagctaggtcttcagggaagtgatgttgctcgggtctctcctccccttgctctgg

SEQ ID NO: 182477 - DNA, 122 bp, Homo sapiens
taggtgggcgatccggtagaagagctgctctggactcgtctcgtactcgctgggagcctgcggggcagaggcaaagaggctctaagaagcagaactggggccctccagcgtccaaatcttcc

SEQ ID NO: 182478 - DNA, 122 bp, Homo sapiens
acctccctttaaagcacagaacaaagccatcgtggtggaagctgccccaaaagtaatctacgttttgtgtgattttgtttttctaagagccaagaaaattttgaaaaacagtaaaaataaag

SEQ ID NO: 182479 - DNA, 122 bp, Homo sapiens
aacttccccagttccgtgaattatcctttgcgggagcggggttcctatcccacaccatggcggatgcccccgctttgcgggagcggggttcctatcccacactgttgcggatgccccccatt

SEQ ID NO: 182480 - DNA, 122 bp, Homo sapiens
cccggcgttggggacagagggcagggcggaggcccgggctgctcggaaaggggccggggccgggccttccgaaagctcctgggcggccctgccggaaccctgctctccactgcggcctgcag

SEQ ID NO: 182481 - DNA, 122 bp, Homo sapiens
ttccccaagcgtggccagggctaaggctccagggatgcgccaagcacccttcggttttcccggggagaattttccccggcccggggactagggtctggcgctggggcgcccctcggacctgc

SEQ ID NO: 182482 - DNA, 122 bp, Homo sapiens
gatggacagattccaagttccaaaacaaatgtccttttaaaaaagtgtccccctccccaccgagtcccaaggagcatttaccttgattgctttttctgttaactgccttgctattttgtatc

SEQ ID NO: 182483 - DNA, 122 bp, Homo sapiens
cacagaaggaaggcagttacattctaagaaaaacaatgtccagggagcccttttatctcccgccttactcttgttacttgcctgcattcgtcaaccacttatgctaaaaatgatgatgcaga

SEQ ID NO: 182484 - DNA, 122 bp, Homo sapiens
tcaggagccagacagccgcggagagggcggcggtgagtgcacagagcacacgcatgcgttcggcttgcccccacgccgcccccgttatctctgtgtgtgtgaagatgagaaattttcacttc

SEQ ID NO: 182485 - DNA, 122 bp, Homo sapiens
cctctgccgtaaaatgcagcccatgggactgctaggcgatgaaggcgaggggaaggtccccgatacagtgaagaacagccaaagaatggctgacacattagcgtctggaaaaccaagtccct

SEQ ID NO: 182486 - DNA, 122 bp, Homo sapiens
gcagggagtcaccggcaacatggagagaagaggtggaggctctgttgccacaagaacatgcgggagcgttactaagagatggcccattctagcaggagaaaaccaagcacttgaaggcactt

SEQ ID NO: 182487 - DNA, 122 bp, Homo sapiens
gcgtcttcgaacagaaccaggaccccaagcacagaacgtacgtgtatgtactgactgtcacggagctgctggaggattgggaagattcggttagcattgggaggaagcgagagtggttcaaa

SEQ ID NO: 182488 - DNA, 122 bp, Homo sapiens
cagcccgccatgcccgagcccccccttcccacatcttcccccgtgggctccggcaaggcccgagcctccccaatggacacgccccctgctccggggagcccagttcccattgaccacctacg

SEQ ID NO: 182489 - DNA, 122 bp, Homo sapiens
ttttgcccatggcagctacagcagcagagagaagatgaccccgctcccacaggcccgccgcggcatccgctctggggggacttccggctcaatccggaagctccctgttgtccacacaggat

SEQ ID NO: 182490 - DNA, 122 bp, Homo sapiens
cccagtggctggacacgcgaggtctagttcctgctcaggcacacgtgtggtggggcggcgcggtacctgctcaccacggtctctcagggcccgggcgatggaggctctgtctcgtcacagcg

SEQ ID NO: 182491 - DNA, 122 bp, Homo sapiens
cctctccagagtgatcaagtgtgacccggtaagtgagggtgatgtcccaggcagccttgccggggcttacagggggagacacctagtgccacggaaatgccgaggctggtgccaaggccccc

SEQ ID NO: 182492 - DNA, 122 bp, Homo sapiens
cccaagtaactttttttgtttttgagacacagtttggcactgttgcaagtggcacgatctcggctcactgcaacctctgcctcccgggttcaagcgattctcctgcctgagcctcctgagta

SEQ ID NO: 182493 - DNA, 122 bp, Homo sapiens
gttcgcggatctcggagagccacagagcccgggccgcaggcacctcctcgccagctcttccgctcctctcacagccgccagacccgcctgctgagccccatggcccgcgctgctctctccgc

SEQ ID NO: 182494 - DNA, 122 bp, Homo sapiens
ggctgtgagcaggtggacgtgatctggcttgagttttaacagggccagtagaacaaagcacgcctgggtaccgaaaccagccactggccagttggcaacctgggggagtctaacgcgaggaa

SEQ ID NO: 182495 - DNA, 122 bp, Homo sapiens
tactaaaaatacaaaaaaataagctgggcttgatggcgggtgcctgtaatcctagctactcgggaggctgaggcaagagaattgcttgaacctgggaggtagaggttgcagtgagccgagat

SEQ ID NO: 182496 - DNA, 122 bp, Homo sapiens
cagctgccctcaccagctcccgtggatgtgggctctgccgggtgttccttgcaaggcgcccgcagatgccgaggcagacagaggagaccaccaagatgcccaggtcaggggccaccagccgg

SEQ ID NO: 182497 - DNA, 122 bp, Homo sapiens
acaatggtagctcctgaaatgccccacgaaagctcaggtggactatagtgttcctcctgacgtaagccataaaacaaaacatgcttgacctgggtatagagaaccctgaatgagcttcaata

SEQ ID NO: 182498 - DNA, 122 bp, Homo sapiens
ctgccaaggggcaggcagccatacgtcaccgaggatcccagttagaaaacagccattcggcgcccggtggtgcctacagtctcaatgcggctccagtgggagttgggggtaggggggtgggg

SEQ ID NO: 182499 - DNA, 122 bp, Homo sapiens
cccgccaaaagggagtcccttccagcactctcccctttgttcctttttctgggcaagaaccgctgactggggctgccagaaatgtaaaccctgggtgcaagtgacgggatccctccagcgtc

SEQ ID NO: 182500 - DNA, 122 bp, Homo sapiens
tggcccgggcggtggggtcggggggcagcgcggggctgcgcgggggcgacagcaggtgctcgcgactctggcgcagggcctcgggcgaggacagcagcaggtgctcctgcgacaccaggcgc

SEQ ID NO: 182501 - DNA, 122 bp, Homo sapiens
ggcgcagctgtgggagccggtcggagtccgagcgctccgtcgcggggcccggccgcttggcgagcctgctccgggccccagcacttagcctgtggtcctccaggccgtcttcccgctttcct

SEQ ID NO: 182502 - DNA, 122 bp, Homo sapiens
gcctatggcccccggagtttgaacagtgtccccaggagagaagttgaggtgctcgaaccccgtctgggcttcctgtccggctgtcctgctcctgctgccccaggcctcccccccacaccaca

SEQ ID NO: 182503 - DNA, 122 bp, Homo sapiens
agacaatggagagcaaaggcagttttctctctaatcttgtaacagtcttctaaagagaagcgttattaaagaaaaaaagaaaaaaaaattgagggggccctgaggctctgagggtgctgtag

SEQ ID NO: 182504 - DNA, 122 bp, Homo sapiens
agcaggccccccgtgcagcaggttggcgatgacggctgtgggcagcagggagccccagcccgactccaccagggccacgcccaggccctcccctcgccgcttctcgaggtgcacctgggaca

SEQ ID NO: 182505 - DNA, 122 bp, Homo sapiens
gggacaggaccacagaacatcatttgagtgaacactagctccacaagccatagaacaaatcggaattctcagtggacatccaacctgacaaactcattacatactctcccctgtgggccacg

SEQ ID NO: 182506 - DNA, 122 bp, Homo sapiens
cacgtggtttctctctgtacatctgctgcattgtcttctctaggcttacttaccaacttccgctgcttactcataatttctgtttcctcttcgtttttccggggccctagtttacctccggg

SEQ ID NO: 182507 - DNA, 122 bp, Homo sapiens
gaatccctgcagaactaattttgtagaaccgccggggataaagacctttatttgcaatgtcgaactccagcagagtaaccccttttgctttccacacgcgcaaacccgggtcccaaacgctg

SEQ ID NO: 182508 - DNA, 122 bp, Homo sapiens
cctggggcaccggggctgtccggggacggggcctgggccttggggacccttggacctccgcggggacgcgcaggggacgcagcctgggcctggctgctcctgggctccggccagggagtcgc

SEQ ID NO: 182509 - DNA, 122 bp, Homo sapiens
ggctgtacttatttatttatattcccaaggcctgcacctaatagatgctcacctaatagacgtgctggattacctctgtcatagctcctactgtctgtcatttctgctccctgaggccaggg

SEQ ID NO: 182510 - DNA, 122 bp, Homo sapiens
attaaccagagcctgctggccccgctgcggctggacgccgacccctccctccagcgggtgcgccaggaggagagcgagcagatcaagaccctcaacaacaagtttgcctccttcatcgacaa

SEQ ID NO: 182511 - DNA, 122 bp, Homo sapiens
ggcacctggctcagcaggaggcccccggctcggggcagggcagggccggcggcggcgagccggagcccgccccctgcccgggccccgccgagccctcggagcccacccatggggcacctgcc

SEQ ID NO: 182512 - DNA, 122 bp, Homo sapiens
tgcggggcgcgtcggcggagctgatgcctgcgtccgactttcggggcacatactcgatctcgatgttgtgctttgtgttgcccttgccccggctccagagaaacagcagcaccaggcagaag

SEQ ID NO: 182513 - DNA, 122 bp, Homo sapiens
aaaaaaaaagaaacaaaaacagatggggaaactgaggcccaaagagggaagggatttgcccgaggccacaacaggcttggaacctgcttttacaggacctgggagaaagttgaggggagagc

SEQ ID NO: 182514 - DNA, 122 bp, Homo sapiens
taaaatgcttaagaagagtaagcaacagcatcttcagattagggtagtgtcctggtttcacgcttgcctcatatgacattctataaattggaaagataacgcattgtcttaccagccacgct

SEQ ID NO: 182515 - DNA, 122 bp, Homo sapiens
ctttggggttccctggagcccagcaagagaccaccccctcgtgttccattctggggggcccgtcctgcaggcgaggtgggggcgcctggcaggcctgcgccaaccctggcggctagcccgga

SEQ ID NO: 182516 - DNA, 122 bp, Homo sapiens
acgtccaggacgttggagaagaggatgtgcgcctcggacgggtgcaggatcttccttatccgctcgttctccatgaagtgggacacgagcaggttcagactcttgtagtaggacgcctcgga

SEQ ID NO: 182517 - DNA, 122 bp, Homo sapiens
cacacggacagacggaatccgtgttcagtgcagcgagcgaagcgtgtgcacacggacagacggaatccatgtgttcagtgcagtgaacgaagcaagtagataggagcctttcccactgcaga

SEQ ID NO: 182518 - DNA, 122 bp, Homo sapiens
tgtcccgggggctcgggaagtgctagctcagcagtaggttgggtaatcacactacctgcacgaacagcactttggagcccccaggactgaggtccaagacgggaggacagaaaggaaggtct

SEQ ID NO: 182519 - DNA, 122 bp, Homo sapiens
ttgtggcttcggttgctgtgacagtcgtttcgaaaatgcacggaaatgagggcggagacccgagagatttgaaaaagccgggctgaaacagcgtggtattggtccccgcctccccagtcgcg

SEQ ID NO: 182520 - DNA, 122 bp, Homo sapiens
gccccagccaagggacacagctcaggcagctgggaacatgtgcaggctgatgaagagaaccggatgagggcttcacatgaggaagcatgtggccaggtcctctcagaacatcagcctcatct

SEQ ID NO: 182521 - DNA, 122 bp, Homo sapiens
cacaaaaaatccacggtgctggagcaagaggatctcaggctgtgaccctctaaagggaagcgctttctgtggtcagaaagaaaagcaagtgcttccttttagagggttaccgtttgggaaaa

SEQ ID NO: 182522 - DNA, 122 bp, Homo sapiens
cgaggttttgccatgttgactacgctgttctcgaactcctgacttcatgtgatccacccgcgtcagcctcccaaactgctgggattacaagcatgagccaccacgcctgccgcgattagatc

SEQ ID NO: 182523 - DNA, 122 bp, Homo sapiens
gagtgggggaggctggggtgcaccgaggcccagcaatccaagcccgtacggagctgcggccggggaaaccacccacacagtctgagaggacagctgattctgagcggaccgacggaaggaga

SEQ ID NO: 182524 - DNA, 122 bp, Homo sapiens
cgctgtccttaccccgcgtatccgacgagcctaaagtcataggtaagagatctgtagaagcgacgtcaaggtgtggttccctctgtaaggcggagctaaacggtgcattcgcccagcgggga

SEQ ID NO: 182525 - DNA, 122 bp, Homo sapiens
tcaaaagaaactgacagccttcgcgctaagcccccattcccttagcacccccccaccccccgacacagctacccaccggcttcgatctgggtaggtgctgccgccatccttttcccgagggg

SEQ ID NO: 182526 - DNA, 122 bp, Homo sapiens
tccgaccggcccgcgctgctaggagaacagcggcagcggcagcggcggcggggagagccgcgaagcagagcggcccggccccctccgagcgacaagcgctgccaccaatcgcgctccggctc

SEQ ID NO: 182527 - DNA, 122 bp, Homo sapiens
taactgacaggaagcggaagccgtgcgtgggaggccgattctagtgcgcctgcgtggccgcgaatcaccagccagcctctgggtctgtagcaaccgcccagcgttgaggcgcggctcatgcc

SEQ ID NO: 182528 - DNA, 122 bp, Homo sapiens
attcgacagcaccagggtgagcctgaggccagaagacaccccagctgctctaagaacactcgcctcggcagcaggcgacactcgccgcagatggcgggggcagcgggtggcccaggtcacag

SEQ ID NO: 182529 - DNA, 122 bp, Homo sapiens
ggtggattcggatccgggtgagtagggaaatgcgcctcagcccctcccacgggccgcccacggattccaggatccgaaaacgcttccagctgctccgccaccccaggaaggcagcgcctgcc

SEQ ID NO: 182530 - DNA, 122 bp, Homo sapiens
gggttttcactcgtgccctgttcacaagctcttgggacccgggttctaagaacaccgggccgccccctgctgatgatcttggttcgcagtccgcctgaggccacggccctatggaaagttct

SEQ ID NO: 182531 - DNA, 122 bp, Homo sapiens
gtggagtccacaactgagcaagcgcaaaggtgattctcttgcgagggtctttgagagttgcggtgttagccaatagcgtaagatagcgcacgcgcagtgctttccagtgcggtgaatatttg

SEQ ID NO: 182532 - DNA, 122 bp, Homo sapiens
ctgcaccccaccaatgagcacttccctggggcgctcagtgacaaaggacaggtgaggcctcggggctacggagggggtcagctggccagggcgagcccccagcatggaaggcctgggctacg

SEQ ID NO: 182533 - DNA, 122 bp, Homo sapiens
tgcaatggcttgcatttaaacaagactccttacaggccccagggcaagatcaggtatgggcgggcgtagtgaacacgaagaagcccagagatttacaatgggcaggaccagggtaacaaatc

SEQ ID NO: 182534 - DNA, 122 bp, Homo sapiens
gatttgttgatgatcgaggaagggttttatagagttatgtgcttacctgagggcagaattcgctagctgaaacacataaaattggactcccagtggtaggattaatgtgaggtataactgtt

SEQ ID NO: 182535 - DNA, 122 bp, Homo sapiens
cggcaaactaaatgcaggggacgctggagtccgactcacctacaccggcttcctcccagccgctggtgtgcggcacacacaacatctgcattaggcagaggtgcaagtgggctgattgaact

SEQ ID NO: 182536 - DNA, 122 bp, Homo sapiens
aataccgctgagccctgtgctgcgcaggccttggtctgtgcctgtcaataaacagaggcccgaaccatctgcccctgcctgtgtggtctttggggagctagcaaagcgaggtcactattgtt

SEQ ID NO: 182537 - DNA, 122 bp, Homo sapiens
gcgctctcgcggggacgcgcatgcgcgaatcccgactgattagtgacctgggggggtttgcgggagtgcgcagcgcggcgggacgcgactggaggcccttttggcttggagggcttcggcct

SEQ ID NO: 182538 - DNA, 122 bp, Homo sapiens
tctatatcagttgtgatctgcctcagacactttttggtttacacaacaatccaatcatagcgatttatttggaaatataccttcacaagttaaatcaaaccacagcactactgggcattatt

SEQ ID NO: 182539 - DNA, 122 bp, Homo sapiens
taatgactgggtgacagactctctaccagtaacatttgctgtatccgctttatcacatgccgtctctgcatccagcaatccatcctattttttgatacattcaaagtaaattatcagtacct

SEQ ID NO: 182540 - DNA, 122 bp, Homo sapiens
gcgccgtcgtcagggagccgggatgcagttgctaggagccaccgcctcgtcgctaggggacgctgaagatgccgcggggggcgggggcaggatggaatccactaagaaggggcgagaccagt

SEQ ID NO: 182541 - DNA, 122 bp, Homo sapiens
cccccactccgcgcttgggagcgaggagccgccagcgcccccgccccgccgccgccgcagcgccctcaggccgccattcgccaccgaaactttccagcgcccgcgctctctccgggactcgg

SEQ ID NO: 182542 - DNA, 122 bp, Homo sapiens
aggggaggctgcttggggtgggacgccgtgggaggagtcggctccttatgcaaatcacagcggagcgcgcacggtccggaggcggggcttgcgatgcaaagacaggtccgtctggcgaacag

SEQ ID NO: 182543 - DNA, 122 bp, Homo sapiens
ggaactcggtgtgcctggcagttggaggaccccggtccagggtttctggctgtgtcatctcgggcgagtcttttaatcaatgtgtgtgtgacgtcagtttcctcatctgtaaaatgggataa

SEQ ID NO: 182544 - DNA, 122 bp, Homo sapiens
acctcgtgatccacctgcctcggcctcccaaagtgctgggatgacaggcgtgagccaccgcgcccggcccacaataggtaatcttagcagcctgcttcatgagatgactgggaagggaagat

SEQ ID NO: 182545 - DNA, 122 bp, Homo sapiens
aagtgccggagcgcagtctggagaggaatcggccgaagcgggccacggccgggaagagcacgccaggcagacaagcacatggcaaggcggacagcgcctcctgtgaaaatcgttctacctcg

SEQ ID NO: 182546 - DNA, 122 bp, Homo sapiens
gaagtgctccagaacttgtgcagtcccaggtgatgggaggaagctagtggctagtcctaacgacaaccctctgcgactcccctgctgatcaaatggggtgaggagagagaggcggacggggg

SEQ ID NO: 182547 - DNA, 122 bp, Homo sapiens
ctcgagtttccgagggacattggaacgcgcagctgtccatcacgcgctcatctgcatattcgggggcccgcccctcccctgctccgcccgctgcagcctccgggccgcggccgggggagggg

SEQ ID NO: 182548 - DNA, 122 bp, Homo sapiens
agacagggtactcagcaacccattttctagctccagaggcatggagacctaatcaagagtcggacttttcttcaacagaaactaaaaagctgatgagtagcaggtgccaatgacatctctct

SEQ ID NO: 182549 - DNA, 122 bp, Homo sapiens
tgaatctcgtaagacattgtttctggaatctggctgtgatacagtcatctcctctggatccgtcatgatgggtgggacccgctgtcctgcccttacctggccttggtctgtcctgctgggtg

SEQ ID NO: 182550 - DNA, 122 bp, Homo sapiens
accgcggggcgaaaaacacacaacgcccctaccgtgtttgcaggccacacttgcagagcgcgtctctgatccaacgcctgctgtccccagatctgatcctttgagcatcagggctggaaagt

SEQ ID NO: 182551 - DNA, 122 bp, Homo sapiens
tgcgctgagaaacgactctggaaactagagatttcctccatttgcaaatacatttctaaacgtcaaggaggaactgaatgttaatcagacattaagacaggctgtggaatatttaatgacat

SEQ ID NO: 182552 - DNA, 122 bp, Homo sapiens
tgcggtggagtgtgtggagctgaccttcctggcccccagctcctctcctgtgctaagctccggtagggctgggagctggcctgtcacctcttgtttccaggccaataggaccagaataagga

SEQ ID NO: 182553 - DNA, 122 bp, Homo sapiens
gatgggcgcagaggtgggcggggaggtggagtctcgtcggcctgccccagcaaggggaggcggcgggccctgaggaagatggacccacatggccactctatcaacctgtgtccccatgttcc

SEQ ID NO: 182554 - DNA, 122 bp, Homo sapiens
ccctcccccagtgtcgctcaaatccacccagcgttccgaaatcccgggagtgggggccttcgactgtcaccctcaggcccccttggccgctcctcccggcccttgggacccgccagggcagt

SEQ ID NO: 182555 - DNA, 122 bp, Homo sapiens
tgttttaaatgctcctcacagtctttttgccccttctcccaatgacaaggcaagtctcagcgggtgaccttggtgtgtgccgcagggttcaggctcttggagcccagctgccctgctgagag

SEQ ID NO: 182556 - DNA, 122 bp, Homo sapiens
tttctgagataattggcctgcaggcttgttccctgttctggtgtgcttttgagctccttgcgcagttccaccaggtacaacaaatgcgcccataaaatctgtctttgagccctgatgaaatt

SEQ ID NO: 182557 - DNA, 122 bp, Homo sapiens
aatcagtatttcgggaacacatgtcagtgctcgcagctggctgggtgtggacagacacctcggggtgaccgctgagtatattttgtggccccagcacccgtggcaggcagaactcacgcctc

SEQ ID NO: 182558 - DNA, 122 bp, Homo sapiens
ttgggggcgaggagacgagggggcgagggggcgagggggcgagggggcggggtgagacctcgcaccagcccgtggagaggtattttggcagtgttcctccgcccaaccgtctttaccccgca

SEQ ID NO: 182559 - DNA, 122 bp, Homo sapiens
aatgtcactgaatgtagccttatcatcagtattgccttggggaacaaaggatgtggataacggtgccaccaactggtaggacagtttgttggtgatgaaacttttttttgtttggcttatac

SEQ ID NO: 182560 - DNA, 122 bp, Homo sapiens
acgagcggagggttagacctttgccaggtagcgctcaaaatccgctaagactactcccaccgaaactcggtagcgcagttgtctttccgcagctgcttcagccagccccagcaagcccgagc

SEQ ID NO: 182561 - DNA, 122 bp, Homo sapiens
ataattccctctcctacctctgaatgtggtttttagtttccaccaaacttcggggaagggcgaggagatgaccccttaggagcgggatgcacgggcggggtgaaggaggcatttaaaagcag

SEQ ID NO: 182562 - DNA, 122 bp, Homo sapiens
agcgctccggttcggtacctcgtggagaagacgggggaggggagcagcgagatttccttgcggagcaatattcctagggtacagacctcgtagcccgggcccgcgactccgccccgggagcg

SEQ ID NO: 182563 - DNA, 122 bp, Homo sapiens
ggacgtcacgagccatatgccctgtgatggaggcctcgggtgcaagcaaatccacacccacgcaaatgcaaatggctgtttccacctaagatgcaatgtcaacttcagactcgtgtccagga

SEQ ID NO: 182564 - DNA, 122 bp, Homo sapiens
gtctgagactgagttcagagccgtggggctggcgctctagaggagcctgggacggctggccgaagccgccagcctcaggaagcacaacgccgtcctgtcactgcccagcccggccaggtggg

SEQ ID NO: 182565 - DNA, 122 bp, Homo sapiens
aaacaagagaagcaacgaaataatttattattcccattaaataaagatgctgatggctctcgagatagatatgaggaccccaggactctggggagtgaaggaactaagccgctgccatatct

SEQ ID NO: 182566 - DNA, 122 bp, Homo sapiens
acaggggaggagaggcttttctggggactcccttgccttcaagacctctaaggaaggagccgcttgacaaaccgagggcgatcagccccacagaccccatcagattcatgatcaccgacttc

SEQ ID NO: 182567 - DNA, 122 bp, Homo sapiens
aaagggacttacactgacaatgctatagcatcctggccatatccagttttgaaaacactacggtgtcagccacgcaccatttaggacggggagaatggaaagccagtttggagaacagacgc

SEQ ID NO: 182568 - DNA, 122 bp, Homo sapiens
gagcccgtccctcagccccgctcactgcagaaggcgcagggagagggcagctcgccatgccgaccctcgctctggttgctgggaactcttcctgctgcgccgaggtactttctcttactgtt

SEQ ID NO: 182569 - DNA, 122 bp, Homo sapiens
gcgcccaccatgggcccctgcgtggggcactcctcgggcagacacagcctcagccgcgcacgctcaccaagtgtggtctcacgtcctcacctgcccttggtgccatgtgtctctggtatttt

SEQ ID NO: 182570 - DNA, 122 bp, Homo sapiens
gagagactgtcagggttaacagataacttaatttccatcatgttatacagttagatttcccgtatcttggaagatgtggcagcgggctgcctgcacacaatggctgtttcaaagtacaggga

SEQ ID NO: 182571 - DNA, 122 bp, Homo sapiens
ttaaatacataaataaaatgtgtcttcctccactaaaagagtaggacacatcgcagaagccgataaatatttgttcaatgtttacatgaacaaacacggtcactcagccgtctttattttca

SEQ ID NO: 182572 - DNA, 122 bp, Homo sapiens
aatcaagagaagagtttgcttttttgaataactacaccctggacattagtttcaagaaaccgtctgctggaaatatatgtttaagttgatggatcattattacacgtagcagaaagaaagtc

SEQ ID NO: 182573 - DNA, 122 bp, Homo sapiens
gcaaactactttttctatctagctggatcacttgggtctcattatttcctgggctgtgggcgtgtttgaacagggcggggaagaaggtggggatggggggatggggaggtgggggcgatttg

SEQ ID NO: 182574 - DNA, 122 bp, Homo sapiens
ttctttgactcagaaagggaactccctgaccccttgcgcttcccaagtgaggcaatgcctcgccctgcttccgctcgcacacggtgcgcgcacccactgacctgagcccactgtctggcact

SEQ ID NO: 182575 - DNA, 122 bp, Homo sapiens
gctgctgccaggatgaagtgccattgctgcggcaaccctgaaaggaacggcctgcaaagccggacgcagtagctcccctcaccccgccattcggtctccctctagcgtgccctactggccaa

SEQ ID NO: 182576 - DNA, 122 bp, Homo sapiens
gaaaccggcctcgcagggcttggggaccaagcgagtctttgggaactctccacccactagcgcggggcgcccaggcgcgccccggtgtctgctgcccccgtgcggccgcgctgcagtcctgc

SEQ ID NO: 182577 - DNA, 122 bp, Homo sapiens
tgatttcctatctataaaatgaggctgacatctgtcccgcctgcctcaccatgtggcttacggttgataacacacacacatgagtgtatctaataggtgaagtttttatgaactgcagtgct

SEQ ID NO: 182578 - DNA, 122 bp, Homo sapiens
aataatttttttttttttgagacagagtctcgccctgtcgcccaggctggagtgcagtggcgcaatctcggctcactgcaagctcggcgtcctgggttcacgccattttcctgcctcagcct

SEQ ID NO: 182579 - DNA, 122 bp, Homo sapiens
cctgacaagcaggctcgtgaaaatcagactttgttctgttcacaaaggcgcagctcacctcgtgcccatggaacgccgcctttattaacacagcacaggcacgtcccaccagcgtgcaacac

SEQ ID NO: 182580 - DNA, 122 bp, Homo sapiens
taaaatgattatatatctgtttaagtctcttaatgtctattgtacattttttaaagggtgcgattgttaaatactcagaaaaaggtttgcattcaaggatactgatgctagttttataatag

SEQ ID NO: 182581 - DNA, 122 bp, Homo sapiens
ccacgcaatacacaggcccttcaggctggtgctggtttttcattttttctgacacagtctcgttgtgttgcccaggctggagtgcagtggcccgatcttggcttatggcagcctccaccccc

SEQ ID NO: 182582 - DNA, 122 bp, Homo sapiens
ggaactgggttgcaattccaatttttctgtgggagtgggactgggagacagcacccacagcgatgctcttgctccttcgcacttgagtctgcgtttgcggcttggtttgctggtgcaatcct

SEQ ID NO: 182583 - DNA, 122 bp, Homo sapiens
agcctggctgatagcctttccgccttctctgagttcgggctgcagctgctgcgccagctccgagactacttccctgccaccaacagcaccgctgtccaccgcctggagctgctgctgaagtg

SEQ ID NO: 182584 - DNA, 122 bp, Homo sapiens
gagtggcggcagggggtgggggaagggatgaggacggccagacaagacagggcgcacacacggagcccctcgcagtgtgcaaaatgatggcgaatgacaaagccacatgcttccctaactct

SEQ ID NO: 182585 - DNA, 122 bp, Homo sapiens
tcaaagggtcctgacttggtctcctcaggccggaaacgcagaaagtcaatcattcgataacgttgcttgtggcccccgccaataccatgcacccggattcggcctgtggtttaggacagttg

SEQ ID NO: 182586 - DNA, 122 bp, Homo sapiens
gcaaacagaacaaggtcgtgaccctgggtcacggccgccagtaccgctcccgcccggcagcggggaagccacctgttaggcccgagcctcacctggcaggaaagaggaagcgattgcccggc

SEQ ID NO: 182587 - DNA, 122 bp, Homo sapiens
gggcccagccgggagcagcctctttcgaaggccgccgtgacctcttcaagggcgtggagacgggaaggaaaaggccccggttggggttccagggcgccggtaacgttaaccggcgccttgcc

SEQ ID NO: 182588 - DNA, 122 bp, Homo sapiens
cggacgccggagaatcgacttcccggaggatcccgcctttcctccctctcctagccccgccggctgcctggcggcctgtaccgccccaactctgcgctctctgctcctcgccgggcggggac

SEQ ID NO: 182589 - DNA, 122 bp, Homo sapiens
gatgcaaaaaaggattgatttcaaaagttgcgagttgcattggcagccgcccttggcgcccgggccacctttttcccgggccccgctgcaagggccgggaacgtttccgccacctggccggg

SEQ ID NO: 182590 - DNA, 122 bp, Homo sapiens
ggcgtctccggggcgggctggcagcccgaggccaggagagcacccgcgtgttggcctggacgctgtgctagggcagctcttactgtttcacgttgtcccccagggcctcgcttaagttcttc

SEQ ID NO: 182591 - DNA, 122 bp, Homo sapiens
gagtttaaatgcgtctctctttcccaggctagtagctgagttttccaatagcctttctggcggttttaggaaatcgtgtcctttataaaaaataatgctacctaaataagtgttttaaacat

SEQ ID NO: 182592 - DNA, 122 bp, Homo sapiens
gcattgagagacgcttcacacctgttatctctctccctattctctctccactcctactcccgcccggcagctccccgctgtcagcaccagaaatacccgctaagaatacgaaaagcaacgct

SEQ ID NO: 182593 - DNA, 122 bp, Homo sapiens
tgtcccttccagtaaggcgttccagaggcttcgctgtgaaggcgcgaacgtccgctccatcggcaatgtgcgcctcactttcactgtggtccgtggccagttctcacagcaggaggtgcctc

SEQ ID NO: 182594 - DNA, 122 bp, Homo sapiens
cgaatcagataattaagcagagacctcagcacgggacctgccgctcaggggtctcggagccggctgcacgctctccgtagccccactcgcattgtttgctatgggagtagcgccccctgctg

SEQ ID NO: 182595 - DNA, 122 bp, Homo sapiens
tttatggtgcacttgttgggtgccagccccgcccccaccactccaccctaccccagcaggcgctaaaggagagctgacatgatggataacgaaaaagaagacgctgtccttctattcaggga

SEQ ID NO: 182596 - DNA, 122 bp, Homo sapiens
cgtgccctcaacccaggatctgcgccataaaccgtccaccccggttctgttgagggcatccgaaactagacagtgcgtttcaggatctaggacagctcccgccccggccacctgtttttaac

SEQ ID NO: 182597 - DNA, 122 bp, Homo sapiens
tccgcccacctaggcctctcaaagtgttgggattacgtgtgtaagccacagtgcccagcccgaattggatatctttaagatatctgtaagtgttatatccctaaccaagaagaaaaatatga

SEQ ID NO: 182598 - DNA, 122 bp, Homo sapiens
ctggccgcggcctttcctgaggctacaaaagtctcgaagtttctaactctccaggcaatccgtgcccctgtcttaagaagatgaggtagggccgggcgcggtggctcacgcctgtaacctca

SEQ ID NO: 182599 - DNA, 122 bp, Homo sapiens
gctagcaagcagaggcccgtgtggtcaggtggcggctggcagtgtaggctggcggggtgacggccacaggggctgggtttgacaccagtgggagccggggccctaggggactcagaggctgg

SEQ ID NO: 182600 - DNA, 122 bp, Homo sapiens
tggcttcactccacaagtcagcgaaaccacgaacccacccggagaaacaaactccagacgcgccagtttgaagagctgtaacactcgctgcgaaggtctgcggcttcacttttgaagtcagc

SEQ ID NO: 182601 - DNA, 122 bp, Homo sapiens
agaagagatgggcttacctttacacctcactgctaaaacattactgttctggaaggatcccggcagaggggcttctgacccgaggtgcttggagagaatggaggccacatccagtgccttac

SEQ ID NO: 182602 - DNA, 122 bp, Homo sapiens
tttctgggctgaatggagtctcagggagggggctaggtgacagcatcgccctttcctctccggctattgcgcaccttctggagcctcgctcagcctgctccctccggcgtaatacgccaatg

SEQ ID NO: 182603 - DNA, 122 bp, Homo sapiens
cagtgagcgtgagagcacctggtcaggaacctcccacctctcgggccctgcagccgcttccgtgggggaagggcagccgacttcacctaagcttccacctactgcatctaacccttaactgt

SEQ ID NO: 182604 - DNA, 122 bp, Homo sapiens
ccctcccactgcagccggcgaggctggccctgacccagagtcgcccgcccacccagtctacgtaggcattagaggtttgggttctgagctcagggcctggtttccatggcaaatttctctcc

SEQ ID NO: 182605 - DNA, 122 bp, Homo sapiens
acacatgggcattaacatgtagccggtgacacacttcactgagaaggatgcagggggccccgggcgtggcgtctgcaggcttttgaggggacgtccttggacagagctaacactttgtctct

SEQ ID NO: 182606 - DNA, 122 bp, Homo sapiens
ttttccatgacataacactcctcgagaaaagttcctgctgaatgtagtttacctgtcccacgacttgaataatcagaggaaattatccaaagctggttactgacccaaaaggaaaccatcga

SEQ ID NO: 182607 - DNA, 122 bp, Homo sapiens
tcactgcccggggccggtggggccggcctgccgctccaagtgtggggtccgctgagcccacgcccaccaggaactcgcgctggcccgcaagcaccgcgcacagccccggttcctgcccgcgc

SEQ ID NO: 182608 - DNA, 122 bp, Homo sapiens
ccatcgctgtcctgaaagcccatctcctccaacttgcagcgccggtagagctcgtagtgccggctgtgggtctgctcgcggaggtcttccatgttcacccggatcaacatctcccgcagctt

SEQ ID NO: 182609 - DNA, 122 bp, Homo sapiens
caagccgtcactggaactttgtatccttaagctttgaggccttgactcaggtgggggtcccggaataagctcatgaagtttttgcctcgttacccccaggctccaaatcactggtacaaatt

SEQ ID NO: 182610 - DNA, 122 bp, Homo sapiens
tacacaacatcagcttctttggtttgaacatcaccctataattacatctctagataaggccgaagtttaaatcttcagttccatttaaaaccggtacgatccatgaacccactctcaactga

SEQ ID NO: 182611 - DNA, 122 bp, Homo sapiens
gatgaacagagatcaggagctcatgaaggcaagggcaagtcttatttacctttatctccccgaacctagaagcgaggtcaaacagaagcgctcggggtagcaagaaggctttgtagatattg

SEQ ID NO: 182612 - DNA, 122 bp, Homo sapiens
gctgcggggcggaggccggccgggagaggggcggggaaggggtcgttgctgtgtgcctgccgtgggtcagagcagggagctgccggctgccgccattacaatccctcctccatctgcccgtc

SEQ ID NO: 182613 - DNA, 122 bp, Homo sapiens
ggacaggattcaggcttgcctggccggaatgagggtgctggtcccacgggagggcggctccggcaggcgggggtagggaagctggcggggagctgggcagggcgctgcagccggcgccagcg

SEQ ID NO: 182614 - DNA, 122 bp, Homo sapiens
cgttccgtaggcggggccgctcccgaggcacaaggaggcctgcgcggcgcccgaggtgtccggatcccaaaacaggaccccaggagtttctcacactcaggactggcccctagttgtcaatc

SEQ ID NO: 182615 - DNA, 122 bp, Homo sapiens
tggtaggctatgcattccaaagccggacagtgcagcagtgggcacgcaggaagcggcacacgcaccttggttccatcacgggttcactgactgtctgccatgtgccaggcactagaggagac

SEQ ID NO: 182616 - DNA, 122 bp, Homo sapiens
gacccttcctccaggaagccttgccttgtcccttcacgtggctgccgctgacttgccgtacgctgagaccatctcccatcaagccctgattcctctgagctgtcgtggggctctctctcctc

SEQ ID NO: 182617 - DNA, 122 bp, Homo sapiens
cagcatgctccgggtgggcctgggggcggcgcgggggcttggggcgcgggtcctctggggcgcaagcctggaggggagaagcatcggtcaggagaccccaaagaccctctcctttcccagcc

SEQ ID NO: 182618 - DNA, 122 bp, Homo sapiens
aggcctgaaagagcttcccttgactcagccatgactcaccaggggtgggccctaccagggcggggtggccccctgaggggtcttgggatggcctggagtttctgagctataaacattgccat

SEQ ID NO: 182619 - DNA, 122 bp, Homo sapiens
cccggtaccagggaaaaccgttccctgagctgcgcccagcaacacagtttaccttccgcgcgcaccgttcccctctaagtgcaccattttcaggacacgctgagagctcgggcggatgaaaa

SEQ ID NO: 182620 - DNA, 122 bp, Homo sapiens
aatcagaaggtttcttaaagtatttagctaggacttgttatgcttgtcagaaatgactcacgggccttttggatttttgagtgaatgccattgttagttttcagtgttcaacaatgcataat

SEQ ID NO: 182621 - DNA, 122 bp, Homo sapiens
tggaaaggggtgtaagccccccgagtacaggaattaccagatcgtcttcatcgtcttcggcgttctcatgaccatggccttgatcgttgccactcagttccggttccgctacaaccatttca

SEQ ID NO: 182622 - DNA, 122 bp, Homo sapiens
ttggtacaaggtggaaatttggttagagtggagtctgagccacctgggctcctttgatagcgttccttacatttttgcaaggtaaagataggactattctttgtgcctggtgcaaggctgag

SEQ ID NO: 182623 - DNA, 122 bp, Homo sapiens
aaatccctgcagtcataccccccgaaaagccctaaaattgcaggcgatgaagggagaaaacggcttggagccatgagaatggtctttccactgttttgtgtgcaaaatctggtagaagtggg

SEQ ID NO: 182624 - DNA, 122 bp, Homo sapiens
tcgggcctcgatggccgcgccgccccgggggagccggagccgagctggccgccgcccgcgcgcactcaccaagcccgctgagctcctcctcgcacgagtaccagatgccggtgtggaaattc

SEQ ID NO: 182625 - DNA, 122 bp, Homo sapiens
gggaatctctaggcaaaggctgttacagtcaaatctctgcgaacgattgtgatccgacagcggtgcaaaaggaaagagcgaatgcagtccacgccgcggaaatctaggggtagaggcaaggg

SEQ ID NO: 182626 - DNA, 122 bp, Homo sapiens
cgccataggggcccgaacgctagcgtttagggaatccgcaggctagaagtggaggcgggacgccactggtcgtctgagcgctgattggctggtggcgctagtcaccagccaatcgtcaacag

SEQ ID NO: 182627 - DNA, 122 bp, Homo sapiens
cagagtggtgggaaaggaagcgttttcttgcttggggcgaaagggggcagcggagcggagcgcccgaaacccagcccctgcggaccgcaatctttgggaaaaaggcgcaaggtgggaacgca

SEQ ID NO: 182628 - DNA, 122 bp, Homo sapiens
atgatgcacttgatagtttgggaatttattatagctatcaatcagttttgggaaaattgacgtctttacaatattgagttttctgattcatgaacatggtttacctctctttccatttgggt

SEQ ID NO: 182629 - DNA, 122 bp, Homo sapiens
agttatgccaaacacagcaataaaatatttgaaccacttttgcagcctcttgaacttttgcgtgtctcctcattgagtcatgtatcactcctgtgcaacaataataatggcatgcattaaga

SEQ ID NO: 182630 - DNA, 122 bp, Homo sapiens
ccattttaataatagaaagtcacgtttccaattaggcattatcttgtaatttgcttttgacgaaagttaaatgtaaggaaatgcagcacatgatatagaatgctcatatggtgttttgtgat

SEQ ID NO: 182631 - DNA, 122 bp, Homo sapiens
atttctaaacataaaaaaacttcacatgttctacttctagtctgtaaaacgtgtattgttcgttacctggagaccagcaagtattgtcctatttgtgatgtccaagttcacaagaccagacc

SEQ ID NO: 182632 - DNA, 122 bp, Homo sapiens
cgcttttcacaagcactttcttttttgggtggaagaaattggagagagggggtgagaaatcggggattgaggaaccaggctgtaagaccctataacagcctgtcaggttctagagagaccac

SEQ ID NO: 182633 - DNA, 122 bp, Homo sapiens
ttgatctttaaaaacatcttaattgagcttctctaaagggagctttttaggcaacatgcccgctaggtgtactgattgctagggtggctggtgtcaggcgaatcgctgtggctcccccagcc

SEQ ID NO: 182634 - DNA, 122 bp, Homo sapiens
ctcctggggctccccgcagacgctgcttttcttgctccactgggggtgcctcttcctgggcgcccgccgcctgcatcctgctcgtcctgtctgggaatggggccgcccccgggcttgggccg

SEQ ID NO: 182635 - DNA, 122 bp, Homo sapiens
gccccggggccacggaaggcaaccgagacccaggaagcaggcccaggacgccaaggaggccggtaaggaagacggtgaatagttggccctgtgaggcctagtgtgacctgtgaggcctgcgg

SEQ ID NO: 182636 - DNA, 122 bp, Homo sapiens
ggtccagcgcgacctgcctggggccacgtgttcaagcacgaagcccctgcgtggagtccacgcccttcaaaaggtccctaggggcaaagggatgaagcccaggagcgtcaatgtgaggtcag

SEQ ID NO: 182637 - DNA, 122 bp, Homo sapiens
acaaagctccttcctcccttagaggctttgtgattcagctccttttgctgtttgcaaggccggctgcttcctgcaattcacatctcaacttagacgccacttcttctgaaaaatcttcccca

SEQ ID NO: 182638 - DNA, 122 bp, Homo sapiens
ccttccttttctctgtctttcctatcccttttctatttttttctgtcatttggggtgcttcgcccctcctcttctaatcccttctggtttgggttgccttattagacatccatgagggatgg

SEQ ID NO: 182639 - DNA, 122 bp, Homo sapiens
gtcctgttttctttacctaatttacccctttcttctgaaccatgctctatgccaaggattcgcaacaaaagttagcaccaaaattaaagtaattaacagcatagcttccccatcactcaggg

SEQ ID NO: 182640 - DNA, 122 bp, Homo sapiens
gccgccgcgtcaccagcgtgcggcacgtgcccatgtttacgtccctcgtggagccgccgacgtcagcagtcgaatggcaacattgtggcgatgctgaggcgcagagtttaggagacgggttc

SEQ ID NO: 182641 - DNA, 122 bp, Homo sapiens
gagcgaatttcttccatctgagagttcacagtccagtttggacggggacagtcatgtgaccgggtgatgaatgagtggtgcaggctgtacatataatatgcatttggagggaggagaggtct

SEQ ID NO: 182642 - DNA, 122 bp, Homo sapiens
gacctcgtgatccgcccgcctggcctcccaaagtgctgggattacaggcgtgagccaccacgcctggcctattattaggactttgtagttcaatactatatgaagagaatattttcatcttt

SEQ ID NO: 182643 - DNA, 122 bp, Homo sapiens
cctgggctacgtgaacctgccgctcacctttttctgccgggcagagctggatagtgagcccgagcgggtggcgtccgtcctagaaaagctgaaggaggactgtaacaacactgagaacaaag

SEQ ID NO: 182644 - DNA, 122 bp, Homo sapiens
cccaggccgcgctctgtgtctttgtccaggctgggaggggccgatggccgttaaaagccccgcccgccgccgctcgccgccgcctggccccacccccgtatccatggagacccgacgccgcc

SEQ ID NO: 182645 - DNA, 122 bp, Homo sapiens
agctgtgtggggcccctggggaagccgcacggttcacagtccaggggcgggtggggacgacggagccgctctcttgataccactgaagagtgcatactgagggccccttttgttctgggcgt

SEQ ID NO: 182646 - DNA, 122 bp, Homo sapiens
gatgcggccctgctgctggtgggccacgctgtgtggcaaacaccttagaatgtgttctcacgccctaaagatgcgtccaaacgcttcagcagcagaaactgaacagttgaatgcacacagct

SEQ ID NO: 182647 - DNA, 122 bp, Homo sapiens
aatgctcctgaaggcggggaggcggcccggcccgcactgagcttctcaccggccagagggcgcagccacccggccttcccgaagcaggacagcggcctttccaagaccgcggagtccccgtg

SEQ ID NO: 182648 - DNA, 122 bp, Homo sapiens
ttttcttgctgtctttttctggggcatctgaaattcttccatccttttctttgctaccatcgggatctggaaatgtagtgttagttccataatacttgtaccctctatagcctggcttctca

SEQ ID NO: 182649 - DNA, 122 bp, Homo sapiens
gccttaggtttttaaggcatgctggtctagttggctctcagtaaaagtacattgaacaaacggaagaacaatcctatccatagaaagaatgctgaaggaaaaaaaatattttctgaatgatt

SEQ ID NO: 182650 - DNA, 122 bp, Homo sapiens
gctgcgggcgtcgggctgggtgcgtcctttacagacaggccataagtgagcacgtggactcgctgtgggaattcatatttcttctgcaaggaagaatgactcatatccaaactcactcagct

SEQ ID NO: 182651 - DNA, 122 bp, Homo sapiens
gccggcgtccctcctagtagtaccgctgctctctaacctcaggacgtcaagggcctagagcgacagatgtttcccagcagggggttctgaggctgtgcgcccagatcgcgagagaggcaagt

SEQ ID NO: 182652 - DNA, 122 bp, Homo sapiens
ctcgaactcctgacctcgtgatctgcctgcctcggcctcccaaagtgctgtggttacaggcgtgagccaccacgcccggcctgcagttaatatttaactgacaatttacggtgtggtaggcc

SEQ ID NO: 182653 - DNA, 122 bp, Homo sapiens
cccaggagggactgcaaagagcccggggacggtgggaaagggcattcccagcggtagaaacggcgctgtgtgaaaacaaaacaaaagcctggacgttgcagggaaggaacgccggctgccag

SEQ ID NO: 182654 - DNA, 122 bp, Homo sapiens
aaagagcagcaagccttctccatcttaatttgactctaccgcagagcagacttacgctggcgtgatgggaggagatcatgggcagagaggaaaaactaatagcagcattgctcacctgagac

SEQ ID NO: 182655 - DNA, 122 bp, Homo sapiens
ccagagattaaggaaagtcacttgattcttgggccaggctccccatcagccatcaaggcccggcttgcctcttttctttcctcctctgcctcctgccagatgaatttcccctccttcctcca

SEQ ID NO: 182656 - DNA, 122 bp, Homo sapiens
acagtgagcgttcactttgccctggcaactggaactgtctcctccagtcctcaccacaaccgttttacagagcaggacacctgttgcaagatgggagagactttgctaacaaggtcccacag

SEQ ID NO: 182657 - DNA, 122 bp, Homo sapiens
gaagaagacacccacatggcgcttcctctatcccaagatgatgacataccctgtgtctagcggacagctggatgtctgtctacactgtctggttgttgggatttggtgactacattgcacag

SEQ ID NO: 182658 - DNA, 122 bp, Homo sapiens
gcaaggaggttcctacgcggaaggaagcccgtggcttctgctgcgctgcgagggcttgaccgccatgtttgaagcgggcggaaaaaaattatggggcgtgcagtgtcacgtgactgctcgga

SEQ ID NO: 182659 - DNA, 122 bp, Homo sapiens
gatagaatagatgaataaatagaagagaatgaggagacggatctgggcaggctgcgaaggcggtgctattccaaagcccagcccagaggcagtgacctccgacccaagccaaaaaaaaaacc

SEQ ID NO: 182660 - DNA, 122 bp, Homo sapiens
agaaagtaaacgtggttattatcttcattattttcggacttatttatttaaaacgtaaatcgaagcctgaggagcccaggggaaaacctccttcagcttaatagctccagcctgcccagctt

SEQ ID NO: 182661 - DNA, 122 bp, Homo sapiens
agaaggaaggaagcaaagaaggaagggaggaagggaagaagggagagttcagttccctttcgtcgttcacacagtggtcctccacaccaggaaacctaagggctctgtggagggccaggtgc

SEQ ID NO: 182662 - DNA, 122 bp, Homo sapiens
ccttgctgaagtgttagaaaccccctccctacagacaggctgtggtgccccgcagggagacgcccattcagtgccttccttcacatctactaagtgcctactatgtgccagttctggtctag

SEQ ID NO: 182663 - DNA, 122 bp, Homo sapiens
aaaaacaaaatctgtctaaccagtcgggttccttgtttatactgaaactacggcagccgccgccgcgcacgccccccttggctcaggcgcctgcctcccgctgccagccccgccccgccccg

SEQ ID NO: 182664 - DNA, 122 bp, Homo sapiens
gtctgtgtatctgtctgtctctgtctctatctcggcccttggaaacgagaggcttttggccgagaggactagaagggggcctgaggtgggaggaataggaataggaatcccggcaaagcgtc

SEQ ID NO: 182665 - DNA, 122 bp, Homo sapiens
cctcagttattcagtggctacctctgtttgtaaacagcagtcctttgtaaagagcaagtacgactatcaaattttagttcagtcacttaagggtatattcctacacgcatgcacatgtgcat

SEQ ID NO: 182666 - DNA, 122 bp, Homo sapiens
tcctgaagagaatcagcattgtgttgcctagcagctgcctcaggggaggctattgttcttcgctcatgcaatgcagagttaatcttgtcagacaaaggtaaaaaggctgataacagcctgta

SEQ ID NO: 182667 - DNA, 122 bp, Homo sapiens
cggtcctcggcggagcgggagcagtgggacgtttccgggggtcgggtgggtagcggcgagcgctgtgcggtcagggcggggctcctgtgccctgtcggtggcgcagggagctggacgcggcc

SEQ ID NO: 182668 - DNA, 122 bp, Homo sapiens
acccccaaggtcgccctcatggggtgtatggggcacaggactcctgaggccctggcttctcgaagccgtgcagctcacagaggtggtagccggtgttcccatcactgggcaggcaaagcctg

SEQ ID NO: 182669 - DNA, 122 bp, Homo sapiens
ggggaggcaggcactacccagccatgccgggtggacaggcattttccacagctcgggaaacggagccgggccaggaaggttggagctcagctcttgggtgagagccgcggagccctggctga

SEQ ID NO: 182670 - DNA, 122 bp, Homo sapiens
ccgtgttgggggaggcgtggatggtctgaagctgacaacttgggagttccttcctctatccggtacccccaagtctccacttgctgtcggcgcggagcttcgagtgggggtgggctcaagtt

SEQ ID NO: 182671 - DNA, 122 bp, Homo sapiens
cctgtgggaagcagctctccacaccagccaagggggcccccacactcccgcgctgctctgcggctcagggagcagcccacctgctgggtgtgctgatatcaccctcccttcttccccccagt

SEQ ID NO: 182672 - DNA, 122 bp, Homo sapiens
tatatgaatcctagagacagcaaacttctgctgtacagctaacttacaagggcctgaacccggctgatggcagcaagcctgctacagtccagaagagtgcgacttcttatatttacatatga

SEQ ID NO: 182673 - DNA, 122 bp, Homo sapiens
cctccggtgagttcagggcggttgcctttagggtgtgtccctaattgacggggtcggggacggagagaagggtaacaccaggctgggtcggagaccggcggaggcgaggaaatcctaagagc

SEQ ID NO: 182674 - DNA, 122 bp, Homo sapiens
aaaaagtctggcagatgcagaaccacagctgatcactttggtccgtttgagggcccctttcgctcagctcttttgggggttccagggctctcagagcttccaggtcctgtaagaagagatgg

SEQ ID NO: 182675 - DNA, 122 bp, Homo sapiens
ccttctgggcggaagcctctcgcgagctgcgggacacaaaagaatgagcggcggggcgggcgcgggaagccaagagactccaggaattcgcagccgcgcaggggagggggttgccggagtaa

SEQ ID NO: 182676 - DNA, 122 bp, Homo sapiens
agtagagacggggtttcaccatgttggccaggctggtctcaaactcctgacctcaagtgccgcctgcctcgggctcccaaagagctaggattacaggcgtgagccagcacatccagcctttt

SEQ ID NO: 182677 - DNA, 122 bp, Homo sapiens
ataacaatgaagctatccccatcagagcctttttcacattgtacgaaagttagctgcattcgtgaaaaatttttattaagtcctaggcaagagtaactgatcttgtttttcttgttttccaa

SEQ ID NO: 182678 - DNA, 122 bp, Homo sapiens
taaagcatagcatctagaagagaagactgaaaaataaacatgtttagatcacagggcatacgttcttagataatttgtgacaagaaatatcagcacataaaaaaggaatctattgattctac

SEQ ID NO: 182679 - DNA, 122 bp, Homo sapiens
ccacatgcctgtcctctacccaccagataccctccccaggctgtaacagccaaaatgtttcgagacattgccaaatgttcaagagtggcagaaccactatgacgggacaaaggtagataaag

SEQ ID NO: 182680 - DNA, 122 bp, Homo sapiens
ggccgcgagggcgggcttgatgcagatgagggggcggggcccacgggcgcgggagagcagcggctccgccggcagctgctgggaactggaaggcgcccggtcctttctttgactggagcgga

SEQ ID NO: 182681 - DNA, 122 bp, Homo sapiens
gtggggagataagtggtcaggcttaagccagccttgcctgtgacgcctgggactagaagccggggatgggcagctgtgccactctgtcaagatgccttgtgggcccccactccacagcatgg

SEQ ID NO: 182682 - DNA, 122 bp, Homo sapiens
tagaaccttttcggatcctcattctacctttgaccacatcagctctcctccctgatggttcgaatccacacggctttaatgttttctaaaggacattttttttttgttttttgagacggagt

SEQ ID NO: 182683 - DNA, 122 bp, Homo sapiens
atccttgtttttatgtttttctctttagaaatcttttgcctattaaagccacttttcagtcggtttaaaaataaatgtatgggttctatacatcatacttttcaatctacactgggattttg

SEQ ID NO: 182684 - DNA, 122 bp, Homo sapiens
ccgcaggtgccactcagcgagccaggtgggccgaggggctggagggggctccacagggctcgttgtggggggctcggtgagcagccgccgtgtcccccatcaggtttccgccgtcgggagtc

SEQ ID NO: 182685 - DNA, 122 bp, Homo sapiens
cattgctcaaacactgattggatgccaggccccaaagcaagtcctttacatgaatttactcgtttattccacacaacaatcctatatgaagtaaccattacttcctctcttttatagaagaa

SEQ ID NO: 182686 - DNA, 122 bp, Homo sapiens
aggcagagctgcaaacacccacatggtgagtccaggacagggcctcacatgtggcatcatcgccagctcaggatgggcaaagggatgcatggcagacaggcatgctggatactaattgtgac

SEQ ID NO: 182687 - DNA, 122 bp, Homo sapiens
gcttccccatgtgtgtgcaaaggaggcaccaagcaggagaaatttccacaagggtccccacgtggcccaccctccagggcagacagagagggaaaggggtgggtgacagcagcccccttcct

SEQ ID NO: 182688 - DNA, 122 bp, Homo sapiens
ggccaccagtagcctgggtccccgtacctctgcaggcgcagccgctcttttcacctggtgcgccagcttgcaagtcgtgcatttacctcttttggctgcacagagggcagggaagcctcgcg

SEQ ID NO: 182689 - DNA, 122 bp, Homo sapiens
gctgggattggtggtcccgggcaaggagttccagcaggtggggggcgaatcacctttcagcgggcccaagcgatgagcacaccttgatcttcaccttacggatcccgcgcccaactcaagat

SEQ ID NO: 182690 - DNA, 122 bp, Homo sapiens
gaagaaggggcgtgtcaggctgcgcaggcggccagtccattggctggaagagaccggagccgggctccgggcccgaccagaggagggcggtgctgcagggctggtccgggaggtgacgaccg

SEQ ID NO: 182691 - DNA, 122 bp, Homo sapiens
cccttaaacccgtgcccctcctcccgtcccccatgcaccctccaaaggagatgacaaaggcggcagtgaaggaggagaaggaggaagagaaacacctttattggaagagctgtgtggacaag

SEQ ID NO: 182692 - DNA, 122 bp, Homo sapiens
ccccctctcgtcttcccccgctacttccctcctgctggtcggttcaactccacaagcgcgcgtttgtttcgagtacagtaacttagagcagatggggggcactttctagagggcagtggaaa

SEQ ID NO: 182693 - DNA, 122 bp, Homo sapiens
ctgctgtgtcctcacaggcagacagccaggactgatgttccatcacatgaatgctcagtgcgtggatgcaggggagactcaagcagcctgagtgccctgtgggcaagagatgtgtgcctggt

SEQ ID NO: 182694 - DNA, 122 bp, Homo sapiens
ttaaatcagtggtatcagtaggacttctaatgtaataaatcaggcaatataatgttaaagcgctgcttgagttgttgaagagttagtaggcagatattacaattcactgtagctgtaataga

SEQ ID NO: 182695 - DNA, 122 bp, Homo sapiens
aggctggattggcatcccctcatctcctgattggaaccatcactcctagaataaggtaatcggggacttgacagctttcatcatgagactagactagaatcagccattcgcggggctgtgga

SEQ ID NO: 182696 - DNA, 122 bp, Homo sapiens
aagcagctgcagggccagtggccgggccaaacttctagttggagacgagactcagctttccgctggtacaatgcggagcggagcacgagggtcgcaggtgcagaacagcgggaagatgcgct

SEQ ID NO: 182697 - DNA, 122 bp, Homo sapiens
tggcaggaggcggcgcagtggacacgcggtccgaggacgggggcctcacccgccgccccacgcttgcctcttcctgggatgccgcaggcggggccctaactcacagcctcctcacccgggct

SEQ ID NO: 182698 - DNA, 122 bp, Homo sapiens
tgcctccctccacttcctagggtgcagtgtgggtggggcgggggcagctagggagtcctccgggctctgccgagccccttccccagtgtgaagtccagcctgttctgaagtcgcacagggcc

SEQ ID NO: 182699 - DNA, 122 bp, Homo sapiens
aaggacttctctaagatattggtcattggaagttccttcacaccaattctcctcctgagacggaatctccgttgttgttgttgttgttgttttctagcccaaggatgacatagagctggctc

SEQ ID NO: 182700 - DNA, 122 bp, Homo sapiens
caaagacgatcttgccctggctgatgaccactagtggggagccgtggcactccataccctcgaagatgttgtactccaccgcctgcaccaacagcctcagtgttacttcccaggatttgctc

SEQ ID NO: 182701 - DNA, 122 bp, Homo sapiens
ctgaagtaacctcttcatcagcagaaatcaagtagttaaaggcagagtgaaaacctcccacgctggtaccctctcaaattcaaatgagggtaagaaaaaaaaaaaaaagacaaagaaaagga

SEQ ID NO: 182702 - DNA, 122 bp, Homo sapiens
gagcgctagtgctgggagggcggacacgtggctccgggcagaagtgtccgccagcaggagcgctcgtgcttggaaggtagacacgtggcccgggcggaagtgtccttgcagcgagcaggagc

SEQ ID NO: 182703 - DNA, 122 bp, Homo sapiens
tctttgtgatctggctctatttatctactactccttccttctttattttgctatgctactcgctcttcctgtgtgaggattttcacatactctcttacttttatctgcagtgcttgtttgca

SEQ ID NO: 182704 - DNA, 122 bp, Homo sapiens
ccatctcattccccatacgaatatttaccatttcctcctccctaaaagtaatcatgttcccgactttttggttatcacttccatacttttctgttttatcactcaagcgtgcatacatgaac

SEQ ID NO: 182705 - DNA, 122 bp, Homo sapiens
gcccccacgacccggccgcagctggcgcttcggtcacgtacacgcggatccgggggccctcgccctcccgctcagctacttacccggcaggccggattcgggtgccaggtcccggcgaaggg

SEQ ID NO: 182706 - DNA, 122 bp, Homo sapiens
gagatgagagcagatggaatgagttggtgacccctcttaatctgtagcctcagggaaacacggctacccaatgccaagatggtaaaccctcaactcgaagagtaagatcaggacgtatgctt

SEQ ID NO: 182707 - DNA, 122 bp, Homo sapiens
cccagctactcaggaggctgaggcaggagaatggcgtgaacccgggagaatggtgtgccccgagcctacttcccgcgcagtcctccaagacgcggcctccagcaggggtcgctgcttcgctg

SEQ ID NO: 182708 - DNA, 122 bp, Homo sapiens
caacccggtgaagcaaatgacacacgacctgggcgtctgtacttacgactgcgtcatacacgcctgctctctggaacaacaactatgaggagtggacgcatgcgggaaggtgagaaatgaga

SEQ ID NO: 182709 - DNA, 122 bp, Homo sapiens
tgactgtgaatctaacagttacaatatactaagcacatagtagatgcttcaaagatcactcgattatatacaaaaagcaagccaggagactaatcactttattgtccaggcaagtataggaa

SEQ ID NO: 182710 - DNA, 122 bp, Homo sapiens
tttggtgtctctgacactgatttcaggaaccatctaccagtgctcccaagagtgaaaatgcgtcccaggcagtagggctctttcccacactgaaaggtcagaatgaatttcttgtcatttcc

SEQ ID NO: 182711 - DNA, 122 bp, Homo sapiens
gatcattgatctgtttgggagcagcaggggcctttgtgaatacagggccagcctcctggccggacatggttttgctgtgcttgccctggcttatttcagatttgaagacctccccgaagatc

SEQ ID NO: 182712 - DNA, 122 bp, Homo sapiens
tccctttgcccagaacataggacttcgtgttagggtttccttgtgccttgtcttgcagtccgtactttgaggctgatttccaggtacactgctctgaacagctgggtttaggatgggtggca

SEQ ID NO: 182713 - DNA, 122 bp, Homo sapiens
ggagcggcagtcatcccaaatacaaactacatgttccaggatgctttgggcggcagatctcgcggaagccgcgaggagagcccggccccgtctcgcgcgcctgcttccgcctccctgtggcg

SEQ ID NO: 182714 - DNA, 122 bp, Homo sapiens
aatgctccttatcgctatcctactgtcctcctgtaagggtcctcttccaaaaatggtttgcggatttgcttaggaggcccttagagccccagagaagatgcttcatggattccacaaacaat

SEQ ID NO: 182715 - DNA, 122 bp, Homo sapiens
gcagttgagagcctacctggatggcacgtgcgtggagtggctccgcagatacctggagaacgggaaggagacgctgcagcgcacgggtaccaggggccacggggcgcctccctgatcgcctg

SEQ ID NO: 182716 - DNA, 122 bp, Homo sapiens
tgaggattcttaaaatatgcttctggactacatttggtcatgtttgtgtgtccacatattcgttgtcttaatgagtagttaggtaatttgaactacattgcttgattgctgaactgtagttt

SEQ ID NO: 182717 - DNA, 122 bp, Homo sapiens
atcctcctgttctccagacggagaaggccctgggggatggagcctggcgccgggaagggccgggcccctgaggccggccgtggtttggggctggggcacacccccgagcttcctgtgctgtg

SEQ ID NO: 182718 - DNA, 122 bp, Homo sapiens
cgggagggacagaccagagccgaagctgcgcggagttcctcgcccctggccccgccgccgcgccccccgcccgcttcggcgctcggacgctcttcccgcggaccctccccacaccccaccca

SEQ ID NO: 182719 - DNA, 122 bp, Homo sapiens
taaaaatccgacacggagtaaagaacgcagcccatgctacgtcaccatcccgtaaccacacgtgacctgagctgaaggtctgacagctgcaggccaaaggccaaacagagctcctttactca

SEQ ID NO: 182720 - DNA, 122 bp, Homo sapiens
ccttttattagtgctttgccagaggctgatgtcaagcaccacaccccaaccccagcgtctcgtgagtccgacccagacatccaaactaaaaggaagtcatccagtctattcacagaagtgtt

SEQ ID NO: 182721 - DNA, 122 bp, Homo sapiens
tcggattccttgttggtaaacagcgtcttaggacgcggctctgtgatgctgtggcctgtgcgtcgcatcggcatgtctcagccggcaccgggcagcagagggcagcagagatcaggaaatgg

SEQ ID NO: 182722 - DNA, 122 bp, Homo sapiens
atgtttccccctccaagaaggggcccttgcagcaccacaacctgcttgtctgccacgtgacggatttctacccaggcagcattcaagtccgatggttcctgaatggacaggaggaaacagct

SEQ ID NO: 182723 - DNA, 122 bp, Homo sapiens
gtcagtgtgggtgggcaggaggacagccagtcgtcctgctgccagcccaatagcttccagcggcaggtgcccaggtgctaccggagcccctcataggggtaggggcagggactgcacctcct

SEQ ID NO: 182724 - DNA, 122 bp, Homo sapiens
ctcttttgcccatggggagcgagaaacaggcagagcagagatttaaaagtgccaatgcgccgggtccgcactgtgatctggagagttggaaactttcggcagtgtagtccattgcacagaac

SEQ ID NO: 182725 - DNA, 122 bp, Homo sapiens
tcgaggattggtcagacctcaccgcctgccttggctcaggaaaacccctctgcttccagccgtcagtgagcgccaccctctccaggaacagatgtcctgcgttctaaatgaagagtgcagag

SEQ ID NO: 182726 - DNA, 122 bp, Homo sapiens
gatggatgaggagaccactcggaacagtgtttaattaaagaaatgggagctagggagagacgattctgtaaagccaggggatacagagacacagggagagaggctcaggccaaggcaggtgg

SEQ ID NO: 182727 - DNA, 122 bp, Homo sapiens
ggtcgccggacctttgaggggcattggaatcctgggctcctcctctgctgggtggagccgcgaaccctcgttctctccgcggttttgtgtgtgtgggggggtcctgctcaggaggggatggt

SEQ ID NO: 182728 - DNA, 122 bp, Homo sapiens
aatagcttccataaccatgaatccacattttgtagccttggggagaccaacgtgctctgacggttttccttaacaagatgtgattgacgtgtaagcagcagcataggaaccggaagtggcca

SEQ ID NO: 182729 - DNA, 122 bp, Homo sapiens
ccacgctgtctctccttctgacctcttctcaacccccatcccccacaccatttattcatccgtgaaacctttaacaactgaactaattctggaaagttgcccatatcagatatcttcagaaa

SEQ ID NO: 182730 - DNA, 122 bp, Homo sapiens
gacgctctgcaactaccgtcttgaaattctgtattttatttatttatttattttttgagacggggtctccaccatttcccaggctggagtacagtgacacaatctcagctcactgcaacctc

SEQ ID NO: 182731 - DNA, 122 bp, Homo sapiens
atgtgtgttgaacgagcttcctgctgtggagcaggatgagcgcgggatgtggagtccagacgcggtctgctgctcacctgcgacctcagtttccctgtgccatcatggctggggtcgggggg

SEQ ID NO: 182732 - DNA, 122 bp, Homo sapiens
tctctgggtccttgtttgagtgagtgcgagtgtgtccgttcctttgctgtctgccccaggcgggggagggggggggaggtggtgggggcgagggggcgggggctcagctagtccagccgtct

SEQ ID NO: 182733 - DNA, 122 bp, Homo sapiens
tgcaccaatggatgtgtgcaccaatagacgtgtgcaccaatagacgtgtgcaccaatgaacgtgtgcgccaatagatgtgtgtgccaatggacgtgtgcgccaatagacgtgtgcgccaata

SEQ ID NO: 182734 - DNA, 122 bp, Homo sapiens
aggatcattcacagcactctccctgttagttctacatagagggagcacctgtcagaagagcggtttccagagctgcaagaattccctgggggtcagagctgggccagggcttggaggggtgt

SEQ ID NO: 182735 - DNA, 122 bp, Homo sapiens
gcctcaggtaatccacccacctcggccttccaaagtgctgggattacaagtgtgagccaccgtgcccggccagaccagccctttgcaacattgtaacctctgtgagtttgttttcattaaat

SEQ ID NO: 182736 - DNA, 122 bp, Homo sapiens
aggctggcacaaggagaaaaaaaaagcaagcatcagcgaatagtatagtgtctcagggtccgaagcaagtttaaatgccacctaggaggatccaaagtctgaatctcctctacaatgtttcc

SEQ ID NO: 182737 - DNA, 122 bp, Homo sapiens
ctggtccggccccccgggatcccccgggcccacgggttcctcttcgccctcgcaccgacccgcagggacatagaaccaagccccaggctggcccagctacaagaccgcctctgggtgccgca

SEQ ID NO: 182738 - DNA, 122 bp, Homo sapiens
ttggtgtaaacttataaagcccttcctatgaaaactgtcccccaaatcacattacttggtcgtcctcgaggaacgattttgaatgaaaagcacataaagtgctgtagcatggagacgagaga

SEQ ID NO: 182739 - DNA, 122 bp, Homo sapiens
gcagtagctgtggactggccagagtgattggaggtgttttcctcgcgtcctccaagtctacggggccttcgcacctctgagtgcctgagagccccggcttttgcttgggacggaggtacggg

SEQ ID NO: 182740 - DNA, 122 bp, Homo sapiens
agggagagggtctgccggggctgaggaccttcggggaagttctggaatccggcagggacacgcggcgcgtgcttccacccgcggggagtgcaggccccgggagggtccgggctggcctagag

SEQ ID NO: 182741 - DNA, 122 bp, Homo sapiens
tttactctgtgcagtgggggcgatgcctaatgcctggcatgtgccaggcaatcttttgcacgcatggtgacttttgctccaatgctgtaaagcagagttatctttgtgaaagacactttcag

SEQ ID NO: 182742 - DNA, 122 bp, Homo sapiens
gagaacacagcgagtgtgtgagtccctcccgctccagctcctccaagccgcggccgccgccgccaccctcgcccgcagcctcccgcagcctccctcggccaccggtgcctgctgggggtgtt

SEQ ID NO: 182743 - DNA, 122 bp, Homo sapiens
cccgaggtgagggaatagtgggcctggagccagctgccggcagctctgctgggggaggggcgtcggggtcgcgctccgtatcctgcgggccctgcagccccgatttacgcgccggctccgct

SEQ ID NO: 182744 - DNA, 122 bp, Homo sapiens
acactgcagctcttttcagtttttgcttatacacaattcattctttgcagctaattaagccgaagaagcctgggaatcaagtttgaaacaaagattaataaagttctttgcctagtatacag

SEQ ID NO: 182745 - DNA, 122 bp, Homo sapiens
agatctgatggttttataaacgagaagcccttttcgcttgaccctcattatagctcatgccgcagccaggtaagaagtgcctttcgccttccgccttccgccatgactgttaggcctcccta

SEQ ID NO: 182746 - DNA, 122 bp, Homo sapiens
gactgaagtgatcacacaaaaaagatatcttccaattccatttgagctacaatctgatttcgctgttgagtacaacgtccccttcacaagaatcagaagtcagcatcagggctgtgctgcat

SEQ ID NO: 182747 - DNA, 122 bp, Homo sapiens
gcaactttcttagcctgacatacaaggcctgttactcaccctggccaggcttcctggacacgccatcaaccacagctccacaagccctcctgttctccaagcacagaagcttcacgccctgg

SEQ ID NO: 182748 - DNA, 122 bp, Homo sapiens
tgaaaaggctgcagcttaggctgtcactcttccttcagtccagcatctgatcacatctcccgtcactcagggcccgaaggggcggggccttaaacgttatccaatcaggaacgctgggctgg

SEQ ID NO: 182749 - DNA, 122 bp, Homo sapiens
cctcagcaagccgagtgtttaaaatacattcagccactagatgtcgctgtggccccaccgcgaggacgcggagggaggcgctgcagagcacgggcgacgtgaccacagctgtcggggctaac

SEQ ID NO: 182750 - DNA, 122 bp, Homo sapiens
tctcccagtggccctcaccccactttctgtctctgtggatctgactactctggggcctcacgtcggcgggatccacaggacgtgtcctttcagcccggctcactctactcagcaaatgtcct

SEQ ID NO: 182751 - DNA, 122 bp, Homo sapiens
ctctaggaactccggtcacttaccgcccagggagccgccatcttgctaaggtttcgtaaccggaaggggccggtcttatcccacgctcctggttcagcgcgaacttattctcctgtggccac

SEQ ID NO: 182752 - DNA, 122 bp, Homo sapiens
ggcggacgcagctgcgggtcctgcttttcccatattggcactgcacatgattgctcagagcggagagacacaagcaaaaatgtgctagtgccaaaatcggccaagcagatggcactggtgcg

SEQ ID NO: 182753 - DNA, 122 bp, Homo sapiens
aggatttcaagacaatgtggtaggagcaagccagggtctggtatcagagagacccagttccggttccaaggttagctgcttcccagagtctcagttgcctgctctgaaaatgagataataat

SEQ ID NO: 182754 - DNA, 122 bp, Homo sapiens
accctcctgcccagcctcagggtaatccaggggcacagagactctgagccctggcccacccgtggtccctcggattttgacactccctcacccccagtgtcatgcactctgacctactgcag

SEQ ID NO: 182755 - DNA, 122 bp, Homo sapiens
gttcacgcccccgcccacacccccgcccacgcacctgcctctcagcaacacccccacccccgccacccccgcccccattgtctatcctgggtgtttccgaggctgctaccacctgaaccgcg

SEQ ID NO: 182756 - DNA, 122 bp, Homo sapiens
tcctaagtctgacagaaggaaattacctcaaactcctcagtagccaacagcacatcatgacgttaaagtaaaacaaaaataagatttaaaaacaaaacaaacttccagataacaaaaattat

SEQ ID NO: 182757 - DNA, 122 bp, Homo sapiens
ggcttcagtgttcagtggatggcaggctcctacagtggctcctggactgaggctaagcgccgtgatggccgcaaactggtgccttgggtagacactattaaagagtcagacattatttacaa

SEQ ID NO: 182758 - DNA, 122 bp, Homo sapiens
aggttaagcctcaatcattgtgtcccttccctagggactgctggcgctctcgcccactggcgatgattatgcgcctagaactcgaccgcgaagcaactaataggaaaacatatggtgtcaat

SEQ ID NO: 182759 - DNA, 122 bp, Homo sapiens
aaaccaccggcacacacctccgagaactgcgcagagtgggcaggcagcccccaaaggctgcgtactgtgtggttctttttatgtcacatttatgaggcgagaagattctgaagttgaggaaa

SEQ ID NO: 182760 - DNA, 122 bp, Homo sapiens
gcaggcggagtgagaggcggctcagggcaccagctgcccactgagtcactgtgagaagagcgaaggccaaggcttgggaaggtttccagctgacagagacgccactgaaacatgagctgata

SEQ ID NO: 182761 - DNA, 122 bp, Homo sapiens
tctccgccgccgttggcctgggtgccaagtctctcgttgcctggggccggcagggccggccggctgctccgagtgctgggccctgccaaacctacgcccaaccggaactccagctggcccgc

SEQ ID NO: 182762 - DNA, 122 bp, Homo sapiens
taccatggcaactggtgatgtcagggcggtagcgtcgtaacatcgcgcgagaactctctgcgcggttgactacgcttatcaatccatcgtattcctttgtcttcttgtcacaaaaagaattt

SEQ ID NO: 182763 - DNA, 122 bp, Homo sapiens
acacgtgggtctccaagtacagcagacaacaggagcttctctataagcacccctaacaaacggcacacacacaggaaacgccgcaagatgcctcccaccagcccaggcaccggcagggtaaa

SEQ ID NO: 182764 - DNA, 122 bp, Homo sapiens
tttaaaatccccaaatcctcaaaatagctgatttgctgtcattttatttcatttttcagtcgcctgcttgttacatcttcccattatttcttcctcttctcattgcatgaggctaacacaat

SEQ ID NO: 182765 - DNA, 122 bp, Homo sapiens
gggtccgggcagaagtataggtggcatccttactagcccaagcctctcgcctcatctccacgtatgctgctgtgatgtagtcagccagagactctggcaccatgggctgcttctcgcggcac

SEQ ID NO: 182766 - DNA, 122 bp, Homo sapiens
gggcgccgtcctccagcgtatgctaggcaggcgcgccccgccctcctggtcacgtgaccacgcctacagccgaagaggatgggaaaatgcggccctgttcctgaacaggaagcggaagcagg

SEQ ID NO: 182767 - DNA, 122 bp, Homo sapiens
aaagttcaccttttacgacctcacaaaagctcctaacacgttaccaataaaaacattccgcggcaaacaccgaggaggaaaatatcaaacagatacaaataaaacaccccgcagggggaggg

SEQ ID NO: 182768 - DNA, 122 bp, Homo sapiens
gtatctaatcctgaaccgctagtcactgacctcactgacaacttgttactgaaaatacttcgttgaaaaaggccagacacatactttgcctagagacctacaaacatagctctgaataagtt

SEQ ID NO: 182769 - DNA, 122 bp, Homo sapiens
aaggtgtccgagtgaagatcacagtgaaggagctgctgcagcaaagacgggcacaccaggcggcctccgggggaaccgtaagcataagcccttccctcattccccagcccatgccaggcctc

SEQ ID NO: 182770 - DNA, 122 bp, Homo sapiens
tagtaacaatgtctttttttcctccaaaaagactcccaggctggaatggtgtcctcatatcgaggaagaggatactgaggcccagaaatgtgccctagctttactaggagcgcccccaccta

SEQ ID NO: 182771 - DNA, 122 bp, Homo sapiens
gggcatacggttttaattttaatctgcatgcctccgtttctattctcccatgagtctttgcggcaggacaaggaaaagcaagtcttataaaaagaaatacagtatgtggtgcttattaaagt

SEQ ID NO: 182772 - DNA, 122 bp, Homo sapiens
acacacgagtggagcccccactggcccctcctgggctcttgagagacccagaagagaagccggccttgaggcatttggaagccatggcccctgcaactcagatgcaattgataggtctctga

SEQ ID NO: 182773 - DNA, 122 bp, Homo sapiens
tgggagactcagatcacttttccaccttagagaattaactgtttccttgaaaaatggaaacgaccagaaagcagattcacaaactttactctccccctacccgcatctgggatacacagcct

SEQ ID NO: 182774 - DNA, 122 bp, Homo sapiens
tctacgaccaggggcgccggggcagcagcgaccccacagtgcagcgctccgtgtttgcatcggtggacaaggtgccaggtgagccagccccccgccctgcgccacagctcgttcatcatggt

SEQ ID NO: 182775 - DNA, 122 bp, Homo sapiens
gccctccctgctgacatagcacacaaatagggcctttactcgctgccagcgaccgtctgccgccctgggagtgtgagccggaacccgggcccctgtgccagccaggcccgcaaggctcgctc

SEQ ID NO: 182776 - DNA, 122 bp, Homo sapiens
ctgccgtctcttacttgtttaaaacgcccagaacccgagtcagccttggcagtgagcttacggcccgcaccaggaggggccagcctgctgccaagatggggacggttccctgggccccgcgg

SEQ ID NO: 182777 - DNA, 122 bp, Homo sapiens
tcctatatactggtgaggtataatttctcaactagcctcactgttcctaatgaaatgtcacgctccagctatcacgtattaactgagactatgttaggctctgagggatgcaaagactgagt

SEQ ID NO: 182778 - DNA, 122 bp, Homo sapiens
tcgatggagttacactgatgtattaatttattcggcaaacatgcatgggactacgccaggcgtggctctaggtgctgccgacactgggatgaaacagccgggatccctgcccctgtggaact

SEQ ID NO: 182779 - DNA, 122 bp, Homo sapiens
cgctgacttccatccctccggatccagcagggtgtccgctgttctcctgatccagcgaggcgcccattgccgctcccgatcgcgctaaaggcttgccattgttcctgcacggctaagtgcct

SEQ ID NO: 182780 - DNA, 122 bp, Homo sapiens
aactgatattaacgacagcgccccaaagttccaggccgaaagtctggaagtaaaaattaacgaaatcgcggttcctggagcacgttatccacttccagaagctattgatccggatgttggcg

SEQ ID NO: 182781 - DNA, 122 bp, Homo sapiens
ttctttgatttgtactggataactcttctggttctcctgacaccttctcagtcttttctgcggccttctcttctgtacaccctgtaagtggtgccattgcttagagttctgttcttggtttc

SEQ ID NO: 182782 - DNA, 122 bp, Homo sapiens
atataggactgtaagcagttttatgtacttatgaagtttttgactccttactctgatttacgcaagtgaaaatatggaaatacacaaatgagttgtgatatatcttttagtcttaaatagga

SEQ ID NO: 182783 - DNA, 122 bp, Homo sapiens
ctgtggccattgtcccctgaccagctaaaatcaagcctctgtctcagtccagcctttgcacgcacgcttcctttgccctgctttccatcccctctccctccaactcccctgccagagttcca

SEQ ID NO: 182784 - DNA, 122 bp, Homo sapiens
ggagcagttctccgggacccgttgcgtcagagggactgggcggggctgggcggggcaggacgggggcggcgctcaggaaccctggaacccgctggccctgaggccacggaccgagacgtggt

SEQ ID NO: 182785 - DNA, 122 bp, Homo sapiens
cccaaaagcccagtgcccactgctatctcttatgcccattcaggatggctacactgcaggcgtggaaaagcccctccctgccgagcggtttgttctgctgtccctctgtggcccttttgttg

SEQ ID NO: 182786 - DNA, 122 bp, Homo sapiens
ggaccgtgggtgggtgggaagggcggtcagacacctccaggcgctgtctgcagcgaggggcggccacattcgctggggatggtgcctttgccgggattcctgaaaggcagggtccatggttt

SEQ ID NO: 182787 - DNA, 122 bp, Homo sapiens
ctgagacaagttctgtggtagtatatgccttaaaaaaaaaaagaaacgagcgggggactccgggatgattttgttgttctagaacagtgaccacagcctcacactctgcaggaaaagactgg

SEQ ID NO: 182788 - DNA, 122 bp, Homo sapiens
gacggggccctcatgagtgtcccggcaggaaaaaaacaccgcgattgggactctcagaagcgcaggatcccagagcaccatggacaagccagtgacgccccgcccccactaggccccaccca

SEQ ID NO: 182789 - DNA, 122 bp, Homo sapiens
actgtgtgagtgctggggaaccaattacccctgacgtgactgaaaaatggagaaacaagacgggcctggatatctacgaaggatatggacagactgaaacggtacctgacctcactgaaaag

SEQ ID NO: 182790 - DNA, 122 bp, Homo sapiens
ctgacttttggaagcgaggcggccttaggcttcctggttatcagtttccttttagcaggccgtccccgggcgctgtttccttcccaggggtctctcacccgtgtcccggctttctgagctgg

SEQ ID NO: 182791 - DNA, 122 bp, Homo sapiens
gccctacgtgggggtgggcatcgcggggagtgaatccacgatctgggaatggctacatcccgtcaggttaaaggatgagagaaaatgacgcggcgccacacatcggacaggccagggtggcc

SEQ ID NO: 182792 - DNA, 122 bp, Homo sapiens
gctcttcctttgcttctactcccagttttggggacggggcggctggaggttgaggaagtgcgcccagggccgccgccccggccgcggtggctctgtctcccgcgccctgcacgcccacccag

SEQ ID NO: 182793 - DNA, 122 bp, Homo sapiens
cctgattcagcagttgggtatggtaatgcaatggctgggtgtgtctacccccaacaccaccggtaggttctcagtgtggctccttttcttccttgtctagtgaaggggcgctgcccttcctt

SEQ ID NO: 182794 - DNA, 122 bp, Homo sapiens
ccagaaggctgaggctcccgaccaggggagactccaggagacccaagggcaggctgcatgcggaagtctgggccacacctggtatggctcacctcaggatcaccaccggtcccgccagtcgc

SEQ ID NO: 182795 - DNA, 122 bp, Homo sapiens
ttgaggcttcactccccttcctagtcccatattcctcactttcaaaatctaaagaaaagtcgatgagtaactgcatccaaaaattaggtaatcccgcatgaacactaggacaaaacaaaccc

SEQ ID NO: 182796 - DNA, 122 bp, Homo sapiens
agacgtgtgcctgagtaacagagcgtaacccacaggcaagccacagaaactccccatgctcgtccttgatgccaacccccccatctccctggatgaccttgggtggcatctctcccctgctg

SEQ ID NO: 182797 - DNA, 122 bp, Homo sapiens
taataatgttaatttcctggttttgatcattgaactatgattatgtaagatgataacagacgaaactgggtgaaaggtatataggaactctgctgtagttttgtacatctaaaatcaattcg

SEQ ID NO: 182798 - DNA, 122 bp, Homo sapiens
cgggggcggagggagctgaggccccgtgaggacacgcgcggtggtggcggtggcggcgggcgcgcggccgcagccggaggaggacggcgggagcgtgcgaggagctggctcggttatttcgg

SEQ ID NO: 182799 - DNA, 122 bp, Homo sapiens
cacgctccatcagatgctgtgattaaagggagggacgctgcggtttgtcacatgactgcacgaggctgtcaccacctgctgttaataactgacaggcaatctgagcctgctttataagaacg

SEQ ID NO: 182800 - DNA, 122 bp, Homo sapiens
tcatggtaggcaggggcaggtgcgtcagagatggagcgcaggtcctgcatggagaagctccgcagcctgccggccagcgccccctgactctgcgagggggaagaggcttcagcggggaggct

SEQ ID NO: 182801 - DNA, 122 bp, Homo sapiens
aacatcaaggcggtaaagcacagaaacttcctccctaccgcagcaagcgtggggagagggcgcccacagggctggggcccttcccaggctgctgggtctccagcccacgttccggatggacg

SEQ ID NO: 182802 - DNA, 122 bp, Homo sapiens
ctcccaggtttaagtgattttcctgcctcaggctctcgattagctgggattacaggtgcccgctgccatgcctggctaatttttgtatttttagcagagatagggtttcgccatgttggcca

SEQ ID NO: 182803 - DNA, 122 bp, Homo sapiens
cacactcacacacgaatgcactcacacacaaatggactcacactcacatgcacactcatacgaatgcactcacacacatgcactcacactcacacgaatgcactcacacacacgcgaatgca

SEQ ID NO: 182804 - DNA, 122 bp, Homo sapiens
agccctcccccctaagatgcagaccctcagaacacgtcgcggaaggtgagctccctgctccgagaggcagactcgggtgtaacgcaaagacggtttctttcatcaataaggtccccactgcc

SEQ ID NO: 182805 - DNA, 122 bp, Homo sapiens
caccccagatgtcactagccccttttggcttgttaatgcattttcgcaagcaaggccagccgagacctcgtattctagctggggacgtacaattttcagttctgagtttatttgaaagaaat

SEQ ID NO: 182806 - DNA, 122 bp, Homo sapiens
tgttaaaaggctaaaaactccactagtcggaagtgacgtgccagcttagccccgcaggtccgccacgtaattggccgccgccacagctagccaccctctccccagactggcccgaagagagg

SEQ ID NO: 182807 - DNA, 122 bp, Homo sapiens
gtcctccctgcacccccaacccgaagacgggcgtgtgatcctgtgggtgggtgcgtggtccgtgtgtgtaattttgtccggagcagtcattctcggagtgggccccagacccgcagtgtaag

SEQ ID NO: 182808 - DNA, 122 bp, Homo sapiens
ttctggtcagcaccgaagaaggaaggtgtggagaggaggggccgggccgagagcaaataccgcctttttggtgcagcagcagccctgtctctgaccccggccgtcctggggagatgaggttt

SEQ ID NO: 182809 - DNA, 122 bp, Homo sapiens
ccggggcctgtttcagcctcctgctgtcagaaagcagctgtttgggaagaggctgtgattcggccttgtttgagggccgatactctgaatgggtgaggcttgaaatcctccctttggaacaa

SEQ ID NO: 182810 - DNA, 122 bp, Homo sapiens
gggttcaggtttgcaggtgtgaccagaagccttctctccttctctctctcctccccaagacgaccctgagggtgccttcgttccccccgagttcgacgtgaccgggaacacctttgaggtaa

SEQ ID NO: 182811 - DNA, 122 bp, Homo sapiens
tacgtggagaccctcaccttttgtcttgtgcattccgtaaaaagctcaggagtttccttccggctgcctggcctcccctccttgccccggggggttaggagtgctctgttctgacttaggcg

SEQ ID NO: 182812 - DNA, 122 bp, Homo sapiens
gctctagttagcaacactgctctatcaaagtaggaaataccacacacagtaaatgtgctgcgctgagcttaatgcttggaaactcttgaaaggcatgatgcaatttaacgtattttaaatca

SEQ ID NO: 182813 - DNA, 122 bp, Homo sapiens
ttgcggggcaggtcgcgcagggcaggtcgtgcggggcaggtggggggtgccaaggaagtccgggcgtggccacaccgcagagaaagccatgggaggcacgtcctgagagctgggaattggaa

SEQ ID NO: 182814 - DNA, 122 bp, Homo sapiens
atcactgctttagagaaagcaggcgacagctgggaggcgacctggtcggagctcacttaacggttttgtatttcaaatccaaagagactttgcctgctcgaggcttgtgttcccgcggctcc

SEQ ID NO: 182815 - DNA, 122 bp, Homo sapiens
aacaattttatctgtcatgtttagatatgggttagctggaaagcagcacagagtaaccaacgatgagattcatattctacattaagtccaaaaaggggctttcttccccaggtcaccaaata

SEQ ID NO: 182816 - DNA, 122 bp, Homo sapiens
gcgccgcccgcgctgcccccgccgccgcccgcgctggagccccctgcgctgctgtccgggcggggtccctcgaaactgacgctcaggagatcgcggaaagtcatctcaacgcgcggccgtcg

SEQ ID NO: 182817 - DNA, 122 bp, Homo sapiens
ctccccaggccctgagctgggccctgtgcgggtggggcgaggcctgagccccagaaggttcgggggcggggcccggggtggtcctggggtggagaaggctggaggaggccatccgatgcgga

SEQ ID NO: 182818 - DNA, 122 bp, Homo sapiens
agtgggaatgtgactggttgagggtggggaagggaaaaaggcaagaggccccagatggggcgccccaaggtgttaaagagaagcagtgacaggtcaaggcaggactcacccaacactggaac

SEQ ID NO: 182819 - DNA, 122 bp, Homo sapiens
ggccctgtgcccccttcttggggtgtaatagcctcaagcggatttcccggcttctgcgggcgcagcacattgttttatttgttttgaaggctcagagtttgaggctggtcgtagacacccac

SEQ ID NO: 182820 - DNA, 122 bp, Homo sapiens
ggtgcaggtcctgtctgctgcttcattctctcactactgaaaataaatgtgttaaagactcgccacacatagggatattttattttaagctaattggacacaaataattttaatttgggtta

SEQ ID NO: 182821 - DNA, 122 bp, Homo sapiens
agggctgggtagcgggccggccaatgggggcccgcgggggtcgggagggttctcaaagaacggaggggctgaaaaggggaagaagagaggaagggggacggggaaggcgacgcggccgctga

SEQ ID NO: 182822 - DNA, 122 bp, Homo sapiens
gagaggagccgagaggaagttgagatgcctgttctgcagctgctgcgcgtcccaccgacccgctgctcgccgtccctgggccgtgctggccctccgccctcggcccagacccggaccgggcc

SEQ ID NO: 182823 - DNA, 122 bp, Homo sapiens
gccgccgcagaggcgccgcaggtgcgggtgcagccttacagcggacccgaggccccttcgcgttcttgctcctcataatggcatccgcaggagtctccaggattgggtgaggccccgccttc

SEQ ID NO: 182824 - DNA, 122 bp, Homo sapiens
tttaaaaaaattgagaactagatcgagaagacaactgattgtagaacagtcagagagcttcgtgctggtgaacattaatagagctataatagtctgccaaaattatgatgaaatcactggag

SEQ ID NO: 182825 - DNA, 122 bp, Homo sapiens
catcaggtagatttgattagtataacaaggtgtttaatgaaaaatgaagcttcccttactcgacgtccacacagcccctagtggccctccttggaggcaagcactgctgctcatttcttgtg

SEQ ID NO: 182826 - DNA, 122 bp, Homo sapiens
atgtgtcctaggctcctctctccttccaacgcaaatatgtgtacaaaccctgcctggaaccgcagccctgctctcagaatcaaattcctgaaagtgggcaagcggaagcggaaataagccct

SEQ ID NO: 182827 - DNA, 122 bp, Homo sapiens
ccagcccaaggttaaggcctcagccagcaagcaggccctggtgttccactgagtgggctgcgggtgcttccaccttcagcgcctcggcaaagcgtcaggagtcccccgcggccgggtcaagt

SEQ ID NO: 182828 - DNA, 122 bp, Homo sapiens
cccaataaaacgtgtgccccggggcgcggtgctgcatctgtgctgcgtgcgtgggggcagcggtggcgtgtgccagtccaggactccggcagtcccgggccccggccggcggacatgggtct

SEQ ID NO: 182829 - DNA, 122 bp, Homo sapiens
tcaagttctctagatgattctaacactcaccaaagtttgagaagcactggtttaaacattcgctgaggcctaccagggaccaggcatgcttctaagcacttgacactcagtgttttatttaa

SEQ ID NO: 182830 - DNA, 122 bp, Homo sapiens
ggagtggcttgaagaacaggaaaagaaacactcgtttctcaaaaaggccaaggaggtctccgaggcttccaaagagagcagtgttaactccacaccaggggacaaaggtagcagaaaagaga

SEQ ID NO: 182831 - DNA, 122 bp, Homo sapiens
ggtacgagaaacaggctcagggcgatgggctcgacctgcggggaggtcgcacaaccgggacgtgctgggggcagaaccgtaaagccccacgtgcctcaggcaactgtgatgagaggacccgg

SEQ ID NO: 182832 - DNA, 122 bp, Homo sapiens
atcagaggctcagagaggggtagtgacatcttcagggtcacacagcaaggagtggagaagcgcagcctagaacccatgcacttgggactcagggggaaggacatatgagaagagcttatgtt

SEQ ID NO: 182833 - DNA, 122 bp, Homo sapiens
gctagcccatcacggctcctcctcctcctcttccatgggccgcagaccgcggaggatcagcgctctctggctcccggagcccagagaccagctgaggaaagttgctgccccgatctgcagga

SEQ ID NO: 182834 - DNA, 122 bp, Homo sapiens
tcagcaggcttaatccaggtgcctccactcagagacctccttaaaaggtgggtgcctccacggagatgtccttgtaaggggcccctgactaagacacttttcccctttgacccagtactttt

SEQ ID NO: 182835 - DNA, 122 bp, Homo sapiens
tccggtggcgggcgaaagcaaccgctctttctgttctctcttcgccctccctcgtggaaacgcagactcgaccctaaacgcttaacccacagagatcaacaggttcaagcggaatattcgcg

SEQ ID NO: 182836 - DNA, 122 bp, Homo sapiens
ctccgccagctcgcccagaaatacaactacaacaagatgatctgccgcaagtgctgtgcccgcctgcaccaccccgtgctgtcaactcccgcaagaagcgcggccacaccaacaacctgtac

SEQ ID NO: 182837 - DNA, 122 bp, Homo sapiens
agaaacattgtcttttgggtcctctctccatggctttttcatgtgttcattagttcattacgtatttacctactgagacccatgcaatgccattcagtgtgttggatgagaggattccagga

SEQ ID NO: 182838 - DNA, 122 bp, Homo sapiens
tgaatgcgagtgggcttcgattatccctccaaagcagggtcgtggcgaggatcaaaggagcgaccttaggaggggccttacaggacagggtgcaaggcgagtgctcggtaaaccgcggtgat

SEQ ID NO: 182839 - DNA, 122 bp, Homo sapiens
caccgcagccgcccgtcccgcgcctacctcccggcggctccagtcgcgcacgcgcgtcggcgcccggggccctccgcggcctctctaggaaactgggaggcccaacgtctctgcttctctcc

SEQ ID NO: 182840 - DNA, 122 bp, Homo sapiens
tgcagaggtcgttgtccagggggaacttgtggcagtgcagcatctcaggccaggggaagccgtaggcctccatgagcggcgcgcagccggcgcgcacggcctcgcacagcgagcggcacggg

SEQ ID NO: 182841 - DNA, 122 bp, Homo sapiens
gcggaggtgaaacctagcatggcaccagctcccagcagcctctgctaggaaggcctggagcgccacagggaccacggccatgggcacttccagaccgagtgcagcagggctgccatcttggg

SEQ ID NO: 182842 - DNA, 122 bp, Homo sapiens
gaatctactccgggacgggtccgcggtcctcagtcgggatggagcgggggcggaggcagccggagggaactggagtccccattgcagaactgcggggccgggctctgggctgggcgcctgcc

SEQ ID NO: 182843 - DNA, 122 bp, Homo sapiens
cgcacccatgcggaagcatctgcgcaaactgcagaggccacggggtctacgctcaagtcccgggagcagctgtcacactctcgcctcacccttttcaaatccgccttgcgcacgttcacaaa

SEQ ID NO: 182844 - DNA, 122 bp, Homo sapiens
tctcatagaacatatcgaagtcgtcctcactcaggggctcggtgctctcctccgtggccacgctgaagttctccaggatgatggcaatgtacatgttgaccacgatgaggaaggagatgatg

SEQ ID NO: 182845 - DNA, 122 bp, Homo sapiens
ctagggggaggcagggtgacatcctgcggcccttgggcaattcgggccagtgacgttcaccgacactcaggcggggatcccttcgccagagccagttcctttgagtgtctccgctcaaaatc

SEQ ID NO: 182846 - DNA, 122 bp, Homo sapiens
caaggctgctgggcccatcttccaggggtgatcactgaggctcaggctggctgaggtggccggaccccaacccctggccctgccctgtgggcagcagtgccaggtctggcactcagaggtta

SEQ ID NO: 182847 - DNA, 122 bp, Homo sapiens
ggagtccctggggtccgagaggcccttggaatccaccatggcatgggccggagtccctggcgacgcagaagatgtgctcactgattcgtggggtggaggacactgcacacccagccatctgg

SEQ ID NO: 182848 - DNA, 122 bp, Homo sapiens
gtgctgtttttctgtttttgtctgcacagaaactggggtctcatctgcagcaagcagaaccgctagagctgggggtaggggtgcagtgtccaggcaagccgagtgtttgcttatatttctgt

SEQ ID NO: 182849 - DNA, 122 bp, Homo sapiens
aggtttccgtttccacttccgtccagggagacttccgggagagcccggcgctccccgccacgcatccagcccctctacctccggcctccggcggactctatggtcgcgagcggtctgggcgc

SEQ ID NO: 182850 - DNA, 122 bp, Homo sapiens
ccagccctggtcccagcccatgtgtgggacctgccatttagctctccaatttggtagctccgtctgtctcaccttacccccaaagtgtgatgttaatggtgaaatttcagatcttatgaagg

SEQ ID NO: 182851 - DNA, 122 bp, Homo sapiens
tcagacagactctgggtagggcccagaaattcgtattttgataagctttccaggagattccggcttctgtaaagtttgagagccactgtctaagagtactcagctctcagccctgtgttccc

SEQ ID NO: 182852 - DNA, 122 bp, Homo sapiens
gcgagctctccggaagccaagtggcggcggctggaaggaggccgcgcggccgctggggtgcgctgtgtgccaagccgacttctggggagcgcgctaggtgactgggtgtgttctcagagtgc

SEQ ID NO: 182853 - DNA, 122 bp, Homo sapiens
aagcaggtaatgacaatttctgctaataataacccagtccaagaatcttcagacttccagcgggccattcctgatcccttcaaatccggacatctccatggtcctccagtcactgccaatgg

SEQ ID NO: 182854 - DNA, 122 bp, Homo sapiens
ctaaatcccgccctgcccttctcgttccgcccctgcccgggagccccgcgtcctcattggcgagctccagggtggcccggcccggacaccccagtgataaaatagatcatctacacggaaac

SEQ ID NO: 182855 - DNA, 122 bp, Homo sapiens
catgcccagaaacaggttaaatttatctggggagaagaaatggaatgaaaacaaagtagccgcgtgaagaggcaagtctatagggcttcgctcctggaaatgactcttggaaatgtcatctc

SEQ ID NO: 182856 - DNA, 122 bp, Homo sapiens
ggagtccacgccaggccccaggcgcctcaaaggcccagaggcggagtgccgcggtgggagcgctgcctgcgaggtgtctgtgagaggtggggttgggagcggctggggtgggtggggctgct

SEQ ID NO: 182857 - DNA, 122 bp, Homo sapiens
gctccccaggtgacgctcacacacactgataaacgccgctccaactcacccctccctgtgcgcagagacgtgggtccccgactcttggttcactccctgcctgacccctccccgtgcgcaga

SEQ ID NO: 182858 - DNA, 122 bp, Homo sapiens
cagcacctactgacagacagaaagtacagggcattgacatagtttaaatccagtgacttccgtttttcctaatagaatcagagtgataatgcattttaaaggttatttttattatttcatgt

SEQ ID NO: 182859 - DNA, 122 bp, Homo sapiens
gcagtgagctgtggagtccgtggtgacgtgggccgtcctccagaaggagccctgggcatccgccacgctgaggctccctgctgtcactgcctgcccctccagctggaacatgtatccgccaa

SEQ ID NO: 182860 - DNA, 122 bp, Homo sapiens
accgaagggcggatggttgtgcccggcgacggcgcccaatgagcggccaggatgttggagcgccggcggcggtccgggcgctcgctggctgagggacggcggccgccgccatgatgcttgtt

SEQ ID NO: 182861 - DNA, 122 bp, Homo sapiens
tacttattttgaaatactctagaaaaaaaatgaattggactatagatgaaacaaatttggcgtaacgttgctaattattgaagctgcatgatgggcacaagggaaatcattatattgctttc

SEQ ID NO: 182862 - DNA, 122 bp, Homo sapiens
cgcggaccctcggaaacccaggccgagcatgcagtgagacgcgggcagaacccggagtggcgggcacacccaacctcgtgaacgcccacgcaccccatccccatcccccagtacacacccag

SEQ ID NO: 182863 - DNA, 122 bp, Homo sapiens
ttctgcacatacaaggaacgcttcttcaaggccatcaaatgcgtgcctatcctatggactcgcaatttattgggagaatgtgggtgtttcttccatgcacacaaatggcacagaaattccac

SEQ ID NO: 182864 - DNA, 122 bp, Homo sapiens
cctcctcctccaccctggcctctaggtcatggcagatctcttctaattcctgcttcttggcggtcaggcgggcccggagctcctcagcctcggcacacagctcggtttctgcctggagctgc

SEQ ID NO: 182865 - DNA, 122 bp, Homo sapiens
ggtaaccgcagagtgagagcagagggcccagggcagccgccatacccggagcctgagtatcggggcttcccaggacctggctgagtgacagccagcagagcccctgccgtccaatcacaggg

SEQ ID NO: 182866 - DNA, 122 bp, Homo sapiens
acccacacatatgtggacaactaattatcggcaaagatataaagccagttctggagagagcgaacaatctttcctaccaacggtgctggaacaatccggtatcatccacaacacagtaaaca

SEQ ID NO: 182867 - DNA, 122 bp, Homo sapiens
gttcggtcttgtccaccttttcttccaagtcccgaagaagtgagtccttgcctagaaggccgcacttctgattcagtctgatgttgtccgtccgcagcccctctcgggcttgcttcgtcttg

SEQ ID NO: 182868 - DNA, 122 bp, Homo sapiens
cgcaggcacaggaagccgcggctgagctgaagggctcgagaaggagcccagagcgctgcacgctgctccctctgggtagtctgaagggtcagagctggactgccctgccctatgtgctctgg

SEQ ID NO: 182869 - DNA, 122 bp, Homo sapiens
agccgttcccgcggacgtcggcgccagggcttggggtgggaacaggtgcggggctgcgtccgcccccgcctgcatgccagagtgaggcaggcctggccccgtgtgagacgagcctttccttc

SEQ ID NO: 182870 - DNA, 122 bp, Homo sapiens
cccggagcggcggcctgcgggggcacagagcggctcctggctcctcagaccgccgcagcccgtggctcctgccctgggtctacccagggctacaagggtcttttgcggtcgaccctgcgggg

SEQ ID NO: 182871 - DNA, 122 bp, Homo sapiens
ctggtctgggcagcgctttctccttccgtttctgcatcagctgcctgcctgggtggggtccgcaggtgcgtcagccaccccgggggctcccccagcccaccttgagctgacgctggcagccc

SEQ ID NO: 182872 - DNA, 122 bp, Homo sapiens
acggagattcccatcatgcctgcactcacgctcccctcacctttcattcccttggagagacggctcttctggcaggtctccaaatggtcgactctgtcccccgaggccccgccctagcctcg

SEQ ID NO: 182873 - DNA, 122 bp, Homo sapiens
ctagcacggctgacgatggccctttctgcggagaccgagtcacacatctaccgagctctgcgtactgcttctggcgctgccgcccaccttgtggccctgggctttaccatctttgtggctgt

SEQ ID NO: 182874 - DNA, 122 bp, Homo sapiens
atcttgcagagcctaagacacaggcccagagaggcagtgatcgccaaagatcacacagcacgaagtggcagggacgcgatcctggaagaagggagtcaccaaggacccttccctcctaatca

SEQ ID NO: 182875 - DNA, 122 bp, Homo sapiens
tcaaaacccactccgcgcccgacgggaacggctggagggaggaaagagccaggcacctctcgttcggggtctgacattgtcacctggcagataagtgagtctgctcggatgtgccggctcgg

SEQ ID NO: 182876 - DNA, 122 bp, Homo sapiens
aggagcccgggagaaagtctgcagagctcacacaggcctgggaattgtgagtgctcccgccggggcagaaatacctcgtgatacacaaggccttgggtagagtgagaagttagccctggagt

SEQ ID NO: 182877 - DNA, 122 bp, Homo sapiens
taaggagccagaaagcaaatactctagaatttgggcctggaactgtctctgtagcgtattcgtctttgttttgaaaatgtaaaaaccactcttagctgctggccttacaaaaatagaatcat

SEQ ID NO: 182878 - DNA, 122 bp, Homo sapiens
aggcggccagatcggggatagaacgccgagacggtggtgacaatgcccgcctagaactttcgggctgtagcctgggttccagaaggcctgcttgggaccggaagcgcggaactctcagccca

SEQ ID NO: 182879 - DNA, 122 bp, Homo sapiens
ttccgagtaataactttaattcctttctaacatttacacggcaaacaggaatgcagtaaacgtccacgtccgtcccacggctgggctgccgttccgtttcctccacgaacgggtacgcgctt

SEQ ID NO: 182880 - DNA, 122 bp, Homo sapiens
aactctttaacaacagctacataattagaatttggattcccattaattttccttgggcctcgaaccatttgcagctcacactggtaattaatgcgatacatcactaactttacccagcgcag

SEQ ID NO: 182881 - DNA, 122 bp, Homo sapiens
aacagttagcaacattaagtaggtgtgaaaagagttactttccgaagacgtcacccgtcccgctccataagtgacagagttagacatcaaagttgccgcgagcccaaaggagctacgggaat

SEQ ID NO: 182882 - DNA, 122 bp, Homo sapiens
ggtcagctggggcttcctcatccactgccctgggctttggctcaggtggtggccacgggccgaacggcaggagggcatgatgggcctgaggactcctgggtccccgaccatgttcccagcag

SEQ ID NO: 182883 - DNA, 122 bp, Homo sapiens
aggctaaggcaggggaatcacttgaatccgggaggcggagcttgcagtgagccgagaccgcgccactgcactccaactttggcgacagagggaggcgccgtctaaaaaaaaaaaaaaaaaaa

SEQ ID NO: 182884 - DNA, 122 bp, Homo sapiens
tgtctttccacgtatctgtatggggttgtccctctgtctttcccgccatgactggctttccgtcctatttcacccacccttcctcccacggatccgcgagtcctctggccctggccctttca

SEQ ID NO: 182885 - DNA, 122 bp, Homo sapiens
ctttatatattttcaaacaacacattggtaaacatgtaatgctgcttttttcagcatctccgagtgaatagccagtctttcatatacacattgacagagaaatctctcaatgaactcagaaa

SEQ ID NO: 182886 - DNA, 122 bp, Homo sapiens
tagaattttggcttatctggaaatactggatctcggaagcttcttattgcttcgttcctgcggaaaattcctcttaagtcagttcaaacaactccagacctgaaaaggctcaaatgatctct

SEQ ID NO: 182887 - DNA, 122 bp, Homo sapiens
gatcataataaacagttctgactccttggctggttaggactggttaagtccagagtttgtcggctgccttcaccataaaacttaaatgacatcaattcagtcatcttgatgtgcatgttttc

SEQ ID NO: 182888 - DNA, 122 bp, Homo sapiens
tcctgactccctgctgtgcggctaaatgagttagacgaatctgttctctcctgaacttggcggagctcctcggcaccccacactgttctggggacttgggctgcctcggaggaaaaagaaaa

SEQ ID NO: 182889 - DNA, 122 bp, Homo sapiens
tctcttcctcctgtctcctcggccccttctccgcaggctgaaggcggagctggagatattcggggagcaggtccggagcgcccccgaggtcggggccggcgagggagaggtagggagcccga

SEQ ID NO: 182890 - DNA, 122 bp, Homo sapiens
gaccctcgccgcctgtggggaagacctgccttgaggacagagcgccaggggtgcagaggccgcctgggactgcccggaggccggtggggagcgcgccagcgaaagcccgtgcgccctcggag

SEQ ID NO: 182891 - DNA, 122 bp, Homo sapiens
cacaatctccacccaatcacctgggaccttcttttcatcatgcaaatgggtcgggcagctcggaagctcaggagtcattggaggcccctgtcctgtcccattcctagttctgctttccctca

SEQ ID NO: 182892 - DNA, 122 bp, Homo sapiens
ctccttgtggccccccagctgcctgtcctcctcctgcacacccacatcctggtagccagacgggttcccatatggccctgggtgctgctgatgggcctgactcagggccaggaaacaggggc

SEQ ID NO: 182893 - DNA, 122 bp, Homo sapiens
tctgaatctcaaaagaaacactgtgtcctcactgcacagcttccagtcagttctacagatcggatggaagggatgccacggctcctcacagacgtctcacttctctaacatctgggtggtgg

SEQ ID NO: 182894 - DNA, 122 bp, Homo sapiens
gttccagaacaaaaaataagcagaggcaggaggtggagagcaaagacgctggcagccctgcgtctggtctttatagctgtgtctttggatttgtaggccactcctcaacttttcagctcccg

SEQ ID NO: 182895 - DNA, 122 bp, Homo sapiens
caggcccacagcgccaacgccgcgcagggcaagggtgcagccactggcgggaaagtagtacgcgggccacttcctggctaggactacagggacctttgcagccccccaccccgcagcgccca

SEQ ID NO: 182896 - DNA, 122 bp, Homo sapiens
gccacctgcgctgccgctgaggtctgcagattgcggggctgcggtggaagtctgggttctcgcccagattgagccggcgacgtggaggcagtgttcaaggattgattctgtagtaggacccg

SEQ ID NO: 182897 - DNA, 122 bp, Homo sapiens
ccggcccgcccttcctccgggtgtctgagagctgggcgcaggaggcgggctcagcgctgacgggctgcgcctctgcagccagagggaggaggcgggaaggcgggcggaggaggaggcggagg

SEQ ID NO: 182898 - DNA, 122 bp, Homo sapiens
cgactccggggagaagtcatcctgggtcccaccccgggggcgccccgggcgcggagggggcgtgggcacctccccagcgccgcccctgcccttggtgactggagtcgcctgcacgcccgggt

SEQ ID NO: 182899 - DNA, 122 bp, Homo sapiens
cacaggaatttgggggacactaatatgcagtccacaatagacagtgaggccagggccacgcggcagcccagccggacccttggtggtgtctcaggacaggttatggccaagagaaggctctt

SEQ ID NO: 182900 - DNA, 122 bp, Homo sapiens
tctggtttcctttcacaacctgttacatatgtatctgctagacatccagaaagttactcccgaagagtctccctctccccaccacctctccagatcagcagaaacattaggagaccaagaaa

SEQ ID NO: 182901 - DNA, 122 bp, Homo sapiens
attatttactgcaaccaacagatgttaggagaaccagcacgttaatccgtgtattcagcacggttctgaggcctcctatgccccagcgctgtagtgggcactgcggattccgcagggaggaa

SEQ ID NO: 182902 - DNA, 122 bp, Homo sapiens
cagaattcctgagctctgaaagagaaatgagctttcttctctctctctgaaatgatgtagcggtcttaatgcaacaaagttgggaaaaaaacttacaatatcaccacatgggctgtaatcag

SEQ ID NO: 182903 - DNA, 122 bp, Homo sapiens
ccgtcggcagcagggccgggggcagtcatgaggaaacaggtcagggcgaagcgggctggccgggcgtcggcggggcaggagaggagcgccttcctgcctgtggccgcagtccccgaaacacc

SEQ ID NO: 182904 - DNA, 122 bp, Homo sapiens
gaaatggagagaagcgaaaaagagcctggagaaacggctgtcatatttgctcagaagaaccgccaaatcagagagcacagaagatttcattggaggagcgccttcaacagcaactaatcctg

SEQ ID NO: 182905 - DNA, 122 bp, Homo sapiens
agtcctagtccggccagaggaggccgtttacgagcccacacccgtaggtggcgccacagccggagaattggctttggttctgttggagccgcgccgcctttaaattagccccacgcatgcgc

SEQ ID NO: 182906 - DNA, 122 bp, Homo sapiens
ctgtcccttcttccctttcaaatacttttgcagatttttacagggataaatagtgagccacgtggcagtcagacggcaacaggtttggccccactttctcagaaagcctcggcttggttttg

SEQ ID NO: 182907 - DNA, 122 bp, Homo sapiens
cactgactcttgccagcaaagctacatgttatcagccttcccagggttatacgtgcagcacggtagttcttaggcattatattgattgcaaagaagggcaggaatctctgtgtatgcctgta

SEQ ID NO: 182908 - DNA, 122 bp, Homo sapiens
acaagaaaagactggcatcgcagtcatcgagtgagcagcgaggcttggacacgggtctggcggcgcagccaatggcgggggagggccgaggaggccgagggggggccaatagggacaggcgg

SEQ ID NO: 182909 - DNA, 122 bp, Homo sapiens
ttcccgaggtggggggaagcgcggatttgccgcgggactccggcttggcgcggagctgggcgcggcaggcgcagggaggaactggcgaggtggcccgggctcggccctccgagggtgtggag

SEQ ID NO: 182910 - DNA, 122 bp, Homo sapiens
cagtcctccgaggcgcggtggtacaggagcagcgaggcccccttcttgaaggatagctcacgcggggaccgccccatgtagtcaaacttggcaatagcctcgatctgctccacttctggaag

SEQ ID NO: 182911 - DNA, 122 bp, Homo sapiens
cagcaaggattgcaggccaagggactggcacagcaaggactgcccagcagatctgagctccggtggccactgttgtctcagcaagcaacaggctagcttcacgccacaccctgcgtgcggac

SEQ ID NO: 182912 - DNA, 122 bp, Homo sapiens
tttggcgtttggtgggtctggtatctagcggcggtctgttagccttttaggggggattcacggacacctctagcgccctgtagggttgccatggtgacggagcgcttaagggactggcaacg

SEQ ID NO: 182913 - DNA, 122 bp, Homo sapiens
ggcccgtggggggaacatggctggatgagaaccgtcttaggaccccgacacatctggggtcgcgcgatcctcgacttccgctctcccttcgcgcccagagggcttgttcgcctcccgaggcc

SEQ ID NO: 182914 - DNA, 122 bp, Homo sapiens
tggcagcgtgagaggccggcggcgggaggagcgggcggcgccgggtcggggctgcagggccgcatggacagcggcgccaccccggccggcccctactagggccccccatctgcgggcgccac

SEQ ID NO: 182915 - DNA, 122 bp, Homo sapiens
ttgctgggagcagccattttcaaccctactgccgtagagcaggcggagtccctcttttcgcgccttaagacaggtaggttctgacgatgaaaagcaattgaaaacgacccatttcacccttt

SEQ ID NO: 182916 - DNA, 122 bp, Homo sapiens
cgctccatcaaggccgtggactgacaggatttggggcttggagggcaaatgagaaacaatcgtcagggaccgaagaacaaatgcgtccatcacaccagccccccgcaccccgagccccgtgc

SEQ ID NO: 182917 - DNA, 122 bp, Homo sapiens
tccacctcgggcgaagacctcatagcctgcgggagatgggagtccgggacgcggacaggacgggcacttacctacgaatagccagagggagccccccgacacgaggaagaaggtcagcatgg

SEQ ID NO: 182918 - DNA, 122 bp, Homo sapiens
ttctcccctggatttgggaaagcatcactgggcactgcctcctttggctggtccctgtggcgtactggacgcccaccggccttttgccccaggcctggccctgtactccccagggcctgact

SEQ ID NO: 182919 - DNA, 122 bp, Homo sapiens
ccagagacaggcggagcgtggcctcgatcaccaccgagagctgacggccgcccggattcccgccctcagagaatcctggcccccagtcgttccaagaccctttacggactgcagcttaaagg

SEQ ID NO: 182920 - DNA, 122 bp, Homo sapiens
gatcattaaccaggaggccgtataaggagctagcggccctggcgagagggaaggacgcaacgctgccaccatggacagtagcacctggagccccaagaccaccgcggtcacccggcctgttg

SEQ ID NO: 182921 - DNA, 122 bp, Homo sapiens
cgcttgtgaggctgcaggatttttgttttagggaggtaggagccaaacaaacctggcgcccgcttccaggctgtggcatgccaggcgagtcaccggcatcctgtccctgcccaccgctttaa

SEQ ID NO: 182922 - DNA, 122 bp, Homo sapiens
agagatgccaagaaattgtgcagcctccggggggtttatttaagcttagattacacctgtcgggggggaagggaggggttggaaacattcctaattccatagcccacttcttgtcctctcct

SEQ ID NO: 182923 - DNA, 122 bp, Homo sapiens
cgtgcagacacactaacatgtaagacatgcatagtatgtgcacacagacatgcacactaacgtacgtggacgtgcacacaggcaggtacacgtccaccggcaggtgcgctgacaggtacatg

SEQ ID NO: 182924 - DNA, 122 bp, Homo sapiens
ctggggctgctttgcccctgcgtgcagcaccgcccagtagggctgcttacctgtcccacccgtgcgcgcccgcgggttctaaactcattttaacacttggttaagcaaaaaccaatttgaga

SEQ ID NO: 182925 - DNA, 122 bp, Homo sapiens
ggagaggaaaagagcagaggtaaaaaattaaaaccctgcttcttttaacagcaaatttctcgagtgggcccaacagtggtgtgcagagagtcttaagcaataaagcagtcaatagggactct

SEQ ID NO: 182926 - DNA, 122 bp, Homo sapiens
catgacggtgagctctgctcagcctgagacgtgactaattatctgctgaatgagccaccccgttttcgaggaaattaggttttaaaaatagtcgggggaggaaaggcgagccgcgctgcgga

SEQ ID NO: 182927 - DNA, 122 bp, Homo sapiens
cggagctcgccggtcgcccctgcgctgcgcggaccgcagccacagccggactggtgggaacggcggcgacagacggattggctgacagtcccagccctcagaacagccccggcctcgaagcg

SEQ ID NO: 182928 - DNA, 122 bp, Homo sapiens
agtgtaggaggtgggaggattccggcccgcatggagctgtcctggcctcagaaggttatccgtctctcctgccaaccatggagacatatttagacaggaccaggtggggactgaggggtgcc

SEQ ID NO: 182929 - DNA, 122 bp, Homo sapiens
atccccgcgggttgggcggggagggggcggggctagctgggcggggctgactgcggggaccggctagggtctcacaccctccagggaatgaatggctgcgacatggggcccgacggacgcct

SEQ ID NO: 182930 - DNA, 122 bp, Homo sapiens
atgtaaatggatgaatacagtgccagaggatggtgcttagacccctccactgacagtcctcgtcctgatgcctttcacctaacggtcacctaaagctatccaaacccactgaaagacaatta

SEQ ID NO: 182931 - DNA, 122 bp, Homo sapiens
cccgatcccgggaagaaacgctccgtggctcgcccagggttaagagccgcggtgacaacccgtttttgtttgagaagcggtgggtggaagccacgaatcccacacgacatctggggaccaaa

SEQ ID NO: 182932 - DNA, 122 bp, Homo sapiens
tggagccagattttaaaatccttgtcttccttctgcgtgctacttgatctaaatgagatacggcaaagtcacagaacctgtttttatgtttttgcctgattcatacgggcttctccggtgaa

SEQ ID NO: 182933 - DNA, 122 bp, Homo sapiens
agcgcgcccccgccacgccctgctgtttagaagcggcctttcttcacatatcgctgtccgcgaaagtttctgaactcttgtgacaattaatgctgtttgaaaacctccctcttgggtctttt

SEQ ID NO: 182934 - DNA, 122 bp, Homo sapiens
aactcgggctgtcgggcccgagaggctgaggagcggagaactgacccgccccgggaggcgcgtctgttccgctgactctcagccccgggggaagcatagctctgctttggatcttttctgag

SEQ ID NO: 182935 - DNA, 122 bp, Homo sapiens
gagccgctcgctcccgacacggctcacgatgcgcggcgagcagggcgcggcgggggcccgcgtgctccagttcactaactgccggatcctgcgcggagggaaactgctcaggtgggcgcggg

SEQ ID NO: 182936 - DNA, 122 bp, Homo sapiens
tgagaaccagggaagccagggatggatgggagaaattaactccgggactggggatggcctcgtgaacaaagtacctgggcctggaaggatgagaaaagctgttctggaatcaggaatcaggc

SEQ ID NO: 182937 - DNA, 122 bp, Homo sapiens
agctcgtcgctgcccagcaacagtgtaaccggcgctccttttctgaccggcttcgagtcacggtacttgacacacctggggagaggcggctgcgcccagatcaccagtgggcttcttgatgt

SEQ ID NO: 182938 - DNA, 122 bp, Homo sapiens
tggaagttgtataatcactctatcaagctacgcaaaccaggacttaagttttttaccatgcgaagcagagcttttagcaatttcttagtgactctgaagccaggtactgtcttaggcacttt

SEQ ID NO: 182939 - DNA, 122 bp, Homo sapiens
attgtcagggaaaagtcaaactcagataaagaatgcattttagataacactgaaacatgtcgacagaaaatagccatcgtatttccttttagcacactgctccaagtctacctgctttctta

SEQ ID NO: 182940 - DNA, 122 bp, Homo sapiens
tggctgctaatgagtcagctgctaagtgactcagcactgcatcaataaaacagatcccttcgtccctgaatctgctggatgaaaatgatgtcttcctttgtcaatgtgtcccttttggcccc

SEQ ID NO: 182941 - DNA, 122 bp, Homo sapiens
gtagatgcggcggatcataaggacttgggttttgagcgccctgcaggaagccactggccgcgtccagggtcacctgtgcctggtcgttagtccctcacaatgctgtcactttgtgacgctct

SEQ ID NO: 182942 - DNA, 122 bp, Homo sapiens
ccaaacagccctaggaagagggcagggcctgggagtgagcttcagagaggctgcataagccgcccaaggtcacacagccaggggtaaagaagaagggtcttcagctccacggctatgctttc

SEQ ID NO: 182943 - DNA, 122 bp, Homo sapiens
ctcccatgagatcttgcaaaggagatggagaaaatatggctgaatgccagcaaggtaggacggaagcatgactgctctaacaaccaagctcaaagagcactgctcacccaatgtttccttca

SEQ ID NO: 182944 - DNA, 122 bp, Homo sapiens
cagcgagatgagcactgcaacagacagcttggtcagcaccacggtcagcaccatggccagcgccgacaccaactcagggccacggggcaccagcaccccctcgccgggaggagggatgggag

SEQ ID NO: 182945 - DNA, 122 bp, Homo sapiens
aacaggctctgaccaaagttgctggaccagttaaaccactaccagttacttctttgcccacggtgagtaaggctgcttgggaaggtaacctattttctctgaatactctcaaagcattcaag

SEQ ID NO: 182946 - DNA, 122 bp, Homo sapiens
cagcactccctccagggccctccccaccgtgggtcaggcagctgtcagatgatagggcctcgtgccatcaacatctacccctgtgccaaccaccaaaaccactccctgttcctctgcagccc

SEQ ID NO: 182947 - DNA, 122 bp, Homo sapiens
tctcccacctcagtcttgagtagctaaatgctcaccaccatgccctgctaatttttaaaacgtttcgtagaaatgcgggggtctcactatgttggccaggctggcctccaactcctggcctt

SEQ ID NO: 182948 - DNA, 122 bp, Homo sapiens
aaagaatgctgttattaagatggaaagaaaggaaaattctcgtaagtcaggcttggtgtgcgcctgacatatttcactcttggaggttatcagtggttgaccattagagggaggccacgcca

SEQ ID NO: 182949 - DNA, 122 bp, Homo sapiens
acggctggtaccacgtgcagcaccggcgcgcacgctggcctgacgcaggcgcgtccccgccgcataacctcctgcacatacctagggaacaacccgcgtcaaaggtggctgtgccggcggcc

SEQ ID NO: 182950 - DNA, 122 bp, Homo sapiens
attagagtaagcattcggccacctctaggctgctacggtcactgctgctgtcaccatcaacgtgactgtctcacacctcacttcctccggccagccacacccctgcagatttaacccgccag

SEQ ID NO: 182951 - DNA, 122 bp, Homo sapiens
gtgtcagccacggtgtgaccggctcggctcacaggtctgagggtcagttggctcaggcatcgcccggtacgaccagagatagtgactgaggaagagcagcctcacatctggcagtttgcctc

SEQ ID NO: 182952 - DNA, 122 bp, Homo sapiens
aaatctgcaaagcagaaacagctacacacacacactcacacacatacacacacacacgcgcgcgcacgcacaggcacacccacacgatgctccagggttagcatatccaacctagatccttt

SEQ ID NO: 182953 - DNA, 122 bp, Homo sapiens
aataagagctcatttgttttttgatatgtgtgcttgatttgtggctcgcggtcgtttgtgcgtctatagcacccttgcacaatttatgatgaattatggaaatgactgggacatgtacttgg

SEQ ID NO: 182954 - DNA, 122 bp, Homo sapiens
gttcctaaagtgtctccttctgaaatttaggacactggcaaactgaatgttgcctactttcgatttgacataaacgacgcgactggagacctggatgccaaccgtcctgtcccatttcgact

SEQ ID NO: 182955 - DNA, 122 bp, Homo sapiens
tgaagccctgggggcattatggaactactggatgcctctccggcggaaactccacgggaccgaaagagaggcccggggtctcctgccgggtgagagaagcattagagaaagatgagattggg

SEQ ID NO: 182956 - DNA, 122 bp, Homo sapiens
ttgagagtaaaggagagggggacatgtaggatgactcccaagtttctggcttggttgactcgagtggctgatgatgtcattaaatgtgtagaaaacatggaagaattacaaggaaaatgagt

SEQ ID NO: 182957 - DNA, 122 bp, Homo sapiens
tccagagaattcattcaagcctcagaggcttaactttttattgttgttctgcctctgattcgctatttcactttgagaactatgcaaagttaactgactcagcattacagcccaaatccacc

SEQ ID NO: 182958 - DNA, 122 bp, Homo sapiens
ggaagacacttccctcttgcagcaaatgcagcttcagagaggcctgagatcttgcttctacgttgcttgctcctttgcccactgccttgcaagaagatctgtggaggcctctgaggacgagg

SEQ ID NO: 182959 - DNA, 122 bp, Homo sapiens
ttgtgcagatttatttttacagccacctgttggcagaatgtcttcctcacattctgttctcgatgcttctagagttgctattgcccctattgggaatattagatattaacaaaagcacattt

SEQ ID NO: 182960 - DNA, 122 bp, Homo sapiens
agatgaagaggacagtgactgagagaccaaggcagccctggttaaagtagaatgccccttcgagtgtctggggtagttggtgagtgggaggtgggaagggtaggccagagcccacctgcctc

SEQ ID NO: 182961 - DNA, 122 bp, Homo sapiens
ggctggagtgcggctgtcagctctagagcagccctccccggccctgggccccagcctcaccgcatcaccagccctgtagggtgtggagcctttcccaccagcaatgctgaagcccagccccc

SEQ ID NO: 182962 - DNA, 122 bp, Homo sapiens
ttttttttttctttagaaagatctcatctaaatagtaagttaaggttgcgtctatgaaaccggtgcaccttgtcttgtttctacgagctttaaaaagtccaaatactgatgaggctgtggat

SEQ ID NO: 182963 - DNA, 122 bp, Homo sapiens
catctaacacctgttgagaagccccccaaggaactcgctaagccaaggtcctcgaaggcgcgactcctagccccaagctaggccaggccgtcgccatctccgccggggatgcgcggccgagc

SEQ ID NO: 182964 - DNA, 122 bp, Homo sapiens
ggcgcctggaaccgcagttagcgggcactgggcagatgaatgaatttgtctgtgcctggacggctctccaattcgaacccagttttgctgccctctggggtctcaactgttacgtgaggcaa

SEQ ID NO: 182965 - DNA, 122 bp, Homo sapiens
cctcctgcaggccggctcgcaagaacgcacggccacccacccgcgccgcggcccacagcgcgcacccacactctcactggcactcgcacgcgcgcccccaaccacaaagcccgtccgcggcg

SEQ ID NO: 182966 - DNA, 122 bp, Homo sapiens
tgcccctacgcttccaaaatgtgaatgtcacgaaacataaaaatgacgaggagactgtcccggagcaaaggggactggggaggacgtgagaattgaaggccctgcagggcctgtcatctgct

SEQ ID NO: 182967 - DNA, 122 bp, Homo sapiens
gtgagcatgggtgattgggtgggggagttgggaggggtgctagtgttccgtgtgtgtgcacgtttgtgcacatgcgttgtatgcacctatgtgtagagagagaaggtgaatgaagtgtaaga

SEQ ID NO: 182968 - DNA, 122 bp, Homo sapiens
agaaggagcatatagtggacctaggtgattggtcaatttatccatcaaagaggcacacaccgaattagcatggagtgttataaaaggcttggagtgcaagctcatggttgtcttaacaagaa

SEQ ID NO: 182969 - DNA, 122 bp, Homo sapiens
gccaagtgggcaagcttccagcagcagtctgggagcgagcgacagagccaccaagctgggcggcagggcattgagcctcgcgtttcaatttctgttcagttctcctgtaatggaaaattgct

SEQ ID NO: 182970 - DNA, 122 bp, Homo sapiens
tggcatcggctccagtggggccacctccctccgcttccctctagttcttgggcgatgagtcgcggggttcgctcacccaaagccacagcgaggagcagagacagggacttcatggcgctgcg

SEQ ID NO: 182971 - DNA, 122 bp, Homo sapiens
tgagaatctgacttctggtccccgctggttaagagtgggcttcgaagctttggctgagctcgtggcgctgttggcctatgcgcctgggctcgcttgtgtgaccccctggggctcacccaagt

SEQ ID NO: 182972 - DNA, 122 bp, Homo sapiens
ggcttgcccactgcccagcctgtggtgtcaaatatcctgccccttcaaatgtgcttggatcgatgatgagtcccccataaaaacattccttggaaaagctgaacaaaatgagtgagaactca

SEQ ID NO: 182973 - DNA, 122 bp, Homo sapiens
acagcatttccatgtggacttatgaatccagtgagagagggagagtggagaagaagctggcgtggccccttggctcttttattacctaggatagtgcttggcatgccataggtgctcatcgt

SEQ ID NO: 182974 - DNA, 122 bp, Homo sapiens
aaggggggagggtattccccttgcagggaccgtccctgcatttccctctacactgagcagcgtggtcacctggtccttttcacctgtgcacaggtaacctcagactcgagtcagtgacactg

SEQ ID NO: 182975 - DNA, 122 bp, Homo sapiens
cgtgtagaaacgacttgtctatcggcagcgaatatgttaaataaaatactgtgcatccaacgagatcaggagattgagaccatcctgtctaacacggtgaaaccccgtctctactaaaactg

SEQ ID NO: 182976 - DNA, 122 bp, Homo sapiens
ctttggctttgtgggccgcaactgctccacggaatgccgctgcaaccgccacagtgaatgcgctggtgttggggcgcgtgaccactgcttgctctgccgcaaccacaccaaggtgggccgcc

SEQ ID NO: 182977 - DNA, 122 bp, Homo sapiens
gggtgccagggacaggcgagcgcaagcccaggtcgcaaggacgatgctggcactcgcgttcgagccaagggaggatgcagatccctcccaagtctgtggccagaagaggtcgtgcgggggtg

SEQ ID NO: 182978 - DNA, 122 bp, Homo sapiens
attatttaaccactcagattcagtttcctgtaatttggggataattaaacaagaatgagccgtgtgaaagtgcctatccaactgtagtaggctcgcagcaagagtttaaatcgtttttattc

SEQ ID NO: 182979 - DNA, 122 bp, Homo sapiens
aagcagcagagaaaccaaagcaaagcggagcatgaggttactgtgtcccgacgcggagggcggcaaggcccagagcagccgaggtccgagggttgcggccactcccaggccaggccctcggc

SEQ ID NO: 182980 - DNA, 122 bp, Homo sapiens
caggctagagtgcagtgccacaatcacagctcactgtagcctccacgttctagggttaaacgatcctcttacctcagcctcccaagtagctgggactacaggctactacagagaatggacca

SEQ ID NO: 182981 - DNA, 122 bp, Homo sapiens
aaaggcagccagaggtcaagacagtccaccgtgtcatgttaaagccaggcggggtcatgtcggacactctatgatatctgctgtaccctccatgcttgttcaggatcagaaggagtcccaag

SEQ ID NO: 182982 - DNA, 122 bp, Homo sapiens
caggaggcgggcctgatgaagggctggtgggcgtgttcccgcccaaggtccgtgttggcccgcgcggtggctgggaggccctccccacgcccaactgcgggtataaagaggcaggctgcgga

SEQ ID NO: 182983 - DNA, 122 bp, Homo sapiens
gcagaattgaatttatttgctctcaaattcccctaaaagctctgaaactgggaaagtccgcgggctgccagggacagtaatcactgtgtccccacccggacgcaggaggtctcgggaggagc

SEQ ID NO: 182984 - DNA, 122 bp, Homo sapiens
ctggttgccggattctttcagcagctcagcgtaagctgtcaggtccatcctgtgaggagacgggggagacgcttgctgccagacccgtgcagggcatgttcaccttccggtctgcattgctg

SEQ ID NO: 182985 - DNA, 122 bp, Homo sapiens
caggaaaacaaggcaaaaggcctgtgactctgtcttcaggcagtgggacatgttcttaaacgacggagccacatccatgcctctaccttccagtaaggtttgcctgcttaagcatacttgtt

SEQ ID NO: 182986 - DNA, 122 bp, Homo sapiens
tgttaaatgggttgctttactgcaggacttctcagagccttaacatgctaatgtgccttacgaatgtctaaggggaagacattatatgcagcatttcttaagccagttcccccagatccact

SEQ ID NO: 182987 - DNA, 122 bp, Homo sapiens
acctgcctcagtacactcacacaaatgttcacagatgcacggacagttacacatgcgcagcgaacgctcagcgagttgagtccaagggtctccggttcttttgttctgccagtagatgccct

SEQ ID NO: 182988 - DNA, 122 bp, Homo sapiens
atggcctcattagtttctgatcattgctttctggcccaacaaaatgtctcatgtttatgtcgtactttcccttacattcacccaaagaatcttggttctcttattagagagtaggattagga

SEQ ID NO: 182989 - DNA, 122 bp, Homo sapiens
tcagaatttgagagtagctgaagtgcctctccttcctcttgggcaatagcctcttacttccgcttgtgttctgggtggtttctaacacagccacagcttcctggactccaacagggcacagg

SEQ ID NO: 182990 - DNA, 122 bp, Homo sapiens
gcctcttttccctcatcccctaggaggctttatcaggttctaaccgcttgtagtgggggccgtgggtgctcggggcgccaagaggagggggctgccgagagcggcctgcctagttctcagca

SEQ ID NO: 182991 - DNA, 122 bp, Homo sapiens
acgccggcgcagcgcggtgaccccagccccagccggcgcggagcaggagccggagccgagcggatctcggcgccctcgctgcgctcctcccggcccgagcctgccctacccggcggtggcgg

SEQ ID NO: 182992 - DNA, 122 bp, Homo sapiens
ctcaccattcagcccttcccagcaaaagatcctactgtgcagctcaacctagctcgcagccggtaccgcgggattttaatgtgcaactgtgagctcgcaggctgttaaaggaaggccgcgcc

SEQ ID NO: 182993 - DNA, 122 bp, Homo sapiens
agagtaatcaagactggtattcacagaggtataggcacatagatcgatagaacagaatagcgaacccagaaacagccccacacaaatagccccacacaaatatgcccaatcgattttttcaa

SEQ ID NO: 182994 - DNA, 122 bp, Homo sapiens
aatattgattacatgcttatcatacaccaggtactgtggtaaggttttgtcctatggggtcgaagttagatattgaaatatatgtctataatcactgtgatatgctgagggaagaaagattc

SEQ ID NO: 182995 - DNA, 122 bp, Homo sapiens
ggaataaaagctggccacccccagccagcagcagcaacgcgctggggtcctcttctgtcccgtgcgtagtttgttatttcgctcttcacgataaatcttgctactgctcacgctttgggtcc

SEQ ID NO: 182996 - DNA, 122 bp, Homo sapiens
gacacgcgggacttcggcagtcccagtaacttgctttgctgttctgagacctcagcggggcggtcagacctctgctgtctccgcagcgagttgcagtacttggcgcggggagaggaactcga

SEQ ID NO: 182997 - DNA, 122 bp, Homo sapiens
ttttctccagacagagaaaagctgtttcacccgacagatcagccccgcagtggaatttctcggagccagtgttcctcccctccgtgcacctctgttctgacacagtttccccctttggctat

SEQ ID NO: 182998 - DNA, 122 bp, Homo sapiens
gaggtgggttcattgcgggtctgtctggccgggctgcaggacgtgcactcagactcagcccgtgtggtttccaaggcccgaaggacacaccaggccagatgcccccatcacacacagggcta

SEQ ID NO: 182999 - DNA, 122 bp, Homo sapiens
ccaggctcacttatctttgttgtatgctgagctaattagctcgaaaggctggctgacaggcgggttcccattgctttcttctgttaaacacacccacctacaggctagctggggaagctcgc

SEQ ID NO: 183000 - DNA, 122 bp, Homo sapiens
ggaggcggaggttgcagtaagccgagatcacaccactgcactccagcctgggttacagagcgagactccgtctccaaaaaagaaaaaaagaaaaaagaaaaaaaggcgcaaaggctccgttc

SEQ ID NO: 183001 - DNA, 122 bp, Homo sapiens
aagacgcgaaacctgaacggctgcggcgtgcggcacctccctccgcgccaagttagttcacgctcccaactcctgcctgcctccccgcgctgccgactgtccgcaggaccggggaggttccc

SEQ ID NO: 183002 - DNA, 122 bp, Homo sapiens
aaccaagcaatttgcccaaaagcacccagtgcgttagtttttgcatttaagaagggtaaacgtttccaaacctgaagatttctgtcctcagtatgcaatcgagaagacgaattatatacact

SEQ ID NO: 183003 - DNA, 122 bp, Homo sapiens
acttgcttcccactgtaacctctttatattcaacaggatccttgggcagggaattttccacgctataaagtcactcccctccagtggggcagcagagcttccagtcctcacagcctgcttgc

SEQ ID NO: 183004 - DNA, 122 bp, Homo sapiens
tcacatctgcaggctttgacttctctccctttcccatctcaggccagaaattgggtgcagcgcagcggtggtatggttattgtgattattgccctggggcgaattctgcagaggagtgggca

SEQ ID NO: 183005 - DNA, 122 bp, Homo sapiens
ggcttggatatggggtgtcgccgcgccccagtcaccccttctcgtggtctccccaggctgcgtgtggcctgccggccttcctagttgtcccctactgcagagccacctccacctcaccccct

SEQ ID NO: 183006 - DNA, 122 bp, Homo sapiens
tttgctttcatatttaagtctttcctgaattgctgtcatcattcaacaacagttgcatgtcgccttgctagctgtcaaagtagacttcatccccaaatggatatctgtaatgaaagaataca

SEQ ID NO: 183007 - DNA, 122 bp, Homo sapiens
tgaaaagaacatggacggtatggactaggatatttacactcatgcacgcccgaggtccctcgtgacacaagatgaagccagggagtaggaagagaaccaggggtgaaccacaggggtcagaa

SEQ ID NO: 183008 - DNA, 122 bp, Homo sapiens
ggcaaagttccgcgccgggttctccagctgtgggttcatcagcttagcccaccactcccacgtaacaccagtttggggaaatgcaaacacgccacatgtgcccacatgtgcatgttttgatc

SEQ ID NO: 183009 - DNA, 122 bp, Homo sapiens
cgtttgcgggatctggaaccgagttacatgcatgtccagtgggggcaggtttaattttgacgacggagggtcctactgtggaggctgggaggacggcaaggcgcacggccatggcgtctgca

SEQ ID NO: 183010 - DNA, 122 bp, Homo sapiens
tctcagcattcctacacaagctggcctgacttctatatcccaacacatgcatctctttgccgagggcttcctctggctgctggagcctgctgtaaccacaggcatggcagcctagaagtgcc

SEQ ID NO: 183011 - DNA, 122 bp, Homo sapiens
atatcctgcatttccccctcctcctccgaagactaaagactgtgaagtagtgctcttgaccgcagtgcataatacacttggctttgctttattaacatgctttttaaaatgatgttttcagg

SEQ ID NO: 183012 - DNA, 122 bp, Homo sapiens
ccaggttgcatgaggtgagcataaacgcatagggaggaacggtccatgccaactgcaactcggttttcagaattcactcgcacctttggctcagtaactagcagattcgttcctgctgggat

SEQ ID NO: 183013 - DNA, 122 bp, Homo sapiens
gtgtggccgatcctacaagcacgccggcagcctcatcaaccaccggcagagccaccagaccggccactttggctgtcaggcctgctccaagggcttctcaaacctcatgtccctcaagaacc

SEQ ID NO: 183014 - DNA, 122 bp, Homo sapiens
actgagaggccaggggaccacagtggcctctgacccctggagggccctggaggctgctgccggctccccccgggggcagatggaggtcactgtcacccaggctgcttctcatggtgccagga

SEQ ID NO: 183015 - DNA, 122 bp, Homo sapiens
cagacccctcctggccgctactctttttccctcttctctgggctctcccactcctggggccggtctgagcctacctgagcccatgcagcctggggccactgccaagtcaggccctggttctc

SEQ ID NO: 183016 - DNA, 122 bp, Homo sapiens
tttttcccccagctctggctggttactctgctgcaggggtgtgcacttagaaaaaaatcccgaccccacaccctactgcttcctccaccagaaagtttggctttgctttttgctcattctct

SEQ ID NO: 183017 - DNA, 122 bp, Homo sapiens
cccgaaggctactaggtctcgagcctcggtggaacctttgtgtggcttctcggctctccccgcccccctcgccaagggcgccgagcctaggacttccgggcgggagggcagttcgaaggagc

SEQ ID NO: 183018 - DNA, 122 bp, Homo sapiens
tcccccagggaaaagagggcccgccccccacgccagggcatcccacttcctgcctctcaccggcaaacagctcccaatcccagtcctcagtgaggaaacggaggtgtgtctgacccctccca

SEQ ID NO: 183019 - DNA, 122 bp, Homo sapiens
ggaggaggcctggggcaggtcaggcaggtgagcacacagggcagccccatccccggatcccgctgctccccaggcgcagttggcctcctgaccgtcatcagcaaaggctgcagcttgaactg

SEQ ID NO: 183020 - DNA, 122 bp, Homo sapiens
tgggacatgagtagccgaccatgacctggctgcgtactggcccaccaagcattcgactggcgtgcccagccactctccgtcatcgcagagaagtgctctatgtgagatttggttaaaggagt

SEQ ID NO: 183021 - DNA, 122 bp, Homo sapiens
tgcctgccagctcacctgcttctcttctttgcccctccagcacgcccgtcctcagagtcccgtcctcaaagtcccatcctcgccatggcacccggagagaagatcaaagccaaaatcaagaa

SEQ ID NO: 183022 - DNA, 122 bp, Homo sapiens
cctccaggtcctgccgcatgactcactagacgccggtgtagccaggtgcgcagaggcactcgccggcgcgggggtcgcagctggcaccgtgtcggcactggcacggcagctggcatcccttg

SEQ ID NO: 183023 - DNA, 122 bp, Homo sapiens
ggccacgcaggcggggccccagagaccgtgaagcagagcttgcaaagtgaccccgtccaccgaattccccaagctgagtgttcggccatagcccttcgggactacaattcccaggagggcgc

SEQ ID NO: 183024 - DNA, 122 bp, Homo sapiens
ctttatacagagcagatttgaaacactctttttgtggaatttgtaagtggagatttcaagcgatttgaggccaatggtagaaaaggaaatatcttcatataaaactagaaagaatcattccc

SEQ ID NO: 183025 - DNA, 122 bp, Homo sapiens
ctgccttcctatcctggaggaaggtgaggctgaacctccttccctccctccctccctccccgcccccactgcacgcagggctggctgggctccagctggcctccgcatcaatatttcatcgg

SEQ ID NO: 183026 - DNA, 122 bp, Homo sapiens
ggggtgacggacgcacctggaaaatcgggtcactcccacccgaatactgcgcttttccgacgggcttaagaaacggcgcaccacgagattatatccctcacctggctcggagggtcctacgc

SEQ ID NO: 183027 - DNA, 122 bp, Homo sapiens
gcaatccccattgtatccctatccgcagctcgtttctaatctcactcagccgccagccttcgctaggaggatagaggcacttggctccctaggatccgcaccagttttttgtctgcctgttt

SEQ ID NO: 183028 - DNA, 122 bp, Homo sapiens
actcaaggacaaccctccagggaaatagtatgtttccttcctgggaacaagatgctagcgcggtgcaccgggaggtatctggtgtcaacaatgccagagcgccctctgctgcctcaaagagg

SEQ ID NO: 183029 - DNA, 122 bp, Homo sapiens
cagcttctcgttggtgtagttgatgcacagctgctcgaaggagttcacctgagcacatggcgtgggggcggggcgtgagcatcttggtatgaagtcagaagacaaggagccccacagaagct

SEQ ID NO: 183030 - DNA, 122 bp, Homo sapiens
ctgatgcccacaatgagtttataaataactgcgcataggtggcgcgggcatccatcccaccgccactgcgaacacccctgggcacgccttgttccccgggtgcacacgcctagcgcgcactc

SEQ ID NO: 183031 - DNA, 122 bp, Homo sapiens
aagcccgttttcccttcaaaacacagtcaccaccgggatcgtgagcaccacccagcgaggcggcaaagagctggggctccgcaactcagacatggactacatccagaccgacgccatcatca

SEQ ID NO: 183032 - DNA, 122 bp, Homo sapiens
gctcccggcgcaggagggcggggagggggaggggcgaccgggccccgccccgccgggaaccgtgggatccgcaaacccagctccgccttagatccaggggtagaaacttagggtccgagaga

SEQ ID NO: 183033 - DNA, 122 bp, Homo sapiens
cccggccccgcgcctggggggctgctgcgcccagcggtgggtatggccccgtgccctttgcgttggctttcccgcggggccctgcagaggaaagcgaagggcgcgcgggtccgtgtgctccg

SEQ ID NO: 183034 - DNA, 122 bp, Homo sapiens
cgtcctggccccgaacttggcctgctccggggcgcagggagcgagcccggtgcccaggcgcgtcccaagcgctgccgcggccgcctcgcctttcgactcgccagccctttctgcggcgcgcc

SEQ ID NO: 183035 - DNA, 122 bp, Homo sapiens
caagattacatgagatcccacatctgaaggtttttgcaaaggacttggcacaaactcgtgcgactagacatggatatggctcttgctctggaaaggatcaccttgataggagcaaacaaagc

SEQ ID NO: 183036 - DNA, 122 bp, Homo sapiens
gggagttaggttccctatggaagctgctcacacccttaggcagtggccaccatatatgggcgatcggtcagagtggtggaagaaattttagggaaaggacgcaaaccttcttgaaaggtcag

SEQ ID NO: 183037 - DNA, 122 bp, Homo sapiens
tggggggcagcggcagctctgcacaggccgcccgggggcgggggcggtgggagctcagggcgcctgtcccggcaccaccacagattcccagaaccaactccccggtgaccagactgaagaac

SEQ ID NO: 183038 - DNA, 122 bp, Homo sapiens
agttaatactgatgaactaactgcttagaacaaggtttgccccttactaaatactgtgcacggtggtaataagtaataataattgatttctcctacttttcttcctctagtctatatcacta

SEQ ID NO: 183039 - DNA, 122 bp, Homo sapiens
gaggaccacacacagggatgctgcctctgaaaaggagtctcgcttttagaatctagaacacggtgccagatgtgccttcattctagcctccttgtcaggactcagaggcttgaggaaactaa

SEQ ID NO: 183040 - DNA, 122 bp, Homo sapiens
tttcctgtatgcaggcctgcgagcgtagagggagtggaattcacagcctccccacccatccgcaggggtctcctgggaggaacccaccagcgataggaacactgaagctgggctacggcgtc

SEQ ID NO: 183041 - DNA, 122 bp, Homo sapiens
ccactcctgagatcttacaggaagctgctgatcagtttcaggtgttttctatctgttaggcggctgcctgttccctagcgccagctgtggccaattactttagagaaacagttaacaaccac

SEQ ID NO: 183042 - DNA, 122 bp, Homo sapiens
taattaccgggaaaaacgctttcctgtcccacctcatttcctctcctcggccttcagcttcgctcaaggcaaaagagaagttcgtgtggtcccgtggccaagtgtggcatagcatgcgtgca

SEQ ID NO: 183043 - DNA, 122 bp, Homo sapiens
tatttctcaagactaaagagagctattaatacaccctaaaatgtgagtttcccgttccatcgtccatggtcagatttctaagtcaggacacaaaggaaacaccaaatgccttatgtttatcc

SEQ ID NO: 183044 - DNA, 122 bp, Homo sapiens
gtctaagtctctgagttgctgttgctaagcagaacagatcccttcagtagacatgtcacacgagaagaaaataaaccatgttaagccatggagatttgggggttcatgtattactgcagtat

SEQ ID NO: 183045 - DNA, 122 bp, Homo sapiens
cacctacgactacaagttccccatcgaggatgccagcaacaagctgccctgcaactgtggcgccaagcgctgccgtcggttccttaactgaggccgtggctgcccaccacgacccctcacac

SEQ ID NO: 183046 - DNA, 122 bp, Homo sapiens
ctgacaagtgcctcagcttccccccggcccgggtccggccgtgggagccgctgttacctgcgttctctgccaaagactcgtgggggccgtcacacctaccctgtgcagcggagccggaccag

SEQ ID NO: 183047 - DNA, 122 bp, Homo sapiens
ggcagggcagccagatggagccggcgacctttctctgatccaagcaggcacagagatcatcgtgggaatggaaacgaggaagaatcacaaaactgcagatgtttcccaggtcctcaatgcat

SEQ ID NO: 183048 - DNA, 122 bp, Homo sapiens
gcaggaggtgagggagactgggtcctggcctttgggcatcatccagcgccatcggcctggcgcttcagccaacgcgggagtggatgggccccttcttcttcgcagacagcgttcggccgctg

SEQ ID NO: 183049 - DNA, 122 bp, Homo sapiens
ttttacagtttcatctcttgccctgctctgaaatcttgacgctgctaacacaactcagagcgtcactctgcaccaacttcccatggaactctgtcttcccagcatcagcacacgcactggca

SEQ ID NO: 183050 - DNA, 122 bp, Homo sapiens
aatccactgttggtgggcacctgagttgattccatgtctttgctattgtaaatagcattgcggtgaacaccactgtactaagttatagatctatcatgcttttatgtttgggacattgcata

SEQ ID NO: 183051 - DNA, 122 bp, Homo sapiens
ggtgggcccgaggtctgggccagggatcgggaggcttggaccgcccttaaggactcatggcgccgccgctgtttgaagccgaggcaatgctcggaggctaggccctaagcggggcagccgcc

SEQ ID NO: 183052 - DNA, 122 bp, Homo sapiens
ttctcccttccttgtattataaaactcagcttgtttcatcttgctgttttagaaagaaagcgctttatacactgtaagctagtaacgtcaacaaaaacgatacgagattgaagggctttgtc

SEQ ID NO: 183053 - DNA, 122 bp, Homo sapiens
cccgcggccccctcacctgaggtccctcagccgcttgcagtgcttcaacatgtctgagagcgcgggcatgtacaccaccttccccatcatgcccaggttggccagcgacagggaccgcaact

SEQ ID NO: 183054 - DNA, 122 bp, Homo sapiens
ccggggaggctgtgggcccttaggcagccgctgatctgtgtcagctctaggcttcacctgcgaagccccagagaacaggacagatggagcaggggtgggcatttagggagcagtgacagaaa

SEQ ID NO: 183055 - DNA, 122 bp, Homo sapiens
gaagccgagcggaagctgctaacgtgggaatcggtgcataaggagaactttctgctggcacgcgctagggacaagcgggagagcgactccgagcgtctgaagcgcacgtcccagaagtgaga

SEQ ID NO: 183056 - DNA, 122 bp, Homo sapiens
tcttgtcctttccctcagaaagaggctgggaggcagaggctgaggcagcggtggccgggacggttaggagaaaaggagtctctgctggttttattctgcagctacctccccaggaagtggag

SEQ ID NO: 183057 - DNA, 122 bp, Homo sapiens
tgggcagcgcccagggctggtagctttccatgggaagacccaagggttcgtggcgcgactcgccggggcccccgaggcccggcaccactggcatatccaggtagccaggcatgggctgatgg

SEQ ID NO: 183058 - DNA, 122 bp, Homo sapiens
tcagtaaattctaacattactgcagttaccgattcctaactcaggttaaacaagcgatggcgcatgtataccatgataggttatgcagccattaaaataatgttctgggtgccatgtataac

SEQ ID NO: 183059 - DNA, 122 bp, Homo sapiens
ttctcgcaatttgcgaccgcggggctcctagtccaaacaggaagcggcaatagcctgggtcgcaggggccggcgggagttggagttctgaatgcgccaagcccgcggtcgctgtcaaacctc

SEQ ID NO: 183060 - DNA, 122 bp, Homo sapiens
gtgtgggtgacaggcagctcccaggtacacatgtctcggcactttaaggtgtggagccttcgccgggacccacggggcgccccggcctgggccacggtgggcagctggcgggacggccagct

SEQ ID NO: 183061 - DNA, 122 bp, Homo sapiens
actaaccaatcactgtggctgtcaggaagcagtgctctgattggccaggcatacatcttgcgatggaggaagagtggggagtagcctcgccaacacctcacaggctaatcatagcttaaggc

SEQ ID NO: 183062 - DNA, 122 bp, Homo sapiens
tgtgagctaaagttaatggatttctattgcattcctgttgtcactactaccaaatgctttcgtatggatgaggcagatacctggttatttaaggagcaggataaatgggccaagacagcttt

SEQ ID NO: 183063 - DNA, 122 bp, Homo sapiens
aaaagggaaaataaatgtgtcgttttcatttttagcgggaggagcagtccttgcgttaagcggtgtgaggccctttaaggcgcggccacactcagcatggcggcctcagtcggccttccaag

SEQ ID NO: 183064 - DNA, 122 bp, Homo sapiens
acccactgggccccaagagcgcctccgtggtggagacacaggtgggccaggtggggcagccgagtgggtggggcagctgggtgagtggggtggccctgacttctccggctctgtccctgcag

SEQ ID NO: 183065 - DNA, 122 bp, Homo sapiens
taatagtgatatttttctttttcttcctttcctaactgtgccattactaacctcaggggccgtggtccctgcacacatgctgtggcgtccacttacgaaggggtgcttcgtgtccatgtacc

SEQ ID NO: 183066 - DNA, 122 bp, Homo sapiens
acctcccccgcatgcatgtctgtctgctgggcaaggcccaattccgaggtgacagctcaccgggcctcacccacaagtctcttccaagcattagcagcccaccccagtccaaagatatcttt

SEQ ID NO: 183067 - DNA, 122 bp, Homo sapiens
ctcatacagagcccggggcaccacagcatcttctagactgtccatgtcctctgtgcctggcgaggcctccacgaagacctcttccggacacgtgctatggcccaggctcaggccgttctgct

SEQ ID NO: 183068 - DNA, 122 bp, Homo sapiens
ccgtgcccttggcttcccgccgtccgctgtgcgctctcctgcgcctcggcctgtccctcccggcactgatgagtctacctggcacacatgcttagcatgattctcaataaagaagaggtgtc

SEQ ID NO: 183069 - DNA, 122 bp, Homo sapiens
ttgcgcggagccaggaagaatgggcccctgtgtgtgcgaccgggacgcagcggcgcgggccgtgccagccgggcggagccgggtgcccgacggcgcaggacgagcgggcgcaggacgagcga

SEQ ID NO: 183070 - DNA, 122 bp, Homo sapiens
tgctggtcagatttttcccctccatttgtctgtaggaagaaagttgggttaattgggtgacgttggtaagccctggattgtgaactctgaaaattatgcaatattccagtgttgatcttcta

SEQ ID NO: 183071 - DNA, 122 bp, Homo sapiens
atctacgtcaccctggaaacaggaagccaggaatctccttttgccattatcagttatggccgccttagcttcaacagtaacttccgatcggggagttgtcactctaccctgctggaggctta

SEQ ID NO: 183072 - DNA, 122 bp, Homo sapiens
tctgatggctagaaggcgggagagaaagattcaaggggcaagcttcaaatcctagctgcccgggctgcaagagggatgggaagggagccctctgctgaacaaaaaatatatttgaaaatgta

SEQ ID NO: 183073 - DNA, 122 bp, Homo sapiens
agcagcttccgagagcgtacccgtttgcaaattgctgcaggaagagcgaggcgggccttgcgctttttaatccggaacgggaagcactggggaagggaccgaggttaacttcgacctccgct

SEQ ID NO: 183074 - DNA, 122 bp, Homo sapiens
gccagtttattgctgtgccctctgctgttgatgaaatctccagcgcagctgtaaactcttcgagtgtggctgctgagacttacttgtccttgagtgcccagcgcctgcaagtgttttaacca

SEQ ID NO: 183075 - DNA, 122 bp, Homo sapiens
aggagctgatgaggtggcggtggtggtggtggtggtgatggtggtggtggtggctggatccgtaaaagctttcggaggatgtgaaggaaaagtgatcaaagtcactttcactgcagaaggat

SEQ ID NO: 183076 - DNA, 122 bp, Homo sapiens
agccctttactgggatccaccagctttacgattacataatagatggtccccagtttaggacggttggacttaagatttttttacttcaggatggtacaaaaacataaacattctgtacgcct

SEQ ID NO: 183077 - DNA, 122 bp, Homo sapiens
tcaaacattacatttaaacataggtgcctagctacgatgatacatttgccagtagggcagcgttgcacggtgaaaggcaaaaacccctctaagcctcctcctgtggcgacaaagctctcggc

SEQ ID NO: 183078 - DNA, 122 bp, Homo sapiens
aactcaatatccccttacgccactccacggtgatggggctctggaggctggggtgctccacgtggcaggtgtagacatctccacgctggggagtcatttccagcatcaccaggatctggaaa

SEQ ID NO: 183079 - DNA, 122 bp, Homo sapiens
cctgagaaggccgagggctctcttccctgcccaccacccccaggtgctctgtgagacattcgtgatccaagggcccaggtctgctcagagctgcagtgagggtccagtgaggggcaccaacc

SEQ ID NO: 183080 - DNA, 122 bp, Homo sapiens
gaaccagctccgaatccattgaaaggcccctggtgtctctggggggttggtaccttcagacgttattgtactacatttttgttcaatgagtcagagccaaaggacttggttggtgaaaaatt

SEQ ID NO: 183081 - DNA, 122 bp, Homo sapiens
caaataatttaaaaataaatctccatgaaaactctggagagcagcccgccgcctttccaccgtgggtcaaagttccccgagaggttagaaagaagagaaagtagtttcttcgggttgtgggc

SEQ ID NO: 183082 - DNA, 122 bp, Homo sapiens
cgctgcgcgtcgcagagccctacgcccctcctcctcccgagtcctcgggcctacgtcgtccggcatacgtcatccccattggccgaaggctcccgggagaaccaatcagaacaggaggagcg

SEQ ID NO: 183083 - DNA, 122 bp, Homo sapiens
ccgcatctgcagggtgagctcaggcccggaattcatctctggacctgacggagattcacccgctgaagccggcatcacaggcccgctgtgagtactgtgtgaccagaatgcgtagtaatcac

SEQ ID NO: 183084 - DNA, 122 bp, Homo sapiens
ttttcacagcggcaggtgtgagttccccgccgctggagaccagaagcctgaaggcagctccgcccaccccagcccacagcgccgttattccgtttctatatcagtaaacacttgtcattttc

SEQ ID NO: 183085 - DNA, 122 bp, Homo sapiens
caatattcacgcacctgcttcagctgacccctcaggcggtcttccgtgacgcccagggcccgcatgcctcgtgcccgacacgctgcctgcagctccttgacattcaggctgtccaccccttc

SEQ ID NO: 183086 - DNA, 122 bp, Homo sapiens
gccctcgggagagtgggctcagcacagcctagagcaccaggtctgaggtatctgcaaccacgtgggagccaggcccctggacgatgaaggacaatctcctggagcagcaataacttataagg

SEQ ID NO: 183087 - DNA, 122 bp, Homo sapiens
ggagccagtgcaggtgtgagcacagatagtcctttgcatgaagaaactaatagcgcaacacgggacacgtgggtggctttgctacctggtgggcattgagagggtcttcccttgatgctgtg

SEQ ID NO: 183088 - DNA, 122 bp, Homo sapiens
acacccctatttagaaaggttgacacatcactatcactgcttctgaaaattttatccggccgaaggcatcagcccaaatttgaattcttgccaaagctgctggtgatttcgttctttgaatg

SEQ ID NO: 183089 - DNA, 122 bp, Homo sapiens
gggttgtggctgtggagcggaagtgggtctcaaccactataaatcctctctgtgcccgtccggagctggtgaggacagcctgccagagtctggtaagaaagggactcagggtgcggggacag

SEQ ID NO: 183090 - DNA, 122 bp, Homo sapiens
cagcagcagcagcagctcagccggcatcttcctcccctcctcatggggacgcagctgccgcggcccccactcgccacctgcagggagaccccccagaccaaggggagattactatgtggtgg

SEQ ID NO: 183091 - DNA, 122 bp, Homo sapiens
cccctcggcggttgctttcgctgccctcaagagaactcagcttgccggaagctggttgttcgctgcggcgaccagctccggaaagcgcggtggggacgcgctgtgttctcgcagctcagagg

SEQ ID NO: 183092 - DNA, 122 bp, Homo sapiens
aatacttatcattttatgtacgaaagttactaagaaatagctttaaaagtattgcctttgcggtttagtttggtgctggacaaaaattatatgcttttgcatatcttcaaagtaatttatct

SEQ ID NO: 183093 - DNA, 122 bp, Homo sapiens
acagaacacaatagtcatgaacaaattcaggtcagtcatggtaagcgatgacactctgaacggcccaccacacactcgaaacgtcccaatcaaagaatccccattacccaggccttttccct

SEQ ID NO: 183094 - DNA, 122 bp, Homo sapiens
gctgagcggcaggtgcaggcagtggaagcagtagctgctgtccagtcggtagccgacttgcggatccagcaagagccagcggctgcgcttcggctgctgcaggtaacggcagcgggggaagg

SEQ ID NO: 183095 - DNA, 122 bp, Homo sapiens
cagaatctactccctgtagataaaagagcaagactttagacaaaacgtcgacccatattgcgagccaactgtcaaccactattgtaagaaagaatatataggttcgtagaagttggtatcct

SEQ ID NO: 183096 - DNA, 122 bp, Homo sapiens
cgggccggccggccaccaggacgccgtcactcacacccacagcctcggagggcagggaggcgcgcacgctcacaggcacctgctgcatccggttctcgaaggcattagatgccagcacggtc

SEQ ID NO: 183097 - DNA, 122 bp, Homo sapiens
aggctgaggcgggaggatcgcttgagcctgggagttcaaggctgcagtgagctatgattgcgtcactgcactctagcctaggtgagactgtggagtgagaccctgtgtctttaaagaggggg

SEQ ID NO: 183098 - DNA, 122 bp, Homo sapiens
agcctgggacacacccccttcaagaaggaaacaaaatacttttctcctaactccccctcccgcttaaagtcactatcaggtctggtaagaggaaggagcacagagctcaagacttaatgatt

SEQ ID NO: 183099 - DNA, 122 bp, Homo sapiens
ggaagcccggagccgcccctccccgctcccccgccccgccgccccggacggacgggcgcgcggagccaaccccgctgccgctggctgtccaaatcccaccagagccaatgggagcgcgaggg

SEQ ID NO: 183100 - DNA, 122 bp, Homo sapiens
ctttgcaagactgcagtgaaaatgaatgacttaaagtgtccctgcccccagtgtgaccatcgttattttttgcagacttaaaaacataggtatatgaataatgagatctatatttttatcta

SEQ ID NO: 183101 - DNA, 122 bp, Homo sapiens
ggacgtgccgctggccatggaggagtggcaccacgagcgtgagcactacaacctcagcgccgccacctgcagcccaggccagatgtgcggccactacacgcaggtgtgggcccggcgggcga

SEQ ID NO: 183102 - DNA, 122 bp, Homo sapiens
ggtgggagcccgcaggccagagtgtgggctgggctcggttcccccatcccacgcagtgggcggcccgggactgtgggggcgggctggaggcaaccttgagctcatcagtgggagacatctgc

SEQ ID NO: 183103 - DNA, 122 bp, Homo sapiens
ggggacgggcagccaccgtgggtcggggactcaccacagcccagcccctcccagatgggacgagactcagggccagccacatgtgtgcatgtgacatgtgcaccctggaacacacatgctaa

SEQ ID NO: 183104 - DNA, 122 bp, Homo sapiens
gccacgctcaggtgtcccttcacaatggcagccacactgcttcgtgaaacggacacactacgggatggaaaacagtgagagggaagccacggcatcaagaagcaataatcacagaatgtttt

SEQ ID NO: 183105 - DNA, 122 bp, Homo sapiens
ggaccgggagtcctcaaccccggactgaggcaggggtctctgggggcgaggagggcgcgtcgccctctgcccccgccggcaccctggccatgacaggcaagtcggtgaaggacgtggatcgg

SEQ ID NO: 183106 - DNA, 122 bp, Homo sapiens
ccccgtcattcagcttcagtgtggagaaggcccggagctgtgggcatcagctcggggacccgagtgactgtccctgcctcggggagggggggggccacacgggcaggcggggcagcagcttg

SEQ ID NO: 183107 - DNA, 122 bp, Homo sapiens
tagaaaagggcttgtgaaaaatgaggaacgtgctcaagttcacatggaaaactaaagatccgggatcagtgtattatattcaagtgaaagaccaagacaggaggacagagagagtccttcat

SEQ ID NO: 183108 - DNA, 122 bp, Homo sapiens
cttccgcttccttcttctcgagccttctggaaagattctacccaatgggcagccggtccccggagaacggccgccgttgccatggcagcgacagggccgctcccgtgccattggctcaaacc

SEQ ID NO: 183109 - DNA, 122 bp, Homo sapiens
ttcgaatcttgaggtttcaaactgaaccgtcttgtgccttttgcccggcgggcatttctgcggggaccgcgggtcaccttctgaatttttaccttcataaacagcaaggactgcgctctttc

SEQ ID NO: 183110 - DNA, 122 bp, Homo sapiens
ggaccctaacatgtctctttgtactaactgtttcaactttgtgtttgtttagggtggtaccgaggttacacgttacgaaaaaagtctaagaaggtaagtccttcttcttaaacacagtgcat

SEQ ID NO: 183111 - DNA, 122 bp, Homo sapiens
tccctggcactgcagccaggtagaggcagctgcagccgcagccctgagaggggctggagacgctgaggcaggggcagtggtggggtctggctcccctcagttcaaagtggcctgcagatgct

SEQ ID NO: 183112 - DNA, 122 bp, Homo sapiens
cctgcagagccgccatcgtccctggcctgagatcctcccgtctgctccctgcaccctctacgcccagactgaggccagatgcccacctctgggctttatagtttcctctgccagaggtcaaa

SEQ ID NO: 183113 - DNA, 122 bp, Homo sapiens
cctcgcctgcgctctgctccgcccccttcgttacaccacctcacgtcctcccgtgtgtggcgtgggtccctcctgagggctgggtttgttcacagctgcctcccggcttctagaggtgcacc

SEQ ID NO: 183114 - DNA, 122 bp, Homo sapiens
tggctgcgcccggggcttgggggtggggtggctgcggccgcgccccttgctgccctctaacgtgtcgcctgtccccgcagcgcccgccgccgccgtgcgcaggttcggcgaggacaccgcgc

SEQ ID NO: 183115 - DNA, 122 bp, Homo sapiens
gggcccacatcccgcccactggggcccacatcccgcccactggggcccacatcccacccacggcggccagggacagacgtccttcctgtgtcttgtgtcccttcaccactaccagcccggca

SEQ ID NO: 183116 - DNA, 122 bp, Homo sapiens
aactggggctgtgtctggcgctcacaggccagcgtgaattccaggtgggcgcgggctcagcgggccccgcactcggagcagctgtccagtgccgccggccccgggcagtgaggggcttagca

SEQ ID NO: 183117 - DNA, 122 bp, Homo sapiens
agaaagggggcgagcaaaggggagaggggccagccaggcgacacccacctccgacatacccgcctaaagaactccggtgcacatggtgcgatgaaatatgtttggaaggatgcaccaataaa

SEQ ID NO: 183118 - DNA, 122 bp, Homo sapiens
ttttggtaatcctgtggtgcatttttgctttactgttgttttcactagtccctcacttgccggttcctggttgtatcactgcctgcagtgcaagacagctttaagctgtcttatctctcagt

SEQ ID NO: 183119 - DNA, 122 bp, Homo sapiens
actcaccacaaacacacacagaacaacagcgatgatgatgaaggcagtgcgggcatgagacgtggaagagaacgggacatggtgggagaaagaggatgggacaggcaggccgatggcagagg

SEQ ID NO: 183120 - DNA, 122 bp, Homo sapiens
agttcaccgtggctgttaagagggctaggggattttaagagcaagagaatcaacaagtgacgaagctgagcgtgtccatcctgagggatctgctttaccacatcgtgctcagcccacatacg

SEQ ID NO: 183121 - DNA, 122 bp, Homo sapiens
aggggcaccatgggcgacacgggggtccccgcgcgccgccctctggacttacgtgactgtcgctccccttccagaagtagaaggccccgatggccccaaagagcagcagcacagctcccgaa

SEQ ID NO: 183122 - DNA, 122 bp, Homo sapiens
tagctcatttttaagatgaacacactgaagctctgaaaagtcaactgacctgcccaagttcgcaaagctgaggcctgagtacagaccttttgactccaagtctagtgctctttcctctcctc

SEQ ID NO: 183123 - DNA, 122 bp, Homo sapiens
gggggctgtgaggggagggtgacgtcagctttttcctggggaaggccggctcccttctcccgcataatcggcggtgcttggcgccgctgtaccccacggcttggcgctggattctctgctgc

SEQ ID NO: 183124 - DNA, 122 bp, Homo sapiens
cgggctgcccctgcgcgccgaggccccgccccgcggcccgccgattggccccagccgccccggcgctaagactcaatttcacactacgcgcccaggccacgcccacctgtcatgcggccctg

SEQ ID NO: 183125 - DNA, 122 bp, Homo sapiens
ccgctttcttctcccgggagaacttgaggagcctcactgagaagtgcgtcttggtcttggcgctggccatcccgctgcctcctgccggggcgtttttccgatggatgcggagcgtcacttgc

SEQ ID NO: 183126 - DNA, 122 bp, Homo sapiens
tcttgctagaacgttggcaaggagaagccggagtctctcctttttctcctcggcttttctcgggctttctgaaaagagcacctgcatattcccaggaaattttggctcctgatggcatgggg

SEQ ID NO: 183127 - DNA, 122 bp, Homo sapiens
tgcccaagggcactcgggagctgaggagggcagagcgggattagaaccccagcttcctgccgcccgcccggctggcctagctgcactgcgctgcctctctgcggctcatctgcgcacagacc

SEQ ID NO: 183128 - DNA, 122 bp, Homo sapiens
agctaggaagagggctgccttggcatgacctcttctctcctcctcgacaggcctgtccttcgcagcttaccatcagtcactccctgttggagcctcactgttgtccagcaggaaaggtattc

SEQ ID NO: 183129 - DNA, 122 bp, Homo sapiens
gtgcagtgtcctggggtggccactaggcagtggacagcagtgaggcccacagccataggccgtattcatccatgtgcccagcactcctgagtgtgagcagcagaatcccagaacctggacaa

SEQ ID NO: 183130 - DNA, 122 bp, Homo sapiens
aggttcttgcgcctctacttcccaggcccctcagtggcgcccacctttgttgtagcccggcgtgcgggggaaccgcccagcaaaccttcgcagagcctcctgggacccgagtgtcagctgag

SEQ ID NO: 183131 - DNA, 122 bp, Homo sapiens
aaatcgtgcacgtccctgatggtagcagccctcctcctgcacgagcacagaatgtctagccggccgtgaacacccccaccgccccccccttcccgtgcatgcgcggtgcgggctggggggaa

SEQ ID NO: 183132 - DNA, 122 bp, Homo sapiens
agggcaagcgagggaggtctgggctggtaatcgagcaaggcaaatgaagtctccgggggccgcaggaaaatggagacagcagaaaccctagggctcctattcaatatgaacgtcactcccac

SEQ ID NO: 183133 - DNA, 122 bp, Homo sapiens
attccaggatggaaacaatagtgggcagaactcagggaggaagaaagacagcggtggtgacgtggagtgcctgtcatggggtggtggatgaccctcccaggtcccgcagcctgccaaggggc

SEQ ID NO: 183134 - DNA, 122 bp, Homo sapiens
aacggtctaccttcaaaagcatcctcttgacaattccactaggaccaacaccaataccaccgagccctcgttgctgcctcttcagcgcagaatagcccaccaagtccacgtttccctagtcc

SEQ ID NO: 183135 - DNA, 122 bp, Homo sapiens
gtctcctcatcattgccgtcagctacaggttttcacaggagacattgggacttacaaaggcggaaactgcttgtctgtcacgtgatcctagtccccagcctgggctcctgttattgccaggc

SEQ ID NO: 183136 - DNA, 122 bp, Homo sapiens
gtggtccggacgcctagattctggagatgctggagggactgtgcattggtgccagagcctcgggagggtgcatcggtgcctgaatgtctgattccgaggggtgcattgaatcctttacgctt

SEQ ID NO: 183137 - DNA, 122 bp, Homo sapiens
accattgttggcgaggggcaccactccgggagaggcggcgctgggcgtcttgggggtgcgcgccgggagcctgcagcgggaccagcgtgggaacgcggctggcaggctgtggacctcgtcct

SEQ ID NO: 183138 - DNA, 122 bp, Homo sapiens
ccggccgccgccgacgccgccaccaccgcctcaaccgccctcccggcgatagaagccgagcggcaacgacgaagtgattataaagcctccgccccgcgcgccgctgccctgcgcaggcgctt

SEQ ID NO: 183139 - DNA, 122 bp, Homo sapiens
aggccagtcgtatgtggagggggggcatgcaagtctgactcgcccttacatcagtagcagcggctgatgggtgaggaaacgagcacgttttctcttagggaaacagtgttttaatgtggctc

SEQ ID NO: 183140 - DNA, 122 bp, Homo sapiens
aaggccatggggttcgagaagctgagaatttataagccaagttccccacaccagggggtacgtggcagctgtcaggcatgtgacaagaccacaggctaaatgccaagcatgttgctggaccg

SEQ ID NO: 183141 - DNA, 122 bp, Homo sapiens
accgggcacagcactcacccacgtcttgctcgaaggggttggcggtgaacaaaggcatctcgccggcgcccgagccctagtcgctgctgtctagctgacactcagcaactgctacccgccgg

SEQ ID NO: 183142 - DNA, 122 bp, Homo sapiens
aaaaaaaaaaaaagacagatgttgggagtcttctcccagacagctgatgttcattaaaatcgcagagaatggggatggccaccacatcctgcagcaaaagagatgcagaaagcatccaggag

SEQ ID NO: 183143 - DNA, 122 bp, Homo sapiens
aaaagacaggctaagctaggccttttgcagcaagaaaaacttgggaaaggggcccccacacgcacttctcctgcaccctggctagatttcccggcacgggccagccagggcagccagcctga

SEQ ID NO: 183144 - DNA, 122 bp, Homo sapiens
gtgggctcacaacaaaagaaatccgcatccatgaggtagctgggaagagagggctttgaacgctatagcaggcagatggaagctctccataatgggtgagagtagtatttttgctgttgctt

SEQ ID NO: 183145 - DNA, 122 bp, Homo sapiens
cacacacacacaccccagtgccaggatcagtaatttatgagagtcacagtgaccccagaacgacctggcctccctctccaacaaagcaacagcaccaggttggcactgaataccaggaagag

SEQ ID NO: 183146 - DNA, 122 bp, Homo sapiens
acttggattctcccgcgcttgagcgtcactttcaacgacttcattcctttctgtccaggacgacaagaagccacttaattgaccgcccctaacggagcaagtaccgctgggccacaccgtct

SEQ ID NO: 183147 - DNA, 122 bp, Homo sapiens
acaattcccgcacgggaggccccgttacaattcccgcacgggaggccccgttacaattcccgcacgggaggctccgttacaacccctgcacaagaggccctgttacaacccctgcaccagct

SEQ ID NO: 183148 - DNA, 122 bp, Homo sapiens
agttcaggtatttgaaaggctggtggagagaaagtgcggagttcttgggtcagagcggagcgggattcgttgcaatggaccttcagattagattagaaatgtaaataagtgtatatttatat

SEQ ID NO: 183149 - DNA, 122 bp, Homo sapiens
gcgtgatttggccgcgactgggaactaagaccaagtccagaaggcggggctggagtgaggcgaagctcggaggcggggctagagacgaggaccaagtccggaaggcgtggccggggtggggt

SEQ ID NO: 183150 - DNA, 122 bp, Homo sapiens
gaagcccgccgtctctaagcctcctcgcatccgctgggaccgcgaggagaaggaaaggaacgtgaaggagaccacatgtgtgaggagccagagtgctgggccctcggtcccgtgtcccgggg

SEQ ID NO: 183151 - DNA, 122 bp, Homo sapiens
atttttattgtatttgacaaaagcaccaatctatggtagattagacattataaaaacacacgcacacacacgtgcacacacagtccttcagtgtaagtattttgggaagctctggctaagaa

SEQ ID NO: 183152 - DNA, 122 bp, Homo sapiens
tgcagggcctatttatgtctgcagccagggtctgggctgggaggctgataagcccagccccggccctgttgctgctcactggtcctggcaatgtggaacttaagagttcaaggatcagctct

SEQ ID NO: 183153 - DNA, 122 bp, Homo sapiens
gggctcgggtggggcgcgcggcggccgctggctcctcggcgcggctggactcacccgcggcggccgagacgctgagcaacccacagcccagcaacagcagcagaggcggcggcgttggcggc

SEQ ID NO: 183154 - DNA, 122 bp, Homo sapiens
atgaatgaaggaacgaatgacggaagtaaaaggtatgagcgccccggagactctggcttgcgttttccctctccagcccccagcgaactggagccgggctggcgcccgaagggagtccccgg

SEQ ID NO: 183155 - DNA, 122 bp, Homo sapiens
ggtccgtgcggagcaccctggggttcacgaggtactggacgaggacatacagcaggatggcgatcaggcagagcatgccagctgtggccgaggccacagtgctgaagaagaacctgccggga

SEQ ID NO: 183156 - DNA, 122 bp, Homo sapiens
tggaagtgcaagcaagattttggattgaaggctggggggcagaggggcaggagggagctccggaagggtcggcccgctccgcagtcctttctgttgcctgcctcgctcccctcccgctgcct

SEQ ID NO: 183157 - DNA, 122 bp, Homo sapiens
tgggctccatgcgatccctgagagtgatcatggcaaggtcagcgcgtgcggcccggaagccggctgctaggcgccggctcaccgttgctgtagaagagctcaccgttgctgtagaggagctg

SEQ ID NO: 183158 - DNA, 122 bp, Homo sapiens
ctttccaagtgtggaagcatgttatgagcagagcagttgtctatgagcaagaggatccggcgttccgccctcttcatcctggcatccacttgcatcagccactcattaaacagatcccttgt

SEQ ID NO: 183159 - DNA, 122 bp, Homo sapiens
gagaagaaaacaatttgtattatctccagctagaggtcagttgctgccacagccccttctcgccaccaaggcgtggtgtcccctggggaggccccgcgaggtgctgagtggcaccgaactct

SEQ ID NO: 183160 - DNA, 122 bp, Homo sapiens
tgtgaaaacaagccgtatccaaagtcttgcttctgctgaggtgtccctgatgccaagattcgcatcttagacctgggaagcaagcaaaagtggatgagtttcctctctttggtcacatggcg

SEQ ID NO: 183161 - DNA, 122 bp, Homo sapiens
ccacgcacccaacgcactccgggccgcagccccgccgccgccatcgaggagccttggggacgcgaagggccagccctgctgctgctgtcgcgcttttcccaggcccctgacccaagtggggc

SEQ ID NO: 183162 - DNA, 122 bp, Homo sapiens
gattacaggtgtcagccaccgtgcccggccaatacataattctttagtgaggggaaaaggcgggggataggattatagttgcttactgagacctgaacttaagccccagtctctcatatatt

SEQ ID NO: 183163 - DNA, 122 bp, Homo sapiens
taaactattttgcccaaacgtacatagccagtaaggaggtagaacttaaatgccagtcttcggggctctaaatccattgctgtttcctcagcaccagggggatcttgtctctggtccccaac

SEQ ID NO: 183164 - DNA, 122 bp, Homo sapiens
cacccgggagcgccagagagcagggcccgagccctagttctgcttctcggatggggagcccgggcacttgcgtattcctgtctgtaaaatgggcacgtaggccgcggcccctcgttgcgggg

SEQ ID NO: 183165 - DNA, 122 bp, Homo sapiens
ttggcaggtaagtgcccctttgccctgctggtgtgggagctgctagagatggatgagtcacgtcgcgtccagacgcttcctggttgtgttgcagtaacggtgattgtactcccgccatgtct

SEQ ID NO: 183166 - DNA, 122 bp, Homo sapiens
tttaaaatcatttctatttgtgtaagagaaacccgagtttgaggaccttattttattctacgctgtttagatttgtatcctctggtaatttagtggcattagtcacctgctaattaatcttt

SEQ ID NO: 183167 - DNA, 122 bp, Homo sapiens
aaagctagttgactttggaaattttgcttacaattatttcaagcatacttgcactttacacgggatactggttcaaggtccttagctagaatgtgctcctgttgtttaatcttcagggattt

SEQ ID NO: 183168 - DNA, 122 bp, Homo sapiens
tgggaagcggtgtgtgtggtgtgtggtgtgtgtgtgtgtgtatgtgtatgtgttgggaagcgggttgttccgaggactccccgattccctcctggttgaaacgtggcccagaaagagaggca

SEQ ID NO: 183169 - DNA, 122 bp, Homo sapiens
cggacgtgaagggcagtccgggaaaaacgggtgcggccgcctcctgtgtcctacagggggcgccagacgcatttccactcggcttggaggtggatttagtgccacgtgcccgaaagtcttaa

SEQ ID NO: 183170 - DNA, 122 bp, Homo sapiens
atggtgcaggaggaagagctgcagccactgcctgggatggcagaaccttcccacccagaccgcggcggcgccactgccaggaacctccataaccctcaccgctctctcggagggagcatctt

SEQ ID NO: 183171 - DNA, 122 bp, Homo sapiens
gaaggacccatgaaacctgggaagactacatttcccagaagcctcctctcccaggaccggcgttcagcttcccaggttgttaccatggagatggctaacagctagagcaggctgtcctcgga

SEQ ID NO: 183172 - DNA, 122 bp, Homo sapiens
atgaaaacggggccgagtaaggggcagagcgctgcctctctgcaggccgtgtgctttgctcggttgatcttgcagagcctaagacacaggcccagagaggcagtgatcgccaaagatcacac

SEQ ID NO: 183173 - DNA, 122 bp, Homo sapiens
ctcattttgagaactttggagtccgcccccagagaggaaatgtgacccaaacgtccctttcggagatagagtttgcctttgtttttgctcagaatttcacaagacccattcctcaccccaca

SEQ ID NO: 183174 - DNA, 122 bp, Homo sapiens
ccccccgggcaaccgcagctcccaactccgctggctttcccctccctctgacaccctgcgcggctcctgcgacccaggtgcgtgccagctgtaggagcctgctccgcctgccctcctggaac

SEQ ID NO: 183175 - DNA, 122 bp, Homo sapiens
aaagtggtgcgtaggccaggcctggacgcccagggacctggccggcctgcagcgttcggacggccctcaaagccacgctcgtggctcagttcgtcccaagatcgtagcacatggcgaacgta

SEQ ID NO: 183176 - DNA, 122 bp, Homo sapiens
ggcctcgccggctcccctcccacccttgaccttttccgccacagctacagaacgcccaagcgctcttccgcctagggtgccctccctgccccgcccacctgcgtcccgcgggctcagcggtg

SEQ ID NO: 183177 - DNA, 122 bp, Homo sapiens
tggtcgctgtcaggaggcgctggggtgatggggcgagctggagacgcggcctggagcccacgacctgggcttctcgccctgccctactgcttgctggttcgtggccgggccgcgcctcttct

SEQ ID NO: 183178 - DNA, 122 bp, Homo sapiens
ccaccatgcattcttggccacaggccagcctcctgctgccctggggctgtgctgggccgtcgggagtgttgcctattaaccaggcggtgtcacctccaggatgcaggggataatggcaaaac

SEQ ID NO: 183179 - DNA, 122 bp, Homo sapiens
acctggtgggctgcgggcggtcccgtgctcagttgggccagggagtggtgtaggcagggtcgcgcgcccggtaagtctccaggcaccaagcaccgggggcgcagccggcttcagtgtctggc

SEQ ID NO: 183180 - DNA, 122 bp, Homo sapiens
cctggttgcggaaagagcagttttatgtgagtattcaaaatttctctcaacttggcaaaacgaagcctttgtggaaacactaggctgatagggttggaaggggaaatgaatctggggatcgg

SEQ ID NO: 183181 - DNA, 122 bp, Homo sapiens
tcacacccttctctttctttctctcttcagagagggttgttgggcaggcagagcatcccccgaggggacaagtcaggcctacggactcctggagccaggacctgccgtaggctggttagggc

SEQ ID NO: 183182 - DNA, 122 bp, Homo sapiens
ccccaggatgcccccaagcacctgcgcgtcccggcccggccccgggctctgagcgcgccgcggcacaggtaaggcgcttcctggggcttcgtcctggccaccctgctggctcctctcggggc

SEQ ID NO: 183183 - DNA, 122 bp, Homo sapiens
cggcaacacagttacaatcacatacacaccataggaaacacacaattacagctgcacaatcgtaggcaccccacactgtcgcagagtcacaatcacacatcaccacgggaacacacagccac

SEQ ID NO: 183184 - DNA, 122 bp, Homo sapiens
agatcgctccggggtggcggggacagctggtgcttttcttgtctgttgtaaactttggttcgttattattatattaggtaaagctggtcttatgtattaatttgtttaaccattaaaaataa

SEQ ID NO: 183185 - DNA, 122 bp, Homo sapiens
agatttgctctcaatagatggtggttgacgttggaataacagtctgatcctgaccctggacgcacatctggggcccgtggcacctggggcagggaggggcgctcggtcctgggctggggctg

SEQ ID NO: 183186 - DNA, 122 bp, Homo sapiens
ccagtgccactgttcctccagtgactctgtggtagactgcactgaggtcagcaaccagggcgtgtacgggagctgctccaccttccgcagctccctcagcagcgactatgaccccttcatct

SEQ ID NO: 183187 - DNA, 122 bp, Homo sapiens
gactgtttagtggctacaacagagttgcacaaaaggagataatgattgcagacagactcccgaagcctttgaatgctgagtctacctaccatgagactactttcttgggacttatggttatg

SEQ ID NO: 183188 - DNA, 122 bp, Homo sapiens
cagccaaccaagggtagggactggtagggccccaagtgaatgggtccccgggctctagcccgggaggcccaccggggatctgcacagcgtgggcagctctgccgggatctgcttgtggcgca

SEQ ID NO: 183189 - DNA, 122 bp, Homo sapiens
aaacggcaaggttggattcactgcgaaggctgactgtacaataagaagcaaaaggaaaagcggttcagttgtgaaaatcagtgtcagccctgggtgtaggggaaggtcctctccacaaacca

SEQ ID NO: 183190 - DNA, 122 bp, Homo sapiens
atgagacagctgaagcaggaaaagcaggcacaaaggctaacacaacacaatgtaacagaacgggagtttagaacggaaggaacactccagagtcattctggtccaattctgcagatgaggaa

SEQ ID NO: 183191 - DNA, 122 bp, Homo sapiens
atttttcagactggcaatacgtaaggtagccactaccagcacctcaaaccagggccccagcggaggggtggagtgttccgaggacccgaggcaggaagtggattggtcgccaggaaagggaa

SEQ ID NO: 183192 - DNA, 122 bp, Homo sapiens
ggaatggggtgacatatgctgcagccaccatctgacctctgagaggcagctgcgcattagcggggaagttatgagaggattagatgtaacaagtggccagtagagggtgctaaaacatttac

SEQ ID NO: 183193 - DNA, 122 bp, Homo sapiens
ccctcctgtgatattgttcctaatatcctaggtgggagagcatgatattactcccaatatcgcagggctgtatacccacccagtgatattgtccttaatgtccagaagggaaaggatgttat

SEQ ID NO: 183194 - DNA, 122 bp, Homo sapiens
tactgctaaccctacttatcttctctgtgattctctgcagtggctccacagagattcaaacggctgttcatatttcacatcctatcctctcttagagctaacagatgggaatccttgatagt

SEQ ID NO: 183195 - DNA, 122 bp, Homo sapiens
gaccgcaccgctggacctcaccgctggacctcaccacaggaccgcaccgctggacctcaccgctggacctcaccacaggaccgcaccgctggacctcaccgctggaccgcaccgctggacct

SEQ ID NO: 183196 - DNA, 122 bp, Homo sapiens
taatgataatggtggtagtagtagctgcaggagcagcaggattaaaagcaggatcatttacgaggaaaagcccaagagagaaaagtatgagtcagaagtaatgatccctacagttgggagcc

SEQ ID NO: 183197 - DNA, 122 bp, Homo sapiens
acccaccctcagactccaactcgcgcatctccgcaggcccaacagcccccgctccagtggcgcagagacccccgaaggccggcacctggacgttccccttgagctattcacttaagaagaaa

SEQ ID NO: 183198 - DNA, 122 bp, Homo sapiens
aggtaggccgagtagggggaaaagccctcaaatgcgcagaagctgggcggctacctctagcgtctcctccagcaaagccagactgcaaggaaaacaattcgtcttcattccccagccccggc

SEQ ID NO: 183199 - DNA, 122 bp, Homo sapiens
ggatgatcatggtccctaccggatgcttgttttgaggatccgtgcttggcataccagaaacgctccacaaatgttaggtattactggacgaaggcaaatatgaaaaaaattaagggcagggc

SEQ ID NO: 183200 - DNA, 122 bp, Homo sapiens
catcactttctataaaaagtgagtggaagaatctaatattgtaaaactgcacgtgcctcgcgtgacctgagcagaaaattcctagtttgggattttctcacaggcatacctaaactgacctc

SEQ ID NO: 183201 - DNA, 122 bp, Homo sapiens
ccagtacacgctgtactggggagacaaggggaccccggcctcgtccaagcagaaaacgcacgtgtcctaaagagctctgaaacattcacaagacagagttatttgtagggaggtgaaactat

SEQ ID NO: 183202 - DNA, 122 bp, Homo sapiens
gccgttggccgtggcaccctcgggcagtgtgtcacccgcggctgcggcatcgtggaggcccgagtagtccttgagctcggcgttggtgagcagcagtggctgctcccccttcttgtgcggca

SEQ ID NO: 183203 - DNA, 122 bp, Homo sapiens
ctttccaaacactccccgccgccccccaccaccgcagaaaaaagagcttttagcataaggcggatgctatctatccgcggtagaaactgggtcttctggtcccaaggaatagggttagttcg

SEQ ID NO: 183204 - DNA, 122 bp, Homo sapiens
ggagacaaaatgatctctaccaataggagttccccaaagtgccatgagtggcccagaaatcgagtgacacatgaatccgcagaaatacgtttcctgggtgattgagctgtcaggggtcttgt

SEQ ID NO: 183205 - DNA, 122 bp, Homo sapiens
cagcaaacagcccagaggccccacctgggcaaaagcaaacaaaacagatacgttcctttccggcaggtgcagatgctctgcccaggcctgcggaagccagctccggtctgtgtgtaaatcct

SEQ ID NO: 183206 - DNA, 122 bp, Homo sapiens
aactcagccggccaattcttgatggggctgccagtgatggctgcagggggtcccctgggtcgtccccatccccgccgccgcagcagcagagacgcctcagagcgggcgtcggcgccccctgg

SEQ ID NO: 183207 - DNA, 122 bp, Homo sapiens
tctctgcatgtcagggctgagaggtgaccaaactccctccccactttctagaaggtaaaccgacacccaaagaggggaacagtgcatttctgtggcagagaacagactctgtcccccaacat

SEQ ID NO: 183208 - DNA, 122 bp, Homo sapiens
ggtcagccatctgtggggataagagatggctaaacaaccaagctggtatcctgtcatttgcgggtttttttgttttgtgtgttttttgttgttgttgttgttggagacagagtcttgctctg

SEQ ID NO: 183209 - DNA, 122 bp, Homo sapiens
tttggagagaaaatgggaactcacttaagaaccctacttcaaggcagagtgtgggaattgcggggggcggggcggcgcatgcacatatgtgcagacatatgcagatacacacagtgcatata

SEQ ID NO: 183210 - DNA, 122 bp, Homo sapiens
caggaaaagcccgccatcaggtcaggggttctccttaaaaagcgcacccttctggccgggcgcagtggctcaagcctgtaatctcagcactttggaaggcggaggtgggcggatcacgaggt

SEQ ID NO: 183211 - DNA, 122 bp, Homo sapiens
catcatttcctaaaccctacaatccaggaaatagtccatcattttataaaattataaaagcgaactatttgagtttctttattatctgcccccttctccccaagctggtcttgtacaaacat

SEQ ID NO: 183212 - DNA, 122 bp, Homo sapiens
tctggggctagggaggggtcgaaggtcataggggcgcgtggtggtggaggcgggcgggtccggagggtttcgtgaccccacaatttgcttctgcttctgcaagactgccctaaactcacctg

SEQ ID NO: 183213 - DNA, 122 bp, Homo sapiens
gagcaggaaggtgggcgagaggcagcagctccagcaggctggaaggacaagcccctcccccggggccttctgttactctatccttgggttgctgcctgctctggcctgaggccccacaaggc

SEQ ID NO: 183214 - DNA, 122 bp, Homo sapiens
gattggattggggaaatcttactggcagtcatgtcatccaagaagttgttggcataatctcggagtgcaacagcaaggacctaaacgggcagatcctctcccaggggaaaatcagtagtcct

SEQ ID NO: 183215 - DNA, 122 bp, Homo sapiens
gtggttcacacttttaatccctgcacttttggaggtccaggctagaggatcatttgagcccgggagttccagaccagcctgggcaacacacagactccttctctaccaaaataattagctgg

SEQ ID NO: 183216 - DNA, 122 bp, Homo sapiens
ccacccgcccagccccgccgacccccgccctgcgcacacgcccttggcgggccctggcctcgctctcgcgatccagagagtatggttttcagggctcctttaaaagaaaaagacggcgcggt

SEQ ID NO: 183217 - DNA, 122 bp, Homo sapiens
caggaagtatggttaggggacatactcacccggacaccgacgtgaacctgcagcctcccccggggagcacgcatgggtcccagttgccttacagtctgatcacggatgctgttgcctaggca

SEQ ID NO: 183218 - DNA, 122 bp, Homo sapiens
aaggccgacagcagagacccagcccttcgccgcgcctgcgcagaacggccgaagtgtgcacgcccctctttggcggcctcagggcctagaacaatgaatgagtcaacgcgcctgcgcgccac

SEQ ID NO: 183219 - DNA, 122 bp, Homo sapiens
tttctggccttcctttctcttctcttgagcagctgctgtggaacctccgttcatgctctccgcttttgccttaggtctccatcatctttaatttgagctatagcaaagctttcctcccttac

SEQ ID NO: 183220 - DNA, 122 bp, Homo sapiens
ggatggcttctcagagggatcagcgctgcaactcggtcgccgcggggccctggtgacaggcgcacgccccgccctttctcctcccaagacctgcgggcttttgttatgcagatggcggcagg

SEQ ID NO: 183221 - DNA, 122 bp, Homo sapiens
gccctcagaccaacagcctctcccaaccccagatcctcattagagcccaagacagggagccgttttcagaagcaggtgagcccagtgaaacaatgcagtggagagaggaaccgtgctgtgcg

SEQ ID NO: 183222 - DNA, 122 bp, Homo sapiens
tggaaatccctgccctgttcagccccacagctcccaactatttggttcctgctccatggtcgggcctctgacagccactttgaataaaccagacaccgcacatgtgtcttgagaattatttg

SEQ ID NO: 183223 - DNA, 122 bp, Homo sapiens
aagcatgttgtagaggatgctgccctgccactggtggttctcgcccgccatggcccgcggcgcccgtagcccagttctgcccagtggctgcctcctgggacctatttatacctagcgcgcac

SEQ ID NO: 183224 - DNA, 122 bp, Homo sapiens
ccaactacgcagaggctggcacgccgaccctccacacctcaccacgcccccatctccgtccgtgtacacacactcacacaaggacgccaaccccacctagatgcaaagcaggattcaaaaga

SEQ ID NO: 183225 - DNA, 122 bp, Homo sapiens
gaacccagaaacccagagaagctcccatatcccccttccactggtctggcctcgttaatccgaagtgctaggcaaaggactatcatgttttaaggtgactaatttcttaaaataatagaatt

SEQ ID NO: 183226 - DNA, 122 bp, Homo sapiens
ttgtcggcctatttcactaggaaaatcagatccggccaccgtggctaggatgctcgtggccgggatgagccggagctgcagtgaaaggaagcccgttgagtgtcttcagctgatgttatcgg

SEQ ID NO: 183227 - DNA, 122 bp, Homo sapiens
ctgtggctacctggtgtttgtctcttgattccctccacctgcctcacaccctgcctccgtcgggattttccacctacaccattcaaaaggaacataggagagggcatgaaggggctaggctg

SEQ ID NO: 183228 - DNA, 122 bp, Homo sapiens
gtgcagaaagagaatgcggagccacggtgtcctcaggctaccggcaaggccgtggatctgcgtggctaacggggggcaagacaggggtcacggggctgagtgtggaagccctgcgtggaaat

SEQ ID NO: 183229 - DNA, 122 bp, Homo sapiens
cagccgggtgggtggtgccacccagtgtataggggagaaagctggggacacggcctccaacgacgcccaatgggttgaggccatgtagcccctctggttccagaacacaacacctaggccta

SEQ ID NO: 183230 - DNA, 122 bp, Homo sapiens
gataggatcctgccgtgtgggctggggtgggtacagcaagatgccagaatccctggagttcgcaaggacattatctttttggagacctcagggtctgatcacacttcatgactgttctctgg

SEQ ID NO: 183231 - DNA, 122 bp, Homo sapiens
gacagctcgctggaaacgaggcatgtggaaattgggcctcgctgaggcgcacataaggcccgggccgcgggtagaccgtgggcgctgaggccctgcgctgcccagcccccaagttcgcattg

SEQ ID NO: 183232 - DNA, 122 bp, Homo sapiens
ttcacaactggcaaggttaggagatactggttcctggcacaggcatggtcctgacctggccggctggccacctcatggttccctgaggagaaccacttgcctataggccctgagggggaaca

SEQ ID NO: 183233 - DNA, 122 bp, Homo sapiens
attccatagtctttttttttaaagcaaccacctgctatttttgaacaaccaagtgcattccgaaggttcttttgtccagtttgttgcttgaacatgtcattatggatggccctacccaggcc

SEQ ID NO: 183234 - DNA, 122 bp, Homo sapiens
cctctccacatggcagctcacaccttggaagcctgcttcatcaaagccaggagttaagagcgtgaaaacaaggtagaaattacagctttcataaccgcatcttggatgtggctacacatcac

SEQ ID NO: 183235 - DNA, 122 bp, Homo sapiens
gggacagagatggagaaagggggagctcctgggttgccacagatggtttcctacaggatgcgggaggatggggccttgaggtctaaagtccagcctgctctctgcttggcaagcctgttccc

SEQ ID NO: 183236 - DNA, 122 bp, Homo sapiens
acagcggatccccttttattatctttgtgcctacctggatgcacggttccagcatgttctcgtcacgaaccacaagcccaccagagggcgctggttccccgtctacctactgttctccatca

SEQ ID NO: 183237 - DNA, 122 bp, Homo sapiens
cctacaccaaaccctgtacatgccactcaaactcaagtgctcacctcccctgcccaactccgccaggagagaatctagtattcctgcaaactcctatctctggcccagcatctcttacaagg

SEQ ID NO: 183238 - DNA, 122 bp, Homo sapiens
gggagagggcaggaggccagtctctatgggggcggttcccgtaggatcaccaggtgggttcgcgtgcccagattgactgcttgtgggtggcatggcctcaggtggagaggcttgctgcggac

SEQ ID NO: 183239 - DNA, 122 bp, Homo sapiens
atccctgcacctcagtgtctcagtcctggaggatacgggctccccaccttccacggaccccggcactgcgggttgcacaagaacccagggcgtcggatacatttggcatttcagacaaaaca

SEQ ID NO: 183240 - DNA, 122 bp, Homo sapiens
cctccctccctcggacgcccgccagccgctctctccctctcaccctcacaccgggagcgacgcacaccccacccgcccctcagcttcgcaggcccggccccttaaagagacacacacgggcc

SEQ ID NO: 183241 - DNA, 122 bp, Homo sapiens
ccagaggcaggcggcgggcgcagagcggagaaagaggggcttctctccctagacgctgaacgatctaggatccgtccccgtcccccacctcgggacagaaaggacagtttgtctaggtttgg

SEQ ID NO: 183242 - DNA, 122 bp, Homo sapiens
ggagcaccagggtgtgcgtgctctcatgtgtcccgtgaatcagtgcgcccctgccccctgcggctcctcccgccaacaaatgtgctgtgttcccagagctgtgcccggccaggctcgcccac

SEQ ID NO: 183243 - DNA, 122 bp, Homo sapiens
gctgggttggaggcgggtggaggcgggggttcctcacttcagacagctcagcgcggggcccgaggcccagccccatgcccacagctcctccagaccctgggtgagccggaccccggtgagcg

SEQ ID NO: 183244 - DNA, 122 bp, Homo sapiens
gcggctttttgcccttcgccgctgccgcggcttttttcccgaccaggctttttgccccaccgccgacacagctttttgcaccctcgccgccatggctttttgccgccgcggctttttgcccg

SEQ ID NO: 183245 - DNA, 122 bp, Homo sapiens
tcatctaaacaaaaagccagaggtatctggcctccactgtccagtcctagtcttcataaacgtgaagtttgttagccacattaataagcaaagaaatgtaaattcaatggagacagaatttt

SEQ ID NO: 183246 - DNA, 122 bp, Homo sapiens
ctaacttcccagccttgtccttctctaattttcttggcttcctatggtttcagacctactcgactttaagaagatgccgtgaaatatggcttttagtcataggcatttctctggacagaaaa

SEQ ID NO: 183247 - DNA, 122 bp, Homo sapiens
gatcctcagtgatggggccaaccagtgacttgaataagacttggggaagacctcctggggcgacatttacgctgagagcttctaccgtgaaggagccgagcaggatggactcctgaccgcag

SEQ ID NO: 183248 - DNA, 122 bp, Homo sapiens
ctggaagggcggggcatggacagggacggtgggcaggtcaccagcgggacgcagggagcccggccactgtcacacggcggtgcgcgtgggtgtgccgggctggttcagccgcagggttttac

SEQ ID NO: 183249 - DNA, 122 bp, Homo sapiens
ggtcactagggaatcctctgtagataacagagccccttatatgacaccagtggcaccaatcgcagttgagcaaacagcttctcaaatatcccttgctccttctcacctcccagcccacacca

SEQ ID NO: 183250 - DNA, 122 bp, Homo sapiens
ttacattaccaagattcatggaaaggttttggctctgcccaccaaacatacatacatagccgaattctcagttcttgtttcaataccagggaagaggtgtccctcttttcacctaagatgga

SEQ ID NO: 183251 - DNA, 122 bp, Homo sapiens
aagattctcacagtaaaagattcacaagacagaggaggaaaacgcctaggtccaccgagtcgtggcagcaaaagacgccacggcagtgatgaggaccacgtgcctaagattcaatccctgct

SEQ ID NO: 183252 - DNA, 122 bp, Homo sapiens
ccacttatagctcctgtgccctacctttgtcatttcttatagttttgtgcttggtatttacgactctctctcttttttttttttttttgacagggtctcgttttgtcacccaggccagagtg

SEQ ID NO: 183253 - DNA, 122 bp, Homo sapiens
cctggcatacaggaaatttctagaatcaggaggaaaagatgttgaaacaagaaaacagatcgcagggttacaaaaaagagtgagtaaactaagcttgttgttttacatttgtgtgatgtaag

SEQ ID NO: 183254 - DNA, 122 bp, Homo sapiens
ggagttcggagggctgggggtggcagcaggaggctggggcgcagcgcagcgccaggggcgcgggacccagccaagctccccactctgcccccactgggacagagaggcgcaagagtccacca

SEQ ID NO: 183255 - DNA, 122 bp, Homo sapiens
taaccgctcaaaatggcggagagcgaagaacaaagccggtgcctggcaatgggccggacccgcgaattagcgcaaccaatcatcttcctggaaaggagtgtgggccttaaattctagcggcc

SEQ ID NO: 183256 - DNA, 122 bp, Homo sapiens
gtcccgcccttcgctgttagcgcttaggatctggtgccttttcacgtgggggcgggtgggcgggaggcgagtctggggtcttcgggccgggcctccgctctctggcagtttgcaccttgctc

SEQ ID NO: 183257 - DNA, 122 bp, Homo sapiens
ggccggcccagctttcccggaccaggccaccagctgcgggcccccaacctcgctcagactcgtgcagagcccaggcttgggagtggcttaaggttttttgccctcaacgtccttgccttcct

SEQ ID NO: 183258 - DNA, 122 bp, Homo sapiens
ggccgcctgcagcaggacctggatgttgctggccaagggttccatgtcggcgacagctggcggcgggccggcctagggtgccggccggagcaagcggctgcagcacttttgttacaaagtaa

SEQ ID NO: 183259 - DNA, 122 bp, Homo sapiens
gaggagggggtatattgtgggcacgaggaaagttgttgatctccccatgaccatgccagccgctgttgggcaggacttgagcttagagctatcagataatgaagtctccccttgagaatgta

SEQ ID NO: 183260 - DNA, 122 bp, Homo sapiens
ctagaggcacttggcacttgcctcctccacaaagaacgaagacagtgggtaatcacatatcgaatagagtgtctaagagacaacactagaattcagaggggaagtgacaggaaacctctgtg

SEQ ID NO: 183261 - DNA, 122 bp, Homo sapiens
ttcaacttggaacatcaagctccttcgttctgggaaatttccttaaattcaaggtaccatcgtcatgaaatttctgaactttaaagagaagatcctaaaatctttcagagagaaaaaaatga

SEQ ID NO: 183262 - DNA, 122 bp, Homo sapiens
ctgcgccatggccaggcctttttctctagtcaggaccgtccggatggggccttagggccccgccccgtctagcctggcccggcctgcgcgagccccgcaagctctgcaggctggctagcggg

SEQ ID NO: 183263 - DNA, 122 bp, Homo sapiens
catatggccccagtcccttcgtgattctggctctcccaactacttttcccataggaagctcggatcaatcagtgtccaggtccacctaatgtaaacctcaaactatactgaacctggacttt

SEQ ID NO: 183264 - DNA, 122 bp, Homo sapiens
cgcggagggacaggggctgggagacccccagggcagagcaggcggaacggggctggactccgtgagaactttccacccagcttcccttagggagcagtcctcccagggttcccatccttcag

SEQ ID NO: 183265 - DNA, 122 bp, Homo sapiens
aggctcagctcctagtcgctcccaaattactttgttggtgctcgaggcagccccatctcacgtctagtgctccggcctgggactgggtgtgggtgcccgcacgccgcggcagcctccggcgc

SEQ ID NO: 183266 - DNA, 122 bp, Homo sapiens
cctggggattaacccatccctcccaccagcacccatgtgcaccatgtgggggcctgaggacgggcctccctgtgtgctactaatgttcatgttgtctgggggcctcgggatttacccacact

SEQ ID NO: 183267 - DNA, 122 bp, Homo sapiens
aaagtgaccaaagagcacgagatgaaatctcccttacggccctgccctcaatgactagctcgtttactcaagttttcaagtagagatcctagcagtctcattttggtgtgtggctcgtatca

SEQ ID NO: 183268 - DNA, 122 bp, Homo sapiens
cgcttcccaccagacccctccttcaacattggggattacaatttgacatgagatttgggccggaacacaaatccaaactatatcgggtgttcacacatgtcaagagttgtttaagctcccca

SEQ ID NO: 183269 - DNA, 122 bp, Homo sapiens
aagtggcagcaggtaataaagctgttaaaggagcgaggctcttaccttgttctgagcacacggatccagtgcaatcccaggcagtgcgagtgaattgcaggctgcagctgtgtcaggtagag

SEQ ID NO: 183270 - DNA, 122 bp, Homo sapiens
acggcgccccactccccgcggcgttgtgcaaggcagcggctactgataactggggtttcccgcctggtcctccctgctgccctgcaaagtgaaactccaaagccacacagagcaatggtgca

SEQ ID NO: 183271 - DNA, 122 bp, Homo sapiens
cagcgccagggggcgctcagcgctagagctcactgaccctgggagccctatggagagactcgtgtcatcctggcaaccctgtcctacctgattggatacctgctgccgttcgttggatccat

SEQ ID NO: 183272 - DNA, 122 bp, Homo sapiens
gacggtgacttcagtgccagatgagctgacacactggtgcctgtgtgtcagctcgtgtgtcggatgtgcacaaagtggccacagagagatgctgacagtcaccgggcctccagggagggggc

SEQ ID NO: 183273 - DNA, 122 bp, Homo sapiens
gccgagtggtgctctcgaagtgtgagctgacgaagctccctctgttgcatcagagacatgcgcaagggccttgtcttagggtcctcaggagagtaactaagaaactctacccacactgtcat

SEQ ID NO: 183274 - DNA, 122 bp, Homo sapiens
gctgtgcatctgtgaatgggagattgttcttagagattggtcatagttgtccacctgcctcggaaactgcaggtacaaatgcagcagcaaagtatttacattcttacttcagggctgatctc

SEQ ID NO: 183275 - DNA, 122 bp, Homo sapiens
ccaggctggtgagcgcccctggggcctgtacctgggctcagcttgcagtgctccgggagacgttccaggccgtgctccagcagcacggggataattcggtccaggtcgggaacctcgctggg

SEQ ID NO: 183276 - DNA, 122 bp, Homo sapiens
tagatagagcattctcccaagtaagatgactgaagccagagctgatggggctaacaatgacgttcagtcaacgcagtgcatagaccagctttggaggccagggcatttctatagaaggctcc

SEQ ID NO: 183277 - DNA, 122 bp, Homo sapiens
ccccggaacgggggctgggagtggagactcgctgtgtgcctgccataattccgtctgcgtcgaggaagggggcggcttgggaagcagctgggcacctgtgccacagccgccacagactcagc

SEQ ID NO: 183278 - DNA, 122 bp, Homo sapiens
acaaagacccatgttccaagtaagtttgtattcacatgatctgagtagacattgtctcttcgtgggatacttttcagtccatgacagttactaaaggacattttaggatagtcttcatatga

SEQ ID NO: 183279 - DNA, 122 bp, Homo sapiens
tcacaccagacggtcccacatggagggaaccaaccggccagaccaaccaaccctgccagacgcctgggtcttcaggagcagaaagaccagctgctgatctgctcacatccctcctgctgagc

SEQ ID NO: 183280 - DNA, 122 bp, Homo sapiens
gagagggaggggaaataccggattgacgctatgtggttcaaccaatgcaaaagataacaccgccttaaaaagtctactacaggaacatgggagggtcacaccctcgaataatgacgcatacc

SEQ ID NO: 183281 - DNA, 122 bp, Homo sapiens
gctcagaatttcagtacattatctgcccgcgggacacacctcagaggaaaggggatgaagcgtggtccatgaccatggcaccccctggtcttatcaccacctgcacctcccaggggctgcca

SEQ ID NO: 183282 - DNA, 122 bp, Homo sapiens
cacattataacaactgccccgcaaaatggttttcactgtgttctttcttggcactccatacgccatggtgagttattacggtatgatttcgttacataggtgcctgatggaatgtcacagat

SEQ ID NO: 183283 - DNA, 122 bp, Homo sapiens
gccccggtctacagtggggtccatccctgagccaggaccacagggtccaggagatgggctcgctccctccgcccccggtgggcagcacgcctggctttacctcccagcattctcttgggtgg

SEQ ID NO: 183284 - DNA, 122 bp, Homo sapiens
atttctgaggccagttctgttctgacacatgcagctgggagccactggtttaggaattcacgtgggcatgggactgtgcttattcagaaagggctcccagtcacatcctgtattctcctaaa

SEQ ID NO: 183285 - DNA, 122 bp, Homo sapiens
tggggtggctctctccgccccatcccggccccgcctccgcactcgggcgggggaaagttgcgggtaccgctttaaaaatcccagcctgggcaaaactttgatgataaatcaagcggcagatc

SEQ ID NO: 183286 - DNA, 122 bp, Homo sapiens
agggaagcttggttaaaaacagttatggcagtgggagtcgaagcgagggtctgaagttcacgactactagaaggggaggggagtggaaaggctctcagtgaaaaaggtacagtaaataaatg

SEQ ID NO: 183287 - DNA, 122 bp, Homo sapiens
aggttatcacttagggtggcacttatcccagcagcagtcccaggagcaggagacctggatcgggggaggatccatcctccctccctccctccctcccttccttccttccttccatccatcca

SEQ ID NO: 183288 - DNA, 122 bp, Homo sapiens
tttttgttttgagacagagtcttactctgtcttcccggctggaatgcagtgatgtgatctcggctcactgcaccctctgcctccggggttcaagagattctcgtgcctcaacctcccaagtc

SEQ ID NO: 183289 - DNA, 122 bp, Homo sapiens
cctgtgtactcccaggaaagtcccaaatgacatgctcagttgccagaccccatagactgacgtggcttgtgaggggcttgccatagcctgcaatgtcaaatgtctaatgagacattccagag

SEQ ID NO: 183290 - DNA, 122 bp, Homo sapiens
ctaggaattgatgccagcgcccagtatggccccgcgtggggaatcgagcgccccatccctcggtgagggcttactctgagcctgagtctgtggcaggcccccccatagctactgtctgcctt

SEQ ID NO: 183291 - DNA, 122 bp, Homo sapiens
tatttcagtttcagaagcatgggtagtagatgctcaagaaatgtttattgaatgaagaaacgaatgagaaatttgataatactaatggaattcttgtatttaggtaactccttctagaaatt

SEQ ID NO: 183292 - DNA, 122 bp, Homo sapiens
tcacctcagcaccgcctttgccagagttgacgaggccttggggcgcccgggaggcctggccgtgttggccgcctttctggaggtaccagatcctggacaccccctactccccgctttcccat

SEQ ID NO: 183293 - DNA, 122 bp, Homo sapiens
ttacctggggagaagctgggccgagttgtgcatataatccaagccagggagccctctttacgtgattcaaacccagaagagattgagattgattttgaaacactcaagccatccacacttag

SEQ ID NO: 183294 - DNA, 122 bp, Homo sapiens
ctctcgcagcctgttgcaggctactgaaggaaagacaccgtccctggcatagaatgggttcggtaactatcaacacagcaagcacaggaggtgattcctgtacgattctgtgttgagtggtg

SEQ ID NO: 183295 - DNA, 122 bp, Homo sapiens
tacctcagtgcagatacgtggctggctttgttgcaggattttccttagtttagctaaagacgggatcttgtccatcccatggccatgaaaatttaggctcacagacgctttaaagggtgagt

SEQ ID NO: 183296 - DNA, 122 bp, Homo sapiens
ccttcagtgcctgcaccaccgtgctggtggctgtgcacctctttgcactcatggtctccacgtgtctgctgccccacattgaagctgtgagcaacatccacaacctcaactctgtccaccag

SEQ ID NO: 183297 - DNA, 122 bp, Homo sapiens
tttatctataaatcctcggggcatagctggactcagcccagaatagatgctcaatataaacgtgagtgagtgagagacccaaattggtgttgatcttgcactggtgttgcaggttgtctgat

SEQ ID NO: 183298 - DNA, 122 bp, Homo sapiens
ttggacatgcaaagccactccaaggaagcctcttaaacgcccaccttgttgcaggtgggacgcttatgcccagctgctccagctggaaaagacaggactgcaagtgggttcaggagctcagg

SEQ ID NO: 183299 - DNA, 122 bp, Homo sapiens
cgaatctgggggcggggcgagatgagggtagtccgaggactgagcgagcccgggcgggcccgtaggcgaggcgagatgaggctggccagggggcggggcgggcccgggcgggaggggcgggg

SEQ ID NO: 183300 - DNA, 122 bp, Homo sapiens
aaggggtgacagacggcacctggaagatcaggtaactcccacccgaatactgcgcttttccgacgggcttaaaaaacggcgcaccaggagattgtgtaccccacctggctcggagggtccta

SEQ ID NO: 183301 - DNA, 122 bp, Homo sapiens
aacaggtgtacactcatgtccacagcagcataattcacaacagccaaaaggtggaaacaacgcaaatgtccattgacagatgaatggataatcaaaatgtgatatatgcacacaacagaata

SEQ ID NO: 183302 - DNA, 122 bp, Homo sapiens
gactggtagcggctcccaacaggggaacgtccctctgggggtggcctttatccatctctgcggggcctgtcctagcttccctcctggctcggccagcctcccggctggtctcttcgctctct

SEQ ID NO: 183303 - DNA, 122 bp, Homo sapiens
gcgtgcttggtgacagggtcagtagcacagagctgggcacagagaagtcactcacacagacggcaagggtggaaaagtgtatagagggttgaggagcttcactctgtagtgggagggtatga

SEQ ID NO: 183304 - DNA, 122 bp, Homo sapiens
tttctcaacttagagcaaagcccttcaaacgaggagggagtgctaccagttcatgcttcacgagtcacaggggagagagtccaggtgctgaagtaaaccctatcgtttcagtgacgacactc

SEQ ID NO: 183305 - DNA, 122 bp, Homo sapiens
ccggcatcggggagccctcagatcccagtgagcacttcaagtgtgaggcctggaccatgccggagcccggtgagtcgctgcccccaggacacccgcgttccagcgcacaggctggctgggaa

SEQ ID NO: 183306 - DNA, 122 bp, Homo sapiens
agtgcaacaattgaagagcttgaataatggttaaccaggatgaagtcacatccgaatatgcgtcatctcaccacctcctttgctgcagtccgaaaaccccactgagtctttgttctttttcc

SEQ ID NO: 183307 - DNA, 122 bp, Homo sapiens
ccggactgtaatcacgtccactgggaactggcgcagtagtggaggggacgcgatcaggcccgtggctgcgcccagagcatgataagccagggacctcgcggcgcaggcggagggagggagag

SEQ ID NO: 183308 - DNA, 122 bp, Homo sapiens
gattggtgatcaagtaaatgcaggcaactgaggggtcaggccaggggcttggctgcatcccgcagccagagatacatgagactcctactaatgtggaagctttattcatatggatccatccc

SEQ ID NO: 183309 - DNA, 122 bp, Homo sapiens
ccaaaatgcaatcttatctgacctaccctcccttgtccactgttccccaggtttttcacacggttcagctgtccctgagatctagagccccagtcattttccccaaggcctccagaaacaaa

SEQ ID NO: 183310 - DNA, 122 bp, Homo sapiens
ggtgcacacccgcgagaagccgcacgcctgcaagtggtgcgagcgcaggttcacgcagtccggggacctgtacagacacattcgcaagttccactgtgagttggtgaactccttgtcggtca

SEQ ID NO: 183311 - DNA, 122 bp, Homo sapiens
acagggggaagataagtttgcttcagattctaaaagttctaagaatacgaaggcctcagccgcccgtcgccgggcgacagcccgaggctctcgttttctcccacagccccgcactccgcctt

SEQ ID NO: 183312 - DNA, 122 bp, Homo sapiens
gttctgcctgcaagaagggaacgcgcatcgcctttcagtagatcacaccgatcgtttgcacgtttgcattctcaatttctgcactatatagggcaactcagacatgaaaacaatctttgtaa

SEQ ID NO: 183313 - DNA, 122 bp, Homo sapiens
ggtaacagagtgagactctgtctcaaaaaaaaaaaaaaaagtctcagcctatgagcaagacgcatctcgggttagtgctaactttgtagcattctgtggtatcattaagcccagataaagta

SEQ ID NO: 183314 - DNA, 122 bp, Homo sapiens
ggcggcgtggcgcagccctcgggcttcaagcaccccttcgccatcgagaacatcatcgcgcgggaatacaagatgcctggggggctggccttctccgccatgcagccggtgcccgctgccta

SEQ ID NO: 183315 - DNA, 122 bp, Homo sapiens
gaaatgtagtccggagcctgggccgtctttaactgccccggacaccgcggtcaccattaacggaccctgcatttgagccccatcccctcgctgggcaaagaccatcgcccacacaccgctca

SEQ ID NO: 183316 - DNA, 122 bp, Homo sapiens
ccgcgcctctgaaggggcttggaaccagtccgccgctgcacatccttcttggcttcctggcgccccctatcgggggtgagcgaagcccccactactaaatggcctctctccactaccccgac

SEQ ID NO: 183317 - DNA, 122 bp, Homo sapiens
gcagagctgataaaccctgcactcagggagacactgaccctcgcaggagggaagacagagcggagctggacacaggcggaggctgaagaaacaagcaaatcactggacgtgcagagaggctg

SEQ ID NO: 183318 - DNA, 122 bp, Homo sapiens
agacgcccaacaaccccacacaatgacacttatgtggggaattgtgtcctgagacccaaacgactgaccccccaatgtgctgtgaataagcagtgaccacaaccagtaccacctatgactga

SEQ ID NO: 183319 - DNA, 122 bp, Homo sapiens
gctgagagtgattcctggctagctgttcacaagaaaacagagacttcagaggtacaactgcgggaactgattttgccaataacctgaatgaacttggaagtaaattcttcaccacagcctcc

SEQ ID NO: 183320 - DNA, 122 bp, Homo sapiens
gtagttaccatggctcccagtgctgtgcgtctgacgtcattctgcggcgctggctgatggcgcaatcagttgcggcgtcctgtgagcgcggggatgctgggaggagggtgaaatttagccat

SEQ ID NO: 183321 - DNA, 122 bp, Homo sapiens
ctgcgccttccggccacttctcggacccctccttcggacttggcgaccccgattttgccccgctacctcgggttccactttctgccgccaggccctcttgggacgcgccctgacacaccctc

SEQ ID NO: 183322 - DNA, 122 bp, Homo sapiens
tcagatgtggctgattggagtaaatgagcacaccccgcacgtggatgcagcagtggctgacggcagctccctccccctctccctatctcggtctgtctctcctgcgtccacacacacacatg

SEQ ID NO: 183323 - DNA, 122 bp, Homo sapiens
ttccgctggccccgccttactctgttgcaccgcccagtcgcccggctttccactgagggacgccccctgctctggactgcttagcctactccagctggccccacctcacctcatcggccccg

SEQ ID NO: 183324 - DNA, 122 bp, Homo sapiens
aggcgtcacggtggcaccgaggcggtgaggggtcctcttaaggagtgggagggacaggggcgatttggcagttccagacaccctgaaaggaactctgcggccccaaattcgtttgagagatg

SEQ ID NO: 183325 - DNA, 122 bp, Homo sapiens
gagcctcggcctccccactgctagtgatgagcagaggatggcacagaggtgacgtcacctcgacctacattgcgctgactggagccagtcctgtggcccccgcctgcagcgagggggtgaaa

SEQ ID NO: 183326 - DNA, 122 bp, Homo sapiens
ctcgcgcgcgttctaaaatgaggacaaagcccgcccaggtctagagcgcgcgcgccgtggcggccaatgggacgctgaagctaggttgagtgacggacttgagcagccaatgagtgtgcagt

SEQ ID NO: 183327 - DNA, 122 bp, Homo sapiens
ttcgtctggatttgggagggcagcgagaattgggcacctactgaatgcgtggagggcagacggcagaggaagacgactgacgcttggctccatcttgccgagacttaggggcggtggactgt

SEQ ID NO: 183328 - DNA, 122 bp, Homo sapiens
acatgtttaaagtaaagcattaccacttgaaagagaagctttatatatctggaaaatacacggaggtgaaatgttttattctgtaaaggagggatcagcaagcttttctgtaaaggccagat

SEQ ID NO: 183329 - DNA, 122 bp, Homo sapiens
ccctacccgcgccaacctccacccggcgccttgcgttcaaattagccgggcgggccggaccgtgcttcctattggtcagcgtccgtatcgctgattggctgtttcctaagtaacaaagtgtt

SEQ ID NO: 183330 - DNA, 122 bp, Homo sapiens
ccaggacacacttacagaagagacgaggcctggttattcttccaacacactcccctcagccgcgcacagcgttactggctatgtggccagtgaccagatttgcagacctgtttccagacctc

SEQ ID NO: 183331 - DNA, 122 bp, Homo sapiens
tgctaagtccctcactgcccggggcccgcagggccggcctgctgctccgagtgcagggcccgccaaacccacgcccacccggaactccagctggcctgcaagcgcctcacgcagccccagtt

SEQ ID NO: 183332 - DNA, 122 bp, Homo sapiens
cctggcggcggcttccaagctaaggaacggtttggggcagtgtcgttcccggaggtcggccgccgttacccgctcaccagctacgcggcgcgtcaggtccgcggaggcgcgggctcggggcg

SEQ ID NO: 183333 - DNA, 122 bp, Homo sapiens
ttttaagcacccacctatccaagctcccaactctggcgactagatacaggagactcccaacggcaaggcttcccagcaccaggagcttctgtctcagccacgcctgctgtttgaatagcatg

SEQ ID NO: 183334 - DNA, 122 bp, Homo sapiens
ggggcgagttccccaggctgcgagagccagcggcttcagatctgccaaggcactgaggggcgcgccggccgggggacgcgctgaggtagtttcggggtgtcggggccgcgccgcttcccctc

SEQ ID NO: 183335 - DNA, 122 bp, Homo sapiens
ggtcttctctaccaagaacaattataaaataaatagtagtaataatagtgacagtaataacgacagtagatgaaaacaattaacttcccttaaatgtgctgaaagtgctttatttgttttgt

SEQ ID NO: 183336 - DNA, 122 bp, Homo sapiens
cctgggcgcccgccgcttccagccgcctgaggcgcccgcctcgtggcccggcgtgcgcaacgccaccaccctgccgcccgcctgcccgcagaacctgcacggggcgctgcccgccatcatgc

SEQ ID NO: 183337 - DNA, 122 bp, Homo sapiens
gccctaaggaacggtatgtacacctgtaattcattgaagcctagctgtttacctgtagctcggagccacaaactcatttctttaagcagagaactggtccaggaaaatatatcttctaggct

SEQ ID NO: 183338 - DNA, 122 bp, Homo sapiens
agccccggcgcattcacttaggtgcgggagccctgaggttcagcctgactttcccgactccgccgggcgcttggtgggctcctgggcttctgggctcacccttacacctgtgtactaaaggg

SEQ ID NO: 183339 - DNA, 122 bp, Homo sapiens
cggccgcgcccccggcagcccagggcgcgcttccaccacggtaccggtggattcgccgtgcgcagccggaagatggcgcagacgcacaaagcacaccgatgctgcgccatgatagggccggc

SEQ ID NO: 183340 - DNA, 122 bp, Homo sapiens
tctgacgacaatggcagtaagtcctgctttgttgttcttggagcctaccagggtttgggtcggggtaaaaacatgattttttaatgtaatgctttaaattgctgaggccctttgcatgtcag

SEQ ID NO: 183341 - DNA, 122 bp, Homo sapiens
caaggaggatgccttctccgggacagattggatgttggagaaaatggatttgaaggagttcgtctttgatgccctgttgggtatagataacctggaaaccatgccagatgaacttttgacca

SEQ ID NO: 183342 - DNA, 122 bp, Homo sapiens
aatgggaatttcgtgtctagcagtgcaacgaacatcacccgcagctccctgggaggaccgcgagcttcacgtgtgggagctgcgccgccccctggtacccagagacacacggagcctgggct

SEQ ID NO: 183343 - DNA, 122 bp, Homo sapiens
atccctgtgggtgaaaaacatgccggaagtgaaacagaaagactcagcttgccccgtgttcgtggtctgtcaacttctctagccagtgcctggatccacagctcactgctgccggttgccct

SEQ ID NO: 183344 - DNA, 122 bp, Homo sapiens
tttctagaagcgaatggattttattctcccaggtgtaaaggctacctcctgcttcacacccgggtaacataaaagacagcgctgggaccgaaactcgggtctcctgggtcctggttggctgg

SEQ ID NO: 183345 - DNA, 122 bp, Homo sapiens
tctacaacagtttcttcctctgcagtttttgtacttgtctcttcctttagacactgaacccgctaagagcagggattaaacttcattcattttttacattgccaatgcctgctataaagaat

SEQ ID NO: 183346 - DNA, 122 bp, Homo sapiens
attttaggatgattgtgagaacaaaatgagttagtacctgcaaagcatttagaacagttccggcaatgctgtattcatgccaatgttttgctattattattgtcattattaccatttttata

SEQ ID NO: 183347 - DNA, 122 bp, Homo sapiens
tgagaaacctggggaccgcccagacactgtggacggaaggccccacacccagaagcaggacgtggctcttctcctccctggccaccttccgccgtgcccctccctgtcgcactggaccgagc

SEQ ID NO: 183348 - DNA, 122 bp, Homo sapiens
gggaagggctgggaacctgggtgccactagcgctattaacaggaatggggcagttgagggcggggaacggtgtctcattcgcgtgcgccggggttcccgggatgagtggccgcgaagtggag

SEQ ID NO: 183349 - DNA, 122 bp, Homo sapiens
tcgcgtggcgggctgctctcggaaactcgcgcggcagtgggctgctctcacagactcgcgcgggggtgggctgctctcgtctgtaaattttccacattgagagcaccaactgctcagcttca

SEQ ID NO: 183350 - DNA, 122 bp, Homo sapiens
cattgacggaacggatacgaccgcagattgcgggagctgtcctctcaatcagcccggcagcggcggcccacaatttacgcgtgtgcaaccctaaccccggcccaagcttgacctacaatttg

SEQ ID NO: 183351 - DNA, 122 bp, Homo sapiens
actgacctgaatttgttcatgactattttcttctgtagcctgagacagctgccttgtgtgcgactgagatgcacagctgccttgtgtgcgactgagatgcaggatttcctcacgcctcccct

SEQ ID NO: 183352 - DNA, 122 bp, Homo sapiens
cctgaccatgattgttctgtccacaggcctcttcttttcttagttccgctgtcttctaggcgtggggaccggggctgtaggggggcgggctgtgcagtaggaggaaggtttcatccaacacc

SEQ ID NO: 183353 - DNA, 122 bp, Homo sapiens
ttatcatgtggttttaaatttgcctctcaatatacagaggtactgtctttactccagtcccggataaagaccttctaggtatgaatgatctttgtctccatatctttgcctaccggagggag

SEQ ID NO: 183354 - DNA, 122 bp, Homo sapiens
cctggtcgcaaatgcggatgccttcctggagccgcgccagcgccagaaatagcccaggctcggagtcccacttagaagagcacagccccggctcaggggagcttaaaaagttctctacattt

SEQ ID NO: 183355 - DNA, 122 bp, Homo sapiens
aaccgtcttcaccgtcttcatgctagctgcctctggcatctgcatcatcctcaatgtggccgaggtggtgtacctcatcatccgggcctgtgcccgccgagcccagcgccgctccaatccac

SEQ ID NO: 183356 - DNA, 122 bp, Homo sapiens
ctctgccctgcttctaggctagaggatgatattattatcaaaggctacaggattaacctccgaatctaggcaatttctgcttgactcacataggaagaaccagtgttccatgtaacaaaatc

SEQ ID NO: 183357 - DNA, 122 bp, Homo sapiens
tattatatctaggtgtggagtggacagcaagacaacttaagagttaaaatctaagcccagcgtggctctccagctggtctaccactgacttcggttatctaacatctggcctctgcccttac

SEQ ID NO: 183358 - DNA, 122 bp, Homo sapiens
gccatgttgtaaaactcaaacttgccaaaaagacatgggttagggtttcttcccctccctcgggatgaagctagttagctgacacagatggtcacctccattaccaagtagagccaggatga

SEQ ID NO: 183359 - DNA, 122 bp, Homo sapiens
cctccggcttccagggccttccagaagttccagtctcttgggtttggttgtgcattcctgcgaccttcaccgcaggcctcctcctccacccactagtgcagagcctgggggctgccggtggg

SEQ ID NO: 183360 - DNA, 122 bp, Homo sapiens
agcagagatgaggaaaaggagtggaagaagtcctccactctgatagtgttactggaacaacgagacaaaagcggtgtgctccttccacctgtttgctccgtgtccctgtcggcgccccctct

SEQ ID NO: 183361 - DNA, 122 bp, Homo sapiens
aggctgaggcaggagaatcgcttgaacccgagaggcggaggttgcagtgagccgagattgcgccactgcactgcagcatggctgacagagcgagactcattctcaaaaaaaaataaataggt

SEQ ID NO: 183362 - DNA, 122 bp, Homo sapiens
tgcccccagaaaagtcacgactgaaactcgctgcgtcatgaccctcccaccttcttccgccgctttttaattacgccattctccccgagcgccgattggacagctcctgcacagccgcgcga

SEQ ID NO: 183363 - DNA, 122 bp, Homo sapiens
acagaaaccttcagcaagttggctttggctatgggccatcagtttctccccttagcttcccgtagtgtcagggaaatactaccaggcacagaggagccacctcatctttttggattgttggg

SEQ ID NO: 183364 - DNA, 122 bp, Homo sapiens
gttagctgtagtgagagtgggcttgttatatacaaaagtgagttcggactcctcttgttccgttgctctcttgcccttcaacctcctgccatgggtgatggagcaagaaaacccttgacaga

SEQ ID NO: 183365 - DNA, 122 bp, Homo sapiens
acagggtgagcctttcagaaaacgtgtacccggggaccacggtgctacaggtgactgccacggaccaggatgagggtgtcaatgccgagattactttctctttcagtgaagctagccagatc

SEQ ID NO: 183366 - DNA, 122 bp, Homo sapiens
ccctttcttagcaaccatcgcccgctcccgcccccgctccctcggccgcggccgcgcacgcgcgcccctcccggcgcccggccccgcccaccccgtcacccgtaacaaccacaagtgccgtc

SEQ ID NO: 183367 - DNA, 122 bp, Homo sapiens
ggaagcggggtgggagtatccgcctctcctgggggaatccctgtccatcaagggttgctccgccccccccccctttggaggcgcgagattctggaaaaacgccgggggagggggaaggggag

SEQ ID NO: 183368 - DNA, 122 bp, Homo sapiens
agcgacctttttgcagggactggggatgagcagccaccccgtcacaagcgagcccagccacggagcccccgtagtggggttctcggagcccctctggtctggtctgtttccctttagggagg

SEQ ID NO: 183369 - DNA, 122 bp, Homo sapiens
gtagaagcgagcgccggctcgagcaaaagcggagggccagaacagtggggatggcggagccgcgcagagtagcgttcattagcttgtcaccggtgcggcggcgcgaggccgagtacccgggg

SEQ ID NO: 183370 - DNA, 122 bp, Homo sapiens
tagttgataaatggagctgtcagtctagaagcccctgggcccagcgtgcttctgcagagccgggtagtttcagagtcggcgctctctgagattccagctggtccacccggcggggctcctgt

SEQ ID NO: 183371 - DNA, 122 bp, Homo sapiens
tggacagccggccccgggaggggtgaatactctgtccactgtgcccccaggccagagcctcgcatggtgatgaatagagtcgtactgacgtggaaaatcagatactcagcacctttccttca

SEQ ID NO: 183372 - DNA, 122 bp, Homo sapiens
tgttgggattacaggcatgagccaccgctcccagcttatcttaaccatttttaagtagaccgttcagtggtactaactacattcccagtgtaggtttcccatcaccatcatccatgtctaga

SEQ ID NO: 183373 - DNA, 122 bp, Homo sapiens
gccggatgtggtagtgcgcacctgcaatcctagcaatttgggaggcggaggcgggtgaatcgcttgaggctcggagttcgtgaccggcctggccaacatggtgaaaccctatcactacgaaa

SEQ ID NO: 183374 - DNA, 122 bp, Homo sapiens
accgtgcgcaggagctcacacggcacgcctgcggccaggggcaatcgggttctcggttcccggagtcccagttcccggtttccagtttccttatcgacgcgattgttccgtcggggtcttcc

SEQ ID NO: 183375 - DNA, 122 bp, Homo sapiens
cagaattggcaatgactaaatcaattcattcaaacaaaaattcatcatgtgcctactgtgcgcataatttgtggaatcaaagtctcttgtttccaggggctttacagtgtaataagtgctat

SEQ ID NO: 183376 - DNA, 122 bp, Homo sapiens
cacacacacgctccgaggcgttcttttctgcctctaccagcctttttatgtgggaatgttcgttttctaagtgtggcgagaatcctactaacttggacttcccatagcatgctggcctgagc

SEQ ID NO: 183377 - DNA, 122 bp, Homo sapiens
ctcggttgctcccaatcagaatctgctttgtgctccacggcctccaagcactttcatgagcgttctgctcctacgtggccaggtcctaccttccctgacggctctggccaggccagctcggt

SEQ ID NO: 183378 - DNA, 122 bp, Homo sapiens
cctaccccttcccctttgtccttaatggttttttattattgtcaggagttgcccaagtctcgaggtttagccaaccgtgacagtcatctttcccaccgttcccgggctgtgacccattctcg

SEQ ID NO: 183379 - DNA, 122 bp, Homo sapiens
gacagagaccccagaggctctgtctgaaggaagctgcacccacagactccatccaggcagcgcgggcgcggtcctgtcgcctacctttctcggaagccatctgcccatgtgaatctatgtga

SEQ ID NO: 183380 - DNA, 122 bp, Homo sapiens
aggtcttgtgtacacacgaatgatgctattgatcctcccactgtgggccccaagcactgccgttctttgtaagtagctgggggttgcgtttacactgctctcctcacacaccaccacctaat

SEQ ID NO: 183381 - DNA, 122 bp, Homo sapiens
gacctcgtgatccaccggcctcggcctcccacagtgctggatgacaggcgtgagcccccgcgcccggtccgtgcatttacagcacaagttcacgcttatctacaaagcatccacctctcacc

SEQ ID NO: 183382 - DNA, 122 bp, Homo sapiens
ccccggggagctgggctgggcccacacctgtgacggtgacagtgaaggaggccgactcatcgtcaatttcacacaagtactcgccggagtcctcgagctggacagcgggcagcaccaggcgg

SEQ ID NO: 183383 - DNA, 122 bp, Homo sapiens
ggggcgggctgctgtggggatggggccgctgtgggggcggggctgccgtgggggcggggtcgctgtgggggcggggccttgtgagccagtgcttggacttccacgtcataaacggaagggcg

SEQ ID NO: 183384 - DNA, 122 bp, Homo sapiens
gctgcctggcccgggacaagcattggccctttctgggcctcctcaggaatctccaacctccgaggcgattctagtttaagcctgatgaggcagacgtgcatccgggcggatgattagccggt

SEQ ID NO: 183385 - DNA, 122 bp, Homo sapiens
tgtaagatatggttctttctgaagcaccctcagaaaattgtcagcagcttcacagtataacgtgcagagatgggtagttggagctacctggaaatgcggaattaacagaataaagaagtatt

SEQ ID NO: 183386 - DNA, 122 bp, Homo sapiens
gggctggctcagctggctaaaggacttgccatcctgtgagattcattcagcttctttgtccgctgttctccaagggccgcaatgtagtgaaatgctctggcctaggaaccttacaaggtagg

SEQ ID NO: 183387 - DNA, 122 bp, Homo sapiens
gcggcgcctgcctagtctactgcaagaacggccgcagccgctcggccgccgtctgcaccgcgtacctcatgcggcaccgcggcctcagcctggcgaaggccttccaggtgggcgggccttta

SEQ ID NO: 183388 - DNA, 122 bp, Homo sapiens
ttctccttcctgcagccgggtagggggcagccaggtttggagcagggttctaggattacacggcaaatccccaacttcagcaccgcggacagcatcacctcccgcccagggagaggcgcgcg

SEQ ID NO: 183389 - DNA, 122 bp, Homo sapiens
ggctcttccatctcctgattgggtctggaccgcaagggggcggggtcttgaggggttctgcgggccggcattgggagccgcagaaggagggcgtggtaatatgaagtcagttccggttggtg

SEQ ID NO: 183390 - DNA, 122 bp, Homo sapiens
cagagagcgataaaggaaaagcatggtcgtgctctaatcattacagtctaagggacgacacgtcgagacggcgcgcgcctctgcgtgcgtggagatggcacaaaggccgcgccgcccccggc

SEQ ID NO: 183391 - DNA, 122 bp, Homo sapiens
tggcatgatcttggttcattgcgactaccacttcctgggttcataggattctcagcctcccgagtagttgggattacgggtgtctgccaccatgcccactgaattgctttgtgtttttttag

SEQ ID NO: 183392 - DNA, 122 bp, Homo sapiens
tgcttaattttgttattaactcttgcttctgcctttctctgcagcacgtccatttctttccgtctttttcccacctctgtatccacctagcattcccctaagtgatagacacagcagtttgg

SEQ ID NO: 183393 - DNA, 122 bp, Homo sapiens
aaattccttaatggaccattagtgacaggatcgatcctagttactttagtagcgatacatcgcaaaggcacatctgctgtgtttaccagtgccagaaacaccattcaaaagttgagaggtta

SEQ ID NO: 183394 - DNA, 122 bp, Homo sapiens
ccgtggtaacattttaatccactcactgccagctgctgccacttctcttgctactgcacacggaaagccctcttccacctctctccatttccccaattctataatacctccatttagtttca

SEQ ID NO: 183395 - DNA, 122 bp, Homo sapiens
gggcgcgcccgcctccagcctggctctggacccggggccccgccacctcccagcagcgggcgcagagagccttctggttacccccgaagctgaggattgcagtgttctagcaatggatgaaa

SEQ ID NO: 183396 - DNA, 122 bp, Homo sapiens
ggccgggcgcgtctgccgggcaccagagcaggcgcagcagcagcagcagcagcaggctggcgagcagggcgagcagtgcgccccccggccgcatcctgagccacaggcgccgccgccaccgc

SEQ ID NO: 183397 - DNA, 122 bp, Homo sapiens
agggtcgaggccatgaggctgggggccatcataaggccatgaggctgggggatcgaggctcgaccgtgagacggccatgaggctggggaggtgccacctggcggctgcggagacggttcccg

SEQ ID NO: 183398 - DNA, 122 bp, Homo sapiens
tttcctctttgtaacttgcttaactaaagaggagacatgcaggccaaactccacagtgcccgcaggcagcaggctattgcttgccgctgcaacttgtgcgtggtttctcttttacttccctc

SEQ ID NO: 183399 - DNA, 122 bp, Homo sapiens
cgccgccgccgcggatttcctggcaaaaagcaaactccggccaagacttcacttctcaaccgcccctgctgccttcccgggggcagcgccaaggccgagcggcccaacccgcacccgggcca

SEQ ID NO: 183400 - DNA, 122 bp, Homo sapiens
cggcgtaaggctgcaccggcctgcgggacggccgcgcgctcgcagcgcaggccgcgttcgcgaatcgcgccctcccagttcgcgcggtggaaaccagcatctgaaaggagagggacgcgcga

SEQ ID NO: 183401 - DNA, 122 bp, Homo sapiens
tcaggaccaaatcccaagtcagggccacagggggtcccgtcaccttttccgattaggcagcggggtgtgaggtgaatgtgcgtggcctgtggcttttatgctgtttcgatgttaggtgtaat

SEQ ID NO: 183402 - DNA, 122 bp, Homo sapiens
ttagggaagcgctgcctcgcccagtccctcgcaccgcccgctggcggagggagaggaaagcggaccttcaaaccagaccgacctgggacatagtagtctctgaaccttagtttgctactccg

SEQ ID NO: 183403 - DNA, 122 bp, Homo sapiens
gaactgaccctgccccaacccaccccatccccatttcccccccagcaaggcttcctgagccgacggctaaaaagctccatcaaacgaacgaagtcacaacccaaacttgaccggaccagcag

SEQ ID NO: 183404 - DNA, 122 bp, Homo sapiens
gcccgtgcaccctgcgccctgtcggctcgacaacccgcagaccccccgaaagttacagcgcgcacacacacctgcaggccccccttggtcgctcctgccagacccccagcgtggcggggcac

SEQ ID NO: 183405 - DNA, 122 bp, Homo sapiens
cctgctttcctggcccccagagtaggtccccagtatcgggaattgctccctccgggcagccgcagaccccctgccgccctccagcgtgcccctagcccaaaaccacggcggatggcagcgga

SEQ ID NO: 183406 - DNA, 122 bp, Homo sapiens
aaaggagagccagggcctgggatgggggatgagcaccttcttgcccattccgggccccagcgtgcaggaggtaaacttgccagcacagacaagacagcttgttcaagctgcacctcaggccg

SEQ ID NO: 183407 - DNA, 122 bp, Homo sapiens
tgtgcgtttatagctggttcccacagggctgcttatcaaccccagcttcttccaatctcacggctgacgcgcaggctgtggaccccgatggggacgatatggagccttttgctggcatcccg

SEQ ID NO: 183408 - DNA, 122 bp, Homo sapiens
taggtaaagattcgtcggtttttcttgccacccgaattctccagcttcaggatctcctgacggtactgataatccaaaggactctgacaggctgtttcattttggtacagatctacttcaaa

SEQ ID NO: 183409 - DNA, 122 bp, Homo sapiens
ccctcagtcgtggtccggctccttctctcacagacgtggacctttggagggcagtcccagcgccacggagaaatgcatctccagaaacactcgtggcttcctcaaactgagcacaaccagac

SEQ ID NO: 183410 - DNA, 122 bp, Homo sapiens
gctccagaccgttttcccacagcgttccccacttggggccaaaaataaacaagccgcgtccgatttgcaaaagccttaatgggcctgcagactttgaaaagcgagtggagggcggtgggcgg

SEQ ID NO: 183411 - DNA, 122 bp, Homo sapiens
acctaaaacaggggacagcttttggaagatgacatctgcaatgcttttcatctttaccaacggcaagcctttctgcacagagagcacagcagaatggctcctgtcactgcattccaatggca

SEQ ID NO: 183412 - DNA, 122 bp, Homo sapiens
acttccaacaggaggagtaagtggatgagcggtgtgtgacacacccgcctcagcgtcgcccggagtccgcaaggctgcggctcaccgttctctgccccatagctggcattgtggagtgaaag

SEQ ID NO: 183413 - DNA, 122 bp, Homo sapiens
cttctccaaatccaaattccacttggattccacttcggtgagtccccttggtggtgtctgcgccgattaacaagtcatttcagggcggggggcggggtgggggctggggcaggggtgcaagg

SEQ ID NO: 183414 - DNA, 122 bp, Homo sapiens
cagctcctgtctactgtgttgataaactgggggttgtgtccagactgctggctggaggtccggatgtccttcaggctgggctagggggcatgaagacagagggtcctacctccagaggggac

SEQ ID NO: 183415 - DNA, 122 bp, Homo sapiens
tcatttcttgtctctgcaaatccgtcagctgcctacaagggcctaccagaccctggaagacgagaacaagaaaaagggagagtggggggcgggggagctaatgacccataattgccatgata

SEQ ID NO: 183416 - DNA, 122 bp, Homo sapiens
caccgcggcccgtcttaggccaggatgtgctccctgccctgcggactctggagcagggcccggccactccccggagcctgtatgacgggaaccgccccgcgccctctcccctacgcggggca

SEQ ID NO: 183417 - DNA, 122 bp, Homo sapiens
ggcgacgcggagcgcaacattttcaccagtgagcgcctggtcacgatccatgagatcgagcgcaagatcatggaccacccaggcttccgggagttctgctggaagccccacgaggtgctcaa

SEQ ID NO: 183418 - DNA, 122 bp, Homo sapiens
tctcccacgagcttccagcccagaacacctggccagacccaggtcgggggagttagatcccggggtcaagcaaccagaactgggggctcttgcctgaggattccagcttctcttcccaggtg

SEQ ID NO: 183419 - DNA, 122 bp, Homo sapiens
tgatggtctgcgctgctccatctctggtctgcgggaactactcctagaatcccgtaggagcgaagtgttccggggaaagtgtagaatttgatttggattctatgccacaaaactgcctagcc

SEQ ID NO: 183420 - DNA, 122 bp, Homo sapiens
ctgtggaacacccaccaagctggaatccacgcggtttttaaaatagagtcgggggccgggcgcggtgactcacgcctgtaatcccagcactttgggaggtcgaggcgggcggatcacgaggt

SEQ ID NO: 183421 - DNA, 122 bp, Homo sapiens
aattgtattctctcctcacagtccggtggctggaagtcctctgtcaagccggcagggccacgctgcctctgaaaccctcggggagtccgccctcgccttttcctagcttctgcgggctcgcc

SEQ ID NO: 183422 - DNA, 122 bp, Homo sapiens
ctgaggggcctctgtggagggcaggtgtggcaagtgggcaagactgaaggccagcgtggccggaagggaggatggggcacaagtgcctgggtggctgagggtggacggtgcaagtcagatcc

SEQ ID NO: 183423 - DNA, 122 bp, Homo sapiens
tctccagtctctttatcttgcttcgcacaactccttgcttggttcagagccttgaagaggcggatacaagaggccctctgggcaccgccgcccagtcccgcgcagccccctgcagttcccag

SEQ ID NO: 183424 - DNA, 122 bp, Homo sapiens
cctctcagagctccgcgcgtgcgcacaccgactgtgactctcagcagccggcttgcggagcggttgccgcgtcctctgccgagcttcttgtgcccgcctccgagcctgaggaaacagctgat

SEQ ID NO: 183425 - DNA, 122 bp, Homo sapiens
gctctgcaggaaggactgtatgaagtttagctgtatcctcccctagagtcagctctgagccgtcactttactaatgagctcagttttcaccagcatgcaaaatgctctgctgctgtttcaca

SEQ ID NO: 183426 - DNA, 122 bp, Homo sapiens
tggcacctccctggggctctcggcgcagctccggcgatgggggtgcgggaggctgggcggcgaccgggatgcgctgcggggctgtgagtgccgggttgggatggtcgtggccctagatcctg

SEQ ID NO: 183427 - DNA, 122 bp, Homo sapiens
atacctaccagtttgtggttctgactacatcacctatgggaatgaatgtcacttgtgtaccgagagcttgtgagtacctcataagaagaaaatgagatctggagtcagtgctctctactaca

SEQ ID NO: 183428 - DNA, 122 bp, Homo sapiens
tggctgaaatatgtgcgggtacctagggagtggggtaagagagggactcgtggtggggggcgggtaagtgcctttttcacaacctgccccagagaaatacacgaaattacatcgggagtgga

SEQ ID NO: 183429 - DNA, 122 bp, Homo sapiens
gggctctgagtttgtgctttccctggtgggccggcagaggccgaggccgaattggaggatcgcatcttggtgttgggcagtttgtggtctttcttccacttcatcctccggttctgaaacca

SEQ ID NO: 183430 - DNA, 122 bp, Homo sapiens
attctctttttagcagctgtttggaaaaaacttgcagtgctgatgacaactcgggtgtgtcgatgcatctctgcgtttgtagagcttgttagcgtatttggaggttttgtgcgccagagtga

SEQ ID NO: 183431 - DNA, 122 bp, Homo sapiens
tgcggctgggcacacgcagtcggaggcggcgccggccaggccgccgggcgcctatggacgcgcggagcccgctgtctccccgagccagtgcgttcagcatcgcctctctggttgcagcggag

SEQ ID NO: 183432 - DNA, 122 bp, Homo sapiens
gtatgtttgactcctcccatccacccgttactgacttttaaaagtcgtagctgagggttccgtttcttcgtttctttttgaattaaggcataaaattgaacaagacaccttattgctttatt

SEQ ID NO: 183433 - DNA, 122 bp, Homo sapiens
ggcagaggcacgcatgtccctggaggcttaagctcagaactgggaatgtcattgctgtcacgttttattggccacagcaagtcataagacaggctcagattgaaggatggggaagtagacgc

SEQ ID NO: 183434 - DNA, 122 bp, Homo sapiens
ctcctcatcatggtgagaggccgggcggggccgggcacggggtagcaccagggcgggaaacgagtgtcggggcccctcgggaggaagcgtcttgcaaacgaggacccggggctccgggttcg

SEQ ID NO: 183435 - DNA, 122 bp, Homo sapiens
aatcccgatcttctttccatcagctcctgctatccccaattaccatgtcagaatgtttaccgttttcattctgaaagtagaatgagatcataggtctgttataatttaaatagtacacgttt

SEQ ID NO: 183436 - DNA, 122 bp, Homo sapiens
gcgcccgccccaccttccttcccacccacatgccgaagggtggccaggcaggcaggtggacgagtccaggcagcggctgagtcagtgtgtgtggaatgttctggccgctcccagctgcaccc

SEQ ID NO: 183437 - DNA, 122 bp, Homo sapiens
ttttttaaaggatagctaggatatttgcagtcttgtgatgtatggaatcccagtcattagcgcatggcattgtcttatctcctattgctgtcacttgaccgctgatgtgggagtgactgaaa

SEQ ID NO: 183438 - DNA, 122 bp, Homo sapiens
cccggggcaggtcctccagctgtggccactcagccaatatctgcacaggtggcggttgcccggtcaagggcgggctcacaatctgcggggcggggagagggaaggagccagggagaaaaggg

SEQ ID NO: 183439 - DNA, 122 bp, Homo sapiens
catggctgggactcccgacgagagcgcacagctggatggagagtgcacagctggggaaggcggaacgcgtcgggaagagccgcggctgcgggatccagcgggaggggcggggcgccgggcga

SEQ ID NO: 183440 - DNA, 122 bp, Homo sapiens
ttattaatggtgaagaaacgtgcagaggaatattcagcggcctcggcgtctccttgtccccgcctgggtccgcggcactctccctccttccgcttgcgccgcggggtccctggctcaccccg

SEQ ID NO: 183441 - DNA, 122 bp, Homo sapiens
agtatactgactcagtgtgctgtaaccgtcactgcttcatgtccagaactttttcatcatcggaaacagaaagtgtagctattaaatactaactccctccgttttctttcctttctgtctgt

SEQ ID NO: 183442 - DNA, 122 bp, Homo sapiens
tggagccgatgtccttgtcaatgagatggtcacaggaaatggacagctgaaccaaggtcacgcagtgggccatctgagggaaaaggagctgggtcaagcaccagggagccttctctcccctt

SEQ ID NO: 183443 - DNA, 122 bp, Homo sapiens
gacccgcttgctgactctggaggggcgcacggggacagccgagaagaagctggccgactgcgagaagacagctgtggagttcgggaaccagctggagggcaagtgggccgtgctggggacct

SEQ ID NO: 183444 - DNA, 122 bp, Homo sapiens
gtgtccctctgcaccccatcaatgggccccttaccgcgatggtgaccacagtgcggtctgcgaaggctgtcatcaccaccttttggaggatgttttcctgccaagtgggggcaacagctgtt

SEQ ID NO: 183445 - DNA, 122 bp, Homo sapiens
ttccctcaccctaaatcaatgattctgacatcaaagatgccaacaagttttccctgggaacgctttgtgcctatgacccttcgttcaacaaacctttaccaagcacccaccaggtgccaggc

SEQ ID NO: 183446 - DNA, 122 bp, Homo sapiens
tcttgtctgctatttcatttgacttttttcaaccagccgctgaggtggggattattagcacgccctttgcagatgaggaaactgaagcccagggagctttggcaacctgcccaaggtcacac

SEQ ID NO: 183447 - DNA, 122 bp, Homo sapiens
ctgggggaaggaaaggaacagctcagcaatggtgacaggatgggcgccgccaggaacagtcgcacagcagatgctccgtgggggcagcggctcccgttatgcagccctagagcgggcagggg

SEQ ID NO: 183448 - DNA, 122 bp, Homo sapiens
cctcagtggctctgggtacctgcaagcagaacttccaaagagagttaaaagcagcagccccggcaactctggctccaggcagaaggagaggcccggtgcagctgaggttcccgacaccagaa

SEQ ID NO: 183449 - DNA, 122 bp, Homo sapiens
tccctcctcagggatcccaatgcagataggactccccacatctttcagagaggccctatacgcatgattattattccttttttacttttttttttttaagagttggggtcttggccagtaat

SEQ ID NO: 183450 - DNA, 122 bp, Homo sapiens
tccgggcgcgggcggggccgggggcggggcgaagagcggctttccagggtgacttcgtgacgtcaggaaggcgcgagtagtttcgcgagttcgaatcccgcgctaggtgagctggttcgaat

SEQ ID NO: 183451 - DNA, 122 bp, Homo sapiens
tgaggcttcatcgaaaaataagctgggcggaaaaataagccgccccctcccgacgacgtacggtgtattcttaaccaccctccgaaggaggctggggcgcctgtcatgttagattaggatta

SEQ ID NO: 183452 - DNA, 122 bp, Homo sapiens
gcagagcagggctgggggcgccgccgccgcctgacacaggccccccgctccgtgcacagacgatgccactgacaaggacctgtcggacctggtgtctgagatggagatgatgaagatgatcg

SEQ ID NO: 183453 - DNA, 122 bp, Homo sapiens
aaagaggggaaaacccctttcccatctgagaccgctccaccctcgccagttacgagctgccgagccgcttcctaggctctctgcgaatacggacacgcatgccacccacaacaactttttaa

SEQ ID NO: 183454 - DNA, 122 bp, Homo sapiens
gggaggcggggccgagcctggaagcacagtcagccctctgccggcgaggaactctcagtgcgacccctcaggaagagactgagaacttaaaagctgagggtagaacctgagtgtccaaaagg

SEQ ID NO: 183455 - DNA, 122 bp, Homo sapiens
tgttcaaatcctggaccaagcctctgacacacctgactcctctcttcctgtccttgttgccgccatgttgagtcattagctcagctctgagttcctattcacttgtaagcatgaatcatctc

SEQ ID NO: 183456 - DNA, 122 bp, Homo sapiens
agagacacctggggtcttgggccaaggattgacaatagtggtcttgcctttgccccttcacggagcccatgggcacgatgcttgcatcctgggggagcccttggtcccacgcctactgagct

SEQ ID NO: 183457 - DNA, 122 bp, Homo sapiens
ctgcccgtcccccgaaccagctgcccctctgggggtgggagcccagaccaggtcagcagacgcgaaaagagaaagcaccaccatcaccaagtccagcgtccccgcgcgtcccagctccctgg

SEQ ID NO: 183458 - DNA, 122 bp, Homo sapiens
gaagggactttcagaggaccagaaaagctaatattcaatgttagaatattttctaaacagcgctgcaacatgagtacatgattacctcaatatccagtaaaatctgccacacatagttgtag

SEQ ID NO: 183459 - DNA, 122 bp, Homo sapiens
cctcctcgtcggcctcttcggcaggggctctggagtcctcgttggatcgaaaattccagtcggtaaccaacaccatggagtccattcaaggcttgtcgtcttggtgtatagagaacaaaaaa

SEQ ID NO: 183460 - DNA, 122 bp, Homo sapiens
ccagaaagagctgcaggatcgggtccggaggacccttggctggagtgtctcaagctgagtcgggtccgtggggccagggcaccccctaaggatcagatcagaatccgaggtggagacattcc

SEQ ID NO: 183461 - DNA, 122 bp, Homo sapiens
aggctgtgccaagtgccgtggccggcgggagcttgtcacacaggttgatgggctgatcctcggcggccgtggtgaagtccatgggggccacggcgccgttgccattcatctcggggaaggca

SEQ ID NO: 183462 - DNA, 122 bp, Homo sapiens
ctcgccggggaccggggtggagcgggagcccaacccctcctggccgcccggcgtccgtagcgttctgggccccgaaaggccaaggatctaggggagggtgataaagcaatgccccttgaaag

SEQ ID NO: 183463 - DNA, 122 bp, Homo sapiens
ctaaggccaaggcccgactctgcactgaaagttttttttttaaacatcagactcatttatcgtggagtgacttgcccagatcctacaagtaacagtccaagaaaaggggctgctgggtagga

SEQ ID NO: 183464 - DNA, 122 bp, Homo sapiens
gtggcgggatcaccactcgcaggccgttgtggcgacttcctctcatggaaccaccccgggcgtcaaccatgaagctcaccagaaacctaggagtggggcagatgcacgttgggcttctgcat

SEQ ID NO: 183465 - DNA, 122 bp, Homo sapiens
gctgctggccaagcacccctgccacatcaagaagttcgaccgctacaagtttgagattaccgtgggcatgccattcagcagcggcgctgacggctcgcgcagccgcgaggaggacgacgtca

SEQ ID NO: 183466 - DNA, 122 bp, Homo sapiens
gtcggaggagggaagttggttctccaggagtcggggaagcgtcgagtttggatccaggggcgggagtgggcctgccactgctattgttactcagctgctaaataaataactggagagaaaaa

SEQ ID NO: 183467 - DNA, 122 bp, Homo sapiens
aaaatggctcccttccctcgaggggctccaactgccacataacttctgggagtctcctcacggtacctggggcttctagaaccttccccttgggacccaagtaaccaatgatagcgcagcaa

SEQ ID NO: 183468 - DNA, 122 bp, Homo sapiens
tgcctcctgacgggctgctctgaggggctgtgagggcaaggctggccaggctagttgtcccgatttactatttgatactgacgccccactcaccccctccactccgggccatgacacaaaca

SEQ ID NO: 183469 - DNA, 122 bp, Homo sapiens
gttaccactgagggaatggggtcatcctccctagagaacctcggcggctgtgcggggatacggacaaaagccgctttgtggaagactgtgggaccgtccaacggcgccaccgtgtggcggcg

SEQ ID NO: 183470 - DNA, 122 bp, Homo sapiens
gggcacctccctcctgggctaggcattggtcttggctgggggttaggagctgcacccccacgcctgcctatgcaggtgcacagggaagggtggcagcgggcgtgtgtgcccgggacctggat

SEQ ID NO: 183471 - DNA, 122 bp, Homo sapiens
tggaggcccttttaaccaagttgatctttgcccagagggtcgggggagctccgtccctgccgggttctttgaggctcttcccagtgtgaattaaagggttggggctggagcttgggaaaatc

SEQ ID NO: 183472 - DNA, 122 bp, Homo sapiens
aacccaaggcacttcctctgcctgaggtgctgaccttgcctctttccctgacagtaagaacgagtctgaaaaacaaattgagaatctgacttccaatcaataatctttctccatgaccacag

SEQ ID NO: 183473 - DNA, 122 bp, Homo sapiens
ccacgtagagccccacagccccaggggagcctctctgccacctgcgaggttcagccaccccgtccccactccggaacacattgaagctgagcaaggagaaaagactgaaaaaaaagaaaaaa

SEQ ID NO: 183474 - DNA, 122 bp, Homo sapiens
acttcagcctgggcaacagagcaagacccggcattaaaacaaacaaaaacgggccgggcgcggtggctcacagctgtaatcccagcactttgggaggccaaggcaggtggatcgcctgaggt

SEQ ID NO: 183475 - DNA, 122 bp, Homo sapiens
ttttcttctcttgctaatttcttttttgctactaaagacttgtgtttctagagatatgaccgtaattattccaacctctccaatttataatttagtgttcaagcttttaaattaaggaacac

SEQ ID NO: 183476 - DNA, 122 bp, Homo sapiens
agccccaagctgagttcacgcagcccggaggatgctatcgctggacaagagaccagagaccgggatagacacgtgcgtcctagttctgaacaaaatggtatccggaaagagaaagcatccca

SEQ ID NO: 183477 - DNA, 122 bp, Homo sapiens
gctggaagggaggagccccggggggcggcggtgctgaaccgggtagagtcttgaaggtcacggtcaggactggagtgggaggggagtcagaggcctgctgcggaggcccaggttagaaacga

SEQ ID NO: 183478 - DNA, 122 bp, Homo sapiens
ttccttagttctcctccctctctttgctcttgcaaggatctggatttgcaggcaggaaaccgactcattccaattgacacattctggttcttctgccttcccatcccaccccgcttgatgcc

SEQ ID NO: 183479 - DNA, 122 bp, Homo sapiens
taggaagggcacgtcacttctgtggtctccctccccaagcccagaacctcaatcagaccacgagaaaagcctcaacaaatccaagtccagggacattctgcaaaatacctgagcaacactcc

SEQ ID NO: 183480 - DNA, 122 bp, Homo sapiens
ccggggcctgcgggctccgcgtgccggtgccggcgcgggtgccaagccgccctctccgctcgcccccaggtcttctggatcggacccctggtgggcgccatcctgggctccctcctctacaa

SEQ ID NO: 183481 - DNA, 122 bp, Homo sapiens
ttagaacaatctactttgggtggggtgggggccttttgcaccctgctgttgtagacccttcgcagacataaaaactaagatcctatgtggtttcctttagaactgatctgattacactctcc

SEQ ID NO: 183482 - DNA, 122 bp, Homo sapiens
gactctgctctgaggagagaagacaagccctgcctcccttagttcaagaggaagtggctgcgatggagtgaagcagtaacctgcttctggattgtgaaacagaaatcaggaacagcaagcag

SEQ ID NO: 183483 - DNA, 122 bp, Homo sapiens
ttctcttggtttatcacgtgggggtcatttgtgacgggcgtgcttcctgcaaagggcatgcggctggcacctcttatctcctgtgtcttctcactggcagggttggccaattttcttttttt

SEQ ID NO: 183484 - DNA, 122 bp, Homo sapiens
ctgttgtaaataatttgtaaagaaatgcgcggcgcccctgttgggaattggagctctgggcgtggcgtctggagtgggtgtgtgctgcttttgcttccgagacattcattcatatttcccct

SEQ ID NO: 183485 - DNA, 122 bp, Homo sapiens
gcagcggcgccgcgtagctccactggccggtcgcggggctgtagcactccacggtgagcacgtccacgcgctccccgcgcggccccagctggctgccgcccatcacgtacactctgtcgctc

SEQ ID NO: 183486 - DNA, 122 bp, Homo sapiens
aaaatgacttttttgatcaaaatagtaagtttctacagtaagaacacatttcttgggcatcgttgaggtcttctcagagccttccatcagtttgtctattgaattcaaagtgactcactcag

SEQ ID NO: 183487 - DNA, 122 bp, Homo sapiens
ctctttccaagacactgtgaccatgtacagtagctatttcctgatgaccaaatctctcaacgaatcatgttattaataaatatttttagcactcatcagtattctccaatgtgaccttctca

SEQ ID NO: 183488 - DNA, 122 bp, Homo sapiens
acctcaggtgatccacctgcctcagcctcccaaagtgctgggattacaggcatgagccaccgcacctggccgctcggttttaatttctaatgccataaatattgacgggtttgactctcata

SEQ ID NO: 183489 - DNA, 122 bp, Homo sapiens
gagtgggttgtccttggctggaaggaaggctgaggggtagctgggatggggctccagactcggtcacatgtcctgtcatttagaatggcagctgtggaaacctccatctgaccagtatttgg

SEQ ID NO: 183490 - DNA, 122 bp, Homo sapiens
gcgacttcctgaacacctccaaactttagctttcccatcagaaagttccctgacttgccacggtttctctccttctcacctgagaggacctagagccagtcctccctccaaccaaatccccc

SEQ ID NO: 183491 - DNA, 122 bp, Homo sapiens
gcagcccccagtttagcggactgatttactcccggtattggtaaatatgatcacgtgggccgcgcgaccaatggtggaggctgcagcctgcgaactagtcggtggctcgggcgccggcgggg

SEQ ID NO: 183492 - DNA, 122 bp, Homo sapiens
ttagggctgggctccttcaggcaagggatatgcagagttgtgacctctaggtattaagaacgcagcatcacagggagaggctgtctagggcaggatagtcatgtacacgcagttgccagagt

SEQ ID NO: 183493 - DNA, 122 bp, Homo sapiens
ccagcttgcaaaccaataaaggcattcctggacaagtcctgagcgacattccttcttgcccggttaaagcatccgttctgctgattattccactccataacgccctctcctcctggctagta

SEQ ID NO: 183494 - DNA, 122 bp, Homo sapiens
acacgtgccctggccggtggctctcagagctatgtccagagggtggccaggcagtgctcccggcagcgcccagatgaggctggggtgcggcttggggatttgtgggccgctggccacagctc

SEQ ID NO: 183495 - DNA, 122 bp, Homo sapiens
aggccactggatggcagcaaagcacatgctgcccattgaggtgctcagagcggcatctcccggatatctgggtatggggaataacagggttccaggcagggtccaggtccacggagaccctc

SEQ ID NO: 183496 - DNA, 122 bp, Homo sapiens
gctggccggggcggggcctatggaggggcgggaccgcggcgccctataagtactgcggagcgaggcgcgcgcccggccagagagcgagcgcgcaacggcggcgacggcggcgaccccaccgc

SEQ ID NO: 183497 - DNA, 122 bp, Homo sapiens
gtcgggagcctaggccatggggcagcctgggccttctgcagtgtgaggcgcggggcctcccgcgtcgctccgctgacaggctgcgggcgggcaggcgggaggcgtagtgtgggtcgcggtgg

SEQ ID NO: 183498 - DNA, 122 bp, Homo sapiens
taaaggggatgtcctgactcggaggggggtcagcagaacgcgagggagcagcgggagctgcggggcattcgggcctcagatagttgggtccaagcgggtgacctagatccaagggcaggatg

SEQ ID NO: 183499 - DNA, 122 bp, Homo sapiens
gtactgcgttacatgatctgtaaatcgtgggctacgcatcctctacacccgactggaacacgctttgcacctatgcgcacacgtgtttcgcggagagtggtgctcagcgttgtgccaggcgc

SEQ ID NO: 183500 - DNA, 122 bp, Homo sapiens
cgcgcgcgcgtggatagggcagtagcaagtcgtcgtcgcgggaggccctgcggggacgggcggccgtgagctcagggggctgtcctcgtgagctcggaggacaggggggaccccccgaacca

SEQ ID NO: 183501 - DNA, 122 bp, Homo sapiens
aatgtgcgagctgggcagcccacccctttcagctgctggccggaagcggaagtgggcgtccgtcgcctcgccatctcccatagctgtcgcctgcagctgagaaagggttgctgtcccagcag

SEQ ID NO: 183502 - DNA, 122 bp, Homo sapiens
atgctagttggcttaattttatgttagagaacatctgatttagtcagtaatttctaggcacgtgtcagttaataaagaatctatagtttttactaggcactttgtatcataaattcaatgta

SEQ ID NO: 183503 - DNA, 122 bp, Homo sapiens
gaggcctgcaaacctacttggtgcacacagatgcagctcatcacagcgcggtcacaatgtcgggagggaaatgaataaaatggaaatactaccttgttgcctactgcagaagcagcggcttt

SEQ ID NO: 183504 - DNA, 122 bp, Homo sapiens
gaccatcctggccaacactgtgaaaccctgtctctactaaaatacaaaatattagtcagtcgtggtggtgcacacgtgtagtcccagctacttgggaggctgaggcaggggaatcgcctgaa

SEQ ID NO: 183505 - DNA, 122 bp, Homo sapiens
tgcgcacgatgcaggcatcctccgggctgctgctgtcgacagggtccccagaggctgggccgttggcagcctcgtcaccggggtgccgcccaccgtcacccttgtactccacagaggctgtc

SEQ ID NO: 183506 - DNA, 122 bp, Homo sapiens
aaaatagaggaacaaattgtcacagagaagccacaggatgggacaaggaagcagagcattcgagccagacagaggtgcgttcaaatccacctcgccaaattatttcagctctcagaaccttg

SEQ ID NO: 183507 - DNA, 122 bp, Homo sapiens
tagctgcctaaaaataatctcttaataactcgtgtattaatttggccaagagagaaatcccgtgaaggagaccaaaaagcaccagtgagcctctcactaaacaaggacctttgtcctagaga

SEQ ID NO: 183508 - DNA, 122 bp, Homo sapiens
aggggtgggggcgtcctggggctgcttctgctctgatgaaggcacccactgtcactgtcccggccctcgctgagtgttcccggacccgtgggcccgcgtctgtgccaggccttggggagctc

SEQ ID NO: 183509 - DNA, 122 bp, Homo sapiens
actgttctcgactctaataagattgtgatcctctggatttggtgtccactctgaacgcggcgtgggtgtttaacaactgtgacgggacagatgtcattaatgtgaaaatgctcgcagccttc

SEQ ID NO: 183510 - DNA, 122 bp, Homo sapiens
agtcaaatgtcaagaatgttaattagtgaaaggaaggggaggagttgacgggaggcaggccgtcagcaccagctcactctgtaaacagagctgtgtcttgaattccacagcaatggcatgga

SEQ ID NO: 183511 - DNA, 122 bp, Homo sapiens
ccctccaacatcctgggctggctctccatggccacagtgcgtgctctcagccccctgctccgggggcccctgaatcgtgggtctttacttattcctacacgacatagtcaggtctgcatttt

SEQ ID NO: 183512 - DNA, 122 bp, Homo sapiens
gagtgcggtggagcgggcctgggcagccaacggcagcatgggggagcccgtgatcaagtgcgagttcgagaaggtcatcagcatggagtacatggtctacttcaacttctttgtgtgggtgc

SEQ ID NO: 183513 - DNA, 122 bp, Homo sapiens
atacttgtgattaggagcctacagtgcaccgttactctaggagagtaactgcaaacaaagcggcagacggggttctcgctcctcaggcttcagcccagagatcttatttatatgcctgaaca

SEQ ID NO: 183514 - DNA, 122 bp, Homo sapiens
aaaggtctctaaagtgactgacatcagacctgctatagcctcactaaaagaaaaaggtaccgtagcactctcccgtaaagtgagttaggctctttgcctgccagcttcacttttgtgacttt

SEQ ID NO: 183515 - DNA, 122 bp, Homo sapiens
ggctcatgtttcctatcagtatatgaatttagacatttttcacactttctactgaaaggtcgggggaaagggaaaaataatataaataaatcagtgttcctggatatacaacatatagacat

SEQ ID NO: 183516 - DNA, 122 bp, Homo sapiens
ttatggttattgtgtcagtccatttgcattgcagtaaacttcgggtgacataaagaaaagcggtttactttaggtcagttctgctggctgtacaacgcaagtgtggtgctggcatctgctct

SEQ ID NO: 183517 - DNA, 122 bp, Homo sapiens
ggcatcatccccggttggctcaatggctccagagacagggaggatggcgaagagaagggccggtggcatgcctgccttagccaactctgcacaggaatctctgcccacagtttggactgtgg

SEQ ID NO: 183518 - DNA, 122 bp, Homo sapiens
accattgttatgaattctctggcttcggaaaatagaattcagactccaccaactcgcgttcgtttgtcgagattgattttacactgccttccataaggagattagaaagcaaaaggctgcaa

SEQ ID NO: 183519 - DNA, 122 bp, Homo sapiens
caggacgcctaattgctatttttgggtttcagctgaaacgccacgggtctgggggaatagcgagggtgtgttacattttcggtcttccggtcagccggaaccactcacaccgctgctggtgc

SEQ ID NO: 183520 - DNA, 122 bp, Homo sapiens
ccttgagtcccacccgcctggtgtcatctctccagtgggcgttgggggaggattcttatgcgaacgtgactccgcttcccccaagggaatgaacacacggtcacccccctcccccctgccac

SEQ ID NO: 183521 - DNA, 122 bp, Homo sapiens
ggggtttggcttattaacccccctttccctgcaggcaggaattgatggcgagaaggagcacgccaatgccaagaagatcctgctggagatgggggagttctttcagattcaggtaagaaggc

SEQ ID NO: 183522 - DNA, 122 bp, Homo sapiens
gtagaagagaggcattgtttggagctctgctggaaagttctggttggagagaataaaaaccgttcaaccttctgggagctattgctggtttggtttgggacatttggtcttcatctttgcag

SEQ ID NO: 183523 - DNA, 122 bp, Homo sapiens
agcactttgggagacccagataggtggattgcttgagtcccaggagttcgagatcagcctcgggaacatctctacaaaaagtacaagaagtagccaggcatggtggtgcacacctatagtcc

SEQ ID NO: 183524 - DNA, 122 bp, Homo sapiens
cagcccagcagcagctggagcttccagaatggcacagcagtgggcctgtggagaggctggcgtcaactgaaggagaactggagggctgacacgcgtggctggcgggcaggcaggccaaggag

SEQ ID NO: 183525 - DNA, 122 bp, Homo sapiens
gcagcttcatgctcaaggacatgctctacctggctggcctctcctgggacctggtgcaggcgggcagcattgagcgctgctggctgctgggcctgcgggctgccttcgagccccggcccggc

SEQ ID NO: 183526 - DNA, 122 bp, Homo sapiens
aacatccttaggctgccctctcatagcagggagtaattgccttcaggtaaaagttgattccggaccattcaattcactgaaagctattcactgtcttagattaaccagcacctaaaaacact

SEQ ID NO: 183527 - DNA, 122 bp, Homo sapiens
cccttccatcctggcgctcctcatcctgggtggtgatcatcagggcctctgcccccaggccgggcctgggaggacgtccatctgcagaacaagcctggcctgtgactggccccctgaggaag

SEQ ID NO: 183528 - DNA, 122 bp, Homo sapiens
tcccaccatcccagccaaattcctgtcggcgtctatgttgttcgccagtcgatggcctgccggtgcctgccagtgcctgttggtgtgctcttccgccggtgcgttcctctcgacgtccaccc

SEQ ID NO: 183529 - DNA, 122 bp, Homo sapiens
gcagcgcctagaaacacctcccagctgccgcctacttgcccaggctcaccctgccctacacgggcgcaccgcctcagggcttcctgaaacagcctcacttaccagcgcggccaggatatcag

SEQ ID NO: 183530 - DNA, 122 bp, Homo sapiens
tgccccacgccacgcaccgtgcctgtgttgtcttgtgggaagcctgcggtactgcggtggcggggggcggggtgcagttgtcatccccgattcacagatgagaagctccagacgttggtcct

SEQ ID NO: 183531 - DNA, 122 bp, Homo sapiens
atttgcagctttggttgatatgacagctgcttgttctacttttcattttgctgtcccaggcgcagaatcagcctcactttatttatgtaaggagtccaagacggcagtaggttttgggctaa

SEQ ID NO: 183532 - DNA, 122 bp, Homo sapiens
ccccagagcgcgcagggagcggggcgcgcgatcacaccctccgcgctgcgcccgaccactcgggctttcaattaggagccaagctgagaaaagtaggcttttctttatgcacgcctcgccga

SEQ ID NO: 183533 - DNA, 122 bp, Homo sapiens
tccttgattatttcaaacaaatgcacagcagccgctgtaaggagattaaagtgacataaacgtcccgagcgggaggggggagggcagaggattcaggtcacccccatccgtcccccgcctga

SEQ ID NO: 183534 - DNA, 122 bp, Homo sapiens
aatctatactgcacactctgcacctgattccctactggaaaccaagcttcttccagggaacggggtgggacaggaactgaggggtcatgtgccctgggctgggccggggaacagggtcagga

SEQ ID NO: 183535 - DNA, 122 bp, Homo sapiens
gggatttgaacctatgttggtctgactcctgagggacagggaaatggaaaaggcttatcccgagcctgtggggtcaggataagtggttggtccggcttctaagcagatttctctttagcctt

SEQ ID NO: 183536 - DNA, 122 bp, Homo sapiens
caaagtgaagggaagtaactccagagaaacgggaagcttccctgaaagcaggtgtgggaccgcagttctgtaaaatcgctgaacagatgtttgtggagagtttattgtgcaaggcacatggc

SEQ ID NO: 183537 - DNA, 122 bp, Homo sapiens
taaggggcggggaagaacgagtgagacatgggcggggcagtcgcctcatgacgtcagtctcgcgcgcgggcggaggtgggccggtgcggcgctgtcacgtaggttcagtgggcggaagaggt

SEQ ID NO: 183538 - DNA, 122 bp, Homo sapiens
ccacacctgctgtgtcatgtcagaggtgccagagcaccctttgactgcctgaagaggtctcggcttgccacccaccagggtcaggtcgtctcaggtccccggggaggtttgactagccaaga

SEQ ID NO: 183539 - DNA, 122 bp, Homo sapiens
cagcaacagaaaagtggaacaatgtgtcccctgggcacgaacaggacccggtttgagaaacgcggtgccaggaccccgagccctgttattgggcacaagagccgccaggaacagctttccca

SEQ ID NO: 183540 - DNA, 122 bp, Homo sapiens
caataggagcttctcgtacggagcagaaatgtgttgttgcctgtggctttgcaggagctccgagcagtggcgagaggaagtcatgggtgaccatggtaggcattaccgcctgatggggttgc

SEQ ID NO: 183541 - DNA, 122 bp, Homo sapiens
tgcgcggattgatcggcggcaggcctccaatagagcctgctaggcggattggctgctacgcggctgggccctgtttccggtacctaggcgggcagccatggtgaccggcgagcggcatgcga

SEQ ID NO: 183542 - DNA, 122 bp, Homo sapiens
ttgtccacgtgggaagaactcaattgaccatcagcctctacgattaaaaacattatgactcgggccgggcgcggtggctcacgcctgtaatcccagcactttgggaggccgaggcgggcgga

SEQ ID NO: 183543 - DNA, 122 bp, Homo sapiens
cggcgacaccgtccggaggaggtgctaaggcggcggccgggagaacggcgcaggcgcaggcgcaggcgcaggcagcggaatgcgcaggcgcggggccttctggaagccaccgagttccgcgg

SEQ ID NO: 183544 - DNA, 122 bp, Homo sapiens
cactgggatacaaagtcaccatacttattaggaccagggaagccaggagtcctcccttaccgagacacaaggcaagtgccaggaagagatggtgagggcctgcctgggaaagatgtaggttt

SEQ ID NO: 183545 - DNA, 122 bp, Homo sapiens
gaggattaaggattttatccttggagtcaatagagtttggggttttaagtaggatagcatcgtgatcagataagaagctttgtggagtacagatctcagaaagactggagaggagcagtgag

SEQ ID NO: 183546 - DNA, 122 bp, Homo sapiens
aaaaagagaatccccaaactggacaagcaggttacattcacacaatagcgtgaatgaattcgctggtcgcccttcagattctcattttggaatctcgaagaaagagaggtggtgggaggagg

SEQ ID NO: 183547 - DNA, 122 bp, Homo sapiens
cccattcccatcatgcttcctcctttctcagagatttcaaatagactcttctgcctgtaacgctttgcttctctctctcatttacggaattacctgttctgatctcggctcactgcagattg

SEQ ID NO: 183548 - DNA, 122 bp, Homo sapiens
ctccctggccgggcgtcccgcgggcctcctcacctggcccttctcgccttcctcctccctcgcctccccggtcctcccgctcgcgggctgaaccccgaaaactccggcccggcctggtccgc

SEQ ID NO: 183549 - DNA, 122 bp, Homo sapiens
ttggtggtggcgggcggcccgcactccccgcgccccaggcccgcccgctcccgcccggctcggcgctccctcggctgagcagctaggctctgcattgcaggggtcccaccgggccgcagggt

SEQ ID NO: 183550 - DNA, 122 bp, Homo sapiens
ctaattcccctccactccccgctcccattggtcacgaggatgaccaatgagcgctcggatcgaggtcctaccccgggcctgactcgaaagctcctgccaaaactttgggagtttttagagac

SEQ ID NO: 183551 - DNA, 122 bp, Homo sapiens
gcccaaggccacaggagtaaacaggctcaaaaagggcctctcaccgcgcacgcgctgcagcgttagggccggcaaacccttctttaagactcagccctgagcacaagcaatgggaactgagc

SEQ ID NO: 183552 - DNA, 122 bp, Homo sapiens
cggcacctttgatcacgttgctgtagatggtggggcggaactcctcgcgcgcgcgctggtcgaagtcctgcccgtggatgatccgcatctgcttcaggaaggtggacttgccgctctcgccc

SEQ ID NO: 183553 - DNA, 122 bp, Homo sapiens
ccggggaggcccgggagggtcccgggctggtgggcagggccgggggcggcggcgtgggggcggcaggggccgcggcgggctcgggcgggctcgggcgggccgggccgagccgccgagagggg

SEQ ID NO: 183554 - DNA, 122 bp, Homo sapiens
aaattgtttccctagtgatgtaggatgactagagagagaatagggagtaaggaataaaatcgacatttattgagcactcactatgtgctagaggcataatgtatgtaggggatagaaaatct

SEQ ID NO: 183555 - DNA, 122 bp, Homo sapiens
tctactctcagaaacagcgtcctccctgccacagccatcaatgtgcatgtggtcgacacacgcattcacacacactcacggctcattaaaatgcgttgtgaacttggcgtaatccccaggat

SEQ ID NO: 183556 - DNA, 122 bp, Homo sapiens
gcaggatctgaccagtgttcacgtgtgctcacactggcacccgtgggaaggacaggcgagcgtgccgtgctgtgtgcgtgcacatgcgccacagcggcccacacagcagcacggggcaagcg

SEQ ID NO: 183557 - DNA, 122 bp, Homo sapiens
agatattactagaaaaacctgactgcacacacaatcctatcccctacgcaggagaaagaccgagtgctagcacccggggtgtgaaagcctgcaccaagggacccaggaaccaggcgtgcctc

SEQ ID NO: 183558 - DNA, 122 bp, Homo sapiens
agcccttcggaccaccctaccgagggggggccctgaaggacggccgtcggagccaatgggcgtgcccgaagcgctccggccagccttccccgtcagccaatgagcgcgcggagggcggggcc

SEQ ID NO: 183559 - DNA, 122 bp, Homo sapiens
attgagatgggcatccagaaaccccatccacagcagtagtgtctgacccagattgagagccggccacgcagctttgggacaccctgagtgctcccaggcaggctctctgggtcacctttgtt

SEQ ID NO: 183560 - DNA, 122 bp, Homo sapiens
tggaaactgcttcagcaaaggggtgtcagaaagaatccccggaacaagtgtcaaaacacccgtggttctttgtgcttgagttgggggcccggcctagagagctagccctaaactgctgctac

SEQ ID NO: 183561 - DNA, 122 bp, Homo sapiens
gctcattgctcctggggtggcactggctctagaccaagaaacttccttttaaaccataagcgagagaggcatggtggtgagagatgaggcttgaacacccactgggtttttgttgtgctgat

SEQ ID NO: 183562 - DNA, 122 bp, Homo sapiens
tgctgttttctccatcctcacccctccccatccctagacttgagccccacaactctatcccgtttgaaaagctctgtgtgtcacccctgcttgggtgtgggtctcatttgcatctcagcctg

SEQ ID NO: 183563 - DNA, 122 bp, Homo sapiens
agaggataaagctaaagcgtcttaatgaagccgccggctcaggagctggctgaaagcagccgcatttacagcctcagccagggaaaagtgccttcagtgcagacctgcgtgggcctccgcaa

SEQ ID NO: 183564 - DNA, 122 bp, Homo sapiens
caggcgctcaatctccagccctgtcctccaggcgctcaatctccagccctgtcctccaggcgctcaatctccagggcagcgctggccctcggactttgccacagcgacatccgaactatcta

SEQ ID NO: 183565 - DNA, 122 bp, Homo sapiens
ctatatcggtcgctgccatcgctcctgcgtccgccagggctgccacgggtgccgccgcaacgggagctactgcacaggaaacagaggagctcctccgacaaagagaaagtgttacacttcgg

SEQ ID NO: 183566 - DNA, 122 bp, Homo sapiens
attacaggcatgagtcaccgcgtccggcctaggagccatatcttaaaacctaattcagatcgtatcactcctctgcttgagtcctttttttctttggtagagaacggcgtctcgctacgttg

SEQ ID NO: 183567 - DNA, 122 bp, Homo sapiens
ttaactttatcaactgtaaaagaaaaaaattcaacatcttgttgttttaaaggagttccccggcatggaagcagatcatacacttgattcctgatgcaggaactgaaacaactctggcccag

SEQ ID NO: 183568 - DNA, 122 bp, Homo sapiens
gggcggaggagccaagatggccgaatagtaacagctcccgtctacagctcccagcgtgagcgacgcagaagacgggtgatttctgcatttccatctgaggtaccgggttcatctcactaggg

SEQ ID NO: 183569 - DNA, 122 bp, Homo sapiens
ggagatgctgcctcgaggtacctcagctggccacctagtgtcacgggtggtaggctgggacgcggatgcagggcacaatgcctggctctcctacagtctcttgggatcccctaaccagagcc

SEQ ID NO: 183570 - DNA, 122 bp, Homo sapiens
ctgcaaccaaagagcgcgcctcgtttctatagcaaccaccccaggtccacgcctagacggcgagtggcaagggtcaaaatagattcgcccagtagacgccctcgacctgttcggtcctcgcc

SEQ ID NO: 183571 - DNA, 122 bp, Homo sapiens
acctgtctgcctcagccccctccctcaaagtgatgggattatacgcgtgagccacaatgccgggaccattccctggtttattttagaacagtccagatgtatcatcaatttagttgtaaaga

SEQ ID NO: 183572 - DNA, 122 bp, Homo sapiens
tgtcctctgcaacgtgtgggagcgctcagagccgcgcgtatcacagaaacatcatccagtcgtcacccccaatgcctcaacccagggacagggacagactcaatcagacctcggccccaggc

SEQ ID NO: 183573 - DNA, 122 bp, Homo sapiens
aaaaggggcagcgcctcctcagcccctcactgccatgagggaatgcagggccattgtcaccggatggttagtttcaagagaatctaggaatccagatttcatgggaaatctcccaattggct

SEQ ID NO: 183574 - DNA, 122 bp, Homo sapiens
ggcctggccagtgggggttgtggccagagattgccggaaaggggcacagcctcagggagccggctctgggcctgggttcagttccgccttcttctcttggcgccaggggaaacagagccggg

SEQ ID NO: 183575 - DNA, 122 bp, Homo sapiens
agagacacagaccctggatcatgggggctacaccaagatttttctaattaccaaattcatcggactattcttggttctttccctacttcataactgaaacatttaacactattaatcactct

SEQ ID NO: 183576 - DNA, 122 bp, Homo sapiens
aagctttgtatacaccacagcaacaatctgtaacccattacagaagtgtcactaacatagcgttaattaccacagtatgtgacttggaaatggtatcttgagtaaagtgggatatttggtcc

SEQ ID NO: 183577 - DNA, 122 bp, Homo sapiens
aaaccaggtctggaggaaaaggccaaagcaagaagtgagccagaagcaagcaggagctcacgtgggcctcagggaagatgctctcagtccagatagcagcaccctgcagggacagggcagcg

SEQ ID NO: 183578 - DNA, 122 bp, Homo sapiens
ctgcaccattttgtaatcccagccccatttcgcagaccctggtcaaagtgaaatattccacgggggtcggaccacgagaaatgtcctgcccaaccacctgactttcttgttatcccctgccc

SEQ ID NO: 183579 - DNA, 122 bp, Homo sapiens
cagcttcatgtatgagtgtgcccatcctctgaacttgattactgaccacctgcttcccaccggcccccaccccagcctgatgaccctctgagcttcatgaattgataagcaagttactcatc

SEQ ID NO: 183580 - DNA, 122 bp, Homo sapiens
acttcatgtgatccgcccgcctcagcctcccaaagtgctgggattacaggtgtgagccaccgcgccgggcctggagctgcatttttgttgtaagcactttgttcttacttggattaggttta

SEQ ID NO: 183581 - DNA, 122 bp, Homo sapiens
aagccttatgaggtaggccccatttttgttcccatggtagtgatgaaataattgaggtttcgagaaagagtcagtgtgagctgttgaaagcctgcagctagtaagtagtagagcagggactc

SEQ ID NO: 183582 - DNA, 122 bp, Homo sapiens
caaatcactagatcccacaagccatgcgctgcaagtctaatgatccagaggctgaggtttcggccgctgtacactcagcagccccgcgctcttgccggccgacaccacagtgtgggaatcga

SEQ ID NO: 183583 - DNA, 122 bp, Homo sapiens
ccacccaaacctacattttttcatgtgcaaatgtgtgggtccctctagtcccctcctggacgttcgcctcgatccctagataccaggaacccatccctactcccaatccaatattatttcca

SEQ ID NO: 183584 - DNA, 122 bp, Homo sapiens
gcatcttactgagcgagagaagccaacctgaaaaggctgcgcccggtgcgattccaaccacgtgacattctagaaaacaaaattatacagtaacaagctcagggttgctaggggtttgcggg

SEQ ID NO: 183585 - DNA, 122 bp, Homo sapiens
aggcatgcgttaaattgtggtcatgcggagctaagtgtctttgagacattaaatcggacacgtcctgtaggttatacaggcgccaaggaagaaaatctgcataagaacacagttttttcttt

SEQ ID NO: 183586 - DNA, 122 bp, Homo sapiens
cctgcctgtgacgcgacttggagcatatctctgcactcagctcctgagtctatttcctcacgtgggaaaatggtgattagagactgaccccatgggaggcttagctcatagtgagtgctcaa

SEQ ID NO: 183587 - DNA, 122 bp, Homo sapiens
cggggtggcggcgctcaccagtggtgcagcacgtcattgatcaggtagatgaggtgcagccgcagctcgaagtgtgccccatcagccgtgatgcggttccggaggtggccggccatcagctc

SEQ ID NO: 183588 - DNA, 122 bp, Homo sapiens
tgcctttcaaaaacctagagccacttccaaatgcttggctgggacttgaagagaatcatccgtgacatactagaacgaggtttcttttaaatgtcaagatgccataaaatgattcaggccca

SEQ ID NO: 183589 - DNA, 122 bp, Homo sapiens
ccaatgtatacatcacgcgggagcacagcctggtggtgcgacaggcccgccttgctgacacggccaactacacctgcgtggccaagaacatcgtggcacgtcgccgcagcgcctccgctgct

SEQ ID NO: 183590 - DNA, 122 bp, Homo sapiens
tttattgtcttccaggttttaatatcataagaaagcacatatgtcttcctcatctcccttcgccaacaccaactatgccttcaaatatttgttaagaaagaaaattaatacctcatcttttt

SEQ ID NO: 183591 - DNA, 122 bp, Homo sapiens
ggaggccaaggcagaaggattgctggagctcaggagtttgagaccagcctggcaacacagcgaaactgcgtctcgaccaaaaatacaaaagttggcggagtgtggtggcatgcacttatggt

SEQ ID NO: 183592 - DNA, 122 bp, Homo sapiens
gttctgggctgcagacgcttaccttgttcagtcctcgtggagctgggctggcctgtgcctcgccgtagactgcagactgtgaggggcagagccgaggggaggctatgaaaactgtgtccagc

SEQ ID NO: 183593 - DNA, 122 bp, Homo sapiens
acagcaggggctgaggatgcctggtgaatggatgcctgggagaatggatgccagaattcacgcatgaggctctgaacagggctgggaaaacttccaaacgaagggaagctcatgtcttggtg

SEQ ID NO: 183594 - DNA, 122 bp, Homo sapiens
atgagccactgcgacaggcccccaatgcattttcaaatctacatgctgtcaaaagtttcacggtaatttgtgacatgaaggaagattacttttatttgcctatttctgcctgtattataaac

SEQ ID NO: 183595 - DNA, 122 bp, Homo sapiens
tcctggctaacacggtgaaacctcgtctctactaaaacaaagtacaaaaaattagctgggcgtggtggcaggcacctgtagtctcagctactcgggaggctgaggcaggagaatggcgggaa

SEQ ID NO: 183596 - DNA, 122 bp, Homo sapiens
tgagttacaggtagagcaggacagggaggaatggatctcaggacaaacaggttcaggatccggcaaactaattttacactccagccattgagttggaactactggccagcctccccccgagt

SEQ ID NO: 183597 - DNA, 122 bp, Homo sapiens
aggagcgccctgggagcagggtgtccgaagcgcgggtaccgatctgggcagcgcggggcacgcggcgcgcgggcgagtctgcgtgcgcgcgcggacgccttggttcccggagcccagttgct

SEQ ID NO: 183598 - DNA, 122 bp, Homo sapiens
ctccctccagggcctctatagcttcctgagccgtcctaacgtactgtcgttcctgaatctcgcaggcaccgacactgccctggacactgtgagggggtgctccgtggggggatggatgaccg

SEQ ID NO: 183599 - DNA, 122 bp, Homo sapiens
aacattcaggccatggcaagtgacagttaggacaaggacaatatagcacacctgtgttcacgattccaaagagctaactcagaggcaactcttaggtctgccgagaatggaggtcatcttgg

SEQ ID NO: 183600 - DNA, 122 bp, Homo sapiens
gccctaaatccccaatcatgtcggcctccacttcataaaccagtggggcaggcagccacgcgaaagcctaaaggttaagcacataccattgacctgagagaaacgagttttctcacatcatt

SEQ ID NO: 183601 - DNA, 122 bp, Homo sapiens
tcataatataccccacagtggggaagtattggtacaaattaaagaagagatggaggagggcgggctaggcaatggaatcagcaagaatacaggcccagaggtaagtatgataagaaaacaaa

SEQ ID NO: 183602 - DNA, 122 bp, Homo sapiens
ataaaggcagactggcctcgttctgacactccctaagaaaaagttcaaagctgctcacctcgtcccatgttctcattctgcagatgggaaaactatctcagaggagttaagtaatgggctta

SEQ ID NO: 183603 - DNA, 122 bp, Homo sapiens
gcccaggggaatgttggtggggtgtgtttcgcttggttttcaacaaataatactgtccgacggcattgaggacacacacacagaagtggccaagacagacatgtcttctctcttatgagctc

SEQ ID NO: 183604 - DNA, 122 bp, Homo sapiens
caccctaccgcccgccttctgttggctgctgaccctgggggcagcccagctcaacgtcgtcgcaccaggtaataggagttgaagggctaaggagcctcacagctataaaagaggatgttaga

SEQ ID NO: 183605 - DNA, 122 bp, Homo sapiens
tttcagtataacactggatagaactggaaaaaacaaacttggggatcatcagctcttaagcggtactaaaagccatgggaaaggaagacaatccatggcaaattgcatagaaaagacagaag

SEQ ID NO: 183606 - DNA, 122 bp, Homo sapiens
catgagcgggaaagagcagggcggtgattgcttagtttatcctgggacacgggaactggccgtggactgagtggtgccggggaggggatcactgagaccgggaagggtcatccagacaaata

SEQ ID NO: 183607 - DNA, 122 bp, Homo sapiens
acggccgccgccaccgccgagggctggagctcgctgcccccatcccccacggcctgcggacgcccggccaaatctcagccgcagccgcagccgcagccacagccacaggcaccaccaccact

SEQ ID NO: 183608 - DNA, 122 bp, Homo sapiens
tgttgggcggggccggcgcggcgtgatgtaatctcgggggcgggacgaagcctaggtgggcggggcctgcgggggcgctgtggcggtacaagaacccaggcggggccggcgagcaggtgacc

SEQ ID NO: 183609 - DNA, 122 bp, Homo sapiens
gatccccgactcctccagctccaggtcgccgccgaaagcacgtggagggacctgccgctgcggccaaggtgtaagcaccaaccagctgccagctcggcccatcgagctcagaagctcgcgct

SEQ ID NO: 183610 - DNA, 122 bp, Homo sapiens
aggagctgtgccagtggagcgcggagtgcagcatccacctggagttgatcgccgacaggccgctgcaggttttccatgtggaggtgaaggtgaaagacattaacgataatccacccgtcttc

SEQ ID NO: 183611 - DNA, 122 bp, Homo sapiens
cctagttcggttgggtgctccatcttacggagccccaaacttattttgagaggccgccaccgtgttatgggcgtgcgcaactgcctctacggcaataatatgtcaggacaacgcgatatccc

SEQ ID NO: 183612 - DNA, 122 bp, Homo sapiens
tggggagcgcctctgccccgccgccccgtctgagatgtgaagagcgcctctgcccggccgcgaccctgtctgggaaatgaggagtgtctctgccccgccaccaccccgtctgggaggtgagg

SEQ ID NO: 183613 - DNA, 122 bp, Homo sapiens
tctatcccagggtgccccacgtttctggttgtctttttacatttctttaattgggtgtgacgaatcagctctcaggccctgaccttccgctcctcctcctgtgtccctgagccagacgccct

SEQ ID NO: 183614 - DNA, 122 bp, Homo sapiens
gtggccgctttcagctcggactgaattacctgcgctcttttcggctggcgggctggcgggcggtgctggtgatgttaactttttatctccaggtaatctcaaacctacaggaagttgcaagg

SEQ ID NO: 183615 - DNA, 122 bp, Homo sapiens
ctgccatcccatgctgcacgggcaggttttacctttctaacccaggggttaccctaccttcgctgaagtcttcagctcgccccactgggcagcccctagaggcacagatgtcccgtccaggc

SEQ ID NO: 183616 - DNA, 122 bp, Homo sapiens
ttgccgctggcccggctgtgggcaggtggcaggtcccacaggcgcagttcgtgccacctgcgcatggggtggcacacatgaacaggcacacacgcgggaatgaacctgtcaaaggccgtcgc

SEQ ID NO: 183617 - DNA, 122 bp, Homo sapiens
ggaccgggtctactccccgagggcgatgctcccggggcagggacaatgggcaggggaccccgcggtgtggcggaggaggcggcggccctcccctgcaggtctcgggagcccggcggcgctga

SEQ ID NO: 183618 - DNA, 122 bp, Homo sapiens
gctactcaattttgcagaaataaacatgtaagagaaatcaaagtcctgctcccaaaagaacgtttcagaagttgttttgaaagctctgggcaagctacatggatgaaagaaatgctacaagg

SEQ ID NO: 183619 - DNA, 122 bp, Homo sapiens
ggttcacggttaatttggctaccagctctgtccaggtttgagcctcgggttctgcatctgcggaatgggaagacggttgggagagatggcctttgccaagggtggaccgagagcgaccgccg

SEQ ID NO: 183620 - DNA, 122 bp, Homo sapiens
ccaaccccccgaggccactcacctcccccaactacccaggacagaggatgcccagccagccgagctccgggcagtacccgccccccacggtcaacatggggcagtattacaaggtgagtccc

SEQ ID NO: 183621 - DNA, 122 bp, Homo sapiens
ggagggctggcagtggggtgcaggagccagccatgagaacccctcaagtacagttgaactcgctgggaggttactgctgtactcccggggttttgctatggcctgactggggccaatgtgtg

SEQ ID NO: 183622 - DNA, 122 bp, Homo sapiens
tgcagtgttttgtagcctcaagatcagtgagggaatcttcgggcccccagcatgcaggaccgaagcccccgagacagctgtccctcagtcccaaggtccccatttggaagcagccacaggag

SEQ ID NO: 183623 - DNA, 122 bp, Homo sapiens
tcagcagcccccgagtgttgtattctcctaacccatgtgcatgtcttccatggggaagatcgttttgaaatcagttctttcctcctttaaaggtaaacataagtcgtggggatctcagtgag

SEQ ID NO: 183624 - DNA, 122 bp, Homo sapiens
atttgaaccatgtttggattgaagccgcctctgtattacttaccaggtaagcgagccgtgcgcctccctgggtcccgcgcggcgccggcgcgcccgggaccctccctcacccgacccccctc

SEQ ID NO: 183625 - DNA, 122 bp, Homo sapiens
cggttttacctccattttgagacaggactcacctcttccaactcgagatcaatatgggaccgagaggaaggtggccagcgttttcatttaggcaactctgcctggatcagcacactttccct

SEQ ID NO: 183626 - DNA, 122 bp, Homo sapiens
cacaagcagggcaaatccaggttttgaagagcctgatgcttataaaatctgggggacactcgttaagaaaaaataacacaaaattacaattacaaaattgctggggcctgtttcagggcctt

SEQ ID NO: 183627 - DNA, 122 bp, Homo sapiens
gcctgggcaacaggagtgaaactctgtctcaaaaaaaacaaaaaacaaaaaagaacaccacgggaaaatcaagtgtgaagcaagagctcaactcttaacaggggcaatgtttggagttttgt

SEQ ID NO: 183628 - DNA, 122 bp, Homo sapiens
acatcattggccactggtgattagtttaacttttagcccctcatctcctggaggttggggcgtgggactgaaaaatcctatcctctaatcataccttggtctgtcctgtgagcagcccccat

SEQ ID NO: 183629 - DNA, 122 bp, Homo sapiens
aggcgctcacgcgccgcggtggccctcaggggcttttgtcaccctgccagtgggggctctcgctctagccgcacagagaccaagccgggttctgcaggccctgagggaggcggggggtggga

SEQ ID NO: 183630 - DNA, 122 bp, Homo sapiens
catgtccttaccctggatccagggacagctcagcagaattaggaacagcagctggggaggcggcgggtgctgggccctgggagtccccatggcgactcaccccgatctctctcctctgtgcc

SEQ ID NO: 183631 - DNA, 122 bp, Homo sapiens
agccctagacggggcaggagcaatgaatgtggggaggcgcgggagacgggagattggtttcggagccaggtacggagccaagcagtcagagagaagcaaaaattgacgcagcaccgagaaca

SEQ ID NO: 183632 - DNA, 122 bp, Homo sapiens
tggcaccccaccaccaattcctcatagctccatatctctccaggaaaggaaggtacccctcgagaaggggctgggtaatcaaatgtgtctccctgtagccactgagggcggcggggggggga

SEQ ID NO: 183633 - DNA, 122 bp, Homo sapiens
cacacccactgtgaaatgcaggctcctgagctctgggggcctgtggagctgctgtctagacgcagatcatggtgagcctggggccctcttgcttccagccctgagatgtgtgcccaactcca

SEQ ID NO: 183634 - DNA, 122 bp, Homo sapiens
gcactcgccaaggaccggcctggcagagatagaaaactcgcagtacgtttgcctcagaaccgcctcaatccggaaacagaaactccccaggcccggcactgcgggagccacctctttcgagg

SEQ ID NO: 183635 - DNA, 122 bp, Homo sapiens
ctctactacagagcacagcaatgttcggcctggtggctcacagaagctgaggctcttgaacgtctgggcacagcatgaaagcatcaagcttgagagactgcaggccttaacaaactagaagt

SEQ ID NO: 183636 - DNA, 122 bp, Homo sapiens
aggtaaactttttctcagtccctcatctcgttctctttcaggatacaggtgtaggtaaatcgagtattgtgtggcggtttgtggaagacagttttgatccaaacatcaacccaacaataggg

SEQ ID NO: 183637 - DNA, 122 bp, Homo sapiens
gggctggggtggcctggaccccaactccagcccaccctcagttgtctgcaggtggggctgcggcagttggacatgtccttgttgtgccagctgtggggcctgtacgagtcaatccaggacta

SEQ ID NO: 183638 - DNA, 122 bp, Homo sapiens
ttcccggctcgctgtctgatgcccgcggtagccaatgagctagtggtgtttgtcctgctccgtccccgccctccaggggaaccaatcccattgcaggagaggcaggacgcgcaaaggcccga

SEQ ID NO: 183639 - DNA, 122 bp, Homo sapiens
gcaaaacagaaacgaacaggcaaaacctgaacgaaccaaacaaaaactgattttctcttccgcttgagaaaatgcaactctaatgtcctcaacagtttcttactgcctccaggtatcctttc

SEQ ID NO: 183640 - DNA, 122 bp, Homo sapiens
ctgtaaggggtcattcattgtttaccgggaaggcagacccatacaaaacccaggaagctccggaggctgagagccgtaagagggaaggtaagcgcacgtggtgtgaacacttgggaggatgt

SEQ ID NO: 183641 - DNA, 122 bp, Homo sapiens
gctcctgctgggtcccctccatcctgcactaagatgagaggtctaaggcaagccctgtgccgcccattctgggggaaccatggcctacctgcagatgcaactaccaaatcaacacattagac

SEQ ID NO: 183642 - DNA, 122 bp, Homo sapiens
tcgtatcgggagccaggccgcagggcctgcactgagtattggctcaggggaggctgcagccggaaggtggtcctcccaccttccccgcccaccaggccatatttcaaaagaatgaaatcgac

SEQ ID NO: 183643 - DNA, 122 bp, Homo sapiens
tgatattttgagatgactgcaacatttctagtgcagtgtgaaaatacctgtaaagtctaccggtgaccaagtagttaccagtactgcccatatgacttgctggttgcttatattcctaatgg

SEQ ID NO: 183644 - DNA, 122 bp, Homo sapiens
cattaacacttgctcgccaggttggtggaggcggggcggattctgctggcggccgcggggcggcgagagtgggggctctttaagcgcccaccaacgcgggggcccgaggggggcagggacgg

SEQ ID NO: 183645 - DNA, 122 bp, Homo sapiens
ataacatatagccagttgttcataggcctgtgttttaaagaagggcaagcctgaactcaccgtcctgcctcagggcctgggctccatacctggggagtagacagtcttctactttctaaaaa

SEQ ID NO: 183646 - DNA, 122 bp, Homo sapiens
aggaggcgggaggaggaaggtggcaggccggggaccctggctgtgggctgggcacaaaggcggggtctgggcacccccagcattggcttattctgccttctgacctcttctgcccaagacca

SEQ ID NO: 183647 - DNA, 122 bp, Homo sapiens
acttgctccaacgccctgttccttaggaatttgcagtcacagcatttgccacatatgttccggcaacaggggtgaggttgaggcatcacaggcctcttatggtccagatgagggatgatcag

SEQ ID NO: 183648 - DNA, 122 bp, Homo sapiens
gccaaaaagaaaaggcccagaaaggacgcagccacccaggggcggagcgtggggagggcgcgctccctctgccgctgggagccgggtggtagctgagcaccgggaagcgacctccctgacgg

SEQ ID NO: 183649 - DNA, 122 bp, Homo sapiens
gccccgtgtcccggtgtccgccgcgtgctcacccagccgccctgagcctgcagccaggcgcggtgctgccccatgagccgcgagctcagcaaggccaccaggcgctggcagtcccgggcgac

SEQ ID NO: 183650 - DNA, 122 bp, Homo sapiens
gcggtgcaagcggctctgctttccctcgccccgccgtcgggtgctccctgcccgcctccccgtgtcagctttccctgggccccgccgggaaagtctgggcctcgaaattcgaaggcagcggc

SEQ ID NO: 183651 - DNA, 122 bp, Homo sapiens
tagtgctttttacacatcagatgcatcagcaaacactcgcttctggggccacccagactgcgctgtgctcaccagagcagatgacaggttgcaggtctgccctgcaggtcaggaggatgcaa

SEQ ID NO: 183652 - DNA, 122 bp, Homo sapiens
tcctcgaggctccaaaaccaggctctaggcggggacgactgcagccgttatggaggccaccgcggctacggccgcggctgaggcctccccaggtggagcggtggcctggaggggaatcttga

SEQ ID NO: 183653 - DNA, 122 bp, Homo sapiens
gtcagttataaggtggaacattaaacactagttttaaaccacctaagagtgttaagaaaacgtcattgaagagtgaattttatttttcaacagacaaaagggaggaaatgtttttctagcct

SEQ ID NO: 183654 - DNA, 122 bp, Homo sapiens
agtgagagaccattagcaggtctgactgaccgaataacagactctcgggatcaaggcgctcgtgctgtggaaaacgaaaatgggcccctcactcagtattcttccctccatgggaattcaat

SEQ ID NO: 183655 - DNA, 122 bp, Homo sapiens
ctgtgatgtggtggcaggaggtaacatgcagccaagacccggggccgccttgtctagccacgtgatctcagagatgttactcaatatctctaagccttggtttctgtggctataaaatggtg

SEQ ID NO: 183656 - DNA, 122 bp, Homo sapiens
tgtttccaattgatcttcccaggaatgaagttaccagcctcgatgcagctgtgcacaaggcggaaagtaaagaggggcggggggccgctggagcgaaagagaaaaagaaatgaaactcgaca

SEQ ID NO: 183657 - DNA, 122 bp, Homo sapiens
caaaccttttcaactacacgcagcaaaaagctaatacaatgccttctgcatttgactgtacgtctcctgcagtgattaatgctgcctccctaactacattgtccggagcaagtgtcaagccc

SEQ ID NO: 183658 - DNA, 122 bp, Homo sapiens
ctcccaaagtgctgggatttcaggcgtgagccactgtgctggctttagtcatctgtttcccggatagactgtgagctccccaggatctagcacaagcctggcatatgacaacataaataaat

SEQ ID NO: 183659 - DNA, 122 bp, Homo sapiens
ggaggaagtcggctccggggcggaacctggactccccgccttcctcccactctggtctcccgactccccgccccggtccgttgccctccagcaaaaggcgcttccttactacacccttggtc

SEQ ID NO: 183660 - DNA, 122 bp, Homo sapiens
caaattacctggctcccgctgaactccagcacctagaactatgtcacactcgtagtaggccgctgcattggttgaacaaatgattttgaaagaatgaatgtcttcctctgtgcctgcatttc

SEQ ID NO: 183661 - DNA, 122 bp, Homo sapiens
gaatttgacgtgccaccaggcgcggggctaggttcacaagatacagtagtgagttaggcacgattcctactaccagaagcttagagcatagggaagactaaaagtaagccaccgtctacaat

SEQ ID NO: 183662 - DNA, 122 bp, Homo sapiens
ccttcagccataggcgctggaggttgtgctgacgctcgaaggtccagaccagggcctcctcgcgactgcgggcaaaggtgcaccggtttcggtggcgccggcagccgagcccagggctgtag

SEQ ID NO: 183663 - DNA, 122 bp, Homo sapiens
ttataaaacaaggcatgaaaaagcacttgtctgaatatcattgacgtcattttatgagcccgattttaacacaccaatcacaaagaacctgtgccaaagttagtctagcattaaaaattaca

SEQ ID NO: 183664 - DNA, 122 bp, Homo sapiens
aaagtttggcctagagggtaggtccagcctctcccaactaagtctcctcactagtctccacgacttcaaatccctgattccacagcctcccgctcctgccagctctgaacctgagactggta

SEQ ID NO: 183665 - DNA, 122 bp, Homo sapiens
caagagtctccagaggcaaggaggcatggttagaaaacagcccattcagcagacactggacggtacagatcctatccctggggtgttcataaccaggacagatcagattctaggccaccaat

SEQ ID NO: 183666 - DNA, 122 bp, Homo sapiens
tggcttggaaaccactgaatgactttgtatcttccatccatccatgtatccgcagcccagcgaatgtatattgggagcctcagacatgtgaccagggccttgtgggccagaggcagccagga

SEQ ID NO: 183667 - DNA, 122 bp, Homo sapiens
cctgggcctctgcagacttggttctggtgggacagctgtcccatcataagctgcagctgtcgcagctgctctcactcccacatccctggcacatgacccttccattcatgttttaggattct

SEQ ID NO: 183668 - DNA, 122 bp, Homo sapiens
atcaggaatttccagagttgccaagctgattggatcaaaggtccacagcaaacaggcctgcgtcttttgtaacatttctcctttgctgccacctggcccctcatggaggcagtgtaagagca

SEQ ID NO: 183669 - DNA, 122 bp, Homo sapiens
tcccgcactgacctctcttccgctcccgtttgtcctgcaactgcttcttcttctgcttcacgctgaatggcttcttcctcggcatggcccggaccagtcacctggcccgccctccgccgagc

SEQ ID NO: 183670 - DNA, 122 bp, Homo sapiens
gcccaagctgccgcagccactgctttaaagggagccggggacgcggcgctggggactgggcgaggcgggtggcagaggcaagaggagagtggtcgagcgccggggccaacactcgggtcgcg

SEQ ID NO: 183671 - DNA, 122 bp, Homo sapiens
ctgaggagagtttacacagatatgggcagagtaaagagatcaagagacagtagaaagctgcgttttgagctgcaacttggtagcaagggggtggccaagctgagaagatggatgcagtgagg

SEQ ID NO: 183672 - DNA, 122 bp, Homo sapiens
gctaaggtggactctcttgcagccaacttcccatcagatcaccctgctggacttgcagaccggaatggggctcgcctaaggagccgagcgctgcggaggctgctgcgtgttggatgggagtg

SEQ ID NO: 183673 - DNA, 122 bp, Homo sapiens
caggtgccccagcctacctcgcgaatgcccatgctccagtcgcaggacacctggcggaagcggggagccctggctcgcatcacagtgaaggccacctttgcctggtgacgagtccctgcggc

SEQ ID NO: 183674 - DNA, 122 bp, Homo sapiens
ctcattgtggtttttatttggatttccctaatgactgatgatattgagtatcaaagttctcgttgaccatttgtttatcttctttggataaatgtctcttcaagtcatttgcccattttaaa

SEQ ID NO: 183675 - DNA, 122 bp, Homo sapiens
aagtggggattttgatagttcgggctgacctacgcgggtaggacttcgagggcccaggagcgatttaaggattttagaatagttacccatactggctctgcaactcctcgatattcaagcct

SEQ ID NO: 183676 - DNA, 122 bp, Homo sapiens
ctgcactaggcgtgctccgagtcttccctcttaccattcttgggtaagggccgacgttctcgctttcggttcagctgttcctggtgtcctgagtggaggcttccaggttcctcccgagacac

SEQ ID NO: 183677 - DNA, 122 bp, Homo sapiens
ggccgacttccgcggcggcgggagacccctgctcggggaggcggccgagctggaggacgacgaggccctggaggccctggcgccatcatcgccgctcatgtacccaagccccgccagcgcgc

SEQ ID NO: 183678 - DNA, 122 bp, Homo sapiens
aatgagacattatctcttttcatttgttgaggccctacaaggtgccagaaccgttccaggcgttggggatatagtaattaaaaacaaaacaaaacaaaccaaacaagaaatgtataagccag

SEQ ID NO: 183679 - DNA, 122 bp, Homo sapiens
cctggcacattttaggtgctcaataaatactgatagattgaataattggactaatggtggcgtgggcaacccacagtcagtgaataaatgttaactgagcacctactatgtgtcaggctctt

SEQ ID NO: 183680 - DNA, 122 bp, Homo sapiens
gggccagggccgccgagagcagcaggaggacggttcggggcgccatgaccagcatctcggcgtctgaggagactctgagtccgggtgggtgcgtggggactttagaactgggaccgcggcga

SEQ ID NO: 183681 - DNA, 122 bp, Homo sapiens
cgggaactgcggagcagtgattgcggccctcgcgaggccggaagtgggcgggccttgaggcgaggccgccctaggtaggtgtggccgagacagcggggagcggaagtgggcgtggcctggtg

SEQ ID NO: 183682 - DNA, 122 bp, Homo sapiens
ccactacctcagctgcacctccccgtgttcctgctatcgcccgctctgccgcctcaacttcggcctcaatgtcgtggagaacctcgcgttgctagtgctcacttatgtctcctcctccgagg

SEQ ID NO: 183683 - DNA, 122 bp, Homo sapiens
tcagcctgctccctccagcaggcaggcctgcaactctcagagctgcccacctgcatggagcgccgggccctgggcagaggtaaccagggtggggttggcatgggtggcagcagggcccctgc

SEQ ID NO: 183684 - DNA, 122 bp, Homo sapiens
gcagcagccggtgcgcggccgcggcgagggcgggggaagaaaaacaccctgtttcctctccggcccccaccgcggatcatgtaccaggattatcccgggaactttgacacctcgtcccgggg

SEQ ID NO: 183685 - DNA, 122 bp, Homo sapiens
ttgtaggacactgggtgctccaataattgtaaatatatctaaaagagcatgtgcaacttccgtaggccttttagactttaatgaccgcaaaaaagttaactttgtacagagatcttgataat

SEQ ID NO: 183686 - DNA, 122 bp, Homo sapiens
aagtgtgcatctccacaaaacacatgctactgtcttatgacagagccttcaggggtgcctcgttgcctttcaggataaataaaaactcttcactctggcatataaagccattcatgagctag

SEQ ID NO: 183687 - DNA, 122 bp, Homo sapiens
aagtaacttgccaaagatcacgccgtcaggaagcgacagaccccagatccaatagcagcacgaagcctgagccactgaatgaatggtggaaattacggttccatcttggcccaaacgtggga

SEQ ID NO: 183688 - DNA, 122 bp, Homo sapiens
ctgcagatgaccagggttgccccatcttcgactaagaaagctggcgatctgtttctcccacgaaatcttctgactgttagaggtgtcgtcagttattacttctgagccatatgtgagaggtc

SEQ ID NO: 183689 - DNA, 122 bp, Homo sapiens
tatcgtgtaggtaaaaattaatcttcagagtattacagacatgcgtgcccacgcgctaggcgaaagtgcgagtcggaagcacttcattccctctcttcgctagccggaagtcgcgagatctg

SEQ ID NO: 183690 - DNA, 122 bp, Homo sapiens
acctgcaccttggggtcgttgagttttagtttaggtcttccgaggaatgcacagaccacacgttgtcaggcttcccttggccaataatgtggagtcttttggtttttctgttcttcagagtt

SEQ ID NO: 183691 - DNA, 122 bp, Homo sapiens
ggggttgcgggactggtgggctctccgggcaggcggcggtggcggcacactcgggacagtcgcattccaagacacaaagccccggaagaatagctctctggcagggttttcgctggaccata

SEQ ID NO: 183692 - DNA, 122 bp, Homo sapiens
cgcgggcgggtgcagggcccctctgccgcagggaaaccggcgttccccgcgcaaagcagccgctgctcctaatgagctcatgggttcaccgcgctgagctagccagagcggacccggcttcg

SEQ ID NO: 183693 - DNA, 122 bp, Homo sapiens
aggaacaaactccaggcgccccacattaatttaagagctgtaaaactcaccgtgagggtccgcggcttcattcttgaagttagtgagaccaagaacccaccaattccggacacagtgggcgt

SEQ ID NO: 183694 - DNA, 122 bp, Homo sapiens
tttacagtcatctgcagagaccaacttttccctggaccaaaacctgcagggcacttggatcgcgtgggctttcatacgagagtcaacaacagcctacacggaacaactaaggaaacagacat

SEQ ID NO: 183695 - DNA, 122 bp, Homo sapiens
ctgtaaatgagggcgactagatgggtgcggactgtcatccgtgttgagacttccggcccccgcagaatcaaccttaccggcgggagcacctcgaggggacgccgctcgcactagggggcgcc

SEQ ID NO: 183696 - DNA, 122 bp, Homo sapiens
ggggtaaacgggctggggcgcggggttaaggggcggggtggggcggaggctgtctcccgccgcgcctgcctcggatgagggcagcacctgctgggccgctgaacgccctcccctctctctac

SEQ ID NO: 183697 - DNA, 122 bp, Homo sapiens
caccccggagtggaactgctgggtcggggtaagtggatcttcagctctgggcgacgctgccgggctgcttcccaagttccagatccaccacacccccagggggttccagcctgcagcggggg

SEQ ID NO: 183698 - DNA, 122 bp, Homo sapiens
gctgagatcacctgggccatttttattgtagtcttcgaagtcattcacctgccttggaaacggtgataaccatcatggaattgttcaggagtggagctgaaagagagatgtagtggtcagat

SEQ ID NO: 183699 - DNA, 122 bp, Homo sapiens
tgagctacccgaactttcttctgagcaaaggccattttgggacggttttgcctcttctttcgaacttctttcttgggcttcttctcatagcctggattctcttgtagagcagcatgagcttt

SEQ ID NO: 183700 - DNA, 122 bp, Homo sapiens
cccactaggaaacaggctcagagaggttagaaagctgcttcgaagctttctgtgggcgaacgactcacctggggatctgttaaaatgcagatccttactcagtaggtctgggctggcctgag

SEQ ID NO: 183701 - DNA, 122 bp, Homo sapiens
tctacacatcgggtagcatcctgtgcatgccgtggggcgcctggctgtcctcactgcgcgcgtctgggcgggctgtccacaccgtccgtggagcctcactggctgctgcacggtggcattgc

SEQ ID NO: 183702 - DNA, 122 bp, Homo sapiens
gatcgtgacagcgcacgagactaaacgtggactcagacgccttctgcaaaacacctgacccgtgagcacaagtcagggtcaaggtcatgaaagccagacagaggaacagcctcagactggag

SEQ ID NO: 183703 - DNA, 122 bp, Homo sapiens
cgcgaagtccatgaccatgacgagggctgtgagaactgtaaatagggatttgggcagtcccggctgattctgaataaaagtccggaggggcgttactttcgggtctcggcctgtgtgtcccc

SEQ ID NO: 183704 - DNA, 122 bp, Homo sapiens
gggctcctcaggccgcccccgtccttcaccgcgcgctcccgcgctggggctgctcggcggcgcccgctccttagtattccccccacggagcccagccgcgccgccgcagccggcccggggga

SEQ ID NO: 183705 - DNA, 122 bp, Homo sapiens
ctggtgagaagaaggtgactgaagcctggatttctgaggatgaaaactcacataggacgacgtcagacagactcacggtgatggagctcccctctcccgagtctgaggaagtccacgagccc

SEQ ID NO: 183706 - DNA, 122 bp, Homo sapiens
tttctataccttatataagttttctgcccaaaactttcctcgtccgtgcgttccctaccacggcgcatctaatctgtctgccctatttgtggctgcacagctcattcttgcaaccggctggg

SEQ ID NO: 183707 - DNA, 122 bp, Homo sapiens
tggactcaacttgggcatggcccctgatggagaatactggaggcccagatttgtactcaacgtctcagccacctgaaaatcattcagaaataaattccttggttcttatttcctggaagggc

SEQ ID NO: 183708 - DNA, 122 bp, Homo sapiens
tggcccacgcctgggcacaaccagcacacaaaacactgccgtggggtgggctggggatcccgggaggggtgcggggtcggggcggcggtggggagagctgcaccgtgccagggagaagcaag

SEQ ID NO: 183709 - DNA, 122 bp, Homo sapiens
cctccccttttgaaactccctaataaaaacttgctggtttttgtggcttgtcgggcatcacggatcctaccaatgtgtgatgtctcccccggacgcccagctttaaaagttctctcttttgt

SEQ ID NO: 183710 - DNA, 122 bp, Homo sapiens
aacctaataatttgacccttggtcatgtttatttatttatcccgagacagagtctcaccccgtcacccaggccggagtgcaatggtgcaatcttatctcactgcaacctcagcctcccaagt

SEQ ID NO: 183711 - DNA, 122 bp, Homo sapiens
cctggggcggcggcgggtgcaggggcggctctcccaggcttggaggctggctaggtggggcgctcagggtgcgcaggcacgcctcactcagttcgtgtgccttggggtggcccccggcgctg

SEQ ID NO: 183712 - DNA, 122 bp, Homo sapiens
tctccgttgtctgttccgcccccaaaagcttccctcctttaggtttaacctgcgcccccgcgctctgcatcagcgcggtccccgaccccgtgcagttggaaacactgggcgcctccctgccg

SEQ ID NO: 183713 - DNA, 122 bp, Homo sapiens
ccgcagcagcagcataaggctggccccacacatggtgcaacacagcagagccagcagcaccgctgccaccagccacagcgtccggcacaagtggcggctgggctccccgaagaactgggtgc

SEQ ID NO: 183714 - DNA, 122 bp, Homo sapiens
taccccagactttctgatttaattcttgtggagtgaggcccagcattggataagactccacgtgattccaaagtttcagtgaagagctgaaaatcaaagtcgtaaggaagttgaccttgaag

SEQ ID NO: 183715 - DNA, 122 bp, Homo sapiens
ggggtccccatccagggcaatgctcgctgctgaagatcatctgtccagctctcctctcctcggcttccccactagaccccattcctccgagcgtccctactcccctctgtgcacccctggcc

SEQ ID NO: 183716 - DNA, 122 bp, Homo sapiens
cctcacggtgccaccagggccgcactcaccacacattcccgctcttggtctggtccacgacgagcaggttgctatgcacctcgtccaccagctctggcgcgatccagcgcagaggcacccac

SEQ ID NO: 183717 - DNA, 122 bp, Homo sapiens
tgcctgtgaggagacaatgcaaaatccatgcctccattcagtcactatggctagactgctcgttctgtgccatggaccgggctctcattcagacactgcccctggggatggcggctgttaca

SEQ ID NO: 183718 - DNA, 122 bp, Homo sapiens
gcctactgggccctccgctttaaggagcaggagtacagcacggagcaccacctggtctgccgcatgctgcttgactacaaagccgaagtcaatgcccgagatgacgactttaaatctcccct

SEQ ID NO: 183719 - DNA, 122 bp, Homo sapiens
aaggaagggagggaaggaaaggatctccgttttgcattgtacttgcctttccacacacttcgcaagtgaaaactttgggcttggcattaggagagcctcggctgaaatccgaggttttgaac

SEQ ID NO: 183720 - DNA, 122 bp, Homo sapiens
aaggctcactctggctgctgtgtgaaaaggatcaagaacagaaataggaaaaggattagacggtcactgcagtcactcaggtaattcctgagattactttggaatctctcttgaaggtttgc

SEQ ID NO: 183721 - DNA, 122 bp, Homo sapiens
ctgggtctctctggtgttggtggtctcctccctccgcatctctgattccgcgtctctccgcgtcttggcgtctgcatctccgcctctggctctctcgggtctctggtatctcgtcgtctctc

SEQ ID NO: 183722 - DNA, 122 bp, Homo sapiens
tggacaacatggagaaaccccatctctactaaaaatacaaaaattagccaggcatggtggcgggcacctgtaatcctggctactagggcagcagaatcacttgaacctgggaggtagaggtt

SEQ ID NO: 183723 - DNA, 122 bp, Homo sapiens
ccgccatgcctgagccttcccaccccctctgtggcctcctgtgcggacgagcctccccgacgaatgccgccccctgctccacggcgcccagtcccatcgaccacccaagagctaaggaatgc

SEQ ID NO: 183724 - DNA, 122 bp, Homo sapiens
ggtgccccctcgggtttctttaagtttttttcacagccatccaggaataacctgagtcagcgagttctgaatgcaaaactcacgggaggtgtcgtttgtatcttccacctacctaattttca

SEQ ID NO: 183725 - DNA, 122 bp, Homo sapiens
cttgaagtccccacaataaaactgtagtagctccttcggtgcaccttgcgtctgaggagccgcctccgaggccgtgtgtgctgccctgtttgtctctttgtctcgctgcccctcggtgtgac

SEQ ID NO: 183726 - DNA, 122 bp, Homo sapiens
aaaccggaggtaaaaagttcagaaaagaaaaaaacagcagagaagataaaagagaaagaacggcaacagaagaaaagcaagaagaaattaaaaagaggttaaaagaacctgaagaacctaaa

SEQ ID NO: 183727 - DNA, 122 bp, Homo sapiens
caccttggtggagaacaagaaagctcagctggtggtgattgcagacgacgtggatcccatcgagctggttgtcttcttgcctgccttgtgtcgtaaaatgggggtcccttactgcattatca

SEQ ID NO: 183728 - DNA, 122 bp, Homo sapiens
ccgcagaccctggtgcaatgctctggtggctagggatgtactcatgctcatatgtgtgcacgcttggacacccacctccatggacacctagccaccctgttgtgtgtccttatgccagttga

SEQ ID NO: 183729 - DNA, 122 bp, Homo sapiens
gtccattattgattactccttatcccctttctttcctctgcatgaaaggcaggtctctgccgggcgcagcggctacctgtaatcccagctactcgggaggctgaggcaggagaattgcctga

SEQ ID NO: 183730 - DNA, 122 bp, Homo sapiens
ctctcctggggctgccgcgaaaattgggccggttggggtaacatctaacctggggtcccgcgaaagagcccatcagttccgcttgggggccccactgccctcccacctcctacgctgggcgc

SEQ ID NO: 183731 - DNA, 122 bp, Homo sapiens
tgcagacgctccgcaaacggtcaataaacgctgaggggccaaaagccactcctcaggacgcgcggcggagagacctagcctcaccccagcctcgccccgcgcagttgtttacaagcgctcgc

SEQ ID NO: 183732 - DNA, 122 bp, Homo sapiens
aaggaagaatgcaaagagaagggatgtggctgtacaacctccaagaaggtaaaccttaggcgaggcacagggactcacacctgtagtctcatagtctcagctactcagaaagctgagacagg

SEQ ID NO: 183733 - DNA, 122 bp, Homo sapiens
caataaacactttaaagaagcaaacaggctgctctcattttggacttaacaaattctacacgattccatggcaaatactttgcaacattatagccaatacttattaactgaagaggtcaaag

SEQ ID NO: 183734 - DNA, 122 bp, Homo sapiens
ttgtaaactcaaaagttaaagatgtgccaagagctgtctcccacgaacttgtttaacaaacgtactgactttgtatgttgatccaatacccatgctggccactggacataccagtacaaaca

SEQ ID NO: 183735 - DNA, 122 bp, Homo sapiens
gctggcccagcgtatggtcattgggggccatttcttgcagagatgccctgctccctgacgcgctcgctcttctccagagttggccaaaggtgctcttccccgcagaccctaaccacacccag

SEQ ID NO: 183736 - DNA, 122 bp, Homo sapiens
ggctcctgcactgagctctggtgagtccatctgggtcctgctggatgcatgagctgggggcgggagggtgccctgggttgggtcagtgatgagaaccttatattgtcctgaagaaaggtgat

SEQ ID NO: 183737 - DNA, 122 bp, Homo sapiens
ggctcgggccccaggttggagtagccacgctagcggctaggccgttccaccgggtagctccgcccttccttttgctcaggcagctaactttggagccgggcaagacgtgttttcccgctcct

SEQ ID NO: 183738 - DNA, 122 bp, Homo sapiens
gtgagaagcccagggcacataggaggacccagtgggaacagccagagcctctctgcacagcgccccgcctccgcttttgcctgccctgattacaaaacgctgttggcacccaggggcggaag

SEQ ID NO: 183739 - DNA, 122 bp, Homo sapiens
cagttctctctcattcccgccatttacagccgagcgaacgagggcgtgtcacaactcattcggtcccgctgcctagatgggcgagccaaccagaagcgtgctgctgcccttttcactgccac

SEQ ID NO: 183740 - DNA, 122 bp, Homo sapiens
tgccgccaggccacgcacacagggcaccacttttcctgaaaatagaaaatgtgggcggggcgcagtggctcacacctgtaatcccagcactttgggaggctgaggcgggaggatcacttgaa

SEQ ID NO: 183741 - DNA, 122 bp, Homo sapiens
caaggagtttcattttttattctaagtgcagttggtatccactggaagtttcaagtagagcgtgcgttgtgagggatgtaataacaacaggcagtttaaaatacaatattgtacttcgattt

SEQ ID NO: 183742 - DNA, 122 bp, Homo sapiens
cgattcagaggggtgcaggagctgcggtacccagagcaagggcccttcacagccagagagcgtcagggggcttcccagagctctctaacctgggacctcagaagtttagcgaggcggtgtgg

SEQ ID NO: 183743 - DNA, 122 bp, Homo sapiens
actttcctagtcaaagaaaggggtgacagacggcatctggaaaatcaggtcactcccacccgaatactgcgcttttccgatgggcttaaaaatcggcgcaccaggagattatatcccgcaca

SEQ ID NO: 183744 - DNA, 122 bp, Homo sapiens
gtctccttggcgccggcttctgggcccgggcgaagctggtgcgtggcgccggggtggaggcggctaagtcccagggacttctgccctgcgcctccgacgggcatttgtctggctgcgtccgg

SEQ ID NO: 183745 - DNA, 122 bp, Homo sapiens
cgccgggcgctggggtgggggatggccgggcccgaccgggccggggctggggggcgggggcggaggcgggcggtgggggcgcgggccgggtggccgcgcatgcgtgcggcccccgctccccc

SEQ ID NO: 183746 - DNA, 122 bp, Homo sapiens
ggccacccccacctcccaccccaacctcctgggcttcggtcagaatccacagcccgtgcccgaagagcgcttcccgcctctggcaccctaccttcgctcagctccagggaaaaggggagagg

SEQ ID NO: 183747 - DNA, 122 bp, Homo sapiens
acagctgcggcggctgcgattcttcagggccgcggatgcggcggtgatccccaggcatggcggttcttggcgtgcgaaccccttccgcccaacgccctgccgcatccactggttcttccgtt

SEQ ID NO: 183748 - DNA, 122 bp, Homo sapiens
tctccggtagggggcatgaggagcgctgaggacagttgggacaatgtcctgcaaggcaggcgagagtgcagtgaatgtcagaacaggagggtcacgttgtataaatcactcccactccgccc

SEQ ID NO: 183749 - DNA, 122 bp, Homo sapiens
gaactctctaacggcggacagtcttctggacgcttagatctcttgcacatagccaggcatcgccttaaactgggttgggctggtcactgaaggctttctgctaccactatttcttctagcac

SEQ ID NO: 183750 - DNA, 122 bp, Homo sapiens
cctccctcccaccctgtgcacccagggaaattcatctcttctgggtcccaaccttggcctcgggagagccccagatgcccccctctgtgtctaccccagttactcagtgtggtcagacttgg

SEQ ID NO: 183751 - DNA, 122 bp, Homo sapiens
gagttaggggaagcctgtggacgccatgtgtacaaagtgaagtttaatcaaagttacaaacgttggtgggttttccgggacaaaggcccctcctcgacgcagggttcgcttgggcgacgcgt

SEQ ID NO: 183752 - DNA, 122 bp, Homo sapiens
cagggaagatggaagaaggctggttggtgggcagctagagacccacaggcccttcccaaacgtcagtgccccacccagcccctgtctcattccacatcataggagggtggtaggggggtggg

SEQ ID NO: 183753 - DNA, 122 bp, Homo sapiens
ccgctcatgtgttttgctcttgccattgccagtcatacgtctgctcccgtcatctcagggcgacgatttcttggtgctgctctgtgtgtttgctgttttctcacccttggcaggtacatttc

SEQ ID NO: 183754 - DNA, 122 bp, Homo sapiens
ggtcgctccctcagtcggtctcggggcccgggggccgggttccccccgcggcctcctcatcggctagccaccgagtccgccatcttcccagcagcccctagatagccgcccggacgccaatc

SEQ ID NO: 183755 - DNA, 122 bp, Homo sapiens
cgcgctcccctctcttcctctctcccgcccgccccgcgtcagcgcagaagtcgctgggtccgcttctgcagcccctcgctgctgtgtattctccttgcagacacctccaggatcctccacct

SEQ ID NO: 183756 - DNA, 122 bp, Homo sapiens
gcggcccgcagcccgcgctcttccgtctccaccgcgctctcggcagcctcagcgtccccacgcccactcctctgcagacaccccgacatggcgaagcataggccccaagcattcggcgcacc

SEQ ID NO: 183757 - DNA, 122 bp, Homo sapiens
tactgtgtggcagtttttggctgtgcttcaagagcagtttggaagcatggcaggctccaacgtttacctcacgccccctaactcgcagggctttgccccccactacgacgacatcgaggcct

SEQ ID NO: 183758 - DNA, 122 bp, Homo sapiens
ctcccaagggcctgctggcagtgcctacgctgtgccaactaccctgtctggtacagaccacggctgggtaagcacccttaaaagcaacagaaatgacgtctggaagctgaaatgtgaaactg

SEQ ID NO: 183759 - DNA, 122 bp, Homo sapiens
gtaagggaaggtaataatagtacccaccttttgaagttataaggagccgtaaatatgaagcgcttttttgagtgcccatggaagtaagcactagcaatcaatactcttaactgaaatccaag

SEQ ID NO: 183760 - DNA, 122 bp, Homo sapiens
cgtcctgccaagctccgggacttgggtgtgtaggggagggctggagccatccacccggtccgcatctgagccacagcccttcacaggagtgggaaggtcacgcgcgctctaggaggcccaga

SEQ ID NO: 183761 - DNA, 122 bp, Homo sapiens
acatggaatttgcccatagagaagttggccaccatcctgaacgagtgctttaacatatatcgaactggaaagtccagaaagttgaggctacctcttttgtgtgggctccttaaaaactcagg

SEQ ID NO: 183762 - DNA, 122 bp, Homo sapiens
ctgacgatgaagtctaagatctatcctctgacccactgtgctgtcactcttacaacaaaacgaaggaagcttaacattttatagtcagaaaaatcttgagaaaatgttttactggtttcatt

SEQ ID NO: 183763 - DNA, 122 bp, Homo sapiens
atttttcccaaaaagaaaggttagaataaatttcagagggttgaaaatgccagtttgatacgaaagtctttaaagcataggaagaaatcttagtcgcttcagtgtaataattctgtagatga

SEQ ID NO: 183764 - DNA, 122 bp, Homo sapiens
gatgggggcaggacgcgggagggaagggcagggggtggggggcgaggccccggggaccagcgcgcgagagtgcccagctgggaaatgcagctccgaattaacatcgtatgtttcataatcag

SEQ ID NO: 183765 - DNA, 122 bp, Homo sapiens
ataaaacccctatccatttgacatctaaatgtcatagcgacttttgggatagtttgctatcgacaaagggagacaaagtcaaggggtgaagggaaaggagggccaagtagagcctccacgac

SEQ ID NO: 183766 - DNA, 122 bp, Homo sapiens
cccccccaccccgggcagcgcgggcctgagcttgggggacaggcagaaggggatcaaacccgcacccagcgcagactcctacttgctcagtgacttcgcaagctcgtgggagggagctgggc

SEQ ID NO: 183767 - DNA, 122 bp, Homo sapiens
tagtcatttctttcgggtatatacctaggagaaaaactgctgggttgaaggatatgtgtacgttcaccttcagtagatgtttccaaatagtttcccaaagtagtttttgcctaactacactc

SEQ ID NO: 183768 - DNA, 122 bp, Homo sapiens
ggccggggaggcggggcggggcctggagggaggcggggcggggccagaagcaaagccgggcgtttctcccatgggaggtgctctgggtcctacggacagcccgctcccaggccagggggagg

SEQ ID NO: 183769 - DNA, 122 bp, Homo sapiens
actcaaactggccaggcgtatctgtagagaaaccttcctgtggcctggctctggaagggccgtgctttcttttccacactgtgatttgagatctaaatgacaccaacaaagacacaggtgcc

SEQ ID NO: 183770 - DNA, 122 bp, Homo sapiens
tctacccacgccacccctcaaacaaccctcactgtctccatagaggcagcattaactaaccgcgcatcaagatcgccatgtactggctgaaggattaaacaatcagaactcaacagaagaaa

SEQ ID NO: 183771 - DNA, 122 bp, Homo sapiens
cttcaagggcccacaaggccggctacgcaaaccctttcaagctggctgggaagaggccggcgcagccccacccccgcaagtcacatgatcacccctctccggccactagggcgttccaaccc

SEQ ID NO: 183772 - DNA, 122 bp, Homo sapiens
cctgggtcacagcgccgaggcacatcagggccaggcctctgcacctgccggccctctcgccgctctgcagctcacgtggtacagctttcttaggggattcctgatgctctgtgaggctgaac

SEQ ID NO: 183773 - DNA, 122 bp, Homo sapiens
tgctgatctgcctccctgactgctctactgctgtcctgaaaaatgcgaatttgacttaatcgccaattttttcattgaccttttatgtcacaaaacgagaggacacaaaaagctatatgaat

SEQ ID NO: 183774 - DNA, 122 bp, Homo sapiens
gtcctgcgcaccttagggctgggcacggcgaaacctggcgcccttgggagcagaggttctcgctccattcccctgtggggatctaagctccaggccggggtgtcggacctctgggttgcagc

SEQ ID NO: 183775 - DNA, 122 bp, Homo sapiens
ctgggcagcttccgtagcccccgagcgggagcgggcgccctcctgcgcctgccctcggagcgcctcgacttctccatggccgaggccctcaaccaggagttcctggccacgcgcagcaacga

SEQ ID NO: 183776 - DNA, 122 bp, Homo sapiens
gatgccgcacaagccagcaaagccttggaggcaaaggcggagctgggcgcacgcatgcgccgtcagcggcgagagagcggggggccgcgccccctggcgaccgaagggtgactgcgcgcccc

SEQ ID NO: 183777 - DNA, 122 bp, Homo sapiens
cgttgctcccgtgctggatgacttgcagttttctaaacacctcacatgtgctcagaccaacgtgctccgccatgccgatcctcctgttccctgcaaacccaaatcagccttcagggcttcag

SEQ ID NO: 183778 - DNA, 122 bp, Homo sapiens
ggtgccgggaaccagacagcatctttgtctctgaagaaaccactgtctccagggagaatacgaaacatacaaggaaccaacagtgggagagagtctgagcagcaaaacgtggggtccccatc

SEQ ID NO: 183779 - DNA, 122 bp, Homo sapiens
agttgcctgaaagcccctttagggtttaaacctggacttcattattcacaatcacattcccggtccccattacggagcctggtcacctgggtgcttgttagatatggaaatcatcagatccc

SEQ ID NO: 183780 - DNA, 122 bp, Homo sapiens
agtctgaggcaggagaattgcttgaacccaggaggcagaggttgcagtgagccgagattgcgccattgcactccatccccgtcagcagtgtgagattccgtctgaaaaacaaaacaaaagaa

SEQ ID NO: 183781 - DNA, 122 bp, Homo sapiens
atcatgaacgcggctccagcaacgtgatcgtgaacattgcaccagctctgtgatcatgaacgctgcaccagctccgtgatcgtgaacgtgaacgttgcccactggtgacaaaggtgaaactg

SEQ ID NO: 183782 - DNA, 122 bp, Homo sapiens
ctctaacttgtggcaactttttaccttcccatctggaaagctgggggcgggggcgctgcacgaggacgaatattcggagctgaaagagttaaacggtggggaacaaatacaggcccgggaaa

SEQ ID NO: 183783 - DNA, 122 bp, Homo sapiens
gtttccccggactcctgttatgatttgctctttgtccccaggtggctagtttactcccagcgaagaggaatgtctggattctcctctaagccctttgcacaaagtgcagaagctgtctcatc

SEQ ID NO: 183784 - DNA, 122 bp, Homo sapiens
cgtcggcgcgggatgctcgggcggggccccgcgcgggggtgcgcacattcccgccagccccgccccgcgcccggacgccccgcccccagacctcagccggttccgcccccacccgcaactcc

SEQ ID NO: 183785 - DNA, 122 bp, Homo sapiens
tctcgcccccacccctcccctcttctttccttctctccctccctctctcgctggctccctcgctcgctctcgtgtgcctgttctgcagctcagtcaagtacagccgccctcggaaagtgcaa

SEQ ID NO: 183786 - DNA, 122 bp, Homo sapiens
tacgagctggcgcaggcggcgggcggcgctatcgaccccgacgtgttcaagtgagcggggcgggtgggggccgcatgctagccagacaccccccgacctctgctttccgggtacgcccggcc

SEQ ID NO: 183787 - DNA, 122 bp, Homo sapiens
gaggtgtacgtctcttacaccttcatgaggtgtacgtctcttacagcttcatgaggtgtacgtctcttacaccttcatgaggtgtacgtctcttacaccttcatgaggtgtacgtctcttac

SEQ ID NO: 183788 - DNA, 122 bp, Homo sapiens
acgcggccctgaagatgcgggcgtcagtgcgcatgacccggtacctcgagtcctggggggcggcacggccctttgcacatctcaaccaccgtgagagcgtgagcagtggtgagacccacgtc

SEQ ID NO: 183789 - DNA, 122 bp, Homo sapiens
gcaggataacgtaacgaacagtttctgactaaaattcctctatcactcccccatatggctcgacacctccaccacaacaagcaaaagacacacacacgcacacacacgcgtacacacacaca

SEQ ID NO: 183790 - DNA, 122 bp, Homo sapiens
cgagggaccaggaaatgcgtctgggggcgccaggaaagatgagaagataaagtcacgatgcgtccagctagctatagacacaagcagaggagccagtaggccaaaggagacgcacagctgat

SEQ ID NO: 183791 - DNA, 122 bp, Homo sapiens
tcttattccaggtccttccattgcttgatcctaaagtttagaatccaattcccagtgccacggtgaagtctcccctttcctggcagagctgggactggggctggggagtgctaagctcgcgc

SEQ ID NO: 183792 - DNA, 122 bp, Homo sapiens
agcaaacactcagcatgcagtaatattaataatgtgattgcagtagtgagtgcttaagagcgggcagtctgtggttcctgaccagactgctgggggtcaaatctctttcagcattttatgtt

SEQ ID NO: 183793 - DNA, 122 bp, Homo sapiens
tgatttatctcccctggacagcgctttggaccagaaagctttgggctcagccttgggcgccggagcagtacgcgcaggggaactgctaagccggagcaagattcactcgcggggacccctgc

SEQ ID NO: 183794 - DNA, 122 bp, Homo sapiens
gtggtgcagtgaaagcaaaggagtcctcggcggcaggtgagcaatggtgatgaaccgaagcgcgccaggagaaggccggcgggatttcatatgagtgcagctgaaatatgacttcagtactt

SEQ ID NO: 183795 - DNA, 122 bp, Homo sapiens
aacattctaacctttgaacgtggtctctcaactggccgggacctagctctccccagagaccgtgagaaactggcagttgaccggctcctctgagcctgctgagtttttttctatttgcccaa

SEQ ID NO: 183796 - DNA, 122 bp, Homo sapiens
gatcacattttccgtttaatcctgtggttatagcacacttggaaataccaccctttggaccgggcaaggtggttcatgcctctaatcccagcactttgggaggctgaggcgggtggatcact

SEQ ID NO: 183797 - DNA, 122 bp, Homo sapiens
agggcagtggcctcacttcgaggaagtggtgacactgcgggccctcctggttacaaggaccgggcactgttggaccacgtggctccatcatgatgactccagttagatgtcaccccgcccct

SEQ ID NO: 183798 - DNA, 122 bp, Homo sapiens
ccctcgattccctccgaacccccccttaaaaacctacgccgactgctcctcctcttggcccggcctcgaaaggggcccacttaccgctccgcggttaataacaggcctcgcgctccctgaca

SEQ ID NO: 183799 - DNA, 122 bp, Homo sapiens
ccgagctggggaggggaggggactcccccggactgcctcaggggggcccggccatggggccgccctgctcgctgcccccagcccccggaccccgctgagcccccggcccggctccgctgtcg

SEQ ID NO: 183800 - DNA, 122 bp, Homo sapiens
tttgactgacgtcaacgtgggtcttggtatttcctctttccccattttcaggtgactcgccgggccctattccctggagattctgagattgaccagctcttccggatctttcggactctggg

SEQ ID NO: 183801 - DNA, 122 bp, Homo sapiens
tatttggagatgacctcatccagccgactcatggccaaactccggttttcccgaaggcgccgggccaacacaggatctgatagtgcagggtcaacgcctacgtgggaagacataaagtcaga

SEQ ID NO: 183802 - DNA, 122 bp, Homo sapiens
gaaaggggcggcaaacactgggcggctcagatttatccttcggcctccgcagggcccggccggacgagatttactgggcctcgaacacggcgacagttcaaacctttgattaatcatgtttt

SEQ ID NO: 183803 - DNA, 122 bp, Homo sapiens
agaatcaggcagggaggttgcagtgagccgagacggcggcagtacagtccagcttcggctcgggatcagagggagaccgtggagagagagggagagggagaccgtggggagatgggagaggg

SEQ ID NO: 183804 - DNA, 122 bp, Homo sapiens
gctgcctgaacccctccaggcctgtgctttccttacacttttatcttgatcagcgggtctcgaagtatagaaatgcaaattattagacttcaccccagatctactgaatcagaaattctggg

SEQ ID NO: 183805 - DNA, 122 bp, Homo sapiens
tttactctcggcggtgctaccatggcaactggtgatgtcagggcggtagcgtcgtaacatcgcgcgagaactctctgcgcggttgactacgcttatcaatccatcgtattcctttgtcttct

SEQ ID NO: 183806 - DNA, 122 bp, Homo sapiens
aaaaaaatttacctgtagatcaagccagggatgtgaactctgggccggtcctgcactgagcgactccttgatcctggaccaggtctcctcccgcaggcgcctggccccgcccctcccctcag

SEQ ID NO: 183807 - DNA, 122 bp, Homo sapiens
gaccaaagagatccctttgcctcattctcctgtggaagcaatcaagaaagggaggttgggcgaggtgaccttccagagccgaatctgtgcttctaaaaatagaagcatccttggagaactga

SEQ ID NO: 183808 - DNA, 122 bp, Homo sapiens
ggtctcctgtctttcttggtctctcggtcctgagcgctctctcgccctgtcactgatgaccgctggcttttggctctccgtgctcgctcttcgtgtgtcccggccacgcacggctcaccagc

SEQ ID NO: 183809 - DNA, 122 bp, Homo sapiens
cggccagcagcgggaaggccagcatgcccagcaggtagagcgccaggctcagcaggatggcgcgcgcccggcccagccgcgcgtcggccagccagcctccgaacggcgagcccaggtaggtg

SEQ ID NO: 183810 - DNA, 122 bp, Homo sapiens
ttaggatcggcgctgtcaaatccagcccatctgctgcaatcataatcagtctcaaccgaacggttctgacaaatctccgcctggagctggagttggagaagctggagagtgaggggcgggga

SEQ ID NO: 183811 - DNA, 122 bp, Homo sapiens
ggcgatgcccagagctgtcaccacccggggtctcagtttctagcaggctgtgcagggtaccgccggcggcgccacgcaggtagattacgcaagcgagcacctcgcacgcgcgccctgagtgg

SEQ ID NO: 183812 - DNA, 122 bp, Homo sapiens
aagccttgactggatgcagaaaactgtaataacacaatgatgccttacccagtgcctttgcggattgaaatgtttcttataattgaattttttcagataattgaagctaacctcctctaagc

SEQ ID NO: 183813 - DNA, 122 bp, Homo sapiens
taagtctcagcctcgagaactagagcacttcgaccagggagtagaggaagcgttattgggcgtggtaccctgggttaggaaacctggctgtagacccactccaaggaccgcactcaccgaat

SEQ ID NO: 183814 - DNA, 122 bp, Homo sapiens
ccgggaagatcgttcttgtccgggtgaggccgccaggacttgtgggctgcgcggtcctgtcgtgttccctgaggacagttttattttcttgtcagtggtgcttacgggttctctttcttttg

SEQ ID NO: 183815 - DNA, 122 bp, Homo sapiens
gctggagaactcggccgccgctccctccgcgaggggctctggggcgccggggcccgctggcgagtctgcctccatcggcgcccttgcgcgtctccggcgcccaaaacccccgaagtgccggg

SEQ ID NO: 183816 - DNA, 122 bp, Homo sapiens
gggccagaggcagggtccaaaggccggcgggaaggcagccagtcccaggaaggcagcaggcgcactgcctggggccctgccttcctcctccgggttccgcagtgtcctgcgggctaccagag

SEQ ID NO: 183817 - DNA, 122 bp, Homo sapiens
cagaggctgctgggaaggcactttcaaccgtgggtggacctaggccctgcttctctgccgcgccatttttttccttctacacttgcctctacctccccttacaagacttttctccccttttt

SEQ ID NO: 183818 - DNA, 122 bp, Homo sapiens
aaaggggtgacagacagcatctggaaaatcgggtcactcccacccgaatactgcgattttcgacgggcttaaaaaacggcaccacgagattatatccctcacctggctcggagggtcctacg

SEQ ID NO: 183819 - DNA, 122 bp, Homo sapiens
agaagaaccagaacaaaacctaagtacaaacacggcgggctcgagcggggcttggcacggcgcaggggtggcggcaagggggcagcctggactggagccagaaagcctgtgctggcatccgc

SEQ ID NO: 183820 - DNA, 122 bp, Homo sapiens
gcagaaggcttgggaagtgtggttcctggtctcttacgtggccgtctgtggagtagcgtccggacgctggggtaccgtgggaagggtggttcccggtctcttacgtggccgtctgtggagta

SEQ ID NO: 183821 - DNA, 122 bp, Homo sapiens
ggttgacacgggagccaggctcggcctcctgtgatccggcagcctcggcggcagcgccgccgtgcggcacttccagcagcaccaagaaagagtcgccgtcgctgtcgtcctcggcgggcggc

SEQ ID NO: 183822 - DNA, 122 bp, Homo sapiens
ggaggaggctgtacccaaggcagtgttgccagactgggccaagccaggagcaaggctgagcggctccacccgcgggctcccgggctgggacccggggtgtcacccgcagtgctgagcgtttg

SEQ ID NO: 183823 - DNA, 122 bp, Homo sapiens
gccatgggctgcctcgggaacagtaagaccgaggaccagcgcaacgaggagaaggcgcagcgtgaggccaacaaaaagatcgagaagcagctgcagaaggacaagcaggtctaccgggccac

SEQ ID NO: 183824 - DNA, 122 bp, Homo sapiens
agccacaagctgccacttgtggagctcggtggccctgccctcgacagccttgctggtggtcgtgaaggctctaaacacctgcatggcaatgaggccaaccttctccgcttgatccgtttcag

SEQ ID NO: 183825 - DNA, 122 bp, Homo sapiens
ttttccgcggcgcctcctggccctggcggtgactccgaggtggcgctttcagggtgggcgcgagggagaggaaagcctctggcatcctcacccccggggccagagggacagcgggtgccctc

SEQ ID NO: 183826 - DNA, 122 bp, Homo sapiens
acagacgttcagctgccccagcttccagtttcgggtggcccagccaactttcatgccagccgtcctcagcccttcctggtgctgggtctgccaggctcatggtcagccaggcctggggccct

SEQ ID NO: 183827 - DNA, 122 bp, Homo sapiens
tcagaggggctggggtgggagctggaggaggctgagctggctgtcagtgattgacgggtccggagttcctctgtcaggcctcagcgcccctcgcctgtgtttatctctttaatctaaatatc

SEQ ID NO: 183828 - DNA, 122 bp, Homo sapiens
gtaaattcatggctatggtaaaaggggaggtagcatcagctaaggcaaacaaaaagtccacgctgcatgggttgacatttaggactatgaaagaatcctagaattaaggaaaggataacaaa

SEQ ID NO: 183829 - DNA, 122 bp, Homo sapiens
gccatccctgtcatcacccgcatcttcagcctgcagcgcgtagggaggactccccatgggcgggcaggactctggacctgagaattgcacaggatggtttccaagagggtttacatgctccc

SEQ ID NO: 183830 - DNA, 122 bp, Homo sapiens
tagaatgttccataatcaaatgattggacaaccacccccacgtcagcaatgacacttcgccgcagtaaaggcgggtgctagcaacctgcttcttcactgttaaggtctacagcaaaccaatc

SEQ ID NO: 183831 - DNA, 122 bp, Homo sapiens
ttcttactgtccagcttttcattaacggatatttcagcgaatgtctcatgatgccacaggcggtttcaataaagaagtaggctgtgcagaacagagttaaccagatattatctaagttgtac

SEQ ID NO: 183832 - DNA, 122 bp, Homo sapiens
ttactttcttatatcaccctgtagtgatttttccttctagggaggaatagatgaaatcaacgagctgtgactaatatctgctgttctctagcaagggcctctgtgctcattctccagaaaat

SEQ ID NO: 183833 - DNA, 122 bp, Homo sapiens
cgagtgcaaggacctcatctaccgcatgctgcagcccgacgtcagccagcggctccacatcgatgagatcctcagccactcgtggctgcagccccccaagcccaaagccacgtcttctgcct

SEQ ID NO: 183834 - DNA, 122 bp, Homo sapiens
gggaagtcgccgccatcattgaggccctccaggttcccgatgaagtccccgcaggtcatgcgcttcccgatgttctaaggaagggaacggaggcctgtgagtttggagggcccttggcctcc

SEQ ID NO: 183835 - DNA, 122 bp, Homo sapiens
cgccttccccaggaaatgagggcataaacatttgcagcaaagtttggcaaggcaattcctcgctacatggtattaactgcatgttagggtgggggaacacttgtcagggacgccctgaaata

SEQ ID NO: 183836 - DNA, 122 bp, Homo sapiens
tccagtaatgaggacgaggatgaggatggaggacagtggtggacgctgactgggggtgcccgctcaccgggtgggtcccccgactgctgcatcctcttgctgactcagctccagagggagca

SEQ ID NO: 183837 - DNA, 122 bp, Homo sapiens
ggcgcaatggaatattccattgcccctcctgtcctgggtctgtgttgcggggaacgctcgcgcggttgccagagaaagccccggacgtgacggatttgcgcgaccccaagcagcccgccctt

SEQ ID NO: 183838 - DNA, 122 bp, Homo sapiens
taccagccttcaatgaaggaggcagtctgctaagtgctcaaaagtacctgcttgggagcccggcagtcctgaatttaaaccccaggcaattgagcttcaatttcttcctctgtgaagtgagg

SEQ ID NO: 183839 - DNA, 122 bp, Homo sapiens
acctcgtgatccacccacctcagccccccaaaatgttgggattacaggcctgagccaccacgcctggccataggcagcttttaaaagaacacatgtgcagcctggccatcatggtgaaacct

SEQ ID NO: 183840 - DNA, 122 bp, Homo sapiens
tttaaaactaaagggcagtattaaaatcacatatcaagctatgctaacaaataatgtgaacggttattttctcacatggatgccctctagcaagatcagagacaaggttatatatttccaaa

SEQ ID NO: 183841 - DNA, 122 bp, Homo sapiens
ccggctcccgcgggcggcctacgcaggcaggggccgtgcgggcgctgggggctgaacccgcgggctccgcctccccgagtcctcggggcatcttccacatggtccctcttcagaaggctctc

SEQ ID NO: 183842 - DNA, 122 bp, Homo sapiens
cacctctttctgaccatctctaatgtgggtgaaagggaccttagcgccacttcaggtcagcgagacagctcgatttccagaagaatttcccccacccaggttttacttcgctagtaacttga

SEQ ID NO: 183843 - DNA, 122 bp, Homo sapiens
ggcatctaagctatgtaatgaattatctcatctcctgtgcacctagaatagtactagctacgtaccgttcttgagagaactaaagcagtagttactccagtttttgtagggcttaatttctg

SEQ ID NO: 183844 - DNA, 122 bp, Homo sapiens
attgaattatgccagcccatgctctgccctgctattctctgcagactgagagagggggaccgtggaccctgtaaattcactcggcgcccagcattactggctaaatcaagaccgctcttcag

SEQ ID NO: 183845 - DNA, 122 bp, Homo sapiens
gggagttagcgggcgaaacgattccccggagtggccccgagcggcgcgtgcgtgaacgcgcggccgtaatatatgctgccattaagaatccgtgcagcttccagcgctccgggcgcagggac

SEQ ID NO: 183846 - DNA, 122 bp, Homo sapiens
ccctggtgggaccccagcctgccgcacccccaggtgctgctaggctgcctgtccccgggccgactccctctgagcccaggccctccaaggcccccgccctgccctgcgccccccaacagccc

SEQ ID NO: 183847 - DNA, 122 bp, Homo sapiens
tctgtccgaaacgctatagagaacagaaggagcctgcccaggtggccgaaggtgttgccccgaggtgggggaaagtagagaccaatttttaaaatattgccttgtgagctccagtgcgagag

SEQ ID NO: 183848 - DNA, 122 bp, Homo sapiens
ctgctgcagggtctatcctcagagttcgacagtgacgactgaagctgaagcaaaagattccgggggcaaagcccccaagatctggcataggggtactggtctctaataaacatcagctgctg

SEQ ID NO: 183849 - DNA, 122 bp, Homo sapiens
ggactcggagctcactcacacaactttctttgatgaacagaaaattggtagatttcacaccgaggtttgagatggcttccatattggggtttcttgctcttttccattgatcatgagattat

SEQ ID NO: 183850 - DNA, 122 bp, Homo sapiens
ctttctctattcccagtagcattaccttagttggggccaccaccatttcactaggattgccgttgcagcctggtaactggattccctaactaaggttttctctaccaccaatctgttctcga

SEQ ID NO: 183851 - DNA, 122 bp, Homo sapiens
atgattgctaagcaccttctatgtgcaagacactgtgatatagtaatatacaaagtagtacgattctggtccttgaagagtagagaagacagacagaaaataatcacaggatgggatgggcg

SEQ ID NO: 183852 - DNA, 122 bp, Homo sapiens
tttaaaatctcatatggtaaaattgtcagcttttaaaaaagttacctgcttcagggtttgcgtgcagaatccaagccacgctctgtaattcgatcctgttgtcatagcaggaaccttagaaa

SEQ ID NO: 183853 - DNA, 122 bp, Homo sapiens
atacctcctcttgggcaagcatcttcaacctagggtagctgtcagcatactcactccctgcgggagagccagagggtcccagcacagggcctggccaggtactcaaacaatgactagcaaca

SEQ ID NO: 183854 - DNA, 122 bp, Homo sapiens
gcttaaaggctgctacaaaaaggcatatgattaaaattgctgttgtactcatgccagaggcgtagctgagcatgttaacattacatcacagagggggccttttatgaggcagggtccctgac

SEQ ID NO: 183855 - DNA, 122 bp, Homo sapiens
tgtgtccgagcattgagcagctgctggaagctctcaacctctttgctgtcatctgcagcccgctcctaagggaagacaaagggaaatgtctagtttggggaaagcagtccttcacttcagga

SEQ ID NO: 183856 - DNA, 122 bp, Homo sapiens
tcgtcacttgacaggcggcttaacaccctctcactccaagggaggatacagctgggtggccgggagcacctccacactccaggcttcccagctccaactggcaaagctgctgggccaccctc

SEQ ID NO: 183857 - DNA, 122 bp, Homo sapiens
tcagggaagttcgggtgagaggaagtgcctgccttttaatttctgaatcggagcctggggcgctcagggaagtaaggtgctgccatttgtctgaagcgatccatctccctaatagagcgtaa

SEQ ID NO: 183858 - DNA, 122 bp, Homo sapiens
ctgggaccaggaaaaacgcagactctccagagtcaatgtctacttcagccagctcaagggcgcgacaacctggcgccgagcatctcaggccgccgcggggaccccccctaagggactcggga

SEQ ID NO: 183859 - DNA, 122 bp, Homo sapiens
agcctgatgcagaagatgacgaggtgcagagaggccagctgggaactctgcgggctcttgcgcacgggatgaccagagagccagggtcttttgatggacatacaacaggcaacaggtagggc

SEQ ID NO: 183860 - DNA, 122 bp, Homo sapiens
ggtgcggcagcaagacagtaggagaaacagcacagcaacctagcatcctccactcagccgcgcaggtggacttgggccagatggcccccaggggcgtgtcatgtgccttctctgacgtttgt

SEQ ID NO: 183861 - DNA, 122 bp, Homo sapiens
gaccgatgggcgcgcagcgcaggcgaagccagctcggggactacgaactcgttcctcctgcgtttattggtagttgaacctcagcctggttccgttctaccgggaattccgtgtgctcgagt

SEQ ID NO: 183862 - DNA, 122 bp, Homo sapiens
tagcactttggaaggtcaaggcaggcggatttcttgaacccaggagttcgagactagccccggcaacatagggagacccttgtctctacaaaaaataaaaaaattagccaggcatggtggca

SEQ ID NO: 183863 - DNA, 122 bp, Homo sapiens
ctggccggtcccctctaggggaatcggaggcagaggcgcctcccggagtcccctgcggggcgctctggagcctgtgcacctggaggccggcagacactccgggcctgcagcggggaccctcg

SEQ ID NO: 183864 - DNA, 122 bp, Homo sapiens
agggcactgctaggagctcactttcctgagtttcatcccctttcactttctgacataccacgggccaaagaaagtgacttcgcctggcacagcttcacttcctgccacctgtcttcctcacc

SEQ ID NO: 183865 - DNA, 122 bp, Homo sapiens
ctgaggccccaccccattcgcgaccccgcccggatctagcccccctaccccagtttgggacgcagcccccccacatcttggcttggggccaggcacgtgccttctacgcccccccaccctgc

SEQ ID NO: 183866 - DNA, 122 bp, Homo sapiens
gactctatctatccttctcacttggccatgtgacttgctttggccaatggagtgaaaggacgtgatgtaagccatgtctgagtagaagttccaggcaaatgctttaagggccatggcagttg

SEQ ID NO: 183867 - DNA, 122 bp, Homo sapiens
cttcatgcgtcggttctggaaccatatcttgatctgcctctccgtcaggcacagggcgtgcgcgatctcgatgcgccgccgccgcgtcaggtagcgattgtagtgaaactccttctccagct

SEQ ID NO: 183868 - DNA, 122 bp, Homo sapiens
agcagagcgtcaagctgcggggctacaggcccaagtctgagaaggtgggaccctcccccacgcccaaccccagcctaactgcaaagactgaggcctccgctatgcggtgtccagccccgggg

SEQ ID NO: 183869 - DNA, 122 bp, Homo sapiens
gccgtccctattctcagctcgatcccgggtgaccattgctcctccggaccctgtgtggaccggttccctgctcgcctggagccttatattccgcggcccaagggtaggagggataggacccg

SEQ ID NO: 183870 - DNA, 122 bp, Homo sapiens
aagtttcggccccgagttaaacattagtgagcgccgagcccgctgggtataaaggcgccgcgggcaggctgcagggcaggcggcgcgggagcaggcgcgcgtggcgcggggcactggcatcc

SEQ ID NO: 183871 - DNA, 122 bp, Homo sapiens
tattaaacctcccctcctaaactcctcgtgtgcgtccgtgtcctaaactttcctggtgcgcgacaacgaaccccagggtatataccccgacaacgtagctgcttcaaagccaccaggtctgg

SEQ ID NO: 183872 - DNA, 122 bp, Homo sapiens
tggtctgcattcgggcaaggtgagccccgggatgtttctcaggcagggcccagggctgcacgccctaacttggtgcggggtcgcggcggtccagcccggctgcacgtggtcgcgcgctcctt

SEQ ID NO: 183873 - DNA, 122 bp, Homo sapiens
cagcagctgctggcacaggtgctaagcctcttactgctcggggcttgcggattagggggccgctccgagtgcggagcccgccgagcccacgcccacccggaactcgcgctgggcccgcaagc

SEQ ID NO: 183874 - DNA, 122 bp, Homo sapiens
ctttccccgacggcgtctcacagccaagtgagcttgtgaacacggagacggccgaggatccgagacaaggagctcgctcgctcggtttttcccgggctgtgtttgccattcgcgggaataaa

SEQ ID NO: 183875 - DNA, 122 bp, Homo sapiens
ctgggtgccttgctcgatgcaaatgcatacaaacgtaggcttggataagcgccttggcaacgcccctacaaatattcatgatcattattagtatgttaccaacctattggttaattcttctc

SEQ ID NO: 183876 - DNA, 122 bp, Homo sapiens
gccctgagacagaagacactggtcctcacacagcagctgccattgctctgttctcagttgcggtgctttatatagaacaataggtatacaaaagcgtttgagccattccggtattcccactg

SEQ ID NO: 183877 - DNA, 122 bp, Homo sapiens
gcaaccaccagcctggaactggaagtggggatcacccccaccttcgggcctctgctcccccgacacgtggcccatggccatgcatctccctgcagcgggagaagaaagccaggaggtggccc

SEQ ID NO: 183878 - DNA, 122 bp, Homo sapiens
tgtgagtgtgtgcatgtgcacatgggtgtgtgtatgagtgggtgtaagtgtggacgtgcacgcgtgggtatattgtgtgtgtgaaggtgtgtgtacacatgcacatgtgcattgtgtagatg

SEQ ID NO: 183879 - DNA, 122 bp, Homo sapiens
aactggtaccagcctgtggcctgttaggaactgagctgcactgtaggaggtgagtgtcagcgagcattcccacctgagctctgcccctgtcagatcagcagccgcattcgattctcacagga

SEQ ID NO: 183880 - DNA, 122 bp, Homo sapiens
aaggcctgttagcaggtgactgcggcaggggcaggggcgcatcagctgtccggcttggaccggcgtgggcgtgggctgggggcttttccgatttgctgagtcagccgcgggcgccgcgggct

SEQ ID NO: 183881 - DNA, 122 bp, Homo sapiens
ctagagccctagttaactgacagctcttttgtgttaattctgtaccgtttacacacttctcgttgcttgtgtatgttttaactgtctaaatgccaacgtctccctgattgaagtttcctcta

SEQ ID NO: 183882 - DNA, 122 bp, Homo sapiens
acgcagagcctgggagcccacgggaggcttccctgaggaaggtggcccgagcagcatcaccgtcacctgtcggcatcctcccgtgacacggcccccaccctccagtgtggcagtcaccgcta

SEQ ID NO: 183883 - DNA, 122 bp, Homo sapiens
gcctgtggcagtgctcttcatttggctccctggctgatgggctggcttggcccttgcgggcgtttgtccattggctggtggtgtggcatgagctagagctgcagctgtggcaaggcctggcc

SEQ ID NO: 183884 - DNA, 122 bp, Homo sapiens
tttttattttttacaaatatactggagaatcatgcaatgctgccagcattggatgcaatccggggccacaagtctgcacactcctttgctactggtcctgtaatggcagaacctgcattaaa

SEQ ID NO: 183885 - DNA, 122 bp, Homo sapiens
agaataattactaacctttgtttaacttttgactcacatgtctcaggtatagcaatctaacgtaatgctaatcaaagctattaacgtgaggatatatttggtgatatgtaagttattttagg

SEQ ID NO: 183886 - DNA, 122 bp, Homo sapiens
tcgcagagcttcggcgtggccagcgccagcagcatcaagcagatcctgctcgagtggtgccgcagcaagacgctgggctaccaggtgagccccggctcccctccggctgctgggacgcccca

SEQ ID NO: 183887 - DNA, 122 bp, Homo sapiens
tcttccgcaagtgtgagtggcgtaactgtcgggctcttggccttggtcccgcccttcgctcgcctccgaagcctcgcctacttgacgtcatacaatgccgcaaagcgcagggctgatctccg

SEQ ID NO: 183888 - DNA, 122 bp, Homo sapiens
ggctggcccgggggccttgctgccgaacaccgtgccggctccctccagctgctggtaccgcgcctccaccagccgctcgttgccccacactgcgatgagcgcgttcgtctcggctggcgtcc

SEQ ID NO: 183889 - DNA, 122 bp, Homo sapiens
gtgggcttgatgtagcccatgggctgtagttggttgacccctgtttcagaaaataatttccgtagcagctggtgaagagatggaaatcatagcataagatcacagagaaggtccactggatc

SEQ ID NO: 183890 - DNA, 122 bp, Homo sapiens
tttgctgaggactctcctttcctctgtgcccatctctggtacggggtgactgtggcgcagcgtgtgcttcctcatgacgcccgggcccctctctcccatggcccaggtcaaggcaggaggac

SEQ ID NO: 183891 - DNA, 122 bp, Homo sapiens
agggattttaataatacacattcccactaaccattcctctgcctccctcagcttcagtagcggagtgggttatgaggcttccaggtttcgacaagctcataggtgaaaaatggcatgccagc

SEQ ID NO: 183892 - DNA, 122 bp, Homo sapiens
aaagaaatggtggggtaggaggctgaaatgtacacggttgtttgtaaaggaatgtgtaaccgtgaaagtatgtttttgtgtttcacagctggtaatcacccattttcattggtagagtctgt

SEQ ID NO: 183893 - DNA, 122 bp, Homo sapiens
gcctgcaggtcggcggggcctgctcttcccggctcctgaaatgcatttccttcccgactccgaggtcctgcttccagaacctttggcaacagaaaaggaaacccgcacaggcgtcaaatgtc

SEQ ID NO: 183894 - DNA, 122 bp, Homo sapiens
gcctcgcttcgctcgacgtcccgccccggacagccccagcaccggggacgacccgcgctgcgccagcgaaccccgcctcggaggagtccccgcccgggctctcaccgccacgcggcgcgagc

SEQ ID NO: 183895 - DNA, 122 bp, Homo sapiens
cagcctggcgctgtgcaaacaggacaatttactgcggccaaaagggacccaaattacaatcgtatcacagacaaatatccgccacgccaggtctccaggggccaggaggggcctctctcccg

SEQ ID NO: 183896 - DNA, 122 bp, Homo sapiens
ggaagaaggccgggtacttcagcttatttctgtagaaattgtcagaaacgttgacactctcgcagcgcaccaccaccttccggcccagcagtacctgcttcaccacaacggccgccaggtgg

SEQ ID NO: 183897 - DNA, 122 bp, Homo sapiens
atactataaaaatactgatctctaaactttcaaagcataatgcaaaaaatccctaggtgacgaacctttgtgatagagtaatacttttttcaattctttgacaagtggcactattatttata

SEQ ID NO: 183898 - DNA, 122 bp, Homo sapiens
cataaggccatccttagggaataaaagcaactctgcttcttttctaagtctccatggctccggccccctaggtccaacccttgctttgatccacttctatttgtgctgtttgattaatctat

SEQ ID NO: 183899 - DNA, 122 bp, Homo sapiens
cctgatctggagactggaagtccaagatgttgtcagggaggtttcctctgaggccgctctcggctccaagatggctgcctcttcacctggtcgtccctctgtcataagctcaccgggtgtct

SEQ ID NO: 183900 - DNA, 122 bp, Homo sapiens
cctggggtggggccagaatgagcgtcttgagggcgaggcctggggtagggccaggagaagcgtcgttggggcaggtcctggggagagttcaggttggcgtgtcctggggcggggccaggaca

SEQ ID NO: 183901 - DNA, 122 bp, Homo sapiens
atgttccttattgatgctactgaaagaagcttcctggggagcccaaaatgcattcttcgtcgggccatgttaattattgtttataatcaccgaatacagtttatatccagatctgacttgga

SEQ ID NO: 183902 - DNA, 122 bp, Homo sapiens
gagcagcagcggctagcggctggctacggtgacggctccctgcgcatcttcagcgtctcccgcacggccatggagctcaagatgcacccccacccggtggcgctgaccactgttgccttctc

SEQ ID NO: 183903 - DNA, 122 bp, Homo sapiens
agtctggaattgtcaagagtctgaaagcacagaataagactgcagctagagcaatttaggcgccatagtttgtcaaaacaggtaaggggaataaaggggatgacaccaagagatgtgcaaag

SEQ ID NO: 183904 - DNA, 122 bp, Homo sapiens
cttagtacaaatcctggcaactaaatgaaagaacaaacaacctggggttctgggatggttcgtctttgctgatggcactgtgttccaaaatggccaaggtcaaatataaaaatttcagactg

SEQ ID NO: 183905 - DNA, 122 bp, Homo sapiens
tcagattcccacactgagagtccattgagagatctcccactcattagcatgctacaaggccgctgaaagatcaggaagatgtcaaaagggcaaaccttcacataaacagaactcagagaaac

SEQ ID NO: 183906 - DNA, 122 bp, Homo sapiens
tgacctcgtgattcacccggctctgcctcccaaagtggtaggattacaggactgagccaccgagcccggcctcctatatggcttctgaaaggagagcagaaccccacgcagcatctgccaga

SEQ ID NO: 183907 - DNA, 122 bp, Homo sapiens
tggcattgttggcagatccgcccctcgagggcaagtctcgggacagaatcgcgctgtgggcgtggcttgtactggatcctccccggggcgtggctaaaacaagaccgaggtcccgggacgag

SEQ ID NO: 183908 - DNA, 122 bp, Homo sapiens
atgttctcagaccttcaaaatgttttatttccacccttgggaagggaatggggggtgagtcgaaagaaaacacgtgatggccattttccatggcacgagctggctaacctttctggactgtg

SEQ ID NO: 183909 - DNA, 122 bp, Homo sapiens
cccggccccatccccgcccagagccgggcgtcgtgtgggtccgtgggtgataattgagagcgtcagacccaggactgttcagggaggagccccggtcagactcccacgtgtgaagaccgggc

SEQ ID NO: 183910 - DNA, 122 bp, Homo sapiens
gcggggctcaggaaggcacgcttagagcgaaccacatccatcggagagggcagtgcaggtcgcagggtgcacaggtcagtgtttcccgctccactgccagggagcaggggtagtggggcgca

SEQ ID NO: 183911 - DNA, 122 bp, Homo sapiens
ccgtgtgccctggcagccgcagccccgccccgccgcgtccggcccggtcctgtcccgcagcgtcccgccagccagctccttgcacccttcgcggccgaggcgctccctggtgctccccgcgc

SEQ ID NO: 183912 - DNA, 122 bp, Homo sapiens
tatttccttctcgcatactctagagaaatcgaagtgttttcaaaggtgctctgaagcttacgctccactagtttcacagtaaatcgccccttgcgagggcgctttttttttttttttaatgt

SEQ ID NO: 183913 - DNA, 122 bp, Homo sapiens
tgtgttgggggtggggtgtttccgcggaaatgctgcgtcctgggccctctgaggcaggggcgcgcgtaaagctggggggctcttgggcgtccctcgcggctccccaggcctgttgggcctcg

SEQ ID NO: 183914 - DNA, 122 bp, Homo sapiens
tcatgggctccaccttcaactggatcctctgtgctgccccataatccggctttcctggtccgctccctcctctgttctcacctgactggagtacgtatctatcaacattttgcttttccatt

SEQ ID NO: 183915 - DNA, 122 bp, Homo sapiens
tttttgtctaggggacaggagacaaacctggaagttaaaatgatttcctatctcaacacacggtgcagagaaagcagatttggggcatccagtgcccactccttctgtattgcagaaaactg

SEQ ID NO: 183916 - DNA, 122 bp, Homo sapiens
ctcgcgccgcggaagagcggggaccccgagaagctcgcgaagaaccccaagaacccggcgcgggaggcgctccccgaaaagttcctaacagacaaggagcgcaagaagctcgagaagaagct

SEQ ID NO: 183917 - DNA, 122 bp, Homo sapiens
ccaagtcccgcgggtttcaggaaactccgaagaggtcgggggccaggggcgactatggcgcgggggaggctgggaattgtagtctccacctgcctccgagggcggggtccgagggcggggct

SEQ ID NO: 183918 - DNA, 122 bp, Homo sapiens
tggcatattgttagaattgtgctattttttttgagtctcgctctgttgcccaggctgaaccgcagtggcgcgatcttggctcactgcaagtgattctcctgcctcagcctctcgactagctg

SEQ ID NO: 183919 - DNA, 122 bp, Homo sapiens
tcacagtcagacaatgctggaatgtcacggtgaaggaaaatgggaacaaatatagataatcggttcctgggtcaaaggcatttagaaagtatgttctcaggccctccattctgttcccatca

SEQ ID NO: 183920 - DNA, 122 bp, Homo sapiens
ctcactgtcctcatctgctgtggacaagtcggaagatgcagtcccatgactgtcccagcacgacaaaccagacacatggcttcccaaagataccaggctcttcaaaatcctgggcatatgta

SEQ ID NO: 183921 - DNA, 122 bp, Homo sapiens
ttaagagcccctgccagagaggatctgctaagatctgctgggagatgcttcctcagcaggcggcctctgtggctgccgttttcttcacaggctgcaggtggcatcagcgggtacgtgctcct

SEQ ID NO: 183922 - DNA, 122 bp, Homo sapiens
cccagggtttcgagaggaggagggagccgagggcgaggcccggtagcctgctggtgctcccgggtcaagcaggcggcaggaagctgagctgcaagttcatcatcatgagtgcgatctgcgta

SEQ ID NO: 183923 - DNA, 122 bp, Homo sapiens
gaggggcccatttccgtccgtcgtggggggaggcacagtgagtccactggggcacggcagcgtctaagccacaagccgagcacataagccaggtcctaacggagcctatgtgtaagtccact

SEQ ID NO: 183924 - DNA, 122 bp, Homo sapiens
ccagctaatttttgtatttttagtagagacggggtttcaccatgttggccagaatggtctcgatctcttgacgtcgtgatctgcctgcctcggcctcccaaagtctgggattacaggcgtga

SEQ ID NO: 183925 - DNA, 122 bp, Homo sapiens
agcaacagcaagttttactcatagaagctggggtatgtgtgtaagggtattgtgtgtgtgcgcatgtgtgtttgcatgtaggagaacgtgccctattcacactctgggaagacgctaatctg

SEQ ID NO: 183926 - DNA, 122 bp, Homo sapiens
tccttaaagttcaaagtcctccgcgtgtgtccctcacccagagagggcacttaacgcctccgagcctcagtgtcctcatagatcagacataatcgtaacaattctgttcttaacaggagaat

SEQ ID NO: 183927 - DNA, 122 bp, Homo sapiens
tgggaccctggcaggtgcttcggatgaaggagccgggaggagccgactgcctttccttcccgccgggatccgcgaaaacgtgtggtcgggactccgagcgcggaaccctcaaggggaagaag

SEQ ID NO: 183928 - DNA, 122 bp, Homo sapiens
cagggatatggtgtttgagtctctgggcttgccgagcactaagtcctctgagttccgcagcgcagcaccggaagcggccgagcgcgctcagcccggcgacccctgcgggctccagacccctg

SEQ ID NO: 183929 - DNA, 122 bp, Homo sapiens
gggcgcggcctgagcccctgcggtgattccccaggtgtggaatcaaaacagatcccagagcgcgatccgcggggcttttggaaggagccgcccagggctggagattccgacgcaaagacccg

SEQ ID NO: 183930 - DNA, 122 bp, Homo sapiens
aaatgcagccattcaatgaacatcttcactcaattaaactatttttggacatatatcatgcgcaggtattcatctagctcctggaaaactgaacaaaagaggcaaaaatccctgcccttatg

SEQ ID NO: 183931 - DNA, 122 bp, Homo sapiens
gggtttgtggcaagggcttcaagaagctgatccacgtgcgcaaccacctgcggacacacacgggtgagaggcccttccagtgccactcatgtggcaagacctttgcttctttggccaacctc

SEQ ID NO: 183932 - DNA, 122 bp, Homo sapiens
cgtgtgcccagagccatttccggcggcccgaaactaggaagaaacttggagctgttcaggcgatccagcctccaatcgctgctgctcttgtactcggttggcccgggcggcgctgaactgtc

SEQ ID NO: 183933 - DNA, 122 bp, Homo sapiens
tcagtcctctacatgtccgattgccttaggcagacagaacctatgctacatactgatctgcgctatttttgtcttctcttgcaagtggcccacattgagaactggggaaagagtgtgtgtgt

SEQ ID NO: 183934 - DNA, 122 bp, Homo sapiens
cccctctccacctgcatttcactcccttcctcctctccttgggtctccctggcttttgaacgctgaaaggctgggcccggatggggaggggcggccagtgtgagctcgaggcgccctgtagc

SEQ ID NO: 183935 - DNA, 122 bp, Homo sapiens
cacgcccctggaagtccgccccggcccccgcccccaacccgcctcttcggggctttatggcgtgaggtttggggctgggatccatctggagccgagcagaaaacttttcccctcccgttccc

SEQ ID NO: 183936 - DNA, 122 bp, Homo sapiens
gcggaggtggggcagggacccggggcggcctggagcgctgtcaggaggagctgcctgggccgggcgcgcgcctggcgctaggtgtgggggcgccgtaggtgccggggtgtgaggctggacgg

SEQ ID NO: 183937 - DNA, 122 bp, Homo sapiens
actttttttttccttaccactttcatctagcaagaaatcatcctggtaacggaacttctccggtccacatgcaataaaaatgtcatcatcaccaaaaaagtcctgaaggcacatcacctaca

SEQ ID NO: 183938 - DNA, 122 bp, Homo sapiens
agcttgttgctgtgctactgacactgggcttagtcgatgttcacacctattacatttttccggaaagtgggaggagcagggggtagagaaagctgtgtgtattgagggaaggggagatgtgt

SEQ ID NO: 183939 - DNA, 122 bp, Homo sapiens
cctgccagcatcagccctgtgcagcctccgtgtggaatggggcccctgcgcatgggcatccgagtggcatgtgtgagcgtgtgtgctcatgtgtgcgacagagagccagaggaggaggaggg

SEQ ID NO: 183940 - DNA, 122 bp, Homo sapiens
aagtgtgtgcgattgcgggtgtgtcctgtgggagtgcggggtgccaggaaacaattttcccgttatcctaggagaactggaaacgattagagacaagtgttaaagggatgggaagcggggga

SEQ ID NO: 183941 - DNA, 122 bp, Homo sapiens
gcagccatggtgaagatgatcatgtacaggcagtagaccaggaagttgaagtagaagatgcgcttgacgaatctgtcccacttgtcctgcaggagtcggttcagcggctccaccaagagcat

SEQ ID NO: 183942 - DNA, 122 bp, Homo sapiens
atagaggggtcctatttcatgccaggttctcgctggtttacattccaactcccctctgtccgttgtgcgaaaacgtctccaggccgaccttcattcatttattgtcaacaaacgtcctggga

SEQ ID NO: 183943 - DNA, 122 bp, Homo sapiens
ctcggtcagctgggaggggcccgccccggcacaaagcacccatgggaataaaggccaagccgcgacagtcagcacgggggagacttttccctaaagcctgccggtttcccgacggtcccacc

SEQ ID NO: 183944 - DNA, 122 bp, Homo sapiens
cccaggagctcccaaagcctcattcgccccggcggcgtcggctgtctccgccgcttgtctcgtcccccatggccgctgacggccctgtggcctttctgcactcacacagcgcgtctcccact

SEQ ID NO: 183945 - DNA, 122 bp, Homo sapiens
cccggacggcgacgacgggggaatgtggcgctggatccggcagcagctggtaggtgcccccgcccctccacctccattcgtccgcccccgcggggcctctcggcccggggtggcggggaaag

SEQ ID NO: 183946 - DNA, 122 bp, Homo sapiens
ttggccagaacctgctgccagtctgaaagagttgggggaatgtacaagtcaaagatccctcgggcccagaaccaggtcagtgtcaaggtcactcctaagaacactgagatgaaaatagcaga

SEQ ID NO: 183947 - DNA, 122 bp, Homo sapiens
tggctgcccgtcgctgacgccccctggccgctgattggcttcccctgacagtgggcggaacgcggccccggattggatatccattcgccgtccctcacccggcacctgcgtgcactctccgg

SEQ ID NO: 183948 - DNA, 122 bp, Homo sapiens
agaataaattaaccgctaactgggcacaacctgtttccagtgatggcagtgtggaccgtccggagtagctgctgccatcaagcctgctgcagccgggaggtgtgggcggtggcggcaggagg

SEQ ID NO: 183949 - DNA, 122 bp, Homo sapiens
ttggactacctcaagattccctaaaagtataagatttgactctgcccccagattttgatacggctggcttctatttctttatgtcagtcataataaaaagaacatagtggccacatccacaa

SEQ ID NO: 183950 - DNA, 122 bp, Homo sapiens
tccgaggcacaatgaggcccgggcaggagcctggaccacgtctccgcggctgcgcagtagcgcttggcatgcgtgcgtgactcctgggggtcaaagggcctcgccctctcccccacttttga

SEQ ID NO: 183951 - DNA, 122 bp, Homo sapiens
atttcctgtgcagggccctccacttatcaccagctgtcacacacacataacaggaagtctcgcactttctcatcctgttactacaaatgccagcaacttctattcttcttctttctgtgagt

SEQ ID NO: 183952 - DNA, 122 bp, Homo sapiens
cccagctccacctgccccactgccaggacgtgccgcgcagagcaggttccggaacagcggcgaggcagagggacacaggaggacacagtcagggagacacagtgcccgcctgcccgccagcc

SEQ ID NO: 183953 - DNA, 122 bp, Homo sapiens
cccccaccccgcccgccaagtaaccccactctctgggacgctgtgtaccctcatagcttacgagtttcaagagaactccttgtgccttcatagtgccctctgtggccaggggcctctggagt

SEQ ID NO: 183954 - DNA, 122 bp, Homo sapiens
actgcatttccttacaactctacccccacctgactctgcatttcaatctttgctaactctcggcaaaagaacagatgttctgctttgggttgagaaatcaacagttaccattcatatgttcc

SEQ ID NO: 183955 - DNA, 122 bp, Homo sapiens
aatttactgctattactctaagaccagttaagattcccttactgagggcaaccattttaacgatcccaagtttctctagtcctatcacattgtacttgtaattctcctatttcagttttatt

SEQ ID NO: 183956 - DNA, 122 bp, Homo sapiens
actcccacactctattattttttcacgttcccttcgcttaattaaaggggggagggggcgcgagtctttggtgcccggtatgtactccttctgttctgcagcaaagaagttaaattattgat

SEQ ID NO: 183957 - DNA, 122 bp, Homo sapiens
agagctttttcatttctgccgcactacctacaagcaaatttcttccagttgctcaacagtcgaatgcctccctttcttcgttgctgaagcatttcattgcagtttcattgacagggtggtgt

SEQ ID NO: 183958 - DNA, 122 bp, Homo sapiens
ttgcaaaccgagagcaagttacttgtacttcaggggttttgctgggtggggttttagtgtcggggaaaaactgcttcaaagacccattattaaaatcagccgacaatttagatggctaaagc

SEQ ID NO: 183959 - DNA, 122 bp, Homo sapiens
agctgctcaggcccaagaccctcggagtcatctggatcgttccctttctctcaaactctgcgtcccatccattgacaactcgtgtggattcgtccttccaaatctgaaatctcacgaccgcc

SEQ ID NO: 183960 - DNA, 122 bp, Homo sapiens
ataagcacgttccatgcagtctgtgggcattgttattttcatttgttcaagctggcaagccgaaagggcccccagtctgttgccaacttctccaagaaactcacacggcctcgtcccccctt

SEQ ID NO: 183961 - DNA, 122 bp, Homo sapiens
ggggctgggaaaaggaggaaggcgcgtggagccggcggggcggcgtagggagattctgcgcgaaactaagcgtcaggtgctggaagaaagcgctgcgcaccggctaccccgcagttcaggga

SEQ ID NO: 183962 - DNA, 122 bp, Homo sapiens
acaattggagaagctgactaaggtcagacagagaggcagttgcaagactaagattacaaccgaggccctgccctactcacactatgggttaatgttgccaatttagccatagggagggcctg

SEQ ID NO: 183963 - DNA, 122 bp, Homo sapiens
ccaccaggaggagtgaacaactccagacccgccacctttatagagctgtaacactcatcgcggagctctgcagcttcactcctgaagccaacgaaaccacgaacccaccaggaggaacgaac

SEQ ID NO: 183964 - DNA, 122 bp, Homo sapiens
ttcacagaactcacagaggcctctcctctctgagatggcccagtgtgatatcccaggctgcgtagtaagctcctcctctggtgtcagccatgtggaggggttaaccctttcctggctctgag

SEQ ID NO: 183965 - DNA, 122 bp, Homo sapiens
cacttcctgcttccctcccgcacacgtggccctcccgcctccgggccccgcccccttggccgcaactggcaactcccgcctgaagaatagattctctggttcacagccgtctgcaggctcag

SEQ ID NO: 183966 - DNA, 122 bp, Homo sapiens
ctggtgagaaaagcactggcagcactgatgttggtgtgagatgatgttgttctttagctacgttaataaagatattgcctttagaatacagaggtgctctacagtgatcattcattcaactg

SEQ ID NO: 183967 - DNA, 122 bp, Homo sapiens
gcctccccaccgccgtccccagtcagcagcgtccgcaaccgtgtgatctctgcagccaggcggttgttcagctcctggttgtgggcattgagctcctggttctcacgctggcactgccgcag

SEQ ID NO: 183968 - DNA, 122 bp, Homo sapiens
ctgctcatcggcgcggtgctcgcggggaactcgctcgtgtgcgtgagcgtggccaccgagcgcgccctgcagacgcccaccaactccttcatcgtgagcctggcggccgccgacctcctcct

SEQ ID NO: 183969 - DNA, 122 bp, Homo sapiens
tgtctcctatgcctcctccccccatcccggctctcctgcgggcaagcgccgaggggacaccggggagtaccccacctgaacctctggggcccacaccaggccccagtcttcctctactcact

SEQ ID NO: 183970 - DNA, 122 bp, Homo sapiens
tgcataccaacttcagctcgcctgtaaaggtgcgtgggccagatggtataggaagctctgcgccgagacaatagctacttaagctgcactgagagtaaaggcttattttctcataaacatta

SEQ ID NO: 183971 - DNA, 122 bp, Homo sapiens
tgctagcctgagcttgcaagggagggatacctgaaaactccccatcgatggcgaagaagtcggcctcctctatggcctggtacactttgtgaagattactcttaaaatctgcggagaaaccg

SEQ ID NO: 183972 - DNA, 122 bp, Homo sapiens
aataataatgtatgagatatatattagaagtttcctttccctttgcaaacaggaaatcatcgcatatgccctgtatctagtagtgacatttgtctggaaaagacaaaggaggtctcattatg

SEQ ID NO: 183973 - DNA, 122 bp, Homo sapiens
ggggcgcgacgtcacaatggaagctcctcacaatggaacattagaaagcaggaagcgggccgcagccaacgtgcggcgcccgcaccgctcgcggctcttgaaaaaaagagaaggggagaaga

SEQ ID NO: 183974 - DNA, 122 bp, Homo sapiens
ccccagcaccacttcccctgctggaggatggatttgaaggagggtggctgggcggcaccccgatggctccctgtgctccctgagaccctacaggccgccctctgcagccacacctggaccgg

SEQ ID NO: 183975 - DNA, 122 bp, Homo sapiens
aggagcacggatttgttcctgcaagtctcctcttttgttgtcatgagagtgttatgttaacgcttgtgataacgataagacagaaactattgaaaagggtgcagtggtggtgtgaaggatta

SEQ ID NO: 183976 - DNA, 122 bp, Homo sapiens
tcgctcagtggatcccgcaccagggccgcaggtggagctgcctgccagtccagccccatgcgctggcactccttagccattgggtggtccatgggactgggtaccgtggagcaggggacagc

SEQ ID NO: 183977 - DNA, 122 bp, Homo sapiens
tcacgtttagaaaacacacatctgatcatgtcattaacttaaaaacccttcatggctgggcgcggtggctcacgcctgtaatcccagcactttgggaggccgaggcgcgcggatcacaaggt

SEQ ID NO: 183978 - DNA, 122 bp, Homo sapiens
ttgttccaaagaaacatccacgtgcagagggcaggcagcttcggcccatggcgctcctgacgagggctccctcgtggctgccccaggacaagcaggaccccggcggtcctaggcagggagaa

SEQ ID NO: 183979 - DNA, 122 bp, Homo sapiens
aggtgatgaatatggtcttagattatttcagtgatcccccacgttccgttcaggagaacccgctcagtgatgtgcctgaggtcacacaggatgcgaaccagtgtcttctgactccgaatcta

SEQ ID NO: 183980 - DNA, 122 bp, Homo sapiens
ctggagtcaaggtgaacctgaaacccagcccctcccggctaagtaaacagaagcagaggccggctcaagctgatgaatattcatcatgccagaaatccaatcccagcgcccctgcatccacc

SEQ ID NO: 183981 - DNA, 122 bp, Homo sapiens
ggatcttcatcttaggatcatagacacgttggaaaacctattataatccatgcactctctcgccagaaaatcctatgtgggcatgtgcacatataaaatattctgcatataacttcaggaga

SEQ ID NO: 183982 - DNA, 122 bp, Homo sapiens
tatcaaaggttaaacccacacagtggccagttaatttcacactaaagaaaaacttctggtcgggtgaggtggctcacgcctgtaatcccagcattttgggaggcttaggcgggcagatcact

SEQ ID NO: 183983 - DNA, 122 bp, Homo sapiens
cgcagaagcccagcatatggggcactcagcgcagcagtggcagcatggcggagaggactgcgaacatgtgcggatgcaaaggacaacccaggcctaggtacccagagtacccttttttgttt

SEQ ID NO: 183984 - DNA, 122 bp, Homo sapiens
gggagcgctgcggcagtttccatggtgagatggtcaacaagcctgtaagttcctcagctacgactaccaggtacctcgggttcctccctcctccgagagaccgccgaggtgcgggctgtgag

SEQ ID NO: 183985 - DNA, 122 bp, Homo sapiens
gtattgatttccccataccccagcatccccaccccagtttccctctcttcccccattgcccggtgctttggctggcatgcccctgacaaccagggagggcaagtccttctcctggtgggtag

SEQ ID NO: 183986 - DNA, 122 bp, Homo sapiens
gggtgtggacgactcctatcctccccagaaaaagtccttcatgatgatcaagtacatgcacgaccactacctggacaagtatgagtggttcatgcgcgccgacgacgatgtctacatcaaag

SEQ ID NO: 183987 - DNA, 122 bp, Homo sapiens
agacggtcaccagataccaagggttcgaggcgtttctcagagcctgtgcttggaactgaccgtcaggaagcaatcggagccgaagccgctgctcccaaacctggccgcccatcggcctggcc

SEQ ID NO: 183988 - DNA, 122 bp, Homo sapiens
caggggtgccccgatcgtcttcctttgacttctccctagaaatcagtcagtaaaaccaagcgcctgtgtgtttttaagccggattcagatatggacccaaattccagtggagaaggagtcaa

SEQ ID NO: 183989 - DNA, 122 bp, Homo sapiens
gtgttaggattacaggtgtgagccaccgctcctggcgtaaattaaattttatcataggttcgtgtgatgattaatgtggagtgtcaacttgattgaaggaagcaaagtattgttcctgggtg

SEQ ID NO: 183990 - DNA, 122 bp, Homo sapiens
ccttccggagtctacacatcggcgacctcccgtgtctaggcgcacacatttcccgccccgcggagactcccacgccccgggccctctctgccgcaggcgccagatcccgcctctgggggctg

SEQ ID NO: 183991 - DNA, 122 bp, Homo sapiens
ccttgttgcacacccgggtcaagggcaaatcccagctgcacagccgggtgatccagcggccgaccctgcttccctgcgtaggaggcctgagccaaggacactgcggccccggctgcaccgat

SEQ ID NO: 183992 - DNA, 122 bp, Homo sapiens
tcttcctgattccagagtgagagtcttgcaggagttttgcctggaagggcagcagactaccgggcccacacacgtctccatctgcgtagcctcctttttagctcagatccttttcctaatcc

SEQ ID NO: 183993 - DNA, 122 bp, Homo sapiens
tataaggcagaggtaataataacagtactgtcttccatgttggaggaataaatgaaatcacgtgcataaggcacttagcactgtgccaataatgcttggagctgattcccactctccctctg

SEQ ID NO: 183994 - DNA, 122 bp, Homo sapiens
cctgctccctcgcgctgggctgcgtgctctggatggggtggtgtcagggctctgcgcctccgcccggcggccttccagacctgacgccttattcggagcagcgaaatggaatcctgaagcct

SEQ ID NO: 183995 - DNA, 122 bp, Homo sapiens
gtttcacacagcctgcaaagcaaatgggatgagagcattgttaatgcccaccccaacctacgcccccaagcacccctcctctgcccccacccccaagcagggatggagtcctttcttcccag

SEQ ID NO: 183996 - DNA, 122 bp, Homo sapiens
cccacccctcggtcctgctcaccctgcggggattttgttgtctgtctttctggcccacctcggtttcagtttgaagaactgtgctgaggacaaaggtgagggaacacagtgtgatggccagc

SEQ ID NO: 183997 - DNA, 122 bp, Homo sapiens
cgacttccttgtcatactgagagattgtggtgagccattgtttatcatccagaaaattaccgccgtccgaccgccccccggctgcagccaccgccgcggcagctgcgagagactgactgcac

SEQ ID NO: 183998 - DNA, 122 bp, Homo sapiens
actggctctgtcactcagcgtcacatctttagggtccatctgtgccgtggcgggagtcggcgcttccttcgtctttgcggctgagcgctgttctgccccgtggacggagcacattttgtgca

SEQ ID NO: 183999 - DNA, 122 bp, Homo sapiens
acgggtgatgggtgtgcggcccaccggagcccgccctgcccaacctgcaccctcggggctcgaagaggagccaagcgtttccccaggtcctagttatgcctccaaataatattcgtagaaaa

SEQ ID NO: 184000 - DNA, 122 bp, Homo sapiens
ctaccccaacaaggacgtctccaggggaaagggagttggaagcaaacttggtccagctggcgttgaggtctcaacttcggctggactcttaaatcctggggtcatgcccttcacgctaggca

SEQ ID NO: 184001 - DNA, 122 bp, Homo sapiens
tagggctaatagatttgggatttctctttgtaaagaaatacaaccccagcgcacaggggccgggaggtccccagcccatccaggttcccagaatcttacatcctctttgcctctcccctggg

SEQ ID NO: 184002 - DNA, 122 bp, Homo sapiens
gcagatggcgctgcaaagcttctcaaatgcagcgggaagtccatttaccaacggctgttgcgatctcttaattagcttgaactgagtttgtattagaatttataatttttactgcatattgc

SEQ ID NO: 184003 - DNA, 122 bp, Homo sapiens
cagtggctggaggtaagagccctattcctctctacttaccttcaatctgttttaaaaatccgcaccctaatttttaaaaatctgcactttaatgtttaaaaaacatacattcatctggtaca

SEQ ID NO: 184004 - DNA, 122 bp, Homo sapiens
tgacgaactttgaatgtgaagatgtaaataaatcctggctcggcaaccctgcctgtgacgcgacttggagcatatctctgcactcagctcctgagtctatttcctcacgtgggaaaatggtg

SEQ ID NO: 184005 - DNA, 122 bp, Homo sapiens
aaaggaagattctcattgtactgggggagtatcagacttgcctaggttttgggagttaaacgtagtgaggttcttcgtgttggaagattttcctcagagaaatagggttgccagtgctttca

SEQ ID NO: 184006 - DNA, 122 bp, Homo sapiens
ggcaggttcgcgccgccacgccgaccgcctctgggttcccagaaagtggtggggtgttcacgccgtatctccgttgggtacctaggcgggacttagacaaacttcagcctcagctacgagag

SEQ ID NO: 184007 - DNA, 122 bp, Homo sapiens
ccccctgcgctgggaggaccgaactgcagcccagggctactgggtgtgatcggcgttcctcggaccccgctggggtcatcgcctcctcccctcttctcctactcagccctagaaaagctgga

SEQ ID NO: 184008 - DNA, 122 bp, Homo sapiens
ctcactgcccggggccggcagcgcggccgactgctccgagtgcggggcccactgagcccacgcccacccagaactcacgctggcccgcaagtgccagccgcagccccagttcccacccacgc

SEQ ID NO: 184009 - DNA, 122 bp, Homo sapiens
aggaattctaggccgccagatgagaggcgatgctttcgccctccaggcgaaaggatttgtcggggagagacagcaagagttcgaccagccagccactttagagattgtcaggggcgctcagc

SEQ ID NO: 184010 - DNA, 122 bp, Homo sapiens
aatacagagaaaccaggaggagcagccggcttcccgtgccagatgggaaaagggaagctgcgccaagaaacaagatgagattcataaagacgagtctctgcaggctgggaaggagggtgtgc

SEQ ID NO: 184011 - DNA, 122 bp, Homo sapiens
ctaaggggcggggccagggtctcacaccctgcagtggatgcatggctgcgagctggggcccgacgggcgcttcctccgcgggtatgaacagttcgcctacgacggcaaggattatctcaccc

SEQ ID NO: 184012 - DNA, 122 bp, Homo sapiens
ggaacctggtgacagtggggacggccgccctcagtcatgcccgctccttccctgggcccacgtgaccatccttctctgtgagctcgaggacaccccgtcagccccacggggtgcggcttacc

SEQ ID NO: 184013 - DNA, 122 bp, Homo sapiens
agaagcagaagataaagaagtttcctcacatccggggctgcctttggcgcctgcgccctgcgcaccgttggggggggggcagtggcgtccagtgacgcccagtgacgtccggtgaaatccaa

SEQ ID NO: 184014 - DNA, 122 bp, Homo sapiens
tgctctcctcctgctgaagaagggggagccgggtggcagtggggagccgggtgacagggacgtgccagctcacagggctgccaagaccctcactctgaccccggtgggatgtgtggtcatcg

SEQ ID NO: 184015 - DNA, 122 bp, Homo sapiens
atactcctggcgtccagtgagactcacgacgaactgcccttttcgactttttctcctcgccgggtttctttggtgctccaagcactctgtcacatgggagttgtagtctgccttgtactgtc

SEQ ID NO: 184016 - DNA, 122 bp, Homo sapiens
cagacttgtgctccaaagacagttatcggagttgctgcaaaagtgaccaccccctgcagccgtaaccttcaatactgtgcctagtctcgagctcagtcaaacctggatgccttttctgcagg

SEQ ID NO: 184017 - DNA, 122 bp, Homo sapiens
ggaatgatggaaaacaaagagctcgctgctgcagcacgtgccggctggatgcggagaccacggcatccactccttacagctgggagccagcagaggagctagtgggccgggaaagccgtcag

SEQ ID NO: 184018 - DNA, 122 bp, Homo sapiens
tggatgagcttgggtgagttagtggatgtcttggaagctcagttttctcgtcgaaaacagcggcctcaaggagctgcagtgaagatgcaggcagtggaggagcggagggcacgcagcataca

SEQ ID NO: 184019 - DNA, 122 bp, Homo sapiens
tcctaaagaaagggctgtgacatgaccagagcaaggagattggctctctggaatagcacgcgcgcgcgcatgtgtgtgtgggtgtgtgtgtgtgactgggttttgctctgttgcccaggctg

SEQ ID NO: 184020 - DNA, 122 bp, Homo sapiens
gaaagtggccaaggcctgtcttcccggcaacttggagcacaaaagggatcctgccccagccgtccgaggtcggggaggggaatgtgtcagcccccaggaatctcatccagcgcctgcctttc

SEQ ID NO: 184021 - DNA, 122 bp, Homo sapiens
gcgcgctcgctcggtaagttctgagcactcagggacgcggtggcgacgcggccagtgagccggctttcctcagtccgttgcctttcccggccacctctccttgcgaggggcaccagcgtggg

SEQ ID NO: 184022 - DNA, 122 bp, Homo sapiens
ggagaactctgtgctgaataaacagaaagcttctgccaaacaagcatccgtgtgtgtgcgcgcgcacgcagtttgctagagcagctaatgcaaatgaatagtttgactctgagaatggagat

SEQ ID NO: 184023 - DNA, 122 bp, Homo sapiens
cagggctgtaaggtagctgccgcttactcccggaaaccggtggccagtgacagatgctagcggtccataacttcggctttcatgcagctcccgtcgtccctttcatgaggaacgtacgtgtg

SEQ ID NO: 184024 - DNA, 122 bp, Homo sapiens
ttcgaggtctcaggagcttttgtccccaagcccagaggacaggggtggccctgactcaggcgccctcttccgggtaggggtccgcgtgcgccctcccaagcccgcgccccgcaggggcgccc

SEQ ID NO: 184025 - DNA, 122 bp, Homo sapiens
atgctgtactgtgtggtttaggttggtgctgcaggggtgcggcttggccactgtgcatggcggaggccaccaggctctgcgtgcaggacacgggggcaccacacacacgccacgcggttggc

SEQ ID NO: 184026 - DNA, 122 bp, Homo sapiens
cccagctcctgggccagagggggcatcaatgggcattggctgaactgacctgaatcagtgcgtagccacctagcactccgtgaactctgaaatcacctcctgactgtatttttccattgccc

SEQ ID NO: 184027 - DNA, 122 bp, Homo sapiens
ggctatggagtccggcgtggcagcggcaatccctggccaaaggtacttggggtcattttccgcggggggttacgtgcgggagcgtgtcctccacaaacggattttccccccttaagcggact

SEQ ID NO: 184028 - DNA, 122 bp, Homo sapiens
gagggagggggccgggcgcgcggcgcggaggggagggggcggccacgggcctgactacaccgacactaattcccaggccgcccttaaggaatgaggggagcacgtgacccgctgggggggcg

SEQ ID NO: 184029 - DNA, 122 bp, Homo sapiens
catgccactgcgctccagcctgggtgacagagcaagaaactgtctcaaattaaaaaggtgcgggaagataagtttgtgtttatacctttgtaaatataattctgaaactgtagcgtattttt

SEQ ID NO: 184030 - DNA, 122 bp, Homo sapiens
ttgttcccagcctcccacagggcactggcatggccatttgtcagcactgcctccagaccccgggcgacaggaacaaatgtcaccctcccacccgccagctgtctttggagcatgcagcgtcc

SEQ ID NO: 184031 - DNA, 122 bp, Homo sapiens
agtgggagacaaggaaactcagcattcatccagcgttccttcgcctcagcaaggggctcccgtcggcggcggccgtgatgacgtcctcattggtccgcccaaccacgattggtgaaggggtt

SEQ ID NO: 184032 - DNA, 122 bp, Homo sapiens
aaaatggacaaaatacataataggcagcttatgagtaagaatacccaaatggccaatgaacgtgaaaaaattactcactctcatttgcagttagggaaatgaattttttttttttaagtttt

SEQ ID NO: 184033 - DNA, 122 bp, Homo sapiens
tgtgtagggcagccactcagtcagtgttcggccttaaagactcttgccagtcaaggaagacgaccgaggcaagtctccgtcattttagctttaaatgccaacattagggacgcgcacctgag

SEQ ID NO: 184034 - DNA, 122 bp, Homo sapiens
gcagcgcggtctggcgccccagctgcccgctgtgcgccttttccttaggtggggcacgagcgtaaggtccagctggtcaccgacagggatcacttcatccgaaccctcagcctcaagccgct

SEQ ID NO: 184035 - DNA, 122 bp, Homo sapiens
gtctgtccccgcggcatcaccagggtgctggagttttccgagcaggccccttgcgctaagcgagaggatctgtgagggaaagttgggagagccacttctggcttttgtgaagatcccgggcc

SEQ ID NO: 184036 - DNA, 122 bp, Homo sapiens
ttaacctactcacctactcactgccgaggctggggcgctttgggcaagggcagacgcttgcgaatcgccgatgcatgccccagcactttccttccttgctgtgtgatccgggcaggccgctt

SEQ ID NO: 184037 - DNA, 122 bp, Homo sapiens
ccaggagggggcgctgtgctgggtcaggcgaggtctttgctagctgggtctttccggctgcgcccctgctgggtggtggttgggagttcgtctgtgaggtgtgtttctcacagcttacacac

SEQ ID NO: 184038 - DNA, 122 bp, Homo sapiens
tatgctactacttaatattgccttgcgtttctgaaaggatctgaaatgtaaattttttcacgtgtgttagcatgtatcgtcattccgacacccatatgaagcacataaatgaggattaatcg

SEQ ID NO: 184039 - DNA, 122 bp, Homo sapiens
ccaggcccggggtgttggcgccccgcccacagcccagtccttgctgcccagccctaccttcgcgcagctgccgccaagcctggccacccaccccgtgcaccccgtggacgcccccagccacg

SEQ ID NO: 184040 - DNA, 122 bp, Homo sapiens
ggggaaggcctcgggagggacacgacggtccggcagcagagcctgcggggctggaggaggcgccctcctctcagctgctcttcctgcccctttcggtggcgaagatggatggggcccggggc

SEQ ID NO: 184041 - DNA, 122 bp, Homo sapiens
taggtgcagggtccatctttcatcactgccatgcgagtgagctgtgaagtgggaggggaccgtatatggactggacctcaggtgctgaaggagaatgaagactctagaagcaatatttggtg

SEQ ID NO: 184042 - DNA, 122 bp, Homo sapiens
atgtgattcaaatgtgcacatattacctctgcttgcttctcgttggctaaatcactgtcacgtgctcgtgctagcttgcaagtgtgttgtgggaagtcagggaccccgaatggagggactgc

SEQ ID NO: 184043 - DNA, 122 bp, Homo sapiens
ttttgggaggaattggaagattgggtggaaaacgcatttcacaggtcagaatatcatactcgaaggcttgggggtgaggagtaggcaagtcaacagcaaagatcagccatgaggagagggct

SEQ ID NO: 184044 - DNA, 122 bp, Homo sapiens
accaacaaggatggcttccgcagccgcctgcccgtccctgggccccggcggcgtaatccccgcaccacccaacacccattagctctgttggcaagggtctgggtcctgtgcaagggctggaa

SEQ ID NO: 184045 - DNA, 122 bp, Homo sapiens
gctcaggttctgagacgcagcttcgcgtctcctgggacagtgtcttgagtgcggagcagacgggtcgctggtggattgtggggtccgcctggagtggggccccgatgatcgacaacagtcac

SEQ ID NO: 184046 - DNA, 122 bp, Homo sapiens
tatataaagctatggtaatcaaaacagcatagcagtggcataaaaatagacacaacaggtcggtaaagccggagtcgggtcctgtcggcttcctccccggacagcatgaacttcaccactcg

SEQ ID NO: 184047 - DNA, 122 bp, Homo sapiens
atggaggaggagctacgttatgcacccctgtctttctgtaaccccatgatgtctaagcttcgaaactaccaaaaggaccttgccaaactccatcgggaggtgagaagcacacctttgacagc

SEQ ID NO: 184048 - DNA, 122 bp, Homo sapiens
aaggcatctccaggcccaatctacctctgggcttttctcaagctctccctaggattactgcggtttcctcctggcgcctctcgtcttggacagccatgcccccctccatgctgcactaatgg

SEQ ID NO: 184049 - DNA, 122 bp, Homo sapiens
agaacccagccgaggagggggcttgagggagaagtcccaggacagcccgaagagagggtacgggaagctccatcctggggcgcggggactcctcttcgtcatttttgcacccactggaacgc

SEQ ID NO: 184050 - DNA, 122 bp, Homo sapiens
ctgttctacccctccccctccccgcggtaccttgcacttttctccctccctgccccctctcgagtccaccctccgggccttctgcccctgatcgcttggttttccttgcagtcgcctgctgc

SEQ ID NO: 184051 - DNA, 122 bp, Homo sapiens
gggaatgtacctgcctgaaccaacgtggaatacggggaaaaacgttggctttggagaatccggtgttaagctggctccataccaactttgttattttaggttacttctattctatgaactgc

SEQ ID NO: 184052 - DNA, 122 bp, Homo sapiens
gcgcgcgcccgcgccccaaccggaagtccgccaccggccgctctagcacgcgcagggctgcgtctgtggccttaacccttcccaaggctgcgccgccggcctttgtctccgcggagcgtcac

SEQ ID NO: 184053 - DNA, 122 bp, Homo sapiens
gtaagttcagttattcagtaatagactaaaatgtctgatgtgtgtcccatgcttagcagccgaatagagtgatgactaggaccaggctcttgtcccagatcagggcaggcaaaatacaaaca

SEQ ID NO: 184054 - DNA, 122 bp, Homo sapiens
tcggggtcctgaggccaaactctcatccacgaccggtgaccatgtctcaggcccgggagccgacccccggcctcagcaggaagtcagcgggaagctatgcctgggacccagcctgggtcgtg

SEQ ID NO: 184055 - DNA, 122 bp, Homo sapiens
gatttagaaaattggaaactggagaaactaaaccatatggctggtttgggaggtgggagtcgcttaggaatgggtctagtcttaagaatgccctaaaagacatcgaaagtcctgcgggggga

SEQ ID NO: 184056 - DNA, 122 bp, Homo sapiens
aatttagtgcctccatcagtctggctcctgagtcaagccactagtcaccacattcctgtccgtggtaatagcaatgcagtgatattagtcccacttcgcaatggaggtgcagagatcatgcc

SEQ ID NO: 184057 - DNA, 122 bp, Homo sapiens
gtgtatagatttcatacttatgttgtctttcctgggtacagatttattactgaacaagtacgtgtaagtaaaatgtcattggtgagcaggacacaagataaaaggtgaacaccacatatggt

SEQ ID NO: 184058 - DNA, 122 bp, Homo sapiens
caaattccacgtgccttcctccccagtgcttctcagcagcctgcaattccatgggaccaccgaccgtgacaaatgtggccaacagaaagcttttattaataggaatttaatttagaatttag

SEQ ID NO: 184059 - DNA, 122 bp, Homo sapiens
gcaggagctgtgggcacacccgggcaccacaggcctgctcgccggagagagcaaggccctcggaggggccacacaagggactggcacactgtccagggatgcctctcgagaggaagagacac

SEQ ID NO: 184060 - DNA, 122 bp, Homo sapiens
gggtgaagctggtggctggtccagttggtcaaggctcacccttgtagaggtggctggttccgctttgagccagcttggccttgcctggcatgcacaggccccaggtactaacacactgctcc

SEQ ID NO: 184061 - DNA, 122 bp, Homo sapiens
gggtggagagagacagagacatcctttccttggacagaatccctctggtgtgaagtcttacgaagagcgctgcccttctcacatgggcacctggcagtctgtcctggtgtggcctagactgg

SEQ ID NO: 184062 - DNA, 122 bp, Homo sapiens
agggcctgaggagcagccatggggccccagggcagaaagactggagctggagctgggacccggtaagaggctgactgggtggcaagggccacacctgcaggctacaaagaggattttgtcct

SEQ ID NO: 184063 - DNA, 122 bp, Homo sapiens
ggaatgcctgcagaataacatggtttccccacacacggagacacaggctgcttgtgtggccggcacggggggtcctacgtcagcatgtggtgacccttggcctcgcccaccatcagatcact

SEQ ID NO: 184064 - DNA, 122 bp, Homo sapiens
gaggctgagcaggggtcgctgaggggcccacgcgcgttatcaggaccaagcagtccccagcgaccctcgccagggcaagaagcctccccacccagtcactccctagactcctggtatagtcc

SEQ ID NO: 184065 - DNA, 122 bp, Homo sapiens
aagaaaaaccattctattgttccaaagggtaaaaaaaaaaaaattaatgtacagaaatggcggatgggtatttacgtagaggtgaacaggcatataaaatgtttaagcacctgcgtacacag

SEQ ID NO: 184066 - DNA, 122 bp, Homo sapiens
actcgggaagcgcagagggtcagggagttccctttcctagtcaaagaaaggggtgacagacggcacctggaaaatcggttcactcccacccaaatactgcgcttttccgacgggcctaaaaa

SEQ ID NO: 184067 - DNA, 122 bp, Homo sapiens
aatctaaggaaagggaattcgaggcttgggcacagctctcagtgtgcactgcggtcccaccgtggactggaagctcagtgcttggggtggagccccggatccgaaaggagttcagagtctgg

SEQ ID NO: 184068 - DNA, 122 bp, Homo sapiens
tgaagagggataggggccatgagtaaaagaatatgggcagcctctagaagatggaaaagtcgaggaatagattctcccctagaatttccagaaggaaggcaacctggccaacaccttcattt

SEQ ID NO: 184069 - DNA, 122 bp, Homo sapiens
tttccacctggtgatgtcacctcctgaaatgtcaggtcagatggctcattctccatgtggcgtatctgcttatactgagttcctccctttattcttcttccttggtactttggttttgctaa

SEQ ID NO: 184070 - DNA, 122 bp, Homo sapiens
ggcggagcgcggcggacggaaggggctggaatcgtctctagcgggcgggggcgccgggagcgcagggaggggctggcggcggcgcggggcgggggcgccgggagcaaggtgcgccgcgcccc

SEQ ID NO: 184071 - DNA, 122 bp, Homo sapiens
cataatttgggcaaaaacataaacaccacccctttcagtagtcatggtcttgtgagtctacggtacttctgcatttcattaacttatccgttcctctctaggtcacagtcaatatgattaca

SEQ ID NO: 184072 - DNA, 122 bp, Homo sapiens
gaagtctgttgatgtgctaattaataagacacacagttcttttttcagctgcttcatcttcgagtacttttccaaacattccttttggaaactaatgtgtcctttaactttttttttctctg

SEQ ID NO: 184073 - DNA, 122 bp, Homo sapiens
cgacatcccaggcacctcggggatcgcggacccgccccccacacccggtatctccgcccgcggtcggctccaacctgacccccggctccccagcccctgagccccgcggactcactcctacc

SEQ ID NO: 184074 - DNA, 122 bp, Homo sapiens
agcctctggagtaggcagggtgggctatacagggcgtctaggaagacagataggtcacggcggagacagggctggccccctcgctgcatctccgagggtccgggtctcccctcagcgtctct

SEQ ID NO: 184075 - DNA, 122 bp, Homo sapiens
cacctctcttcccacctactggggaggctgaggtgggaggatcactggagcccagtaggtcgaggctcgcgagccgtgatcacaccgccgtactccaaactgggtgacacagtgagatcctg

SEQ ID NO: 184076 - DNA, 122 bp, Homo sapiens
aaaatctgtgagattttgctcacctcacacaggccctgcacactgtcctctgtgagggcccgcggtctcacacctacactcagggtcaagtaaagacactgtctaggagccccgctcccagt

SEQ ID NO: 184077 - DNA, 122 bp, Homo sapiens
aggtgtgttacataggtaaaactgtgccatgatgttttgccacacctatcgctatcctatcgccccatcacctaggtattaagcaccacatgcattagctctttatcctgatgctctccttc

SEQ ID NO: 184078 - DNA, 122 bp, Homo sapiens
tcaatttctccctctattcaatcctactttctttttcttcttttcctcgaggtggagtctcgctctgtcgcccaggctggagtgcaatggcacaatctcggctcactgcaaccacggcctcc

SEQ ID NO: 184079 - DNA, 122 bp, Homo sapiens
agagtcgttctggtgaaggagggctggtctgatgggttgagaactgctagattgggtcatcgcagtgtgacccgctgccactgtggtgcctggccagaactcagtcacatggactcaaccaa

SEQ ID NO: 184080 - DNA, 122 bp, Homo sapiens
ccagtgcactgaagctccagcccttcctggcgccctggactgagctgtggtgagcacatccgggttccactggatgcgtatgtgggaaggggggtgccctgggttgggtcaatgatgagaac

SEQ ID NO: 184081 - DNA, 122 bp, Homo sapiens
ggagtaaattatgagggagggtcggagttctgcagagcaccgagggccacatggggaaggcgttcttgtttctagaggccgctttaaccagacccacttgggggccccgtggcgatttattt

SEQ ID NO: 184082 - DNA, 122 bp, Homo sapiens
tttatgtttgagtgctatttctttgcggctccaaggaacaagcattttgtttctaacaatcgaggaacaggcattttgtttctaacaactgggtgcatcccagagcttctaaattcatcagc

SEQ ID NO: 184083 - DNA, 122 bp, Homo sapiens
agggcctacatctggcttccctcttctcctgggaagagcactcctggcttcctgcagggccggtgggaggaggaaagtgattctgagggagaggctggagccttaaggaccaacaaggcaaa

SEQ ID NO: 184084 - DNA, 122 bp, Homo sapiens
cgtggaatcactgttcttctctgttctctttgtgcattgcccttggctgcctccgattgtcgttccgggagtgaattttacgtatatatatataaacctgtccttaacaggactgcttcgtc

SEQ ID NO: 184085 - DNA, 122 bp, Homo sapiens
gaggactggccgccaagggttgcggactatggccctaaagctcatccacaaggagttcctcgaactggcccgcgacccccagccccactgctcagcagggccagtgtgggacgatatgctcc

SEQ ID NO: 184086 - DNA, 122 bp, Homo sapiens
agtggaatgtcctttcactaagccgttctgcaaaggtccagtgtggttctctaaggacttcgctgccgtcgagacgcgcagcggatgccgctgcttgccgcggcggaggaagctacgccgct

SEQ ID NO: 184087 - DNA, 122 bp, Homo sapiens
ggacccgggccttggggccccgggaggtggaggtggtcccattccagtgagggcagtggacgtgccagggtcttctggggcccagaggctggaaacgtccttccaagagaacagccaggccc

SEQ ID NO: 184088 - DNA, 122 bp, Homo sapiens
aggacaggttccctatctggtactacccagatattctccaatgagacttctgtgctcctccgagcagtgagactggcacgtgaagagatctctgagagacatgaagtgaatgagtgacaggc

SEQ ID NO: 184089 - DNA, 122 bp, Homo sapiens
ggcgggtggatcacttgaggtcaggagttcgagaccagcctggccaacatggtgaaaccccgtctctaccaaaactatttaaaaaatagctggctgtggtggcgtgtgcctgtgatcccagc

SEQ ID NO: 184090 - DNA, 122 bp, Homo sapiens
gtggtcacggaggctggctctgcagcggggagtcctgagaactgtgcgtccccatctccccgtccctggaggtggcgccagacaccattcctttccctcttcctgcaccaggtgttaacgtc

SEQ ID NO: 184091 - DNA, 122 bp, Homo sapiens
atttattcaaatcttccactatttaatttatgtaaaatatcctagtcaatgtttttaacccgagtgtttttaaacattgctttttaaaaaataaaaaacttttaaaatattgaaccatttac

SEQ ID NO: 184092 - DNA, 122 bp, Homo sapiens
gcacccgggcgctgctggcggccaagctggatgggtcgccagtgagtttcggtgcggcaccgctggcccaggcccgggcgcggctggacatggccacctactgcgacgacctgggcccctcc

SEQ ID NO: 184093 - DNA, 122 bp, Homo sapiens
gccagcttcttcgaaaggcccatttttctccgtggctgagcgaatgctcctagaataccacgtttataataaatcatgtagggtggaattcctgctggatgtatacacctttctgcatcaga

SEQ ID NO: 184094 - DNA, 122 bp, Homo sapiens
cggccaggggccggagggcctggaggcccctggagtagcaggccgcattcttcgtctctccgcgctctctgccggacctgaactcacaaaagtgaactttttataaatagaagtaaaagcca

SEQ ID NO: 184095 - DNA, 122 bp, Homo sapiens
gtgtgctggccccgcccccacagcctggccctccagttgtggccctgcccccgtagaccacgcccctctggtcacgccccccaagcccccactgagactctggcagccgcagtttcttcccc

SEQ ID NO: 184096 - DNA, 122 bp, Homo sapiens
cgagggcagtcctggtgccgacccggaggtggtggcctgcacctggggcctgtgcatctgcggcaggctgccccggtgagtgagaatcagcaacaatgccctcagtccccagctctgccagc

SEQ ID NO: 184097 - DNA, 122 bp, Homo sapiens
agagagtaattaattttagacttgcaggcaaatggcttctgttgcaaaaaaaattaactccgcccttgaagctcaaaggcagctgcataaaatgatggatgtggctgcatcccggtaaattt

SEQ ID NO: 184098 - DNA, 122 bp, Homo sapiens
ggggaggaagtggaagggtcacctcagcggggggtctgtcctgcgccgtatgggtcctggcgagcacgtctgaggctggggcctgggacagggcctccaggaagggcaggtggcgtcggagg

SEQ ID NO: 184099 - DNA, 122 bp, Homo sapiens
gcccacccccgttattcttcactttcacttgacatcgttcttcactcaaggttaggtcctcgctagtgccagagaagcccctgggtccccagtgccctcagccccgcagcgtagggagcagc

SEQ ID NO: 184100 - DNA, 122 bp, Homo sapiens
attttttttttttgcctccttctttctccctgaaacttgtttgaaaacccaagtgaaaaccgcgacgatctgcacactcaaaagcaagtgccaagtaagtgccctgcggtggcctcggcgcg

SEQ ID NO: 184101 - DNA, 122 bp, Homo sapiens
accctgtcacctgcaaatcaaactctcttcctcaaaggaccacttgacctgtctctgcctcggagaagctgccaatagtgccccaggtgaagccatgttcccctttcctatgggttcacaca

SEQ ID NO: 184102 - DNA, 122 bp, Homo sapiens
ccggccaatttttgtattcttagtagagacggggtttccccatgctggccaggctggtctcgaattcatgacctcaggtaatctgccagccttagcctctcaaagtgctaggattacaggtg

SEQ ID NO: 184103 - DNA, 122 bp, Homo sapiens
ggtcctagctggcctttggccccacttgtgccgaagatataactccatcctgcttgcctccggctccctagcctggtgacattggcaggaagacggagtcataaactgtgccggtagagcct

SEQ ID NO: 184104 - DNA, 122 bp, Homo sapiens
attttcaagaagtttccagattcgtaaaaccagaattagatgtctttcacctaaatgtctcggtgttgaccaaaggaacacacaggtttctcatttaacttttttaatgggtctcaaaattc

SEQ ID NO: 184105 - DNA, 122 bp, Homo sapiens
aggaagggggaactctgcggttcccaggaatgaggctgtcagcgtttggcatattgccaccgagtctccatacacgggcaggacgtgtgtccaccacctccgcgtgctgctccttcacgagc

SEQ ID NO: 184106 - DNA, 122 bp, Homo sapiens
tatcaggaattacggtggcgtgtgggtgtggctgtgtcacccagaaaggggtctggttctcgtagaggcttagatgaggaaatacttggcgcagatgggtctctgggtgtggtgtgtgcccc

SEQ ID NO: 184107 - DNA, 122 bp, Homo sapiens
ggctcgagacggaaggcggaaggcggaaggcggaaggcggaactcaacccaggagcctcccgccggaagttgtgcgatttctttaatcagagtggcttcccacaaatgtatttcctgcctga

SEQ ID NO: 184108 - DNA, 122 bp, Homo sapiens
ttggttctttcaaaacagagaaggactttaaaaaaatggactgtagatactgcactagaacgtgggagctttcattcctcaggcacccaggatccatgaacttaaagccttctgcctctctt

SEQ ID NO: 184109 - DNA, 122 bp, Homo sapiens
ggatacagtgagctatgactgcaccacagcacagtcagagacagaccctgggcaacagagcgagaccctgaatctaaaaataataataatgataatggtaataataataaaaatatcaattt

SEQ ID NO: 184110 - DNA, 122 bp, Homo sapiens
ggcgctagggccaccagatgaaagggaggtgcacaggaaggagctgtggagtggaaagagcgcgggctttcgagcacatacaaacctgattacaaaagtcagatttctttatttcgtcttgg

SEQ ID NO: 184111 - DNA, 122 bp, Homo sapiens
tccggagagcagaggggtgagtcttcttgtccagttgtgtcccttccttgacagatttgccggcttcctgtctgactttttctgcctccctagggattccagccatttggtgataccggggg

SEQ ID NO: 184112 - DNA, 122 bp, Homo sapiens
tccgcaggccccggccattccacagcatgcggcagagggcgccgcagccactgccaggagcggcagaacccccaccctctgcaggtccggccccggggttctgagccacgagggcgggcgca

SEQ ID NO: 184113 - DNA, 122 bp, Homo sapiens
tcccaacaaaatcccctctctaattgcacatcccattcaacaactctgcccagggcttttcgaatttctggatcaacttctttaggaaaaagggaagaagaagtctcagagacagcggtaga

SEQ ID NO: 184114 - DNA, 122 bp, Homo sapiens
aaggggtataattgacaaggcactgaaagtattgaagtcagagccttgggaaggatctaccgaactctcggcggtccacgcggggacagacctcagcccgtgagccttgagctccacgcggg

SEQ ID NO: 184115 - DNA, 122 bp, Homo sapiens
aatctcttgtcattctctcctcacttcaactgtgcttttgaatcactcattgggttgcctcgtttgcactttaatagatgctgctgctctcaagcaggtgatcttctcactctgaaacatat

SEQ ID NO: 184116 - DNA, 122 bp, Homo sapiens
ccccaggaacccgctccagcctggccccggagagcgagagctcggcgcctgcgtggcccccggggctggccccagaaccctgttccttacgctgcctgacatcggcgaggagggggcctcgg

SEQ ID NO: 184117 - DNA, 122 bp, Homo sapiens
gcccctctcccggagctggcctcagctttggtggggaggccggggctccagtgagccccccggcgaggctccaacgagtggcgtgggtgttccccgcaggcaaccttggctccactagtctg

SEQ ID NO: 184118 - DNA, 122 bp, Homo sapiens
atctcgatcttttttcctcaacttttattgggccgctgtggcaccagaatctacgaatggcgccctctagagttgtgtaaagaagtggcgtcacctcattataaataaaaggttgcttataa

SEQ ID NO: 184119 - DNA, 122 bp, Homo sapiens
cgccgcgatgccggctgcggcgcggggggccactgccactcccggcatgcgccgggcggacggccgctccaccaatccccgcgcccgtcggcgcccctgccccgccctccccagcctcctga

SEQ ID NO: 184120 - DNA, 122 bp, Homo sapiens
tagaggacagggaaaagatgtctttgcttttgcccttaagttgcctatcagtcttagtggcgagacctcctccctctccttcatcagccacagtgctctgggtcattcaccccttccattct

SEQ ID NO: 184121 - DNA, 122 bp, Homo sapiens
ctcttcagggacaaggtggccttataccaagccaaagtgctgagggcgcagggagacccgcgagacagggccccctgaagtcctggcggtttctagccagcctcttgaaattgacttgaagg

SEQ ID NO: 184122 - DNA, 122 bp, Homo sapiens
cgggaaagatttcggactgggggacaggaaaacagagggcggagtcttgggggggggaagcgagaagccgcatcaaccatgtaagcagcttcgcttcctgccgcaaccgtccgcggcctgag

SEQ ID NO: 184123 - DNA, 122 bp, Homo sapiens
ctagctggcaggcaggcccgcagccagctccctcgcgctccctctcgcgcgcgccggccacgccccctaggcaccgcggccaatcctcggccagctctggtccgtctccttccgcgaaaccc

SEQ ID NO: 184124 - DNA, 122 bp, Homo sapiens
cagagaggcgagcgctcttgcccggcctgacagctgtggcctaatttccagggctataaccgggctccttatttttacccacttggtatttttcattactgatgcatgggagatggccaggg

SEQ ID NO: 184125 - DNA, 122 bp, Homo sapiens
cgcccagattgtgcttctatataccacacaccctgaagaggaatagcactcctcaatgatcgattccagatctgggataggaaatgcgcaagatgtgccaatcatcaaagaaacaatcacaa

SEQ ID NO: 184126 - DNA, 122 bp, Homo sapiens
aatcgtctttattaaataagcaaatagtctacacagatacagtcacttgtctgttgcacacgagtgcttccccttctcttgggaaagatcactctatgtgacaaggtgcaagctaagcagca

SEQ ID NO: 184127 - DNA, 122 bp, Homo sapiens
cacagctttcccctcagactcagcgcccagctctccccaatacctctccctctatatccccgcccccgcctctgatccccgcaccgtccggcccccacctcagaaaccgtctctcgaggcga

SEQ ID NO: 184128 - DNA, 122 bp, Homo sapiens
ccgtcgtcctggatgctgcatcgcttccagccgggctgctgcagcacctgcccatctcagcgccagcctgggaatgaaagtagacgtgtaatttcaggttagtttcgctgaacaattgtttg

SEQ ID NO: 184129 - DNA, 122 bp, Homo sapiens
atgcgcatgcgtggtgaggccggcctatgacaaactctgcaggattttaaagccgtactacgggctggggtgccgggaggcggggtacactctccttgtctccccttctctaagttccccat

SEQ ID NO: 184130 - DNA, 122 bp, Homo sapiens
cttaggtacggaagcgctggggcgcggctgcctagcagccgccagtccgctcgcccctcgcgttctctggctctcaaatccgagtgcagcctcgaacataggtccttctgccgccccgcccc

SEQ ID NO: 184131 - DNA, 122 bp, Homo sapiens
ggtcgacctcagcacagccaagcttcagttcagcctgtgtccctaggttaccagcacatccgcatgtatgatctcaactccaataaccctaaccccatcatcagctacgacggcgtcaacaa

SEQ ID NO: 184132 - DNA, 122 bp, Homo sapiens
gccatgagcagccgcccgtcctgatccagcttgggcagtcgagactgtgttcaaggggaccgacctctccatgcctccgtccctgtccccacgtcagtgtggctcgaggtgaggttggtacg

SEQ ID NO: 184133 - DNA, 122 bp, Homo sapiens
cagctgcaaaagaaaagagcttggctcttccccctctgtggagtctgcacacaggatttgcgccctcccccgagttctggccaggaggcttctcaccccattcgaattgttacaaagttcag

SEQ ID NO: 184134 - DNA, 122 bp, Homo sapiens
ttcggccaggtagagccccagcgagccgtagttgtcatagatgttcctttatgtggtgtccgtcaggatggcttgggccttgttgatctccttaaacttgtctgcggcctccaggttgtcag

SEQ ID NO: 184135 - DNA, 122 bp, Homo sapiens
ctcctgctcgccatggcaaccggaccctcgaatgccctgtgtgtgtcgagtgtgtgcgggcgtggccgtggatcgcgcgtgtgcgccttgggccgcgtgaggggaagcagcttcgtcatgcg

SEQ ID NO: 184136 - DNA, 122 bp, Homo sapiens
ttcggttgcccttgaaattattgaccgcacaaggaacaattaaaaatacggcattctggccgggcgcagtagctcatgcctgtaacctaagcactttgggaggccaagatgggctgatcacc

SEQ ID NO: 184137 - DNA, 122 bp, Homo sapiens
gctcggaaggtgtcttgagattatcatccgctgagggtggaagcggcccccgaagacgctcggcaggtgtattgatattatcatctgctgagggtggaagggcatgatatgacgctcggaag

SEQ ID NO: 184138 - DNA, 122 bp, Homo sapiens
aggagagagggggagaaaagtgaagcgggatagatttagggtagagatgttcaggagaggcgggcgacccatctcagatgaaattcagaaaaactgacaactgactaggggtggcaggatgg

SEQ ID NO: 184139 - DNA, 122 bp, Homo sapiens
atccaggatcttccttctatcatccaaccaccacccacagcccatgggacaggggcactgcgtggagaagtggacacccagttccaatggtgagcagactagctcagccctagcagcacaca

SEQ ID NO: 184140 - DNA, 122 bp, Homo sapiens
gatttcagcagctgaacggaaaggaaaagacaggcgtgagcagcaccgcaggggcaggatcggtaggattcactaactcacttttcccgggcttaaagcctgggagacagagcactagtgat

SEQ ID NO: 184141 - DNA, 122 bp, Homo sapiens
gagtagccattctttatcctttactttcttaataaacttgttttcactttatggattccccgcaaggtgccaggtccaagaaccctctcttgaggtctggatcagaacccctttctggtaac

SEQ ID NO: 184142 - DNA, 122 bp, Homo sapiens
ctgcagctgggggccagagatcaggatgccatagatatcattttctaaaaattcccacgacgcctccgtgccggagtcagaggtctgccccttccgggtggagcatgtcgccctgaagccga

SEQ ID NO: 184143 - DNA, 122 bp, Homo sapiens
cccctgcaggtggaggcggcagggcctgcgggaggcaccctccccaatcgcctgggaacacgcagggaggcaatgggtcccccagtaagacccaaaggcaggacgtgcagtgcagcccgggt

SEQ ID NO: 184144 - DNA, 122 bp, Homo sapiens
gggccgccgtcacaaactctgtagccctgacccgggccaggccaacaacagtgaaggcagcgaccatgactacctgcccttggtgaggactcgggaggtggagggtggtgccgccggggccg

SEQ ID NO: 184145 - DNA, 122 bp, Homo sapiens
tcaagagcagctcctcttgcgtggcagagttcttctgcccatagaggtcggctccccgggcgacgaggcgtcctgcagagcctaccaccatgacttcatgcacaaaggcgcctggcatgttg

SEQ ID NO: 184146 - DNA, 122 bp, Homo sapiens
aatattgaggaaaattggaataatacaacacacatgcattgatgctccacctgtttaccccgattcaacagttaacattataccatatttgctttcacagttgcccaattatttgagtggca

SEQ ID NO: 184147 - DNA, 122 bp, Homo sapiens
caggccctgtgctttgtcaggctctgggggagacaggtcattactctgcagtgtgggaagcggggctgccctggaagtgtgtactcagtgctgtgggggtacagagggagggctggagaact

SEQ ID NO: 184148 - DNA, 122 bp, Homo sapiens
agagaaggcccatttagctgttgggatggatcagggaagtcttcatggaggagaaacatccggatcctgaaggataggtaggcactaggcacagggagggcattctagacagggggagcagc

SEQ ID NO: 184149 - DNA, 122 bp, Homo sapiens
agccgcggttggggcgaggaggcgggagtttggcactggttctgataggacgggtgtttgcgttcccagagttcctattgggttaacactggaggctctaagatggcggcagtggcaacctg

SEQ ID NO: 184150 - DNA, 122 bp, Homo sapiens
tcccaggggaagataacagtttatgaacacttgccagtcacagctttgctaatgttctatcgctgtgctagacaatatggtcaaaagggttttttctctatcatctagtctctttctctgtc

SEQ ID NO: 184151 - DNA, 122 bp, Homo sapiens
ggacctgcaggaaaagatctgggaggaatattcgcccagaagcctctagggcatacgactcgcgttcttcaggggtcggcgcggataggaaccgcagcaaaggatcccctagacctccgagc

SEQ ID NO: 184152 - DNA, 122 bp, Homo sapiens
tctgtggggtcgcccccactgcgggctgtgcgcgcctgcccgggcgccatcgcaaaatcgcgcccaaagcacaggtggggactcatagcctgggggtaaatgttaaacaacaacaaaaagca

SEQ ID NO: 184153 - DNA, 122 bp, Homo sapiens
gcgaccgttctcactgagcatgtgcagacggcggtgcgcatgctctgttgcggtccgcttcggtttctgttgcgggacccggggtgtctcctagcgcaaccggaactagccttctgggggcc

SEQ ID NO: 184154 - DNA, 122 bp, Homo sapiens
ccctcagttaatagaagaaacagtcaagcatggtggcataggtctgtattcccagctacccgagaggctgagaagggaggctctcttgagctcaagagtttaaggctatatgccaggcatgg

SEQ ID NO: 184155 - DNA, 122 bp, Homo sapiens
acgcctgagggggcggagatacagagtgggacgcgcagtacatcccaggatctctaggaccggggctccagattgggttttctcgagggaatggagttgaattagccagatcagggatactt

SEQ ID NO: 184156 - DNA, 122 bp, Homo sapiens
accagcttgctgagggaggagtccgagaactcgtaaaaaaacctcttaaagctggggtggcgcctgatctggaagtggaaatgaaaacaggtcattagtgttgctggcagtacccctcccgc

SEQ ID NO: 184157 - DNA, 122 bp, Homo sapiens
cttaaccccagacccagccgggacgctgctcctggaaggggcagcccgtagaaccaagagcgcacagggaggaaaggccgtggtgaccctacgcacccagagattctttgcctcaggggtgc

SEQ ID NO: 184158 - DNA, 122 bp, Homo sapiens
ggtgcgtgctgaggagcgccgcctgcaccgccatcgccgcggctcccgggctgtccgcagcgctgcccgtgcgcccccgccagctcctgcccgccgcccagacccagctcccgccccggcgc

SEQ ID NO: 184159 - DNA, 122 bp, Homo sapiens
acgtattccggtaagggctccttgaaccgcagctcgtagggcaggacagcgagccgcctgcgtgtggccttgtcccgaatctcagtgaccacctcccggatggtgtaaatgttcttcccgat

SEQ ID NO: 184160 - DNA, 122 bp, Homo sapiens
gtttttcaggttgtttgtctcttcaagtcacagctggcgcccctcattccctgaagagcccgtcctggtctcttcctcctcttggagatatacatagaaactacacctttcccaggactgtg

SEQ ID NO: 184161 - DNA, 122 bp, Homo sapiens
gactgcagcgtttccaaggcgagcttgcagtgatcgaggctcgcagaccctcagcgcagccgctgcctgctattgggaggttcccatgtcctgcggaagctggagctcctcactgcgcgcct

SEQ ID NO: 184162 - DNA, 122 bp, Homo sapiens
gaccaaaatggcaactccaagcgtgctttgggggaccctgccactcccacggaaggtcctcgccgcccacctccccgtcctccctgtcggctcagcatgggccgccgtcacaaactctgtag

SEQ ID NO: 184163 - DNA, 122 bp, Homo sapiens
ggcctaagaaacggctctaccctctctgcagccctggttggagacccagggtggatccagcgccagccacagaaaggaacgcacctccatccaggacgccagagccctcccataaccctctg

SEQ ID NO: 184164 - DNA, 122 bp, Homo sapiens
gcgggaactgaggctcctctggggaggcttccccggcgcggggggatggggtgggcactgcgctccaaggggcgggggagggggagagggcggaggctgggggaggagaaggaaggggggga

SEQ ID NO: 184165 - DNA, 122 bp, Homo sapiens
cctgacccccaaagccccagcagcctttgaggccaaattattttctagcctgacctgtcccgactgcagggagagcttcagaggccagggcgtgaaggaggaagcaggggacaaaagagcct

SEQ ID NO: 184166 - DNA, 122 bp, Homo sapiens
aggagcaacatgacgctgagaagctaagcagcttgcccatggttagcacgccagtgagagcggcagactcagctctgtgtttctcctgccctgccaagctgcttccctgatcagctgcaggc

SEQ ID NO: 184167 - DNA, 122 bp, Homo sapiens
ccccatacccggaactctttccaacactcagtagcgtgaggcatgggaaacagtgaaagccgggggataggttgagagggcgaaagctcatagctaccacagtagttcaggccgtgacgtct

SEQ ID NO: 184168 - DNA, 122 bp, Homo sapiens
ctcaaaaccagaaaagcccacagggcagccttcagcccctgccaaatgtcccagagaccccgaaagtcggaaactgctggtgcaagtcccagagcccgaaggccaaagaacccggagtctga

SEQ ID NO: 184169 - DNA, 122 bp, Homo sapiens
cctgcctgctggtggtcctcggcctccagaccgtgggctgtcccttggacgagtggaattcgtccccaggaaggatgcaggtcctatgagcagacgctgtgaagtctgtccatgtgcagcgg

SEQ ID NO: 184170 - DNA, 122 bp, Homo sapiens
gaacatgtcacaaatttgcatgtggtctttgcgcagggcccatgctaatcttctctgtatcgttccaatgttaatacatgtgctgtcgaagcgagcactgccctgctatttagggacagact

SEQ ID NO: 184171 - DNA, 122 bp, Homo sapiens
gtcctccgctccggggaggagaatgtggccagtggatgctgagttccttctgttgccttccgcagcccacagctaagtcactctgaagagcatctcgctggcctgcgcttctgcttcccgtt

SEQ ID NO: 184172 - DNA, 122 bp, Homo sapiens
taactgaaagagtcagcttaagtccatgctaaaacagatcacagtgggaaagagaagaggcgatgagaacctagcagctggaacacagaactgttcttcaagagagattctcagaataagac

SEQ ID NO: 184173 - DNA, 122 bp, Homo sapiens
gtgtttgaaggggagggacagtcgcacttggctgtcagcatggtggtggggattccctggcgcccaggtgtcagaaacacggtgatctacctgtgtaggtggcccatgagagcttgaggtgg

SEQ ID NO: 184174 - DNA, 122 bp, Homo sapiens
gcatgccccaccctgattggtccacttgctcagctcgccggcacccctatatccaattggcgtagcgcttgctgagcggcggcggcaaccgacgtacacaaggggcttgagcgttctgtgga

SEQ ID NO: 184175 - DNA, 122 bp, Homo sapiens
aaataaccccagttctcagcctcgccggtgttcctggcttcctgctttccaaagtgcccacgtgcctggtggttttacctggctgtgctctcagatcctctccgaatgcgtagtaactgcga

SEQ ID NO: 184176 - DNA, 122 bp, Homo sapiens
ttcaccgcagccccatccacctctccctctagggccaggagatggcgaggtccgtgggcgcggtggcctacctcgagtgctcggctcggctccatgacaacgtccacgccgtcttccaggag

SEQ ID NO: 184177 - DNA, 122 bp, Homo sapiens
cgttcctattcacggtcacctccataccccagaagaggcagaggcaagagccgcaattaccgttcacggtctagatctcatggatatcatcgatctaggtcaaggtcacccccttacagacg

SEQ ID NO: 184178 - DNA, 122 bp, Homo sapiens
tagtggctccctgtcccggcaattggcaattaccagcgtggttgggggagagggtcccctcgctgggcagctccagggaccccagagggacctccatgtactcactggggcctgaggagccc

SEQ ID NO: 184179 - DNA, 122 bp, Homo sapiens
ccacggggcagactcaggggtcttcacctccacctcatggagcagcccaccccactttcccgaggagagatgctgaagaatgagctcaaagatcttaagccccagaagcatggggagtgtgg

SEQ ID NO: 184180 - DNA, 122 bp, Homo sapiens
ttttcctaaattgctatgctgaggcctttttgacggtttgtccgccatcactttcagaggcgctccgcgcgaaccccgaaaatctgtgcaaaattctcagggttaggggaagagcatgggtg

SEQ ID NO: 184181 - DNA, 122 bp, Homo sapiens
tggaaaggtctttatggaccagggagtccggtgtcttttttacgggggacccctgggctgcgagttgcacagtccaattcgctgttgttagggcctcagtttcccaaaaggcacagggacgg

SEQ ID NO: 184182 - DNA, 122 bp, Homo sapiens
ctctggactccagtgtcaggcatctcccctctactgtcctcagggaagagggtccaagtgcgtcagcaagtatggtgaaaggtgaaagagacagtgatcttggatggagagaaatagggcaa

SEQ ID NO: 184183 - DNA, 122 bp, Homo sapiens
cggcggggccgagcggggtcagcgtgtcccgataccactgcctggccaagcagtggagcccgtgcgtcgcgcccctgcgcctccccggcggccccacgggcctgcagcccttccgctgcgcc

SEQ ID NO: 184184 - DNA, 122 bp, Homo sapiens
caattcccgaactagaaatttccagaaacttccgcaccaccgatggcattgatacaagggcgctggatcgatctagccctagatctccgggcctgctccggcggaccagcctaggcagccat

SEQ ID NO: 184185 - DNA, 122 bp, Homo sapiens
cctccccgggccccgcaggcagcggcggagagaaggtctcgagctcgggctccgggcgcgcgtagtagggctcccggctccagatctcctgcccgtaataatcagggtcctcgagggctgcg

SEQ ID NO: 184186 - DNA, 122 bp, Homo sapiens
ttccgctctcggggtgaggtctccctgcggcgagccggtgtcggggaaactggcatacagcgctccgcattcgtgtgtacctcgtggagctttctaaaatttaattccgttggcaggcgaag

SEQ ID NO: 184187 - DNA, 122 bp, Homo sapiens
agtgcgggactgaggacaacactaaaatgaattaaatcaaatgaaattaattaaattaaccgaaggtcagaattatcagcagagatctttggaaaatgcgtgttgaggcgtcatgtccgttg

SEQ ID NO: 184188 - DNA, 122 bp, Homo sapiens
gagaggtgaagggctgttcggtcattgcccatggagccaggggagctgtgggccttccgccgccaacctctgggctagccctgcagagatgctaggaggatgcagggaggtgaggtgggggc

SEQ ID NO: 184189 - DNA, 122 bp, Homo sapiens
cactgcctgaaggaaggagtagttggtgagctgcagggaagggtggataggcaccggcgccggcaaggttttgctgcccatttcggtagttgcagtggcttctcaatccggatctgcaaaga

SEQ ID NO: 184190 - DNA, 122 bp, Homo sapiens
gggacaatgctgacccaggtgagacctggggcccggctgggtacctctatctgaatgagacgcttctggacgcggccgaggtggcgagggagggtgctgggatgggggaacatcacctttgt

SEQ ID NO: 184191 - DNA, 122 bp, Homo sapiens
actttattctgttaacaagaaagataattgtcttgaatgtggcgtcccgcactgtattcccgatcaatagggcaccatcttagcttccttcgagatgtggtgaaatggagacgaaggcacgt

SEQ ID NO: 184192 - DNA, 122 bp, Homo sapiens
ctcagctgcagaagcaagccacaatggggacctcagagtgagcctgaagactccccacaccgcctctttgaagtcccttccaggttccccacccgatgtcctctagctcatttgagccttgt

SEQ ID NO: 184193 - DNA, 122 bp, Homo sapiens
tcttctgttgccgggcaacacgccttttaaacctgagcgagtgggtgcgcatgcaaagaacgggcgcgagtgacagagcgaccttaacggattagcaccttaacggattagcaccttaacgg

SEQ ID NO: 184194 - DNA, 122 bp, Homo sapiens
cggggcgcgtggggagtgaaggttggagggcgtcaggagagggaggtgggtatagggaggcggtgaagagcgaggctccaagagagcgcagcagctcccgcagctcccctctcctggctgca

SEQ ID NO: 184195 - DNA, 122 bp, Homo sapiens
aacctagatgatgcggggctttaaaccggggcctctggttctaaagccctgtgcttgccacgacacccacaatgccgcccttgggtcctgcccagtggactgtatgtgccacaataactaga

SEQ ID NO: 184196 - DNA, 122 bp, Homo sapiens
ttttatttcttggcacttattttaaaagccttattctctcctcctcccagtgcaaacccacgccatatccctgaatctgttgtggaagaacagactggaagacatctgcctcttgccttatt

SEQ ID NO: 184197 - DNA, 122 bp, Homo sapiens
gcgctttagggtgagccaggcacgatgccttgccaacgtggccgcccccttcctcccaggcggaattcgctcaggcaacattggccccttgagatccagtggggtccttttcgaaaggaggc

SEQ ID NO: 184198 - DNA, 122 bp, Homo sapiens
gggcgcgtcgatctgagagtcgagggcgacagccatgctgcagcccaggggtcaacttcacgtctagctcaaggtggggacccaaagaagactccaagcgctccctgcttaatgttcctggg

SEQ ID NO: 184199 - DNA, 122 bp, Homo sapiens
tgaaaagggagcggccggatgggtgcgggtgaagcgcccagggctaggatgcaaacccagcgagggagctggagacaatttttcctgtggcttctgcttgtgatgcaggaggagggggtgcg

SEQ ID NO: 184200 - DNA, 122 bp, Homo sapiens
ggatgtttcacattgtttcagatgccagtgactttcgaggatgtggccttgtacctctcccgggaggagtggggacggctggaccacacgcagcagaacttctacagggatgtcctgcagaa

SEQ ID NO: 184201 - DNA, 122 bp, Homo sapiens
ttaacgaaagctattccaactttttaccagccgtctgcagttattttcaccagtagagcccggatgaaagaggagcccgtagtaaccacggcaaccgaaaaacaaggcggaaagggtggggc

SEQ ID NO: 184202 - DNA, 122 bp, Homo sapiens
aaaaggtacaaattagaaagcagttctgcggctggattagagacattgtgttttcaaagacggtggggagggctagagaaaaatcctagaagctagcaagaccgcactacaccgaaacgtcg

SEQ ID NO: 184203 - DNA, 122 bp, Homo sapiens
aagctcatgctccagagccactgagccagaatcacagcagaacagggtgtccaggtgattcgaatgcactaccaggtttgagaagtgctgccgtaggccaactggggaaatggttaattctg

SEQ ID NO: 184204 - DNA, 122 bp, Homo sapiens
tgcagggaccagatctgggtccccagggccctgccttctgcctccttatcccatcagtcccgtctaagaactcaagacctctgcccagcatgcactgtgaccccgccctgggacaaacacac

SEQ ID NO: 184205 - DNA, 122 bp, Homo sapiens
tggcccggcctgcgcgcttttctgccccggcactcgccagctgcccagtccagctcaagccgggattttccacggctgcctctgaacggtctccaagccgcagcttcctctcctccttctga

SEQ ID NO: 184206 - DNA, 122 bp, Homo sapiens
tggagcgtagctgtctgagcagtgcaggattatctgaaggaggggagttcagggtttccacgaccctctttgcagtgacagtggcgcatggcctgaccttcgtaacaatgcatttttgttgt

SEQ ID NO: 184207 - DNA, 122 bp, Homo sapiens
tgctaagatgtcagcccaggatggaagccatatggtcatcccttttgtggtagagcaactcgccttttggaaagttctgtaccttatagtgtctttactttagaaacttccctttctgccaa

SEQ ID NO: 184208 - DNA, 122 bp, Homo sapiens
agttcgcctacgacggcaaggattatctcaccctgaatgaggacctgcgctcctggaccgcggtggacacggcggctcagatctccgagcaaaagtcaaatgatgcctctgaggcggagcac

SEQ ID NO: 184209 - DNA, 122 bp, Homo sapiens
cccacagagccacacttcatgggctgtctgctttgtacttgagtttatttcacaaaaccacggagaaagatactgaaatggagctctttccagcctccaagcaaggaggccccagcagccag

SEQ ID NO: 184210 - DNA, 122 bp, Homo sapiens
cctgcaatgcaaatgaacctctgcaaaacagggcgcagacaatgccagcctagtcctctgcgcgaagcgatccatctgcagctattttgttaacctgatgtttcttacattctttctctcat

SEQ ID NO: 184211 - DNA, 122 bp, Homo sapiens
atctctgtggatccgaggaggcagaacaagtccaccgattccctgcaggccaatgtgcagcgtctgaatgagtattgctccaaactcatcctcttccccagaaagccctcggcccccaagaa

SEQ ID NO: 184212 - DNA, 122 bp, Homo sapiens
tgagaacaagaggaacacatttagctctgcattatgtatttaggttgagagaaacaatttcgaatgaatgggggtctctccaacaaagcagtctagaacgggcccctgaggtttgaattcag

SEQ ID NO: 184213 - DNA, 122 bp, Homo sapiens
aaacatgaatatttcagatgtctcccatcttacaaagttatcaatctgtcaaagccactccgtgtgtgccggaaaatgatctggcataaaccagtcctctcagtggaggaggtcacagtgac

SEQ ID NO: 184214 - DNA, 122 bp, Homo sapiens
cctcagcctttcctgcctttgactgaaacagcagtatcttctaagccctgggggcttccccgggccccagccccgacctagaacccgcccgctgcctgccacgctgccactgccgcttcctc

SEQ ID NO: 184215 - DNA, 122 bp, Homo sapiens
taaacctttgggcaagtgaattccctcttctctctcagttcaccctttggtgacctccaccgtggctgcagacttcaggtggtcctcacgcattcacagaactgtctgcttaggttacagca

SEQ ID NO: 184216 - DNA, 122 bp, Homo sapiens
aggcttccaccttccagcctcggccaaagaacctcaaagctctatatgtaatgaagtcaccggaatgtttacagggcaaccaggggaggtggcatacaagcccaccttgtgacatttcttgt

SEQ ID NO: 184217 - DNA, 122 bp, Homo sapiens
agcaacaggaatacaaaatgtaagcccagtaacatgcctgatggcctactcaggaaagcgcgcctccccagaaggaggactgctttaagtatttctccaaagaatggcaatggggcagccaa

SEQ ID NO: 184218 - DNA, 122 bp, Homo sapiens
ggtgcagaaggggagctgcagtggatgctgtagcccccagaggcctgaaggtggcggtaccgtggttggagacctccaggctgggcagaatttggaaatatgtgtagtcacctgggtgccca

SEQ ID NO: 184219 - DNA, 122 bp, Homo sapiens
ggcgggcagcaattagctgttatctagcaagaggcgtcaggctgcacggcgaggcggccccgaagtgcactccgcaaaccatgactactcagcaagctgcctgcgagcgttcgtccctgtgc

SEQ ID NO: 184220 - DNA, 122 bp, Homo sapiens
ccggaactgctgctgagggcggcgggccggcttcgctagggtgagtggcggcagtatctgcgtccgcagcccccgcagccgcgcgccggcccgcggaggggacgtgccggggctagcgccgc

SEQ ID NO: 184221 - DNA, 122 bp, Homo sapiens
ggctgagctgtttttctgagggtgccacaatgaatcagctgcttagtcatctctggagtgcgggagctagcagaacagcaaagaggcattacaaacccaatagcgggtttcacttccttgag

SEQ ID NO: 184222 - DNA, 122 bp, Homo sapiens
tccagcctccaggccaacacacgtgaccacgtctgcctggggcagttgaagtaaaggacgcgaggcggcgctgtcaccgcattctgtgaaccgcagcgctctgggtccctcccgctggtcta

SEQ ID NO: 184223 - DNA, 122 bp, Homo sapiens
gagtctctgaggacgcaaggcggacatggagggggagactcgatggggcaggggtctgaccgtggggccctgtgtgatgcccataagagccagctgcctccggccacactccctggtgatgg

SEQ ID NO: 184224 - DNA, 122 bp, Homo sapiens
cctcctcgcacggtccccatttgaggttacagagagataaactgaggcacaagcagcacccgcggcccaagacctccccttggcctcactgtccccctttccgtatcttccccgggccaagt

SEQ ID NO: 184225 - DNA, 122 bp, Homo sapiens
cgagacccggagggggggtgcccgggacaaagcgtcggctgcaaaagagaaaaggccaggcgaagacgctaggctctaaaacaccctcagtagaagcattaaaatgccctttcgtgatttat

SEQ ID NO: 184226 - DNA, 122 bp, Homo sapiens
ttccagttccagaatgaggactagttattgcaaatgaagtcccaaagctctgctcttacccggtcccctaggccacctgcactgttttgtgattctggctcggctgtctcaagaaaggacag

SEQ ID NO: 184227 - DNA, 122 bp, Homo sapiens
gtaactcactgcttttctcctgtcttctctagtgactaatttgtcaacagactttggacacgctgaacttgatgaacagagccggtctaatacatttccagtttaagcagtgattaacaaca

SEQ ID NO: 184228 - DNA, 122 bp, Homo sapiens
cgcgggtgtttgtcgcttcgcggggccttgcggcagcatggcgaaccatctgatcagtggcggcaccggctacgtgccccaggactggctcaccgtgcagcagctcttcctcggcgccaact

SEQ ID NO: 184229 - DNA, 122 bp, Homo sapiens
aggacatggcagtgaacacaacagggaagctcatgtccttcttgcctgccttcatagttccgaaaaaatctgattctcttgtttgggttcctactagtcttcctcaccaagtgccaaagggc

SEQ ID NO: 184230 - DNA, 122 bp, Homo sapiens
cccagagtccacgtatgtgcagaatgtggcaaagcttttcttgagagctcaaagctgagacgacaccagctggtccacaccggcgagaagccctttcagtgcacattcgaaggctgcgggaa

SEQ ID NO: 184231 - DNA, 122 bp, Homo sapiens
ccggtggtgtcttctacctggtgttccgatgctgttttacttggttaacttcttgcccttcgggaatttaaggaacctttactgatgagcttgaaacgtgcgtcctggtgggtggggggccc

SEQ ID NO: 184232 - DNA, 122 bp, Homo sapiens
gaaacaaagccccgccgctgccggcgagccccggggtggggccgagggcgggggcggcggcggggaggggctcgctcagcaggcgctaagtcgctttattgccataaaatggggcccccgag

SEQ ID NO: 184233 - DNA, 122 bp, Homo sapiens
ctgccttaatgttcccctgagtccctgcgtcccttccaggccaccgtgcggacccgttttcgtttgttggggcctgttgcgagagacacaggcacccttctccaaagactgtggcatgaaag

SEQ ID NO: 184234 - DNA, 122 bp, Homo sapiens
acagcccacccggccaaagcctctgccagacccggtacgtgagtcccggccccagctccccgcacctccctgggcgcagagacccactcagagccaccacaagcccaggtcagggcagcgtt

SEQ ID NO: 184235 - DNA, 122 bp, Homo sapiens
cccttccctttggtttattactaccatattccaaatctagtgctgtacttgtccctgctccgcaattatcagcagtcagatttttgtacttttctggcaacctaagcttaggggtaccaaga

SEQ ID NO: 184236 - DNA, 122 bp, Homo sapiens
gcgactgcctcctggaagagggccacaggtctgtctcccaaccccaggctggaggagggacgaagtgcctgtcacccagtccctccatcagaggagtgagcagataccctctagggcagtgt

SEQ ID NO: 184237 - DNA, 122 bp, Homo sapiens
gttccggcgccgcactgttccagcctctactatggtacagtccctgcgtcgcagcctcggcgggggctctaagaacgggaggcagaaaaagctcaatcagcagcaggcgagcttcacccgct

SEQ ID NO: 184238 - DNA, 122 bp, Homo sapiens
tagctggcaagagctggagctgaggttcaaatccagatcagtctgactcagaagtcagcacgctgtcctttcgctgagtcccgagtgtaaaaccttactgaggaaaaaaaccgaagctcata

SEQ ID NO: 184239 - DNA, 122 bp, Homo sapiens
ggtgcattgacaccgccctggtcgcctagcctaggagaacgccgtcccggggacacctgccgtgaggtcctaccagaaagcaaatcagggtgaggaagagggttgttctcctccattccttg

SEQ ID NO: 184240 - DNA, 122 bp, Homo sapiens
ccttccccagggttttgtaagtctctgggcgcccaggcttaggctgtaatgaagaagcctcgttgatttcccagctgggaaacgtagctcattatattccacggttttgcacaagcctggaa

SEQ ID NO: 184241 - DNA, 122 bp, Homo sapiens
cctgaacgcagggaagcctggggcctacaacggctgccaggagctgggcaggagctgggccgaacgtggttgtcgtgaggcaggagctgggcccgtggaggtggccgggagagctgggcctg

SEQ ID NO: 184242 - DNA, 122 bp, Homo sapiens
tgccacatatgcgcgccatggaatactgtgccaatgacaacaaattactgctacctgcaacgacgaggataaacctcacagccgtgaggctgatgtaagggaagacccaaagagcaccgcgt

SEQ ID NO: 184243 - DNA, 122 bp, Homo sapiens
atttcgggactgaacgggcttacaaccacactgccaacttcagacagcgggtccagagggcgaggggctggctgacaacccactaaaatatgggatccatttctaatcaagataaaggatta

SEQ ID NO: 184244 - DNA, 122 bp, Homo sapiens
agcggtgcccaccttcctcataggcgcagaggactcggtcaggcgggaagaacactttggcgcgtgcctcctcttcctcttcccactcctaactcaggctggcccagaccattcaagaaccc

SEQ ID NO: 184245 - DNA, 122 bp, Homo sapiens
taacatgggcccatgtttccagcaagactcagacaagcacttcagtggctgtgggtggcacgggctggcatgatcctgggctgatttcatcctcttgggtgctgaggcctcccatttgtgac

SEQ ID NO: 184246 - DNA, 122 bp, Homo sapiens
tttgcttacttcctagtcccgggcaggccggctcggaggcagcgagaaagcgcagccaggcggctgctcggcgttctctcaggtgactgctcggagttctcccaggtacgtcgtgcgctccc

SEQ ID NO: 184247 - DNA, 122 bp, Homo sapiens
tgctccctacagcgttgtccctgccccgtgccctcttgtggtcgtaggtatctggcggcccgggaaagacaaaaagaagctgcccgcaggagcccagaccctgggggccttcctccccttgt

SEQ ID NO: 184248 - DNA, 122 bp, Homo sapiens
agcagaggcgggcgccgcaccgccccgcacgctcgctcgctcgggagagtcgcgggcggccgcttgggcgcacttgccgggtcaccttgtcccggaggtaagtccagacctcccggccgcgg

SEQ ID NO: 184249 - DNA, 122 bp, Homo sapiens
gccatcacctacctgcgcccctgctccaggacaaccgcgccagccgctcaaccacgctcccgagcatgagccctgcagcaaaacaagcctttatagcggcatcggccgccacaccgcgcaag

SEQ ID NO: 184250 - DNA, 122 bp, Homo sapiens
ctctgaatgcggtaacgtgcacggggagataaggatgtcaccatgagcaagcctcccagacggcatccaggagcaaccccaagactgggcaggggggctctgatgccgcccacggcgaggag

SEQ ID NO: 184251 - DNA, 122 bp, Homo sapiens
gagctggcggagatgctcaatctcagggagtaccaagtgcaggtgtggttcaagaatcgccgggccaaacgctctcgggagcggtggttccagaagcagctccagcagctccagaagcatcc

SEQ ID NO: 184252 - DNA, 122 bp, Homo sapiens
taggaggtggacagaaaacaaggtagccaggaattcatcaaatgactgcatgtggccaggcgtggtggctcatgcctttaatcccagcactttgggaagctgaggcaggtggatcacttgag

SEQ ID NO: 184253 - DNA, 122 bp, Homo sapiens
tgtggtgcagggacacacctcagcattgataagccccagttccaggatgcacctcagcaccgatgaacccccctctccacgacgcacctcagcaccgatgaacccccctctccacgacgcac

SEQ ID NO: 184254 - DNA, 122 bp, Homo sapiens
atctatatataaggagcactccctcttggtgtaattactgcaatttattccttcactacccggctgccaggaccttcaagaggcgccacaaaacggaggcagggaaacccgtagcaacgagg

SEQ ID NO: 184255 - DNA, 122 bp, Homo sapiens
agcgtctcacccatatccgaagctgtggaggtgggtatctcagcaatccttaaaaatactcgacttgcatctgtacaggctatatccccaggccacctgccccacccccacacttgtagaaa

SEQ ID NO: 184256 - DNA, 122 bp, Homo sapiens
cacataacagtgaacggggaggtagtcgtgcagtagactctggagcaagggcctttctgccgtgtctaacattagctgcgtgaccacactgcactgttcacctcttggcgttgtgcgacagc

SEQ ID NO: 184257 - DNA, 122 bp, Homo sapiens
accacccacccatccagcctgttgtgagttgggtgagggctgcccccagtctccgtcctgcggctctgggtgccatcctgttcctttgagctcagtcagcctcctgggctcgtctctctgtg

SEQ ID NO: 184258 - DNA, 122 bp, Homo sapiens
ggcgccctggacagccggcctctgctgtgtccctgcacccctgattagggcagcttcggacggcttataattggttccagttaatctctgccgccctgagaactgccgttcaaacttgagca

SEQ ID NO: 184259 - DNA, 122 bp, Homo sapiens
taggaaggcggtagacagcctataggcgctgtctgcgggcgggggggcggagaccgcgctcgcgaagagcccgcggattggcaaggccgagggaggctgcgcgccggccccgccccggcccg

SEQ ID NO: 184260 - DNA, 122 bp, Homo sapiens
cgcagcgctcccgtactgaggcttcgtttgcaaaagttacatccgtcccggcgcgggcggcggttccccaccaaaagcaacccagatcttccccgcacgcctctgacctgactgcacgactg

SEQ ID NO: 184261 - DNA, 122 bp, Homo sapiens
tcggttcttatactgtatgtgtactcaaatgtggccgtccttgggatttacagcaattaacgaattacgggagtgcgcacgaggcagcaagctctcggcagccgggctccggctcgggctcg

SEQ ID NO: 184262 - DNA, 122 bp, Homo sapiens
gccgggcctcgggagaaagccggaagcccgagagggtgtgggcgctccgggagccaaacgcggccgctcagccgccacgcgccggtggccccgcggggactcgcgttccggtgagagagccc

SEQ ID NO: 184263 - DNA, 122 bp, Homo sapiens
tcctcactgcacagcgcctcctcactgcacagcgcctcctcactgcccagcgcctccccacggcacagcgcctcctcactgcccagcgcctccgcactgcacagcgcctcctcactgcacag

SEQ ID NO: 184264 - DNA, 122 bp, Homo sapiens
aaccacaaagtgcaggctttcatatatgttgttgatggcagagtcactgccttagagcctcgagtttattcaatgggataaaagttgcctggtaaattgggctgagaggattttttcccaga

SEQ ID NO: 184265 - DNA, 122 bp, Homo sapiens
ctgatggctgggaccccatctctgatggagcaaggcttctgatacccaactgaggcttggcgccaaggactgacatcaaggaagtggattcctgcaaacctggcacccgagggtccacttcc

SEQ ID NO: 184266 - DNA, 122 bp, Homo sapiens
tcattcgcacgctcattccactcctccccacctccacccaagcgtccagcccgcgcgcgccgctcccccgcaggctgatcagacttgcctgcccagtccgcccccgcccaaaccccgccccc

SEQ ID NO: 184267 - DNA, 122 bp, Homo sapiens
ggcggggcgggtaagatggcggccccgcggcgaggtgagctcgggcggggtgggggcttccgggcttgcagcggcgggcgcggcgtttccctgtggtgacaatccggtttccgctttcggtg

SEQ ID NO: 184268 - DNA, 122 bp, Homo sapiens
tcccaggataggatctctgtttctggggaacccccgggttcttgaggcccaaagaactgacgtacagggaggcagaagtcatgtgatgccaagcagtggtcagagaggctctgtcttgggtc

SEQ ID NO: 184269 - DNA, 122 bp, Homo sapiens
acgtaaatcagatcatgtcactcccctccctaagctcatgcaatcactgccttttcagtgcgaataaaatcccaccccaccccccactccaccccaccaccatggcctagaaagccccactc

SEQ ID NO: 184270 - DNA, 122 bp, Homo sapiens
aaacttgttctcccaggatccagactggaaatggggtttatagggccctgactgccagggcgcagaggggagggaggagctgggaaggggaacctgctagcactgctcttcttcttgagaaa

SEQ ID NO: 184271 - DNA, 122 bp, Homo sapiens
cagagtgtgcaacagccaaatagaacgcacgtcaagttttgcaaactgtccagcacagcccgcgctgtttctgtggttaagcgccattaataccacacaggtgaagaaaaaagggccggaat

SEQ ID NO: 184272 - DNA, 122 bp, Homo sapiens
gggcccttccttactgacccggtcgcggaatagatgtgaggttgacgtttggtgaaagcccgcctcgagacactgagagcagattgattgaatgattgattttgagacagagtctcgctctg

SEQ ID NO: 184273 - DNA, 122 bp, Homo sapiens
aacctaaaaccaagtcagagtaaacactgctaatacaatacaggtacttacatatttacccggcataatctccaggattccacccacaacctaacagatcctaactctctggcagagtgaga

SEQ ID NO: 184274 - DNA, 122 bp, Homo sapiens
gtgagaccccatctccaaaaaaaaaaaaaaaaaaaaaaaaagggaaatcaaggtgtcagccgggcaaagaaaaaaacagaaaacaagagcccctgaaagtgcccaatgggaggcaggttggg

SEQ ID NO: 184275 - DNA, 122 bp, Homo sapiens
gaagagctcccgggcgcagcactgtgcgacaggcaacagaaatgtcccgtttggtgttcacgatggtggccgcggccacaggaggatccagaacacttgagctgtggctcctgctacttagg

SEQ ID NO: 184276 - DNA, 122 bp, Homo sapiens
tgagagtaagcagagacgctgcacttaggggcaggtggctgagctcagccacaggacccccggggttcgttcactccaagtggaattcgttaccacttcagtgcagtcccaagcaacatgcc

SEQ ID NO: 184277 - DNA, 122 bp, Homo sapiens
ggttgaagtaagaggtaaactagctattcgtccaaactccaaagctcaggttcactgggccgtaagcctgtacccaccatccccgggcctgccaggggcggctttgcaggattcttccagcc

SEQ ID NO: 184278 - DNA, 122 bp, Homo sapiens
gagaggaagcagaagcgaaggttacgcgaggaaagcccctcgttaaacttgggattttcacggggactcagtccagaggaagttgagaaaaccaacttaaattacggtctcgatcgccatct

SEQ ID NO: 184279 - DNA, 122 bp, Homo sapiens
atttaacagtcatggctcttaccttgaagagattgtgatacaatgaaagttttggccgggcgcggtggctcacgcctgtaatcccagcgctctgggaggccgaggcaggtggatcacctgag

SEQ ID NO: 184280 - DNA, 122 bp, Homo sapiens
aatagagatgtctgaaaatttttcagctgaatccccatcatgtatgtcatgtattctgttcgctccgcagaagcctcgttattgatggcgccgtctcctaatgcgccgcgcagctgtgggcc

SEQ ID NO: 184281 - DNA, 122 bp, Homo sapiens
gagactgtaggccatggaaatagctatagacaatggttgtcagctctcctccgtctcctccggcctccctggagattgggtctcctgatcagagaagcttgactggctacactcgccctttc

SEQ ID NO: 184282 - DNA, 122 bp, Homo sapiens
ctccccctcccgctacacaaggcccagggccaggtccctatttccttcacggctcaggggcggggagactggggctggtcctggctgggagggcctgccccgcccctggcctagctgggcaa

SEQ ID NO: 184283 - DNA, 122 bp, Homo sapiens
ttcaaaggttgagttgctgaagcggcttcattgtctggggacatacccaaggttcgtcatcgcgtgacgagaagattaaggacacagacgcaaacacggagcgggtcaagtagcggaaagtt

SEQ ID NO: 184284 - DNA, 122 bp, Homo sapiens
tctgtcgccccatttgtggcaggtcagccacacccgtgagccccggagctccgtgaaggccgtcacggctccttatgacggcgcccaaacagtgcaggcagccggaagctgttccctgatga

SEQ ID NO: 184285 - DNA, 122 bp, Homo sapiens
aaacaggcagaggagaccaaagtcagagggaatcttccattctgcagtcagtcctgaccccgtaagatttgagagctgaaagggatctggggggcaactagtgggtccactcaacgtacaga

SEQ ID NO: 184286 - DNA, 122 bp, Homo sapiens
gaacagcactcctgggcggctcctgtgggcttcaggactggccggctccagccgcaagggcgatgctgtggacgtttgtgtggatggtgcagtgttcttggaatctgtagaccagatcggtg

SEQ ID NO: 184287 - DNA, 122 bp, Homo sapiens
tataaagtgcagaagcttaaacaatccagtccccaggattagcagcccatgtccagccttcgtcttgaatccttcatcttgctcagtttcccattaacatgagacaaggtattcaaaagttt

SEQ ID NO: 184288 - DNA, 122 bp, Homo sapiens
cggctgggcagtccgtgctcctccagctgccccagtgagggcccatcctgcctgcaccgccgtgggctgactggggcacagctccgatgattcttaacaccgccttccttccgcccccaccc

SEQ ID NO: 184289 - DNA, 122 bp, Homo sapiens
tctcactctcttcctttcattctagtattctttattatttttctctctctctcgttcgctcgctctctcgtactctctctcttttccctcctttcctttttctttcctttcccctttttctt

SEQ ID NO: 184290 - DNA, 122 bp, Homo sapiens
cttctgcaaaaagatgtgctttaaagagaatagaatggacgctcggtatgttcatctaaacgaccttgggcaagtacgtcgattccaaggtacaatcagccctcccagacggcttttcgagt

SEQ ID NO: 184291 - DNA, 122 bp, Homo sapiens
gcgggccggcgcgatgcggctgggcccgaggaccgcggcgttggggctgctgctgctgtgcgccgccgcggccggcgccggcaaggccgaggagctgcactacccgctgggcgagcgccgca

SEQ ID NO: 184292 - DNA, 122 bp, Homo sapiens
gttttaatagatccctgtttggtgttactcaacagagaagaccactcggccctcagccaccgaataagtttaagaaacagaggtgtggcatgcttcattctacaggtagggaggctgaggct

SEQ ID NO: 184293 - DNA, 122 bp, Homo sapiens
ttggctcctcctggatcccgcgggactcggcgtcgtttccgggtttgcccgccccaggcacgtgcacagtgagtttgtgtaaatccagttagaccaaaatgagcgaggtggagagcctctta

SEQ ID NO: 184294 - DNA, 122 bp, Homo sapiens
gggtgaaaataatagattagaatctggtaatatttaatgcgcacgcttgaccaatccctgcgctggtccaggcaggggtgagtcagtggagtttttctttgatcatcttctagattagtgtg

SEQ ID NO: 184295 - DNA, 122 bp, Homo sapiens
gtgaaagagactcatgccattcacctcatagttgtagttgactcagtttaaaccaactaacgtgtctgtcagaatgcagtttatttgtaggctaaattaccagatatgtagcactcagatca

SEQ ID NO: 184296 - DNA, 122 bp, Homo sapiens
ataaaagagcagctgattttggtggtagtcatttcgtgagatttccctctctggtagatacgcaaacttcatgttttacagaaacttaatttcacttgctggaaatctcccctcccccaaga

SEQ ID NO: 184297 - DNA, 122 bp, Homo sapiens
acaacatggaaaacactcgctagaacaccccggcccagtgggtcctcggtgccggggcggcgttcccaacacgcagagccgcagtacctccagcagccgcacgtccagccttcgcaggatct

SEQ ID NO: 184298 - DNA, 122 bp, Homo sapiens
tggttagccatcccaaatcctgggaaagtccagctctgacttcctgccctccaagagatccgaatggaattccctaggttcaggggctttagtggcagccactttggcccttagccatcctt

SEQ ID NO: 184299 - DNA, 122 bp, Homo sapiens
ggtggcagcgggtcctgggtctggcggaccctgacgcgaaggagggtctaggaagctctccggggagccggttctcccgccggtggcttcttctgtcctccagcgttgccaactggacctaa

SEQ ID NO: 184300 - DNA, 122 bp, Homo sapiens
gtggggccgcgtctggtgcggggcccgggacccagcagggcagcccgggatggagccaggcgggagccgacggagccgcttacaccccgccgccggtgtcgccgcgcttctccttcccgggg

SEQ ID NO: 184301 - DNA, 122 bp, Homo sapiens
cagcgtgggcgataagagtgaaactccgtctcaaaaaaaagaaagaaagaaatgagaaagcgtaccacatatacttttgggggaaaagcactccagagactgcagcagcatgtgcaaaggtc

SEQ ID NO: 184302 - DNA, 122 bp, Homo sapiens
caccaccgtccgctcctgggaagaacctgttgactcagctgccgttttacctggatcatccgtcatctttctctcgagatagagttctccaggctttctggacccggacacacatggcaaca

SEQ ID NO: 184303 - DNA, 122 bp, Homo sapiens
gactgaaatgtcaaaattaagcataactggcggaaacccagaggtcttaacagtagggttcgtagaaggtccaagggccagatcttgatgcccaacattgcttatgggagcaacaacaacaa

SEQ ID NO: 184304 - DNA, 122 bp, Homo sapiens
tcattgttttggggttgttgttagagttccaactattttctattgcttatgctggagcaacgtgacattttgttatcaacagagcaagcccagtttgggcctttccctcagttacaacatca

SEQ ID NO: 184305 - DNA, 122 bp, Homo sapiens
ttgttcttggccatgcaaaggaaggcacagaggctgtgtccccacctgaaccaggaagggcgttgtggttagactcacagacctggcctggacctgtcagccgtgatgaggcttaataagga

SEQ ID NO: 184306 - DNA, 122 bp, Homo sapiens
gcagcagcctctttagcagggttcctgtgtctctcgcggaaggccccaaccagggaaaatcgggccgcagggtggggtgggctggccgcagagactcaaggggacgttgaggcaggcagatg

SEQ ID NO: 184307 - DNA, 122 bp, Homo sapiens
cattaacaattcatggaactcatctctagttctacccaaggcatttggaaggacacctggcgtgtagcaaaagcttgttcaaagtgtctcctaatctgctttgaaatgcacagtggattggg

SEQ ID NO: 184308 - DNA, 122 bp, Homo sapiens
tgttttgttcaccgctgtaccctccgcgtgtagacacagtgtagttaataagcattccgtcgactctgaataaatgaatgctaggttgcagacaaggtatggccccagaggagagaaatgag

SEQ ID NO: 184309 - DNA, 122 bp, Homo sapiens
tgctgagccagtacagccacaaacagtactattttgcagatgctcatgtaagcagcttttcgagagaaataattctttaagcagaataaagttaggctggcattgctcccttaagatcttgc

SEQ ID NO: 184310 - DNA, 122 bp, Homo sapiens
gaggtcagaaaggtccgttctgaatggaacccattaatctccctgttgtgagcgaggaaacgttggaaagcgcaggtgttaacagtctcggtgttatttttgggagaatgtgaactgaacac

SEQ ID NO: 184311 - DNA, 122 bp, Homo sapiens
cccaaccacctacttcctcagacactactgctgttaaccgctgctctgcccctcactcctcggtactgcacttcctaggtgtctatatatccaaaccaggaggggaagggaataaacaaaca

SEQ ID NO: 184312 - DNA, 122 bp, Homo sapiens
tgggcacctgtgtgcctgccccgcttcaaccctgatggttttttctacgcctacgtggcccgcctggatgctatgcctgtctgcctgctgctgcttggcacccaacgtgaagccttccatgc

SEQ ID NO: 184313 - DNA, 122 bp, Homo sapiens
cttgattacttgatgctctaatgacctgggctctaaccaggctcaattgctttctagctgcgtgaccttgggctacttacttaacgttcttagtcctctgttttgtcatctgtaaagtgggg

SEQ ID NO: 184314 - DNA, 122 bp, Homo sapiens
ggctccagcgttttcaaggagcggggtcaaggtcaaagggcccctcccaggctgcccgggcggggctgtagtgggatgctggtccccaggctgcgcctcggttctccagggcgaaacgcagg

SEQ ID NO: 184315 - DNA, 122 bp, Homo sapiens
agccccatttaatcctgcttagcccccataactttgttcaccagtgagcccctagaacctcgtccactgacctctcggtcccccatcactcaacccccaactcccacttcactcatcccaca

SEQ ID NO: 184316 - DNA, 122 bp, Homo sapiens
ttcgaggctctccgcttcagagctccaaaggaaaacttctgcgacttcaagaacgtcctgcgcattcacatggggtcgcttcctggctggttgaggagagtgaaagttctagtgcctaagcc

SEQ ID NO: 184317 - DNA, 122 bp, Homo sapiens
cctgccctgttcctccagggtttggtggcagggggagccaagggtgccccacattggtgacgagttagtacttcacatggatctcataacatgtgtccgtggagggcaagcaaatgtgagcc

SEQ ID NO: 184318 - DNA, 122 bp, Homo sapiens
ttgggctgcccactgagaaacactgatgtagaccaaccttcatctcatagacaagaaatccgagcctctgaaggttaggagatttgtttggggttgcacagttagtgtcaaactgggatgaa

SEQ ID NO: 184319 - DNA, 122 bp, Homo sapiens
ctgaccccacattttataagaacacactcacacttttttcctctttgttatttttcattacgtgcataggcttgagccaagcttttctgggcttcaagagtgtttcttgttttgcttttctt

SEQ ID NO: 184320 - DNA, 122 bp, Homo sapiens
ggtggtgcatgcctgtggccccagctacttgggaggctgaggtgggaggatcatgtgggccgaggaggtcgacgctgcagtgaacataatttaaaaggaagaagtaaaattgtgtatatcta

SEQ ID NO: 184321 - DNA, 122 bp, Homo sapiens
ctgggccccgagtgtcgggtcaatcctgggggcgtcctggggcagaggctgcggcggctgcgtccggggctggggctcgcgcgccggggtcttcagggaggaagttgtggtcgtggggatgt

SEQ ID NO: 184322 - DNA, 122 bp, Homo sapiens
cgttgccgtgatagttcacacacgcaggggtgtggatctcgttcgttttcatgtagaaaacgagagcgaaactgcagagaaaagaaacgtcgggtgcatcacggcctgaccacggattcctg

SEQ ID NO: 184323 - DNA, 122 bp, Homo sapiens
attgaaaaatgcgactaacttgttcatcctgtgccaaagacatcacccccttctcagatgcgtggggcacgtcacgcacgatctgccccccctcccgctgccctctcagtgtcccgtcctct

SEQ ID NO: 184324 - DNA, 122 bp, Homo sapiens
gggaggttttctaatcccattttacagatgagcaaactgtaccagccagggtctccaaagcgcggccaccccacactgcttcctccttggcggggggtggggggtctcttagagggggtaag

SEQ ID NO: 184325 - DNA, 122 bp, Homo sapiens
ggacaacttcagtgatcttagacaagtttatgggtttctgagcggctcttttaatacttgcgaggagatagcggtgaaaatcgcctaaagctctccttctacttgaggaatttgggtcccag

SEQ ID NO: 184326 - DNA, 122 bp, Homo sapiens
tgccttactcccctcaggggtgtgcccgtcaatgtagttactgaggtcgtcgtgaagttccgtcagcccgttggccgagatgttgtaggtgggcgtcagcggctcagcctctccaggctgct

SEQ ID NO: 184327 - DNA, 122 bp, Homo sapiens
ttggcccgagtctcattaaggagccgcgcgcgccgccaggctaggaatgcggaatggacacgtggacagaggagggggagctaggagtcggggagtctccgtggcgcgcgagctgtgggccg

SEQ ID NO: 184328 - DNA, 122 bp, Homo sapiens
acaagtgccctgcccgataagaccctggacgagggggtcctgtacaaagtgccggcagaacggcgagattcgacctgccggggagctggggaaggttcccaggaccagaagcggaggggggc

SEQ ID NO: 184329 - DNA, 122 bp, Homo sapiens
tcgcatttggagaaaagaaggcagccctttaacagcccagttaaaagctctttcccaaatcgcggacactcgagatgctcctcgggccatctaaaagactgcggagcagccaggagggcgag

SEQ ID NO: 184330 - DNA, 122 bp, Homo sapiens
cggcaggacttgcgaggagccagcggagtcctgggagctgggagctgagtggagcgagcgcggctctgctcctgggcgcgggccggctccgggtgtccgcgcacttaactccgggggcgggg

SEQ ID NO: 184331 - DNA, 122 bp, Homo sapiens
cgccgggtccattgcgtcgggagctgcgcttagctgcggggtcgcgggtgttatgagcggcggcgctggatcccgggtgcctggaggctggagctctgggaggagctcgtagccccgcctct

SEQ ID NO: 184332 - DNA, 122 bp, Homo sapiens
tcaccacagtcacatacttcataacccatgcctcatcggtgctgggacgggagagggaagcgccgatctaaatgacatggggtccaaatcccaaataatctctatttgctctgcgttacctt

SEQ ID NO: 184333 - DNA, 122 bp, Homo sapiens
ggcctacctcccctcccgccgccgcgctccgcccggcccagccgagggcccgccccttcgcgccccagccagctccaccgtacgggttgtgcccgcccctcccagaccccgatcacccgcag

SEQ ID NO: 184334 - DNA, 122 bp, Homo sapiens
gcgccctctgacccctcacgccagaaagcgcgggaacgaatccacgccgggggtcgggaacggagagccgccaggcccaaacctcccagaatttgcgcagtattctcggcctagagagcgag

SEQ ID NO: 184335 - DNA, 122 bp, Homo sapiens
gagacctccagcacagggatgcccccagcacagggacccccagcacaggttctcctccagcgcttgtcaaaggtgggccctggggctccgaggaccctgctcgcacatcgccgctgaccccg

SEQ ID NO: 184336 - DNA, 122 bp, Homo sapiens
caagcacttccgcattggatggcaggtcaaaggtcacattcttagagccactcttagagtcgtagttcatcgagaaggcagcgaagctggccattacgcaggctgtcccgttgccctttttc

SEQ ID NO: 184337 - DNA, 122 bp, Homo sapiens
tgcagcagggggcacacccacagctggagctgacccagatggacagcttgggctctgccacgcgggactaggcaaggaaggggcacgaacaagcaggaagtggtgaggcggtctccagctag

SEQ ID NO: 184338 - DNA, 122 bp, Homo sapiens
gtcccaggggaagcccagcaacttctatgcagggtcccagcctcatccctttggagacttcgtctctgactctttcttcccacctcccctgttctctcacccctcagcccctgatgctccct

SEQ ID NO: 184339 - DNA, 122 bp, Homo sapiens
tgtttttcagaggattaccccaatggcacctggctgggcgacgagaacaaccccgagatgcgggtgcactgcgccatcatcccctccgacatgctgcacatcagcaccaactgccgcacggc

SEQ ID NO: 184340 - DNA, 122 bp, Homo sapiens
caggcagagaccaccccagataaccagttctcagccttgcgtgggacaccacgagtcccacgtgtttacgtgtttaaggcactggcaagcaggggaatttggtttctgggaatgtgctgtct

SEQ ID NO: 184341 - DNA, 122 bp, Homo sapiens
tcacgcagggaaggatacttaaagccagcattttggattggtagtcaaaggctaccacctcgccctgcagccgctgctcctggcacgtccggcacgacacctggctcccaacgctgaagtac

SEQ ID NO: 184342 - DNA, 122 bp, Homo sapiens
cttgctcaggcagtacccaaaggggccgcctgggagcagcagagaccaggcccaaagctgcgggcttacaacaggttagccatcccagtcggaaaggtctagggatgaggcaggggcggaga

SEQ ID NO: 184343 - DNA, 122 bp, Homo sapiens
cacactgatgtgtgcctccacggtgcacccgcctgcatcacgcactgatatgcgcctccacggtgcacccacctgcatcacactctgatgtgtgcctccacggtacacccgcctgcatcaca

SEQ ID NO: 184344 - DNA, 122 bp, Homo sapiens
gcggccgaggctaagcggctggcagagcagcgggagcaggagcggcgggagcaggagcggcgcgagcaggagcggcgcgagcaggagcggcgggagcaggagcggcgcgagcaggagcgaca

SEQ ID NO: 184345 - DNA, 122 bp, Homo sapiens
tgagccctggagagaggatataggcgtcgctaaagctccaggctgcccagagcctagagtcgggacgcctgcaggggcacgggagcggagaggaggattctgagggccagtcggagggggac

SEQ ID NO: 184346 - DNA, 122 bp, Homo sapiens
gtgttctgcgtcttaaatgtcccccgctgaaggctgtgcatcatcatcaggagataaaaacgccatcactcactgtgcaaaggaaggggtcaaggatagagcgattgcctcacactgctgct

SEQ ID NO: 184347 - DNA, 122 bp, Homo sapiens
cacgcagtatttaccttgtggtacagtcctttgttttggaaacaaagatatcattattaacgtgttccttaccacagttgagggattgagtcttattattgcattatcactgacaaaatttg

SEQ ID NO: 184348 - DNA, 122 bp, Homo sapiens
ggaacggttccggcagggttgggtttccagagctgtccaggggcgcctggtgctgaatcccgcttggaaagaggcttggaggtggatgggaagggatttccaacggaggcggctcctctctc

SEQ ID NO: 184349 - DNA, 122 bp, Homo sapiens
tcagcatctcatgggaaagggacagggctctcttcaggacacgcagtaagatttcaagtgcgggcacttttaatactccgcgatccaaaggcagctccagggccagccgcggtttccggcct

SEQ ID NO: 184350 - DNA, 122 bp, Homo sapiens
gcgggagcaggccgcccgccagacccggccttgggcagggcccagggctcacgccccgcgcgctcaccttctgctcctccgcggaggctgcctcggggacttccgcagacatagtgctccct

SEQ ID NO: 184351 - DNA, 122 bp, Homo sapiens
aagtgacgcagaaatgggcaggaagcgtggaccgcgaactcggggaccaaaaggtcgtgccggagtcactgccagggagagccccgcaccttccagagctctgccggctgaaagcctggtat

SEQ ID NO: 184352 - DNA, 122 bp, Homo sapiens
ccttcccagtccgttctcacgccacagccttcccggcgttgccatgcgtagtgggaaggccgtggacaaactaagaacagtaacaagttgtcatgactcagagactcctggaagtctgcagc

SEQ ID NO: 184353 - DNA, 122 bp, Homo sapiens
atattgactaagggcaagtggtacttcctgaatgcgaattattcttggtctcactgtctgcgggactagggcccttggaaacgattaactgaacaatgtcagctctcacagtagaatcagaa

SEQ ID NO: 184354 - DNA, 122 bp, Homo sapiens
tgacatcctggcgtccggccttcctggtgacaggggaaggcggtgcagtaagtcgccttgcgggccggggtcgggggtgtttttaaaacaagattagtccttctcaactgctcagatcccag

SEQ ID NO: 184355 - DNA, 122 bp, Homo sapiens
aaattgcaggtaattttattaaccacgtgcacgcattttatctgtgtgggtctgccagcacgctggggcctcggggcccgggggacgccaggttgcagggcggtaacgcgcgcgtgtggcca

SEQ ID NO: 184356 - DNA, 122 bp, Homo sapiens
tccatttgccctttgatatgtgggccttggctgggccttcagctagctcatgtgtcagggcgtcctgacatatcactgtggcatcccaggaactctgcctgacccatctgggagtgtcctga

SEQ ID NO: 184357 - DNA, 122 bp, Homo sapiens
gatttgaggctccctccctccttagccagggtcacttgtgccatgcctcctcctccagcccgtgcccctcaggggaaccccaggctgtcctggtgtgatccctgcatccaagagcagcagga

SEQ ID NO: 184358 - DNA, 122 bp, Homo sapiens
accgtgtcttaatgacttctagtggacaagtgaaaatagcaccaactgtgcctccacacccgccggcgaagaggtgaagcagcgtgttctccttctgctggccgcccgtcgccatggccgcg

SEQ ID NO: 184359 - DNA, 122 bp, Homo sapiens
gcggagcgagctagcctgcgaatttcagcatgagtgtactgctgaggtcaggtttggggccgttgtgtgccgtggcgcgcgcaggtaagcgtcagtcccctcgaagcccggttgccgtggaa

SEQ ID NO: 184360 - DNA, 122 bp, Homo sapiens
atttgtcaatattgagaatctaatattttcataggaagctttatgtaggctattctacctcgatttgtgagtcacatgtgtgtgtgctttagatgtaaatgtgactgcacacacacacacaa

SEQ ID NO: 184361 - DNA, 122 bp, Homo sapiens
gaggggggaacagacggggggggattcaggggcttgcgacgcccctcccacaggcctctgcgcgagggtcaccgcggggccgctcggggtcaggctgcccctgagcgtgacggtagggggcg

SEQ ID NO: 184362 - DNA, 122 bp, Homo sapiens
agcagcgtgttgttggaagctagcggctccttgaaggctgagtcgctgggttctcctccccgccggcggcggccacgagaaccgggatgggactgggggaacccccgcagccgaactttctt

SEQ ID NO: 184363 - DNA, 122 bp, Homo sapiens
tcacctaggtattaagcccagcatgcactaggatttttttcctaatgctctccctttccccgaaccatccccctgtcaggtccccatgtgtgttgttcccctccctacgtccatgtgttctc

SEQ ID NO: 184364 - DNA, 122 bp, Homo sapiens
agatggggcaggggttggtggtgtaacggcacagtcaccaatttgagacagattggagagcgagtagggagatcaccttgagatcgaggcagggcagaagctgtgaccaggcagtccccagg

SEQ ID NO: 184365 - DNA, 122 bp, Homo sapiens
agcctgagcgtctgcaaggaggagtttatttcgggcagagggagggtgtgggggtggccccgactggtcctgactcccacccatgccatctgggaggctggtggccaagctacgtgcactct

SEQ ID NO: 184366 - DNA, 122 bp, Homo sapiens
agcaggggtatttaatgtggaagagtgagaactaaaagtagccttgaataccatttctgacgtttgaagaggcagcaaagcttaatgtgtggtggttaaaggcatgactcagaagccagatt

SEQ ID NO: 184367 - DNA, 122 bp, Homo sapiens
cgtccctgatagacccccacacctttactcaggatgaaatgaggcccaaggagtggaagtcgttggtccaagatgtttgctccagggttatccctttaaaatctctagacaggcaggcaggc

SEQ ID NO: 184368 - DNA, 122 bp, Homo sapiens
tgctttacagaaaaaaaactaacattctgtccccaggcactgagtccccggccccacccccgtaggcagcacaagcgctgtgcaccctccgtgcctggagcatcctcgccctgcacacttgg

SEQ ID NO: 184369 - DNA, 122 bp, Homo sapiens
caggaaaccctttctgacctggtttgcccctcagtccctcgggctcatacctagtgcctgcggcaggacagccatggccgccaactccaccagcgacctccacactcccgggacgcagctga

SEQ ID NO: 184370 - DNA, 122 bp, Homo sapiens
gcctcagggcaactgaaaaaaagagtacagccagacgccactcctctgcgcggtctcccacgtaccccagaggctgaggattggagaattagacaagggtcgttcccaggtgaccccacgct

SEQ ID NO: 184371 - DNA, 122 bp, Homo sapiens
cagtgtatagaaattgacacaaggccaatagtcttcccaaacatgctttactggaacttacgccctggcataagggccacaacaaaagagagagcgaattctctggcttgctgactccttgg

SEQ ID NO: 184372 - DNA, 122 bp, Homo sapiens
atgagaaattccagttgctccattcaaacgcttctccctgccgacccatgcggtgtgagccgctgcccgccctctgcccggtgtgctgactctcccggaccctgtttgcgccctcgcagact

SEQ ID NO: 184373 - DNA, 122 bp, Homo sapiens
gctgacacatcaacaaagatggcggcgacactgaagccggcccggttacagctgagggggcgggggctccctggaggaaccaatcagcgcagcgcgggcggggtgacgcagcacaccttgag

SEQ ID NO: 184374 - DNA, 122 bp, Homo sapiens
aaagaactgtgcgaaattcacccttgttttgccgaaagaggaagtacaactgaaggtgagcgaggagaaacagtagtctgtaaagggttgtggttataaataacattcttcacatccagtgg

SEQ ID NO: 184375 - DNA, 122 bp, Homo sapiens
caggcccttccgacccccacctgcaccccctccctccctaggctggtcccgctccgcacccggaacgtgtccgccacgatctcagctcctcggtgattggtccatttggagaggcctacgaa

SEQ ID NO: 184376 - DNA, 122 bp, Homo sapiens
cagcggccggggctctgtggctgcaaggggccgggctctgctgcggacagctggggggtccgaggtgccctccccgactcaccagccgccgcagcgctccacgtcttcggaggcgggtccga

SEQ ID NO: 184377 - DNA, 122 bp, Homo sapiens
accccatgcaaaagccatagtacctcagagcaagtctatctggctgtctatcctcctctccggtcttggatattttgagagagagaggaagatggtgtcctgggtggtaagtggaaagaatg

SEQ ID NO: 184378 - DNA, 122 bp, Homo sapiens
cgaattccccacctcaggtgatccacccgcctcttcctcccaaagtgctgggattacaggcgtgagaccacgactggccaagtctgagcagaatttttaagtcttaaaaaataagtggcctg

SEQ ID NO: 184379 - DNA, 122 bp, Homo sapiens
aggcctaagcctcgctctggggactgtctagagtggtaggtgccggtctgggtgcacacacgtgtcccttgtgtttgctgctgggaggacgccgctctcacaaattttgagaaattggctgg

SEQ ID NO: 184380 - DNA, 122 bp, Homo sapiens
tgtgtccattggccttcaacatgaggtctccaaggccgatttgcaaagtagcagataggccgcctatgaagaccaaacatgaggccaccctgggaggccaggtgacaaagcagacacggggc

SEQ ID NO: 184381 - DNA, 122 bp, Homo sapiens
gtgactgaagtgtgagctggaccagcctctctcttgcttaaatccctcataggtttcccccgtcggagcacagaccaaagccgtgctcatctcccttatgcttcaggctcctcccagatgcc

SEQ ID NO: 184382 - DNA, 122 bp, Homo sapiens
gagctgccggcgctttgtgcaatgtgctgagctctgtcctgcgcagaggtcccagacagccggctcactactgcctggcctgggaagctcaggcctctggatctctttcctcctgtctctca

SEQ ID NO: 184383 - DNA, 122 bp, Homo sapiens
accctcaactgagatggccccccacaacagcactgttggacctaacacaccctgggttcccggcttctcagccactggagctgccagtctcaaattaccggaggggagggagggcaggcctg

SEQ ID NO: 184384 - DNA, 122 bp, Homo sapiens
cccaccctcgctggaagacacggacccctgaagatcgagaaagaggccatccgggtgcaacgtagcaattacgtcagactagggcacttcccgtttacagaagactataaaacctttgccct

SEQ ID NO: 184385 - DNA, 122 bp, Homo sapiens
gaaagatgtcaggagggggagaagcagatgacatgggtaagaggagaattcttacttctacgtggctccaacggaaatttgcagccataaaacccaaaggaggtatttgctgaatcacaggc

SEQ ID NO: 184386 - DNA, 122 bp, Homo sapiens
cccaccctgcgcgtccccggtcccgtcccccaccctgcgcgccctctaacccccacgccgcgcgcctcccaccgcccccaccccgcgcgcccctggtccagccccacaccccgcgcgccccc

SEQ ID NO: 184387 - DNA, 122 bp, Homo sapiens
cacggcacccccacactgacaccacgccccacggcacccccacactgacaccacgccccacggcacccccacactgacaccacgccccacggcacccccgcactgacaccacgttccacggc

SEQ ID NO: 184388 - DNA, 122 bp, Homo sapiens
actctgaatgttttttaagtttattcaggaaccatctaaaagcatcctctgctccagagacgctgctctaatacaaataaccaccttgcagttttccataaggttgcagtgatgtgagatgg

SEQ ID NO: 184389 - DNA, 122 bp, Homo sapiens
ggttcctcaggaaggaacctgcagcatctgccagcacagcgccccctagctgtgctgtaacgcagataatggggatcaccccttagccaaacaccccttggcagcctccctaccctaaagac

SEQ ID NO: 184390 - DNA, 122 bp, Homo sapiens
cgatccgggccgggagcagttctgcgcatgctcctgcgtccccaaaggacggccatagagcggacgccacgagcggccagagaggttccgcagccccgggaggacccgccatagagcagagg

SEQ ID NO: 184391 - DNA, 122 bp, Homo sapiens
acatctgccgtgagcctcgcctgaatcaggaccaagtttaggttttcagaatcagacggacgtgactatgtgacctggggcaagtgactaaccctctctgagcctctgacatttatagctga

SEQ ID NO: 184392 - DNA, 122 bp, Homo sapiens
gccagtggtgggacactggagcaggaagtcggcctgtggccggccatgttcatgagggcgcgtcccttggcacccctgtagccgctatgtttcccacgcccgtggcaggcctgagagattat

SEQ ID NO: 184393 - DNA, 122 bp, Homo sapiens
tttctctctccctccataccggttctttcccgcaggaaaagtgatccggtgtttcccatccggaagcattgaagcgtttactatcttaaacaacaaaacaatgtcctttgacaggcgtctcc

SEQ ID NO: 184394 - DNA, 122 bp, Homo sapiens
catctctcctgctgcagacaacctgctgtagcactgctacttgctttttaaactacagtccgctttctcctttgtgcagggaggaaagaatggagcggtaagaggcagggaaacctgttttt

SEQ ID NO: 184395 - DNA, 122 bp, Homo sapiens
ccccccccccccccgctccacgccgtgtgtgggcgggggtcaggaggtgcggggcggaggcggagcgtgggccgcggagatccggcgttcgcaggaggcttggtgcgcggcggggctgcacg

SEQ ID NO: 184396 - DNA, 122 bp, Homo sapiens
tgggtcccggggtgcctgcctccaagccagtgttcacctcagtggcagaggcaacccattcgtggggatgcgggggccccctgctggcaactgtgcatgccgtcatgctggtggtggtgttg

SEQ ID NO: 184397 - DNA, 122 bp, Homo sapiens
tgcaccacgggcagctccctgagcgccacaatgctcgcttttacagagcggcactggctccgatcaggcacaagagggcgctccgtgcccgtgtattttaagaatcttggctgtcactccaa

SEQ ID NO: 184398 - DNA, 122 bp, Homo sapiens
gctgaggggcaggggtcaggggaggtttaagaaaccagccaggaagctccccaagcaggtcgccccaggggcctgggcaggaggaaggtgctatggggccaaccctaggtgccccaccccga

SEQ ID NO: 184399 - DNA, 122 bp, Homo sapiens
gcacggagactccgggggatcactgggacgcgaagggcgcagggcggaccccaggggaaccggatggcgtctccggttcgccagggcagctggggcagccggacccgagacagccggacccg

SEQ ID NO: 184400 - DNA, 122 bp, Homo sapiens
attcctcctgtaccttaaacctaaacagctgcgagagccccagagcaggaagcgcggctgcggctgagaagctggaggaggaccggggcggggaggagtagccccagcagcaacagcagcca

SEQ ID NO: 184401 - DNA, 122 bp, Homo sapiens
aagtgaagccctggtgcaaaggagatgctctagagaggtcaggcctgggatcctaggccacgtcttcctcaagcaaagagcagggtgcccatcaaaaaacatacaggttcctgggctctaga

SEQ ID NO: 184402 - DNA, 122 bp, Homo sapiens
gcatgacagatgccgcatccctcattatgaaaggctggggctcagggcagcagccatgatcgagaagccaaacactaaaggcgttttgccagaggtggctggtggaacacaatcctgggggt

SEQ ID NO: 184403 - DNA, 122 bp, Homo sapiens
ggacgccaaagtcaacaaggccgggagacgcccccatctggccccgcccccctcagggctcgctccgcccccaagcccaaacaacgcgaggccttgacaggccagaagacgatggcggtagg

SEQ ID NO: 184404 - DNA, 122 bp, Homo sapiens
ggaaatgaaactgttcttaaaccctaccggctaaaacgcctacactcaaaatgagttccgcggaactcagacgaggagatctgcgcagtctccgtgcgtacgtgcgttaagcccgcgctttt

SEQ ID NO: 184405 - DNA, 122 bp, Homo sapiens
cagagaagagtgttttcggttgggttttgggttggctttagaggagggaggaggcaaagtcgggcttacagagatttattttccagggtggagttcacagtgggagacaaacctgtttcaaa

SEQ ID NO: 184406 - DNA, 122 bp, Homo sapiens
tcccgcttaatgaagaaagggaacctgacggcaggcgctgggcagaacggagcctggcctcggcatttttctgaagacagatgggcacggggagccccaagaaagctctgcccagaaactcc

SEQ ID NO: 184407 - DNA, 122 bp, Homo sapiens
ccagcaccaaagttcacatcaaaatcccactgatgaccttggctgctttcatctctgaagcgccacttctcagaaacacagaggtaagttgggtttctaatgtttctgctgattataaatta

SEQ ID NO: 184408 - DNA, 122 bp, Homo sapiens
gccagggcgtggccggcgcgggggcccagcgacgctgggatctccgctctgcgtccctcccggctctctgacgtctcccccgcccgaatccccgcaccgccccccgcaagccctacaacctc

SEQ ID NO: 184409 - DNA, 122 bp, Homo sapiens
atttggaaagcgccataggcatcaggaaagcgacaggagagcaatgttaaaggaggcggccgatcatgagatcagatattgtcgatgacctcctaccaatcagaatttaacgtctttctcaa

SEQ ID NO: 184410 - DNA, 122 bp, Homo sapiens
ccttctccacagcagttgtccgtggtgcctacactccccgcttcacggtcacccttcacccggttccattgtgtgcctcctgcctccacccaccatggcgtctgccctggcttgggttgtat

SEQ ID NO: 184411 - DNA, 122 bp, Homo sapiens
agatcacacatctccatcatcatgttagggcccgtctctcgcaccttattttatccatttcgtaaggtcacatttgcctgaatgttcttggtgcttgtggatgtatgataatgtctgaatcc

SEQ ID NO: 184412 - DNA, 122 bp, Homo sapiens
ctggggaagggaggtgttgctaggaggtcgctgggccccggggttcgcaggcggagatggcgtccgagcctccccctggagggcccgcccggcctctgtccggccagtctgctgcgcattcc

SEQ ID NO: 184413 - DNA, 122 bp, Homo sapiens
agcttggggtgaacgaaaggagggcacctctaggatcagccccgggacactaggcggcggcgctggaggcggggacttcctggccctggtggggcgaagtgcactcattcctccaccgcgtc

SEQ ID NO: 184414 - DNA, 122 bp, Homo sapiens
tttaaggatttaacgaagcaccttagtacagtatctgccccatggtgggacaaaagaagccgcagctgctattaatgctgtattgttagccaaagggaagagaagggcagatgtggtgcaga

SEQ ID NO: 184415 - DNA, 122 bp, Homo sapiens
tgcgcgtctcctgtgcgcgcccctccgcgcgcggccccgatgctggacatgagcgaggcccgctcccagccgccctgcagcccgtccggcaccgccagctccatgtcgcacgtggaggactc

SEQ ID NO: 184416 - DNA, 122 bp, Homo sapiens
cgagacgtctcacctcccaccgtggacttgtagtgtttgctgaagctgtcctgggaatatcgctgcaccagcgacgtcttgcccactgcggcgtcccccaccaccagcactttgaacaggtg

SEQ ID NO: 184417 - DNA, 122 bp, Homo sapiens
acttctcaagagtttgatctgatcagacgcaaggctggagcatcttggcaggatgaaacacgatggtcagattcttccgtgacaacatacacaggcagttaccggaaaaaacaactggacaa

SEQ ID NO: 184418 - DNA, 122 bp, Homo sapiens
ggaggagttccagggcgatggggccgtggtccgggctgatgctttgacagctgaaaagagcgcggagccagcgcctggtcgggagggaggggagcgcggcgaggagagcgccagctagcgag

SEQ ID NO: 184419 - DNA, 122 bp, Homo sapiens
gccgaatgagggccaaggattacaactgtcctggaaaccggcggctgcgccatctgccgccgagcttggcactgtttgggtcacttattggcacgtccacctcgcctgtctccacgcatcct

SEQ ID NO: 184420 - DNA, 122 bp, Homo sapiens
ctacacctgaagcttaaggggaatgaaatcggtgagaaatgagggtcctacagcccgggccgaagtgacaggtccacccctagtgactccaacaggtgaggagcacccccgacccgcctccc

SEQ ID NO: 184421 - DNA, 122 bp, Homo sapiens
gccagaagagttggcgctggaggagcagcttcattccagcactggccgccgggactccagcgccactttgcaaacaagtctcccgccgaggctctgggctaagacagcccgccagtgcggag

SEQ ID NO: 184422 - DNA, 122 bp, Homo sapiens
cgggaaggggcgatgccaggccggtgcaggcctgctccagtgcggggaggccttaggttacgcccgggagaaaaccagccctgcgctcccgcttcccacagaccgcagtggccaagcagcct

SEQ ID NO: 184423 - DNA, 122 bp, Homo sapiens
tctcgggttccggcttcttccgggtcgcggccttccggcgaacgcggttaccgtggaaaccgcggccatggcggcaccgcggcaaatccccagccacatagtgcgcctcaagcccagctgct

SEQ ID NO: 184424 - DNA, 122 bp, Homo sapiens
acacagcctcccgagctcaaaaagcggctctgccctttcttcttaggttcaggctaaggccggctgtgccggaggggcacaacacctgagtggagatgagcagcccaggggcgccctgctgg

SEQ ID NO: 184425 - DNA, 122 bp, Homo sapiens
aagtgactcacttaccttgtctcagggttatatcctaatatgtagaaaaatgaatccactcgggctttaaactctctagcagcaaatatgtcagaaaaatgggagatgttacacttccctct

SEQ ID NO: 184426 - DNA, 122 bp, Homo sapiens
gacgggcgttgacgacagaaggctacttccggctgtggtgcgtatgacgtcagggcgagtcggaccgacccagccaccgagaagccgaggaggcaaggctcgcgagagttcagggaggccgc

SEQ ID NO: 184427 - DNA, 122 bp, Homo sapiens
aggacagatggattacagctaatgagcctgctcgcaccattagcactcgagagccttcctcggattaaagccgtgcgcagcccgccgggccagcttgtcactcgcgaggtgggcgccgaggc

SEQ ID NO: 184428 - DNA, 122 bp, Homo sapiens
ggagtgagaagacagtccgtccatgctgccttatggggttggcctcgagtagtgtggggacgacaggctttcacgttagtcacttagaggtcactgggaactgttccttggggccctgggcc

SEQ ID NO: 184429 - DNA, 122 bp, Homo sapiens
aagccaaagagttcaaggctcagcctagagaccaggtgatggtgccctggaagacacttccgccagcaccctatggggcgcagtggcgtctaatgctaatgtgggctacgtagctacgggat

SEQ ID NO: 184430 - DNA, 122 bp, Homo sapiens
tttgcgcctggtgcagtttaggctttattgtggcagctggaggtctctgcatcgcttatccgtttattagccggaccaagattgcacagctaaagtctggcagagactccacggtatgactg

SEQ ID NO: 184431 - DNA, 122 bp, Homo sapiens
tttaataaaataaaaaaaaaaagaaaacagaagttttcacaacccaggggcctggcacgccggtctgtgcctgcccgccccgccctggcccaccggccccactccctgggcacagagtcaca

SEQ ID NO: 184432 - DNA, 122 bp, Homo sapiens
cactgaatccagacgcagggaccccagataaactgcaagacgcccagtgaacatggatgtcggagcatctaggtgggaccctggcgaagtgtcacacacagcactgaatccagacgcagggg

SEQ ID NO: 184433 - DNA, 122 bp, Homo sapiens
tgagcccccgctctgcagcgagctcaagcacctgtgccggcggctgcgggaagcgtaccgcgagctcaaggaggacctcacgcccttcaaggatgaccgctactacaggtgggcgcggcgcg

SEQ ID NO: 184434 - DNA, 122 bp, Homo sapiens
aagggccgtgtcttccaccgcatcaacgactcggctgttatgctgttcttcagcggggtccgcacggccgacccgctctgggccctggtggacgtctacggcctcacgcggggcgtccagct

SEQ ID NO: 184435 - DNA, 122 bp, Homo sapiens
tgcagctcaggccatggagatgggctgcctgcttgtcataaattgtaggcaaactcccttcgttctgttgttggtcccagtgggcttgagctcctgggaaccaaggctttcagttccacaaa

SEQ ID NO: 184436 - DNA, 122 bp, Homo sapiens
gtccgagaagccttcctggggcggtgggtgggaagtgggggccggagctgcagcgggaggcgtcctgtctcctcaggtcggcaccatgcccctgcagccctgagcggggccctgctgggctg

SEQ ID NO: 184437 - DNA, 122 bp, Homo sapiens
gcaccagcttccccagcccctcctggccgatttccccattgggatgcccgctcctggccgcgggctgctgggttggcccagcctggggtcctcccgccaatccacagcagggctgcgtgggg

SEQ ID NO: 184438 - DNA, 122 bp, Homo sapiens
tcactgtttgaacatctgtgagactccaccccacaagattcagctcttcctgtgcaggaacgaggcctccttcattgctgagtacctctggagggaactgatgtcctgcccaagtcattggt

SEQ ID NO: 184439 - DNA, 122 bp, Homo sapiens
tcatccactccttccctcctggtaacagaactccagttttcctctcagaaactgcctccccgcatctcagacggtgtggtttagttaggactgatacccgccctgtccttcacctcaagttt

SEQ ID NO: 184440 - DNA, 122 bp, Homo sapiens
agaggagctcccccaacccagcgggggccaggtgcgagtagccaggatgagtggggaatccggttgggttccccagctggagctgagggatgagctcccgggcccgggcactgggctcttcc

SEQ ID NO: 184441 - DNA, 122 bp, Homo sapiens
ctctcctgcagccactcacccacttccacgaactcgttgttctctagggccacctcgagccggtcctcgttgtccagcaggcccaggcccttgcaccggcgcacaaggaagtgcgcgtcatc

SEQ ID NO: 184442 - DNA, 122 bp, Homo sapiens
tctgagaggaagataactgcatctctcgcaggatcaggtggcagcagaagagacggtggacgcactcaaaaccatcccgttcctcgactggggcgggctgtgttgtgcacacccggcccggc

SEQ ID NO: 184443 - DNA, 122 bp, Homo sapiens
atgagtgtggatgttgaggcctggagggtgacaggtcacacagccagagcctggcagcagcgcaggggcggaaccccgggtcccctgtgggcctgtgccctctcggccagccttgcaacgcg

SEQ ID NO: 184444 - DNA, 122 bp, Homo sapiens
aattttctctcttggctggccgacacctccctctcttcaccctaagatatcagaaccggccgtggtccgcccaagaattaaaggctgctggctggttccggaactgttcgaagacccctata

SEQ ID NO: 184445 - DNA, 122 bp, Homo sapiens
gcagtggacggcgatgccaaaagacttttcccgcctccaggccaacgtaagtgttgcgagcgtgtttaaggtagggctgcgccatgatgttcagtaggctaggtgtgttaaatgcatttttg

SEQ ID NO: 184446 - DNA, 122 bp, Homo sapiens
aggagggctgggccagcttctcctgtgagctgtcccacgaggatgaggaggtcgagtggtcgctcaacgggatgcccctgtacaacgacagcttccatgagatctcacacaagggccggcgc

SEQ ID NO: 184447 - DNA, 122 bp, Homo sapiens
gcggctaggacccccttctgctgtgcgctgcatcgtgggatggtggggggcgcgtggcgacgggtgtatgctcccagccacattacctggtgtggaagtggctcagcattcactggtcttgt

SEQ ID NO: 184448 - DNA, 122 bp, Homo sapiens
aagactatttttaagtattgaaggtactatttcctttcttgaattcatattgcagatgtacggtgtggatttattggtttatctctgcaaaccttaaagtagaagattgcaagggccaggtg

SEQ ID NO: 184449 - DNA, 122 bp, Homo sapiens
ggagcgctgcgtgaccaaatttagtacagagcagtttagccttttaaagacaaggggccacgcaatgagaaaaagatacaaaaatgcgtaggctggcagaagcagatcacagccacggagag

SEQ ID NO: 184450 - DNA, 122 bp, Homo sapiens
caggactgccttccaactcccaccagggcttgctgagtgggaaacgcagcgagacactgccggtgagctggccggctgcaggcgggccggctgctgctggttcaaatgagaggatactaacg

SEQ ID NO: 184451 - DNA, 122 bp, Homo sapiens
gtatgtaagtactacttattatatacaagatattgttctgaatgcttttacatacattatcgcaattaatcttcacaatgactttttgaaggaggtggtattagtaacatcattttacagat

SEQ ID NO: 184452 - DNA, 122 bp, Homo sapiens
agttgtggatcatggtaaaacccatatcagaaagtgcctgctcttactgtccctgcaccacggatgaaggcgctgagccccgtcggtcactggctggccggtcccctgacaggaggcgctga

SEQ ID NO: 184453 - DNA, 122 bp, Homo sapiens
atggtctctaagattccttccagctcttcacctcatgagacatataaatcaagtaacattcgttattgtgattagaaaagctgcatttacacacgttagccactagatggggacgtgcgatt

SEQ ID NO: 184454 - DNA, 122 bp, Homo sapiens
gcttctgtataaagctgttagtgaccataccattatttaagagcagaaaataagtgccagcgaagatgagaagactgaattgctcatgaattacatcattcattttaaatgggaatcaaaag

SEQ ID NO: 184455 - DNA, 122 bp, Homo sapiens
ctactcccacgagcaggctgccgccctcgctgttgaggaaggcgcacacgtagcgccgcacgtggtgcttgaaggccaggctgaggtactcgccgctaccccgcttgaactccatattgcgg

SEQ ID NO: 184456 - DNA, 122 bp, Homo sapiens
cgccgccaggctcgcaagcaccgcgtaggccagctggccggatcccgccgtctgtcatggcggcccccatcctgaaaggtgaggtacttcctgctgcctgctccagcagcgggagtttgagg

SEQ ID NO: 184457 - DNA, 122 bp, Homo sapiens
atctatctgggaggggtcttccagctggagaagggtgaccgactcagcgctgagatcaatcggcccgactatctcgactttgccgagtctgggcaggtctactttgggatcattgccctgtg

SEQ ID NO: 184458 - DNA, 122 bp, Homo sapiens
gcgttgcgagtccgggcagggtgggcgggacgaggtgcgatcgccggctcgccttcgctacgcccttgtgatcttggggccacggaggccaccagggcccggccaaggatcggatgccactc

SEQ ID NO: 184459 - DNA, 122 bp, Homo sapiens
caccctgtgttcgcagcaaatggagctgctcctggtgaacaagctcaagtggaacctggccgcaatgaccccgcacgatttcattgaacacttcctctccaaaatgccagaggcggaggaga

SEQ ID NO: 184460 - DNA, 122 bp, Homo sapiens
aaaatgagaactgtgttgggcataggaagtacagtcctactctcagagaatttagtattacggtagaaacagatataaacattttgatatttttttaaaaggtaagtgctaaggtgcaagca

SEQ ID NO: 184461 - DNA, 122 bp, Homo sapiens
accgcctctctccagcctgtctccttggagccctctcaggggtggaagactctggggagacgcagggggagggttttactgcctctgcggccccatggcgctcaccttcccctgtcggaagt

SEQ ID NO: 184462 - DNA, 122 bp, Homo sapiens
tcagttctcggcgttctccagcagcaggtgctggtttgccaacctcggctccagaggcggcgacggaggagaaggaaaagagggaaggggaggaggaagcggcgcggctgcggtggctgcgg

SEQ ID NO: 184463 - DNA, 122 bp, Homo sapiens
tcagggaagtcgaggggaggcccagaggtgccattggtgggcgctggtgggcactcgaggcggcccacaccttgcactagggccagcacacaggggagtagggcactgagaccctgacccag

SEQ ID NO: 184464 - DNA, 122 bp, Homo sapiens
gctgggaatgcccaaaaagcttactgctgtttagaattcttgctacagtcaggagaaagccgaaagctgcacgggtactgaatcttctacgactgaattagaagaataatgactgtacaatt

SEQ ID NO: 184465 - DNA, 122 bp, Homo sapiens
gcaccaatttcctccctccttctggatcagagcctgtttccttccaaagtggtggacccccgaaatcttacaggcttttttttttttttttttttcctctgtctcactctgtcgcccaggta

SEQ ID NO: 184466 - DNA, 122 bp, Homo sapiens
gcccagaatatccagcctgtttcctgcagaagccatgttttctctcatatcccaaaccttcgtcaggtgggttctgtttccagtttataatgggccccctccccaacattctcagcctcctc

SEQ ID NO: 184467 - DNA, 122 bp, Homo sapiens
acgcgggggagcagaggtgagctggcaccggaggctggaggggatccccgagcccgggatcggtgcgcggcagaggaggctcgcgggtgggagctggcgctggggccggggcttccctcgcg

SEQ ID NO: 184468 - DNA, 122 bp, Homo sapiens
cctgcatccctctggaagtcaccccttccctgtggctggaagttaccccttcccagtgggcgaatgtggggaagggtcacctcctgaagtgagaaggcccactattgagggtcctgtcctgg

SEQ ID NO: 184469 - DNA, 122 bp, Homo sapiens
attacaggcgcgagccaccgcgcccgacctgtccctgctttttgaacatgattcaagtatcgtgccctgttgccagttacatatactattttgaaaattcttaaaaataggataggtctcag

SEQ ID NO: 184470 - DNA, 122 bp, Homo sapiens
ggcaaagagaagactgttacagaagagagcatctgacatgcaaagcataacaccgataagcgtggccaggcccaagagcaagactcaaacttattctttttcttaaagaatctaaccgcagc

SEQ ID NO: 184471 - DNA, 122 bp, Homo sapiens
cctcctagagccactcttcctggtgctggactaagaggtgcaggcttggagggtgcagggcggtccgcctctcagacgtagaggcccggcctcggatgaaggcggaagggagggcaccgcct

SEQ ID NO: 184472 - DNA, 122 bp, Homo sapiens
ggtgcttgcgggccagtgtgagttccgcgggtgagtgtgggctatgaggggcttagcacccgggccagcggctgcggtaggtgtgctgggtcccccagcagtgccggcccaccggtgctgtg

SEQ ID NO: 184473 - DNA, 122 bp, Homo sapiens
caggctttctcatggaaacgtggcaggcaaacaacgatgctggcaagaaattggacaagccgcatgaaggcctggagagttttaagcccaggttgagagcacaggtgtaggctttctggtgt

SEQ ID NO: 184474 - DNA, 122 bp, Homo sapiens
ctgcctgagccttgcccactccctgggctaacacacactttaaaggaatcccacagtcaccgtgtgaaaagcttgctacactgcatttgattctgggcactgaaagcagtacttggctgcag

SEQ ID NO: 184475 - DNA, 122 bp, Homo sapiens
tgaggaccgaaacgctccttgtgcgctgtagctctgaggtggctgtcatggcccggacggcgggggaggcgaggatggttgtggggaggcgaggatggttgtggggaggagaggggagcgtc

SEQ ID NO: 184476 - DNA, 122 bp, Homo sapiens
agagaggtgggaaaattcgccgcacggaggccgaaagcgagaggggctgcgccgctatgccgggagctgagtcccatataagccgcccccagccatcgcccccagccggcttcgttcccctg

SEQ ID NO: 184477 - DNA, 122 bp, Homo sapiens
aaaacatgaagttaacttggagtttttctgtgatatgacaaactaggcataatcctatctcggaattgttgagtagaaaatttatgtactaatactcctgttaaaattcaacagctttattg

SEQ ID NO: 184478 - DNA, 122 bp, Homo sapiens
atctcagcatatcctcgccgggaccaacgctggggataagtagcaaattaggaagtcaggcgagagtcctttaggttgagaaagcagggtcactatcactcacttggggcagacaccataag

SEQ ID NO: 184479 - DNA, 122 bp, Homo sapiens
tgccttctttacatcatccatgtagaatattccttataaccacttttgtcagtctgagagcgctttttgttttatctatgtctgttaaaccatatgctgaaactgttttctgctttcttcat

SEQ ID NO: 184480 - DNA, 122 bp, Homo sapiens
aaaactaattctgattaccccagctagtttctgctgaccttggtcccttagatgaagactcgcccacggacccggaagaggaggacttgtggcctccgctggagctgccgccgccgtatccg

SEQ ID NO: 184481 - DNA, 122 bp, Homo sapiens
gtcttagggattcagttccccttccccaccctttccccttcaagctcgcttcactccccacgcgtgtctgcggatccgcgtgcaaggggtcaagacataccccctcccgcattctcagggcc

SEQ ID NO: 184482 - DNA, 122 bp, Homo sapiens
ctcttcgagcctcactttctgcctttgtaaaatagggacagcgttttatacacacacacacgcacagacacacatatacatatatatgctcgttatttcaagggttaaacatgtacagtgct

SEQ ID NO: 184483 - DNA, 122 bp, Homo sapiens
ttcaccaaggagggaagctccagagtcaattcatcccgtcttcctggggcatcaggcacacgactttgcatgtaacaggtttcaataagtctattctaaaaaagcaaagaaagggcaaatgg

SEQ ID NO: 184484 - DNA, 122 bp, Homo sapiens
cagcagaggccgcctccttccagagccttctgtggctgggcgggggtctccaggcagctccgcagcccccgcaaataccccctggtgctgagtccgcttatacagacagagacgaagggcag

SEQ ID NO: 184485 - DNA, 122 bp, Homo sapiens
aagccttccctcctctgaaacccgctgcagtccacagtccctcaggtttggcccccgccccgcttaggctccatccaccagctcaccgtctcgcctagcccgggaccagccgaacagcagga

SEQ ID NO: 184486 - DNA, 122 bp, Homo sapiens
cttagtcttctagtcgagccggccgaggacccatcctgggatcgggctgtctaccgcaaacgcctgatcacaaggtccgaagtgggggctcatcctcgccccatttcccgtaaatatcagcc

SEQ ID NO: 184487 - DNA, 122 bp, Homo sapiens
tacatatacaaaacaaagcagcaatatttcagttttagctggactaccactcaattgctccgtggtattagtgccaaaactacaataaggttttgcgcaagacttttataagttggtctgac

SEQ ID NO: 184488 - DNA, 122 bp, Homo sapiens
ggggtacgcatggatgcaaccaagcggtggcttgctagggaaccctccttagaggctgtgcgaggaatgccccaccccaaaggagagatggtcaccccgtttctcactcatggtccggatgg

SEQ ID NO: 184489 - DNA, 122 bp, Homo sapiens
ggcaggtaggagggagcacccagcagtcctagttcggagcccggcagaaagctgactgctcgcggttacgagagctccctcttataaggcggtgaggccgtcacgtgatgggagtggtaagg

SEQ ID NO: 184490 - DNA, 122 bp, Homo sapiens
ggaatgggtttactgctttctcgccaaccaccttcaaagcagtacccaatgcttcaaatgcggcatctctgacttcaggagcagaatcattgatgtgctatagtccagaagtaagcaaaatg

SEQ ID NO: 184491 - DNA, 122 bp, Homo sapiens
tcatgtcacaggctgagtccagaagaagaaccactgcagtctaggagggaaaaaaaatatcggttctctgcctatcccaaacaggaaaactagcaaatatatactggatgttaaagcaagtg

SEQ ID NO: 184492 - DNA, 122 bp, Homo sapiens
ctccctcatcgtgcaaaatggagccgacggtagtaagtaccccgaattggtgctgaaacgcgccctggaccgcgaagaaaaggctgctcaccacctggtccttacggcctccgacgggggcg

SEQ ID NO: 184493 - DNA, 122 bp, Homo sapiens
ggcggggagtggggagctgggcattccccttcttcctcaggacatcccgggagccaaatacgacggccagcactgcccgacccgtgcgtccttttccttcccactcttcacagaaagctgct

SEQ ID NO: 184494 - DNA, 122 bp, Homo sapiens
gcacagtgcagcccggtcacccttccccaaacaccacagatgtgactccagggtctgcttcgtgcaggttgggaacccacccctgtcctgcccccagggcctgggaagccaacccccttcaa

SEQ ID NO: 184495 - DNA, 122 bp, Homo sapiens
cttcccagggtgactctggagggcccctggtctgcaaggtgaatggcacctaactgcaggcgggcgtggtcagctgggaggagagctgtgcccagcccaaccggcctggcatctacacccgt

SEQ ID NO: 184496 - DNA, 122 bp, Homo sapiens
ggcgtgggccgggtgtgggggtgcgacaggcccttgggggctgcccctgtccctgcacagcgagtggggggctggagtttgcaggacgtgctggggcgcggcctcctggcgagcctcccgga

SEQ ID NO: 184497 - DNA, 122 bp, Homo sapiens
gataagacggtaagccgggatcccagggccttctccagctgcactgggtgtcaagcgccacggggtttgatggggactccttctggttccaccctcgcccactcacttctcgggctggccat

SEQ ID NO: 184498 - DNA, 122 bp, Homo sapiens
gtacgtgcgcgagctgcctgcgctgggcaaatgacctccccgcgaacgggaacgcccggacgagacaacctgccactgccgcgccgccaggtccccccaacagtcccctcggcccccgagcc

SEQ ID NO: 184499 - DNA, 122 bp, Homo sapiens
agcgtccctcggcttctgggccgagtcccactcagggccattcaaacgcggccgcgcgcgcggcctgccgggatagctgggaaaagtcttaacaagccaattagctcctcagaatgcctaca

SEQ ID NO: 184500 - DNA, 122 bp, Homo sapiens
gttcccacacatcagcctggagagatgggaagaacctctggggatggatgggtttggaaacgctggagccactgggcccaactaggagcctgagacctgggccctgttgtccctggagactt

SEQ ID NO: 184501 - DNA, 122 bp, Homo sapiens
tctggtgctggggagcgagcgcggagcgaggtgtctctttaaatacgctctgcagtgtgacggcggccgcccggctggaagagccatccccaccctgcggcaggagcccgcccgccgccatc

SEQ ID NO: 184502 - DNA, 122 bp, Homo sapiens
caggagcgcgcgtggctgaggaaagaaagggaaggcaaccgggcagcccaggccccgccccgccgctcccccacccgtgcgcttataaagcacaggaaccagagctggccactcagtggttt

SEQ ID NO: 184503 - DNA, 122 bp, Homo sapiens
gattagattgagcccacaagattaagggttgatctgccttccccagctcactgactcaaacgttaatctcttagcaacactctcacagacatgcccaggaccaatactttgtatccttcaat

SEQ ID NO: 184504 - DNA, 122 bp, Homo sapiens
gggccgtgctactagcaatcggacccacagtcgcggttccaagaagccccgaagcttccccggcttcccgcagcactgctgggagggcacacggcgcctctgtccccaccccagagcgtggg

SEQ ID NO: 184505 - DNA, 122 bp, Homo sapiens
ttaaaaggccatgaccaggaaatagccgtaactggcctttaaaagataagtaaccaaaagcgtttattattttgtaaggacaaaaggcagggaaagaatgttgacttcatgccaagagaagt

SEQ ID NO: 184506 - DNA, 122 bp, Homo sapiens
acgcgaggcgcgaaaagttcgcatgcctgctgccgcgtgggcgccagaggatctggcgatcgcctgcagcgccgtcgccccgcccccgcgcgcgagaatcgaagcacgcacgcgttctcctg

SEQ ID NO: 184507 - DNA, 122 bp, Homo sapiens
ttgcagtctttcaagtctgagttggaccccaggctggaggggctggttccaccacccgcccgcagccaccctgcctcgggctacacgtcggtggagaagtacagtgtgttccgcttgagttc

SEQ ID NO: 184508 - DNA, 122 bp, Homo sapiens
tttgggatccaccatgttcaagaacatggctcagcccctcaatgaccaagctaacacctgcgcttcgggtacttgacaagaaacataagttccacttgctgacatttaaccgaaacttggtt

SEQ ID NO: 184509 - DNA, 122 bp, Homo sapiens
tccaagccaggtgcgggatataatctcgtggtgcgccatttcttaagccgttcggaaaagcgcagtattcgggtgggagtcacccgattttccaggtgcgtccgtcacccctttctttgact

SEQ ID NO: 184510 - DNA, 122 bp, Homo sapiens
gcccatcctccctgcaggagttcctctgagctccgtggggaacagtgctggccccgagtgcgcacctggagcgctgtgctctgcggtaggcagcctgtggtccagggcccgctgaagccatg

SEQ ID NO: 184511 - DNA, 122 bp, Homo sapiens
gtgtgtatgtgtgcctatgggtgtacatgtgcatgtgtgtgcacaagtatgtatgtgaaacgatgctgattaaacaggatgattatccaataccaatcaacttggataatctgattatccaa

SEQ ID NO: 184512 - DNA, 122 bp, Homo sapiens
ctcaccctacattccacagtgacagaaggttgctgaagaaaccgggagaagtggccctcacgctagggctcactccactatgctccgggcctccccagcgctcatctcactgagccagctgt

SEQ ID NO: 184513 - DNA, 122 bp, Homo sapiens
agcgggtcctgggacccgtttccttcttcccctgggcagcccccgcgggtctttcacagtcgcttccgtccgcgattcctggggctcctgccgctttgtgcccctttgtctcccacagcaca

SEQ ID NO: 184514 - DNA, 122 bp, Homo sapiens
taggattcaaatcaaagtatatcgaattgcaaagcaattctcactgttgcataacctctccgagtcagttaccctatcttaaaactaatcaaaatgtcaaagacttataaagaataatttat

SEQ ID NO: 184515 - DNA, 122 bp, Homo sapiens
ccaggagtgagagctgagattggaacccagctaggtctcccttcaaagctgagatgccttcggttactctacggaattgctctttttgaagaagctgcctgatttgggaatgtctttgagaa

SEQ ID NO: 184516 - DNA, 122 bp, Homo sapiens
ttgggagggtgaagttagctttggccaggtgatctctgcatatcagactattaaaggcagcgcctttacagaatgttggctgggctgtgactcatgctttgctttgcactccctaaagaggc

SEQ ID NO: 184517 - DNA, 122 bp, Homo sapiens
tggaacccgggacgcaggcggcgggagtggagagggctgtctgcagagtggttaccagctcgtgctccagaattaggtgcagctggggtcaagtctgtgtttggccacttactagtcctgtg

SEQ ID NO: 184518 - DNA, 122 bp, Homo sapiens
caaattggcagcaactgtcccagacacagggcagctttgtcctccaaaaggtgctgatctcgaggaggcacggattatccttggttgctttgtattcaaaaactgttggcatcatctcagaa

SEQ ID NO: 184519 - DNA, 122 bp, Homo sapiens
ggggtctcggcgttggggtctctgcgctggggctcctgcgctcctaggcgggtcctgggccgggcgccgccgaggggctccgagtcggggagaggagcgcgcgggcgctgcggggccgcaac

SEQ ID NO: 184520 - DNA, 122 bp, Homo sapiens
agggactctcaactctcacgctcagacgttctagtacacagcagggattctcaactctcacgctcagacgttctagtacacagcaggtgcgctgtcctttaacaaggacaaaggtcaacaaa

SEQ ID NO: 184521 - DNA, 122 bp, Homo sapiens
tttgagaggctgaggcaggaggatcacttgagcccaggaatttgaggttgttgctatgatcgtgcctgtgaatagccgctgaacttcagcttgggcgacatagcaagaccctgtctgtaaag

SEQ ID NO: 184522 - DNA, 122 bp, Homo sapiens
cggcccgcaggctcttccccatctgagcgtcctggccccctgttatttttgccacagtgccgcctcatcctccctctcgcatggtctggctcctgagttccctcttccctccagacccctct

SEQ ID NO: 184523 - DNA, 122 bp, Homo sapiens
tgtgccccccaccccatgggctccggacgcccccttcccaggccgggtcccctggtggggcgtgtgcctgcgggagccacccaggtccgtgttccagtccccgctggcccggccacgctggg

SEQ ID NO: 184524 - DNA, 122 bp, Homo sapiens
aggccccggcgcagggtgtcgcatgcttccagcaggggctgcctttctaggagctgctgccgccgggcgtcccccgtggcctcgggcatggccagcgcaaactgccggaccttctgccggaa

SEQ ID NO: 184525 - DNA, 122 bp, Homo sapiens
gtagaaggggtaatccttggccaccatggcggctgccgggcctgccctttgggatgtcaccgctgaccctaggcgactacaaaactcccaggcaaaagggggccccagctccacgatgccgg

SEQ ID NO: 184526 - DNA, 122 bp, Homo sapiens
cccattacctttgtaatagtctgtgtttcaagtacatcccatatcctgtccactgtcaggcgtggcagattatactacagggttttgtaaaacaacaggtagggttcattgagcaccatctt

SEQ ID NO: 184527 - DNA, 122 bp, Homo sapiens
tacagtctacctagaaaatagatggacaatatttttcaactgtatgagcacgtagataaccgagagaatgtggccacctgtgttcaagaagccactgatactggtttttgttaaacattgga

SEQ ID NO: 184528 - DNA, 122 bp, Homo sapiens
tccgaggtgaaggcatgggccagggagcttccctcctaaggcaattggcactgctggggtcgggtctgggggccctagtgctccccactttccacttttctgccactgcctgctccgtcagc

SEQ ID NO: 184529 - DNA, 122 bp, Homo sapiens
atctccagtccacattttctcagaatctgtcctagcccttcagtctcccaggcatgacatcgtgtggtcccagcgccctaggtggtgagctgtgactctccttagagcctggcgaggccgag

SEQ ID NO: 184530 - DNA, 122 bp, Homo sapiens
gagtcctgcgccatgcttgccgggggcgggagtcacagcccccaactcaactgtgtgagccgaaacctggctttttccaagcattttgttatgaatgctagattcaaggcacaatttttagt

SEQ ID NO: 184531 - DNA, 122 bp, Homo sapiens
aaaatccatgacaaacaaagtataaaacatggattaaagatgggctgctgtttgtgttttcggacctgcatgattgtgcaatggcaacagttgtttccagtcagcccggggctcctcagtct

SEQ ID NO: 184532 - DNA, 122 bp, Homo sapiens
ccagccccacactccaaggttttccctttgcttataaggggtagtcacccttttttatttcgaccttccaaacattctgggagttttcctcctttaggccaactacagcgcagaggagcgct

SEQ ID NO: 184533 - DNA, 122 bp, Homo sapiens
gtttccacctctccccaagccacctagtgaccccagaattgactggggaatgcctgtgagcgatgatgacctcacagggaacagctgaccgcagggctgggagaacagctgtgccccttcga

SEQ ID NO: 184534 - DNA, 122 bp, Homo sapiens
aggtcctccccacggcaggtcctccccgcggcaggtccatcctacggcaggtccatcccacggcaggtccatcccgcggcaggtcctccccacggcagatcctccccacggcaggtcctccc

SEQ ID NO: 184535 - DNA, 122 bp, Homo sapiens
gatctgggccgacatgctctccatcgccgtgacctacttcatcacgctgtgcctgttccccggcctcgagtctgagatccgccactgcatcctgggcgagtggctgcccatcctcatcatgg

SEQ ID NO: 184536 - DNA, 122 bp, Homo sapiens
gatgtgccttggctggtggcgacggggttgctactcaccgaggcgacagacccagtgagccgctgtagagcctgtcaagaatgaggggtttttcaacaagcagagtctgcctacaggcagaa

SEQ ID NO: 184537 - DNA, 122 bp, Homo sapiens
gtggtagttctatttttatttttttcacctggccattcttaagtttattttgatgacacccggtgacagttccctgtacctagaagaaggtgttgggactcttgatgttggagtgtggcttg

SEQ ID NO: 184538 - DNA, 122 bp, Homo sapiens
cactcgctcccagagccctcccgcttctctccacacatgctcatcctgggcgacgcctctcggcgaccttcccatgctgatatcttctcccggatgcccaggctgtgggcgcgggtaccggt

SEQ ID NO: 184539 - DNA, 122 bp, Homo sapiens
cacattctcatccagtgagtgtgagccaaatgtcctgaacttactctcctgagttgagcacgttcccatcatacagtgttcttctctgtgacctctctttatgtcgtttattttgtgttctg

SEQ ID NO: 184540 - DNA, 122 bp, Homo sapiens
cgcggcgcgccccatgcccgtgtgtggccatgtcctatccgcagggctacttgtaccagccgtccgcctcgctggcgctctactcgtgcccggcgtacagcaccagcgtcatttcggggccc

SEQ ID NO: 184541 - DNA, 122 bp, Homo sapiens
gctccgtttggaatgattactacagatgagaatgtaggaggatactaacatgcttccggccgcaatgcaagcatctccagagtgataggcaactggacatcttaaacatctcatcatgcggc

SEQ ID NO: 184542 - DNA, 122 bp, Homo sapiens
ggcggcagaatggtacgctctgaaaactggatggttctaacgtaagcaagaaaaacggtgcgcgctgcagctctttaactggaacagcctctgctcggtctacctcgcccccaacagctgcg

SEQ ID NO: 184543 - DNA, 122 bp, Homo sapiens
ggatggaagcccgggccccacttcctctgcagaggcaatgcgtttgtgcgtagagcagcccgtgggccttgcacgctgcatcacctctaccaggcagcttcccatcagatccttatatcttt

SEQ ID NO: 184544 - DNA, 122 bp, Homo sapiens
gatatccgtgccacgccagcagggccgcaggcggtgcagggagagcttcagtccggctgacgtggcaccagggccaatctgctcagctaacatttgcctttcaggagtcagattcctgacct

SEQ ID NO: 184545 - DNA, 122 bp, Homo sapiens
catttatttcatgactggtgttatgatagctattgccagatgaaaaagaatgcctgccttcgaagcttgaatttgtggagagtttcagcctatggataagttgcatgtgtgtgcagacttgt

SEQ ID NO: 184546 - DNA, 122 bp, Homo sapiens
atcagttgatggactttggggttgctttcacttcttggctcataagtcctgctgccatgacgggtatactctgcatgattctgtgcctgttgttctcttagactctgtcagatgcccagcta

SEQ ID NO: 184547 - DNA, 122 bp, Homo sapiens
aggaattcagcttttaaggtttatcgggggtcctcttggccaaaagggggtccgttcagtcggttgtggggcttaggatttaatttttagttctcaaacagtaataaagataatgataatct

SEQ ID NO: 184548 - DNA, 122 bp, Homo sapiens
cttccgctctgaggcgctactgaggccgcggagccggactgcggttggggcgggaagagccggggccgtggctgacatggagcaggtgggtcccggagcggtcgctgggagcgggtggcgtg

SEQ ID NO: 184549 - DNA, 122 bp, Homo sapiens
agggtaaaacctacttcgagtctggtcttaaccacgatgatgctccttcgacgatttcttcgagtactgggccctgttcaacctcatcttggtatcactaaacgctcgtgtgtgtgtctggt

SEQ ID NO: 184550 - DNA, 122 bp, Homo sapiens
caggggtcgcacatatgtgcgcagacggtctggctcgtcaggtggcatgggtgggggtcacgctttcactgcctgctttgggctctcaaaacccagctctgaaacgtttccaaggcaaaata

SEQ ID NO: 184551 - DNA, 122 bp, Homo sapiens
tccggagtgaacaggcatccctgttgcccctgcctgcccagatttactgaccccatttgtcgacatggccccagacaggagggatccacttctctgttctgaacagctcttcctgcccctac

SEQ ID NO: 184552 - DNA, 122 bp, Homo sapiens
ggcccctcagcagaggctgggaaatgcttgtgtctcttccagggactagccagcgcctggcgacgtgcagcgctttgttaacgtgcattttccgactccatatgttcctgcggttgagggga

SEQ ID NO: 184553 - DNA, 122 bp, Homo sapiens
tctataaatagttgttacttaatgtctctttttccacatatacatcattaatctagttaccgaggaaccttcactcaaaattgcttgcctctttgtacaataaccccagaggcacaaaagcc

SEQ ID NO: 184554 - DNA, 122 bp, Homo sapiens
cgtgcactccccagccctgcacccaccccgagcaccctccacagctcccaccttcctcgccgccccctcacctgaaaccaccagcgcctcgttgggccccaccgtgtggcaattgcccatgg

SEQ ID NO: 184555 - DNA, 122 bp, Homo sapiens
tcttgtttctccagcgcctctggcctccctgcctgtctccggggacggggactgagctggcggcggcagatgagtgttctgcggtgtcactgagaactctggctcatgcacgaggccagctg

SEQ ID NO: 184556 - DNA, 122 bp, Homo sapiens
gtgctctggccaaagtcactggttctctatttgcctccctgcatagtgttgggcgctgtgcggcgcggaggagacaggactggggacaggagagccggggtctggggagggagggggcgacc

SEQ ID NO: 184557 - DNA, 122 bp, Homo sapiens
ctcgggaaggctgcagggtgcccgggcgggcggcggggtgggtgcggacccctggctgggcgctcccgagacccccctaccctggtgggtgggcgcccgggggcctggagagccgcctagcc

SEQ ID NO: 184558 - DNA, 122 bp, Homo sapiens
aagctaatttatctttttttggctttttgttttcaagaagggtttaccactgttgttttccgtcaacattttctctgacaccaattaggtgccctgtagttccattggattctgatgctaac

SEQ ID NO: 184559 - DNA, 122 bp, Homo sapiens
tgcgctctgcaccagccacagggatgcggggacgctggggacgcggggatgcggggacaccggggaccgcccgggagcacgtcctgcgcatcgccgggctccgcgaggcctgcagaggacgc

SEQ ID NO: 184560 - DNA, 122 bp, Homo sapiens
ccccgcggcagacgacaggtcgggggcacgtaccgagcgccatttccacgcacgctcttccgctcctagctttcgttcagaagttgacgtcagcttcggagacagaaattacacactctacg

SEQ ID NO: 184561 - DNA, 122 bp, Homo sapiens
tcctcacttctcagacggggcggctgctgggctgaggggcacctcacttctcagacggggcggttgccaggcagagggtctcctcacttctcagacggggcggcccggcagagacgctcctc

SEQ ID NO: 184562 - DNA, 122 bp, Homo sapiens
ccatccgtctctctacgcccccaccatcaggagcccccgacactgggcttcccctactcccgtaattttttttgttgctgttgtttgagaccaagtcgcactctgtcgcctagggtggagtg

SEQ ID NO: 184563 - DNA, 122 bp, Homo sapiens
atgcatcccctggcgttcccggatacctgcctgcatcacacagtccctgcctgtccatctcgcagctttacagcccaggaaggcccaggcccggctcctcccgacctctcccgaagtccctt

SEQ ID NO: 184564 - DNA, 122 bp, Homo sapiens
cattctacagcgcccattccgcgtacatcgagtatccaaaatgagtaaaatcggtttatacgttggaatgtagcttatgattccaaaatctcatctccaggctgcctagatcacacggcccc

SEQ ID NO: 184565 - DNA, 122 bp, Homo sapiens
gggacctgggacagtggcccggatggcagcgccaggttgcaagggactaggagagccgggcgggccgggcgggggcggggggcggggccagcgccgggggcggagtcccggcctcacctggt

SEQ ID NO: 184566 - DNA, 122 bp, Homo sapiens
cgcacaggcatttgcatgagctctatgataacttccctggcagcttttggtaaggaattccgtaagaagctacttgggaggctgaggcaggttgagcccaggagcttgaagttacagtgagc

SEQ ID NO: 184567 - DNA, 122 bp, Homo sapiens
gcatttctaacaagtttctaggtgatgctgatgtcaatagtctgtgtaccgtttgagaaccgctggattgattctttgacagtttttgaagtccgctgctcaccatatcacttcatcctctt

SEQ ID NO: 184568 - DNA, 122 bp, Homo sapiens
gcgtttgttttattcttaatttacttttttgggcacctctgctattgttacaaataaatgcgaacgcggagctttcgggcgggctctgggagcggcccgtgggcatcttggaatattaaaaa

SEQ ID NO: 184569 - DNA, 122 bp, Homo sapiens
tccatctggtgcattttaaacaacttagtatgcttctgaaatgggctctccattgtcttacgagtcattagcatttaaaacccccggttggaatcccaaacacaattctgctcccattccag

SEQ ID NO: 184570 - DNA, 122 bp, Homo sapiens
tcgatctcactcagtgggagccgccgccctggagggaatttcacaatagcctggtcagggcggttattttccagagcagtttaatgtctattttgcccaagtgcaaggaaagcttgccttgg

SEQ ID NO: 184571 - DNA, 122 bp, Homo sapiens
ccatccaggctgatggcactgaggtcatagaaggacttggcaatgaaagccatggtgaagcgcagagtgagccccgcagagaggcctgagcccacttatgagcctattagaggggtggggag

SEQ ID NO: 184572 - DNA, 122 bp, Homo sapiens
caggatgcacccttagtgtcagtgtggagctccttccttggttgtgtgatgagctgaacccgggggtattttctggacatcgaagtgctacacccagagtccaggacaggctaagtgagcac

SEQ ID NO: 184573 - DNA, 122 bp, Homo sapiens
ctgccccagggtcccagccacacccccattagcgtcaccatcgggggacaaggggctgtccgcaggcctcggcacctttcatgtacatcttagtggtctccacgatttcctggtagaccaca

SEQ ID NO: 184574 - DNA, 122 bp, Homo sapiens
tgacattgtatataacgccagtgcagtgatcaaacacagggcactcgcactgggataatgcgattagctaatctacagcacttaccacatttcattaattgcccctctaagggtccttttct

SEQ ID NO: 184575 - DNA, 122 bp, Homo sapiens
cctgctctcccggtcctgccccagggccgagggattgcgtcccgaaccgggcttgggaatcggctgcctctcaagttggtgttatttatgtttgtcttttgtgagggcaggttttgaatccc

SEQ ID NO: 184576 - DNA, 122 bp, Homo sapiens
cctgggcaagcagctccgcagagagcccgccggcactcgcggacgcttctaggctgggagcggggaggaaatgtcaccggccccaaactcggccctagggaaggccatccgcgtctatactt

SEQ ID NO: 184577 - DNA, 122 bp, Homo sapiens
ggggctggcaccgcgcaaggggccctgtttccggggagactgatttcggcctcctgacctcgggaccccttgactgtggagtgtcagacggaggaggacttagtgatcttgtccaaccccct

SEQ ID NO: 184578 - DNA, 122 bp, Homo sapiens
caagcaaaatggtagacattggggcaacgcatgcgattgcagctgctggtggcaccagttcgctggcacagggagcacttggttagcagtcctcggtgcagggcaacctccacattcatcag

SEQ ID NO: 184579 - DNA, 122 bp, Homo sapiens
ggccttgggcttttcaccgtaagcctctgcctggccaaaaacaaatgtacatacacgaggcgcaggtccttctcaagttcactcctttgcaagccaactcgtcttaagaaccagcccccccc

SEQ ID NO: 184580 - DNA, 122 bp, Homo sapiens
cccacttacccggagtccagagtaaatgggcactagaccaagcgagcacctgcctcaggccggatgggcccctgccctcggctgggccgctttatagtcctcagccccccagagtccccgcc

SEQ ID NO: 184581 - DNA, 122 bp, Homo sapiens
agctgggcagcccacccctttcagctgctggccggaagcggaagtgggcgtccgtcgcctcgccatctcccatagctgtcgcctgcagctgagaaagggttgctgtcccagcaggccaggtc

SEQ ID NO: 184582 - DNA, 122 bp, Homo sapiens
cacacgcccgcgggggcgaagcgacagcagccgcagggctgggagcgaggagccactcaccgcagcacgccgagcccagcaacagcgccgctaccaggggccacatctccgcgcccgccgcg

SEQ ID NO: 184583 - DNA, 122 bp, Homo sapiens
tggcgcctggggggcgggccgatggagggtggcgcgggcggggtcgggggccgggtcgggcgcccgaggtcctgggccggggttccgcgggttcttcgcccccgggcctttcagtggcgcgg

SEQ ID NO: 184584 - DNA, 122 bp, Homo sapiens
ttgaggggtgggactgtgttcccctctgctcgctctcgtttttcctgccctttaacagctcgcccccagccccaacccccaaggaagaaagagggaggtaacgctgaggaagggtggaaagc

SEQ ID NO: 184585 - DNA, 122 bp, Homo sapiens
gtaaggactaaaagaaaatgcacagaaggatctcagcgctggtggctggccaatagaaagcggagtattcactattgtggttataataactattttgataacaatggttgttcaggctgact

SEQ ID NO: 184586 - DNA, 122 bp, Homo sapiens
agccttcttctcatcacctcttgaagagccacctttgctcccaggagagcacacttagctcgtttgctgccaggccctccacacactctgcactctttagagccacctgccagttctctccc

SEQ ID NO: 184587 - DNA, 122 bp, Homo sapiens
gttggggactacccacttaacaaagccaagttcaattttaatttcccagaactgacgcaacgcaaagcgcaaagagactgaacctggggtgtggagtgatacagacctgacggggctttatt

SEQ ID NO: 184588 - DNA, 122 bp, Homo sapiens
gccaggaaagcgcggggccgccctaggggctaggcctttctttaaacagtgggaggcccacgaagtgtctgaagcccgaggctcccctttttgttttagttcgctctcttctggtaagagaa

SEQ ID NO: 184589 - DNA, 122 bp, Homo sapiens
aacggtctgcagtcaggccccagcattcctgggctctggttttgcaattcactaggataacgcggcccttccatcaatgaatcatggactataaaccactgtgccagcgcttgagctgttcc

SEQ ID NO: 184590 - DNA, 122 bp, Homo sapiens
cagacatgaagcccatatttcagtggaggagggatcgtaccagcagctaaacatgcctaccgtagatagcaccagatgctaggaaggaaggaccataatgtactgggagagatgggaaagga

SEQ ID NO: 184591 - DNA, 122 bp, Homo sapiens
atagaaacataaaaccccggatcagccatttcttccccctctggacaagcccggacgacacggggccactgttctgtgactctgacctttgccgtacattaaacaagaggagggcgggtcac

SEQ ID NO: 184592 - DNA, 122 bp, Homo sapiens
gacgcgaaaagcagaaggtaatgaaggcagtggaatgtaccatttctgcttgccaccctccgaaacaagcctggcaccctgggacggacggaccattacccgccccgaaggaggggagtatg

SEQ ID NO: 184593 - DNA, 122 bp, Homo sapiens
tttaaccataaacagaaatcaagtaaatgagggagcgagggccgcgtggtggctgagctgcgtaaaggcagacagtgggggtcccaggcgacagattgcaaactgcaggccttggggggtcc

SEQ ID NO: 184594 - DNA, 122 bp, Homo sapiens
aaagccggccaagattggcttggcagcccagagatagatcaccttggaatgagtgggtcacgagcctgaatgaaagataatcttccacttctttttgattttttttcattatagagtcctta

SEQ ID NO: 184595 - DNA, 122 bp, Homo sapiens
tatttttagtggagacggggtttcaccgtattagccaggatggtctcgatctcctgacctcgtgatagcctggccttgtttaaacacaaaacagagtcagcccccaacacagggctgcagaa

SEQ ID NO: 184596 - DNA, 122 bp, Homo sapiens
gaagccgcctcagcgagcctctgggctccgggccatgtgagccggttggccagagcctggcgggttccgtgcttggctagccagcggagcggggtgagagggtgagagaaggacgcttctcc

SEQ ID NO: 184597 - DNA, 122 bp, Homo sapiens
cctgccggggctacaggggtcgaggggctgggcgggcgggccggtccagggcgcaggagccgcccattaattgcgcggggacggccctgagctcctcttcctcctcctctttttgcttcttc

SEQ ID NO: 184598 - DNA, 122 bp, Homo sapiens
tggcgttcgcctgtgttggggttcaccatatgttggggttcaccacgtgttggggtttgccgtgtgttggggtttgccacgtgtcggggttcgcctgtgttggggttcgccgcatgttgggg

SEQ ID NO: 184599 - DNA, 122 bp, Homo sapiens
cctcgcggagcggcttgcagaggagcctcggggccacggcgtgtgtgcagcgacacctggcggtggcatgcggaactgcggacggctgcgcaggagcggacagcggagaggcggtactgacc

SEQ ID NO: 184600 - DNA, 122 bp, Homo sapiens
gcgggggccctactgcgtggacgagaacacggagcgcagaaaccactacctggacctcgccgggattgagaactacacgtccagattcggccctggtaggtcctggaggccaccctgggcgt

SEQ ID NO: 184601 - DNA, 122 bp, Homo sapiens
actttgcagtgcctgatcagggcagaaaaaggaggcatgcacctgggggaggatcacatacgagtgaaacctgtccccgctgaagcactaggtttggagaaatctactgggcatttacacac

SEQ ID NO: 184602 - DNA, 122 bp, Homo sapiens
tggggcgacacctgctctgatgctgcagacattctgtttgatgcggagaggccagccattcggctgtgattttgtagtctctggggagatattttttcatcactgttggtggagtgggagga

SEQ ID NO: 184603 - DNA, 122 bp, Homo sapiens
gacccggacccctaggtgggggacgctttctttcctttcgcgctctgcggggtcacgtgtcgcagaggagcccctcccccacggcctccggcaccgcaggccccgggatgctagtgcgcagc

SEQ ID NO: 184604 - DNA, 122 bp, Homo sapiens
gcgcggagccgacaccgggagcccgggagaagcgacgtctgggtgggcaggaagccgagccggctgcggacgcgggagggcgcggcacgggccgggagtcacgccagcacgcggcggcggcg

SEQ ID NO: 184605 - DNA, 122 bp, Homo sapiens
cctaactttatccgtaccagatacctagcctcactcagggccccccttacctggcggtgccgggatcaacaaatgaaattgtgacgggaagtcctggcccttggcccaacctcctgctgtcc

SEQ ID NO: 184606 - DNA, 122 bp, Homo sapiens
ggtgttctcttggagctctctgcaccgggtaaatcctttgagtgtaggcttgctgacagccgtctcattcacacgcaggttcctcccgggtatagctctgagagcaacagcccccagtcagt

SEQ ID NO: 184607 - DNA, 122 bp, Homo sapiens
acagcaaagggcatactgcagacatcaggaaacactcattgatcacagagaggggcttggcgtcaggggacctaattttaaccttgctgtgtggccctgcggaagtcacttaaccctctggt

SEQ ID NO: 184608 - DNA, 122 bp, Homo sapiens
ctcggctctcttcggctttctgagagcgcgcctgtcgtggcctcggctcctcttcggctgcgttcggcccacgatcatctcagtctcagctctcctcggctacgttcggctggctgccgtcc

SEQ ID NO: 184609 - DNA, 122 bp, Homo sapiens
gcggcaagaaagcagttgggtccccacaaaacgcccgaagtcaaggtgagggtcacacaacgactcttgacgattccggcgagttcatcctggtgcacatcccactccatgcctctctcttc

SEQ ID NO: 184610 - DNA, 122 bp, Homo sapiens
ctggggacaccccctgccccctaggttgctattgtcagtctccttttgtaggtggggaaacggaggttctaagaagttaagccccttttcgaagtcacagtcagacaatgcagtggttagct

SEQ ID NO: 184611 - DNA, 122 bp, Homo sapiens
cagggtggccgctttcagctcggactgaattacctgcgctcttttcggctggcgggctggcgggcggtgctggtgatgttaactttttatctccaggtaatctcaaacctacaggaagttgc

SEQ ID NO: 184612 - DNA, 122 bp, Homo sapiens
tgatttctaaattaaggtcctggacttgtaaaatcaagaaagcctgataatcaacatcgtcgctctggtggccattgaataacgggataaatacctaagacaagtcctttaaccatcccacg

SEQ ID NO: 184613 - DNA, 122 bp, Homo sapiens
gagccggagcggacaggcggaagggtcagctactgcagatagaggcggctggctcgggggcgggggtggagggggtcttcctccttccggttcttgggaagatcctgcaatctgaaagaggc

SEQ ID NO: 184614 - DNA, 122 bp, Homo sapiens
agctcgtgtccgtgtcagccttgtcctctttgtgggccagggcccagtagtctggggctgcgcccccagcccgtagccgcaggtccgactcggtgctggacggccggtcccctgcctgcgag

SEQ ID NO: 184615 - DNA, 122 bp, Homo sapiens
acaggttttttttcttggctttattttgactaagatacaaagtttgaaaagaattcgtgtcgaaaattatctttcaagggaataggtaatgatggatccaaacccaactgaggagttacgat

SEQ ID NO: 184616 - DNA, 122 bp, Homo sapiens
ctatggtgtgccgggggccgcgcgggccgggagttgggtgggctgggggacaggcgcgcccgcgccgcccgctccagctgggctagtgctgcacattccggccagcccctcctcaagacccc

SEQ ID NO: 184617 - DNA, 122 bp, Homo sapiens
tgacctggctttgacacatcctcagatcaacagcactgataagttgactaagtttggttacgctgtgttagccactaatgtggccaaccataaactacacagtcaaatttattttccacact

SEQ ID NO: 184618 - DNA, 122 bp, Homo sapiens
ttgttctcagtgcctggcttcccctgaggacgcgcgtggggcgcctcagcactgcgtgcacgtggttttccccagtgacaagaagcagctcagaatgcccgcctgagactctccatcttggc

SEQ ID NO: 184619 - DNA, 122 bp, Homo sapiens
ctccctgtcccctaaccctgttccctgtggctctttctcaacatggcgcagcctcagtatcggtctgcagcaggctctttctgcacatcgctgttcgagctccttcataagccttagtattt

SEQ ID NO: 184620 - DNA, 122 bp, Homo sapiens
tggccctcactttcttctatttccattaatgacatgctcatcaagggcaaacaatgggaccggctgccggcgcctgtcacagtgtgtgggtgctgggatgccaggctgtcatccccgggctg

SEQ ID NO: 184621 - DNA, 122 bp, Homo sapiens
ctagtcatttacttggtatatattgttttcattgattggggaaacactagatttttacctcggtttttgatcatttataatggagagaggaagttgcctatgttttgtaataatttattttt

SEQ ID NO: 184622 - DNA, 122 bp, Homo sapiens
agataaatccctgaaactccttgatataggagtcctatgatccattggcaaagaaagccccgactagggctactagattgggagaatatgaaaaggtaagggttgacaggattatataaact

SEQ ID NO: 184623 - DNA, 122 bp, Homo sapiens
tgaggttgttctcagtgggttctcatggtatagtggaatgtcatgcaaaacatgagcccacgactcaaagcatgtgaagcagaccacgctggggacccagataaggagaaacttgtcctatg

SEQ ID NO: 184624 - DNA, 122 bp, Homo sapiens
aagggccgctcgccggtgtgggtcttttggtgcgagcccaggtggatcttctggctgaagcgcttgccgcactccgcgcacgggtagggccgctcgcccgtgtgcgtgcgcaggtggcgggt

SEQ ID NO: 184625 - DNA, 122 bp, Homo sapiens
cggcaggaggcctccggactccgccaccatcccagctgccccgggagcaggcgagcagggcgccacgtgctcccccagagcagcctcccagtccccgctgccgtccatcttggagccgggca

SEQ ID NO: 184626 - DNA, 122 bp, Homo sapiens
aagagggagttagtccatacccaagactgtcattttccatgtattgtcttcatcaggtctcgcatcatctggatttctttgtcagagagagatcaaggtaaaacgaaaaactcaagttcact

SEQ ID NO: 184627 - DNA, 122 bp, Homo sapiens
tcactattcttagtccacaggggagtagtgactacccagggcttggtaagtgctcagtaacgtttgttgaaagatgaatcaatatttcaatgctggggcaaagcagtgaaaaactggggaat

SEQ ID NO: 184628 - DNA, 122 bp, Homo sapiens
ttactacttgccaggaaatagtcttagtgttttgcataaattaattcttaagcctcacaacgagcagcgaaaaattgattattgttatgaaactgatttcacagatatagaaaccatgtcag

SEQ ID NO: 184629 - DNA, 122 bp, Homo sapiens
cattagcttcctgccaacctccccactggtattcacgagggtaaggggactgaggacttccggctctgtatctgagcagacttccggctctgcatctgagcggacttccggctctgcatctg

SEQ ID NO: 184630 - DNA, 122 bp, Homo sapiens
ttaatttcagcatagaaatctgaacaccatgacatttttattgttaccttttaaatgcttcggctgggtttctctcgcactccccaggctgtaagaggctttggactgctggatcccttagc

SEQ ID NO: 184631 - DNA, 122 bp, Homo sapiens
cctgctctcctgagcccatgctgcctatcaccaatcagtgcaggtcctttctgaagagctcgggtgcattctctccatcccacctcttttcccaagaaagaagccacctgttccaagacacg

SEQ ID NO: 184632 - DNA, 122 bp, Homo sapiens
gccactcaaagatgcccaacttaccctacttgggctccaacagccatatcaggttgcattcgagaccagcctggccaacatggtgaaaccccgtctctactaaaaatgcaaaacttagccga

SEQ ID NO: 184633 - DNA, 122 bp, Homo sapiens
ccagaaacgtacagcaagaattacacaccatgaccaagtagggtgtattccaggaatgcacggctcactcaacatttgaaatccattaatgtaattcacctgtcaacaggtcaaaaagaaga

SEQ ID NO: 184634 - DNA, 122 bp, Homo sapiens
cgcacacgggcgagaagccacacaagtgccctgagtgcgacaagagcttccgcagctcctcggacctggtgcgccaccaaggcgtgcacacgggcgagaagcccttctcctgttccgagtgc

SEQ ID NO: 184635 - DNA, 122 bp, Homo sapiens
tttgtgctaaaaatctgaaactaatggcctctttgttactgaattccacatacacttttccgccttcagctaactggacctctctgcagcatctgacactgctgaccactttctctttcttg

SEQ ID NO: 184636 - DNA, 122 bp, Homo sapiens
gggggtcgttgtggggaacccagaggccagtgagcctgaggcctcctgtccctttgcagtcggacatcattgcgggccgctggcacgcgccctgcagccggcgctcggtcccgtgggtgtct

SEQ ID NO: 184637 - DNA, 122 bp, Homo sapiens
catggttctgcttgttgcctactccagagcctttggctccacaagttctaaagaaggtggcggcttaataagtcttcacagtccccttttgaggcttttcaggaaagtcatcagacaatgac

SEQ ID NO: 184638 - DNA, 122 bp, Homo sapiens
tggtctcaagagccactcataaatctctcagtaactgcatagtgtcccagggccagagaccggccactcctggcattgtgattagagtcatttaatatccaaggtggtgactaatgtctggc

SEQ ID NO: 184639 - DNA, 122 bp, Homo sapiens
taggatacacacatactctgcttttccagaaaataaaggtctacaccctcagagtggatgcgaggagaatgagtgaggatagggagaagcctccaagtcttttgtttattttaatttttatt

SEQ ID NO: 184640 - DNA, 122 bp, Homo sapiens
ggtccaccagcccctgaagctgcaggtggatggagcagcgatcagaagccagagccacagcgcaaccctggggggcgggagcccccagggccagaacagccaccacacctgcgctggccagg

SEQ ID NO: 184641 - DNA, 122 bp, Homo sapiens
tcggcgcctcctctgcctgggctcccactttggtggcacctgaggagccgttcagcctaccgctgcactgtgggagcccgtttctgggctggccaaggccggagctggctccctcagcttgc

SEQ ID NO: 184642 - DNA, 122 bp, Homo sapiens
aagcctttgagatctctagcctgacttttctctcagtttgaagcaaatcgcctttcagaacgcccaggggtcagggagctgttagagatgcactctccagggccccagacccagctgaaccc

SEQ ID NO: 184643 - DNA, 122 bp, Homo sapiens
aacagaattagaacttagcagctgctagctttcccttacatagacctcaaggctctgtcacggtatggggcaaaattaaagaaaacattgtgtcctgctcttaggagaggtgaaaggattgc

SEQ ID NO: 184644 - DNA, 122 bp, Homo sapiens
gaaggggggactcctctctgagaccgcagaacggggctgaggccctgaaccccgtgtgctcgtcctaaaactaggacgaatgtaccagacgacaagcagcctttgtgtgtaggagaggatag

SEQ ID NO: 184645 - DNA, 122 bp, Homo sapiens
ggtgcaggcactgtggccagaagcagcccaggcactgagacggaagagctggcagctggacgcaggtttgggggcgtccaggctgtgatataggagctctcgtccggacttgtctgcgcagg

SEQ ID NO: 184646 - DNA, 122 bp, Homo sapiens
aggctgagtggccagaacaagcccagtgggcatgagcattactcaggcagaaggcaccaccggccacagacatttctggctggcaaagtgccaccccaaggatcctgtgacaggaaaatcac

SEQ ID NO: 184647 - DNA, 122 bp, Homo sapiens
gttttttctgagcacagagccagcaattcattcccagcactctgcaagaacaacaaaatacgctctctgcaaaaacatcgtggttacaggagaccgagacagcccagcgacagaagctgcta

SEQ ID NO: 184648 - DNA, 122 bp, Homo sapiens
tccgctgatcccgcactcagggtgcaacttcacacagcgagggagagccccacgtcagagcgccagatgtagggaccagccccacagggtcggtgggtctctccctgtgtgtggcgatgaga

SEQ ID NO: 184649 - DNA, 122 bp, Homo sapiens
gacgatgatgaacaggacctcgttgacatggacctcctcaaacacggccaggacggccaccgggtccacagccgccatgaggctgccaaacaggaggaagtccagcagcccaatctgcaggt

SEQ ID NO: 184650 - DNA, 122 bp, Homo sapiens
ttgggccaggacgctagaagatagggatgtagttgtcgattttggcgcggtggcgctgggcgatacattcagcgatccacacgatgttgcgacactcctgctccttgagcttcacgaaggca

SEQ ID NO: 184651 - DNA, 122 bp, Homo sapiens
ttgcaagggcagagggccggtatgactgccttctgtttcctgagctgttgcccagcatcccgcaagaattggatcacacgtgggctggaagaatgagtgcaagtttttattgagtggtggag

SEQ ID NO: 184652 - DNA, 122 bp, Homo sapiens
gccgcccgccgcggcgccctccccgcccccggggcgctcattggcccagcgcctcgcgcccgccgcccattggcctgcaccttcgccaatccgcccccgcctcccgcgggctgcgggagctc

SEQ ID NO: 184653 - DNA, 122 bp, Homo sapiens
gtccccgttatcgccctctgggttcggcagagtggtccaaatgtcttcttgttgggagatcgtggccccacccgctcgccgggagccccgaggggcctcatcccctgaagggagcccggaca

SEQ ID NO: 184654 - DNA, 122 bp, Homo sapiens
tgctgctcttgcaagaaaacataaaattgtatgatggtgccacataacacatacttgacacgggctttgaaggcagagaagcctgggttcaaataaaattcagccacatactagctgcatga

SEQ ID NO: 184655 - DNA, 122 bp, Homo sapiens
ggatttaatgaatccagcagtgccttgctccccattaagaatccctgaggggtgttcagtcggctgagcagcagaagattgcagctgcacacatttaaataagagagacatcagggcagggt

SEQ ID NO: 184656 - DNA, 122 bp, Homo sapiens
ggggttgtcctgccgctctcagaactggctgtcatctgctgctctcttgtcacactgacacggccccctggctgggctgattggtcgctggcaataactgatatggaatactgatgttctct

SEQ ID NO: 184657 - DNA, 122 bp, Homo sapiens
caccacgcaactgaacagtaacacggcacggggagcgtgggaggctccggcttgtttctccgcccctgtgtttccgcctaactcgaaggagccactgctccccagtagatatgtctatgctc

SEQ ID NO: 184658 - DNA, 122 bp, Homo sapiens
ccgcgcccgggccccgcctcccctacctgaggccctcatggccggaggcgtcgcagcctccgcccaccagcgcgcctgccctgccattggctctgcgggctgcccgtctccttgctccgtcc

SEQ ID NO: 184659 - DNA, 122 bp, Homo sapiens
ataaagcccccgagtcaccaatcaactggctgtcttcataccgctttcaaagtcggcgggcgccttgcccaatagcaaagaacatatcgcccccatttcgaagattgatggaaagtttgacc

SEQ ID NO: 184660 - DNA, 122 bp, Homo sapiens
actgctgtggaggaaacttttaaacaccagcatgaagactcacctggcttttcttaccttcgtcctgtaccaatgatcattagaggagctttatatatggtttaaaaccctctctttaaacc

SEQ ID NO: 184661 - DNA, 122 bp, Homo sapiens
cctctacttaaggagctgtggtgatcactccccatgtctttctcaaccgttatctccatgcggatgacttcacacctcttcctctaacccaatatcccaatatctctcctgggctccagatc

SEQ ID NO: 184662 - DNA, 122 bp, Homo sapiens
gaggacttagcattttttttccacaaagcttctcattcatgtgggatgtgacttagaaaccgtggcaacatagaggtttgtgaaaactacaaatggcttagccattttccctggggtcaccc

SEQ ID NO: 184663 - DNA, 122 bp, Homo sapiens
gtttcttaaggcgtgtgtagtgagaaggctgggaaagtaaggcaggtggacctcaccagacggaagcatgcaaaacagaaacacacggacagctcacccggtatccccctccctttcagcac

SEQ ID NO: 184664 - DNA, 122 bp, Homo sapiens
cacagtcctgggagccgtttgccgactcaaggcgcctgtcctggtttctcccgccaggcccggccttcccccgtacactcacgcggcaacccccaggcgcgggtttggacagggcttccaga

SEQ ID NO: 184665 - DNA, 122 bp, Homo sapiens
ggcggctgcggctaagacctgtgactaatgccatttgacctgagcccatggggttttgtgcgtcctgccattcactgttatgtcgttatcttcaagtttatttcggagaaatcactcgcgtt

SEQ ID NO: 184666 - DNA, 122 bp, Homo sapiens
ccccctcccccgatccctcgggtcccgggatgggggggcggtgaggcaggcacagccccccgcccccatggccgcccgtcggagccagaggcggagggggcgccggggggagccgggcaccg

SEQ ID NO: 184667 - DNA, 122 bp, Homo sapiens
gaaaggccccggcggaagtggccgggagagcgggcggctgcgtgggtctgggccctggcccggggcaggctcctctggcctgcctgccttggctgcttggaaagggatttctggggagtctc

SEQ ID NO: 184668 - DNA, 122 bp, Homo sapiens
gcagggtgctcgggttcaggtaggagacgcactgcgcggtgccaggccagcctcggaagccgggcgccacggcctgcactcacctctgctgttccctgaccctcgtccttctccaccttcga

SEQ ID NO: 184669 - DNA, 122 bp, Homo sapiens
cagctctccggggaccctgggggagggcaggcttttgtcagctgggccgctaaggtttggcggtcgcccagcttgggcagcacagctggggtcctctgtggatgcctctggggggcctctca

SEQ ID NO: 184670 - DNA, 122 bp, Homo sapiens
agcaaggatccagaacagtccttgtaataatgaggccgaactggccccctggcccgcccccggccctctgcagccccgcacacacgacactcgcgatgtcgccctctcgagctcattccccc

SEQ ID NO: 184671 - DNA, 122 bp, Homo sapiens
caggataggggagaactcaaaatcaagaaaagtagtttttagaacaagacactctgagtgcgcaccttctccagacttcggagcccctcagagtgcgtctgaggtatctctgggtcctccac

SEQ ID NO: 184672 - DNA, 122 bp, Homo sapiens
tgctcctgggtgtgggaactcaggggtccagggtgctcctgggtgtgctttcgggctggccggggaccagcagcttgggcgccgaggtgccaccgacaggaagtgggcctctaggctcagtg

SEQ ID NO: 184673 - DNA, 122 bp, Homo sapiens
ctgacacctgcagacgtcactcacacccacactctcaccgtaagaggtgacaccagcagacgtcactcacacccacactctcaccataagagtgtgccccgcaggcgtcactcacacccaca

SEQ ID NO: 184674 - DNA, 122 bp, Homo sapiens
cagcttactcccaacccatcagtaaatcatgacagctccatcttcaaaatacatccagaccgtgtgccacctccacctccattagggacactaagccatcatcatctcattactggtcatcc

SEQ ID NO: 184675 - DNA, 122 bp, Homo sapiens
gcccgagggcttttccgattctaggcggggctggggagatgccaggatccccagggctcccgaggctaggctgagaattggcggggtgtcggagctttgccttagggcaaagggaaatgcaa

SEQ ID NO: 184676 - DNA, 122 bp, Homo sapiens
gacagggctgggactgagagcctcaatcctcctccagggaagccttgtgcctgcctgggccgctgcggggttcgggtgccagcatcttcgcggatgttggcatcttcgtaatcacagcggtc

SEQ ID NO: 184677 - DNA, 122 bp, Homo sapiens
gcagcgcctgcccattcttgatatctcttccgcagccggcacaatctgaaaaagagcagccgccagtggttactacacatttcctttgctaaatccaagcaggcagcccaatttcaacccca

SEQ ID NO: 184678 - DNA, 122 bp, Homo sapiens
atttttttgagatggactctcgctgtcagtgatggatgtcagtgatggagtgcagtggcgcgatcatggctcactacaaccgctgcctcccggttcaagcgattctcctgcctcagcctccg

SEQ ID NO: 184679 - DNA, 122 bp, Homo sapiens
gtgagcagtgcaggtggcagaggacagcctctgggcggctgtcatctggcgctgggcaggcgagacagggacggctgctccactgcacaggtgtagcctggctggcagggagggccccagcg

SEQ ID NO: 184680 - DNA, 122 bp, Homo sapiens
attattaggtttggaaggctgaagaattacgtacagactggatggaagctggaagtgagtcgaggtgggtggttaagttaggtctgtcagcatctgcactggttttctactttccagcactg

SEQ ID NO: 184681 - DNA, 122 bp, Homo sapiens
agactcctgtggagtcgctggaaaagcatgcttatgtccagaaagcccacactggagccacgccggctgcccacgggttctggcatgggggggaggatgggcgaggggagccgccctccacc

SEQ ID NO: 184682 - DNA, 122 bp, Homo sapiens
caatgaggggcagggcccgaggagtggtcttcccaagaacccctggtggcctcccaaggccggtgctgtgtacctcctccccgacaaaaggggaaactgaggccccgaggggagtgggaaga

SEQ ID NO: 184683 - DNA, 122 bp, Homo sapiens
ttaatgctcggctccccctttaaacctgcccacaaggaaaaaatgtgatgatcacatcagcgcacagtactgtggtgacccaagtggcagttatcattctgttgagtgacacattgtacatc

SEQ ID NO: 184684 - DNA, 122 bp, Homo sapiens
aaagtgagccaggctggcactgccactgtccacagtgaactgggaagaacatggaaaatgcgaactgacaaagcgacaaagtgacaaaaatttaaattgttttaaatttttaaaacaattta

SEQ ID NO: 184685 - DNA, 122 bp, Homo sapiens
ccagtccctaagggactaaaaacaaacaaaacaggctatgaacagaagcagtggtggcagcgctgggccagcaatgatgatttctactgttagggtttcagttgtacttggatctgggaggg

SEQ ID NO: 184686 - DNA, 122 bp, Homo sapiens
gtgctggaggcgggggtgcccttcgcgccccggttctaggagcgactgctctccaggcctcgtccctgtggcaccgcaggcttttgcgctggagattttaaaacactttagtgattacagcc

SEQ ID NO: 184687 - DNA, 122 bp, Homo sapiens
tgcgcgccagtacgagagtggggaggacaggttggcatggggcttatttggggagaagaccgttggattttcagcagctcaggtggaaatatgtcactgtgtttttccggctggattagcag

SEQ ID NO: 184688 - DNA, 122 bp, Homo sapiens
gtactgttccccggagaagcccacctcctggtaggccacccacctgcaggaagggcggggcgcgagtcagctgggacggagcctgcacctctcctggaaccgcccccggctcgcccgggccc

SEQ ID NO: 184689 - DNA, 122 bp, Homo sapiens
gtcccgggctcagccccttctcccctccctcacaagtcggactcacgcacgcactctcctcgcccaaagtgcacatcatggagcagaggaggactgcagagatgcccagaaacgagcctttg

SEQ ID NO: 184690 - DNA, 122 bp, Homo sapiens
gtttctgcctgtattgtcactgcgcaacggatggcattcattacaagaagagcccatcatcgttgtgtttgcatggtttttttccttgtgtgtagcccatgttgggaacacgatacaggttc

SEQ ID NO: 184691 - DNA, 122 bp, Homo sapiens
ggccgccccgccgggcctggtatgagaagcggccattcactcagcgtgggcttcagaggccggcaggcaaggccaaggccttgggctccgaccctgcgagcaagcgtgtgcctgaaaacctc

SEQ ID NO: 184692 - DNA, 122 bp, Homo sapiens
acgtggggtgaggggcgggggttggtcactgcggcccagaggcccgctcttccgctgaggcgccgcccgcgccgcctgaccagaggatactcgactgccgctcccggagccagggcgtacag

SEQ ID NO: 184693 - DNA, 122 bp, Homo sapiens
acccaaatcatcttcagaagagctgagcctcagcctagctgtgaggcactgactacagggcgtggaaggcccagttccttccctggcaggcggtcaggcagggccaacactaacgcggtgga

SEQ ID NO: 184694 - DNA, 122 bp, Homo sapiens
acctgcgcctccagcttcttcttcttatgttccacctcctgcttggcctggcccaggacccgcagctccccggccaggtctgcgttctctttctccagcgtctgcttattcttgtctaggtt

SEQ ID NO: 184695 - DNA, 122 bp, Homo sapiens
tcaccccgtagggggtggggcagtgggggtctgccaccttcaccctccccgcccgagttacgtacgccccacaaacctgaggccgccaggggtagggtggagggggcgggggtaagcagcct

SEQ ID NO: 184696 - DNA, 122 bp, Homo sapiens
ccccaaagcaagagtgactggaaatcctgctaaaatatggctgtctaatcaaccgagaggcgaactcatttactgaggttcccattgtccacgctgacagatggctcgctcccctctctgct

SEQ ID NO: 184697 - DNA, 122 bp, Homo sapiens
ttactgctccccgtgctgcgattggctccaacggctcaggcacgttggacgcgctgtggccgcagctattctggaaggaagaaacggcccttcatttagcacagcgtgcctttcctcccagc

SEQ ID NO: 184698 - DNA, 122 bp, Homo sapiens
agctttgaaaacagacaaacctagaaaacatctgcacctgacatatgccaggtccccacacgggctttggtacattatctcatttaatcttcacaacatgatgacagagaaatagtggaaca

SEQ ID NO: 184699 - DNA, 122 bp, Homo sapiens
ctgctggccccacctcgttttcgtccaattctgggaggggcagcgagcaaatccacgccccgcccagttctgggcttggtgaaaggcgggatttctttgttcggcccagtagtccctgaatc

SEQ ID NO: 184700 - DNA, 122 bp, Homo sapiens
acgtggtgccgctgagcttggaccccgaccagaagatagagattgaaacgatgaggaaaacgaagtgcctaatccccgctggacgctaactgcagggcaagctccccagtgttgtagttgtg

SEQ ID NO: 184701 - DNA, 122 bp, Homo sapiens
ccaagcctggcctacacattcttaagcacacacaaaacattctcccagatatattgatcacgttaggccacaacagaagtcttaacaaatttaaggtcaaaatcatatcaagtatgttttcc

SEQ ID NO: 184702 - DNA, 122 bp, Homo sapiens
gtcttcggatgcgaacgcgagtccgtgcgatgcccaggtcaagtttgcagagagagtctgcggtgtctgtctccttggcctcctcttgatgctcctgcgggttgggggctcggaccaaagct

SEQ ID NO: 184703 - DNA, 122 bp, Homo sapiens
cgaggaacgagcccagttcagagccgccgtcgagtgtcacgtctggggaggagaggggagcgccgtgctaaggggcttacgcagaatcttcttcaaagctgtcaaatctccatctccgccag

SEQ ID NO: 184704 - DNA, 122 bp, Homo sapiens
tcagggaatttgagtgggagtgttctgcagaggcaaagcaatgtctgctgggaggccagtcgacacccaaagagaaagtcattgagtaagtagcagctgctggtcctcacacacccatttta

SEQ ID NO: 184705 - DNA, 122 bp, Homo sapiens
cctttcctcagggccatcctgcatgcagggcaggctgcaggcaggcagcgagggagggtacgtctgctgtgccggccacccctgccctctggatttccccactgcggggcagcccgcgcctg

SEQ ID NO: 184706 - DNA, 122 bp, Homo sapiens
gggccccgcgagcgtgtgtgctgccagctgctctggaacaatggggccctttatgtcgctcgtgcacctcagcacggatttagtaatgttttgatttatcaaggacaagcgtcagcaggcag

SEQ ID NO: 184707 - DNA, 122 bp, Homo sapiens
cctgagctgaggacaaactaagaacagtggtggacaacactgggatggcaaggatctggccgatgctggactatattgtattttaaagttctaaattgtctgggtgcagtggctcacgcctg

SEQ ID NO: 184708 - DNA, 122 bp, Homo sapiens
atggagccggctgaggggtgcggtggtaagaccccatcgctagcggagtgcaagcaaagccgcacacctcctgggtccgggctggggcaggccgcgcgggcgcgggaacgaacgcgtgcgga

SEQ ID NO: 184709 - DNA, 122 bp, Homo sapiens
gcgcagggctttgctccagggaccccaaagcctgcacaagccctgggatgaggacttggtcgaggctcctttcttagaggaatttcagggactcacagccacatttgctgagcgagaactgt

SEQ ID NO: 184710 - DNA, 122 bp, Homo sapiens
gaccgcggcgggttacaacttgggggctatttccaccttccgtgcgactgatgcgaaccccgaagccggactctgtctgctacagtcctggcgtccaagttctctttagctcatgtcactag

SEQ ID NO: 184711 - DNA, 122 bp, Homo sapiens
aggacaggaaggaaggctctaacatggggaatcctgagaactgctgctgtctgttaaatacgcctacaagttatttttcttatgtcacactctcccagacatgttcttacttctcatttctg

SEQ ID NO: 184712 - DNA, 122 bp, Homo sapiens
ctgcaagctctgtcctgcgacctaaagcatggggacgtcccttccagcagcatcagtgggcgaaaagttaacatgctgagggccaccggcacccacacttgcttccaggaatacttgcggta

SEQ ID NO: 184713 - DNA, 122 bp, Homo sapiens
cagaggatgccaccgagtggacggacgtgagcaggaccacagagacaacccagtgggacacgcaacactgttcccaagatgttagcaggggaaagagtcggacgaaatggcgaagtgtttgg

SEQ ID NO: 184714 - DNA, 122 bp, Homo sapiens
cgccgccgccgccgctcctctagcgctcctctgtggagagcgccgcgggcacctgcaagacggggggcgccccttccacaaacccgagtaggaaaaccaacctaagggctccaggtggagcg

SEQ ID NO: 184715 - DNA, 122 bp, Homo sapiens
ccacccaaagccatgagcccttctccggatcccactcacattcctgaagccaacagactgcgtgctcaagaggtttaggccttgagaacttcacaggggaaagccaaggaaaatgacactgc

SEQ ID NO: 184716 - DNA, 122 bp, Homo sapiens
gatcctgcaggaaagcgcgggagggcctgactcaagctggcctggccctgagcgcatctgcgcgcccgaagcctgtccctgaggcacggagagagcagctttcgggttaaaagggccctggg

SEQ ID NO: 184717 - DNA, 122 bp, Homo sapiens
tgcagggctggaggaaggggagggcgcctgagaaacaccttgaacccccagcgctcccgccgtcacctccacctccaagcccagctagcctgggatctgcgcctttcaggacataaagacac

SEQ ID NO: 184718 - DNA, 122 bp, Homo sapiens
ggcagtttcccagggctcaatttgtagctagctgtctgttcctcacccacagtcatggagcgcttcatagcaggagctcccagtttcccaggtgtaggactaggcattgggctactaggggg

SEQ ID NO: 184719 - DNA, 122 bp, Homo sapiens
aacaaaggccattagagcgaagagcatcagcgacatagacgcagctaccaggcgaccaggcgcaggaagggtgcggccgcagcgggtgtcgcgaccgcaggagggccagggcggggcggcag

SEQ ID NO: 184720 - DNA, 122 bp, Homo sapiens
ggccgcatggggaggagggatttaaaaaaaaaaaaaaaaagcgaggtaattagcattctccgattccactggctctccgccgcccctgctttgcatacgcccgtcccactggctgcccgggg

SEQ ID NO: 184721 - DNA, 122 bp, Homo sapiens
ccagcctttaatttttgatcgcagtaaaatgcacatcacagaaaatcagcatcatgaccacgtcccactgcagaggtcagtggcactcaacacatttacattgctgtgcaaccctcagcacc

SEQ ID NO: 184722 - DNA, 122 bp, Homo sapiens
agaaggaggaaaagccagcagaaaggcagcagattagacacaaaattgtaattgttagtacgcaactgataaatacaaaagggcgaagagaatgtcaatccagaatgatgcaaatcccttca

SEQ ID NO: 184723 - DNA, 122 bp, Homo sapiens
gctccaaagaaacatgttgttattctgtggaagttatttgattgttcctcatagtcttttcgtttcaattggcatttagagaactagccacacaggctgctccccatcttcctgcatgatac

SEQ ID NO: 184724 - DNA, 122 bp, Homo sapiens
tgggtaacctagggcaagacagactttttcttcctgaaatcactcttctaaagctgagaccggaagaggaaccttgcagaagtgcactgtgaccacagttcttggcatgaaagataaacaat

SEQ ID NO: 184725 - DNA, 122 bp, Homo sapiens
aattaccccatttgtcccaatcatttccattttagatctaggatttaatccaggattactcgttgattttagttgtcatgcctcttcagtcttcttcaatctggaatagttgccagtctttt

SEQ ID NO: 184726 - DNA, 122 bp, Homo sapiens
aagctgtagaccttcgcggtgagtgttaacagcttttaaggtagcgcgtctggagttgttcgtttctcccggtgggctcgtggtctcgctggcttcaggagtgaagctgcagaccttcccag

SEQ ID NO: 184727 - DNA, 122 bp, Homo sapiens
ccaggccgacggcgccagtgcagacgagccccactcgggctgagctcctccgcgcgtcgccggcgctccaccgtggctacccatccgtggtcccgacaacctccctgtcccttgcccgcccc

SEQ ID NO: 184728 - DNA, 122 bp, Homo sapiens
cacattcctgcatgccaggaatgactgagtgctttactgatatttacacataggtaaacacgtttgcattggctgaagtgttcataaccccatagtctctgagcactgtactgtgaggacaa

SEQ ID NO: 184729 - DNA, 122 bp, Homo sapiens
tcgggccggggctccggggggctcgggggcgccgaaggggggtcgggggcgggctcgaggcgtaaacacccagcaacgtgaccggaactggcgaacgagccggaggggtgcggggggcggga

SEQ ID NO: 184730 - DNA, 122 bp, Homo sapiens
gggccgcgcagagtcgcttgtccctcggcggctgccgtgcctccctttacgtggcagctgcgggagcccgccaatccactgcgcccgcatcagcccccactggtggcgcaggcggaaggggc

SEQ ID NO: 184731 - DNA, 122 bp, Homo sapiens
aaaggagaaatcagtcatcaccttgtgtgttgtgtgtgaggctctcccagcccgtggaggcgggaccttttattccctcgatttgaaaggcaccaaacgcagattctctgcatgtccaaact

SEQ ID NO: 184732 - DNA, 122 bp, Homo sapiens
aagggtcatttgcagggatagatctgtgccatacagagcagaggacctgctgggggtaggcgatcaagcgaggaggaagggtccccagtccaagggagagcagactccacaaccatgagtcc

SEQ ID NO: 184733 - DNA, 122 bp, Homo sapiens
ttgctccggtgctgaagttcgggatgcggaactagctgagcatgcgtacttcctccctgccggccctccctccgtcccgttggctccgccctccgcggacgtgctgcgtcagaatgcgcctc

SEQ ID NO: 184734 - DNA, 122 bp, Homo sapiens
gggaggggaagttggccggcgcagcgccgggtggcgggagaggatggtgtctggggcttacgccatgcccaagctcccacaaggcaggggcccacgtcccgggctccacgccagggccttgc

SEQ ID NO: 184735 - DNA, 122 bp, Homo sapiens
tttgatgtgacgctgctttaatgtaacttctgagcaagtttgacatgttttggcatgcaccgaacctccaacacctgtatgtatgcagtgggctgaaacagtgtgtcctgtgcccaagcaga

SEQ ID NO: 184736 - DNA, 122 bp, Homo sapiens
ggagcgcctctgccaggccgccccatctgggaagtgtacccaacagctccgacgagtcagcgaccattgagaatgggccatgatatcgatggcggttttgtcgaaaagaaaagggggaaatg

SEQ ID NO: 184737 - DNA, 122 bp, Homo sapiens
cctgttttttcattttcctaatgttatctttcaaagagccaaagtttctaattgtgacagcgtccaatttattaaacattttccttgattgcctaccttaaggtaaggttgcaaatattttc

SEQ ID NO: 184738 - DNA, 122 bp, Homo sapiens
gaacgttccttcctcttgattagtcctatttaggaaaagagggcgggtactgaggaaaagcggcagaagcgcctgcttccattggtcagtcctggcaggaggcggagcacccgcggcagctg

SEQ ID NO: 184739 - DNA, 122 bp, Homo sapiens
tcaatgatttcactcacttgttacgtattcaccttatatccaatggatacaggatataaacgaatgtaatcacaagacactctctgccttaaagagcttacaaatagggtgtgaaagagtag

SEQ ID NO: 184740 - DNA, 122 bp, Homo sapiens
ccactgagacattgatgaccatggtgatctggttgctagacagcatgagcttgttgttggcggccacaccattgctgatatacaggcttttggttatctgcgagaggccgctgactgagggc

SEQ ID NO: 184741 - DNA, 122 bp, Homo sapiens
cacgtcctcctcgaaggccgtctcccgcatcctgggctgcgacgtgtcgaagtagttgggcgtgttctcctgcagggctggcagaagggtgcagtggatctcagggatggcgtggaagatga

SEQ ID NO: 184742 - DNA, 122 bp, Homo sapiens
ccgctgcctcctggagaagcccaacctaccgcgcgcttcctgctcactggctcagtgagacgctgctcagaaggggaaaacccgtctcccacattccgatggcccaagggccgatcagtcgg

SEQ ID NO: 184743 - DNA, 122 bp, Homo sapiens
gtatccgcgccggaaccgcgagggggttggttcaggcctaggcgcggggcaggacgggaccggtgagtggctcctccaaacagctatagagacccagaaatgcctgtggaaagctacagagg

SEQ ID NO: 184744 - DNA, 122 bp, Homo sapiens
gcagacactgctcccggcccacctcaccacacccgcccctggctgcgccacagtcccacccgatgcagacactgctgctgacccacctcacaatgcccgccgctggctgcgcccacagtccc

SEQ ID NO: 184745 - DNA, 122 bp, Homo sapiens
gaagaccgagggcgacctcgaggcgagggcgggacagcggcggggtgtgaagtacgcatgcgtattccgcctttcttccaatttttttttttttttttttttacctacttttgtaagacatg

SEQ ID NO: 184746 - DNA, 122 bp, Homo sapiens
tccctctctgaggcttacgtctgcctggatctttttcttttcagtagagcaaggcagtttcggcctccacctgaaagtggaagtatagggtcaggcacatggacctcctagccctgaggatc

SEQ ID NO: 184747 - DNA, 122 bp, Homo sapiens
taggtcttcacttctgtgtctgctctgagttgttacagaaaattgcctacacttggggaacgcggcgccccggccgccgcagagccgagccgagccaggcgagcccccgcggcgcccaagcg

SEQ ID NO: 184748 - DNA, 122 bp, Homo sapiens
ggaagcactggcatgggaagtacaaagtgaggcaagccaccgccaggtcatgaaagccagcgacacaaggcagcaagaaacttcctcacagtggggctgtttggccaagtaatagagtacca

SEQ ID NO: 184749 - DNA, 122 bp, Homo sapiens
tctgaagtgcctttggagtttatgtctgcacatggcattggtttttcaattcgggcagcccgtcagggctcagcctctgccaggactctgccacggcaagctcattcggacaaacgcctgtg

SEQ ID NO: 184750 - DNA, 122 bp, Homo sapiens
tgtccttggccccagccctcctggcttggccgccctgtcctgcgtgtgagcgctggtgcgcgtcttcttgcagtgcgtgccgccccttccaccgcagctcggagtcagggcttccgtgtgag

SEQ ID NO: 184751 - DNA, 122 bp, Homo sapiens
gttgacaaaattgttagcatgctgtgaagggacggatggtcacctcctcttctccccacgcgtccatgtgtatgcactcagcctgttctccggtgtgggtgtgaagatggacatagtcttgt

SEQ ID NO: 184752 - DNA, 122 bp, Homo sapiens
cccgcccgtccggcggcgcccattgtgccccggcccgccccgccgggctgtccccaagcccgcctgcaacccaccgcccgcccgacggcccggccctgcaagtcctggctcgcgacgcccgc

SEQ ID NO: 184753 - DNA, 122 bp, Homo sapiens
atttggagagtgagtgaggcctacgcaaccccctcgagtcatgttttgtggacgaccgcccgtacttactgctgaggacctctggaggagggggtcctgcgtcctgtaatgcccggggcggg

SEQ ID NO: 184754 - DNA, 122 bp, Homo sapiens
taaaaggacatgaagaatgcattcaaagaaaattacaaacctctaatagaaaaataaaaacgaataaatggagcttctgcctgggaagattctacatggtaaatggcacattcaatctgcag

SEQ ID NO: 184755 - DNA, 122 bp, Homo sapiens
cctgctgcttttccaggtggcattcttccatggctaagcctggggccaccaggggcttcccgagtatcgcaggaagaggggagatgagggagggggaagacagcttctgctctcaggtttag

SEQ ID NO: 184756 - DNA, 122 bp, Homo sapiens
ccatcttgcagcagcagttcaaccggaccgggaaggcagagcacggctcagtggcgctgccggccgtgatgcgctcgggctccagcgggcctgagaccttcaacgttggcagcatgccctcg

SEQ ID NO: 184757 - DNA, 122 bp, Homo sapiens
ccatgtccgccgggatggaataaacgtgacgtttgtctgtggccctgtcagtgtacagcacgtcacggatcatctgcatgtgtgcccaggaccggggcagtcacccagcagatacgcacgtg

SEQ ID NO: 184758 - DNA, 122 bp, Homo sapiens
agaaacggagggagtcgctgggggacggcgacgagtgggatccgggcgggtgggactgggcgcaaaggaccgcgccgacgccgcatggctgccgggaattcagctcccccggccaggttgag

SEQ ID NO: 184759 - DNA, 122 bp, Homo sapiens
aggcagcccccgacagggccagtgcccgtagccaccttccccgggcatggattcagaggacgggggttagagcccagtttggggaagagagaaggagaatcggaagcagctcaggtttggta

SEQ ID NO: 184760 - DNA, 122 bp, Homo sapiens
cctcagacaaatgcaggttccacctgacggagtgcagacatgttagtgtgtgtgtgcgcacgtgtgtgcatgtgtgagcatgtgcccgtctctgtgtgtgtttagactaaagaccccagagg

SEQ ID NO: 184761 - DNA, 122 bp, Homo sapiens
ttttttgttaagcatttttccagaatcaaaggccaccaagcacctccctccacattcctacgtctcagtggtggcggctgagtggtggagggaagatactcaaagtcatagagagagggctt

SEQ ID NO: 184762 - DNA, 122 bp, Homo sapiens
cctcctccctctcccggcgcccgaaaggatcattgttagccgcccccgccccgcccaccccggctgtttatttatgcacacgtcactgggccggccccgccctccggcatctcattaaggca

SEQ ID NO: 184763 - DNA, 122 bp, Homo sapiens
gagaccactcatcgcgagctcgcctctcccgcctccgcccctcagcgtcctccagacttccgccttgctcctgggagggtgatgtctcatcacacagggaccagccttgcccaatccgtcct

SEQ ID NO: 184764 - DNA, 122 bp, Homo sapiens
cctgcgctatggccgccaagcgccgctggtgctgggccgtaagctcagcacgggcctgttcggcctcctggcactgcgacagataccgagctgacagctcttcgttctctctccggagccgc

SEQ ID NO: 184765 - DNA, 122 bp, Homo sapiens
tctcgttgagaaatcagcttgatgggaaggacccaccccttaagtattcagcttgggggtcgggggcggatggtgatctctactgggaagatttctggctgggcagcaaggtggaggcaagg

SEQ ID NO: 184766 - DNA, 122 bp, Homo sapiens
cgcagagaaaatgcagcgatcacagggcccagggctgcatttcggaagccacaggcaagacgacagctcagctttgcagccgcacacggtcctgctgagatggaaaatgcagtgagcggcgg

SEQ ID NO: 184767 - DNA, 122 bp, Homo sapiens
aggactgaaaaaaaatctgatactagaatgatcagacacagattacaaagcaactatgatcgttcaatagccaagcttgaaaataaatgcagataataagaaactgcaaaacgatgaagcag

SEQ ID NO: 184768 - DNA, 122 bp, Homo sapiens
ctgagcagggtttagagcacagtgggcaggagggggagggtctggacttcagcagggcctcgtgctagatgatgccatattgggccagctcgtgcagctccaggtggttgaaggcctcccaa

SEQ ID NO: 184769 - DNA, 122 bp, Homo sapiens
gccccttaaagtgatctccagttgtccgaaaggcccgccagggatctggcgaaacgggggcgggggagggctcagggaagaggagaagctgagcccgggccccagaagctcggtggcgaaac

SEQ ID NO: 184770 - DNA, 122 bp, Homo sapiens
gctgcccggagggcgggcgtctagggccggagggtggagctgggggttcgggggtgtacccgggggcgggaggctggacaaggacggctctaaattggctggaggggcccgtcggcggcgaa

SEQ ID NO: 184771 - DNA, 122 bp, Homo sapiens
cctgctcactcaccacctgccactttgcagagcctccaagggcgtcctgtttctaagggccgggcggactgtgccttccagctctgccaccatcttggccagcatcaggcagctccccattg

SEQ ID NO: 184772 - DNA, 122 bp, Homo sapiens
ccaaacccggggcccgggcaattctccctgtgtccatgcactggtgggactgtgactgggcggcacctcccctcccgggatgggtctgtgtccctaggccctgggtctcggtggcctttgat

SEQ ID NO: 184773 - DNA, 122 bp, Homo sapiens
aagtaaggggtcgggctggaaaggatctcaaggggtcagagtttgagccgccgaggcgcgcgagccccagcactcctaggcagctgcatccgccccggaagatcccctggggccctgcgctg

SEQ ID NO: 184774 - DNA, 122 bp, Homo sapiens
ttgggggcgggtggggagcggacgaagtgggggcggcctttggagacgatggcaatttaccgccttaggcgggcaagcgcacgagtcccgggaaccctaaacaggttggggtgccccttggg

SEQ ID NO: 184775 - DNA, 122 bp, Homo sapiens
aagatggcgagcggcggcagcgggggggtgtcagtacctgcgctgtggagtgaagtgaaccggtatggccagaacggcgacttcacgcgcgctctcaagaccgtcaataagagtaagtgtcg

SEQ ID NO: 184776 - DNA, 122 bp, Homo sapiens
cgccctctgaccccgcagcgtcgtggctagagtagggtctggagagagctcccactgtggcgagtcctgtcgttggattcccgcggcgccccgtaaggctccgccccggcggtgctaccaaa

SEQ ID NO: 184777 - DNA, 122 bp, Homo sapiens
agcaagcactacttttccgatcttaattattccagagatgcttgaccaatttactgggtacgtgggcagttttctgattgctgtttccacactctgctttcccacagagagatttccgcagt

SEQ ID NO: 184778 - DNA, 122 bp, Homo sapiens
agcagtgccttccacgataggtcggcgggagaatggagtggatgctgcgccgaagctgcccgcaggggacactcggtggagacctggcccgcagtcaggaggagctcgcccagcccggcccg

SEQ ID NO: 184779 - DNA, 122 bp, Homo sapiens
aatagctttaaaaccactaaaggtaaacattcttaaatacccttgaagttaagtagatgccggaattgctgagatggctgccaagccaatgttggagaatttatttttttgtacagattata

SEQ ID NO: 184780 - DNA, 122 bp, Homo sapiens
gaagggaaaagctgtcccttggtgtcattgtcagtctgcattatccaaaggaggctagcccgtttggactcttaactgttgtttagcacttcctgtgtcagtctggaggcttcctgttatgc

SEQ ID NO: 184781 - DNA, 122 bp, Homo sapiens
gcttttcaaagcgctcacatggccctggaccaagcgatttcaaagggtttctgcggaggacgcatcggggagcaaactctttgactgtaggattaagactctgggcacttggggaattcgtc

SEQ ID NO: 184782 - DNA, 122 bp, Homo sapiens
attttttgaaaatcagcagcacctattgacaataaacagaagattataaaaatttcaagtcgaagagcatcattttttaaaagttttctaggggttggcaaatgtttgctaggaagggctag

SEQ ID NO: 184783 - DNA, 122 bp, Homo sapiens
tcatctaacgttttattttcctgacttattcgtctttgatatgctacagaaaacccctctcgcccagtggctgttttctctctgtctcttaagataatttaggaacagaagccttgactttt

SEQ ID NO: 184784 - DNA, 122 bp, Homo sapiens
cgcccgcacctgagatctgcaccgcctggaagcggggcacgcaggccaggaagccggcgacgctctcgcagccctcgggaaaggtgaccaggcggctgtcaagcactcgcaggctggggttc

SEQ ID NO: 184785 - DNA, 122 bp, Homo sapiens
acgagagagaaatgagatccagaagggtctgggcttctgaatgtcactgtgagcaaacagcggtggagagaaaaggttcctttccatctttatgtgcagtgctgtctgtgcattgacttgtt

SEQ ID NO: 184786 - DNA, 122 bp, Homo sapiens
tttgatcccgccaccgggtgcgaccagccagagccgcagcgcccgggaacccatggccagcgcctccatagcagcggtgagaaccgtcgcgcgcaagtccttctccgccctcctcccccgga

SEQ ID NO: 184787 - DNA, 122 bp, Homo sapiens
agctggctttgtcacctgccgccttcacggtctgggtctgttgcacagctctcaagggcacgcgacctttgaccactgtcggccactctaccttggagtcactcagaagtactgctaaccag

SEQ ID NO: 184788 - DNA, 122 bp, Homo sapiens
gtgttcgcttttggcgcctgcacccagagggaggcgcgccgcctctttcagctcgacccgcggtctggccgcctcactctggccgggcccgtggattaccagagtcaggacacctacgagct

SEQ ID NO: 184789 - DNA, 122 bp, Homo sapiens
gggtggagtggggtggggggtgggggtcaagcatgtgcctcttccccacccagcggcagccggaagcagctgggcccacacacctctccatggactccagcgtgccatccaggctgcccagg

SEQ ID NO: 184790 - DNA, 122 bp, Homo sapiens
gtccagcctgggccgccgtcctgtatggcgtagagtcgatccccaggaaactagtcttgccgagtgcgctcctccgcaccttcgggcactagggccccaagatctctgcccttaggctggcc

SEQ ID NO: 184791 - DNA, 122 bp, Homo sapiens
ggaccgtatttgcaggcgctgagaaactttctcaacagtaagaaccaatcaggcgcagtgcgcaggcgccttcagtgggtcctgggtccgcctcttccgcccggtgcgggcgccgattggtc

SEQ ID NO: 184792 - DNA, 122 bp, Homo sapiens
ggcccgggcccgcggttccctttgcgacgcctccccgtgagtcgactgggccgtgggtatcgaggacaagcaaacagaaacccccactgcccaccgccgctgccgccgccaggaaggcgctt

SEQ ID NO: 184793 - DNA, 122 bp, Homo sapiens
tggtctcattaagatccctacaagagctctgccacaggagcttgctatgtggaaataatacgcctaatttaccagcaaaatagaagcagtccagtctgagattccattaggggatccctgtt

SEQ ID NO: 184794 - DNA, 122 bp, Homo sapiens
cacttgctgagctacgcctcggcctgtgtcaaccccctggtctactgcttcatgcaccgtcgctttcgccaggcctgcctggaaacttgcgctcgctgctgcccccggcctccacgagctcg

SEQ ID NO: 184795 - DNA, 122 bp, Homo sapiens
aatgactaccagcacacctcttgaaaccctgatttactgaacaccttagaagacaacacccggcctatcgttttggaagaaaaaaaagctgggcatcaaaggaacatgacacacatgcagag

SEQ ID NO: 184796 - DNA, 122 bp, Homo sapiens
cattctataactcactgcctgagattccttcctaacagacataggtcactggcttttgaacgtcattgctgagagaacaggaaagagtaaaatggagctgaaatctcagtgtttcactttgc

SEQ ID NO: 184797 - DNA, 122 bp, Homo sapiens
cctggcgcccttgtatccctgcgggcttcagcacccacatgcactgggtggtagtgatagcgagggttgtaaggccacgcggccagcgccacacacctcgtgccaccgtcctagcgcgctgc

SEQ ID NO: 184798 - DNA, 122 bp, Homo sapiens
tatgtgagcggcacggggctgcgcgagctgccggaggagatcgaggagctgcgcgagctgcgcatcctggcgctggacttcaacaagctcgagcgactgcctgacggcctgtgccgcctgcc

SEQ ID NO: 184799 - DNA, 122 bp, Homo sapiens
tatcgtgagctgcatatgcaagggatctaggttgcacactccttatgagattctaatacacgatgatctgtcacacggcagtgaccagcacggacacgcatcccttcccgtatgaagcttac

SEQ ID NO: 184800 - DNA, 122 bp, Homo sapiens
tgaaggcttcggatgggaagtttgcgttggagtccaacacccgacaggaaccccagttaacgcctccgcatggccaggggcagagttcttgacacctgtagcttaatcaacgcaggtggaga

SEQ ID NO: 184801 - DNA, 122 bp, Homo sapiens
tgacctcgtgatccgcccgcctcagcctcgcaaagtgctggaattacaggcgtgaaccaccgcgtctggccgtattgtctcatttaatcctcacaacagtcttatggaatgggtgctgctat

SEQ ID NO: 184802 - DNA, 122 bp, Homo sapiens
cgctagcgaggaggcgggcgagccgggtccccgggagcgcagaggaggctcggaggggggcggagagcggcggggcgggagggaggcgcgggtcgcggggagggaaagcccggccgggtctg

SEQ ID NO: 184803 - DNA, 122 bp, Homo sapiens
ccgaggcccctcctcagcgggtgtgtcttcatttcctcaagctccctccttaacagctaacgccttcgcgagaggagctgagggccctatgcggaataattaagatgccttctttagggtct

SEQ ID NO: 184804 - DNA, 122 bp, Homo sapiens
gtctctactaaaaatacaaaaatcagccagatgtggcacgcacctataattccacctactcgggaggctgaagcagaattgcttgaacccgagaggcggaggttgcagtgagccgccgagat

SEQ ID NO: 184805 - DNA, 122 bp, Homo sapiens
ccgctttgcgggcggcttctgatctcttgcggacagctcagattagtggctcgaggccgccgcccccgcagcgccccagccctactgcgccgaatcccctcctcccagcccccagcccccag

SEQ ID NO: 184806 - DNA, 122 bp, Homo sapiens
tgctcatccctagtcccaggaagattcggcgcagcgagcaggtgccaaggtcgggctcagcgatcatgaggaaggtggtggcatagcacaggaagatgcctgccagcagcacgtagctcagt

SEQ ID NO: 184807 - DNA, 122 bp, Homo sapiens
aagagcaaaggcaacagcaagaccagcgggttcttgcaacactgtgaggggcagccagggcggccccaataaagcccttgaatactttgagattcctttcttgcctatgcgcacatctccat

SEQ ID NO: 184808 - DNA, 122 bp, Homo sapiens
gagtgaaacaacgtctggaaaaaaaaaaaaacttgcggaaaagatgaaatgaccaagactcgcgcagtgctgcccgtcaggctctcaactagtcgctcttcacatctgattcatgtcttaaa

SEQ ID NO: 184809 - DNA, 122 bp, Homo sapiens
gcagaggctcgggctagcggggcccctgacgcgtccggcgttgaccacggctggtgggcgcggggagggcgaccaagggactacagcgttagggcgtccagccgggaggccggggctgggcg

SEQ ID NO: 184810 - DNA, 122 bp, Homo sapiens
ttatagtcaccggagactcctttacctatccctatctgttagggttttcagatgtcctctcgctgggtttatatttgaaggtatagaatctgggaaagggtggggtgcaagctaaccaaata

SEQ ID NO: 184811 - DNA, 122 bp, Homo sapiens
tttgtgtctagctcggagattgtaaacgcaccaatcagcgccctgtcaaaacagaccactcggctctaccaatcagcaggatgtgcgtggggccggataagagaataaaagcaggctgccgg

SEQ ID NO: 184812 - DNA, 122 bp, Homo sapiens
caccccgaggcgggacaagccaccgccaccccgggcaactggaacccgccgggcagaagacgggcgtcaatagaatggcctccccagccgtccccacgccccaatccgaggcccggggaggg

SEQ ID NO: 184813 - DNA, 122 bp, Homo sapiens
attagagatccaggggggggatggggggttggggacgacactcacacagagagactggaacgcactgacatacacactcatggccaaacacaggggtgatgcatgcacacgtacacacagta

SEQ ID NO: 184814 - DNA, 122 bp, Homo sapiens
ggggaaaggaaaaaaaaaaaaaaaaaaaaaaaaaaaaaaaagcccgcaaagtgcgaagcgcgcttgcgcaagagccgtcgcctgcccttcgaccggaaatcagccgcccctcccaccttcga

SEQ ID NO: 184815 - DNA, 122 bp, Homo sapiens
ctggacaatgctgcagttcaattctgtgcccgcaaagtctctgctgtttcaggagatgttcgcaaagcactggatgtttgcaggtgagttacggctctgttgcattcttttattaaaaaaaa

SEQ ID NO: 184816 - DNA, 122 bp, Homo sapiens
gtgtaacttatcagggttccttatttagcggccctagccatataccaatacctaagtcttcgttaataaccccaactgcatcattactgcagcctactcatgccctctctggtgatggggaa

SEQ ID NO: 184817 - DNA, 122 bp, Homo sapiens
cacgggcgtcatctatagtccggaggacagccccagggcagaggcctctggtgagtgccccgccgccttaccagactacaaactaaaccagtgtttaagtcaaggtgtctgggttttcaccg

SEQ ID NO: 184818 - DNA, 122 bp, Homo sapiens
aatctcagacagctctcttcattatgattatcagtgttaatgccatgtcattaatcctcacgagtatatggaggcctcacactgaatgaatggggaaggtcaccatggaaacatctgtctcc

SEQ ID NO: 184819 - DNA, 122 bp, Homo sapiens
gagagaagagcatgaaagaagcggttgggattagccttcttcagtaacataccctggggtcgtcctttggaatttcatggttattgtggtgtatgtgaccacatttagagtgcactgcctca

SEQ ID NO: 184820 - DNA, 122 bp, Homo sapiens
ctctctgggccttattatacaggaaaagggaaggggcgaagatccgggctcgggttctcccggggaagcgaacccagaggcgaccccaaactcagtagttgccgcccagctcggggacttga

SEQ ID NO: 184821 - DNA, 122 bp, Homo sapiens
cggaagcaaatgcgacccggtttcaccatatcaacactgccgcctccgcgcacccgcctccgtctgcgcatgctcatacacgttcacacccgagacaccagcgcccccccgggacctcccct

SEQ ID NO: 184822 - DNA, 122 bp, Homo sapiens
agtctggaggaatcctcgctgctaaggctgacatcagggcggtgtgatttctgcaacgcccggagacgtcaaggcagagtctgcagggaggaaaaccgacctggtgtcttcactgccatcta

SEQ ID NO: 184823 - DNA, 122 bp, Homo sapiens
gccccgccggccacggtgaggcgcgcgaggcgtgtgctgccagcttctctcttccttccccggtccgccttcgcgcccttaaggagacagtccctgggagtttctgcctttggtctccagtt

SEQ ID NO: 184824 - DNA, 122 bp, Homo sapiens
cttcccctgccccctccctgctttctcccggcctctgtagtcttcctgctcctccacctacgtggctgccttgggccccatgcagctcctcccccgggatgccccatgctctgttctgtgac

SEQ ID NO: 184825 - DNA, 122 bp, Homo sapiens
tacttcacgatttgcgtgaacttttttgtcttctggctgcggattcgagtgtttcgaccgcgaattatgagggagtggaaaccttcagggacagtaaaaagcctaaatctttcctcttttgg

SEQ ID NO: 184826 - DNA, 122 bp, Homo sapiens
ttcattagacactgaaacttggaatatgattccatgattctccggagtcgggttttcaaacgtcaaaacactcaaggtattcttgtttctttgttttgtttttccatgctctgtaagcaccc

SEQ ID NO: 184827 - DNA, 122 bp, Homo sapiens
tcctacaaagcagaggacgaaattagccactgctccagagtgagcacatatcttcactcccgctccctccaccaaactgactgtaactccagtggaacaccacatctctagtctctaccaga

SEQ ID NO: 184828 - DNA, 122 bp, Homo sapiens
cactaaacaagacgctgcagcgtttcaaattaaggggccaaccttaggcacacacacgaccgaagagcagccgctgagctcatgaaaaacctgttcgcgcagaaaccgctctgtgccccgtg

SEQ ID NO: 184829 - DNA, 122 bp, Homo sapiens
cgcaatcgagcgccgatggcacggatgcgaggcggggaaggccgaaccgaagggcagagccgcgccggcggcccgaggggaccgcgctgggaggggctgccgcgcagcgcggggggactggg

SEQ ID NO: 184830 - DNA, 122 bp, Homo sapiens
gcacgtgaggctgggaccaggggtggcactgacacggctggggagcccactcccgaggttcgacccggggatgtgcacagccacattccaaaggcgcacgggatgagatcagcccgggtgac

SEQ ID NO: 184831 - DNA, 122 bp, Homo sapiens
atatctgtgagcagctgcaaaggggattttactagatgacatcctgctgggcacactttacgccagtcctgaatgtgtaatagaaatctgcagtttaatgagtaagtttctcatattcagtt

SEQ ID NO: 184832 - DNA, 122 bp, Homo sapiens
atggcgttgagcatcttattatgtattcattggccacttgtatgtcttctatggtgaaatcgatgttcaaatcttttgctcatttgttggggaagggaggcagttgtttgtcttattattga

SEQ ID NO: 184833 - DNA, 122 bp, Homo sapiens
ctgcaggccagggaaatggaaagcgagaacagaacagtgataagagaattcatcctccttcgtttgacccagtttcgagatatttagctcctggtctttgtgctagttttaatattctactt

SEQ ID NO: 184834 - DNA, 122 bp, Homo sapiens
gcgaaaaggccaccgcggtgttgggggggggcggtccgcgagtccaggaccgaggggtggcgactggcgctggggaactcggagcccatcctgctggcactgcggcctctctcgccgcagcg

SEQ ID NO: 184835 - DNA, 122 bp, Homo sapiens
gaggccaaaatctccgcaggttgctaggggccgggccagggctcggtgggcggggctgaccgcgggaactgggccagggtatcacatcctccagggaatgtttggctgcgacctggggcccg

SEQ ID NO: 184836 - DNA, 122 bp, Homo sapiens
tccaggcacagacatggtgggaacagctgggaggaggtgagtgcctccaggccccagcctcggtcaaccccaccctgtccagcttgctcctcatcagctagacgagggagatagcaggatgc

SEQ ID NO: 184837 - DNA, 122 bp, Homo sapiens
gtgtggttatcagcagggaatgggatcaaagtttcagtccaacaagtccaggtaattgcccgaaccacactgaaaactctcttcagggtcctctaaaacactctatgttgtatcttttgcac

SEQ ID NO: 184838 - DNA, 122 bp, Homo sapiens
ccaaaaacccgtctcgcaggtgcatgcgctgcttctccccacgggagttgatggggatgacgccgatgtccaccacgaccaccactccgacgatcaggtagtgctcctccaggaccacgttg

SEQ ID NO: 184839 - DNA, 122 bp, Homo sapiens
tgtctcaaaaacgctttcctggagaagtccaaagagaacatcaaaacaaatgtgaaaatacgggaacccgagaggtgagatgtgggagatctcacaccaatacttcgatttctaaataaatg

SEQ ID NO: 184840 - DNA, 122 bp, Homo sapiens
gggtcgctccacagccccctccgcccttcccctccacccctccgcgtctcggcctggctccggaggggtgaaggaatgtttatagcctgactcaagttcaatgacaaaaacctgcctggaat

SEQ ID NO: 184841 - DNA, 122 bp, Homo sapiens
gcattaccagatgagtgaaactaccatgaccaaaaatttcggttcacattacacccattccgagaaaggcacaccacacatgaccaggacgacaggattgacagtgatcctcgctaggtgag

SEQ ID NO: 184842 - DNA, 122 bp, Homo sapiens
tctcatttgaaagacgaggaaactgtgagatagagatgagaggggactggcccaaggacacgcagctaattcctgactaagctgggacttcccactgtggcctccccatcaccctcattcag

SEQ ID NO: 184843 - DNA, 122 bp, Homo sapiens
tgttagcccttatttcctactattgacttctaaagaggcttccatgccaaacatagccatcgttatagggaaaccccaagtctagagagatggctccatctagcagtaggtacctactcctt

SEQ ID NO: 184844 - DNA, 122 bp, Homo sapiens
cgacggaaacgacacacctgaggggacccggcaggagcactggcacagacagcagacacgcgcttcaggcccacatggcgcaggaagaggcggggctggcggaagaggcggggctggcggaa

SEQ ID NO: 184845 - DNA, 122 bp, Homo sapiens
gtcttatcagaaacaaaaattgcagctatttcaggaagacagttctaattttggggtttccggagaaggggatctcaggatctcattacaattttagcagcccccaagtgaaaagaaattct

SEQ ID NO: 184846 - DNA, 122 bp, Homo sapiens
gacccaggccggcaggcaccctcgtctgggctacggtgtaggcaggcctggggtgagacccggtcagcctcctgacgcggaggctggaggctggtctcctggggccggcacccacgtggcac

SEQ ID NO: 184847 - DNA, 122 bp, Homo sapiens
ccaacgagagccgggcctgtggcgtgaacaaactttacttcagcgcaggggcggaggaaccgggctggaggcttctcccccgggcctctgctctcctccacctgccagtgctcagcctccgc

SEQ ID NO: 184848 - DNA, 122 bp, Homo sapiens
acgggaaaagttttcttcagtgacccaaacaagcaatagtgttaattcggttgcgtttgtcggttttgtttcggtgggtaccggagtagccagtgcccttccttccgccagcctcggggagc

SEQ ID NO: 184849 - DNA, 122 bp, Homo sapiens
ctaacatggaggggacccagccctagactggggtggaggatcaagtgtctgctgttcatgcgtttggtgctgaattggaggctgtggtttctacatcccctcgcaccccctcccccgcaaaa

SEQ ID NO: 184850 - DNA, 122 bp, Homo sapiens
cgacggacacctgtgctcggcaactcaggaccctcaggtggggccgtccccaaggctcaccgtccctgtggccctgggcaggttccccaccacggacaaggaaggcacagacaagcgaggca

SEQ ID NO: 184851 - DNA, 122 bp, Homo sapiens
ctccgtaccaatgcagccccgggacacttccgtgttgaacgagtccctttaaccagatggcggggccgggccgtcactcaacgccattccgccaccaaggccgcgctacgctctccgcgagc

SEQ ID NO: 184852 - DNA, 122 bp, Homo sapiens
ggcagccacgtgggctgcggactgtgtttgtggactacatctcccaaagtgctccgcaggcgcgcccacaggaagtcgccggagcatctcccgcctccacgccgaggcgaagaggttctatc

SEQ ID NO: 184853 - DNA, 122 bp, Homo sapiens
tcctttcaaaactaattttaaccttgacattcttgggttgaactgaggtcaaaaggacatcgtatttgatctccaaggtctgtgagtgttcagtgagaaggcttcactgtgctagttcttgt

SEQ ID NO: 184854 - DNA, 122 bp, Homo sapiens
gggcccgccgccggcgagatggacacctgagatgctgtgctgcgccctgcctcggccttgcgcctgtgtaggggcagctcggcctctggtcgccttggggagaccaaaagtcggacaggaaa

SEQ ID NO: 184855 - DNA, 122 bp, Homo sapiens
gagccgccgcgctccctgccgtccgcgcagtctggcctcgctcggggccactcctcgtagcgctggagctttacaaaatattaataataaagaaggcagaggagaaaaaagaaagccttcgc

SEQ ID NO: 184856 - DNA, 122 bp, Homo sapiens
aagccctttgttccctatggaagaaggatctgcagaagtggacagtgtttttgcctgtcacgcagtggcatttagttagctcctgcacatctaccccactataggccaagggtcggggcttt

SEQ ID NO: 184857 - DNA, 122 bp, Homo sapiens
ggggggcggatgcgtgggggcgtctccgaggtgggttttcaggttgcccagccagggggccggcgggacctaccgcggactcgcgcatttacgttcgcaagaagtgaatcaccaaacgtgcc

SEQ ID NO: 184858 - DNA, 122 bp, Homo sapiens
ggcacctcgcgtgtgagctcgccccggagcgcggcccacctgtgccagtgcgcacgcgcacgtgccaattcgcacctgagggttccacctgccagcgcggggacttgcccgcgttctgtccc

SEQ ID NO: 184859 - DNA, 122 bp, Homo sapiens
ctccgcccctcggatcccacggggtcccttgcggccctcccactcctcgcaccgttggatcgctttgctcacggcgctatctctcgataaagttgttgttgcggcttccgccgcgggtggaa

SEQ ID NO: 184860 - DNA, 122 bp, Homo sapiens
gccctcggccactatgcctcagaacccgggcgggaacgggccggaacaagggagggggcgcgttgccatgacgaccccgggagcccccgagtcccaggcagtccccgcccatcctgggttcg

SEQ ID NO: 184861 - DNA, 122 bp, Homo sapiens
cagcattcaccccgagtctgctctgaggccagacatcccctcataggccacctcccatgccgaaaccctacacacccacggggctgagaggagccagggctgccactcaggcctcggcaccg

SEQ ID NO: 184862 - DNA, 122 bp, Homo sapiens
aggcaggaggaaggaagaggaagcgccagcctgaggtggtcatgaactgcatactcagaccgtggctcatggggaattggttgccattgaccacgtgaagcagctccagcctccacgccagt

SEQ ID NO: 184863 - DNA, 122 bp, Homo sapiens
tgccctgtggtgaccctgccaggtggctgggtcaggatcttccctgtcaggcccaggcctcgtttgcatgatgatgggagtagcttcccacggtctgggctctccttccccatgttctcctg

SEQ ID NO: 184864 - DNA, 122 bp, Homo sapiens
gggcgcgagggcaaagggctcccttcctggcaggctgcggtctgcaggccttggctgcggcgaggtcagcgcttgtgcagcagcccccgctgcaacggctcccggttaagaacaatgctgct

SEQ ID NO: 184865 - DNA, 122 bp, Homo sapiens
ggaaagagcagcttcccttccctttcctttttctcttttgtgacagtgctgcccgccgttcgcctgtttattttcctccctgcggcggtggcatgctgcttttgttgtgcatgtgttccgct

SEQ ID NO: 184866 - DNA, 122 bp, Homo sapiens
atgggtggggataaagggtctggaggacacctggctcagggactgaggtccttggcacagcgccctgccctgtgcccgttggttgcaggctaacggccggcgccccactctcggcctgacca

SEQ ID NO: 184867 - DNA, 122 bp, Homo sapiens
ctgggttcgacctgggggggtcttgacttctgcagtattttaatgtccttcctcccaccccgctgctggcgaagcgcacgcggctgtcctcagctctcctcccgcggtctgcctccggtgac

SEQ ID NO: 184868 - DNA, 122 bp, Homo sapiens
tcatgagtgggtgtgttagtgtgtgtgcctgagggaatcaacacacaagtctgctagctacgtgtgtcttcttgtatgtctttatgtatctgtggggatgaatccctgtatctattatctct

SEQ ID NO: 184869 - DNA, 122 bp, Homo sapiens
cccgcccctatgtggcatagctcgagctccgcctgttccacttggtgcggggagggttgacggggcaaccccaggggagcttaattttcatttcactatcgtgggtaacgatgggcaattta

SEQ ID NO: 184870 - DNA, 122 bp, Homo sapiens
cgcacttggaggcccttttccaggttagatggttgctaacctcggagcagtctattttcccgccttttccgcgcccagcagcagcttcctttgcccctcccaacttccaccctgcgcgcagt

SEQ ID NO: 184871 - DNA, 122 bp, Homo sapiens
cgcagctccccgggtgggtgagggatgccctggactggggatagccaggtgggagtccgtcgctgtgtggcctgtggtctcggagtctgttctcctggagtctcgcatttgcacccccttct

SEQ ID NO: 184872 - DNA, 122 bp, Homo sapiens
cctggcagcgagcgggcgcggctgcgaggtgcgcccggggacgtggagacgtgcgtggagcgccccctggcggtccattagccgccggcctttcagaacccttgatcagcaggcggtccacc

SEQ ID NO: 184873 - DNA, 122 bp, Homo sapiens
ccgtgtcaactgatagtgagccaaacagatgtatggttaatgtctaaactgggacacttgcgagggtgaaaaggacacaatttgtaatgtatatactgatccgctagtgtctatcagtcagt

SEQ ID NO: 184874 - DNA, 122 bp, Homo sapiens
atcttcccctttatcaagaaagcaaaatatttcccacaacctttctcccctccagtcttccgtttaggtcttattggccaacactggattacgtggccatctctagctacaagagagactag

SEQ ID NO: 184875 - DNA, 122 bp, Homo sapiens
ggaggaaatgttacctgccttagctgagtgggcagctgtggggtcgaagatggcactgcacgtggagcatggagcaatgtgagaggcacacagtgcgcctgccgcagtgacagtggcagatc

SEQ ID NO: 184876 - DNA, 122 bp, Homo sapiens
ttcttcgggctggtgctggcactcatcggcctcatcttcctcatggtgctctacctaaaccgccgcggcatccagcgctggatgcgcaacctgcgcgaggcgtgccgggaccagatggaggg

SEQ ID NO: 184877 - DNA, 122 bp, Homo sapiens
tatctatttacatcaaatgagtacagctactgtgcagagtgcggaaagtgaagcagcattcgaggtccaaagctccagcaggagagaagcaatgctttctgtgaatgagatacaggccgccg

SEQ ID NO: 184878 - DNA, 122 bp, Homo sapiens
agcaaggaagaaggctggcaggtagtaggagtcacagtcaggaaggaagtactgctagttcgtatccagtctaggtctctggacaattgacccctttttgggtaggaggatttgccagcatt

SEQ ID NO: 184879 - DNA, 122 bp, Homo sapiens
gctgctcctgctcctgtgctggggcccaggtgagcggggcgatgccaggctgattgatagcggcaccaggggttggccccatgtggcgcttccatggtgcccggggagagcgatcggtgatg

SEQ ID NO: 184880 - DNA, 122 bp, Homo sapiens
cttatgatgttgatgagtcaatggtctagagccttagtaatatgtctttttgtggtagtacggaccgtatctgtccactaagaaatagcctgtgtaagccatatacacatgaacaatttatg

SEQ ID NO: 184881 - DNA, 122 bp, Homo sapiens
gcagctggcctactcccagtcggccgacccctactcgcatctgggggaagcgtacgccgccgccatcaaccccctgcaccagccggcgcccacaggcagccagcagcaggcctggcccggcc

SEQ ID NO: 184882 - DNA, 122 bp, Homo sapiens
ccgggccgcccgcgccgtctgtcccaagagctcctcctggacatccgcttgactctccgtcgtctccaattggccgtcggggaacggaagccgaagcaaactagtgaacccggaagtgcttc

SEQ ID NO: 184883 - DNA, 122 bp, Homo sapiens
tttgatgaaagcgatatatgcacagatctatggagctaaatggaccctaaatagaagaaacgtgaagaaaatgacaccaagggatatcataatcgaagtgtttaaagtcagtaataaaagaa

SEQ ID NO: 184884 - DNA, 122 bp, Homo sapiens
ggacccttcgtgtccggtggttgctgttgcttggcctggtgggcccagtcctcggtgcggcgcggccaggtgggtgtccgcgccccgggtcggttgggacggctgcttcctagggacggggc

SEQ ID NO: 184885 - DNA, 122 bp, Homo sapiens
gcccatgagcaggaggtgcttgacgcagtaacaggagtcagcccctttcaggatgaatcgcgattggtcgcccactgttgtcaggctcctccgatgaggagcagcccccagagagagaggac

SEQ ID NO: 184886 - DNA, 122 bp, Homo sapiens
acaggcatggggtttctttttggggtgatagaatgttccaaaattgactggggtaatggccgtacaactttgtgaatacagtaaaaaacaatgaattgccaatgagtgaattttatggtatg

SEQ ID NO: 184887 - DNA, 122 bp, Homo sapiens
ggaagtttagaaggcaatttctgtaatgcagaaaagtctgtaccactgacctcccagccacgccacaagatatttctggtctgaattctttctatgtcttttctcagagccagaagtcttgg

SEQ ID NO: 184888 - DNA, 122 bp, Homo sapiens
catcaccatgctcctctagcacaaacgcccttgtcccctgcctgcctttcagaggagactcgctggtccctgctgtgctgctcagagagtttactagggttgggcaggcaccagggctttta

SEQ ID NO: 184889 - DNA, 122 bp, Homo sapiens
aaactcacctctgccgccggctccacctccgctcacattccggccccgccgccttccccccgccccccccaggccctttgttttgattcccgactccgcagctcccgccgccgccgccaagc

SEQ ID NO: 184890 - DNA, 122 bp, Homo sapiens
gctgagaggggccgcggggcgcaggcgaggcgcgggtaggggaagcgggcgcacggcaggcgaggtggtgagctcgggagcctcaccttgctgcacttgatgcacttgtaggagccgccgcc

SEQ ID NO: 184891 - DNA, 122 bp, Homo sapiens
tcaggtgcgctcagcgtgtgtgtgcttgacgcgtgtgcacacacacatgtgacggtgtgccgtgggtctaggagtgttcacagtgcctgtccagagtgcgtccatagggcctgtccacgggg

SEQ ID NO: 184892 - DNA, 122 bp, Homo sapiens
tcctgggggtggggctgtaggggaaagtgctaaagccgctgaggtaagaggccgaggggtcgagggccctcgggagcttggtgaaaagggagttaacccccaggatcctacctgcagggact

SEQ ID NO: 184893 - DNA, 122 bp, Homo sapiens
tccactgttgtgactacacacacaagcccgggacacccacttgttagctcaggaaccaggcggccagcagatatctgctcagatgaacgtccagagactcaatcctctggcattctcaggtt

SEQ ID NO: 184894 - DNA, 122 bp, Homo sapiens
ctggggaaggacacgggtgttctgggagtgtccgcgtgagatagtggcggcgtgagaggccgggcgccgggaccctgcggggacagccctcctaatgcaccggccgcacctgcaggaggccc

SEQ ID NO: 184895 - DNA, 122 bp, Homo sapiens
ccggaacgcgcctctgtgggagaagcaggcggctgcggtgtcccttttgccctaggctctcggttctcaggcctcggcgtgcggcgtgcgttcggcagttcagttgccagttggttcgttgg

SEQ ID NO: 184896 - DNA, 122 bp, Homo sapiens
cgtcagggcaagggcttgaatgagagcgagggtctgagcgaaaggaccagggcgcggcgccgaaagacggcaacaagcccatttgcacgggtgtggagagaagctgaacactgtgccacggg

SEQ ID NO: 184897 - DNA, 122 bp, Homo sapiens
ccagcaatgcctctgttatgaatcttctggtcatcagctttgacagatacttttccatcacgaggccgctcacgtaccgagccaaacgaacaacaaagagagccggtgtgatgatcggtctg

SEQ ID NO: 184898 - DNA, 122 bp, Homo sapiens
attgttacttcccctttggctttcccaccctacctgggtgccatgggtgcggcagggactcggattcgcccctatacggtccgtgtggtgggtcattcatacatgctcataaacatctgccc

SEQ ID NO: 184899 - DNA, 122 bp, Homo sapiens
ggttgtgcaggagcggactgtcctctgggaacatagaagcgcccccgactagagtaggggcggggagggagcgccggaggaggcaggttctgggccaaggggatgggggtgggggggaggta

SEQ ID NO: 184900 - DNA, 122 bp, Homo sapiens
tgcaggaagggcgtgggggaccgagagacaaagagcgcgcaggcaccgcctccgtccgggcggcccctttaagaagcgcgcgccagcttccagcccgccttgtatgcaaatgtagcggcgcg

SEQ ID NO: 184901 - DNA, 122 bp, Homo sapiens
accaaggaaggaattggccagctccacccagccagtcccccatagctccgccctcctcggcgggctaagagttaacagctgcacctgttgaggtatacctccagtcgccggcacctgtacct

SEQ ID NO: 184902 - DNA, 122 bp, Homo sapiens
agaaccgtggaacccagtgacaagtgttcagctcgattacgaccaacccgggcacttaaccgtgcaggaatgatggcaagcctttagcccgatttggagcagcaatgggcgcctcgctggat

SEQ ID NO: 184903 - DNA, 122 bp, Homo sapiens
gggcggggggccagcgggcttcgggcgctgtttgatggtcaggttcccttcctctgcaaacggcagcccttccccagagctgccccgagatgggggcgtcccctcagggcctggctcctcct

SEQ ID NO: 184904 - DNA, 122 bp, Homo sapiens
ccagtttggcgtgcagcttgaagacctgcaacagacagagccgggctcccgcgtgagggccgctcccagcctgatggcctttttcaagaggcaggaagggcctccacgggcgtgcagcgcga

SEQ ID NO: 184905 - DNA, 122 bp, Homo sapiens
agaggtggctggggcaaagcccagacagaaaggacatctcagaaatgaggatctgtactccgagagccggcctcaccctgccacatgttgtcagatgaccgggcgggccacttctctcgctg

SEQ ID NO: 184906 - DNA, 122 bp, Homo sapiens
acgggagctaattggtctgggtggtggaccgtcccggggggattggtccgagccagaggccggcgcggcgttgggcgcggctggggagctgtgcttctgagagtaggtttccctcgaaaggg

SEQ ID NO: 184907 - DNA, 122 bp, Homo sapiens
aatcccacggacccggatgcagataaaggcgcaggaaggaaccgcggcgtggctggcgggcgctgcgcatgcgcaccgcctttaggacgcctgaggtgagacgcgaggagttcggtccgagt

SEQ ID NO: 184908 - DNA, 122 bp, Homo sapiens
tactcctgggctgagaccaaaacgcaagccactgaaatagtcacgtaattatgacaccaacggtttcctattattactggaatgagatctgaagccccactgcctggaatccaatcctgtct

SEQ ID NO: 184909 - DNA, 122 bp, Homo sapiens
ggcccatggcctccttgtagctcagccgttccttggagatggggtctgtcaaatccttctcgtagctggactcgtcctgcaggagctgggccagctcttcactgatcatcccggagaggagg

SEQ ID NO: 184910 - DNA, 122 bp, Homo sapiens
ctgtggccaaatcatgcgtgggtgcctactacagatttatgaaaagcagagaagggccagcgtgtttgccttctaaggcgtattgttctgtagcgtcggcatcctcaggcgttcacgtaaat

SEQ ID NO: 184911 - DNA, 122 bp, Homo sapiens
tgtcaataaatgggcagatggcatcagctctgctggcaggagagttcagttaacccagtgcgggacattatttcaaattcatggtgcaccaggctgagccctttgttgggccattaaagcca

SEQ ID NO: 184912 - DNA, 122 bp, Homo sapiens
tgacctcgtgatccacctgcctcagcctcccaaagtgctgggattacaggcgtgagacatcgtgcccggccagtaagttgtttctttatctgccatcctgtaaactcaagaatttctgttag

SEQ ID NO: 184913 - DNA, 122 bp, Homo sapiens
tcagcccagaagtactggaaaagcagaagctggttctagggaaaacaatggtcccaactccgaagagtcgggggttgttatagagccctttcccagaaaacctgacacccgtgtctttagtc

SEQ ID NO: 184914 - DNA, 122 bp, Homo sapiens
aagtcacacagcatcaccaccaccacattctcttggttacagagggctggcccaacttagcgtggagaggactaccaggaggcatggttcattggtgccacctgggagcgtagctactgaga

SEQ ID NO: 184915 - DNA, 122 bp, Homo sapiens
ctccccgacgggcccgacgcgcccgcggacaggcagcagtacttgcggcaggaggtcctccgcagggctgaggccacggccgccagcaccagcaggtccctggccctcatgtacgagtccga

SEQ ID NO: 184916 - DNA, 122 bp, Homo sapiens
tggacaaagggcccagacgtgagcaaaggatggcagcaagcccggacccaagcgacgcggcgaaagcacagcgaccccaccctcgccaggtgcagagccatttccgcctccgagtcctgcgt

SEQ ID NO: 184917 - DNA, 122 bp, Homo sapiens
ttacggtgctgccctggctccggaatgctggggcctggggtcagaagttggcctggaggccgggtgcggtggctcacgcctgtaatcccagcactttgggaggccgaggtgggcggaccacc

SEQ ID NO: 184918 - DNA, 122 bp, Homo sapiens
cagcccagcaaactgaggcaggaggctgggtttcaggtcctgaccggctcagagagagggcggcttccagtctgggttcgtttctcgctgagaatgtactgtggatgcaaggttggtacggg

SEQ ID NO: 184919 - DNA, 122 bp, Homo sapiens
agctagtagcgcccccacccaacgccacctcggagactccggctccttctctctcaacttcgaacaatacaaagtgtgctaggagaagacaagatggcgcccagcaggaggagcggagaaag

SEQ ID NO: 184920 - DNA, 122 bp, Homo sapiens
aggggctaatggtgccgggtgggatacagcgcccccgatggtgtccttccctctggacttcgggaagaaccaatgagcactcactagagtgagaatagccctgagtggcacttggcatgacc

SEQ ID NO: 184921 - DNA, 122 bp, Homo sapiens
tccatctgaaaaggattttctgctaaagttgggtccatggccatccagcacctgtaaggccggcaggagcgtctgccctctactcagttaaagcctgaagtcgtttcctttcgatggccctt

SEQ ID NO: 184922 - DNA, 122 bp, Homo sapiens
cttctcagtcaagtctgccggatgtctttctttacctacccctcagttttccttaaaacgcgcacacaactctagagagtgttaagaataatgttacttggttaatgtgttatttattgagt

SEQ ID NO: 184923 - DNA, 122 bp, Homo sapiens
aggaggaaataccagaggagtcacattagaaatcaaccagacagactcgtacgtggttatcgctacttacacagcattaaatgcgggttgaagcagcacccgctccgtgtttcagacacgga

SEQ ID NO: 184924 - DNA, 122 bp, Homo sapiens
cattgaagatatgacactcacacttagcctgctccaagaaacgtgctgtggggacacgaacgatccagtcacagggatggcctctgaggaagacactgacagcgacgccgccatccagggct

SEQ ID NO: 184925 - DNA, 122 bp, Homo sapiens
gctgcgcggttgctgaggcatttccggggtgtcttccgaccaggattggaacagctactgcgctgcctctgtgggtcgcggaacattgccttgctcccagtgtgccactgcccctccctgat

SEQ ID NO: 184926 - DNA, 122 bp, Homo sapiens
cacagctgaggaagcccatccaccccttcaggggggcagtggtgggagtgattttcaccccgtttatctcttcaatatcagcaatttctgtgttcctaacagcaatggatgtcatgctgggt

SEQ ID NO: 184927 - DNA, 122 bp, Homo sapiens
gagaggaggaaggaggttcttcccggccccctcgggaagtgagagggagcgggtgtgatgcggagggcacctgggaggctttgcctgctaggtttcccagtcgtgcccctgcagatgtcaag

SEQ ID NO: 184928 - DNA, 122 bp, Homo sapiens
caacacgagaaaccaaagtgcactcttttattgggaagataactttcccaaggttcgcctcgccggagcaaacacgtggatcatgagaagtctcgagcccacccgcgcgtgttgttgtagag

SEQ ID NO: 184929 - DNA, 122 bp, Homo sapiens
atcataggtagggacataatccattgcattttttttttagcacagctttacagtaccttacgtatcaatgatctgaaaattaacttggcatattatgcccttgactcaaaaccattaagtta

SEQ ID NO: 184930 - DNA, 122 bp, Homo sapiens
tctcctctgcccccaacccacacccccaaatcagacaggccagatgtttgtgaaaactgccgtttccacaatcaaaagtacagcatttaccatagtttttatcaaagatttcaattcccctc

SEQ ID NO: 184931 - DNA, 122 bp, Homo sapiens
tcactggccaaagacaggcttgtgtgtgtgagagcagagccgggcaggctcctctggatgcggcctccagattaaacgtctcgtccgagaccactggatgagcgcagtggcaatggctagga

SEQ ID NO: 184932 - DNA, 122 bp, Homo sapiens
cagaagcagggtgcagctgggcgaggaaccccacgttggtagcttctcttctgggatggccgccccgcgccgcccactccggaatcctgtcccctccccggcgcgcccccgcccagctagcc

SEQ ID NO: 184933 - DNA, 122 bp, Homo sapiens
gtgtggggctctgaggcacgggccccggggagagcaacgtggggtgagcagccttcaccacgaggacgtcctgacgacagtgactctctctggctctgccaacctgaccacagcgatccagg

SEQ ID NO: 184934 - DNA, 122 bp, Homo sapiens
acgcggtgaggtgggggtttgcctgagacagtgtctctctctgtcccagatgaaggtcaccgtgtccaaagggggcgaccgggacagtgacgacgacagcgtcctcgaagccaccagctccc

SEQ ID NO: 184935 - DNA, 122 bp, Homo sapiens
gctcagagagtcacatgcagtcgctgctcaataaatgttcttccaagtagctttcagccacgaaagtttaacttggagaataatggggcatgtagagctctggattcacagtcagcctcttt

SEQ ID NO: 184936 - DNA, 122 bp, Homo sapiens
aatccagcgcacacgtgaaaacgccccggactgcggctgcgccgcttacccgcacacagacggttggcagaggaagaaagccttgtcacactaaaggagagacagcggatgttctgaacagt

SEQ ID NO: 184937 - DNA, 122 bp, Homo sapiens
gtgtgggctgaattgtgcctcttaaaatggtattatgtcctaatccctgatacctgtgaacgtggccatatttggaaatagggtctttgaaaatgcaagttaagggaggtctttagggtggg

SEQ ID NO: 184938 - DNA, 122 bp, Homo sapiens
gtgagtagatctcatttggccccctcgccccattcagagttcagaggctttgctgggaagcggccagtgctctctgggactcgtgagagggatttcggtggtcggtgagatgagagctgggt

SEQ ID NO: 184939 - DNA, 122 bp, Homo sapiens
tcctgggagccatctccaggagcagggatccgggcccagaacatctgtaaagtgctcaatcgctacctagatattaaggaaatactgcaaagccttcttggtcacacctgccctcgatttct

SEQ ID NO: 184940 - DNA, 122 bp, Homo sapiens
gggccccggagctgtgcttcagtcaggtcaagggagcatgggaaccaggactttcacctccgcccgggagattcttcggggcagatatatttagaaagcgtggattaatgattaatgattaa

SEQ ID NO: 184941 - DNA, 122 bp, Homo sapiens
cttgcagatcaacagcctggggaaactgccgacgctcaaggatggtgatttcatcttgaccgaaaggtgccctccttccctcacccctcaccgcatccggagcccatgtgaccttggctctc

SEQ ID NO: 184942 - DNA, 122 bp, Homo sapiens
cttccgcccggcgcgtgagaccctgggcggtgcaggggagcgttgacgacagacgtgggccgtgacgtcgccgcgccctgacgtccagccgactggcggcgcggtcgcccgggagaccggga

SEQ ID NO: 184943 - DNA, 122 bp, Homo sapiens
aaccaccttgctccctctggagtcagctttatctcctttcttcagtgagtctgtgaggctcgacttggatttcacctccctaacccacagcctagttactctctcaaagcagtaaggtgaag

SEQ ID NO: 184944 - DNA, 122 bp, Homo sapiens
cctcaccccatgtgctcaagggtacgccgctgagccgcctgccgccactgccatgctcggcgccctcagtgcagctcagctaccaacccagccaggatggtgccgagctgcggcctggtttt

SEQ ID NO: 184945 - DNA, 122 bp, Homo sapiens
gcacgctctcagttatgaggaatttcgtggactgttacatattttaaggctgtccgtgggcgctgccgagaaacaggaagtggcctcagtgacccctgcgcccggccgcgcggcttgttcgt

SEQ ID NO: 184946 - DNA, 122 bp, Homo sapiens
accttttgatccgcccgcctcagcctcccaaagtgctgggattacaggcgtgagccaccgcgattggcccatggatttacattttaaaaccacctctgactgtaggtgtgaaggatagacta

SEQ ID NO: 184947 - DNA, 122 bp, Homo sapiens
ggtcccgagtcaacaccgcggtctgagccgagagccgggtctggggtctgggcaggcctccgcaccgcacccacctaccgtgcttcctgtgcgccgccatgcgggaccctgccgcggacctc

SEQ ID NO: 184948 - DNA, 122 bp, Homo sapiens
tgctagtgaagagacaaagcacacccttgccccggcctggaggcgccgggagctcaaaggcggcagagaggaggaactagaaaagaaacttaggcctcccagaggacctgtgtgctgcccaa

SEQ ID NO: 184949 - DNA, 122 bp, Homo sapiens
ccctgggccaggctgcctgggggcgccccccagcccagccagccaggctctcaggccctgcgcctgcctcaggtctttcttgctgcagcatgctccagcatggcccccaccccagggacagg

SEQ ID NO: 184950 - DNA, 122 bp, Homo sapiens
caagtcagctaccttgggacctctaggatcttccgacatcccaaagctgtcttcccgtaccgcggagcccggaaggggctgtactttttcggcctctaagcactacggtggccgagcgagtt

SEQ ID NO: 184951 - DNA, 122 bp, Homo sapiens
tgttcctggcacccgcacacaagtgttcatacacgcatgcacacacacaggaagccctggcgctgcctgccttgctttttttccaccctggccccggccctagctccctcctggaggaccct

SEQ ID NO: 184952 - DNA, 122 bp, Homo sapiens
cgttgcctgcaaggatctaggtggtggggagcccaggcttccacccgaggccaccaagggcggtcccagcctggccctgccccctaccctgtgcctccacccctgcccttcctatgctccaa

SEQ ID NO: 184953 - DNA, 122 bp, Homo sapiens
caacacttcccttttctgctgtttgaatcatctgcaacttcacagggttagtaataaagtcggctgacgggcagatctcatcctgaccctggcaatagtcactcttacctaaggcaactgac

SEQ ID NO: 184954 - DNA, 122 bp, Homo sapiens
gccaacatggcgaaaccccgtagctactaaacatacaaatattagccgggcatggtggcacgcaccagtaatcccagctactcgggaggctgaggcaggagactcgcttgaacccgggaggt

SEQ ID NO: 184955 - DNA, 122 bp, Homo sapiens
tagcctctgtccctaccctcacttatcaaattcctgatccaggcctggcgcggtggctcacgccggtaatcccaacactttgggaggctgaggcgggaggatcacctgaggtcaggagtttg

SEQ ID NO: 184956 - DNA, 122 bp, Homo sapiens
aactgcccatgtgcaccaggcagcgggagggacagccattgccaggttgccaggctgtcccgtgctttctgtgtctctgtgtcaagagggaatgaagtggaaaaaccagcagagcagcgtgc

SEQ ID NO: 184957 - DNA, 122 bp, Homo sapiens
ggaataatgagtgtctgtcaggccgtccccgggtgactgggcggggcggggcggaggcggcgcgggaggcgggggtggcgggggaagggcgcagggcggggtgcgtgtttgcgcgagtgact

SEQ ID NO: 184958 - DNA, 122 bp, Homo sapiens
gcggtgcctcctgggtgttgtagtttgcttccttggcgagaggccttcgggctggctggacgccggggccttgggaactacgcctcccagcgcgccccgcgcgagagcccaggtcgcctgcc

SEQ ID NO: 184959 - DNA, 122 bp, Homo sapiens
ctacggtttgtcacggtttgaacgcaagcgcagggcctggggcgggtgcaggtggagggtcggcctctttctgcccttgggaacgcccctttctggatgtggaccggcgaggcggtctctcc

SEQ ID NO: 184960 - DNA, 122 bp, Homo sapiens
ctcccactatctcagcgatgggcacgcgagcgccagcccgggcgaccgcgggggaagaagcggtccacgccacctcaggcccccgccccaggctctgccagctgggggtccaccgcccgccc

SEQ ID NO: 184961 - DNA, 122 bp, Homo sapiens
gccgccggctccccaaggcggaagcccgagccgcgcgtcatctgcacgcgccggaagccacgagccgcatttcctgccgcgaggctgagtgtctccagttcctaccggcccggcgaccccgc

SEQ ID NO: 184962 - DNA, 122 bp, Homo sapiens
ctttctcccatagttgaaagtttgatgattacccccttcttgcctgttgtagcatttggacgaccattaccaaaattaactccacagtaagtatacattttttttctccccttccaggtaac

SEQ ID NO: 184963 - DNA, 122 bp, Homo sapiens
aaaaaaaaaaaagatactgtcctcacctccggacagagggcattcccccaacaaaaaaaccgcctctccctgtctcctaacttggacagctcccttcccctcaccgaatgcttagcagccac

SEQ ID NO: 184964 - DNA, 122 bp, Homo sapiens
taccgccgagcaggaggatctaacgaatccagcttgtggacatgccctaatttccatttccgcctcctccaggtctgttcaggtgaggatgatgggagggaaaagcggtgtacagccgtaac

SEQ ID NO: 184965 - DNA, 122 bp, Homo sapiens
cagaagctatgtgcataagtgacttaactcctctgtaacttggctttcttatcatttacacgagggtgctaacagtaccctcacaaggttcaagtgaagattacataggacaatcccttagt

SEQ ID NO: 184966 - DNA, 122 bp, Homo sapiens
gctgaatgaaaatgaagtgggcatttgtatttccccactgattgagttggctcaacttgacgtaggttcaaattcacaaaagcgtgtgcagacttgcttccaggcttgcaatggagctggag

SEQ ID NO: 184967 - DNA, 122 bp, Homo sapiens
ggcgccttctcgtggggtcaggaggggaagaggcccttccccgtcacctgagagccggcgcggcctcagccttgaactttgaatcctgggggaagaggacaaaacccgctcccgcgtggcag

SEQ ID NO: 184968 - DNA, 122 bp, Homo sapiens
atagtagtttggtgatagccgaaacatttctcttgcttggcatgcaaatgctatcattctcgttcatgaactcattgtgtaaaatgcacttagccacatctggctgctgttcgcatgaacag

SEQ ID NO: 184969 - DNA, 122 bp, Homo sapiens
ccatcaatgtttactgactttcggcttccagtcccagatccactgcgcactggatacctgcgcaaacttagagaaacctgaaagcctgcttcctaagagcaggacccgagttctaataataa

SEQ ID NO: 184970 - DNA, 122 bp, Homo sapiens
tttccggggccgttcattactcacggaactttggcaggttgaagcctgctcacctctccccgaggatgaacgctcccgctaatggaattcttctgttttcctatggctctagttttgttatc

SEQ ID NO: 184971 - DNA, 122 bp, Homo sapiens
tggtttcacgtggctctatctcacactcacaacctcagagtagcgtgggggtggggaggccggacacccaattgccacctggccctgagaaggaaaggcagctgtgtcccaagaagaaccgt

SEQ ID NO: 184972 - DNA, 122 bp, Homo sapiens
ctgacgaagtgaccctctatttcggcgcactaatggaagcggggcgtcgcggcccgatcacggtctaagcttcccattcaacagatggtagagggctgactagggatcagtttctaggctgg

SEQ ID NO: 184973 - DNA, 122 bp, Homo sapiens
tgcaatggccagcacgtgggcagagctcaccgcagacagtcctcagaggtcggaatctgccgtgcatctggcaatctctctgctgcccctgccccagcctgcccttagctcatctctctgga

SEQ ID NO: 184974 - DNA, 122 bp, Homo sapiens
gggcttaaaggaatgaagccatggaccgcagcgccgagtgttacagcttgattagagaaacgtgtggacccaaagagtgtgcggcgacaagatttattaaagcgaaagccaaagtaaaacga

SEQ ID NO: 184975 - DNA, 122 bp, Homo sapiens
gccctaaatttctccttacactaaattctctggtctggtgttgccaaaatctccaaagtccgtcggaccttgcagcgctctgccgagccgcagcctagagaacctgaagaggcagtacgcgc

SEQ ID NO: 184976 - DNA, 122 bp, Homo sapiens
ttgccatgggatttgggcatttcaaggctgttataaaagaggcacagacagaaagccaaacgagactgtgacacctgtctcccggtgctgacaagtgtcggtgatgggctgtggagcaagtc

SEQ ID NO: 184977 - DNA, 122 bp, Homo sapiens
aaggctgggccgtgtagaggaaagaaaaggcgcgagagaagaagactgcccgggtgaccgcgaggcctctgaggaatggctgaagagcagatccatctacatggggctgggaggggaggtgc

SEQ ID NO: 184978 - DNA, 122 bp, Homo sapiens
tcggatcacaaggcggcggcggaggaggcccagagaccggagcgcggagacctcagccagcggcctacgcccaggcctttctccaccggaggaccagggaaccgcagtcttcatcacagagg

SEQ ID NO: 184979 - DNA, 122 bp, Homo sapiens
ccccaaattccctcattatttataatgtcaggctgtcctggacaagggaagctgtgcacccgctgacaccagtaagaaggttgccgccatgtcagagatgtccgcggacacctccctgggct

SEQ ID NO: 184980 - DNA, 122 bp, Homo sapiens
tccagtcagagctgtcttggctttcggaacagggctgccccattacatgagtgggcacgtcgctcgctctctgggaggaggaaaaagtctcctccaagcccgggaacgtgcgccaatccccc

SEQ ID NO: 184981 - DNA, 122 bp, Homo sapiens
gttctgggcgatgctctggcactcggtgcccttgcccgagcaggggggtctgaggatgaccgcgcgcaggagtttggaagccactgccttcgcgaggagcgcggcagccaaatgcgcagccc

SEQ ID NO: 184982 - DNA, 122 bp, Homo sapiens
tgataattatccttctatatcatgttcagtatgtgaatgaacaaagatagagggacagagcgtatgtgtgtgtgtatccctgtgtatgtgaataactgtgagccatgatcaatggtggtgtc

SEQ ID NO: 184983 - DNA, 122 bp, Homo sapiens
attgtagtccagtccatatgagctcccggggcactggactacaactcccggcaggctctgcgccagaggccgtgggagacgcagagaagtgctcgaccttcgtcaggagatctgtggaagag

SEQ ID NO: 184984 - DNA, 122 bp, Homo sapiens
gggtgcatccactcaatgagaagctgccccagcgcagatacctgggtgcagtctgcctctcgggaagccctgcttcctccgcccccagggctgtgaccaggcctgtgtccccaacggcaggc

SEQ ID NO: 184985 - DNA, 122 bp, Homo sapiens
gaaggtaaatgtatgtggcttagtagtggggtgtgcttgaggatgtgagtactgagttgccgggaactgtgcctgggtgtctgtttggaggtaaattcttgagtctgtgagtgtgaaagggt

SEQ ID NO: 184986 - DNA, 122 bp, Homo sapiens
ctggccaccagagggcagcagagacgggctcactgtcggcttcaaggatgttccgcaagtcgattcacttacagactcttcttcaaatgcggcggtcacctgtgacccacattcataactcc

SEQ ID NO: 184987 - DNA, 122 bp, Homo sapiens
tctgccaagtggaacaagaggccctagcctctgcgtgggcttcctgctacgggcatcctccgccgccggcgtaccactccccaagcccaggaagtggcgtgcatacgctgggaccagccctc

SEQ ID NO: 184988 - DNA, 122 bp, Homo sapiens
gaggagctccggagggcgccggggtggcggagccggaggcggccggcaaggtgagagcggcggctgcgcgctgggaggagcagcaggtgcaggggcggccggcggcgcgggcagggggcacc

SEQ ID NO: 184989 - DNA, 122 bp, Homo sapiens
gtctgtgcagagttcagcgaagccctggagaaggaagtgaattaacccagcccagagggacggatgaatgactaaaaggaagtgacatcagaactgggttgtaaagaactaactgaatgtct

SEQ ID NO: 184990 - DNA, 122 bp, Homo sapiens
gggcttgtaaactaagttgctcttactttgccccatgcctctcgtacctgtgggcagagtcgaatctcggctgtcctcgtgttcacccacagcccctccattcctctggcccacagctgttt

SEQ ID NO: 184991 - DNA, 122 bp, Homo sapiens
aattgtttttgttgttattgttttaatagaatttcatagtcttatctagcaatttcaaatcgctggaaagagtcatctttgttatataaataaccatgtagactgttttaatgttattgttt

SEQ ID NO: 184992 - DNA, 122 bp, Homo sapiens
caggacaaggccatcctggtgagggcccgggcccggggtcagggctggggccgggacaggcgacggggccggggcgggcggcggggccggaagagccccgcgccctcggccccccgcgttcg

SEQ ID NO: 184993 - DNA, 122 bp, Homo sapiens
aattgatctcccctgaaccatttatgctcccagctaaattgtctacagagatgcccatgccgtcaagcacgaggcacttaggagaagtaaatctgattgcagtccaagttaggaaacattct

SEQ ID NO: 184994 - DNA, 122 bp, Homo sapiens
tgcggcgggcaggggtaggtgcggctgcggaagtccatgttgtgcggccgccagaagacgcggtcccgcaggtgctgcgccagcgagaggcggtacagcgcttccgcccgcaggctgtgcat

SEQ ID NO: 184995 - DNA, 122 bp, Homo sapiens
aggcagggggctaagggggcaggtgaggtcgggaggccactcacctatcactcaccccttcgcgctcgagccaattctcagggcccgcctctttctcccctttctcggcgggggcctctacc

SEQ ID NO: 184996 - DNA, 122 bp, Homo sapiens
gcccggcagtgagatcgcccagagctggggcgaagaaagagggggcgtggggaagcagtgcggagcctccgggactagatactcaggaatggggcttctcacgggaggaaaagccccactga

SEQ ID NO: 184997 - DNA, 122 bp, Homo sapiens
attcttgggccgattcttctcagcggagttaatgcttttccccttggcctggagaatattcgccagctgcgcttgtggctgcagcttacgctgagataactctgccacgaaatatctcgctt

SEQ ID NO: 184998 - DNA, 122 bp, Homo sapiens
ctggtggagcacgccccccaccacatccatgacaacaacaagaaccgcaacagcaagctgcgccgcctcatgaccttcgcctggccctgcctgctctccaaggcctgcgtggacccagcctg

SEQ ID NO: 184999 - DNA, 122 bp, Homo sapiens
acccgagggcacccagctgccctgcgcgccttcccggcccgggcgcgggagcggcgagggcgggaggcttggctgtgcttctcccgccgcctggtgcaaactttcaaaagatgcggcggccg

SEQ ID NO: 185000 - DNA, 122 bp, Homo sapiens
tacctagctgccttctgggtttcagcttttgagtttcaggtccttgcacaacacctaagacgtgcaatactctttttcttcctaatcctggcagagaacagtgcgaagagatctccctccgc

SEQ ID NO: 185001 - DNA, 122 bp, Homo sapiens
tgaaaatagagttgaatatcagaaacagtttagagtgggtaacaaagtggccaatagtctcgcttgctggacgccgttagtggtattaacgggaagcctccagacactgatctcagctattt

SEQ ID NO: 185002 - DNA, 122 bp, Homo sapiens
aaaagaggtagcaagccccagacaagggatccttaattacagataaaaggcaaacaaaaccgtacaccacattttccacgtgtcagctgacggccgcgacaaaaggaaacagaacgctgggg

SEQ ID NO: 185003 - DNA, 122 bp, Homo sapiens
gcgcccagggccctcccctgcgccggcccaggacgtactgttgtcctccgcctcctgcggcgctgagggcttgcccatcttcacccaaaggatgcccaggaagacgagcagtagccctaggc

SEQ ID NO: 185004 - DNA, 122 bp, Homo sapiens
gcatgcgccggagaggactgtggctgggttgagtaaggagccaaacccctagctggctcccggtgtccgcacagccttcaccacggagcaggtccgtgccttggagggcgtcttccggcacc

SEQ ID NO: 185005 - DNA, 122 bp, Homo sapiens
gtcttctctccaccccctttccttcctgattgtcagaccttcaccagattcccgcaaagacgttttgattcgatgcaatactgtttgcacccctgcggtcctgctgaaatgagttgtgcttg

SEQ ID NO: 185006 - DNA, 122 bp, Homo sapiens
gtcaggggaaggcaggagggcggccggagggaccagccacagttccgagaaggggctgaccgtggcctgtgatggacggggcacccagtgggccagaatcagacggagaacagctataagct

SEQ ID NO: 185007 - DNA, 122 bp, Homo sapiens
cctgttcctccctgccgggaagcgtctctcacccgagactacaactcccataaggcatcgcgagcatcgcgagaacggcgccacagaggaaccggaaacaagccagttactttcatactcag

SEQ ID NO: 185008 - DNA, 122 bp, Homo sapiens
taagggaagggatgaaatcatgggacacctccaggcaacagcctccaggggctaaaccatcgtcttgggtaaatggatggtttgagagcaaaggcgggagcagcgagtccggtgagaaggtc

SEQ ID NO: 185009 - DNA, 122 bp, Homo sapiens
gtggtagaagtgctgggagtggacttggtctgctgggactgggactgtgggacggtgcttcgaatggtaagagtggccgggatgacggtggtgaaggtgttggtggtgggcctcacaggcat

SEQ ID NO: 185010 - DNA, 122 bp, Homo sapiens
cccgccatgtcctccagatgacgcggacctggtggagctcaagcgggagctggaagccgtcggggagttccgccaccgttctccgagcaggtctctgtcggtccccaaccggcctcggccac

SEQ ID NO: 185011 - DNA, 122 bp, Homo sapiens
aacttgggactgccttgggtcaggcctcggctcccccacttgccccgtaccttgggccagcgagcccctcgcccaccccgacccggcttctgttgaaatgcccaccttagggcttttatgag

SEQ ID NO: 185012 - DNA, 122 bp, Homo sapiens
aattctcacagcaacactgcctggtggtttttattatccccatttgacagatgaattaatcgtagagagttgagtgacttacccaaggttgtctggataagccctagaaggaaggcggtagg

SEQ ID NO: 185013 - DNA, 122 bp, Homo sapiens
agcacgttggggtggactcgctgcagctgccgtgtgaaccgcactatttcttgcactctccgctgaacagcgtttgtggacacctagggagaaagaaggagccgtggggaatgcctggtgcg

SEQ ID NO: 185014 - DNA, 122 bp, Homo sapiens
cttctagagcagtgcttcgctaactttagcatcagagtcaattgaaggcttattcaaacacgggagcctgagctccatactcagcagttctgattcaacagacataaggttgggcctgaaat

SEQ ID NO: 185015 - DNA, 122 bp, Homo sapiens
gcgttgagggccatggcggggtggttggggtcctgcgtcatgttcaggtacgcggccctccggagctgctcctcaatgaccaacgcctgctccagcagctgggggcggggcgcagcgtcggc

SEQ ID NO: 185016 - DNA, 122 bp, Homo sapiens
ttccaccgtgtacaagtggatgctgctttggacactgatggacaggtaacataaaatgggcgaatctgcagggggatgaactgggaggaaagtattttaggtggagggagcgtctcataatt

SEQ ID NO: 185017 - DNA, 122 bp, Homo sapiens
cttctgctcactgcttgggctgatgggactgtggggccccagccggccccttgggccctgcggggaggaggaactgctggatgagggggcggggcacaggggaaggaagggaggccctcctt

SEQ ID NO: 185018 - DNA, 122 bp, Homo sapiens
ccaaggcagccacgggcaggggtcgtgatcgggggcgggacggggcccggacctcctgaccgccccccaccccccgccgagcgggggtgtatttgcatgtccccgccccacgcacggcattg

SEQ ID NO: 185019 - DNA, 122 bp, Homo sapiens
aggcacatacaagcggcctgggtcctggggctccagagaacaaccgaccaagcagacaaacggaactccgtgagggggacactgcggcagaaacgtccaggggcggttttccagtgcagcgg

SEQ ID NO: 185020 - DNA, 122 bp, Homo sapiens
tgcagatattgaggagaaaggcgtccggatgaagctgacagtgattgacacaccagggttcggggaccacatcaacaacgagaactggtgaggcccctccagggggaggagcactagcgggg

SEQ ID NO: 185021 - DNA, 122 bp, Homo sapiens
ctgtttacgctagcaaggaagacgaaaccgttcacacacccggaaggaccctaagagcgacgcagcctcaccctcggccaatccccttccccagaggccccggaagtcacctctgtgcaggc

SEQ ID NO: 185022 - DNA, 122 bp, Homo sapiens
aatacttggagcgaggaactcctgagtggtgtgggagggcggtgaggggcagctgaaagtcggccaaagctctcggaggggctggtctaggaaacatgattggcagctacgagagagctagg

SEQ ID NO: 185023 - DNA, 122 bp, Homo sapiens
cggcagtaggggtcacggtggccaagcccaccgtggagctcatctgagagttgtaaggtacgggactgcctcggtctttgggacgccccgtctggtagcatcccagatccagcacgttcctt

SEQ ID NO: 185024 - DNA, 122 bp, Homo sapiens
tatttatgaaattggtaaggcatgaggaatagtaatgccacaaacaccattttcactacccggagaaaattactgtctttgaaaccctgtatgtccttccccttgagtgactaccattctga

SEQ ID NO: 185025 - DNA, 122 bp, Homo sapiens
cagaaaagcccccacagtcccagcaggccagcgactaagccaaggcagaggaaagcaccacgttggccaccaagcagaagggcgcttgcaaaggagcagagcttctgaggctgagcggttcc

SEQ ID NO: 185026 - DNA, 122 bp, Homo sapiens
gacgacgccgggccctaggtccaggagctcctaagccatccccgtcctcagccggtggcccggtccccttagggactgccttatgagttgcactcgctgatggaaatctcgggatgcagtca

SEQ ID NO: 185027 - DNA, 122 bp, Homo sapiens
tggagtgtcgctagggagtgggtggccgccaccagtctagggatgggggctgtggttcgccgggacacggggaccacggctcagactagacggcgggtacgagagcgagggaggcagggagc

SEQ ID NO: 185028 - DNA, 122 bp, Homo sapiens
ggttaccaggggccaactccttctcctcttcctgaccctccctcccctgggcagaagaaacgcatgtggaccagaagactttccctgctgccttaaaaccaataaaaggttaactttaagtt

SEQ ID NO: 185029 - DNA, 122 bp, Homo sapiens
ggctcttccaggaccggacgcacctccgtccccaaggtgccacctgacagccaacaccgacggggtgatgcatgaatacagtcattattcaaattagctaaaacacctaactcattcgggtg

SEQ ID NO: 185030 - DNA, 122 bp, Homo sapiens
cttcctctgactgctcctagattagttgcttctccgtcttcagcccagttgtaagcagtgcggctgaccttgggaagaagatcagggatacttgcagagcagaccacagtgaaggtgggaat

SEQ ID NO: 185031 - DNA, 122 bp, Homo sapiens
gaggacattctgatgacctattttgttcccttagatatagcaggaactgaattccattctcggattccccagtaaaatgagttaataattttctgttgatttcacctaacttgagtagggtt

SEQ ID NO: 185032 - DNA, 122 bp, Homo sapiens
atctagtaagcggggtctgggctccagccaggccatccggcgtggtcattgctgtgcctccgacaccttcccctgctgctgtgtgcatgcccagggtgcctcacctgcaggctgagctgcgt

SEQ ID NO: 185033 - DNA, 122 bp, Homo sapiens
ctgccgaagcgagcacactttcttgtctaaaaaatggagctatatgatgcctacctaacccggtcacagtgaggatgaaatgaaccaatgtataaagcagtggtcccaaacctttttggcac

SEQ ID NO: 185034 - DNA, 122 bp, Homo sapiens
tcagatgagacattttttagcaaataaatggaagtcacagccctcttgaaaccatttttccgccgttgctcaccaggaacatgccggaagagataggttccagacgcgggagaatgcggggc

SEQ ID NO: 185035 - DNA, 122 bp, Homo sapiens
gcaatgatttaaagccataaatgtaacaggaagatctaattctggaagacatacaaatgccgaaaggaaaattaaagccacttaccccgaggaagagatgaaggtgaagaactttctgggcc

SEQ ID NO: 185036 - DNA, 122 bp, Homo sapiens
gtgcctcacactcaaggctgacattgtatttctatcaggtgcgtccctctagaccccagccggggtaacatgaccgaggaacgagcccagttcagagccgccgtcgagtgtcacgtctgggg

SEQ ID NO: 185037 - DNA, 122 bp, Homo sapiens
agggcagcccagcctgtgagtaacactcactctggatttccctggccagagtcctctctgcggaggaacttgggaccagttctttagggagttttgggtgacatcatccctccttactcaag

SEQ ID NO: 185038 - DNA, 122 bp, Homo sapiens
ctgcatgatgtcccggatctgtctgaagtccccgtaccggctaccccgaaaggcccgcagcgcctcgtggaagtagaacttgagcacccagcgattgactgcctcttccagccgtgcctccc

SEQ ID NO: 185039 - DNA, 122 bp, Homo sapiens
gaaccctccactcagtagcaatgtatcattaagcctgttcgtgctggaccagaacgacaacgcgcccgagatcctgtaccctgccttccccacagacggttccactggcgtggagctggcgc

SEQ ID NO: 185040 - DNA, 122 bp, Homo sapiens
ttcctgagtttctctttctgagtctggttaataaccgtgagaacacgtccaatttgcggacgactcaaatcttagagagcttggaggccgcgccgcctgtcactttggcgacgtgcagctgg

SEQ ID NO: 185041 - DNA, 122 bp, Homo sapiens
cgcggcggcgggtccggatggagatggacgctggatgggctgtttcctgagtttggttcccgtggcggggtcggcccctcgcccctgcatttggcagacctgatgcggagcccgagggtggc

SEQ ID NO: 185042 - DNA, 122 bp, Homo sapiens
acacccacctaagggctgatcccgcactcagaggcctaaaactatagacattcccttccgcggcactggtgagccaggatttcttaccttcagcattctcagggaaggctctggtccaagct

SEQ ID NO: 185043 - DNA, 122 bp, Homo sapiens
cttgtctcaaaaaacaaaaaacctatatacacaagttcttctataagatctggttggagacgaacattctaggcataaaagaaatgggaggagtctcaaaggaaaagagcctagttttaact

SEQ ID NO: 185044 - DNA, 122 bp, Homo sapiens
cagcttttgttttctacattggccatcacccctctttgatttttccttgttcttccttaccgctacccctgaggccagacataatagattgataaacccatggttcaaatcctgcccccatc

SEQ ID NO: 185045 - DNA, 122 bp, Homo sapiens
tgtccagctggtttctttcagtctctttgattggcagcgcctgtgatcctgtgatgggctcggaggacagggacacaattgttttccctggaagctgacgagaggaaactgctggggagggt

SEQ ID NO: 185046 - DNA, 122 bp, Homo sapiens
ggataagcgggtgtagactctgtctgtttagtcccagattctcctcctttaatgaactaccgtggaaatcctggagtgtcactgctggtctgaattcagcatccgccttcaggctggaaatc

SEQ ID NO: 185047 - DNA, 122 bp, Homo sapiens
cctagccaacttctccctgcgactgggggtaacaggcagtgcttgccctctctactgtcccggcggcatccacatgtttccggacacctgagcaccccggtcccgccgaggagcctccgggt

SEQ ID NO: 185048 - DNA, 122 bp, Homo sapiens
tggggtgtctcaggctagcaatccatgcaaatgggtcctctgactgcctgaagctatgcccgggaatggggcagagagtgccctgctttaccatggtcttggcatggggagagtgggctggc

SEQ ID NO: 185049 - DNA, 122 bp, Homo sapiens
ggtggaaaataaaacagaaagtggggaaccgtcctgaaccttactctgtcctcccgcccccgccaaaaaagaagacagaaagagaaagaacaggaaaaggagatacattctttttaagatta

SEQ ID NO: 185050 - DNA, 122 bp, Homo sapiens
agatgccgactggtccacctgagaaatcgcagggcgttctggcatctgctgcctcggggccgagccctgcgggaggcattctgaggctggcgcccccggaccgcatctcagcatgtgctcag

SEQ ID NO: 185051 - DNA, 122 bp, Homo sapiens
gtggggtgcagacattctctgcctgttgtgatgcttacatataacgtcataacagacacacgtatgtgttgtgatccctgtggtttgagagtttggagcttccctaaaagtcaaaatattct

SEQ ID NO: 185052 - DNA, 122 bp, Homo sapiens
ccgctcccgcggataaaaggcgcggagtgtccccgaggtcagcgagtgcgcgctcctcctcgcccgccgctaggtccatcccggcccagccaccatgtccatccacttcagctccccggtat

SEQ ID NO: 185053 - DNA, 122 bp, Homo sapiens
agtattaattttttcaagctgtcgaggggagcccttagaggggacaacttcttggagtggcggccaagctgggccttaccaggtgtgatcatagtcttaggtatcatggagttcccatctcc

SEQ ID NO: 185054 - DNA, 122 bp, Homo sapiens
tcctttccagcctcctctctgaccagctcctcccctcggaggataagtagcctctgggaacggacccggcgggaaggagacgcggagggaaactgagcgggggcgcagtccggggtgatcgc

SEQ ID NO: 185055 - DNA, 122 bp, Homo sapiens
acatcagtcattgttcaagtgctcaagaatcacatgtgtctggtttaccacgttggacaacgcaaatacagaacatttccgtcactgcagaaagctccactggatggtactgggcaagacca

SEQ ID NO: 185056 - DNA, 122 bp, Homo sapiens
tctctgggatctgtagccaatcattcacgaggtaaacagaacgaccgagtttctctcagccgagaactgtggctgcccctccggtgaaaacagaggaagtgggagcggcaggaagcgctttg

SEQ ID NO: 185057 - DNA, 122 bp, Homo sapiens
ctcaccaaagtgggctccggctctgccatccaggcggccgttccattcttgagttgttctcggcatctcggcatctcggcaaccaaacaagatccaaagttggagaggtgggcaaacctact

SEQ ID NO: 185058 - DNA, 122 bp, Homo sapiens
atttgcagtggcactctcctgtagcgaatgcaagtaaaacaggcggctgaggacgcgcggcggattagaacaatatttgcccaacatgacgcagaatactgaggagagccgagtgccggtcg

SEQ ID NO: 185059 - DNA, 122 bp, Homo sapiens
aggaggctttctaatcaaaccatccaggccatattctaggcaatgatacctactgccatgcgatcacagtctccaaacacaaggaaccaaaaaaagaaaatcaagattcaggaaagcctaat

SEQ ID NO: 185060 - DNA, 122 bp, Homo sapiens
tcagacaccaggcacttttcagccagcgcaacattctcatttttcatgattcctgcctcgcgcccccacgtccccacagctatgcttcctgtggcttactgaagggtgctttaaatatggct

SEQ ID NO: 185061 - DNA, 122 bp, Homo sapiens
ctgacgtgttacgcctcttctaatgacatttttttctttttcttttctgtaggagagagacgagagaccctgaaacacgcgccacctatctttgtggggagggataattgaagcgccctgag

SEQ ID NO: 185062 - DNA, 122 bp, Homo sapiens
tgcgccctgctcgctctgcccggtgcagctgtaagcggggaccttagagctaggaaccctcggggatcgcggcctccgaaagccccatcgggcaggggaggccccctgctgcctccccaccg

SEQ ID NO: 185063 - DNA, 122 bp, Homo sapiens
cagaaggcgccgccgaaactgtgccaactgccgcaccgggctcccgcgcctgcctgggagcggcgcgaccccgaactccgcgcttcagcagccctgccccatgcagcacttccacgggcgcg

SEQ ID NO: 185064 - DNA, 122 bp, Homo sapiens
ctgttttattcaaattaatggtgctcttttaaagtgtctgccctgagtgcacactatagccgactcattaaaaggatgcttcatcttctgcttaccaactcttttctccatttgcagtgaga

SEQ ID NO: 185065 - DNA, 122 bp, Homo sapiens
tagggcttccacagaggcaccagccctgctgacactttgattttagcctaatgacacctgcgttggacttttgatctacagaactgtcagacaacaaatttgtgttgtttgagccaccaagt

SEQ ID NO: 185066 - DNA, 122 bp, Homo sapiens
tggggcccgcgcggggtgcggggagcttgcggttccctggcacaggggtggggccgcagacgccgtgagtgtgcagcgcgtgtgagtgtgcgggggcgtgcgcccccgtgtgcgcgcgtcgt

SEQ ID NO: 185067 - DNA, 122 bp, Homo sapiens
gccaaatccccgcccaccgcggatccgccccgtccaccaaggtctcgctcaccaacggcccgccccgcccaccacaggcctggcccgcccacgaaggctcgccccgcccatccacggccctg

SEQ ID NO: 185068 - DNA, 122 bp, Homo sapiens
tcgggaagctggtagatctgcagggtgggcagcagtcagtggaggcaggtgggtggaacccgctgggccacagtgcagggcaccacctacctccatggtgccattctcccgcaccagcaggc

SEQ ID NO: 185069 - DNA, 122 bp, Homo sapiens
cctcctcctcccaggcagaaagaaagacactgcagagcgcagagggcaccccggacagggcgctcccaaggagtttcctcccggagcccgactgctccggggctgccaagggctggcgcgct

SEQ ID NO: 185070 - DNA, 122 bp, Homo sapiens
acctccaaggcccagacaagactaaaatcctcactccctctatggatgctggtcactgtccgaaggacacatgttctcatccccattccactgtgggtgtgctctgtggtagtctaactctc

SEQ ID NO: 185071 - DNA, 122 bp, Homo sapiens
agattggatatatagtgtgatgtgatgtgtttaagtccaggtgtgattatagcaacagaacgagtgcaggcaaaatcttggggttagaggaaggagaaatcactttttagtgctggaggtca

SEQ ID NO: 185072 - DNA, 122 bp, Homo sapiens
actcgggaagcacgaggggtcagggagttcccattcctagtcaaagaaaggggtgacggacgcacctggaaaatcgggtcactcccacccgaatactgcgcttttccggcgggcttaaaaaa

SEQ ID NO: 185073 - DNA, 122 bp, Homo sapiens
gtcaaaacaatgcagcgcgcatgcgccgcgccggcgcccccgcccccggatatccccgcgcgcccccgcggccacgccccccgcggccccgcccccagcccgcagaccccggccccgcccca

SEQ ID NO: 185074 - DNA, 122 bp, Homo sapiens
aaatccatatgttgactagaggcggaccattggaaggtaatgagaattaggtaagatcatcggggtggagcccccatgatgagattagtgactttataacaagaggaagacagacctgagct

SEQ ID NO: 185075 - DNA, 122 bp, Homo sapiens
cggccggccgctggagctgcgggaagcggaagtgctcgttgggggtgcacaaggcgcgttcgagcagcggcgaccgacgcggcgaaggagcgcgccatggagcatgtgacagagggctcctg

SEQ ID NO: 185076 - DNA, 122 bp, Homo sapiens
cttggtcgcgcggcccccggtgcgggcctcgtcgctccgacagccctacagctgtccctacggcccgcaccgacagctcgtccccgccacctccctccgggctgtagggacgtcgagatccg

SEQ ID NO: 185077 - DNA, 122 bp, Homo sapiens
ctcccgtaacataccgttcatggattctgacacatgactcagaatctgtcccgcacaggacgcatacacgttaggcgaagtcatccttggtggtgtttctatggtgatgagtcctggttaag

SEQ ID NO: 185078 - DNA, 122 bp, Homo sapiens
tactcacttgccctgtaaaaagtagctcatgaatgccacattatttttgccatctctctccgcaccctctgctagcttgttcaccatattagcatttccagaggcagtggccaaaagcagca

SEQ ID NO: 185079 - DNA, 122 bp, Homo sapiens
ggacttcagggagagggcctcgagggacaggacgtgaagatagttgggtttggaggcggccgccaggcccaggcccggtggacctgccgccatgcaggacggtaacttcctgctgtcggccc

SEQ ID NO: 185080 - DNA, 122 bp, Homo sapiens
cggactcctgatctcaggtgatccacctgccttggcctcccaaagtgctgggattacaggcgtgagccaccgttcctggcctgttagtgcttttttgcagagaccacaggttgattgattcc

SEQ ID NO: 185081 - DNA, 122 bp, Homo sapiens
tgcaggtcacccccacactgacgccgtctcagtgagctaatgccagtgtctgccccgcgccggctcattcagcagccactggaatgatcaatgaggccggccgcccagccctccaccggctg

SEQ ID NO: 185082 - DNA, 122 bp, Homo sapiens
tgaagccctgtgtgaatggggttgattgtccggcgccacttccccgcgctgcccggcagccgtcttccccagccgagggactgaactagccatgatcgcctcatgtggagggcaaagttgcg

SEQ ID NO: 185083 - DNA, 122 bp, Homo sapiens
gtccgtgtgcccgggcctggtctggtccccgaaaccagctttggacgagactcaccctttcgtccagcaatttccacaccaggctactttggagtggggagtcttccacagagatgtgggaa

SEQ ID NO: 185084 - DNA, 122 bp, Homo sapiens
tgctctggagggtgtgagaccctggccccggccccgcggtcagcccagtcccccgagccccgccccgccccgaccaacccgcggggattttggcctcaactgaaaatgaaaccgggtaaacg

SEQ ID NO: 185085 - DNA, 122 bp, Homo sapiens
tctgcctttcctctccagctgcagcgcgtcccgcacaggaagtgacgtgaccccgcccctcgcagggccccacccccattcacgagcctctatgaggcgggaaagctagcgtgtcgtttggc

SEQ ID NO: 185086 - DNA, 122 bp, Homo sapiens
gcatggcccagagaggaggagccgaccatgtgacttcagtttccactggcagctgtccgccggatgtgcactgtgggcagggccagcctgagttgccgcaaatactgtggctttagtttatt

SEQ ID NO: 185087 - DNA, 122 bp, Homo sapiens
cacctcactccgttgccacttacccacccatcgtgggacatactcagcacacccatctgacggctgctcttgccctgcctggcattgttttctgagctctgctttctgagcaaggcctactc

SEQ ID NO: 185088 - DNA, 122 bp, Homo sapiens
aagagagcgcgaggggggaaggggagagaagggagagggagcgcctgggactcgagacggcggcaggttcaattagctaaacaaagaaatcatggcggattgtttacatttggcagcgcccg

SEQ ID NO: 185089 - DNA, 122 bp, Homo sapiens
gcccagcaacatgcagctcagaggcggctcagtggcgatgggagattgggacggggcaggcgtctgagtggtctctcggctgtgctgatggctacaaagctaatggcggggggctggcttca

SEQ ID NO: 185090 - DNA, 122 bp, Homo sapiens
gcctgagagccccagggagagccgggcctgggtgcccagcaggaccctgagctgcagagccggccagcggctggggggccgttctccctcccggaccctgtgcatcctccagagcaggagcc

SEQ ID NO: 185091 - DNA, 122 bp, Homo sapiens
aatgattgaattggaatggcccttgagggagcccaacctttctgttttacagatgaggatcggagagggtgaccagaagtcattcagatgaatcagtcccagagctgggacaagaatcaagg

SEQ ID NO: 185092 - DNA, 122 bp, Homo sapiens
ctgtcccaggtcgcggggccggacattttctccaagcgctttcctggcacagcgcgcaggcggcctgcgccaaagctctggcttcctccaggcgcccagaccccgccctccccgcaggcgcc

SEQ ID NO: 185093 - DNA, 122 bp, Homo sapiens
caaggggcctgggctgctgctcacgggtattaaagaactccgcgttgttcatggctgaggcgatgcattaggaagatcctggacctagagaacaagtcccccgaacgctgagttggaggcgg

SEQ ID NO: 185094 - DNA, 122 bp, Homo sapiens
gtgcatttccttccttccagacccggcggggcttaactggagccgaagccccagaacaggcggccattcatcttctgagcagagtctgggagaagcagcctccacttcccagggcagccagt

SEQ ID NO: 185095 - DNA, 122 bp, Homo sapiens
agggcaaggaagtggagacagttcgcgtggcagagcacagcgggtgccctatagtgggcacgcctggagagcgtatattttcacagggcccgaaacctgaatggaggattctttccaccagc

SEQ ID NO: 185096 - DNA, 122 bp, Homo sapiens
attccggacccggacacccacgacagcctcagggggcagctgacctagggctgcctaaggcggaagtgggagcccctagccgcccgggcggaactacagctcccagaggcccccgcggcgct

SEQ ID NO: 185097 - DNA, 122 bp, Homo sapiens
ctgttggagccgatgtcttttctggcgtagccagatcccagaaagcaacggcttcctctgcgaacaaatatggtctcttctcagaaaacgactcagctagtttcctttaccacttcctctgc

SEQ ID NO: 185098 - DNA, 122 bp, Homo sapiens
cagagtaattgggagatgggcataacattttcccactgccagggcacagcgaggaggctgcgctcaagggtctccttgatgtgccaggccagggggaaatgctgggaaggtagatcctttct

SEQ ID NO: 185099 - DNA, 122 bp, Homo sapiens
agagagcaggcaagacttaccaggatctgggagtctttgtggagaggttcaggcagcaaacggggcatgtgaagacacacctgaaagttagagccagtttatgtagaaaacattctccccga

SEQ ID NO: 185100 - DNA, 122 bp, Homo sapiens
cagatgctctgacctcacaagaacaatccgtacatgtgagcctgctactgtactactgaccgactgagtactcaagctctccccaaaagcagctcatctgttactgttctgtgcactgaagc

SEQ ID NO: 185101 - DNA, 122 bp, Homo sapiens
attctgcattgtaattgacccagttatcatgtaattatcatagcgcggccacctcgggtgcgctaaggtgggcaaggaaacaaggattcaggggtctgaatccgaaaaaatccggaaggcag

SEQ ID NO: 185102 - DNA, 122 bp, Homo sapiens
cctttagcacaagggcgagcagcgtaggacaaagactcgggcggcagctgcctggttcggcgcgcaggggcggcctcggccacccggggcgcccgccgcctccaccgccccgcgggggaggc

SEQ ID NO: 185103 - DNA, 122 bp, Homo sapiens
tatgctctgtatggctttgtttgcacctctgattctgctatctcacaagcagcaggttggcgattaacaaaatagcaatagcatcgaagccggtgacaactgccatcatcacggcagtgacg

SEQ ID NO: 185104 - DNA, 122 bp, Homo sapiens
ttattaattttaccctctagtaaatatgtcagcatgaggaagtgacacaacagctatctccgatattaaggactattctggtgctgctcctttatgaaaataatagtagagaaaaacaaact

SEQ ID NO: 185105 - DNA, 122 bp, Homo sapiens
agtccccggcgctctgaggttggagagaaagaacagaccagcgcccttcccgactacatccgaaacttcacacagggtgtttctgagcaccagcacttccagcgcttcacttaacggcataa

SEQ ID NO: 185106 - DNA, 122 bp, Homo sapiens
ccgtcctcaaacctgcagaaaggaagacagacactcagtcacacagagctcttccggcaccgctattccaaaatctcaagtaggatgaggcccagcagggtcggaaagggcagcaatgggca

SEQ ID NO: 185107 - DNA, 122 bp, Homo sapiens
aacaccgcacagagacctcagcagcgtggggcacaccacacagggactgccggccaacaccgcacagagacctcagcagcgtggggcacaccacacagggactgttgcgcaggcgccctccc

SEQ ID NO: 185108 - DNA, 122 bp, Homo sapiens
cagatatagatgactgtccgtatgtattctagcccacagagtctcacagactccttgctccgcacttctgagatggcaaataggacagagaataaaaacagagtgaaaatggagcccttcat

SEQ ID NO: 185109 - DNA, 122 bp, Homo sapiens
cttctttcactggggagctgcaagcaggaggcgctggctctgagcagtggctttgtgcttcgggcagaaccggccgcgagggctgcgccccaccagccgcgcgccgggagggcggacgcgcc

SEQ ID NO: 185110 - DNA, 122 bp, Homo sapiens
ggggcggaagcctgggccagcgcacaaacacaaaatcacctggaatcccaaactactccacggccgaggaactgcgacccgcagagggctgggacgagggtggcggtgtagggtccagcgtc

SEQ ID NO: 185111 - DNA, 122 bp, Homo sapiens
gatgatgaccccaggtaactcttgagtgtgtcgctgatgccatcaccgcagcgctctgaccgccccctcggtccagcatttctcaggctcaacgagttcatggccaagattcctaatctttt

SEQ ID NO: 185112 - DNA, 122 bp, Homo sapiens
catggcttcatgggaaatgtagtttgaggtcgctggaggctgttcttcctgggggtaactcgtgttgacattggcagacagacacaagtgaggaccgagaattatgggagatggagttgcgg

SEQ ID NO: 185113 - DNA, 122 bp, Homo sapiens
gccccagcgagcctccagccgcgcgcgcacgaccggctcccgctcccggccgctcccggccggcgtccctgccagcactgctgccccacatgaaacagctgcaatcccgaggcttctggggg

SEQ ID NO: 185114 - DNA, 122 bp, Homo sapiens
cccgctcaggccacccggcctcctcggaccccgcccaggccacccggcctcctcggaccccgcagaatacccccaaagcccatgggcgtctcctaaccgtgtaagtccggggctccgggggc

SEQ ID NO: 185115 - DNA, 122 bp, Homo sapiens
tcaccctgcacaacgtgccagacctcagtgcgggcgtgagctgcgccttcgaggcggcggcggagaacgaggcggtcctgctgccctccggtgaactgctctgcccctcaccctccctccag

SEQ ID NO: 185116 - DNA, 122 bp, Homo sapiens
ctgtggctggcacttctgcgcgtgacgccgtggcaggaggcttcctaacattccatgggtcgttcatccccggtggtggctgcgtcctattctaagtacacctgtgtccaggggaattcgcc

SEQ ID NO: 185117 - DNA, 122 bp, Homo sapiens
tccagaggctgtcagctgagcaggacttgaggaggcccgtagtccctctccctggctgcacgttgggaccggatcaggccaagtgcaccacacaccctcatgggtctttctgcaggatttat

SEQ ID NO: 185118 - DNA, 122 bp, Homo sapiens
atggattagtgagacgaccaattagagttgcacactgcgccgaggaggcgggcccataggcggaaaggctttgaacgcaagggggtgtggtcggggtgaagccccgcctcctccatttccga

SEQ ID NO: 185119 - DNA, 122 bp, Homo sapiens
gggtcggctctcccttccgcccgccgctccctcccctccgccagctctcctcctcccgggcgcctgcggctgccctgccaaaacttctgcagttcccatgcccttcgcggcgactccagggc

SEQ ID NO: 185120 - DNA, 122 bp, Homo sapiens
gactagaatgagttaagactaagcaccaacacacccaagcaccatggcaccacctaggggcgggcatcaggtgttggcgatggttggttatttgttcctcccttctgaatcctccccacgtg

SEQ ID NO: 185121 - DNA, 122 bp, Homo sapiens
ggaagaaaggcaaaaagagctcattctggcttttcttgggggggggccttagcattttaacgagggtgtggccctcatcaccagggcagacagcaccgcccccccaactcccgcagctttta

SEQ ID NO: 185122 - DNA, 122 bp, Homo sapiens
cgcctccttcgtctgcgacttctttgtctctggcggtaatatctgctccggctctggctgcgacagcatctgtacctggccatggtgcaggatgggcttggcctgaatgctcagagcagggc

SEQ ID NO: 185123 - DNA, 122 bp, Homo sapiens
gctggtgtttctctcaaagggaaatggcctctgtgatttctggagtgcgtcattcccctacgacttggcgggtctgttgctggccatggggtcagtcagagaggcctagcctcagcctggcg

SEQ ID NO: 185124 - DNA, 122 bp, Homo sapiens
gggtagttttctaggccgttgccagggcgatgccacctgagctgggcgccaggcacctgtcgtctggggaacagtgcaggcggggaccttcccccgggagctagcggggccactgggctgag

SEQ ID NO: 185125 - DNA, 122 bp, Homo sapiens
cggcgatggggttggggattttcacggtgctgtcccccaactcgaacttcacaccttgaccgaggacccccgggaggcggccgcgaggtcccccagcgcggcggggcccggccctttaagcg

SEQ ID NO: 185126 - DNA, 122 bp, Homo sapiens
gaaacccagtccatgggaaaggcagcagagccagaggggggcagcgcagcgcctttgctgcggccctaacagctggcaatgccaacccaagggagagaccctgtggccatttcatccccacc

SEQ ID NO: 185127 - DNA, 122 bp, Homo sapiens
ggcggggcgggggagggtgacatgtgagcggcgcgcgccggtggcaggtggaaaggcgagcggcatggagcgcgtaataagagagttggagtcggaaagagcagccccagtcgccggggaag

SEQ ID NO: 185128 - DNA, 122 bp, Homo sapiens
cacagattcaacattccagtgagggtaatttttctatttttcaatagttgtagaccaggccgatccaccaccttattgaactgttatgcattaaatcaacagttgaaaaattaagcattttc

SEQ ID NO: 185129 - DNA, 122 bp, Homo sapiens
gagcaagtaccatccaccaccttgcagtcactccaggcacagtcattggaagggcggccacgtggcttgcacagacagtgatacttaaaatacagacatcaaagctgttggtttgttgtttt

SEQ ID NO: 185130 - DNA, 122 bp, Homo sapiens
tgtgagagccgagcgcgtgtccgcggagtgcttgagcaacgcagaatggcttcggtgctgcgttccttagaccccgtgcggaccctgctgagccctcagcatctgtgagtgagtccctccgc

SEQ ID NO: 185131 - DNA, 122 bp, Homo sapiens
atgaacagcaactcaggctaccaaggtccctttggggtggctccagtgacagagaatgggcggggacgctggcctcaggactgcttcttcccatcctgaccttcgggccccttacctgcggg

SEQ ID NO: 185132 - DNA, 122 bp, Homo sapiens
attttgcagggaatatttggttagtatagcagtgcttcgagcatgtattaataaattatacgttttgttaagcaatgacctgtgcccctattgtatgccaggcgctgggcaaatcttgtctg

SEQ ID NO: 185133 - DNA, 122 bp, Homo sapiens
ctcctgctatagatggggactttcaaccccaagaggatgaggaagaggatgatgaggaaacgattgaagttgaagaacaacaggaaggcaatgatgcagaggcccagaggcgtgagattgag

SEQ ID NO: 185134 - DNA, 122 bp, Homo sapiens
aactcttcctaagatgtttgagattttacaagagactcaggaacccaagcagggctcccacgggcaaagatgacattggacatggggcccaaaggatgagaaagagtcagtggtgagaaagg

SEQ ID NO: 185135 - DNA, 122 bp, Homo sapiens
ctttctatccaccttccccccggggtgtcccgaggagggagagtcgggtcgggcggggctcgggttgatcagtaactgaggctgtgttctggtcggtctgttaatttttattgacggtttcc

SEQ ID NO: 185136 - DNA, 122 bp, Homo sapiens
tgctcacttaacctctgctctccagttacactcaggatagaatacatggaaagcacctggcgtattcagcagctcaacttatgttagtatttttcctccttcctcctccccggccacctaca

SEQ ID NO: 185137 - DNA, 122 bp, Homo sapiens
acctcaggtgatccacctgcctcagcctcccaaagtgctgggattacaggcatgagccaccgcgcctggctgctattatatatttttgagatggagtttcactcttgttgctcaggctggaa

SEQ ID NO: 185138 - DNA, 122 bp, Homo sapiens
ctcaagtgaaggaatttgtggttggtttcctcagccactgtatgatgtcccgtagactgacgatttttaaaatgtttgttgaattatgattaactaaaatatgataagaagtactttcttta

SEQ ID NO: 185139 - DNA, 122 bp, Homo sapiens
ggggactgcgagtcaggggtccggactgggtgggtggctcggggctggcagtgtgggcagcggcagggctgagtgacccatgctggccggccggcttgggagtgtcctggccccgggcccgg

SEQ ID NO: 185140 - DNA, 122 bp, Homo sapiens
gaccgcatctgcccactgcctagcggggcacttctctaccaatccgaagggctgctcgcccggcctcacgggaaaggtagtttccaggtagggcgccaacagcatcaagctgtgcgcgtggg

SEQ ID NO: 185141 - DNA, 122 bp, Homo sapiens
gaggcaggggagagagaatggcatctcgcgtggagggctgtcgtttgaactctcccagcgcgagagaccctgccccgcccccttcctggagcgttgactcccttctcgtctcgaggcctgtg

SEQ ID NO: 185142 - DNA, 122 bp, Homo sapiens
aggctcttggctagaatgcatagttatagacatagtcttgaatacaatactgcaaacatccgggcctgaggccctgaatatagatccttcagagcaatagtgaaaacaaaaccagttgatgt

SEQ ID NO: 185143 - DNA, 122 bp, Homo sapiens
ccaaaccatgtcagggcataaaccaaccataatttacacctgagagaaaatatatagtggcgcagtgagaaatggcctggaagttagtgttggccactttgccaccaactcttaaccttaaa

SEQ ID NO: 185144 - DNA, 122 bp, Homo sapiens
tgctgctagcgggacgggaggcgacacgcgggcgcgtggccggctgggacagtggaggaccgagtcctcccagcccgcaacccggcccgggacctgcgctcccagtccccgcccatcgtagc

SEQ ID NO: 185145 - DNA, 122 bp, Homo sapiens
catttttttggttttgtttctctactgttcactttcctccccaatccacaacactactggcgtcctttgtaaaaatcattctaactcctgtgcacgttgttcttcttcagactgaaagaggc

SEQ ID NO: 185146 - DNA, 122 bp, Homo sapiens
tgggttttattcacattaaactgacttggagcccctgaccttggagccctttgttgtgcacgaagtctccatgacattgccctccagttttcactggtggggatgttatcttacacacatac

SEQ ID NO: 185147 - DNA, 122 bp, Homo sapiens
cgcgctgcccaacacaaaagccgcgccaggtcccggaagctgctccctcctttcgcggcgcgcttgagagtacagtccccttcccagcgcccgattggacagggccttaggccccgcccctt

SEQ ID NO: 185148 - DNA, 122 bp, Homo sapiens
acccagggacccttccaggcattcctcacctcggtgcaggccaggagcgagaactgctgccgggcccccccccaccggctcagggcgtggctggggtggccctgctcctcggtggcccgcct

SEQ ID NO: 185149 - DNA, 122 bp, Homo sapiens
cacgctgtgcttcggatggagcctccaatctcggggatgccattttaccctggaggccatcgggcttcatgccccacgggcattgtatcggcttccgtgtggccccgagagcagggcaatcc

SEQ ID NO: 185150 - DNA, 122 bp, Homo sapiens
ctctttgagtcggcatggaagaaggagaaggacatcgtttccaaggagatagagaagctccgcacgtccatccagaccctgtgcaagagcgcacttcccctggggaagatcatggactacat

SEQ ID NO: 185151 - DNA, 122 bp, Homo sapiens
gtagggggcggaacaggtaaatggggacgtggatccgggtcccctcccccagcgagcccccggagcgccaggagggtgtccccgctgagtaacaatgaagaccccccacccagcctgggggt

SEQ ID NO: 185152 - DNA, 122 bp, Homo sapiens
tcactttcatgaccaaggtgttctcgaacagactgtacttcctcaggggttaggggctcccgctgcagctagaattcaagacatcaaaaggattagttcaccctcctctgtaaaatggttta

SEQ ID NO: 185153 - DNA, 122 bp, Homo sapiens
aggctggtagagcttcctctccatagggatgggggtaataagaaaaggagagagtgggcccggcgccgtggctcaggcctgtaatcccaacaattttggagtccgaagtaggcagatgactt

SEQ ID NO: 185154 - DNA, 122 bp, Homo sapiens
tcctaggggactttctctttatggaaccagactctgagacagcatgtggggctcctgccacggcctagtgtccttctatcacagctggagaatcaaactcacctcctataggataggttgct

SEQ ID NO: 185155 - DNA, 122 bp, Homo sapiens
ccctttttccttttttcttctacctgggggttgtggtgccaaatgcctcttgggttccaacgtctggtgccctctcaggagttccaccggcaacgacccgacgtgcagggactgtggcaggt

SEQ ID NO: 185156 - DNA, 122 bp, Homo sapiens
agcaaaatcaaagacctcatattgttttatgttagccataggtaacctttttgtgggaagcgaggacaggatctcactctgttgcccagattgtcgtgcagtggcacaatattggttcactg

SEQ ID NO: 185157 - DNA, 122 bp, Homo sapiens
accaggaatgctcagctacaggtccagttctgcaggaggaacctcgacctggcctatgggcggggaatgcctgggtctgaccccaaggggaaatgaaagtccaggccagccattcaactacc

SEQ ID NO: 185158 - DNA, 122 bp, Homo sapiens
gggccgcctgaggtttggaggccagggctagtacaacctcaatttgaccctggaacctgccgcttcccccacccaggtgcgggacccacccgcttgtccacacctggctctgcccaccgccc

SEQ ID NO: 185159 - DNA, 122 bp, Homo sapiens
aaacccctaatgctatggctgtggcattaagtcaaactattatttcttactgctttgtaccggacatcactttcacattagtaaaacttttcatcagtgtagtttctcccaagcttgattat

SEQ ID NO: 185160 - DNA, 122 bp, Homo sapiens
tcctaaaccaagatataaaagttaatcaagcctcttcctccgggccgagagaattttgagcgttagccgtctctcagtcgccggctaataaaggactcttaattcgtctcaaagtgtggcgt

SEQ ID NO: 185161 - DNA, 122 bp, Homo sapiens
catcgaggaaccacgaaaggcgccctcggcgtggagcgggcaggagggagacgcgcggagcgaggtagggccctgcccggccccgccgcgtccctcctgtaagtggtcccagggtgtagcga

SEQ ID NO: 185162 - DNA, 122 bp, Homo sapiens
ctcttcttgtagttgaagtagaagttcttacactgcgacacagtcttggagcccaccatccgggcgatggccgaccagttgcggccgtgttccaggagacctgtctcaggagaggagggcag

SEQ ID NO: 185163 - DNA, 122 bp, Homo sapiens
ggggcgtgctcctgacttggatgactcaaagtaaagaacctcaccaggggccctggcatgcgaggcctgggggcccagatgtgctggggcgtgtcactacaaggtgcagaattgttccagat

SEQ ID NO: 185164 - DNA, 122 bp, Homo sapiens
aagcctattagagcaacggctgcctcctgcctgcctccttgggctgggcagggctgagggcggagggagagagagagagagggagggggagaggaggaaggaaaaagttggcaggccgacag

SEQ ID NO: 185165 - DNA, 122 bp, Homo sapiens
cgtcagaccgaggccccgggaggaaacagacttcgggaacaaggctagcaccagaggctgcgcgccccgggcatggcccctgtcggtgggacccgagacgccttgttgtgacgaggtgggaa

SEQ ID NO: 185166 - DNA, 122 bp, Homo sapiens
ctagaggtgagatcagttacctacgtgcaactgaaatttcaaacttctgttcagcagggacgtgagtggacaatggtgactgatagttggaaatatcagcaaacatcttaaattttatactc

SEQ ID NO: 185167 - DNA, 122 bp, Homo sapiens
tgtaaatagtggtcttcagcgagtttcttgatccgcttttcccaggaacagaagccaagtcggcttccttaggagctgctcgccctgagtctccatgtttcctcgcagtccggggcagaacc

SEQ ID NO: 185168 - DNA, 122 bp, Homo sapiens
gctcgcctttttcgtcagccggctggaggagcatcggtccgggaggtctctgggctgaggcggcgacagctcctctagttccaccatgtccgcgggcggagacttcgggaatccgctgagga

SEQ ID NO: 185169 - DNA, 122 bp, Homo sapiens
ccttttactcctctcggaggccctggcccttacccagacctgggcgggtgagtgcggggtcgggatggaaacggcctctaccgggagtagagaggggccggcccggcgggggcgaaggactc

SEQ ID NO: 185170 - DNA, 122 bp, Homo sapiens
atcccctcctgagagcatcaggggccgggacgtccaaggtagcaccaggcccctcatgcccgcaccccctcctcatggtcacctctgttcctgcagggtcccggtggtctcccgctaacccc

SEQ ID NO: 185171 - DNA, 122 bp, Homo sapiens
acaccgggctcgcctccattacctcctccgggaagtggttggaatcgaggtctgaaagcacggagttcacggaaaggccaggggcgccaaccgggatgggcgcggtgggcccgggttcacgc

SEQ ID NO: 185172 - DNA, 122 bp, Homo sapiens
cggccgggcggagccgccatgggagtccgcagcagcagtggaagcagcagcagcggcagccgcgcgcagcccgcgccagggaagcgtgcgcccgaaaggagctccggtggcgcggcatgccc

SEQ ID NO: 185173 - DNA, 122 bp, Homo sapiens
atgaggaaactgaggctcagaggggtgaagtgagctgtccaagtctacttccctaatagacggccgacccaggactccagtattcgatctcatcaggctacgccccacatcacgtaaatata

SEQ ID NO: 185174 - DNA, 122 bp, Homo sapiens
gcggctgggcgcccgccagcctcccgccgccgcctcgggtcaccgccccgcggggtagtccgggggatcctgctcatctcagcttgccagcaccctggggttgaggagctgcccgaaagttt

SEQ ID NO: 185175 - DNA, 122 bp, Homo sapiens
gccatcagcactgcaggtataaacccgaagtttcctgataaaggaaaaatggatctttcccgttggtctccaattgctgcctggtgagctgagggtgggagacgtataatatacaggtggca

SEQ ID NO: 185176 - DNA, 122 bp, Homo sapiens
aaaccagctgatgcagcacttgggagccacagtccagctacaggaacgagggctagtcctcgggtttgccataattttaaccatcaactgtaaatcacagtgcacatttcattcagcttgat

SEQ ID NO: 185177 - DNA, 122 bp, Homo sapiens
cctgtttcgtctgcgcatgcgccgggacacgcctgcgcccttggccgcagtcagggctcccgagtggtcactctggttgacccgcgcaagctctggcctcgcccactaggctggtcgcgtca

SEQ ID NO: 185178 - DNA, 122 bp, Homo sapiens
ccagatagggctgtggacttttgcacttgctgcgtcatctactctaaattaccttctctgcgacacatctgtcactcttcacctagccaacctcaattcatcctttaaaactagctcagtta

SEQ ID NO: 185179 - DNA, 122 bp, Homo sapiens
ctggagcggcccccttcccatctcccttctggattgcagccccgctgcccttcaggaaagcgctgccccggccacccacgctggcctatgcggtggctccgaccgtgttttttgccggacgg

SEQ ID NO: 185180 - DNA, 122 bp, Homo sapiens
agcagcaacccacttgctccccctcccccgcaggcttgctgctccttggtctcctaggaacggcggcagctccagcgacccaggtgcactgccacctttccagcttcctctgcatctgccca

SEQ ID NO: 185181 - DNA, 122 bp, Homo sapiens
gttagggtaccactaacgaagcttccaccttacccgtgaacagagctggtagcaactaaacggaaaacgctgtgaagactacatctacgtttagctacctaatgtccatgccgcaccgacct

SEQ ID NO: 185182 - DNA, 122 bp, Homo sapiens
cagcacttggggaggcttaggctcggggagcttggtttccccacgcaggtgtggcagagccgcctccctctgcgtccgtgagggttctgaggagtctgtgctttctgagcaaactcagagta

SEQ ID NO: 185183 - DNA, 122 bp, Homo sapiens
cagcccgccatgcctgagcctcccacccactccatgggctcctgtgccgcccgagcctcccggacgagcaccaccccctgctccagggcggccagtcccattgaccacccaagggctgagga

SEQ ID NO: 185184 - DNA, 122 bp, Homo sapiens
cctggcgacctcgtgcagaccgaggccttctccaaagaaaggtggtgagggcggaggggccgctccaggccccacagagcaggagacccccagagaaagccggggctggcaggaggcggccg

SEQ ID NO: 185185 - DNA, 122 bp, Homo sapiens
aagaggtcccgccaccaaaaccccatcataccctccgaaccccccaaatcaagagggccccgaaaagtttatccaggaccccggactccagccgaccgtccacgtgtcagcgcggccgagct

SEQ ID NO: 185186 - DNA, 122 bp, Homo sapiens
taggcaggataactgccagagctggatggaccttagaggtgccagctaatgcgctgtgagcgttttctgaggttaggcctgctctaaacatttgatatgtgttaaggcatttatgtgctttg

SEQ ID NO: 185187 - DNA, 122 bp, Homo sapiens
ttacccagctcgggtgagaagggtatcttccgggaacctcgcctttaatagcacaacgagcgcagagtccactggatctgcgagaagaaaccgcgctaactagtttgtccctacggccgcct

SEQ ID NO: 185188 - DNA, 122 bp, Homo sapiens
ttaggagatctgtggttaggaaaggccttccacatgtgaactcaacaggactcaattatacgttttactttggagcagttctaacccacaataagctatgggtgttagagacagtcaggcct

SEQ ID NO: 185189 - DNA, 122 bp, Homo sapiens
acgggctgtttgaaatgcaaatgagctgctgggagcacttctggtcccttccttccctgccgcctgtttgggaggctaaatcttatttctcccagccgcttcccgccaccgatttctaacca

SEQ ID NO: 185190 - DNA, 122 bp, Homo sapiens
gcagatgataaactaattcctccatcggagcttggtgctcatttcccggagtgatgtcatcgggccggcgggacgcattagccagagggctgggaaacagcggagatggcgcgccccacctc

SEQ ID NO: 185191 - DNA, 122 bp, Homo sapiens
ctaatccatttccattagttatttgttcacagtaggtactcctaaggacttgttgaattgcgggcttggcgcccgttctacggagagttcacagccttcgtgagtggggacagaaggcggct

SEQ ID NO: 185192 - DNA, 122 bp, Homo sapiens
gggtgagtacgtgggcccgggcgttgggcgagcctccccagccgttcggtccagccgcagcggagccctcccggccctgccgcccgtgtcccggctgccacctcgtcactgcccgcgagtgc

SEQ ID NO: 185193 - DNA, 122 bp, Homo sapiens
tgtggaggctggagggacatccaggggcacatcgtggcatctgtggtgatctgcagcctgcgcccagtactttgtcctgttcctttcggggcttggccacaccgcagctgcccagtgagtgt

SEQ ID NO: 185194 - DNA, 122 bp, Homo sapiens
ccgacgtgacggggatggagaggctgtgaggtagcgggacggggcgccgcagagtccgctcgtagacgctgtacgggggcggagtcttgctctccttgcgcactggctcctccccgccgtag

SEQ ID NO: 185195 - DNA, 122 bp, Homo sapiens
cccgacccaccgggccaacttttgactccgggtgcccagacacccatccaggtgtgagcccggggtcgcaggtacgtacttgaaattgggaacgaggccccgcctggggtgcctcgggagag

SEQ ID NO: 185196 - DNA, 122 bp, Homo sapiens
gcttcctgccagggccagagccagagcctagagaccagggacaaagctgcaaccttccaccgaaaacttctttgaaatcgggatctcctgtgaacatttccttcaaatctccctgtgtgctg

SEQ ID NO: 185197 - DNA, 122 bp, Homo sapiens
ggccttttcttgcctctctataaatgcttagcgtagcccttagaattcggagagcaggaacgctccaaccaccaaagggttaaagcacacggaataaagtcccctcgatctatattttttgg

SEQ ID NO: 185198 - DNA, 122 bp, Homo sapiens
gttgcaacgagaacagcaacgcgcaaaagaacttgaaaaccgacagaagaaactggagcacgccaaccggcatttgttgctcagaatacaggtacgcagcctgagttgtgtaaagtttactg

SEQ ID NO: 185199 - DNA, 122 bp, Homo sapiens
gggtggcaccatcacgcaaaggcctccagaggcgtggcccgggacaagcacagcgccagccgcctgcgctgccagggcagggtccacacccacagactgtaacctggacccgggcagggcgg

SEQ ID NO: 185200 - DNA, 122 bp, Homo sapiens
tgctggccgtcagtgatctgtgcttaagcttgacatcatgggctgaaatgtggggaaatgcgtctgatttttgtaagccgccctcgtgttcctttctagccgtggtagctgtgacatggggg

SEQ ID NO: 185201 - DNA, 122 bp, Homo sapiens
tcccgtcagtgaggccaggcccccaggtgccactggagtcagaggagggcagctggcgtgcgccaagcagccactaggagccacttcatgccaatgctccacttcctgcacgccacagtcac

SEQ ID NO: 185202 - DNA, 122 bp, Homo sapiens
gtggcggcggccccaccgcctctgggcctgtcgggatgctcctcgctgaatcctctgggacggtccccctttgtgagcaaaaagacctgaactctctgaggcactttagaaaggggcagacc

SEQ ID NO: 185203 - DNA, 122 bp, Homo sapiens
gtatgactgcattaccagctcctctgaaccccctgtgctcagtctgctggaagaatccaccgtgcagggcgcttggtactttctgcaagccattgggccccagcctaatgctttgtcttgtc

SEQ ID NO: 185204 - DNA, 122 bp, Homo sapiens
gctgtgatcgttgcggatttaaacaccacactgtggaagcggagatggccccgcgtgcaccgctgaagtgaaggggctcgtggcaaatgatgcggggggacagcggccagagcagaccccgg

SEQ ID NO: 185205 - DNA, 122 bp, Homo sapiens
cccagcctctgtcgctgtccctgaagcccgaccccctggcccacctgtccatgatgcctccgccacccgccctcctgctcgctgaggccacccacaaggcctccgccctctgtcccaacggg

SEQ ID NO: 185206 - DNA, 122 bp, Homo sapiens
gtgaatcctgacaaatatttgaacgctctcagtgaacagatgttcttggttaccgtggcccgggggacccatcgtttttttcccactagactcccataattccctctcctacctctgaatgt

SEQ ID NO: 185207 - DNA, 122 bp, Homo sapiens
tcgcccacacctcgccggaggagcggagcccacgcgcagcctcgggctgctccccgaggccgcttgctggggctcccgagaggccccaaggttcctgacagagctgctgttgggtgttggtg

SEQ ID NO: 185208 - DNA, 122 bp, Homo sapiens
ttaaaattagcttcatatttttccattccattagatattttttgttagcttaatcatgtacgtattgaaaagttaagtatctaaaaagtgacacgccatttagctgctgaaagatcagggac

SEQ ID NO: 185209 - DNA, 122 bp, Homo sapiens
tggttgtgtttgataaagtccagcaggttctccttggtgacctccccttcaaagttgttccggccttcatcaaactgtggacagaaagagggccctgactgagcattgctgctgggagcaca

SEQ ID NO: 185210 - DNA, 122 bp, Homo sapiens
cctacctcatcatcgtcatccagcctcacccgtttcagagccacgatctcatgagtctcccggtttttggccttgaacacagttccgtaggtgcctaggggaaggaggtcaggggtcagggt

SEQ ID NO: 185211 - DNA, 122 bp, Homo sapiens
tttgattcaatagattccattatttcttttgtgagtctacatgagtctctttaatagtaacggcaattttatgtagactcacgctggagactggcatctagggtgtgctgagctaatggcaa

SEQ ID NO: 185212 - DNA, 122 bp, Homo sapiens
tcaggcccatttctcatttattacctccacccaaaactctcaattttctagatatgacatcgtatagtcaatatcaactttcacttctagaaaaagccactaccaaggacatgcgatcaaat

SEQ ID NO: 185213 - DNA, 122 bp, Homo sapiens
agagggggtggagcccgggccttgtcaagtgtgaccaaccagcgagaggagcggactttgcggggtggagccctgaagccctctcccaatcgcacaagtgtaggggcggggcattctttggg

SEQ ID NO: 185214 - DNA, 122 bp, Homo sapiens
ctctttgtgtatctttctgttgatgatttatagaaataaattaataacaccccaactccacgtgctgcagtttatgttacgtctcagctgcggccagcccggcgcggggctgggtgcggagg

SEQ ID NO: 185215 - DNA, 122 bp, Homo sapiens
gtgcatcctcatgtgagaggaggtaaagtatcctgcaccgcctgtgaaagattccctctccgctacactgcaccttcacggctgccgttcagcttagaggagacaggggcatgtagaagcca

SEQ ID NO: 185216 - DNA, 122 bp, Homo sapiens
ctggcggggccgggggtcggggtgcgccctgggcagctgggtggcctcaagccctactggcgagactccgccctgtgtcccggctggggagtgggactgaggatggtggtgtctcgggtttt

SEQ ID NO: 185217 - DNA, 122 bp, Homo sapiens
ctctggcagcaaagaattttgcagcgaagggctcgccgatccggagcggagaaatgaaatcggcgcccaagggcaattttaattgtctaacccggcccgatttcctaagaggcagcggcgcc

SEQ ID NO: 185218 - DNA, 122 bp, Homo sapiens
ccacttccactgtccccttccaccgcccttctgggatgatgcctccagcctgggaaaacccgaaggcagccaggaaggcaagagttttttccatgctagcccagtgactcactcctgattcc

SEQ ID NO: 185219 - DNA, 122 bp, Homo sapiens
atgagtatatttgtacggggccagtacggcagacatagcgggtcgttggaccgagcccaccgagagtggatctgtgggaagccactgtggcaccttgctgagtctgttcacccgtgcagcta

SEQ ID NO: 185220 - DNA, 122 bp, Homo sapiens
acccgagctttggtgagagcttaatccagcattctcaccctgcttttcgcaggagcacagcggtcactcatcttggcaccggcacttctggggaaggtataaatgccacctcccgctggccg

SEQ ID NO: 185221 - DNA, 122 bp, Homo sapiens
cacactgcaaaggcgggtgctttcaaaattcactttttcccacaagcggattcagaaatgcggaggttgcctgccgccttttctaccggacaacattcccgagttattggtgagctggaatg

SEQ ID NO: 185222 - DNA, 122 bp, Homo sapiens
ctctgtgagaagaattgcaatgcctggtctgggctgagccaaagggtggtgaccctgccacgtcctgccgggtatgggagtggcaatgcgagcctagtgctgcagcattctagacctggagc

SEQ ID NO: 185223 - DNA, 122 bp, Homo sapiens
tcacacccatcactcatccccttcctgagtcagccgcgggaccctctgcagggaggcgtgcgagtcatcgaggtgatgcaacccctgcttggtcacttgctgactcacggacaccccccgcc

SEQ ID NO: 185224 - DNA, 122 bp, Homo sapiens
gcagtgtgtggcgtgtggtgtcaggtgtgtggcgtcaggtgtgtggcatcaggtgtgcggcgtgtggcatcagatacactctggatccgaggacaaagaacacccacgagaaccttccaggt

SEQ ID NO: 185225 - DNA, 122 bp, Homo sapiens
tcctgtacctcacctcccccttctcttccatatttagaaaaatatttgcatgtagccaatcgggtcagctcagattgtgcggtccggccccagcccatgggggagtgacccagaaacaggga

SEQ ID NO: 185226 - DNA, 122 bp, Homo sapiens
caggctgggaagcatggggacgacctccggaatacccggaatgagatttcagagatgaaccgggccatccagaggctgcaggctgagatcgacaacatcaagaaccaggtgggacaagtcct

SEQ ID NO: 185227 - DNA, 122 bp, Homo sapiens
tttcttcgtggttggattcgggcgctgcgttctggcgggaaaaccgctggaatgacactacggacttctgggtgcggcttctcagtgttgggaggcccacgatggcagtttggcccatgatt

SEQ ID NO: 185228 - DNA, 122 bp, Homo sapiens
tttatggtgggaatatgagtagggttgtggagaaaaaggatacagaggcttctaaccccacgagtaagtctgctgccagtggtagccatacagtgagaatacgatacaattagagtccatca

SEQ ID NO: 185229 - DNA, 122 bp, Homo sapiens
gagccaccgcgcctggctcagtttttttaaattaaataattcaatactgtaatgacattccgttgtttaaacacttctgtggcttcccattgctcataggaaaaggcccaaactccttaaaa

SEQ ID NO: 185230 - DNA, 122 bp, Homo sapiens
agggaggcgtgtgggagtggaagtgcctggagcccagggacaaagtcctgtaataaattacgtgggcccagagtgctcccagtcatttcctcttggagccctacctcttcttcctctgtccc

SEQ ID NO: 185231 - DNA, 122 bp, Homo sapiens
tccaggctccctgagaaatctatctgcctggaagaagttgcacttcgtcgccacaggagccgccgagagccagggatggagatttcagacttaggactctgccacgattctactgatcctta

SEQ ID NO: 185232 - DNA, 122 bp, Homo sapiens
ctctttgctaactgcaggatggagccgatcccctcaggatgtttcccctgttctcgacaacggtaaagacccccaaatttgaaagtaagggaattttggggtggagggaaactagggacgta

SEQ ID NO: 185233 - DNA, 122 bp, Homo sapiens
gggtgtcgggcgtccagaagcgtcggtccagtggcaggccccgcacgcccgcggcttcggcggggcatgggctgaggagaatgtgccctgcccacctctggtaaaccctcaagggcaaggtc

SEQ ID NO: 185234 - DNA, 122 bp, Homo sapiens
tgtttttgaacttatgtgttatggtattcacctaaaaactaggaataatggagtaaagatcgtggttattgccctcaagcagctcacattttagtgggtctgccagataagttaacattaat

SEQ ID NO: 185235 - DNA, 122 bp, Homo sapiens
gcccctgccctaggaggcccctctgcagtgaccacgtcctgaggacgcaggggtgctgcccggggtcggggctgggacactcactatatttcttgcagtagtgggcggcgacctcggaggag

SEQ ID NO: 185236 - DNA, 122 bp, Homo sapiens
ccttttcttgcacctcttcctaatcctattagggctactcatgttttaaaatgttcatcccgtctcagtttcgctggaagggggacactccaatgcttctgacacgaaaacatctcacggcc

SEQ ID NO: 185237 - DNA, 122 bp, Homo sapiens
gcgggccggcgggttcccgcggcgaacagctgggtggtatggatacgccgctcgagcctccgcagcgtcaggtcgccagggtccgccctgccactcgccccaccttgaggtaacttttcttc

SEQ ID NO: 185238 - DNA, 122 bp, Homo sapiens
ttctcggcataagtctaaacatcggttgagcggaactggccaaaccatcgcactgcatttcgaggcctggcacaaaagaacaactttggtaactccaccgtctaggcatactaatacctgca

SEQ ID NO: 185239 - DNA, 122 bp, Homo sapiens
agtgctgggattacaggcgtgagccagcgcacctggtccaggcctgtgttttctaaaccccgatgttacatttcagattaagaacttcaccttctaggcatcttttgctgctgcccaaaaat

SEQ ID NO: 185240 - DNA, 122 bp, Homo sapiens
gccggggttagccgggctccggcctccctcgaccccgatgccggcagggaggcgcctcggcgggcgggccactcaccaggtcagaaagaccccggtcttgcggcccctcctcacggcataga

SEQ ID NO: 185241 - DNA, 122 bp, Homo sapiens
gacagtcacacccatgataccctcctgctgatgcggaggaagagacctgaggagttcctccgcaaacactcttacccgtactgctagatttacacggagatcacctagcgatatgcagtgga

SEQ ID NO: 185242 - DNA, 122 bp, Homo sapiens
gtctgggctgccgcgaggcaggtggcaacgtggcccggggaggccgacacgaggcaagagcggggcccggagagaccgctgtcaggcaggagctgggcttctccaggccaccagggagccga

SEQ ID NO: 185243 - DNA, 122 bp, Homo sapiens
cgttcacactcattacccaggtccgtctgggagacccgccgggctcccgccctcccggcccgcagcctcctggccaaaatcctcccgggacaccccacctggactgctgcgaacgggcctcc

SEQ ID NO: 185244 - DNA, 122 bp, Homo sapiens
tcaaatggaaacggtgtgtgtgtgcgcgcgcgcgtttatttttggcgcatgcacacccctcggtagcctcaaggtcggcgataccctgagcattcgggcccccgcctgcaggactcgctcct

SEQ ID NO: 185245 - DNA, 122 bp, Homo sapiens
tccccagtagcacagccctcagggcagtcatgtgtcctgccctgtaatgtatatgctgagcgaccctgggacagcggccacgggatctgaggctctggctttccttctgtaggagcagtggg

SEQ ID NO: 185246 - DNA, 122 bp, Homo sapiens
cacaaccagtgctgctgggggtgaaggcaacgggtgggtgagcacggacagtgtgagccacgtggccgggagctgggccagctcgctgtatgtgcacatcgtttccatgtgtgcagcagaaa

SEQ ID NO: 185247 - DNA, 122 bp, Homo sapiens
acatggctttgaacttctccctgcctgattaggcacttgcagtgtatgttaatgtgtgctcggggagtgcgtgggtgtagggctgagtttttgtctacagaggggaagtgtactggggtccc

SEQ ID NO: 185248 - DNA, 122 bp, Homo sapiens
ttgaggctgggaggtgggagcaacggcggcggcggccgcctgcgagcccccggcctgaggcgcagcagcagctgcccgtcttcccacatagagggcaggaaggacaactttggtgggtaggg

SEQ ID NO: 185249 - DNA, 122 bp, Homo sapiens
aatcctctaaaacaaacagtggttctcagatgcagtcctacagtgagcagttcccactcacgtctcaataggattgcacaacagcgaggtgcacgttgctcttggacaaggacagcaggggt

SEQ ID NO: 185250 - DNA, 122 bp, Homo sapiens
aacccacctgctagtccctaggaccggactgctacttccgcatgacaggactgctacttccgcatcccaggacgaaatcaaactccgcgggccaggacccgtaaccagcctcattgggcaaa

SEQ ID NO: 185251 - DNA, 122 bp, Homo sapiens
gtgggttctaggcctggctttggcactgacggtgtctggcctgacggtgtttggcactgacggtgtggtctggcctcggttttccggtcaagtggactttgtgtgcgtcctattgtaaggtt

SEQ ID NO: 185252 - DNA, 122 bp, Homo sapiens
taggcgcccggccccttcccttcttgacacgtgcccgggcggtgctcgcttgtaccccgccgcgcgaccaccgccccttgctgcacgtctgtactctcaggccgttcgtcccgcactcccag

SEQ ID NO: 185253 - DNA, 122 bp, Homo sapiens
tcttttacttaaaatccttaagaacaaatgtgcttcagaatttttcagatttgccccgtccgggaaggaggtgggggggtcagccccccgcccggccagccgccccgtccgggaggtgaggg

SEQ ID NO: 185254 - DNA, 122 bp, Homo sapiens
ctcactgactgacaacccagccgggagagccaccactgccgccagcctctctgacaggcacgaccagggacccgtcctcaagcagccaaccaccaccgccccacgccagttcagcctatcgc

SEQ ID NO: 185255 - DNA, 122 bp, Homo sapiens
aatccttgacaaccgcagcccaaagaatgataaactacaaaggccggaaatgcgtcaccgcggcccgctctccgcgaaacagcggttccggctgtgttccttctaggaaggccggaggtttc

SEQ ID NO: 185256 - DNA, 122 bp, Homo sapiens
ctcctcaagctctgccagagtgggcgccaaggccggggaggcgcggagagtgtgtaagggcggccaggacgctgtcacctgtcaatttcaggggcttagaggaaggcttcacctcccctgca

SEQ ID NO: 185257 - DNA, 122 bp, Homo sapiens
tctcctgttgactcgggtggaaggacagcattcacgcgtggaacctgacggggtccctcacggaggtgttctagggtctccgcgtggtcatgccccgtgttcttgcactcattttctccaac

SEQ ID NO: 185258 - DNA, 122 bp, Homo sapiens
aggaggtgtgtaatccccaagagggaagaggccttctgtcttttgtttaccaccatttcccgcaggccaaatccagctctaggtcctcaggaaatatttgttgaatgaatgaacgaataaat

SEQ ID NO: 185259 - DNA, 122 bp, Homo sapiens
gcttggggggcgccgcgccgcggtaccacgcacaggagccgtcacttctcttgatgcaggcgaagaacttggcctggtgcccgttgatgttcttctctgtgacccagtccatccagaggcac

SEQ ID NO: 185260 - DNA, 122 bp, Homo sapiens
agagcctaaactcaagcccatgcccttcaacatgataccaaactggcctgaagataaacacgtctggccctcactgctttatccttgtgggtgtgaactgctgtaacctatcttcctcattc

SEQ ID NO: 185261 - DNA, 122 bp, Homo sapiens
caggacagttgcgggacggttggggagcgtcagttctcgcagccatggaaacgggttagccgcgcctgcgcagtgcggcctgggccccgcccctggaggtggctcgcgcctaaatccgggcg

SEQ ID NO: 185262 - DNA, 122 bp, Homo sapiens
agtcacaaggaggccgaggcggagctcggtgggctgagcgaaggcgatgtgagtggtggtcgtgtctgtgtctcctgtgctccagacttggcaccaccggtcacccccacaccccctgcacg

SEQ ID NO: 185263 - DNA, 122 bp, Homo sapiens
cgcggcggggtccggcctggcccaagaagcggaaagttcatgcttctcgcttcaacttttcgggccggcgccacagccccgagcgaggaagagccgcccctacgtcagactcttcaccctgc

SEQ ID NO: 185264 - DNA, 122 bp, Homo sapiens
ggggctgggacagaagaggcagtcacagccgtgtggccaatcgatttctgtcctcatctgcggggcctgggaaggagctggcccccgagatgggccacctgggtcccgggcctcgggggtcc

SEQ ID NO: 185265 - DNA, 122 bp, Homo sapiens
ttttacaaactgtgtgaacttagtcaagtcagcttatcaatcaagcctcagatttcttatcggaaaaataggttgctgtgaggatcaaatacatgtttagtgcttagcacagtacctgggat

SEQ ID NO: 185266 - DNA, 122 bp, Homo sapiens
acaagttgacaccaagcaaggattatctttcatctaacaaaaacaaacctgatggcaggccggcaagttttctcctctctttttctatcttcctgggggtttccctgcggaagatcattccc

SEQ ID NO: 185267 - DNA, 122 bp, Homo sapiens
ccaccgccgtgccctgactctagccctttctgtaagctcgtgggaaccgcctccaccgcccgggactcaccaccctgagtctgaaccgcccaacgcggcctcaacgtcgcggagccgtcgcc

SEQ ID NO: 185268 - DNA, 122 bp, Homo sapiens
cgaactcccaactccgaacgctgtgggactgcatgggcctctgcccgggccaatgaaatgcgctgccgagaggaggctgcggcgcggcctgaggccggatctccacaggccggagagttctc

SEQ ID NO: 185269 - DNA, 122 bp, Homo sapiens
agatggggtcccccaggaccatgttcagggtaagagggaattgcaggggtcctggaggcacgctaaggctaaggtgggagtttaaatccataccagctgtgtgattgtgagcaaattgcttg

SEQ ID NO: 185270 - DNA, 122 bp, Homo sapiens
gttgaaccccagagtctgactccggagacccagggctgactcccgcactgtgggattaaacgaagcttggaaatgacggagcttcgtactgagtagatgctcagtaaacatccgctgcctgg

SEQ ID NO: 185271 - DNA, 122 bp, Homo sapiens
aaagggggcatgcctatttgtattattacccccaaaataactctgtaatgaataagccctcggcaaatcatggatccgctgttcatctatgctcttattctgataggagcctcgtacgttct

SEQ ID NO: 185272 - DNA, 122 bp, Homo sapiens
taactgattctgaattttccaattatatctgccaggaatcactgtatttgtcaatcaaagcgatctttgttttttatcaacgcgggtaagttctgtctccctcactttcccttcttccccca

SEQ ID NO: 185273 - DNA, 122 bp, Homo sapiens
ttcgctcactcaaccttgaatgcgcgtcagaatcacctgggggaggttttacaaaatacccgtgctccacccaagacaatgaaatcagactccctgcgagcggggccgaacatcagcatttt

SEQ ID NO: 185274 - DNA, 122 bp, Homo sapiens
ttaacaatctttcaaatttccggagcgaccgagggactgactgacagcctcgggagcttacgcgcatccctgaagcgggcgccagcaagtccttggggaaaacgctgcctgtacccaaacca

SEQ ID NO: 185275 - DNA, 122 bp, Homo sapiens
ttggttaactaggaatagatagaatttccttaaccagataacctacgtggattaaaaatgcgcacaggtggtataattctaaagaaacttgcaatgttaaataccataaaataaagagtgat

SEQ ID NO: 185276 - DNA, 122 bp, Homo sapiens
gactagtttccctggagagaaatcccttcccacctgggggagggtaagtaatgggctgcccgaatttgagcaaagggctaagagatggtctcctatttggtataggcttcgttcccaccttt

SEQ ID NO: 185277 - DNA, 122 bp, Homo sapiens
tttccgtcctggacccgatctgtagggcgcaaagtcccctgtactgaggcgttcccagggcgcccgcctcccgcgtttacatttcttaggcaaaaaggcagcggagctaagcaggggtgttt

SEQ ID NO: 185278 - DNA, 122 bp, Homo sapiens
cagggcaggtggctagcacatgtccacagtgctccgcgtttagaaggcagaaaacggatacgtattgttttattgggacctagtggtggtttttgatagtgcaagggtgaacaaccgtgcca

SEQ ID NO: 185279 - DNA, 122 bp, Homo sapiens
gacagcctggccatccggccctagccgggctggacctcctgtgtggattctgaaatccaccggcttcccagggttgtcaacccctgggctctcgctcctgtggggatgggtatttccctctc

SEQ ID NO: 185280 - DNA, 122 bp, Homo sapiens
tcggcctcctcagcctccggtttctcctccgtggccaccttgtaaggctagttgggtattcgcaggtggccactgtccttggtgctgcccttccgcgccggcctctgggtctggaaggtggg

SEQ ID NO: 185281 - DNA, 122 bp, Homo sapiens
gggagttccagtgcgggaggccgcggatggggctgttctgcaaggagttgcttcctccgccggcttccgcacagcttcctgtgctggggaagcgcttgtggctgctgcaaagccaaggatgc

SEQ ID NO: 185282 - DNA, 122 bp, Homo sapiens
ccaccgccaccgccctgccccactattctctttacaggacagaaggctgcagcagcacggcggagaaaaatctctgaggaatgagtcagtgggatgggcgtatgggtggagggagagggcag

SEQ ID NO: 185283 - DNA, 122 bp, Homo sapiens
ctcctgctccacctctgagcacaagctgggcaaggactcaccctccaacaagctgctctacgccaaggacatccccaactacaagagctgggtggagaggtaggtggagggtgcaggggtcg

SEQ ID NO: 185284 - DNA, 122 bp, Homo sapiens
atcctgggagatgagatttttttaaaattatgtagcagaatggggagagaaacggagaagcgcatgaaagagagaaaagcacgaaaatcggcggcgtccaagaataaagcagataaaatagt

SEQ ID NO: 185285 - DNA, 122 bp, Homo sapiens
tctcctccccgccaggacccaccagaaacctaggtggtcccgggcactacctccgtcctccgtcctcagcaggttctgcccgttctcccgtccagcgctggttccccgcggacggcggcccc

SEQ ID NO: 185286 - DNA, 122 bp, Homo sapiens
tcgtgggcaatcagggaggcaagggacccgccgctttcgcagccccaacccgaggcgggccggagcagccttctgcattgccttcgtcctccggcggacaccccagcccgagtggggcgcgg

SEQ ID NO: 185287 - DNA, 122 bp, Homo sapiens
cattcatatttacaataacaggtttgagtatctgcaacgacaacaacaaaacacactggccgatacagcctggtttgtttttctttatagcacctatcaaaacccatcagatggtctgtcta

SEQ ID NO: 185288 - DNA, 122 bp, Homo sapiens
gcaggctgggagtgctgcctccaggaaggcctgttctggggttgaaccttagctgttgtccgggaacttggatttcaggggggttcctgccaccctaacggataaaagtgcctcactgtgtc

SEQ ID NO: 185289 - DNA, 122 bp, Homo sapiens
tgctccatgttcctttgcacgaagaagaacagcgcagttcggtagagtgtatgtaagccccggttgccatcagcacactgtgtggattctggcaatacctgtcatccccactggtgctgcgg

SEQ ID NO: 185290 - DNA, 122 bp, Homo sapiens
tcatccgaaatggctctgaggtgcgggacccactggttacctacgaaggctccaatccgccggcttccccactgcaaggtgaccccaggcagcagggcctgaaagacaaggcctgcggatcc

SEQ ID NO: 185291 - DNA, 122 bp, Homo sapiens
tcggggactgggagctctggcttttagcgcgggtccttgtgtaggcgagctcatatactacgatggggcaggggcgcgacggtctggcggctccggggcattgtctaagcgggacggggcgg

SEQ ID NO: 185292 - DNA, 122 bp, Homo sapiens
ctttatctcatgatctactcggggatttcttacagggtatccttacactaaccaaaactccgatcagagccttaatcctctatttaaatcttatccctggatcccaatccttatccctttga

SEQ ID NO: 185293 - DNA, 122 bp, Homo sapiens
acacagatgcccgaagcacgtcccggccttgctggctggggagttgcaggggtctggtctcgcgggtaaagccggtgaacgcgaggctccgcatcctgccccggccgcggcgctgcgccctg

SEQ ID NO: 185294 - DNA, 122 bp, Homo sapiens
agcacttttaaaaatctggtgaggtgaaaaataagagagtaacagattgagaaacgaatgcgtactgtggaaatagagtcaaagaatgtagatctgaaggaaatgaaaaaggagagaatatt

SEQ ID NO: 185295 - DNA, 122 bp, Homo sapiens
caagttgatgggaagcggtgacacttgagcaggacatggctggcctgctggatcctgacacggcaccctgtgtgctcggcggtgcgtccggcctttgtgcagtgcgccccgtccgccagggc

SEQ ID NO: 185296 - DNA, 122 bp, Homo sapiens
cgggggcggggggcggctgcgtcagcgaatggtgtggacggcgcataaacgtggatgtagcgaatgataaggcagtgaatgaatgtcagtggtgggcagccgcattcagggttgggagaagg

SEQ ID NO: 185297 - DNA, 122 bp, Homo sapiens
aacaaagtcctgcccgcagtaccacactgccctctgcagggtgtctgtgagaaggcacctcggctggccaggtcaggttaattccgactgcccagggtcacagatccattcccgtgcctcca

SEQ ID NO: 185298 - DNA, 122 bp, Homo sapiens
agtagcgtggaaaggggggtgacgtcccgcggacttgaggcgggcagatctggggggccccgactccccagcggccctgtagtggtgcgggcgaaactctggccccagataggaccggtgag

SEQ ID NO: 185299 - DNA, 122 bp, Homo sapiens
ctgggccgttccactgtgtcactcacctgagctcttgggaacctggcctcgtgccctcctcgcccgcagtggctgattgtgggtgttgtgtggggaatgcagggttgttctctgagctgagg

SEQ ID NO: 185300 - DNA, 122 bp, Homo sapiens
ctgtctgggaagtagcaacttcaaatgagagggggataagaaggagttaacctcaggctacggaatggagtacagacagtacaagactcaaaaatgagatgacaaatttcatctactggcaa

SEQ ID NO: 185301 - DNA, 122 bp, Homo sapiens
caggaacccgccgggctcagccggacgctagccccctgccgcccccggccccgccagccgcgcccactagcaacgtgctcgcgacctccagtgcccgctcagtgaagcttctgcatgccgcg

SEQ ID NO: 185302 - DNA, 122 bp, Homo sapiens
gggcggggagaagcgtttatatgtcggcgaggggcgtgggagctgccacccgcttgcctgcgggacaccggagtcaagaggctgcccacgccgctgcctgtccgttccacggttccgaggtc

SEQ ID NO: 185303 - DNA, 122 bp, Homo sapiens
gaaatgttggaaggatgacgcaggtgggtgaagctgggaggcggcttgcttgtctgtactcgagggtagccactgctcagtggcaagggctggtttgccaaaactgggttacaagttggtgt

SEQ ID NO: 185304 - DNA, 122 bp, Homo sapiens
ggtgcgatgtgcgaggggctcctgagcgcgtgtgctccgcccgaccccgccctgtccccccgacacacaggtggacccagggtcagctcgtgcacctgggaaatggctcccgccgggtagca

SEQ ID NO: 185305 - DNA, 122 bp, Homo sapiens
cccacagctgaggagaccagagctcaaaggggcgagtcacctgctggctcacacagcagccgggaccgggattgcaggtgacccacgtggcttcagggcccaggcctgccctgtgactcacg

SEQ ID NO: 185306 - DNA, 122 bp, Homo sapiens
cggggcacgcccaccgggaggggaggcctgaaatgatgggcggggcttgaataacagacccgccctcttccaggctggccacgcctccacacgtggttccctggctgctccttgtggctcca

SEQ ID NO: 185307 - DNA, 122 bp, Homo sapiens
cacgttgccaccgtttactgtgcagtgagtgccggtcccaggtttagggtaacggggacccgcatcaagcccggagcatctgcggcagagctcagtccattcagaggctgagtttgccaagg

SEQ ID NO: 185308 - DNA, 122 bp, Homo sapiens
gaagcagctcaccaaagccggcagagaacccaggttccgtggggccacgatgtggggctccgcgggcgccccggcgctggccgacttcctgtctcctgggtcagatgctgctccgcactgca

SEQ ID NO: 185309 - DNA, 122 bp, Homo sapiens
agggtcaacatttggacaggcagttcaaccaggaagctcatggagaggcagctggcaagccgaccaggagtaacccctatccctggcattgcgactttgggcgtatcattaacttgtggggt

SEQ ID NO: 185310 - DNA, 122 bp, Homo sapiens
cctatctgcccaaccctagttcaccctgatgtcccagctcagcattaatcgtggatccttcgcgggggcccggggcccccaaaccctcctatttagggaccacaattccccaactgggggca

SEQ ID NO: 185311 - DNA, 122 bp, Homo sapiens
ctcaagtgatccgcccttcttggcctcccaaagtgctgggattacagaagtgagccaccgcgctcggctaatacttgctcttgaaatctctagtgtcatctcttgccattttccccacttaa

SEQ ID NO: 185312 - DNA, 122 bp, Homo sapiens
ttgtgggtgagggcgagggttgtagggtgggtggcgggcagcgactcggaggagctactgcgccagggaaggaagcacatcggatttttacaatcttgtcattctgtgtggaaggccttctt

SEQ ID NO: 185313 - DNA, 122 bp, Homo sapiens
gtcagaaaggctgctgtctcctcccgggctttggcaatcactaggttctccatcatctgccgctgtagagagagggtctggggggggaggagggagtaaggccgactcccctctgccccgcg

SEQ ID NO: 185314 - DNA, 122 bp, Homo sapiens
gggctgggagtccccaaagtagaagttgcagtccgcggaaaggccagcagagggcacccgcgcttcgtttgcaggaggtccgcgtcgagcgacaggcgacagggttgggaagaacgctggaa

SEQ ID NO: 185315 - DNA, 122 bp, Homo sapiens
ccctgggagatgaatacgctcaagctggctggacaagacaccttatgacaatacagtgaacgcacgtcactccttacctgttgcctaagtccacggccacagctcgagaccctgcgctactc

SEQ ID NO: 185316 - DNA, 122 bp, Homo sapiens
tgcatttaatccccgcaaggtcactatgaggttaaactagtattatgctcattttaaagacgggaaaactgaggcactggtggttaagggacttcccaaaggtcataaccctagtaagtgcc

SEQ ID NO: 185317 - DNA, 122 bp, Homo sapiens
ggatgactaaaatgacctctcaaagtcgctaagatttagagtgagtcattggctcagctgcgaagtgccacagacccctcaggaacactcgtgcacacacactccacccccagtgctggtca

SEQ ID NO: 185318 - DNA, 122 bp, Homo sapiens
tggaatgaattgtctgcaagctaccatccgacagtctaacacaccatcttaggctttcctcggctctccagactgctgtcttgcatccccagagatggcttggggataaaaatgagtttaaa

SEQ ID NO: 185319 - DNA, 122 bp, Homo sapiens
tagagctcttttaggaaggtggagggacagacctggtgacacctgtcgacagtggtggtgcggacctagatttgaagccgggagaccttgaggcctttagtaggatgttatcaagagcctat

SEQ ID NO: 185320 - DNA, 122 bp, Homo sapiens
aactttggagaccaacttctgcattttcaaagggggccagcctgggcccagtttaatctccggcggaggaccggggttgcgggaaatgcgccggggagtgagggcttcccggatcccccgcc

SEQ ID NO: 185321 - DNA, 122 bp, Homo sapiens
ttacaggcgtgagccactgtgctggccaaagtccagttttattaaataagaaaccaagaccggatatatgggggctcatgcctgtgatctcagcatgttgggagatcaaggcaataggattg

SEQ ID NO: 185322 - DNA, 122 bp, Homo sapiens
accacggaaccaaagttgtcaaacccactgaggacccatcctgcccccctctacctgatacgcttccagctgctcgtgtgtgaagactgtctgcttgttgcccatggtgtgaaccacagccc

SEQ ID NO: 185323 - DNA, 122 bp, Homo sapiens
tggctgagaagcagaagcacgacgggcgggtgaagatcggacactacgtgctgggcgacacgctgggcgtcggcaccttcggcaaagtgaagagttgagtacgcgctccggaccgctgtgcg

SEQ ID NO: 185324 - DNA, 122 bp, Homo sapiens
agtaaagttgtttttgtatttctttacttgcaggcagatttttaagaggaattggtgtagcggtttcctagcttgtgatgaaaaagaaagggcaagatgacctccttgtgggagtcagtgag

SEQ ID NO: 185325 - DNA, 122 bp, Homo sapiens
agtctgtagatccatttaggagaacatccagcttcactggctgtgcaaatcccacccatgcggctgtttggggtgagaagtttctttaaatgtctgttgactctcttctctggaaggagcac

SEQ ID NO: 185326 - DNA, 122 bp, Homo sapiens
ggaggacatcgtgcccagagctcggacccagcagcccggccccgcgccctccctgtcccgcggcccgcaggcccagccctcaagcgcccagcctccgcggcctttgtggcgtcacagccagc

SEQ ID NO: 185327 - DNA, 122 bp, Homo sapiens
cagaagcccatggtgagtgcctggctgttctcaggctcctgaggggcggggccagggcctcgatgcctctgccctgcttccccgtcctcagcaggaactcatttaggaggttgaggctgggc

SEQ ID NO: 185328 - DNA, 122 bp, Homo sapiens
cttggggtcctgcttctgctcttgccgccgcctctcccgcttcttccgggggggacatgccgcagaatctagactgctcagtgctccgacgtctgctctctgacaaccccgccgacgccgcc

SEQ ID NO: 185329 - DNA, 122 bp, Homo sapiens
cctggtggaaaaccgcgactcttgcaagtgggcaaacttgacgttttcgctatgggcaaacgcgggagccggagccagagccagctactcaacaccctaactaaaaagcagaagaaacatct

SEQ ID NO: 185330 - DNA, 122 bp, Homo sapiens
gagccagcggcgtttctgccgaaatcctggcaaattccggtagaagtcggctgcaggaggcggaggaggagactaaaaaaccagaaaacaaccagcaaaccagctaggcagagctgagcgga

SEQ ID NO: 185331 - DNA, 122 bp, Homo sapiens
gggccacgtggagcgggtggacagcaaatggccacagtctcactttgcagatggggaagccggggtgcaggagaggaaatgcctcagcggggtccactgggggcggagccatagctgtagcc

SEQ ID NO: 185332 - DNA, 122 bp, Homo sapiens
ggcgggctgcaggtcccaagccctgccccgcggcaaggcagctaaggctcagtgagaaatcgagcgcagcaccggtgggctggcactgctgggggacccagtacaccctccgcagccgctgg

SEQ ID NO: 185333 - DNA, 122 bp, Homo sapiens
gctagcgcgcacccgcgagggtggaaggtctggagatccgggatggggaactgggtccttcgttttaaaaggtgcctctctacacggagggaggggagcacgtgatttttggagctaatcct

SEQ ID NO: 185334 - DNA, 122 bp, Homo sapiens
ccccacctgggaggtgaggagcgcctatgcccggctgcccttggtctgggaggtggggagcgcgtctgcccagccgccccgtcggggaagtgggcgcctctgcccaggccgccccgtctggg

SEQ ID NO: 185335 - DNA, 122 bp, Homo sapiens
aaaagcatcattaaattattcctcagcctgatttccttggaaagtttaggtattaagtttcgggtgctgtggaaagttggaatttaaaaacatctcgtacaagtattctgttgtacttttgt

SEQ ID NO: 185336 - DNA, 122 bp, Homo sapiens
gagtgcttactgagcgccccctccttgtcctccagagtcgtgtattgagtgcttactgagcgccacctcctcgtcctccagagtcgtgtattgagtgcttactgagcgccacctcctcgtcc

SEQ ID NO: 185337 - DNA, 122 bp, Homo sapiens
tctgtttagctgagaaggggagtgaagatccacctttcattgacctggaagaccctaaggcgaggccaacctgaccttgtggctggctggagctgcagaatttacgcaggtcatcagagccc

SEQ ID NO: 185338 - DNA, 122 bp, Homo sapiens
taggtgggggtggggtgggggttcctctgggttctctcggttcaggaggtccaaagaagacgaagcagcccagaggatttgcggctgcaggttctgtagtggagggaaggtgggcggacagg

SEQ ID NO: 185339 - DNA, 122 bp, Homo sapiens
tactccatctacagaaaggggaatgcactgagactgagtggcaggggactcaagttgggccgagggctgtgaggtacttcgctcttgcaaattttccagaaacacctgaccaaccccttgga

SEQ ID NO: 185340 - DNA, 122 bp, Homo sapiens
aatctacactggtcccagcctctcgtccaactcccgtaggacgccaagcaatacggagttcgagaagctcagaaatctcctgagccccaccagtccacactaggttgcaagcccgcagcacc

SEQ ID NO: 185341 - DNA, 122 bp, Homo sapiens
agcacaagaggaccaggtgtcacagggcagaggccaaaccacaactcccagcaggtcacgcggagtagggcgggtaagcgcgccttcttattggatggcgatggacagcgtgctcttacgac

SEQ ID NO: 185342 - DNA, 122 bp, Homo sapiens
tccaccgggagtctgcatggttgggagtcctgggtggaggggcctttgtgaggctggacccggctcagggcaggtggaggagctgggcctcccacagggtgcccgggcagtgccatcctggt

SEQ ID NO: 185343 - DNA, 122 bp, Homo sapiens
taaaaattttcatgtaatctaatctatcagcatttgtctctttgttgtacagtcacactgcgtatcgattggtcaacgacaacggacagcatagaatacgataggctatagtatgtagccta

SEQ ID NO: 185344 - DNA, 122 bp, Homo sapiens
agatagcggagcgaaaagagccaaacctagccggggggcgcacggtcacccaaaggaggtcgactcgccggcgcttcctatcgcgccgagctccctccattcctctccctccgccgaggcgc

SEQ ID NO: 185345 - DNA, 122 bp, Homo sapiens
ccgtgctgccccaggcaggttcccccacagaggtgtcctgttgagattcctcccatcagacgccgctcccagagctgtggcccgcagccctcctggggcgcctcctgccctgagctgaggcc

SEQ ID NO: 185346 - DNA, 122 bp, Homo sapiens
aggtgttcgggtcgagatttacagcggagtctcatcccgggacgtgtgagtgcacttcagcgcaggactgccctggactggggagaccggagccgcgattttagactcaactccccatcact

SEQ ID NO: 185347 - DNA, 122 bp, Homo sapiens
tgtgatccgcccacctcggcttcccaaagtgctgggattacaggcgtgagccaccgcgcccggcctctgttgtcttgtcagcaaaatggccctggtgtgaccgaggtcacgcagccagcaag

SEQ ID NO: 185348 - DNA, 122 bp, Homo sapiens
gcccactttgaaagccgcgatattctgaacagaggccatttttcttttgggcagattccacgggccatcgaagtgtttcgctgccatcttaaatcctggctgtggcctcaatcctgcagcga

SEQ ID NO: 185349 - DNA, 122 bp, Homo sapiens
tcaggacccaagcaacctgggcctctgtggaagggcagaatggcctgagtttgggtttctcgagctaccttaagatcaggcctcctggctcctatcttagcccttctaacactctgaagtgt

SEQ ID NO: 185350 - DNA, 122 bp, Homo sapiens
tgaggtttagattcctgggtaacagaagcgagggcaaaggctcgcccacctccccggacacgaagaggggccaacttcctccaagaacggggccttcccgcgggccaggaactgtgacggcc

SEQ ID NO: 185351 - DNA, 122 bp, Homo sapiens
gagaaactgtaaactctctgtgaagataaggaccatgtctgttttgctcatcatgcggttcgtggtacctagcacttgtatgcttttagtgagtgatcataatggaattctaattgttgaat

SEQ ID NO: 185352 - DNA, 122 bp, Homo sapiens
gccctggaaaggtgaggttcgctccgcagcgctccgtggggctcctggctccgccccgcccgccttgggcagctgagcccagctcacccccgccccgggaggatggaagagagggggcttct

SEQ ID NO: 185353 - DNA, 122 bp, Homo sapiens
ggcaaagtcaaggagcatccggtcgggttctaggcgcccgctgcttgggtttaaatcacccgcgcttcgctgcacgcgatgggccctgagccctgcccagtgcaaggctcattcccgcccaa

SEQ ID NO: 185354 - DNA, 122 bp, Homo sapiens
ggcgcgtcagccgagctcggcggtggcgcgggcggctgggacgcagctgcccccgctcggcgcccgctgcacccttagcagccactgccacctgggcccggagcctccacgatctcgcccgg

SEQ ID NO: 185355 - DNA, 122 bp, Homo sapiens
ggagcagtgacggttagtacagaaatgagttcagaaatgacaaacccacgagggaggaaacgggggagtcagcctctagggctcaaaacggctctccttggtggctgcagcctcgagaccct

SEQ ID NO: 185356 - DNA, 122 bp, Homo sapiens
ccgctcggcgccggcggtgaccgggaagcccgcgttaaaggggcaaccgggaccctggcccggtatggctgaagtcagcatcgaccagtccaagctgcctggagtcaaggaaggtaagggcc

SEQ ID NO: 185357 - DNA, 122 bp, Homo sapiens
gccgcgatctggccgctccgcgagccccaggtgaccgccggcgctccgcgtactgagaggcggaggccgtgcctggccagccgctcttaaagggacgcccacagctcacacgctcctcctgc

SEQ ID NO: 185358 - DNA, 122 bp, Homo sapiens
ctcaggcccttcgcacgtgtgagggtcggctgttgcgggagtggcccctgaccccaggtgcggaaatctgggtgtgacaccagctgctgtctggaaccagccatcctatcccactgactcgg

SEQ ID NO: 185359 - DNA, 122 bp, Homo sapiens
cctccggaagcaagctgctgtgccttgtagcgtgtggatccggagccgattcccagaacacgaaggggggaaaaaacgcttctaatgatccctcagaacttgcatattttcatacgcttttc

SEQ ID NO: 185360 - DNA, 122 bp, Homo sapiens
cttctttgcgggaagtttaatttttcgtttttgcaagataaatccaggccatccgcccctcgtcctccccagccacccggcacagatgtgtccggcttagtggttaaaggcgcagcctctgg

SEQ ID NO: 185361 - DNA, 122 bp, Homo sapiens
ggcttggcgtcaggagagaaggtggccggcctgcaaggtctgggcagccccgccctgatccgcagcatgctgctctccaacccccacgatctgtccctgctcaaggaacgcaaccctccctt

SEQ ID NO: 185362 - DNA, 122 bp, Homo sapiens
tagttttgaggcggcgagactggggaatccccggttgcgtcattagtaggcgtggaggggcgggactcgtgaagctgcgctggggccgggctctgagaggaccggcgcagccgcggggagcc

SEQ ID NO: 185363 - DNA, 122 bp, Homo sapiens
gagattccccccttcacacacacaacaacaaagcgtggacacacagaagtgaaatctgatcgcgtgccaggaaaagctgtgaggctggaaaccccggagtaaggctcgaccttggccagacc

SEQ ID NO: 185364 - DNA, 122 bp, Homo sapiens
aagcataagagccttcggaagcagcatgtaagtgcaacgtaactttcccgagtttggtgacgatgaatcgatgaatcgtagactgcaggctgagccgcctgagctgggagcagcagcagttc

SEQ ID NO: 185365 - DNA, 122 bp, Homo sapiens
ctggtatccatctcaagcttccagaggctctgccataggaggcttctgttgggtgggtgccggtcactcatttcccaacccctgctcctggctcctgctgagcttctcaaccctcttgctca

SEQ ID NO: 185366 - DNA, 122 bp, Homo sapiens
caaccatgctggccgaggccagttcagctgccgattaaccatgctggccggggccagttccgctgctgattaaccatgctggccgtaatttcatgacctgtcacttaggatttttgtccctc

SEQ ID NO: 185367 - DNA, 122 bp, Homo sapiens
caaaatggattagttcttaatatgctgatctgtggttatggatgttgtctggtttggagacgtggatttacaagtcatcagtacatcggtaaattgcccaggggaagaggaagggggggaag

SEQ ID NO: 185368 - DNA, 122 bp, Homo sapiens
tgcgcatcagtcttcttctcagtgatgtgcttcttgaactctggtgatctggaaagcaatcgaaagtgcaggctttacgtgtgaaattggctgaggcccacctggtgcagaagaagacctgc

SEQ ID NO: 185369 - DNA, 122 bp, Homo sapiens
ggaggttctgagcagggccccgggagccacggtgtgagcttctctctccgggggtgctggcgccctgccctccccacagaccagccggacaaccccagtgaggagaactgtggagtgatccg

SEQ ID NO: 185370 - DNA, 122 bp, Homo sapiens
agggcctagggcaaggcagggctgggcagagccccctccccagaacccccactcactctccgtgcacagtccgtgctggctgcagttagaggggccacagtccagctcatcacagccgggac

SEQ ID NO: 185371 - DNA, 122 bp, Homo sapiens
gtgacaagggaatgaaaccaagaagcccgcaggtcacacagcaggcaggcggctgcttcccgtgggtgtgcagagctgatgtgcagagacgtattgatcctccgtgctctgtctcaccggcg

SEQ ID NO: 185372 - DNA, 122 bp, Homo sapiens
cggaggtcctggcggccggctctgtcagagccgctggcaggcggagccccactccgggagcgctcacggcctttgccccagttctgctgctccttgcgccgacccagcccggcccttcaggc

SEQ ID NO: 185373 - DNA, 122 bp, Homo sapiens
gacgcatgctgaccatggccgctgggccccatcccgctctgcgcagccacgaggtgctcacggttgagacacctgcatgggtcaaaaccctgggaggaattaaatacagtagtggaggggcg

SEQ ID NO: 185374 - DNA, 122 bp, Homo sapiens
ttgtctccttagctccaatgcctttgtcctgattcagtgactcatttcttatatgtccatcgttttctaataggtttccttgctcctgattttttaatcatttattctatcctccatctctt

SEQ ID NO: 185375 - DNA, 122 bp, Homo sapiens
cgcacgcaggcatgcaccggagcgctgactcacgctgctcagcccaggaattcttgcagacggctgtgtgtccacatgtgcggtaaagcaaataaataacgcttaaacaccctcgtggaatc

SEQ ID NO: 185376 - DNA, 122 bp, Homo sapiens
gcccgaggaccacaccacctgtgtggatgcggggcggcctggctggcggaggaccaggcacgtgaccacgggagagctcttcatgagtctaccagcccaactttgacccctacagattaaga

SEQ ID NO: 185377 - DNA, 122 bp, Homo sapiens
tggacaccttttcctactgaacatattacagtgactttatagagagaaacctctaaaattcgatctaaacttagtctgtgtgcaagtctgtgtaacagggttttgcttttctggaagccggc

SEQ ID NO: 185378 - DNA, 122 bp, Homo sapiens
aaaagagccagcctcttctcccaggcttcttagcaacctgcctgtctcggctccaggaggcgggttccagccaatggttgagccacccgcttccagccaatggctgagggataagctgaggg

SEQ ID NO: 185379 - DNA, 122 bp, Homo sapiens
aaaatgacaggtccagagccctcagagactttcttttactggctgtttaattgcatcagacgagcttctcctctcactgcaccagggattggtaacagttaagtgctggaccgctgagaggc

SEQ ID NO: 185380 - DNA, 122 bp, Homo sapiens
agacgagaagatctgcctccactttgaggcccaggacctggatcttaagaagcattcattcgttcattcattcatttgacaaatatgagccaggaaatacatgaagtagacaaaacagacct

SEQ ID NO: 185381 - DNA, 122 bp, Homo sapiens
attatgcatagcacaaagcacatgatttataaagcccatggtaccataacaatgtaaaaacgtcctgtcagatctctgggaagaaactctatatcccagttcaataacaaagacactggaaa

SEQ ID NO: 185382 - DNA, 122 bp, Homo sapiens
ccactcccaaccagtcaccagtgactgtcatcctctgtgcgcctggacaaagtggttcgacgtggacttcccatcccctggaccccacggcggggacaaggaaacctacaacaacatcatca

SEQ ID NO: 185383 - DNA, 122 bp, Homo sapiens
tgcccactagcaggagccagctgacctcctgcgtgtcacaatagcagccaggtgtctccacggtgacgtctctgagccaggaggtcagaactgtgggattgatgacctcccacaactggagc

SEQ ID NO: 185384 - DNA, 122 bp, Homo sapiens
gacctggctcggaacctgagttccagcaaggctcaccacctttcaagtcctcaataaactcgaggccacaaggactgcaactcctcctgggcaagtcctgctgttatgctgggctcagagcc

SEQ ID NO: 185385 - DNA, 122 bp, Homo sapiens
aactcctgatcctcccacctcagcctcctgaagtgctgggattacgggtgagacccaccacgccggcctaataatacttattttcaagaaagaagtagttaacctatggctgcttacttttt

SEQ ID NO: 185386 - DNA, 122 bp, Homo sapiens
tgtttcagatgtgtctattttatcatactttaccaacatagtttggttcctggttgttgtcgggttccttgtggtaagaacccatcttctccttaaataaaattaaatgttgatgatctaaa

SEQ ID NO: 185387 - DNA, 122 bp, Homo sapiens
tccggaatctgggcggatgggaagtcctggagaggaccgcctgaggacgcggagttggggcgggaggatgtgtgtgtacaagcggaggggagacgctccaggctccgccagggaggccggag

SEQ ID NO: 185388 - DNA, 122 bp, Homo sapiens
gttccccagggtcgtcgtgggcggggccgcagcgaaggcgggggcgggaatgctcgggcgcgagtcgtttgctacaacttacctacagcaatgacggcttttgtaaattacacaccattctt

SEQ ID NO: 185389 - DNA, 122 bp, Homo sapiens
ggggccgcagcagggactaagtccgattttaattattgtccatcagtgctctcgcccccacggcgcctagaaccgggccgagtacacagcaggcagtggctatttgctaaaactcagaaggt

SEQ ID NO: 185390 - DNA, 122 bp, Homo sapiens
ggtggagagaagctgggctctccacgtgaagtaatggtgctcttctggattctgccatttcgggtaaaccagtcttgcgtttttcctctgatatttacctcttctcactgtgaagattcagc

SEQ ID NO: 185391 - DNA, 122 bp, Homo sapiens
gacctccccacaaaggtttttccactttcccctcaccctccttcccttccccctccctgccgatggggtgacactcaccaccaacatgtgcacaatgaaccatgcttacccagttacagcca

SEQ ID NO: 185392 - DNA, 122 bp, Homo sapiens
accatgcgcgagccgaagcagggcgaggcattgcctcatttgggaagcgcaaggggtcagcgagttccctttctgagtcaaagaaaggggtgacagacggcacctggaaaatcgggtcactc

SEQ ID NO: 185393 - DNA, 122 bp, Homo sapiens
cagggcgcggcagcccgccaggagcccgggcagcttggatggggtccctgtgggcacaatcggcccagtgtggggcgcaccgccccaggcaggctggcgtcccgggggccagaatgaatgga

SEQ ID NO: 185394 - DNA, 122 bp, Homo sapiens
aagctctaaaatgtgattcttcacatgactcaactgtgactccggcatctgggtagggctcgcacctcccccattcccatgcccagggctgcactgttcacagactagcccagggccgcagt

SEQ ID NO: 185395 - DNA, 122 bp, Homo sapiens
cccccgggcccagcatttcggcgaaatctcccaaggtccacattctcccatttctctcgccgatttgggcaggatgcaggcagctggccaagaaatgatcctgggcttcaggtcaggagtca

SEQ ID NO: 185396 - DNA, 122 bp, Homo sapiens
gggctactgtttggctcctgagcctgtgaacctcctgcccccaggcaggcctctctgatccgccctcttcaaaggcagggtagggggcaggacaaagggcccaactttaatgaggggcggct

SEQ ID NO: 185397 - DNA, 122 bp, Homo sapiens
agccaggacctttccttcacaaagcatccagctctttgcctagatctatcccaaagcgagcgcataaaaagttctggcaggaaacttagagggatgttgtttctctagaacatctcttggat

SEQ ID NO: 185398 - DNA, 122 bp, Homo sapiens
gggatctggggtccctaagtccctctctttaaagaacttctgcgggtcagactctgaagccgagttgctgtgggcgtgcccggaagcagagcgccacactcgctgcttaagctcccccagct

SEQ ID NO: 185399 - DNA, 122 bp, Homo sapiens
tcaacacacctatttacaaagggattccagagcccacttttcgaggctgaggaaagaccccgagagcgctttgcacagcgcgcttcccagcgtccgaaacactgctctcagggcggggcaca

SEQ ID NO: 185400 - DNA, 122 bp, Homo sapiens
cctgccacactcgatttgctcacaggcccaagacatggtgccttcctcacctccgggtgtcgcagatccaacctctccacctggcactaacctcgtccgtccccacctgcctccctcctata

SEQ ID NO: 185401 - DNA, 122 bp, Homo sapiens
agcttttccttagcattggaaaaccttttttttttaacttttattttaggttcaggggtgcgtgtacaggtttatcatacaggtaaacttgtgtcatgggggttcattatacagattatttc

SEQ ID NO: 185402 - DNA, 122 bp, Homo sapiens
atttttttttaataattgcaaaacagacacaaaagctaattgaattacctgagatgactgcgcaagtcccaagaacatctggagatttcctgacctttattctagtggttttatctgggggc

SEQ ID NO: 185403 - DNA, 122 bp, Homo sapiens
tcacatcttgccttgtttccccacagggcagctgtgcggagggtagtggcagccatgaaccggatggaccagaagaagcacgagaagttttcaaaccagtttaactacgcactgaactagag

SEQ ID NO: 185404 - DNA, 122 bp, Homo sapiens
tcttcctcggtgtcctcaggtgcgtggcggcggcagtgagaatgagttcttcgagatcgccgggagaccacacaataacgacgaagttacttgccgggctacccgccgagacttgaaaactt

SEQ ID NO: 185405 - DNA, 122 bp, Homo sapiens
gccctcggaacagcacggcctcatccacacatgacatgaccgcagcgtcctaacaaccctcggaacagcacagattcatccacatgctgcataatggtggcaccctgataaccctcagaaag

SEQ ID NO: 185406 - DNA, 122 bp, Homo sapiens
cctcattctccagttgaaatctgcatgaatctctctctttacactccaagccctacacatcgcctatttcccctcatggacgcctctcatacaaatgtttgcatcaacaaagaaatgctacc

SEQ ID NO: 185407 - DNA, 122 bp, Homo sapiens
gagcgaggcggctccgaggaaccgcggaggaagtgaagccagtcccgccactcttcagaccggccctccacctcggccaccgtcaccacagagctgaaggaggcctagagagccgcgcgtgc

SEQ ID NO: 185408 - DNA, 122 bp, Homo sapiens
gccctccagccgcagccccagcgcgcattcctacgggtcgccgggtctgtcgccagcgatcgaatgaagtcggctgatcccccacgtgtggctgctccagtgacacccaggggaggcctcgg

SEQ ID NO: 185409 - DNA, 122 bp, Homo sapiens
acaggagctgttcctattcggccatcttggctcctcctccagttaatatttttctgtccccggccgtggctcctcctccccgagcagtggggctcgctggacaagtgtcctcagatagtcca

SEQ ID NO: 185410 - DNA, 122 bp, Homo sapiens
tcgagggtgatggtcttaccagtcagggtcttcacgaagatttgcatcccacctctgagacggagcaccaggtgcagggtggactctttctggatgttgtagtcagacagggtgcgtccatc

SEQ ID NO: 185411 - DNA, 122 bp, Homo sapiens
ttcccggacgagtccggtagatggtagcattgtgcagccgatgcgtcctctcccagcttgcgtctcatttttccctctccccctttcctgggctcagcggtgaggctcaggtaccggcgccg

SEQ ID NO: 185412 - DNA, 122 bp, Homo sapiens
aacggatggtggtgagagggacagaccaggcaggctgacgagcagggcgggcctggctcacgtgggcctgtaggcgggcccacgccaagtttcacttcccgccactgctgccagcgagagcc

SEQ ID NO: 185413 - DNA, 122 bp, Homo sapiens
gctctgcttggccattcctgtgtggtcaaggatgactgagatccttccagattctgttgtcgtaagtaacgctgtggtgaacatcggtgtgcacgcttcatactttagactgcttctttggc

SEQ ID NO: 185414 - DNA, 122 bp, Homo sapiens
gtgcaggtaagatctcgctcagtgtgaagcttacattccagaggtggtgacagtgctccccggaagtgtaaaaaagaaaattaattttaaacgagttaagtgtcaaaagaaaaacaaatggc

SEQ ID NO: 185415 - DNA, 122 bp, Homo sapiens
ggtggggcccacgattctgcatttctagcaaattcccaggggttgctgaggtcatcagtccggggactgcacgtggagaaccacccctctaggccacgtatccctgcaccatagaaaggagg

SEQ ID NO: 185416 - DNA, 122 bp, Homo sapiens
gggtgagagccaagaccgcgtgggccgcggggtgctggtaggagtggttggagagacttgcgaaggcggctggggtgttcggatttccaataaagaaacagagtgatgctcctgtgtctgac

SEQ ID NO: 185417 - DNA, 122 bp, Homo sapiens
cagagcacgtcacagctgagaagcaggaatacggtgcatgccaagcactgaggtcacccccgagtgctctgccacggccacctcgccctccgaccccttccgcagcccgtcctcagcgggag

SEQ ID NO: 185418 - DNA, 122 bp, Homo sapiens
ggcttcaataccgctgatcagcgcctggatatgcgccagctgggctccaaagcgcgcctccgtttctgccagtgtgtcttccaaggcagctttctgaggatagggagagggggttgtgactc

SEQ ID NO: 185419 - DNA, 122 bp, Homo sapiens
ccgccgctccggccgggcctggccgcgggacaacgctaggcgtgcagggcgagggcggcgcgggcctccgggaggatgaatgtcttatggaatcaggtggtttgacactcgaggaatccgcc

SEQ ID NO: 185420 - DNA, 122 bp, Homo sapiens
gggatgcagttgctcccagatcagtcttaccaggatgtagacacattccaggggaaatttcgcagcactctgtaagtccttttctagcactatattacactatagtctttcccctccacagg

SEQ ID NO: 185421 - DNA, 122 bp, Homo sapiens
gagagtccggtgctgttccttccaaagctgcccccaagtcagggatgagctcgagggtttcgtttgtgagggggtcccgggaatccagcgaggccgggtaggtggtggggggcgcgcggtgg

SEQ ID NO: 185422 - DNA, 122 bp, Homo sapiens
tgagtggagggtcagagctttcctcatttcagtagcctatgaagagcctggtgctcatgacgttcttaggaaaaaaacattgaaaagaacatgatcctgagtactgaactcataattaggca

SEQ ID NO: 185423 - DNA, 122 bp, Homo sapiens
ccccggcttcggtgatctcagtgattacgagtgagtggggacttcgtgttcctgctagggcgcgggcctgtttcccgcgcgtcagggtagtgggcgtggcctgcgcaggccgttgccacagt

SEQ ID NO: 185424 - DNA, 122 bp, Homo sapiens
aaacgctcagcctaggggctggactcctcttaggccccagaaaaggaggcggaaattttgcgtgtgggaagtaaccccaaggagttaaaagccctgcaggggcatagaggagcctttgaatt

SEQ ID NO: 185425 - DNA, 122 bp, Homo sapiens
cctcatacccttgcattctttctgctctgccatctgagatcacctaagctgttgctgggccgccatgacagtccccaccgggccaggaggccaggacaccagagggtttgccccagtccttc

SEQ ID NO: 185426 - DNA, 122 bp, Homo sapiens
aggctaagcgcccggtgcagctccgtgccagaaccgcgtcccatcgtgtccctgttcattcgtagcccccaccttgtggcctgaggggcccagggcccttgagacctgtgatgtgaagcagt

SEQ ID NO: 185427 - DNA, 122 bp, Homo sapiens
cagcccgcggcccaggtctgcaagtgggagctgggctggggtccccatgctccacacacgcgtctcctctcccccagccctgccgcttccagggccctcggtgacgcccgctccccgggccc

SEQ ID NO: 185428 - DNA, 122 bp, Homo sapiens
tacgccctgcgctccttcgactatgagcagctgaaggacttcagttttcaggtggaagcccgggacgctggcagcccccaggcgctggctggtaacgccactgtcaacatcctcatagtgga

SEQ ID NO: 185429 - DNA, 122 bp, Homo sapiens
caccagcaggacccgaggccaggagccaggggcccagaaggtgagggcaccccgggtgggcgcagggtgggcgctctgtgggcaacgggccctgcggccgggcccaggagcaggcctcgttg

SEQ ID NO: 185430 - DNA, 122 bp, Homo sapiens
gcgccgcggcccgccgtgtactcttggcgcagggccttctgggagctgtagtgccccggccgcggcggcgaggggcgctccctcttcagctaagccgttagcgccgagcccgcccgggagcg

SEQ ID NO: 185431 - DNA, 122 bp, Homo sapiens
caattgcccgcgcaagggggcgtggcagcatcgttgggcggggccgcctgtaagagaacgcggctaaaggtggggccaagcgtgcggtttgctgcgcctgcgtgaggaaaaagaggggggcg

SEQ ID NO: 185432 - DNA, 122 bp, Homo sapiens
caggagctcacctgcgctcaactctggagcggagcacctgaccgcgccgcttccccgccccgcctcctggcttctattggctgctgcagagatagtcacttctgcctgggttgcccccgaaa

SEQ ID NO: 185433 - DNA, 122 bp, Homo sapiens
ctcagcgccagcgtctagcccgcgtctgtgttcggtcgttgcctggaaaccgccgcctggcgacccggagctgccctgcagcattcccgctccagggtggagcgaccctcccctcctccctc

SEQ ID NO: 185434 - DNA, 122 bp, Homo sapiens
catccatcaagcatggggtccctacacttcctgtcatgttcctgtcaaataataggttcccgcactactgcagtcgcccacttatcaggcccaaggtcctaaaaaaagcctggtctcgcccg

SEQ ID NO: 185435 - DNA, 122 bp, Homo sapiens
agcacctgctggcagcttccagggatcacgccggaacgcggccgctgctcgagcccagctcgcaggatgcctggagccagggccaagccggtctaagcggcagcctctatttttaccctgag

SEQ ID NO: 185436 - DNA, 122 bp, Homo sapiens
ccggggcggcggcacggccgatatggcatgctgtcacaaagtaatgctgctgctggacaccgcgggcggcgccgcccgccacagccgggtccggcgggccgccctgcgcctcctcacctatc

SEQ ID NO: 185437 - DNA, 122 bp, Homo sapiens
gagagagaggcaggctcgtctccagctttgtgtgggcagatgctgtgccagcgcccaggccgcggcctcaggaccacagcaagtctcggcgggaagcccacacgtgagcaagtctcctttga

SEQ ID NO: 185438 - DNA, 122 bp, Homo sapiens
ttgatcccagctctgccaccgcgtcaccacaaagtcacagcctcttcgagctgttttcctcgttcacctgtaaaatggggataacacctatctgaaaggttgtagggtgggagtgagcctgt

SEQ ID NO: 185439 - DNA, 122 bp, Homo sapiens
ctgtagggatctacctcccagagcacaccacagggcagagaagactggatccaaggacttcggagagaatataaacaggacaaggtacggtggatgagaactgtcccttctaactggatgtg

SEQ ID NO: 185440 - DNA, 122 bp, Homo sapiens
aaccatcagggttgtaactcctggctgcagcacccggaagggagggagcaaaaggagccacgcaagagtaattaggcaattgctgaccacagctctgaacctgcagtcactgataaacacaa

SEQ ID NO: 185441 - DNA, 122 bp, Homo sapiens
tggcaaaaggtggatgaacgcaccggctcccctacaccttccctgccttctactggcccacgttccccctctgaagctggagttggcagccaatcccgttacctttcaactttaaggcatct

SEQ ID NO: 185442 - DNA, 122 bp, Homo sapiens
ccgcgaggccgggggcagaaagcaatggcggcgggggcagaaagccgcaaaaacccgcagcggcggggtcaaaaatccacgatggcaaaaagccgcgtcggcgggggcaaaatagtggaaat

SEQ ID NO: 185443 - DNA, 122 bp, Homo sapiens
gtcacatttatgcaaatgtttcttctgctagaacctcatacctgttctagttcatctccacgtttattttaccaagagatcctctgtcaagagaatttcctggctgttgtgaaagaattttt

SEQ ID NO: 185444 - DNA, 122 bp, Homo sapiens
ccatgtctctgccaagtgcctattcttccagactgctcaactcaacaggatagtgaatctcggaattattcaccctactaaatttcatatgctctcttgatgcacttggaaaattgatactt

SEQ ID NO: 185445 - DNA, 122 bp, Homo sapiens
gtgcagagcttggtgaccattggaatcaggacgccagaaactgtgcaaagcatcgcgcgccgggcaccctctggccatagggtcccgcaagggctaggccggcgcgtcacggaatcagggac

SEQ ID NO: 185446 - DNA, 122 bp, Homo sapiens
cagggaacaatgaagaatcggctctgaaggaagctgccaactctgcctgagtcagaggaccggaaatcagtaagcttccccctgaaccgtttgctctgggaacgacctagggattaggaaga

SEQ ID NO: 185447 - DNA, 122 bp, Homo sapiens
cacccagctgtagctgcagaccggggcatccctgtgctctcggggggcctggaaggcccccggcccccacaggctcaaagcgcctgctcctgctgcctggcttctccctgtttccagcgccc

SEQ ID NO: 185448 - DNA, 122 bp, Homo sapiens
ccggcactctctaggcccctggtgagtaggatgtccacttcatgaggatgcttcctcctccggaggacagccctggccagtggaatgttctggattgaagaaacctgccaccccattctttc

SEQ ID NO: 185449 - DNA, 122 bp, Homo sapiens
agctcggggggaagaagacggcccgcaccagagtcgcgtcgctgccctgcgggatcgcagcgccaccccttcggccagcccagagccgcactgccccggctccgcccagggagcaggccggg

SEQ ID NO: 185450 - DNA, 122 bp, Homo sapiens
gatggagtatttaggactagcatctctgaattaagatcctgacttcacctcttaacttgccgtgaagtccttaggtaaattacttaactgttctgtgcctcagttttgtaaaacaataatag

SEQ ID NO: 185451 - DNA, 122 bp, Homo sapiens
tgggctggaggagagcagctgcttgctgcttgggaacacgctagggtgaccctgcgctcgcgggatctaagctgctttggaggcagaacagcttttacttatttacaaacatttcattaaaa

SEQ ID NO: 185452 - DNA, 122 bp, Homo sapiens
gagatcttcaagcccgaataatttttatcaggcgcagtgtggacagccccgaagcgcggccgggtcccctcatgcatatgcagcagattgtgatccttactccgtgagcgctgggcgggccg

SEQ ID NO: 185453 - DNA, 122 bp, Homo sapiens
ggaaggccggctgcgccgggccgaatctgggccaggcttggagcctacggaggctccggccgccagaggagagaggatcagggcgggaaacacagctcaaatcctacctgcatggccgagct

SEQ ID NO: 185454 - DNA, 122 bp, Homo sapiens
tactgtaatgtgtgtcacctggaattatggagctcaattaacagattatgggtttgtctccgcagcaaggctgggagctccaggaccacaggaagcaggtcttactcatttcctaactcagg

SEQ ID NO: 185455 - DNA, 122 bp, Homo sapiens
gggcttccagtgccacagaacctactccccttccaggcccatggaaggccctgaatgggacgccgggaccacccagcacccatcaagatacaatttcccgcttttctgttctgagcgagcag

SEQ ID NO: 185456 - DNA, 122 bp, Homo sapiens
ggaggagtggggacaagattttttatctccaagtgaattttctaaaaatgtattttataccggcttattcctagtattgaataaactagcgggctcactcagtgtggacagcgtggcctggg

SEQ ID NO: 185457 - DNA, 122 bp, Homo sapiens
tttataccccagaatccagtacagtgtttagtagacagtgtgcactcaataaatgcttgccgaaagaaaaaaaatactaggcaatggaattgcatccaaatagagtaacaacaaaataacta

SEQ ID NO: 185458 - DNA, 122 bp, Homo sapiens
taggccttttacagcaagcgctgccagcagggaactggtggatgtactcttgaccacgctcggctggactctggggagcccaagacgggtaagactaggtccccggccccagcagctggtgg

SEQ ID NO: 185459 - DNA, 122 bp, Homo sapiens
cggttcagcagagtaatggttagtatgaggtccagcagctgaatggagggatgagaggaccgaaggctgcttggcttacgcaggcttcgtgattgtaagtaagtgacagaggctgagttagt

SEQ ID NO: 185460 - DNA, 122 bp, Homo sapiens
agtggcagaagaaaaaaaaaatccccggttaggagaaaagtggtggaccacgcagagagacgtcatgaaatccgcagattcaatgaatgctactcaattccagccgactggctgagccccgc

SEQ ID NO: 185461 - DNA, 122 bp, Homo sapiens
ccagggcagaaagccctgttcagaggtaccagggagcaggcacaggccagggtccgaattcgtaacaagcatccgggactccacatgacgcaggtctgagaatcgatcccgggttccagccc

SEQ ID NO: 185462 - DNA, 122 bp, Homo sapiens
cagaaagcaaaaaagctatcaaagattaggttgtgtcaaaggatgtagaagtcagcttaacggtttcccactgatcaaagatgaacaacttgggcatcaaagagaatggcagattgaaacac

SEQ ID NO: 185463 - DNA, 122 bp, Homo sapiens
gggagcccgcttcgagggggcggaggctttcgtggctggcccagtatccctgcgggaggccggagggggcgagcgggcagctggggttagacacgccgggccagccccgcagcagttctcct

SEQ ID NO: 185464 - DNA, 122 bp, Homo sapiens
acagcaatgacaccctggcaatgggcaggagcagctacacaagaagaatggcaatggccccgctgccagttttgctagggaaggagattcacctcagagaataggtgcgaatcctgccccca

SEQ ID NO: 185465 - DNA, 122 bp, Homo sapiens
aatccagcctcaaagactctgatggaagaacacctgtgaataccgcgccctctaggcgtccgccacaccccacggccccccagacggggtcttcttttgttgcccaggctggagtgcaatgg

SEQ ID NO: 185466 - DNA, 122 bp, Homo sapiens
tgttctgactccaggtgggctctgccgctgcctgtgagatgaggccagatcctcgccgcccgcacctgcctctccccaactcgccctgcgcgggacaggtggacgccgcccacacctacctc

SEQ ID NO: 185467 - DNA, 122 bp, Homo sapiens
gctcctcgggcactagggccataggacgcgagctttacctgccgcctcagccgggttcctcggcgtttccgtcctattgtttctctcgcaccaaaatggctgcggccaggccgagccccgcc

SEQ ID NO: 185468 - DNA, 122 bp, Homo sapiens
gggaaccctcgtttgttaccggctactcaggccttgagataaacccaccgatccactgaccgtcagactgactgacgtggaacttccgggagccgattctcgcgatagtcagaggccagggc

SEQ ID NO: 185469 - DNA, 122 bp, Homo sapiens
tactctgcttactaagattgctggaaaccgtagcccaacactgcttctgaatacagctaacgtgcagttaatgaccattccatattcacacggggcctaaggaacataactactatttagag

SEQ ID NO: 185470 - DNA, 122 bp, Homo sapiens
tttcagggaagaaaaggtggctcgagtgaggaaactgcgggggcaacggtctctcgtcgccgggaccccgccgtgtgccgcccagggacgcgagggggcgctgctgccgcgccaggggcgag

SEQ ID NO: 185471 - DNA, 122 bp, Homo sapiens
gagcctggccgaagagcagaggcccccacggcgccctgtgtgtggaaacctccggatggccgcaggggggtggggggagaaccaaagccctgggatcgccgggggaggggcgggggcttggc

SEQ ID NO: 185472 - DNA, 122 bp, Homo sapiens
ccacagaaagacaggaaactgtatccagtccagcatcccaggatcctcctgcagacgcagcggcccgtcggtgagggcctccttgttttgagcagtcacggcccgggacttgaggacaagct

SEQ ID NO: 185473 - DNA, 122 bp, Homo sapiens
tggggtggctcccccttgtctcctaagtggccagggcagcacgaggctgtcgctgcttttcgtgtctctggcctctaccaagcatccctctttccgctcccacctggcactggcagcgtccc

SEQ ID NO: 185474 - DNA, 122 bp, Homo sapiens
actagaggtgtgtggcttgtgggattctgccaccctgtgtgcagcccttgagacgtggctcgtgcagcaaggccaagtccctgattgttctctcgttttaggctttgccattggggtgcagc

SEQ ID NO: 185475 - DNA, 122 bp, Homo sapiens
aaattaaaacctgaaacccagcaaatcccacttcacaatggctttcagtgttggagcctgcgaattaaaggcctccattgtttggaaggattatttccttgcctttactagcttcaaagaaa

SEQ ID NO: 185476 - DNA, 122 bp, Homo sapiens
ttggcgctttcctaggcagaagtaagttgtaaaagtggccactgcccatacgctttcaaacgcctgcctggagggtggaagttacctggggagcatgctttggtttgcaaatctaccgtcag

SEQ ID NO: 185477 - DNA, 122 bp, Homo sapiens
agtggatgggtgtcccctcctccgtggctgggtgtccaccgtggggggtcaggtattccccgtgaatggccatctgttggctcttggagaacagtgcattttcctgggaacacagccatggc

SEQ ID NO: 185478 - DNA, 122 bp, Homo sapiens
ccgcgctgagcaagtcctgatcgcggactcctgagttacggggaaccgcctggtccaaggcgaggacagggagtgcaccagcagagggaacccaccctgcctccaagccctgcggaacttgg

SEQ ID NO: 185479 - DNA, 122 bp, Homo sapiens
ccgactgtggccactcaactggcgttgaacttgagcaactcactataccgctctagcctccgactaatcacttctgtaaaatgggcattgtgggctccgagtctcgtaagggcgctagggat

SEQ ID NO: 185480 - DNA, 122 bp, Homo sapiens
taaccgagataattcatggatatcccttgcacaatggttgagtattgagatctcaatagacgttagctcaaaactgcaataaaaagcgacctgaaatcctcaaggcgtctcaaaagaaagat

SEQ ID NO: 185481 - DNA, 122 bp, Homo sapiens
gcagagctccaggcagaagaaaactacatttcccagagacctctgcgcggtcgggagcaccgcgaggaggggcgagatgggggcgggcctctgtgtgaaggcccttcccattggtgcgcatt

SEQ ID NO: 185482 - DNA, 122 bp, Homo sapiens
cgagcagagttattttgtgtccactccagatgaacaccccggggggcacgacagagatgacggctcggtgtacgggcagatccacatcgaggaggaatccaccatcaggtactcttggcagg

SEQ ID NO: 185483 - DNA, 122 bp, Homo sapiens
caaaggtctagccacagtgatcagataccggcaggatgatgaccagagatcatcacactacgatgaactgcttgctgcagaggccaggtaagaccaaacattactaaacacatggggaaccc

SEQ ID NO: 185484 - DNA, 122 bp, Homo sapiens
ccggagctacctgaagagcgcggctttccccggctcttcgggctgtggaggctgcgggctcgcgcttgttccgggacaggggcgtggcgcctgctgctggctcggctgcccgcgctgcactg

SEQ ID NO: 185485 - DNA, 122 bp, Homo sapiens
ataacattgaatctgtaaattgctttgggtagtttggccattttagcaatactgattcttcgtatctaagagcatggaatgctgtttcattagtttgtgtcatctctgatttttttgagtag

SEQ ID NO: 185486 - DNA, 122 bp, Homo sapiens
cagaaggagcttctgcaaaaataactgctgcaaaacaaagcaaaataataatatgaaaagcgcccaggctgtgtggcttcaggcacagactcttaaatcttcgacaaataaaagcctggcag

SEQ ID NO: 185487 - DNA, 122 bp, Homo sapiens
tgaattcaaaccaattgaatctgagttcagttggtttttgttaatgtggtgtatcttgttcgattaagccttcattttaaaattaaaggtgtcttaaatggagttgcattgtttgaccttag

SEQ ID NO: 185488 - DNA, 122 bp, Homo sapiens
tctgggtttacagtagttgtaggattaaggaccatttacttcctggggtgaattgcaaaccggcaatcaaggggctgacttccccctccactgtctgcttatcaggttcagaccttcccata

SEQ ID NO: 185489 - DNA, 122 bp, Homo sapiens
ttttctggaaatctactttcttacagatttcaatcttcagaaagttctccttgagtttcccgtaattataagctagatgtcaggagatttatttcctctagaattaaaacaaatctcatctg

SEQ ID NO: 185490 - DNA, 122 bp, Homo sapiens
ggggctgcagggaggggtgcgtttggccgaggagtgggtgggagacacgcgtgtccatgccgcgagggtgtgtcgacgcccgagcctgcgtggggcccggggccgtgtgtctggagtggccg

SEQ ID NO: 185491 - DNA, 122 bp, Homo sapiens
gcacaagattgaattttcctagcagggcatgacggggtaccgcaagctgcggtcagggaacgcacagagagaaagcaactcagagcagtgacgcatgggctcaaatgcaaaagcacgaaggc

SEQ ID NO: 185492 - DNA, 122 bp, Homo sapiens
gtgccagcacacctgcagtcctgcagacctgggaagctccactgacagttgcaaaccccacgcctgtgactgcctcccccacggggcaggacctggcatgagcagaacccacacccaaagta

SEQ ID NO: 185493 - DNA, 122 bp, Homo sapiens
gctatgttgcctcagctggtcttgaactcccagtcttggcctcaagtgatccttctgcctcggccttctgagtagctggaagcacagctgtgagccagcacacctggctttttttttatttc

SEQ ID NO: 185494 - DNA, 122 bp, Homo sapiens
gggtttgagcccttcctggaggtatgaactacatgcgagccacgtccatggcgatgcctgcgaaagacgggcatgatttcttctccaagccttctttttcctcttcctcacgttcgagcttg

SEQ ID NO: 185495 - DNA, 122 bp, Homo sapiens
tgtccaaaagccagtgtgtgggttgactgtttcccagaggagcaagctctctgtggtgaccgcatctctagctaaccctctggcacccaacagtcaacccacatcagtgatgagaaatcacc

SEQ ID NO: 185496 - DNA, 122 bp, Homo sapiens
ctttggcatcactgtctctgctctttctcttccctctcagccccgcacatcacaccgtgccgtccttcagcaacccaccacttacagcttccagggacagtggagagaacagaggaaggttg

SEQ ID NO: 185497 - DNA, 122 bp, Homo sapiens
ctcagacacccttagtgggaggattgaaggggccgggccggggctcctgggcccccttctcgtgaagcctcaggtctcccagggtcagcggctgcagttccatttggcaatcccagaaagcg

SEQ ID NO: 185498 - DNA, 122 bp, Homo sapiens
acgcgatgatattcaaggagtccaaggttctcaaaatgtactctggggccaggcgactcccgagacccttttggggtctgcaaggttcatttttgactttccttctcctgagtatatggtgg

SEQ ID NO: 185499 - DNA, 122 bp, Homo sapiens
tgctcaaataatattaatgctctatgatgaagatggtagcgaggatgatgatgattaatgcgacccatgcaaaatagggctggggaggatgacataggcgagggaccagaagagggaggatg

SEQ ID NO: 185500 - DNA, 122 bp, Homo sapiens
ggctcgccatggctggcccgcagcagcagcccccttacctgcacctggccgagctgacggcgtcccagttcctggaaatatggaagcactttgacgcagacggtcagtaaagctcccaactt

SEQ ID NO: 185501 - DNA, 122 bp, Homo sapiens
ggaaccgctctgggaaggtttgcaaaggtcggggtcccccctgccaggtgatcgaattatcgtggagtgtctggaaggcgggggaagttttgttgagttcaccaaataactcagaccaactg

SEQ ID NO: 185502 - DNA, 122 bp, Homo sapiens
tctctctgaatcgttatttcatcaaagtgccgcgttcccaggaagaaccaggcaaaggctcgttctggaggatagacccagcctctgaaagcaaattaatagaacaggcttttaggaaacga

SEQ ID NO: 185503 - DNA, 122 bp, Homo sapiens
cagcaggcgctgccatttttgaggaagccacaaactgacttccaggagcccaactagattcggtttagaaaatgcgcatgtgcgaggcacgaggcgattctcgcgtcacagtgacccccatc

SEQ ID NO: 185504 - DNA, 122 bp, Homo sapiens
tggaagcagggttgaggtgtggcgggaacgggccgcgtccactccccgcacccccgacagcgcacctgagccccgcctcggccgcacagcgctcgccgctacccacccggacccccagaaac

SEQ ID NO: 185505 - DNA, 122 bp, Homo sapiens
tctgccataaacctgaacttgggttggagagcccccagagactggctggggtaactggttcgtagctgtctaccccggaataaatgccaccttcttttccgcggtgtctgcgggaccctctg

SEQ ID NO: 185506 - DNA, 122 bp, Homo sapiens
aattcagttagaacagagacgtgctgagaagctgggccagagaccccgcggggaacctgccgttgtttgtcaaaaaacgaggccagcgaggaagaagccaaccatgcctcccgctccactcg

SEQ ID NO: 185507 - DNA, 122 bp, Homo sapiens
ggaagcgactggggatgagggcggagcgcaggtgacccagggcctccagcaccaaggggtcgcactgcaggcagccccagcctccgggggcgcccaagcccgagagcagcagaagggtcaaa

SEQ ID NO: 185508 - DNA, 122 bp, Homo sapiens
gtgcgaggccggcggggactggcagagccgtggctgcccgccgccgccccctgggcacggcgtgaccttgttctggggacccccgccccaagagggtccgtgccagaggctgccgaacccgg

SEQ ID NO: 185509 - DNA, 122 bp, Homo sapiens
cgctgcatacggacagcagcctcaagaggacaaggtgatttagtgactctagcctcttcccgcggtgccagcctgatttcaccctctccggaacacacaagcgaacctccggggagggagcc

SEQ ID NO: 185510 - DNA, 122 bp, Homo sapiens
catcctgcggctgctaccccggctggccctggcgctgggaccgggtcgggggcgcggacccgcctgggtccaaactcccgagggtgctgattctctttgctgatactctcccaacgagctgt

SEQ ID NO: 185511 - DNA, 122 bp, Homo sapiens
tcaaaacagtgtggattgctgccttgtgaaatgtttgtgaaatctcgtggtgaagatatgcggagaatttctgaaagtggaatttcctgaagtaaaaaattaagcattgaaaaataagaata

SEQ ID NO: 185512 - DNA, 122 bp, Homo sapiens
ggacttgggtgagggttttatgatactagcataatcagagatcatctctgcattgccagtcgctttctgttatacaaactcctccaatggaaactaatgataagtcgtttgttaaagtgttc

SEQ ID NO: 185513 - DNA, 122 bp, Homo sapiens
agcatttggcctgttgcgtctggctcatttcactggcattacgtgtcccaggttcgtccgcgctgtgctgcgtgtcaggtgattcactcctttctgtggctgagggacttcccttgcgtgga

SEQ ID NO: 185514 - DNA, 122 bp, Homo sapiens
gcaggaggcggctcccgggtgaggatccctccgcggccagcaggggacgctgtggggctgcgccgccaggaccgttttgccagggaagaagccatcgcgcacctgggttcgtgacacccgcg

SEQ ID NO: 185515 - DNA, 122 bp, Homo sapiens
ccccggccgaacggccacccagaggctgtgctgagctggcgcagcggcagcagcatgagccggaccctcgcatcggccgtgcccctgtcgagtcccgactactacgagaggctgggccaact

SEQ ID NO: 185516 - DNA, 122 bp, Homo sapiens
caccaagaagggagagccagaagcctcttgactcaactcaaaaagtccagggtgacgccgcgcccaccaaagtcgtgtgtgcctgaggctctgcggaattgagactgggctgaaccacagaa

SEQ ID NO: 185517 - DNA, 122 bp, Homo sapiens
gctagtgcgtgagtataaggagagacgggaaggaccggctccatccagccctgaggatcccgaagaaagggtggaaacaccctggatgtgctaagctgtggccgggtacactcaagtgttaa

SEQ ID NO: 185518 - DNA, 122 bp, Homo sapiens
cccagtctggctgcctctctgtctctgtctatctgtctgtctctctctcacaaacgcacacgcacacgcacattggcagcatacctcttctcccacagtgactaatactttctgtctctgga

SEQ ID NO: 185519 - DNA, 122 bp, Homo sapiens
ctgaagaaggcggaccagggcagggagcagcggccccgggagggcggggcggacggggtccgcggagggagaggggcagggggtgtggcggctgcaggcggagcaggggctgggcctcccgt

SEQ ID NO: 185520 - DNA, 122 bp, Homo sapiens
ggcctgaaagcagctccaggatctcccggcggcggagaggtggctggaacgtctgtctgtcgctgtccattttactttgccgctcccgaactggctgccggagctggagtctccccactagc

SEQ ID NO: 185521 - DNA, 122 bp, Homo sapiens
gcggcccgggcaggtaggtggagccacggtgcggggcagtcggatggtcgcacgcgggggcggggccgcgcctgcgcagaccgcctgttatggcggccgcctaagtcccacagagacgggag

SEQ ID NO: 185522 - DNA, 122 bp, Homo sapiens
cccagcagagcgagggagcggctgtggcctggggagcgagcgcctggcgaattttatacccgaccggggcgtgtctggtacgcgaggatccgcccccttctctctctggccgttggggccag

SEQ ID NO: 185523 - DNA, 122 bp, Homo sapiens
ccgcataacgtctgaggcgcgcacgcctcacgcgcgccccgcacgcgcgcccgcctcacgcgcgccccgcacgcacatgacggcttggcttacctgtaatgggtgcgcttcgctttgcgttc

SEQ ID NO: 185524 - DNA, 122 bp, Homo sapiens
ggccgggcgctgtccatggtgcccgcgcgcctcgcccggtccccggccccaaccctcccgcgagcttcctggcgggctccctcaccgcttgtagtcggaggagaagatgccgccgctcgcgg

SEQ ID NO: 185525 - DNA, 122 bp, Homo sapiens
gtctttctcttttactttacagccatatccccaggagagcgcctgtatttgcgggccctgcgcgtcctcatgccctccttcactccttactggtatatgatagggtttttacctccagaacc

SEQ ID NO: 185526 - DNA, 122 bp, Homo sapiens
atgtaacttcacaaccaaaaagtacgactccctatccgaccacaactccaagttccatcccggggaggccaacttcaagctgaagttaattaaacgcaataatcaaactgtcttggaacagt

SEQ ID NO: 185527 - DNA, 122 bp, Homo sapiens
tggcctgggactcttaagggtcagcgagaagagaacacacactccagctcccgctttattcggtcagatactgacggttgggatgcctgacaaggaatttcctttcgccacactgagaaata

SEQ ID NO: 185528 - DNA, 122 bp, Homo sapiens
tggaaggcagggaagaaaaagcccagacaagcgtcctcttgttgagtctctttactgcaacgaggctgacggatggggtttttcaaaacgtcgctgcaaccagatgcaaggctgcagctttg

SEQ ID NO: 185529 - DNA, 122 bp, Homo sapiens
agagaggaaaacggggggatgggggcgccccaagtgccctccctgccttcccttcccccacgcaagcccagttcccccaagggccaagttgaaaaatgcatgttccactcgcgcccatcccc

SEQ ID NO: 185530 - DNA, 122 bp, Homo sapiens
gggacggacctttgtagctttgcgaaattaaccgtttttcctccacaactgccagctcggcgaatggccttcaagcccatccaacaggagataatctgtccttggaactagtgcaagtcagt

SEQ ID NO: 185531 - DNA, 122 bp, Homo sapiens
caccccgcccggcctggacagggaaggtggcgggaggggcagcgcagcagacgctctccccgccaggcaaggacgaagagttcaccctcaagctcatcaaccggcccatcctggtgctgcgc

SEQ ID NO: 185532 - DNA, 122 bp, Homo sapiens
ggcccctccctggtcacacacctgcttgtgtggacgccaggcagaccctgccgtctggggcgctcgactgtggacacccgagaccgctgcctcaccccattgggcatgtcgccagtgatgtg

SEQ ID NO: 185533 - DNA, 122 bp, Homo sapiens
catcggggacgcggctcctttaagggcgtaggtgtccagggcgccgcctgactggaaagtcgccccccggccgggctcctggggcggacccggggcgcgggcgcgcggcggcggggcgcggg

SEQ ID NO: 185534 - DNA, 122 bp, Homo sapiens
caagggccagaaagtagcatcaggctcagagctggagtcagggctggcactgggaggccccgacagcaggagcctctgatccaccttgttccagctgtcttgaggaccatctctcccggcag

SEQ ID NO: 185535 - DNA, 122 bp, Homo sapiens
ggctgtcttacccaagtagaacaggatcaaacagagagatcagaagtaccctgccctgctcgcacttttctacagagcaactaaacttgcctttcatctctccaggaatactttctccatca

SEQ ID NO: 185536 - DNA, 122 bp, Homo sapiens
gctttcttatctctctcccccactgtgggcggcaagccagccaggtgccgaggcaagagacggagggcacgagctgatccagtgtaacaaaatatataaaacaacaagagttatgctagatc

SEQ ID NO: 185537 - DNA, 122 bp, Homo sapiens
gccagagccatgggaaggggaagggaatgtggcggcagtggggatggaggctaggaaagacggcctgtgttctaggccctcagaagttctaagggccatcttggtttctcccccagccccca

SEQ ID NO: 185538 - DNA, 122 bp, Homo sapiens
acgggtgccccgcaccccgcctcgctgggcggaacggggtagcgatggcaggagggtcaacgcctgggacgcccgaccgtccagctgcgtccgtggtgctgggcgtccccaccacctgtccc

SEQ ID NO: 185539 - DNA, 122 bp, Homo sapiens
cagttgttgacatcctgaggcaggtttgcggctgatggagcaacagggacgggctgggcccggcacctttttcacggaaatgatgagctctggacagcagtgatgccagggcccataaagcc

SEQ ID NO: 185540 - DNA, 122 bp, Homo sapiens
gccagcaaaggtcgtcagtgacagggatcagttgtgggcggcgagtggtccctctgcacacggtatctgggccgagtctggattcattagagtccccggcgcccagcactgagtggcatgca

SEQ ID NO: 185541 - DNA, 122 bp, Homo sapiens
gtggcttacacctgtaatcccaacacttggggaggccaaggcaggagaatcacttgaggccgggaattggaagttgcagcgagttcaccacagtactgcagcctgggtgacagagtgagacc

SEQ ID NO: 185542 - DNA, 122 bp, Homo sapiens
ccagaccccagagcaaggagaccctcgcctcgggttggatcctcgcaggaaataagctcccgtcggcttcccgccccggcaaggctcaagccggctctggagcttctgttccccgagggaag

SEQ ID NO: 185543 - DNA, 122 bp, Homo sapiens
agaagttttcctcccatttttgtatgatgaaagccaccgcaggcaaagtcaggagagccacgtcaagaaaaaggagtgggtgttacgagaagcccggcatctaattagattttgctcttgca

SEQ ID NO: 185544 - DNA, 122 bp, Homo sapiens
ataaatattttaatctctgtaggccacagagtctctgttgcaattattcagctcagtcatcgtcacacaaaagcaagcatagacagtatgtcagaggatgggcatggctatgttccaatgaa

SEQ ID NO: 185545 - DNA, 122 bp, Homo sapiens
cctttgcctgcggcactagagccccagggccaggggagacccagcatccaaggtgcaccacgggggagcttcacccggatagaagccggcactccccacgtcccggcgccctgtccggcagc

SEQ ID NO: 185546 - DNA, 122 bp, Homo sapiens
cctctgtaaagacagaaggtaaaataatgctagttctgtgaattctctcttcttctcgtgcgaatccataaactgccactgatagacagaaaggagctcaatgagaagacacattagactca

SEQ ID NO: 185547 - DNA, 122 bp, Homo sapiens
taaggcactggaaagttacacaaagcgagagaacggaaaccaaacgcaggcaatcctcagcggagctcttctccagctggaacaatgagctttgtcccgagaacaaggggggcacgcccagg

SEQ ID NO: 185548 - DNA, 122 bp, Homo sapiens
ttcacaatgtgtcatgaaaatttaactacttcaggataaagaccaggtgccacattctttcgtttttgttaaaggttttaacactcctggtaatcaaggctttttttttttctccaaaagtc

SEQ ID NO: 185549 - DNA, 122 bp, Homo sapiens
ttttaaaactttgaagtacagtgagaaacataatttagtaagcaactcagtatgcacacacggaatggaaaaagctctgttctatgttatttgttctattttgttcaagtctagctcaattt

SEQ ID NO: 185550 - DNA, 122 bp, Homo sapiens
gccaaccccatgcccagcatcctactaacccccgcacatcccaggggtattccagaaaaccgcgcctgcaagatgtctaggcccccactccttgattatattaatgccaaaatgtattaaag

SEQ ID NO: 185551 - DNA, 122 bp, Homo sapiens
tgcgcggtcgccaggcgcgccgtcccaccccggctcggcttgggggtggccccgcgcctccgccgccgacgcagctagctggtttttaaattgctaatctcattaacggcgcgcccgtccga

SEQ ID NO: 185552 - DNA, 122 bp, Homo sapiens
gcttttcttctcaggggtccagcttatttccaaattgccccgcgtgaactgtcccgcgggcgcgcacgccctttcgcgcagcctttgcagccggctggcgggagatcccggccgcttccctt

SEQ ID NO: 185553 - DNA, 122 bp, Homo sapiens
tcatccccagcgagggcctggcgtccccaagggcacccttgttgacgttattgttgtagccgcgaccatattgtttgtttccggcgcttttgcgtcagttcgtccctccaggactctctggg

SEQ ID NO: 185554 - DNA, 122 bp, Homo sapiens
cgcatggtgcgcgcacccactgacctgcgcccactgtctggcactccctagagagatgaacgcggtacctcagatggaaatggagaaatcaccgtcttccgcgtcgctcacgctgggagctg

SEQ ID NO: 185555 - DNA, 122 bp, Homo sapiens
gccactctggaaaatagtgtgacagtttcttataaaaccaaacacataattaccatacaacgcagcagttgcattcctgggcatttgtcccagggaaatggagaattatgtttacataaaaa

SEQ ID NO: 185556 - DNA, 122 bp, Homo sapiens
aggcgtgtatcgattggttggcgccgcgggcgcaggtgcgcgctttctattgggtgtgggcggaacgcgagggattgcggcatcttcgggggctgcaggtgagcgcgcgcacgcgccgcggc

SEQ ID NO: 185557 - DNA, 122 bp, Homo sapiens
cccccacgtcacggagtttaccgtacagggcttctcttaaaatggcggcccccaggcaaccggcgttctcaatatggtcccttccgccctcttctggtctcaaaatggctgcccctgcccta

SEQ ID NO: 185558 - DNA, 122 bp, Homo sapiens
tgacctggtgatccgcctgccttggcctcacaaagtattgggattacaagcgtgagccaccgcacccagccaggaatactttcttataattgtttagatgcattaggatttgcaagatggag

SEQ ID NO: 185559 - DNA, 122 bp, Homo sapiens
tgttctggagtttgttgggaggagcagggggctcccttccggcagggccccagggcctcacgcctctgaaagggtggtggtcctcccaagttcctgacttatgcccatctctccagccccac

SEQ ID NO: 185560 - DNA, 122 bp, Homo sapiens
ttcggggcagagatccagagatcctgcctgagtcactttggcgggtttaatgcccagccgcgccaggcacacagtaggtgctcagtaagtgaaacagtgccgggaagaattcgggccgggga

SEQ ID NO: 185561 - DNA, 122 bp, Homo sapiens
cgcccgagggggccgagtgcggctgtgccggtggctggagtgccgaggggtgcggggtgccgggggcggccgcgtctacgctgtccggagggtgaacggccgcgggcttgtcggggctgggg

SEQ ID NO: 185562 - DNA, 122 bp, Homo sapiens
gaggggaaaggaagggggacgggggagggggggtggttccctggcttgcccgctggctgccgtgaacagtctctgggtggcatcttcagatgcagttgtcttactctggcaaccttgcagag

SEQ ID NO: 185563 - DNA, 122 bp, Homo sapiens
gctccggctctctggtctcccgctcggccccgccccctgccccgaccccggtcacgtgcgcgccagaccccgccccggcctgtccccggcgattcctgcggacccagctgcggcgacgccag

SEQ ID NO: 185564 - DNA, 122 bp, Homo sapiens
gaatagaacaagttcgatctgttactgactacataatcaattgagttaactcactaccttcggaccagctcaaatttacagtattttaatcactatcacatagtgtagcatctttgtacttc

SEQ ID NO: 185565 - DNA, 122 bp, Homo sapiens
gctgggccgaggacacacatgcacacgcacacgcacacgcacgaggagaccggggaggcgcggggcccctgcaccctcccagactcacaccgacacacgccccgtacacggggcccccggga

SEQ ID NO: 185566 - DNA, 122 bp, Homo sapiens
ctaccggacacaggtggaggtgggaattcaaagcccacccagcagacaggtcctagaggccggtggacaggggctagcggatctgcagccgtccctatggggtgcggagtggatgagctggg

SEQ ID NO: 185567 - DNA, 122 bp, Homo sapiens
cctctaggacctgtaaccgggttttgccctgagaggatgctccatgggaagtgctcctgccgagagccagcagcccagcctcccggcggctttgggcaagccccaacaggatgccaggcggg

SEQ ID NO: 185568 - DNA, 122 bp, Homo sapiens
aagagatttcttggtgcctctcttgggaatgtcactgacgtccacagtgactgtcacatgcgtgtcagttgttctgtgggtttgctgtgtgcggggcactgtggaaaggaagaaaggcctag

SEQ ID NO: 185569 - DNA, 122 bp, Homo sapiens
acaccaagctgggaaccgacaagtgtgacaactcctccatgtcgctgcagatgggctacacgcagggcgccaagcaaagcggccaggtctttggcctgggccggcagatacatgaccccaag

SEQ ID NO: 185570 - DNA, 122 bp, Homo sapiens
ctgctgctccctgcctgccagcgccctgcacatactttgcacatggctgggggccagctgcgggtccctggggactcggatggcacagagggccccttcctgccaccatcacggctcagacc

SEQ ID NO: 185571 - DNA, 122 bp, Homo sapiens
ctgagcatcagtacctgcacagccctgaatggagcagctgcccagaatctgtcttgtcatcgatagatggacagttgccgagtgtcctgcgtgccgactgactaaggagtttttgtctctgt

SEQ ID NO: 185572 - DNA, 122 bp, Homo sapiens
ctacgggcgtcttctcagcctcctcagtcttttctaggacgttccagtgctgccagggggcgcaggcctggagaaaggccacaggagtggggacgggcgcgagacttgggctcctcctggcc

SEQ ID NO: 185573 - DNA, 122 bp, Homo sapiens
ggcctgctgtcacctcgctgggctctaaggtactgtggggtggacctgggacaagcaggccgccctcggactaggttagcatcctgcccgagggcagccccctccctagagcgggatgggga

SEQ ID NO: 185574 - DNA, 122 bp, Homo sapiens
gtggggggaaagaaaaggaagcaagaaagaaagggaaattaaatccacacgtgttaagctcgctcaaagggccagagtcaaaaccagagatgaaacttcgactccagttctggctgcccgcg

SEQ ID NO: 185575 - DNA, 122 bp, Homo sapiens
tcccaactcaaactctggggagtcccagctctgtgcagcaggagtcaagttctggggggtcgaggacagaaggtgggctgaggagagggaaccccacagacacaaggacacacacatactgt

SEQ ID NO: 185576 - DNA, 122 bp, Homo sapiens
atgcacgaccacgaggtgacggcctctcgctaagtcctcagcacacaactgtctgagccgcgtttaccgagagagtgaattagcatgacgacgtaacacctgtttttctaatctttgaacct

SEQ ID NO: 185577 - DNA, 122 bp, Homo sapiens
cctctggctctgatatatttagctgttgtacttgagcgagttagagaaaacgccacacttcgagacgaattaggagtccgtttatttagccggcggccaagagacggctaacgctcaaagtt

SEQ ID NO: 185578 - DNA, 122 bp, Homo sapiens
caagcactgcagtctcttccaagacaacagaaggtgcaaccggcatctacattcttacaacgaaggactgagaaacacctcctgacagtcacactacaggacagtaaccatggggctggtga

SEQ ID NO: 185579 - DNA, 122 bp, Homo sapiens
acacaccagggtacagattggagtgcaatgacaaaccgcacaacacaccagggtatggatcggagtgcacggagaaaccgcacaacacaccagggtacggattggagcgcactgagtctggc

SEQ ID NO: 185580 - DNA, 122 bp, Homo sapiens
atacaatgtatgcttcattacaagaaagtaaactgcagttggctagtggaaagaatgctacgttttatggacattggattaaatggtcataaatgttgactttgcagctttcatctggtatt

SEQ ID NO: 185581 - DNA, 122 bp, Homo sapiens
ctggatgttggcccagtgctagatgtgcaggtgaagggatcctggggcatcttttctgggcgggggtgggcgtggaggcaggggatggaccaggtgacggctgccgcatgggtggagactat

SEQ ID NO: 185582 - DNA, 122 bp, Homo sapiens
aaggggccagtggcttttcagaagaagggtctgttctcggccccacaccagaacgccagccgccaggtcccgctgctcagcaggtctcaagcccgcgctcactcgggctccggctgctgaca

SEQ ID NO: 185583 - DNA, 122 bp, Homo sapiens
agcgcggcaaggtcggtgaggcagccaccttcactgtggactgctcagaggcaggcgaggcggagctgaccattgagatcctgtcggatgccggggtcaaggccgaggtgctgatccacaac

SEQ ID NO: 185584 - DNA, 122 bp, Homo sapiens
ttctgaattcagattcgttcacaggctgctgacgacaatgcggcctcctcaggggtttctcgggactcctgcttaccctgctgtcctggagaaccttgggcagcctgatattgatgagcccc

SEQ ID NO: 185585 - DNA, 122 bp, Homo sapiens
tcggcaaagcagctggactatctccctcctctgcaaatcagcccccaactccggccattgcggccgtcacacccagagtaacgctggcgttccaaccccggtcagcagagctctgcaaccgg

SEQ ID NO: 185586 - DNA, 122 bp, Homo sapiens
ctggtgtgatccaggcccctcagacataaccctgtaacacctccaagttaagccaaggcacgtcacacatgagaaagaacactgcagttctccaaaatgcttccacacgatgcacatctatg

SEQ ID NO: 185587 - DNA, 122 bp, Homo sapiens
ttatctgaagcaaggccagaagcgaaactcaaacgaggtgactttccccaaagaacagagcggtctcctttcatcagaagaggtgaggctccccgggcctgtggccaaacacaacggtgaca

SEQ ID NO: 185588 - DNA, 122 bp, Homo sapiens
aagcaaaaagcgacaaggcatcttcataagagaccccacctcccgggtcaggagatgaggcgggatgtcaaggttgtgcgtcgcagcagccgggcctcctgtgcgcaggacaaatgggcaac

SEQ ID NO: 185589 - DNA, 122 bp, Homo sapiens
ggcctcccgggacgatactagaacaggacaggaggttggaaccctcagagctggggcctccggcacccccagccccagccctctaacagcagccatgttccctgtttctcttcctcactaac

SEQ ID NO: 185590 - DNA, 122 bp, Homo sapiens
agctgggggcagccgggggcccgagtggctgaggctggtcccgcagcggccgcttgccggcgttctggctcctgtggcctcaccaggaagcgtcagagtcccgacactggggaagctcggag

SEQ ID NO: 185591 - DNA, 122 bp, Homo sapiens
tctcaggatcctttcaagggcttagatgttgctgcggcttgtttctgttttcctcgtggccggcctgtctttctccgagaaaattcaaacctgggataaaaggaacacaagggagaaagatg

SEQ ID NO: 185592 - DNA, 122 bp, Homo sapiens
agctgtagctggggcggtaggggttgtgctccggcaggcagggcctggagtcataggactcgaacggctggaagcggaaggagctgcaacagaagcacagcccatcaggggcggtcaccccg

SEQ ID NO: 185593 - DNA, 122 bp, Homo sapiens
ccagagacggacacttaaaaaaaatgaattcacaaaggatacaggggaattcaatttaagcggtcatgttaaaaaagtaatatctcctttataggcttaatgtatgtcataattggctaatt

SEQ ID NO: 185594 - DNA, 122 bp, Homo sapiens
gaaaagtattcaagtcatctcccttcatggtcaacagtgaggttagaggactatccttcacggttttgtttttcctgcttcctcagccttactccagggactttttgttgcctgtaaagtgc

SEQ ID NO: 185595 - DNA, 122 bp, Homo sapiens
aagaggatttatagaacaccacatgttaggcagttgcaaaaagcatggctggagaggccacgctggattgcccctcttacttcggttctccaaatgctccttctttttaacactctcctctc

SEQ ID NO: 185596 - DNA, 122 bp, Homo sapiens
agctcacagtctttcattgtacagtgaacatcctagatttactcacactcaaaactcattcgtcctaaattgtcaaccaccaagaaaattgtgttttgtttaaaaattttcttgaaagataa

SEQ ID NO: 185597 - DNA, 122 bp, Homo sapiens
tatattctggtctggtctgtttctacacttaattttgtttccagtagtatttccctgtaccggcagagttcacaaacacatttgaagaggctttttctcaggattcttaaccttcccaaagg

SEQ ID NO: 185598 - DNA, 122 bp, Homo sapiens
tgagaaaatgtgaatgggtgaaacttaaagggaagcctaagagaagagtgagcagaggaccgaggagaacattgtatgcacagggttttgctcaggaaagctagcagcccgaaagcggcgcg

SEQ ID NO: 185599 - DNA, 122 bp, Homo sapiens
ctggatccagcagatcttgaagttagaataccccagaatctgagctgagcatttattactcgcaactgaaagtatagactgaaataagagagagttctttcttttacctttttttttttttt

SEQ ID NO: 185600 - DNA, 122 bp, Homo sapiens
cacgcgcgctctctgcccatgccgctgcagccggaggcctgcatctgtcccagccctggacgcgctgaaggtcctagcttcccagcaggggtgtcccagtcaccccccattgccgagcttcg

SEQ ID NO: 185601 - DNA, 122 bp, Homo sapiens
tgtttctctttcttttcttcacccctcctgctccaggctatcctgaggggggaaaaaaaacgtggagtattttccttggacctctggagtatgcatgttatgtatgtgtgagtcttagagaa

SEQ ID NO: 185602 - DNA, 122 bp, Homo sapiens
agtcgattatttcctgcgtatgggctggaagacctagctgacaggcgagggggctcgcggcggcgggcgggtacctggttgaccgcggcgtgctcccttagtgccaggtcccagaagcagca

SEQ ID NO: 185603 - DNA, 122 bp, Homo sapiens
cccgccagcctggttatcacctctggcaaggtttgcagatgggttgtgggctccagggttcgagccaccggcaacgtcttgggctccccttactgcttcggcatcagcagcattagcaacag

SEQ ID NO: 185604 - DNA, 122 bp, Homo sapiens
ccctggcaaggcaggtgctactcaaccttctgccaaggataaccacggctcctgcatccacggagcgcgtgggcaagcgtgtaggagaccaagcggacctgtgtgtgagaagtccctctttg

SEQ ID NO: 185605 - DNA, 122 bp, Homo sapiens
tggttattcactaacagctggcgcatgtctcccccggacaaagccactgggaagcacaggcgctctgattggtgaaccagaaccgtttccctggtaacagttaactagcacgtgttttattg

SEQ ID NO: 185606 - DNA, 122 bp, Homo sapiens
caacccaagcatgtagatttcagaaggggactaggacccccggcaggtgtttgagaccaccggctcccaagtgcgtcgccttgggggtttgcatcggctcctcagcctccccaggcaatctc

SEQ ID NO: 185607 - DNA, 122 bp, Homo sapiens
tttggcctcaatgacacagacacatgccaagatgggtggatctatcctgacgctaagaagcgatcgctgatcaatgaggtatgtcttgtcatgggttgtctgtaactaccctacaggctcag

SEQ ID NO: 185608 - DNA, 122 bp, Homo sapiens
accatcccctgcctccgagggacacccgctcaccgtcctcatccacctcctcgatgatggcgtccagctcctccttggtgggtgtctggcccagcatcctcatcaccgtgcccaactccttg

SEQ ID NO: 185609 - DNA, 122 bp, Homo sapiens
ccagtcgccttccctttctgggctgttggcttaaaatacacacaaacacaagtccccaggcggtccgcggcctctcagtggggctggagctcgctgcccgaggcccgcccggaagccatgca

SEQ ID NO: 185610 - DNA, 122 bp, Homo sapiens
agagaagcctgatgaagccaaagataaccggagggacctctttttatgggcttcaaagatcggaaagccagagatcaccccagggcaaggtagcccacagcagccgcctacccggtgctttt

SEQ ID NO: 185611 - DNA, 122 bp, Homo sapiens
ggaggggtccagctgtcaacgttttgagcaacaggtcccaggaggactttcagctggggccgtcattcagctagaaatccagggctaggtttcaggagagggccagagatgtctagcatggt

SEQ ID NO: 185612 - DNA, 122 bp, Homo sapiens
gggtgacagagtgagactccatctggggcaggggaacgtactccccactcctaaaagaggcgactggtaatctgacttctgtcaacatagataagttttacctggttttgaacctcaaaaaa

SEQ ID NO: 185613 - DNA, 122 bp, Homo sapiens
gaaaagacaatacattttaacgccattggagctgctgctgtgctgcggctgctgcttctccgcctccgcggggtgcggctctcgccgcggctcgcccggcggctctgcgggctgcaggtgcg

SEQ ID NO: 185614 - DNA, 122 bp, Homo sapiens
tttcttacttccttttcatggaccccagataaagactttgacagccagatatccaagatccggatcagccagcttcctaaaattctcctctttttttttaaggggtagaaaactgggggtat

SEQ ID NO: 185615 - DNA, 122 bp, Homo sapiens
ccagaaccacctctttgcggggcacctcctcactccgcggagaagagatgtgctgtttcccggcctcatcccagcacctcccagagcctggcgctcctagctactaatggaagttcccagaa

SEQ ID NO: 185616 - DNA, 122 bp, Homo sapiens
gctctgcgggtcctgcgcccgggtagattttgctgagatggggagaggggaccccctccacgcccccggagtagtgaacaccattttgtttgaaagtatcctgcaaagagaaccacctcacg

SEQ ID NO: 185617 - DNA, 122 bp, Homo sapiens
gcgcgaatccgtagggtcgtgtccccccagtccagtccctggtactaagcccggagctgccggaggtcatgcagcctttccgcgcccaggtgaaaccgcctttgcaaaatgatgactgaaac

SEQ ID NO: 185618 - DNA, 122 bp, Homo sapiens
cagcaggctgacggctcgttccaggacccctgtccagtgttagacaggagcatgcaggtgcgggcatgctggggctggcccgagaagcgcctgtcggaggactctctttgccccttccccct

SEQ ID NO: 185619 - DNA, 122 bp, Homo sapiens
cagttctctttgccagggctgacccccaggttgggcggggcctggacatagcacagatcacgtttctccgcaagtgataccagatagaaatgaatgtggtgcagccatgacagaaaaaccta

SEQ ID NO: 185620 - DNA, 122 bp, Homo sapiens
atggtgtgcctgcagggattcgggaggaaatgcgacgcccacccccagacttgggaaaggcgggggcaataattctctaagagaactggagcccgaaagaggaatgaaaagcccccgcgccg

SEQ ID NO: 185621 - DNA, 122 bp, Homo sapiens
aggcgacttcctcctctctcgtctctttttgtcccacaacaagtctgcactggatgtgcgcgcctccaacacccgctcattcatttctctgcttgtggcacagccttcggcaggcagctgag

SEQ ID NO: 185622 - DNA, 122 bp, Homo sapiens
ggacagtggagcaggcctcgaggtggcccaggcagttccagccaaggatgggcaggccaccgaggaccagcgagatgagccacgaggccccgatgagcagaagcatgcggcagctcttgtcg

SEQ ID NO: 185623 - DNA, 122 bp, Homo sapiens
gccctggatttccaagctgtcaaagtctgtgggtgacagcgtgctgctcatggtggtaggcggcttcctgctcctgcaaggagaatgtggccagtgaggggtgtccagggaccaccaagccc

SEQ ID NO: 185624 - DNA, 122 bp, Homo sapiens
ccctgagtacttaacactgctttcagaatctcattctacaggatcgcactccatctttttcgtgaccttcttgaattctgacttcctgaacattcaggtatacatttcaataatgccaagta

SEQ ID NO: 185625 - DNA, 122 bp, Homo sapiens
ccaggcgccccgaccttaccctcgctggaattcccgaagacctcggctgcaccagccacccggtgttcggatgccagcaccgctacgaccagcagctgcaggaaccccattgctgcctgggc

SEQ ID NO: 185626 - DNA, 122 bp, Homo sapiens
tgtgtaacaaagccaaagaacagggtcccttaagccttcatttgagaatcagggagagtgcgaaccctggaggagtatgggtaggcaacttgatgggtaaaatggaaaaggaagaggccgct

SEQ ID NO: 185627 - DNA, 122 bp, Homo sapiens
agatgagggggttggcattctccaggaggccgccgccgaccccgccgccgcctaccatcgcggaaccaccaccgctgatcctagcaggcgtgcgcttccgctccaacccgcgcacttccgga

SEQ ID NO: 185628 - DNA, 122 bp, Homo sapiens
gggaatgcccgaggcaccggacgaagcagtcgggtctggccccagtcgactccagccaggcggggctccaagccgagactcctgcacgcccggcccgaagctagcccgacaccctcagctga

SEQ ID NO: 185629 - DNA, 122 bp, Homo sapiens
caaatataaaaattgccagtgtacgtgcgtccaatgtaagtgtggtgcaattttaaagcacgcaacagagcattcataatgggtttcccttttaaaagcacagtagaccaaaaataaacctg

SEQ ID NO: 185630 - DNA, 122 bp, Homo sapiens
cagcataattctgactacttatagtcaatgtaactgtcttgagccaaaatacaatgaaaacgtaagataaaatgaaaaggctttgtaagtcttaatggcattctgaaacctctggacagaag

SEQ ID NO: 185631 - DNA, 122 bp, Homo sapiens
tgaacagttgtcaggagggatgaagtttaggctgaccgttttctgatttaaagggcctcgcgtagaaggttctaaagatttaagaatgagatcagctggccagcagggagtggctgaggcct

SEQ ID NO: 185632 - DNA, 122 bp, Homo sapiens
tggcgagtcgcaggaggaaggcctgggccaagtgccgcagctcctggcaagcgtcggagacggaggatctgtccacagaagcgacgacgcaggacgaggaggaggacgaggaggaggacctc

SEQ ID NO: 185633 - DNA, 122 bp, Homo sapiens
taaaaatacagtgtaataaaagttatgtgaagatgatctctctttctcaaagtatgttatcgtatgtaatattttcagattgcagttgatatggatagctttaaacctcagaaagggaatcg

SEQ ID NO: 185634 - DNA, 122 bp, Homo sapiens
ggaggggcaatatgaatcttattaggggttgtatgacaccatatgtaatacatttggaaacggtaagtgatggattgcagagagctaaggagcatgaaatttatttcatggacaaaaaagat

SEQ ID NO: 185635 - DNA, 122 bp, Homo sapiens
gacttaacggccggcagggatcccggactgggcctgaaggggagagcgtggtggtcgtcgcggagccgcctgtcctgctcccaccgaccccggtctgaccacgtccttggctgtcatggccg

SEQ ID NO: 185636 - DNA, 122 bp, Homo sapiens
gtctggagaggcctcagctgccgaggggaacgggctggctcctgagccgctccagcaggtcgatagcaaaacaaacgcactattgaccgccgcgcgcactaaatcctcccggcagacaagat

SEQ ID NO: 185637 - DNA, 122 bp, Homo sapiens
cagccaagtggattcgtggctggtgcacagcgtggcagctgaggatgcagacgtggctcacgggctgctcggcgccaccgccacgttggccagaggagtcggcgccagccaggctgcacagt

SEQ ID NO: 185638 - DNA, 122 bp, Homo sapiens
gggcccaggaggcggggaccagtgtagctcacgcctggcacctgcggaagcagacatcagcgtagctcacgcctggcacctgcagggagcaggaggcagagaccagtgtagctcacgcctgc

SEQ ID NO: 185639 - DNA, 122 bp, Homo sapiens
agatccttttaaagctgatttctccccggatctccgggcaagatgggcaagtacacggtccgcgtagccaccggggatttgctcctggcgggctctcccaacctggtgcagctatggctggt

SEQ ID NO: 185640 - DNA, 122 bp, Homo sapiens
ttaaagggaagctgattgatattgtgagcagccagaagatttggcttcctgccacatgatcggaccatcggctctggggaatcctggtgaatatagtgctgctatgttgacattattcttcc

SEQ ID NO: 185641 - DNA, 122 bp, Homo sapiens
ctccgagtgctgctgctgcaggaactgtaggctcttctccaggtccaggttccgtttctgcgggtcgctctgcctgagctgcgggctctgcggcctcaaggactggacgcccacagaggggc

SEQ ID NO: 185642 - DNA, 122 bp, Homo sapiens
aacgcttattacgccaaagcaaagaagcaagtagattagatgcgtgggcttatccagttgcgctggaacctccaaatgctcaaggggtaggagtgcgtcgatatgcgccactcaatcttacc

SEQ ID NO: 185643 - DNA, 122 bp, Homo sapiens
gatggacgctgcaggtgtcctagggtaggagcagtctgggaagtggaggtcaagatgcaccgagttctgtttttacctcaatggtctggatgcgctggaagaaggaatttatcctggaaaag

SEQ ID NO: 185644 - DNA, 122 bp, Homo sapiens
aattggccatgatcacccagtgtgtagggagtagagttggaactcaaacccaggtctcctcgactccagaggctgggctcttgagctacctgccagctgaagctcccagccagctgaagctc

SEQ ID NO: 185645 - DNA, 122 bp, Homo sapiens
cgccccaggaaggaatggggagcccgggatcgcaccctcagtgcgcgatcagctgacccacgcgggccaagcgcgccctaaactccggccaattaaatccaccattcggcctgcgcacgcgc

SEQ ID NO: 185646 - DNA, 122 bp, Homo sapiens
gctcatttccaccgaggtcaaccccaagctggtgagtgggttggagcccagcccctctggcggcccaagggaagccaggcccagccttggagggctccctgctgggtagctagggccagcac

SEQ ID NO: 185647 - DNA, 122 bp, Homo sapiens
cttccagcccctcggcccctctaaattcccttgcagccgagcctcagcttcctttttcagcgcttgccatccctctaggctcttggcagactgagctgcatccgcattcacctcccctcctc

SEQ ID NO: 185648 - DNA, 122 bp, Homo sapiens
gttcctgcgggcaggtcctgagtcacactgacagagaaccacggagacgccaggactccccgcagcagagaaacgggccgacacccagggaggcgcgagaataactgaggcaaggaggagga

SEQ ID NO: 185649 - DNA, 122 bp, Homo sapiens
ggttccgctttgggctgctctgttgggccctagcgcaggagctcggtccgaaacaatggccgagccattttatttaacatgtactttaccatagttaaaaaataatatgccaaaatcattga

SEQ ID NO: 185650 - DNA, 122 bp, Homo sapiens
cccggccggcgataaaaaccgccgctgaaagcccacggagcaatttcccgggaccccgagcgacgccattacaggaatgtaattttgcccggatgaggccccgagtttaattatcctcgcgg

SEQ ID NO: 185651 - DNA, 122 bp, Homo sapiens
cccaaccacatggcctttctttatcttctccaacagggcagacttgttcctaccttagggcgtttgcacttgctcctcctttgtctggagtgctccgcccccacctgtaaccttctcaaaaa

SEQ ID NO: 185652 - DNA, 122 bp, Homo sapiens
cggcgcctgcgcggcagcgggggtgggagctgcggacggccatgtgcgcggcggagaggccgggtggccaccgaaccttcccgcctgttctgcggtgggtaggagtttggaaactaatgttc

SEQ ID NO: 185653 - DNA, 122 bp, Homo sapiens
tgctgcccactcttagtccgagtaagtgtttgccgttttgactctcctggggtcccaagtcgtgtccggcccgccccaccagtcaggaagattccatactgagtaggaaggcagagcaaggg

SEQ ID NO: 185654 - DNA, 122 bp, Homo sapiens
gctcctgcacactaatgcattcatgcaacaaaggactcacatccaccatgaatcaaagagcgcctaacaaattgataaggaaaagatacactacccaacagcaaacaggtgaaatgccccaa

SEQ ID NO: 185655 - DNA, 122 bp, Homo sapiens
gggcactgtagaataaaggacatggagcaaaataactgtgttaagactagctaccaaagacggagacgatctgctcggcattgaatttgcctctttgtcaaggaaagaaggagcagaagatg

SEQ ID NO: 185656 - DNA, 122 bp, Homo sapiens
catccgcctcaaagcccacggtgggcgcctggttcatgcggaacacgcactcggcactgtcgatctcagcacccaggcctgagcccagcatttggccggagctggacaccacggcacagctg

SEQ ID NO: 185657 - DNA, 122 bp, Homo sapiens
tggtacgcgctgggcggcgagagcctcatggcggaggaagagagcgaccaagaggccgaacgcctcggagaagagcttgtggccattgtggagtccccgctgggccctgtggggcttagagc

SEQ ID NO: 185658 - DNA, 122 bp, Homo sapiens
accctcgaccctgtcaatgacctgcagctcaaagatatgtcagttgtagagggtgggctccgggcccggaagctggaggagctgatccagggggctcagtgtgtacacagcccccgttttcc

SEQ ID NO: 185659 - DNA, 122 bp, Homo sapiens
ccgcgtgaagaagctcatcaactcacagatcagcctcctcatcggcaaaggtagctctgccgagtgggccgtgtggccgggctggccctgcctgccccacccgctgacccagccctccccac

SEQ ID NO: 185660 - DNA, 122 bp, Homo sapiens
ttgcctgccctccttaaagcctgcgtcccagtctgtgcgaatgattcggtcatccagacgcgtcccatttatgtaccgcatggcgttttccgcatctgcgcgtgagtaatatcttaagtatt

SEQ ID NO: 185661 - DNA, 122 bp, Homo sapiens
agcaggatgtgagtatgctggctctgctcccagctgtgcaggaccttacataggtgacttcgcccctgagtctcagttcctcaactctaaagtatggacaattggccaggcatggtggctca

SEQ ID NO: 185662 - DNA, 122 bp, Homo sapiens
ccccactggactcaggagcccagctggcttcacctagtgtatcctgcaccgggccgcaggcggagctgcccccagttttgcgctgcgtgcccgcagcccttgggtggtccatgggaccaggt

SEQ ID NO: 185663 - DNA, 122 bp, Homo sapiens
accggccgaccccagcaagacgcagatactcagtaagacacacagcaatgtgaaggtgaccggccgaccccagcaagatgcagatactcagtgagacacacagcaacgtgaaagtgaccggc

SEQ ID NO: 185664 - DNA, 122 bp, Homo sapiens
gccgcaggtccgctgcggcgcccgcccccctctcccctccccgggccttgccctgctcgtcgctccgccccctgcccggcccctgcccggccccgccccgcgcccgccccctgcccgcgccc

SEQ ID NO: 185665 - DNA, 122 bp, Homo sapiens
ttccctgctcaggaggaggccgacaggaccgtgtttgttgggaatttagaggcccgagttcgggaagagattctgtacgagctgttccttcaggtaccgtctctgggaaggggcggcggagg

SEQ ID NO: 185666 - DNA, 122 bp, Homo sapiens
tttaaccgaagagaggaggaaaatcccatcatgggatcatagccaagcctggaatgcctgcggggcagcactggaagtcacatagtagtgggcaagcctgtctattcctctaaaggagagca

SEQ ID NO: 185667 - DNA, 122 bp, Homo sapiens
gtggagcggggaaagaaaaactctaaggtcctcgctgcaaagcaaccatcagagctccgccgcgccgtgccgctcctctccgccccgtggtccgggtgtcaccgcccgcaggggcgcaaggg

SEQ ID NO: 185668 - DNA, 122 bp, Homo sapiens
actccttggccacttcatctatacccacttacaacgaagatatctttagtctacccatctcgctcaataaatgtctttatttctggctgtctacaggatatagctcccctggctgatgacaa

SEQ ID NO: 185669 - DNA, 122 bp, Homo sapiens
gggcttggatcctagttctgtgtcccaacaaaacaatagctaccacagagcgaggacgttcgccgctaatcattcatttgttcaaaacacacgttaaagagctaccctatggcaggcattct

SEQ ID NO: 185670 - DNA, 122 bp, Homo sapiens
gcaggttttgctggggttaacccagtttatagcctggagggacagcaaggaggcttcctgcgtgggtggcagcgaaccgagcgggaggagcggcagagctgctgctcctgcaagcaaatgcg

SEQ ID NO: 185671 - DNA, 122 bp, Homo sapiens
actcaaggcaagagagattttatatgtgcaaaatgatactgattcagctcaaacatatctcgattattttctgggttgggatgcagttgactcaaaacaggttgtgtagtgtggacatttat

SEQ ID NO: 185672 - DNA, 122 bp, Homo sapiens
tgagacctggagataccacgtcacatagcagaagacagtgctgaagctagcccccaaacccggggcatcttcctggtgtttcccacagcctcagatgacattccatgtagtctgaccccagg

SEQ ID NO: 185673 - DNA, 122 bp, Homo sapiens
ttcgggttcgacagaaaggcggcaataaaaagacccattggtcccgcctctctactgtcacgggttagtagggaagtcagtccaagatcagcctggagtttccgtgctcccattgggcccac

SEQ ID NO: 185674 - DNA, 122 bp, Homo sapiens
caggtgggaggtgtggtgggtggcatggaagtcgaaggacagaataacagggaataacttcgagttggagtgggtggggacaggcagatctcccatccaatcaaggagtctgtgctaccctg

SEQ ID NO: 185675 - DNA, 122 bp, Homo sapiens
ccagtaaattataattacctgtatggttctttaatcttttagaaagatacttagataaaacgtcaagggcttttttataagtattaggaatgcttgcttttggatgtagaaatagagaaagc

SEQ ID NO: 185676 - DNA, 122 bp, Homo sapiens
aagatgccgcctttgtggcccctccccatagggactattcctccaacctgattgcttccacgtgcacatgaatacacacacgtgacaggaatccctacattcctgaattccctaaaccgatg

SEQ ID NO: 185677 - DNA, 122 bp, Homo sapiens
tcatttagcctcacaaccttgaaagggaaatagtattcctatttacacagatgagagaaccgaggcacagagaagttaactgaattgccttaagttctaaagttaataagtagcaaagcaag

SEQ ID NO: 185678 - DNA, 122 bp, Homo sapiens
aactcattggcacagcaggtaacgtgcccgagccgggggagggagcgtggggggccgggccggcaggcctctatagccaggagtgccccctgggccacggcccggccctgccagcctggagg

SEQ ID NO: 185679 - DNA, 122 bp, Homo sapiens
tatacattttctaatatcactttatactattttaacatacattccgttttattttttctccgagtcaagacaagaaaaatcaaaccgaattaaagcaaagcctgtaaattcaaaacctgatt

SEQ ID NO: 185680 - DNA, 122 bp, Homo sapiens
ccaggaggcctcggcgggtccgcaattggccgggacagcttctcacgaaaggtcctgggccggcatcatcagcctcacctgggaactggttagaactacaaattccctcggccccacccaga

SEQ ID NO: 185681 - DNA, 122 bp, Homo sapiens
ctgaccatcaccccaggcagtcatcttcatcaacacccggaggaaggtggactggctcaccgagaagatgcatgctcgagatttcactgtcttcaccattcgtggagatatggaccaaaacg

SEQ ID NO: 185682 - DNA, 122 bp, Homo sapiens
ggccaacacaggttcccggtgggtgcaggctccacgagccccactctcagtgcgtcctgccggtgcctgctgggctagatcagggaatgagcttgctctgggctgccagagtgcccgggcta

SEQ ID NO: 185683 - DNA, 122 bp, Homo sapiens
ggactgcactcttgcggatttctctgccgggtctggtgctgcagatgcaaacccaggccccgtgaacaaagcgatccggagctgcaattcctccctgctcactcctgtggctgacttgcacg

SEQ ID NO: 185684 - DNA, 122 bp, Homo sapiens
acacggcgaaaccccgtctccactaaaaaaatacgaaaaccagtcaggcatggcggcgggcgcctgccatcccaggcactcggcaggctgaggcaggagaatcaggcagggaggttgcagtg

SEQ ID NO: 185685 - DNA, 122 bp, Homo sapiens
agcccgcagcgcgcccggagggaaggccgcagcgagccgaggcgccgccgcccgctggcgcggagagggcacgagcgaacaaggcgcctttgagaatccaccgcccccccttcctcctccgg

SEQ ID NO: 185686 - DNA, 122 bp, Homo sapiens
ggagacgaagcgggtagggggttgctgtttagctgtgcggccgtggatccgcttccttctcggcctccctttcccatccctgattggctgcgaaggctatcgcgtcattcgatggctcctcc

SEQ ID NO: 185687 - DNA, 122 bp, Homo sapiens
gcagtgaggatgaacctggccccatgactcttccttggaggaagtggctgtcctgaccatcgctctccttccttcgtctggtagctgtggactgtggcattcctgaatccattgagaatggt

SEQ ID NO: 185688 - DNA, 122 bp, Homo sapiens
tgagctgctggtcatcaggccactagtccctttaaagtggtcctctctcaggcaagtgtccgtaaaacaaggccgcacccaccccctctagaaggctatgggtcattgtctttcctaattct

SEQ ID NO: 185689 - DNA, 122 bp, Homo sapiens
atgagggtctctctcgcaacagaaacttccactgttacttcatttgagttctccagggagcgcgtgcacaacctcggtaaacacactgcgctccctcccaagggcttgcaggccaccctcag

SEQ ID NO: 185690 - DNA, 122 bp, Homo sapiens
ggcagggttgaaaagtactcagctcgacaccggagaaaaaagaaacccccataggaactccggttgttcgggtgtgtcctaacagcctcactctggacctcttggacctggtgagtccgtgt

SEQ ID NO: 185691 - DNA, 122 bp, Homo sapiens
ggtctgctgacaaccggggactcaaggggcccacctcctctccctgctctcaccactccccgccccctaggcacagcagtgactcagactgaaggcccttcagcttgaaatggggacaattt

SEQ ID NO: 185692 - DNA, 122 bp, Homo sapiens
ggcagggcacaaggggttgatctcagcccacaagccccaggggcagcccaggaaagcaggcgacggatgtggatcctgacctcctgagaggtgtgaggtgcagggatacccacctctgcctt

SEQ ID NO: 185693 - DNA, 122 bp, Homo sapiens
tccgctcagcagcaccgagagcagctcctactggaggagctggtgtcgctggtgaaccagcgcgatgagctagtccgggacctggaccacaaggagcggatgtgagtggcgctgggcggcgc

SEQ ID NO: 185694 - DNA, 122 bp, Homo sapiens
gggctggtgactagcacccggaatttatgctctctttcttcatgggcctgtgcggcggtacgtaggctgcgggattgactttgaattcttcctggctgccacagcaaagagacaggatcagg

SEQ ID NO: 185695 - DNA, 122 bp, Homo sapiens
ctgtcaatgtcctgctgccaaacctgcaggcgtgagtgtgtggacagaagtgaccaggtgcgcgcgggtgggtggacaggagtgaccgggcgcgcgtgcatgagtggacagaggtgaccggg

SEQ ID NO: 185696 - DNA, 122 bp, Homo sapiens
ggaaatgaggaaaggaaagagaacaagatacagtaagtagagctattaacattttaaaaccgtggtaaacaaacgtgtttaaaaattacaacactgaaactaccacagggtgtaaactttga

SEQ ID NO: 185697 - DNA, 122 bp, Homo sapiens
gagctggtgaaaagagaaatctttggagtcttttgtagaagatgagatatgctgagctgccgtgctgtgctgtggagcatgggaggcacactgcactctgctccacagataattagtgctgt

SEQ ID NO: 185698 - DNA, 122 bp, Homo sapiens
cctccctgtccgcctccctttgaaacactattaggagactggggcatttccaaatgtgaccgacccatgttttcaatcatgttaatcacattaaatccacaaacacaaactccacctccctc

SEQ ID NO: 185699 - DNA, 122 bp, Homo sapiens
aggtacatatgtgttaaattttcagattgccacccaaaagattggatcaatttataccctcgtcattgtgtacaaaagacaacaggtctatctgatttcatcttagctagggtggcatttct

SEQ ID NO: 185700 - DNA, 122 bp, Homo sapiens
ctacaaagctgaactcatgcatcctccataatcatgccattccactcccagcagacatgccgttgggggcatatgtgctccgagtgttatatcagtaatgttcacagcagcattacttggaa

SEQ ID NO: 185701 - DNA, 122 bp, Homo sapiens
ctaacttgcatgacactcttgctcaaagaaggatacctgctcctaaaacccgtctaccagcgggtctggctactgttgctgtggattcctgggcaataccaatcctgctcaacgctttggat

SEQ ID NO: 185702 - DNA, 122 bp, Homo sapiens
ggcgctttttacgcctggtcccacaacgagccctgcgccccatcccaccgtcatccccaacgtagagatgagcaaacagaggcttgctccaggaagccagaccacagcgagcctgggagcag

SEQ ID NO: 185703 - DNA, 122 bp, Homo sapiens
gttgggagcccggaacacccccgattggtctgaagatgccgttttcgccttcttattggccggccaaagttgaaaggcattcccgtttcaaaatatttagctttcttacttttttgtgcttt

SEQ ID NO: 185704 - DNA, 122 bp, Homo sapiens
tgaaacaggatctgcgggcagctgcatttgccacccggctttattgctgctttccagcggcgaaggcgcagcagcagtaacagggaagccagagcgagcctccccggcagcggcggcggcgg

SEQ ID NO: 185705 - DNA, 122 bp, Homo sapiens
gcgttttcacctgcggagcaggggtgcggggaacagctgggaggtggggggggtcccaaccgcagctgagctggaagtgcagaatttcaactggcagcgagactgggcttcccagagccagg

SEQ ID NO: 185706 - DNA, 122 bp, Homo sapiens
aagcctcgcaggacgcccctcccctgtccccgcacgcgtctatttagggcccagcccgggcgcccaggggattctgggacttgtagtccctccccgcagcctcaggcgccgccacgacccgc

SEQ ID NO: 185707 - DNA, 122 bp, Homo sapiens
tggttgagacgtctgtgagcaacaccaggacacaaacctcgttctgtccaactgtggaaacggccgtttccactggcccatcactgagtcacagaaaaggcacaggccctacgaatgccgac

SEQ ID NO: 185708 - DNA, 122 bp, Homo sapiens
tagtgacacattgcactcaaccgcggccggcttcacttggcacccagaggaaaaacagtccgctctgctgccaaagcaagtccggtggccagccacagtctagccgctttctaccagccaaa

SEQ ID NO: 185709 - DNA, 122 bp, Homo sapiens
gcacggggcgctgcccgccatcatgctgcctgtgtggttcaccgacaacttggaggcggccgccacctacgtgcagaaccagagcgaggactgcctgtacctcaacctctacgtgcccaccg

SEQ ID NO: 185710 - DNA, 122 bp, Homo sapiens
ttgggtacctggagcttgacatcagatctgtgtgactttaatgcctctgctctgtttcctcgttgcataatcccttgtggaccctgaccacaggatctgtcaacctaagcctctacgtatct

SEQ ID NO: 185711 - DNA, 122 bp, Homo sapiens
caaggtgggcagatcacaatgtcaggagatcgagtccccccggctaacacggtggaaccccgtctctactaaaaaaaatacaagaaattagctgggtgtggtagcgggcgcctgtagtcaca

SEQ ID NO: 185712 - DNA, 122 bp, Homo sapiens
gtctgagatggagatgatgaagatgatcgggaaacacaaaaacatcatcaacctgctgggcgcctgcacgcagggcggtaggtgcggtagcggcggtggtgccggctgggcggccctcctgg

SEQ ID NO: 185713 - DNA, 122 bp, Homo sapiens
ggagccccccacaccctggagtccccggctcgagtcctccaagatctgaggccagcagagcgagctgacagcagcaacactgtcagaaggtgccctgagacggccggctcagccttcccttg

SEQ ID NO: 185714 - DNA, 122 bp, Homo sapiens
ttttacatgtgtaaatggatctatagtgtacatattcttctgcaacttgctatttttcttcggcattatattcttgagattcatcctcgtttttgaacctacctgtaatctatttgtttctg

SEQ ID NO: 185715 - DNA, 122 bp, Homo sapiens
actgtttaaggacaggaaacaagttagtggcaacgccgagctgaaacccgggtctctcaacgtccagttggaggttttacccaccacccctctacctcttcagagctaatgggatgcagagg

SEQ ID NO: 185716 - DNA, 122 bp, Homo sapiens
gaaaactggatatccacacgcagaggagtgagccagaccgtcacctcccacccgagcgtgcgctgactcacagcgaatagcagagtggctggacgcacacttggccagaacatacatgaact

SEQ ID NO: 185717 - DNA, 122 bp, Homo sapiens
cccctctctcgggcgacttttcccccacctccaagtagtgatcaagctcagaatccagctcgcgcccgctgtgcacctagcacttcccacctgtagtcttttgacctcatcgccccctctag

SEQ ID NO: 185718 - DNA, 122 bp, Homo sapiens
gacagcacgtttgcgacgctcggagtgaccttcgagcgactggggaccgggggcgggagtcgtgcatgcagcgttgtgtgacgaggcgccgcccgccgcggtcctgtgggaaaggagagagc

SEQ ID NO: 185719 - DNA, 122 bp, Homo sapiens
tgtgattcatggcacaaagctggaataaccctgccagttcttagaagctttaagattcatcgtcttgaacttgatacacatagtatagcaccttaaaaacgaatcatctgctagttcagtat

SEQ ID NO: 185720 - DNA, 122 bp, Homo sapiens
gaggataaagagacaaaggaagttagtagaggcagaggcagccagccaggcgtgcctagccgggaagcctggtcctaccccggcctcacacccacggggatgggctcccatgcccactttcg

SEQ ID NO: 185721 - DNA, 122 bp, Homo sapiens
ggggacaatgttaagtgagaccaaggaggtggcacccctgaaccagtctctccgtgagctcggcggtgagaaaacagtgcacagggagaggagccacagaaggcccgggatgtgtcacccag

SEQ ID NO: 185722 - DNA, 122 bp, Homo sapiens
cgcggagtagggcgggtaagcgcgccttcttattggatggcgatggacagcgtgctcttacgacccaccccagaaggcaagtcccctgcgcgcggggcacggcgggagtaagagtctgcggg

SEQ ID NO: 185723 - DNA, 122 bp, Homo sapiens
gaatggcctcagctcattttgtgaaaaaatgctgactgaggcctcatggaagttctgtgccgattcttaggtgcctgtgattcatctgtgcctgatgagaatcagggtcaagtacggcccaa

SEQ ID NO: 185724 - DNA, 122 bp, Homo sapiens
ggtgccatgtcaatgcaaaacacagttacttttgcaccaacctaaagttacaacaccatacggcaacaaatggccctgcagccaggaagtaagacagtgctgaagaactggtacaaattaag

SEQ ID NO: 185725 - DNA, 122 bp, Homo sapiens
ggcaccagcaggcgggctcaactcaccccctgcagcatccccgaccctggatcatgatggcgttcctgtgtataccatctgctccttcaggacaggaccctttcgttacttgatcacaggga

SEQ ID NO: 185726 - DNA, 122 bp, Homo sapiens
ggaggcggggggtggggagctagagggcctggggcgccaatgccactctgcgtccctttccgtaggcgagcccagccctccccaccccaccaaggattgtcggctttcccggggaagggcgt

SEQ ID NO: 185727 - DNA, 122 bp, Homo sapiens
gctgcaggaccaggctctggctcctcctcaaccttccctcgctgacgctaagacaagccgcgtcctggaacagactgcggcacgggccgcacttctgaattcagccctatcccgcggtgagg

SEQ ID NO: 185728 - DNA, 122 bp, Homo sapiens
attaaggagctgggacatttgttcccatccagcaataaagagacagccctctccactggccgggggtagagggaatgttagaagaggtatagtcaggagacgggattttccccactatccag

SEQ ID NO: 185729 - DNA, 122 bp, Homo sapiens
tttgggtttccggccagaggcatgctgggagcgtcacatgcaaattgagcgtgcacccagcgttccgccctttctacgctgggccggttatcgacccggcccagtgcgcaggcgcgggaaag

SEQ ID NO: 185730 - DNA, 122 bp, Homo sapiens
agtaacactctctgcctcgtcccgcccctcactcatctcttcacacctgattggaggaaacgccactgtccgctttctggattggtggagtgcatttattcaggccccggtgcagtgctttg

SEQ ID NO: 185731 - DNA, 122 bp, Homo sapiens
gcctcgactgaccttgggcaggcccggggcctctgcacctgcggtcggtcccgccttgcacgcacggtctctgcctgaggctgcaggaaagcgcttcctactgagaactcctgataagcgct

SEQ ID NO: 185732 - DNA, 122 bp, Homo sapiens
ctgcatcttcacattcctggaaccctgccaatattgataatcccccatgacaacccagagcgctgcaacacggagacgctggctgaacctaatggtgctgctgcgttccaagccctctagcc

SEQ ID NO: 185733 - DNA, 122 bp, Homo sapiens
ctggtgcctctccaggttgtccggcccagaccttcaggtgttccaatgggaagtgcctctcgaaaagccagcagtgcaatgggaaggacgactgtggggacgggtccgacgaggcctcctgc

SEQ ID NO: 185734 - DNA, 122 bp, Homo sapiens
gccgggcatggtggtgggcgcctgtggtcccagctacttgggaggctgaggcaggagaatcgcttgaacccagtgagctatgtcaaagtgggatgacctgactaaggctgcttggctggtta

SEQ ID NO: 185735 - DNA, 122 bp, Homo sapiens
ctcagttcccgccacggaacggcgggcgaaaagcagggcgggaatacgccggtaggaatacgcgggcacgtaacgcgtcacttccggtgctggggcgcgctgcttgcggagggagtttgccc

SEQ ID NO: 185736 - DNA, 122 bp, Homo sapiens
gaggcgctgcgtcagtaccagcaggtgggcgggaaagtccctggacagacacctgcagaccgcacgggggaggtgtaggccaggaagggagacacctgcgcactgccgcgcctctccgttac

SEQ ID NO: 185737 - DNA, 122 bp, Homo sapiens
gctcggctccggctccagaagctgagaggctgcggtgcaaatcccgtgtcttagctggcccgattgccggaaatttcactgcgcgtggctaggcgggagaggccactgtgacgcgccctgta

SEQ ID NO: 185738 - DNA, 122 bp, Homo sapiens
ttcatctcactagggagcgccagacagtgggcgcaggtcagtgggtgtgcgcacagtgcgcgagccgaagcagggcgaggcattgcctcactcgggaagcgcaaggggtcagggagttccct

SEQ ID NO: 185739 - DNA, 122 bp, Homo sapiens
tcctggcccgtcatctggtagaacctgcggttgaagggccggtagaactcctgcaggcgccggaccagggcctggggcacgcgtgggtgtggccggcccttggacttgcccaggcagcgggg

SEQ ID NO: 185740 - DNA, 122 bp, Homo sapiens
ccaggaatgagcaagatgcattgtggtccagaggcagctgggcacaagaaagctgcccgacggggacagtgatgccttctgttgcatgcactcttgctggtctctttcttaatgggattgaa

SEQ ID NO: 185741 - DNA, 122 bp, Homo sapiens
ccgagctctgtggggacccagaaacctccagcgaagcgtggaaaagcagcatcctgtcttcgctctcctttccagtttccaaacaggccacagtggagacttcccttgttgcaggaaacagg

SEQ ID NO: 185742 - DNA, 122 bp, Homo sapiens
ttgggccatcccccaatggggactattctgtgagcagcactcactgcttagtctgaggggcgtgtttcctcactgttagtgcatttaatgcagttattgagcacctgctgtgtgcccctctg

SEQ ID NO: 185743 - DNA, 122 bp, Homo sapiens
tctacactattggtgacattgtccactatattttcttctttgtttatggtttctttttcccgcatttaattttgtaatcggtctcatcatattgatgggggtctcacttgattttttttttt

SEQ ID NO: 185744 - DNA, 122 bp, Homo sapiens
aagagatgggcaggatgagggtgttcgctctcgtctggcaggaaagggggtccaggccctcgatttccctgaggttagacgcgcaagtgccctcagatctgctcttcaatgcggaagccact

SEQ ID NO: 185745 - DNA, 122 bp, Homo sapiens
gatgatctgcccacggaggcctcccaaattgctgggattacaggcctgagctaccgcgcccggccccaactgttcaatatatgtttgtttaatgagtagaaaatgagcttcttgagtatgga

SEQ ID NO: 185746 - DNA, 122 bp, Homo sapiens
aggtaatggggggtagaaggatgttgtgataagctacaaattctggcaagggccagatcacgtgggccctgctacgccacaaggaggagcttgcttttacttagcagatgatagagatatta

SEQ ID NO: 185747 - DNA, 122 bp, Homo sapiens
cactcgacgatggatgcctgcacgggacaatccacgtcctgacccagctgatctgaagtgcggtgtgaagcgggcggccgcaagctcagcaacgcaggctctggtttctccacgctgtcttt

SEQ ID NO: 185748 - DNA, 122 bp, Homo sapiens
cggcgcgggcagcgccgggaccccgcgggggacactgcagccggagcccgggaggggccgcgccgccaccgtctgaactaggatgtcccgacatgaaggtgagaggagcccccgcccccacc

SEQ ID NO: 185749 - DNA, 122 bp, Homo sapiens
tttccaggatttccattattactctggtggaaagcataaaagtgaagagcaggggtggggcggttcacacaagcctgggttcaagtaccagtgctgccatctactgattaagacaagttacc

SEQ ID NO: 185750 - DNA, 122 bp, Homo sapiens
ggacaccacggggcagctgagaactggaagcggggattctgggctctggggctaggaccccggcccaggctcttccctgatagccctggtgactcaacgcgtgggtcttttgtccttcacgg

SEQ ID NO: 185751 - DNA, 122 bp, Homo sapiens
attgacacttgaccaacacctgatagacacgtgattgacatgattgacacatgaccaacacgtttgtgacacactgacctggttgacaggcctggcacatgactaacaggtgactgacatat

SEQ ID NO: 185752 - DNA, 122 bp, Homo sapiens
cggccgacgtggcagccgcaggagcatgcgccgcccgtggccatcttgtaggcggggacacgccgaggtaacttccagggtgcgccttcgttgtcttctccaagctgtagttctacgtcccg

SEQ ID NO: 185753 - DNA, 122 bp, Homo sapiens
cctcatcagtttgtgcttcggtttctctgtaagctgaggtgattagttcctgtccagaaacgtcacagagtggttagggccaaataaaattccgaggggggccaggcgcagtggctcacgcc

SEQ ID NO: 185754 - DNA, 122 bp, Homo sapiens
cataagccctaagctggacacgaggagtgaacagaaaggtgactgacaaattgtaaaaggcggtggagccaacagaaaagagatctcaacagagttgaagaattgtcacagtagacgctcaa

SEQ ID NO: 185755 - DNA, 122 bp, Homo sapiens
ggagcgcccgggagacggagctgctgctggggacgctgctgcaaccggccgtgtggcgcgcgctgctcctggaccgccgccaggccctgcccacctaccgccgcgtgtcggccgcgctggcc

SEQ ID NO: 185756 - DNA, 122 bp, Homo sapiens
acttcacgaggaagccattggatgttatatgattgtatttttcacagaatatcacaatagcgaccagctgtccacttcagaggagtttagctatggtaatgtcagctatgaaaaacggtagt

SEQ ID NO: 185757 - DNA, 122 bp, Homo sapiens
gggtacgggcgggtgcagatgcagccaggaggacgggcgggagcgggggcctgtcccacacgggggcctcggcagcaccggcatggctggaggccagtacggccaggtgtggcgggagggag

SEQ ID NO: 185758 - DNA, 122 bp, Homo sapiens
gcgatgcattaggaagatcctggacctagagaacaagtcccccgaacgctgagttggaggcgggacttcgggtgcgcgttggtgcgtcaacgtggtgggggggtgtgtttgtagggagaggg

SEQ ID NO: 185759 - DNA, 122 bp, Homo sapiens
aatcgggattgggattctgtgaaaggcaactgcaggatggttgcgagtaccggcagtgaccgccaaggctttatgcagcacatcgtacccacacactcatggctacgtatacacacacatca

SEQ ID NO: 185760 - DNA, 122 bp, Homo sapiens
ctgggcggcggcgcgggctgggcggcggtcaccgtgtcacctccgggtggcctcgtgccacgcagttagggccctcggaacacggggttaaggcaggaattccacttctagaaaagcctcct

SEQ ID NO: 185761 - DNA, 122 bp, Homo sapiens
cttcctccgacttcctcatagccgttcttttattccggcctcccaagattgcgtggagcccggccactgccagggcggccctgtgatgagctacatgggacacaagaggcagccccaggcgc

SEQ ID NO: 185762 - DNA, 122 bp, Homo sapiens
cagagttaaaattcacattgaggcggcagagcagaactgactacagttcacaaccgaacccgcaaagctcttcgagaatcacgagcaaagcacaaaagatgctaaaagaggggatattagag

SEQ ID NO: 185763 - DNA, 122 bp, Homo sapiens
gtcgggcagcctgacgccgcatcttcctgagcagctgtcggcgttgccgtgtggcagccacgctgttgcaacatgagcggctgaggtttctgaggcccctccggccagaagctggcccaggt

SEQ ID NO: 185764 - DNA, 122 bp, Homo sapiens
gaagcaggacctgaggccggttttgtccaggtcccctctgggatgcatctcagccacagccgcttttttcctccttgcatcactcggctcatgagtcacagccccaggagggagacagctgg

SEQ ID NO: 185765 - DNA, 122 bp, Homo sapiens
tgacttttactttctcccagaacaacagttgtgatatgatctgttttggggcccttcctgcgctccgccctgggccagagtatgtaaagctcgtgggtctctgtgtgtgtctgagcagctgc

SEQ ID NO: 185766 - DNA, 122 bp, Homo sapiens
tcaccgtctcatcttacctggggcagcagtagcgtcaggctgagcggcagcagcagggaacgaaggcaggacagcttcttgggagccatggcgtttacagcgctcctctagtctgagacggc

SEQ ID NO: 185767 - DNA, 122 bp, Homo sapiens
gaccgtctccctccccaaagctgcgtttggggtgctgggctgggggtggacttgctgagtcgcgcggacacctcagggaaaggctctggcgagggaagaagcccgtgtctccgaagatttgg

SEQ ID NO: 185768 - DNA, 122 bp, Homo sapiens
ctccacctcctgtggccgggtttcagagcttggctctgcatctcgggcagtcttcttttccggcttagggacctctgaggtggctgtgccacagctggcttccagcttcatgaccctgcaga

SEQ ID NO: 185769 - DNA, 122 bp, Homo sapiens
tgcacctgtctggcctgggcgccagcgcggctgcaggccaaggtaaagcgagcgggactgcgcggggcgggcgccttcccgggctcggcttcgggcctccgggccgggtggcgcgtggtccg

SEQ ID NO: 185770 - DNA, 122 bp, Homo sapiens
agagagctggggaaacctgtcctgaagttggcggccgctgatgaagccataggcaggactcgaaggcctgcagcgaggcctgaccatcagcctccctggcaggaccccttgagggacaagga

SEQ ID NO: 185771 - DNA, 122 bp, Homo sapiens
gagctggcgcttggcatcgccactctgggcaggatccaacgtcgctccagctgctcttgacgactccacagataccccgaagccatggcaagcaagggcttgcaggacctgaagcaacaggt

SEQ ID NO: 185772 - DNA, 122 bp, Homo sapiens
tgcggagggcggagggcgtgcgggagggatcccgggagtgcgcttgtgtgtgtgtgcgcgcgcgcccgccccgcgcgctcctctccccgcccctcgccccctccctgcgagcgccctcctct

SEQ ID NO: 185773 - DNA, 122 bp, Homo sapiens
tggctccgggcgtggccgggggtcgcggtctggggccggccaacgcgaggtgggtggctgcgggctcgggagcgcccagggaaatagggcgaatgcgccggagggtcgagcccttccagaga

SEQ ID NO: 185774 - DNA, 122 bp, Homo sapiens
cttctgtgcctttccctacttgacgtgttattcagggaccatcgcagcgtgcctgtggctcgtctgggttctctgtttcgtgtgtgtttaactctgtgtgggtccagtcttcagcagtgacg

SEQ ID NO: 185775 - DNA, 122 bp, Homo sapiens
cagcggtctccagcctttttggtgccaggatttcgtggaagacaatttttccatgcaccacggtggggattgtgaggaggtagggtagggcgatggtgtgagaatgattcaagtggattaca

SEQ ID NO: 185776 - DNA, 122 bp, Homo sapiens
taaaccttatttacatcatcttgcttgaattatgtctcctatagggttctgagaatgaagcgagtacctcaaagtgtcaaaatcagactgatctggttggaggccaacttggactagtctat

SEQ ID NO: 185777 - DNA, 122 bp, Homo sapiens
ggtagcagcaagagaaatggaaaagagaattacagaaagggagtacctgagaaacattaacgatgggacacccacagatgcacggatattcaaagggccaaactatgtggtccagaactgct

SEQ ID NO: 185778 - DNA, 122 bp, Homo sapiens
ccacctcggggagggagcacactggctttggcctcagcccggagggaccttctctgggaccgatgctagagtgggcgtggggtccgggcgcggggtcgcctgccacccaagggcgtgtgtgc

SEQ ID NO: 185779 - DNA, 122 bp, Homo sapiens
acagcaccacggccaacgggatggtgcggtaccggatcgtgacccagaccccacagagcccgtcccagaatatgttcaccatcaacagcgagactggagatatcgtcacagtggcggctggc

SEQ ID NO: 185780 - DNA, 122 bp, Homo sapiens
gatttacccaccatgactgtatcacaaaataaccaactgctgagttccaaggaggctccccgactctgcctctgtcctccacctcccctccccagcgagccagagagggtctattgaaatgt

SEQ ID NO: 185781 - DNA, 122 bp, Homo sapiens
ctgcggatgaggccgagcgcagctcttaccctccccttaccctccgctccccgcgacgcccgtcccccagagctgcgtggaggactctgtgacccccattaccttgcgtctgaacttcacgc

SEQ ID NO: 185782 - DNA, 122 bp, Homo sapiens
agccgggcctgggtgcccagcaggaccctgagctgcagagccggccagcggctggggggccgttctccctcccggaccctgtgcatcctccagagcaggagcctccctagtttctcctgcag

SEQ ID NO: 185783 - DNA, 122 bp, Homo sapiens
cactccatgccatgcctttgctaggtgctggtaacccgagggtgagcaagacatgacttacggttcagtcagggaggcagcctccaccaattgccccagcaaatataaaattgcaatagcga

SEQ ID NO: 185784 - DNA, 122 bp, Homo sapiens
aactgagagaagaaactcatgcctacctctgtgatcccataaggtcttacatgtgcttctcggccttactagttcacacatgtcatcctggtctgtagctaatttgagtacaagtctacatc

SEQ ID NO: 185785 - DNA, 122 bp, Homo sapiens
gattatgtcaactgagtctgacgttctatggaaaggcgaaagtcctcgaacagccaacaccgtgaggaagaacagagttggagaacccacatacctaacttcaagccttatcttaaaacgac

SEQ ID NO: 185786 - DNA, 122 bp, Homo sapiens
aacctaaaagccccagaacatcctctgatgtggcaagtgttcaaggagctgcggttagcgcggaggggtcccgcgagcctggatgacagcaagccgcccaccaaggtctggggaaaaatctc

SEQ ID NO: 185787 - DNA, 122 bp, Homo sapiens
ccaggctgatcttaagcaacattcaccaaattaccgatacgacagccaggcccatttcatcggtcaagctctttcacgatttccagactctgttaagcccctttctccccagggctgttaac

SEQ ID NO: 185788 - DNA, 122 bp, Homo sapiens
atatagtttctccctccctttatttctgatattattttatttttctcaaggaactttttccgatgctaagaatatccatataagttgatacactatgttgagtttcattattagctataagt

SEQ ID NO: 185789 - DNA, 122 bp, Homo sapiens
gaccagtcaggaaagagtgggcaaacaggaacagaagctctcactccgtcacggattctacgtaaaaccggcagctcggttttccggctttaaacggtctttggcttgaaggtcaggtttca

SEQ ID NO: 185790 - DNA, 122 bp, Homo sapiens
agcatcatgagttctgaagaactgccctgagggctgcagcatccctgcgggggctcagaccggctggaccgtagcgtagtttctggccccggctagctggcgaccgtgggcctcagtaccct

SEQ ID NO: 185791 - DNA, 122 bp, Homo sapiens
caccaaggagcgacaggatcccgaagagagagagagaaggcagcgagggaaggaggaccccggcaggcagcagcatgaaattcagcccagcgcactacctgctgcctctcctgcctgcgctg

SEQ ID NO: 185792 - DNA, 122 bp, Homo sapiens
ttcgcggcgctgatgctgctgggcctggtggggaactcgctggtcatctacgtcatctgccgccacaagccgatgcggaccgtgaccaacttctacatcggtgagtgcgggcgctgcgccgc

SEQ ID NO: 185793 - DNA, 122 bp, Homo sapiens
tgtttattcatatcaccttctgcacagtactgtgtaataccacgtatgggaataagcacacgaggaacatgggattggtcctaataaagagtcctgcaccattaagctctgcagcccaatac

SEQ ID NO: 185794 - DNA, 122 bp, Homo sapiens
acacgtgaaataaaagttatcaacacccagggaaaggagaaccttgcctgacccttaaaacgtcctgggtgcccttccgtgccatctgtgggagaagggactttccatgcagcagcctctgg

SEQ ID NO: 185795 - DNA, 122 bp, Homo sapiens
accatggagtcatgagaatggaagggaagctgacgccatgtgggatggggtagaactgtccgcaaattcgtcccgcctctggagtcttcagaccagtcaaggccgaaattcaaccaagcctc

SEQ ID NO: 185796 - DNA, 122 bp, Homo sapiens
cacgggggtaccaggaaagagctaattctacaacaagcggacgtcaaccagatggctttgcgagccgagagtgggcgggaccaaggatgcatgagcgctgccctaacgcgatgccacgggtc

SEQ ID NO: 185797 - DNA, 122 bp, Homo sapiens
gcctgtgctccagggagactggaggcctgggccggggaggcttgttcccatgagggacaccgggcaggagggaaccgggtgaggtcgttgaaggaagaaaggaaacggagaaagtgcttccc

SEQ ID NO: 185798 - DNA, 122 bp, Homo sapiens
tatcgtgaaggtgcagctccctgcatatctgaagcggctcccagtccctgaaagcattaccgggttcgctaggctcacaggtaatcctcccccatcagccagtccccatccttgcacgttcg

SEQ ID NO: 185799 - DNA, 122 bp, Homo sapiens
gccagatgcgctcctgcgatcgcacagaatgttccttcacaacagcacgaatttgtttatcgcctttacccactgcctttcgcacacatacatactagagattacaaaatacttgggctggg

SEQ ID NO: 185800 - DNA, 122 bp, Homo sapiens
taaataggcatttcccttagtgccgttaacatatgattctgttcacactcggtgattcagcgaggcagccaggacttcatctgcaccactctgggccaatacggcataccgccaccttttta

SEQ ID NO: 185801 - DNA, 122 bp, Homo sapiens
aggcacaagcagagacagatgtagaccctttccctccagagtcacgcacatactcgtcatcgcgtctcttgggagaatggttgtatcttatggaaggaattatcacatcaaggagtcagggg

SEQ ID NO: 185802 - DNA, 122 bp, Homo sapiens
gggtaactgggtacaagaaaacctcagtcgcctatgaccacaacctgattcatacgttcccgggctggctggtagagcacccttcccctgcagaggggggcctatctccccatcaccaggga

SEQ ID NO: 185803 - DNA, 122 bp, Homo sapiens
actccatgaatgtgcttgcgtgcccgtagttaatgctgtccacggagtgaatgctgtccacgtagttaacgctgtccatgtagttagttaacgctgttcacgtagctcttttctgccttttc

SEQ ID NO: 185804 - DNA, 122 bp, Homo sapiens
ggtttcaggcgctctgtaaatgcgtccgaggtccgcggttctgcccgcaagcccagaccccggcctcacttccgccccgcgccccgcgccccggcctcacttccgccccgcgccccgcgccc

SEQ ID NO: 185805 - DNA, 122 bp, Homo sapiens
tttctgtgttttccacccctacccccacccgccacccagtaataaactatttccttaccccgcagtgagttaaaatttagtaagatgaagatgtggaaaccaatgaaaagtacatttagaaa

SEQ ID NO: 185806 - DNA, 122 bp, Homo sapiens
aacccaaggacccggcccaaaccagcactcataagaaccgggtgctttcttcgcgtgacacgatgcttgcttttctgtgcggggaaggaaggaagcgttgccactgtcccgggaaggtggga

SEQ ID NO: 185807 - DNA, 122 bp, Homo sapiens
gagtccaaagggaagtggagaaaacgggcaacgatcaccaagagctattttgggtttccacgagaagtaacagcaagccaagatctcccggactggagcagctttgcgaggcagggatcttt

SEQ ID NO: 185808 - DNA, 122 bp, Homo sapiens
ggccccaccatgactcttcagtgacagtttttcttcaaacgccgcgcctgtagccaggaccggcgtgccgcgcgtccacgcgtcctcattggctcctgcgggtttgaaactcgctagtcgtc

SEQ ID NO: 185809 - DNA, 122 bp, Homo sapiens
gtcggaattaggaaccgcacctccccttccgctaagcggtgggaggccaggcgggtgacgcggagcagtggagccatgcagcctgttttaccaaaagagtaagtggttttcctgtgaaaccc

SEQ ID NO: 185810 - DNA, 122 bp, Homo sapiens
tgcggctgtgcgggcggggccggaagtgtggggacagcgcggggccgagaaccggaagtgcggggcgggcgcgggggcagagcgaaaggcttgaggaccaggtcggggccgggttccgggtc

SEQ ID NO: 185811 - DNA, 122 bp, Homo sapiens
cagcctgggaaacatagggagacccccttctctacatagaataaatttttaaaattagctcgaagtggtggagtgtgactgtggtcccagcttctcaggaggctgaggtgtcaggatcacct

SEQ ID NO: 185812 - DNA, 122 bp, Homo sapiens
cgaagagatggcggtgtgtagacaggtgacccggtgggtcggtgacgcaggaggagactgcgcttggtggcgggatcacttagttgacaacatctaaaaattaggaggtgcggcagggcgcg

SEQ ID NO: 185813 - DNA, 122 bp, Homo sapiens
gaagatgcaagatgccctcttcccagaagtgcagctgcaaagtgcagccttcttgcttgtcgcacatatgagcacgatgctagtgtaaaactaagaatgaaggttagggcccccaccctaaa

SEQ ID NO: 185814 - DNA, 122 bp, Homo sapiens
cgggggactgctgcctgccctgggactccctgtctcagcgccacagccttcaggtgcctccgtctcttccgaccagagttcctggcaccatctcccaaaaaggaggaggggcggggtccaca

SEQ ID NO: 185815 - DNA, 122 bp, Homo sapiens
ggctgactgatgttttcccctcctcagtaaacaagatcgttctctctgtgttgaagatagcggggtctgtctggcttctggatgaatggcatgcagtggacaaatgactatttattgcatta

SEQ ID NO: 185816 - DNA, 122 bp, Homo sapiens
gcaaccaggccgaagagcgcgcctaccccgtacacgtgggcctcccaggccagcccccagcgagccctggcctctgcccagtcggcctccagggtcaggaaaaagaggggcctcggcgcctc

SEQ ID NO: 185817 - DNA, 122 bp, Homo sapiens
agatcaccgagaggatcagatgaattcacgtggcatgtgccgcactgagacaggcaggcacgcagctgaggggctggcggtgggaggggcagggccgcggctggaggataaaatcccacact

SEQ ID NO: 185818 - DNA, 122 bp, Homo sapiens
tggggcgggcccagctacagggcgggaagcccgaggctcacctccacttccctttcccaacgcacagagcccaggtccgcgaccactcaacagccccctcaagacaaagagagatttttttt

SEQ ID NO: 185819 - DNA, 122 bp, Homo sapiens
tctctagcaattggagaaaatgaatgccaatctgcgaatcctgtgtgtgactggatatgtcgctgaggaggcggaacctcgggactggataatatggactgagtgtcatttcccctgtcaga

SEQ ID NO: 185820 - DNA, 122 bp, Homo sapiens
attttcatgtacatgtaccggtataggattgcagggtgagcaacttgactccaggggaggcgcaatgaagggatgtaattagcctgttaaccctgctaatgtcttgtaaagtcattcaagtg

SEQ ID NO: 185821 - DNA, 122 bp, Homo sapiens
tttcatatgctaacattcattgtgaatctcccaagaggccacacaatccttttttcttagcgttttgtgggatgaatgtccggaagacacagagagcggggcagggaggctccagcttggat

SEQ ID NO: 185822 - DNA, 122 bp, Homo sapiens
ggctcggcgttgacgtgggacgcggcggaggcgcagcagccggtggtgatttgctaacctcgcagcagagaggagttgagggcgatgagagcgggtactgcgaactgccgggcgatgctgtc

SEQ ID NO: 185823 - DNA, 122 bp, Homo sapiens
caccaccatgccacccaccccgagtatctcctgggcatcctggcatagccagatgacttccgtgcccctgttgcaataaccactgcttccaagtctctatagaccaccccttgggtatatct

SEQ ID NO: 185824 - DNA, 122 bp, Homo sapiens
gcacgaggaggcatgggggacgctaccttggactatgactatgctcttctggagctgaagcgtgctcacaaaaagaaatacatggaacttggaatcagcccaacgatcaagaaaatgcctgg

SEQ ID NO: 185825 - DNA, 122 bp, Homo sapiens
ctgttttcccccgcttttttcccttttcacccaataaaatccttttctcatcctttaaaccgtctgcaagcctacattttcgtggctgtgggacggataagaaccccctctttggcggaatt

SEQ ID NO: 185826 - DNA, 122 bp, Homo sapiens
agtcccgcagccacgaggaggacgctgcccagactcactacccgccggctccctcccccgcgtccctgtggtggtgggcgaagatgacctgttgtgcatcagatgcctttgagacatacaac

SEQ ID NO: 185827 - DNA, 122 bp, Homo sapiens
tctctctataaaacttaaagatggaatatatacatgtaacttaacagatcagacaacaaacgtcaagctcattgttgctcaaactgccagttacacaaaattctttttatgtaattcatatc

SEQ ID NO: 185828 - DNA, 122 bp, Homo sapiens
tcacccagatggtaagtgacaaaaccgtaatctgaatcctcccacatatggagcttattccgttacttaagcttttgtaagatactaatgaattatctaaggatttcaatatcagagctacc

SEQ ID NO: 185829 - DNA, 122 bp, Homo sapiens
ttctgctgtcagtggccctgctggccttcagctcagctcaggacttagatgaaggtaagccgaattgggggaagatattgtgactctgattggggtttacgggcgaatgctatagaggggga

SEQ ID NO: 185830 - DNA, 122 bp, Homo sapiens
ggcatgggaatcctgcagggttccaacccccttgtacatttttgtggatctgtaggaagacgggaagagagatgcttctccattgatacatgtatttcaaggtccgtaactacgtggccccc

SEQ ID NO: 185831 - DNA, 122 bp, Homo sapiens
cagggctgggaggcgagagggtcctaccggccagcctcgaaggtaaagcgtgtggcatcccggccatagcggcgcagtgagcagaggggccacgagacgagcttcacacgggggttgtggat

SEQ ID NO: 185832 - DNA, 122 bp, Homo sapiens
cgaggtgtaaataattcgcgagtggcagcgggagatgggccctcgatctggcagcgggctcggaaggctcaggagggcaggcattaaaaataatcgctttgtggaggagataagtgcaaagc

SEQ ID NO: 185833 - DNA, 122 bp, Homo sapiens
actgactgacagtcaggagcaaggacttcaagcaggcagtggagtccattgcaccggccgcggcccggcttagggaccaccaccgcccagcgtgcgccggcctttagctttcgccgcgcttt

SEQ ID NO: 185834 - DNA, 122 bp, Homo sapiens
tggctttgcagagcttttagagttacccaccggctcttcctctggtattcctagtcttgccgagcgctagcaatctccgaccaacccgcgggccactgccccgagcctcagatccacgtctg

SEQ ID NO: 185835 - DNA, 122 bp, Homo sapiens
aataaaatgctactccatgtctgcaagtaacggagttttcagtttactgtcttcttggcacggcagtctgatattcatcataaaccctgttcttatctgaggctaagaatctgagaaaaact

SEQ ID NO: 185836 - DNA, 122 bp, Homo sapiens
ttccagatctggcttttttcggactcggccagggttccagttcctgctcctctgatcggccgcagcggtgctccctggtcaacattccctcctattcttgagatcgccggagacactatcac

SEQ ID NO: 185837 - DNA, 122 bp, Homo sapiens
ggtgggttggctcctggaagtaggctagggcccgtctataatcagcccgtccgctggatacgctccccagggtctccaaagccctccagcccgggtgagtacagagggcatttattgagcac

SEQ ID NO: 185838 - DNA, 122 bp, Homo sapiens
gacctacacagactgagacacgatcgccatgaatggagacctctggaaaagctcaggagccgaggcccacggggcccagcagaggcctgaggggagaccctgggcgggggctgaatcactgc

SEQ ID NO: 185839 - DNA, 122 bp, Homo sapiens
cctttacctgctcccctgccgctcgccttgcatccacgccgtagtggaactggcacaactcgggggccctgggtatcatcatagaagcttaggacaagagtgtggttaaacaaaattagaac

SEQ ID NO: 185840 - DNA, 122 bp, Homo sapiens
acgaaacctctcccacattcattctaggcagaggattcctgagacagctgctataaacagcgtggagacagggttccttgtgcctgtagacctccgaagggttttttcctctcgtgattttc

SEQ ID NO: 185841 - DNA, 122 bp, Homo sapiens
cagctcccaccagaatctgcctttgttggttttagctccggtcaagtccacttcttgcatcgggggagccgcgcgcattgagtttgtgtagtcaggcagaacgctcgacaggaaggaaggag

SEQ ID NO: 185842 - DNA, 122 bp, Homo sapiens
ctctaggttttcactgtcctgatagtctaaggaaaagagaaagacttttcccaggagttccggtaccaattctggaagggctctgattggcctggttaatgtcacattttcatcactaaata

SEQ ID NO: 185843 - DNA, 122 bp, Homo sapiens
agcggggagtcccaccgcctcccattctgagaggccgttgtaaagctttagcatcctgtgcgccttccgccgacgctccgtgaacctccccaccggggccttctgcggagtccccaggtcca

SEQ ID NO: 185844 - DNA, 122 bp, Homo sapiens
tcacgacctcaactcagtaaggcctgagattctttcgaaaaggagctttgcttcccatgacgcagagggaagtgtcaactgggatatttctggtaaaactgaaagcaagaaaagcagggtgc

SEQ ID NO: 185845 - DNA, 122 bp, Homo sapiens
tcattaagctttggcacagttttattacgtagcagtaaacaaatcatataaaaaaatacacgcttaattcttgattatctatactaatagagtgcacatcatcaagaccaagacaatcgaaa

SEQ ID NO: 185846 - DNA, 122 bp, Homo sapiens
caaagtgcaaatgcaccactggtttttccccaaagaacttcctggctgcaggagctgggacgtactgtttgataggaactcaagagacagtggcatttccctctctctggaccttccttagc

SEQ ID NO: 185847 - DNA, 122 bp, Homo sapiens
tcctattgttagagccgagggagacgcgttgtgggagggtgcgcagcaagccagagaggacgcgaggggcagggcctcaagcagggaaaaggcggagtcagggagggagggggagagactct

SEQ ID NO: 185848 - DNA, 122 bp, Homo sapiens
tttgggagggggagggggtgttaaccccttgttgaggtggcggccggaggactggaagcccggggggaaaggtccccctgctggccccgccgggaagagcactgcgtccccctaggacactg

SEQ ID NO: 185849 - DNA, 122 bp, Homo sapiens
tccagcctcgcctccctcctccccggcggctcctgttttgtgaatgaattaggaggcggacgccggtgcggggctccaggctggctggggtacccctcccccgcaccttctacgacctcccg

SEQ ID NO: 185850 - DNA, 122 bp, Homo sapiens
gactcggactgcagtctcctcagtgggtatgaacataccctatcacggcgccagttacctcgtccgaaaccaggaactgcgctcttggactgcagcggacaaggcggctcagatgccctggc

SEQ ID NO: 185851 - DNA, 122 bp, Homo sapiens
aaagcagggaagtctttccatttccatgattaatggaggaccttagcagaaacggctcaccgcgaggtgtgacgaccgcaggagggcgtcaatcaagaaaatgcccccttgccccggaggcg

SEQ ID NO: 185852 - DNA, 122 bp, Homo sapiens
ctagaaccagatgtactctcacatccaaactttgacgtgattttgcacatactcaaccgccgccacttgcatataagctgtggctgaaactggtttggagcaatctgacccatctgctctgg

SEQ ID NO: 185853 - DNA, 122 bp, Homo sapiens
ctccgaccagggaacaccggagccacaggcgctgtgctggaggcagagcattcaggctcccggaagtgcacgtggccccagacactccaacctcaactcagccgccctgaccaggatggaaa

SEQ ID NO: 185854 - DNA, 122 bp, Homo sapiens
tgggctggagagggccacgtcctgattcgtggatgggctggagagggccgtgtcctgattcgtggataggctggtgagggctgcgtcctgattcatggatgggctggtgaggctggtgaggg

SEQ ID NO: 185855 - DNA, 122 bp, Homo sapiens
acatctgaggattgggctttgtggtttacaaagcattttttttcctcttttgatcccagccgcttgtctggactgatacaaagcatttttattagtttgtcttattcaatcctcacaccacc

SEQ ID NO: 185856 - DNA, 122 bp, Homo sapiens
ttcatcacatgtctagtaattttttttgttatgctttgagtaatagattgcagagactctcgatcttcctctgaaaagtggtgaagtcttgttctagcaggcagttaaattacagatagatt

SEQ ID NO: 185857 - DNA, 122 bp, Homo sapiens
gggattatacccgtcttagtctcgatcattgctttcacttgtgccactgagctggaccttcgcacctggaggaggtgcctctttgcctcatcacctgactccacaagaaacaagggcagctc

SEQ ID NO: 185858 - DNA, 122 bp, Homo sapiens
ggtgctgctgctcgacctgcccagggacctgggcggaatggggtgttcgtctccaccctgcgagtgccatcaggaggaggacttcagagtcacctgcaaggatattcaacgcatccccagct

SEQ ID NO: 185859 - DNA, 122 bp, Homo sapiens
agacccggccctggccccgcccagggtcctaagccccgccctctcccctgcccccgcccccgcccgctggctcccaaccgccaaggctcttttgtgttgcgtgcgtgtttgcttttttattc

SEQ ID NO: 185860 - DNA, 122 bp, Homo sapiens
ccactagtttcagcagtggtcctggccatgccagaatgacctaccctatgattagagggtcggggctttgggccaagtgatatcagccgagccacctgaccttgggaaagggaggaagggct

SEQ ID NO: 185861 - DNA, 122 bp, Homo sapiens
aatgctcacaaaatagggcaatgcaaacacaaagacaaacactgcatgatctgactcatacgcagagtctaagaaagttgatctcataggagtagagagtagaatgatggttaccagagtct

SEQ ID NO: 185862 - DNA, 122 bp, Homo sapiens
gagagctgcagacagtaagagaatgagcctcactggagaaagagctgtatggttctcaggcggagggaaccagcagcagacacgaagggtccctccgggatttcagaatatacacagaagtg

SEQ ID NO: 185863 - DNA, 122 bp, Homo sapiens
gggaggatcatttaccaccaactactgtcataactaagaaaggcgatgacgggaccaggacgatgtcttctttccaaccatctatccgctaaacggtcaggcactggcggattggaccccac

SEQ ID NO: 185864 - DNA, 122 bp, Homo sapiens
agcaacagaaatatgaagaaagagccaccactactaactctacgcggacagaaatggttccggagatcgatgaggctctgatgacgaaggggcacctgcgtcaggatgggtctcacgtttcc

SEQ ID NO: 185865 - DNA, 122 bp, Homo sapiens
tcggggtatttttaggccggcgataaataattcatagggaacgtggcatcaggctccccccgcgggaggagggggcgcgagcagcgagagccaccgtcacccgcggctcaaggacactcgcg

SEQ ID NO: 185866 - DNA, 122 bp, Homo sapiens
agcaaatcgctccttgctgagaagcaaaactggctccagcagcttgtactgtagcgtgggcggctcaatcttctccaggggccgcccgttcaccttgatgagaccattgccgcgtttgcagt

SEQ ID NO: 185867 - DNA, 122 bp, Homo sapiens
gaatgaatgaaggaactgcaggtgcacagagcttctctctcccgctcactctgggactgccgccccactatttaaaaataattctctctttcttaaatgtctctcaatctaataattgctca

SEQ ID NO: 185868 - DNA, 122 bp, Homo sapiens
ggcttagcccagaactgtggtatctgttagggaaaggcaggtttctgtcttggagtttcacgtaagagagagaatcttattccattcacttgatcatgctgcctgaagagactcagagtgac

SEQ ID NO: 185869 - DNA, 122 bp, Homo sapiens
gatttatttacaactatagactgacttaaagataagcaataggctgggtgcggcggctcacgcctgtaatcccagcactttgggaggctgaggcgggcagatcacctgaggtcaggagttcg

SEQ ID NO: 185870 - DNA, 122 bp, Homo sapiens
atcagcattaggggttgggactgaggtcagagtcaggggtatcaggggtgggagctcacacgaaagcctggaggtgacagtccccgtcagcctcctgcagttccacctggatgaccttcctc

SEQ ID NO: 185871 - DNA, 122 bp, Homo sapiens
catgggaccttccggccttttcccgtgctagggtgggactacgtgtcccggcatgccctgcgtcctgccactgactgtgaggcatgctgggatttgtagtcttcgaggtgggagtgctcagt

SEQ ID NO: 185872 - DNA, 122 bp, Homo sapiens
ctcttgagagggtcagaagacccactagcatgagggtcagggacatgctttttcctttcccgtggaaggctcctccaggcagggcttgggtgaggcaggcgaggtgccagtggttccctggg

SEQ ID NO: 185873 - DNA, 122 bp, Homo sapiens
gaagatgagcgcttcatgtaaggctctgccagcctacgaggaaatgcaatcctccaggctcgcccgagcgtgggctgcgggcaggggactgtggggccgttgtctcgttttattccacggcc

SEQ ID NO: 185874 - DNA, 122 bp, Homo sapiens
gctggaaatgcagccctgctctgccaactcgctgctttctggagctgctgcacgcgccgccgtctcgagccgtccactcagctccctgcgcccggcgcgctccccccatctccaccctccct

SEQ ID NO: 185875 - DNA, 122 bp, Homo sapiens
tttgatgaaataggattttgcttctaactttgatgtctgtaattctttttatgtcaaaatcgatgagatatggtggagaattctcatttgacaattgggatagatctatgagcattccttat

SEQ ID NO: 185876 - DNA, 122 bp, Homo sapiens
cgcaatgaggtacagctgctttttatttttttgtctgtatcagctattggctcctatccccgcctctgggatccggcctgcgccgcggggtcctagggggccagcagctgtaaagcggtacg

SEQ ID NO: 185877 - DNA, 122 bp, Homo sapiens
gtccactcaccttggcttcccaaagtgttgggattacaggcgtgagtcactgtgcctggccgagaatattagtgatcattcagttgattgccttgtatatctctagactcgagccgtaaagt

SEQ ID NO: 185878 - DNA, 122 bp, Homo sapiens
caggtccttcttcctggatactcataacgcggccccatttctcactcccattgggcgtcgcgtttctagagaagccaatcagtgtcgccgcagttcccaggttctaaagtcccacgcacccc

SEQ ID NO: 185879 - DNA, 122 bp, Homo sapiens
tcatccgctccatgtccacggccagtccccagagcccaggagggctcgcacacaggcgctcggcagatactgagaaacaggaaagtggccgttcaccgggctgcttcctctcccaaggctaa

SEQ ID NO: 185880 - DNA, 122 bp, Homo sapiens
gacttggcttcccacagccgacctcctccgcctgtccctcccgccaccccgcctgtcccccgcctttccagcagcctccaagtggcaggctgggtgctgtgtcaataagggtgtgtgccctg

SEQ ID NO: 185881 - DNA, 122 bp, Homo sapiens
actggatgtccctcagtcatccaaaaccaaactcactaaaattattatgagacagggtctcgctctgtcacgcacgctggagtgccgtggtgcaatcttggctcactgcaacctccacctcc

SEQ ID NO: 185882 - DNA, 122 bp, Homo sapiens
ggctgcaggggagacagtggcgcagagccctgaccctgtcctaggtgctgacaggacacccgtccctcccgtgtggcacttgctttgagcagcgagttcgatccggagtgaccaaggatttt

SEQ ID NO: 185883 - DNA, 122 bp, Homo sapiens
caggggctggattcccaccccctccgtcaatctcagcatctccaccaggctcccctaaaccggttattaagtgaacacattaggcttatcaaaagggacgtgggctgcttctccctgcaaac

SEQ ID NO: 185884 - DNA, 122 bp, Homo sapiens
cagcccggggtaatcccactcagggctccgggtgcccagttctcccacttcccatcctggcggcctaaaggcaaggcctagaccctggagaggccaaagtcgggccaaaacaacagcgaagc

SEQ ID NO: 185885 - DNA, 122 bp, Homo sapiens
agcctcctcccatagggttgccgggaggcagcgtggggccaccccccagcatcatcccaccgggggagcacagtgatgtactgtatcctgcatttcactcgccatgagacgcagcaggggct

SEQ ID NO: 185886 - DNA, 122 bp, Homo sapiens
gcggagctaaggttaacattagacgaggctgtggctaccggaaagagcgcaggcgcagagcgcggaatgcgcctgcgcagagcgctgggcgacgtggccagtcggggcccggaagtggtccc

SEQ ID NO: 185887 - DNA, 122 bp, Homo sapiens
atcaaaaaataaagcaagagagttcatcaataacaaaaactgcaatggttgtgtaagtgccgaaagggtgaattctctcaaggggtaaacaataatgagagattggggcatcccaagagact

SEQ ID NO: 185888 - DNA, 122 bp, Homo sapiens
taaaattcgcgagagttgcttccactctcgtgagacctcctgcgcgttaagcctcacccgcgaaggctctccacgcaggaagaagatcaaggagtcacggataaagcctctctgggcggcca

SEQ ID NO: 185889 - DNA, 122 bp, Homo sapiens
taccattgaggtgcctggtaagaagatcccaagaaaccaggccatgagggtaatagaccacggacacattttccactgtagcattcaaaagctatcagtgttagtctggaagtctggcttgc

SEQ ID NO: 185890 - DNA, 122 bp, Homo sapiens
cagcactgtgagctggatctcacccacagatgtgttcggcttgacccacatagttgtatacgcatatgtcagtttgttgcaacatacaaaaactggggggtttcacataaaaatctgcattt

SEQ ID NO: 185891 - DNA, 122 bp, Homo sapiens
ggccgggcacagcgacgtcaagcgcttttggaagcggcagaaacatagctcctgagagcgcgggacttggacacggacctcggcgggcgggactgggcggggcggggcatcagaactcaggt

SEQ ID NO: 185892 - DNA, 122 bp, Homo sapiens
aagcgctagagggcacggttgcccggggtgaaccgcatgtccaaatgtaactgtgtgctccgagttaaaattgtttttctgcagactttgcttgagccaacgattccggaattggggaaagg

SEQ ID NO: 185893 - DNA, 122 bp, Homo sapiens
cggcttcccgaaaggacggcgccgggtttgctggaagacagctcagttttaggcatggcccggtgggggtgggggtgctcattttcttgggttcggattccctctctttgaccgcacttatc

SEQ ID NO: 185894 - DNA, 122 bp, Homo sapiens
cggccgaagctaagcccctccttcctgggtggtagatcctggtgttggtagcccgagtgacggggcgtggggatgggagatggcttgaagagaattggtgactcctacctttccagacagag

SEQ ID NO: 185895 - DNA, 122 bp, Homo sapiens
gccctggtcggcgagtgggggcacaggtggctcccggtttggaggaggagcaattaatttcggtctcctcccggcagcgggaggtgatttctccgtcaaacacggaagcctgccgtggccgc

SEQ ID NO: 185896 - DNA, 122 bp, Homo sapiens
aactattcccgccctctgcttgcctggatcggaggcgttcttattaattggtcgctgaaacgtctggaagcatattgattggctggtgacgccgcctgtttgggctcaacggtcacctcccc

SEQ ID NO: 185897 - DNA, 122 bp, Homo sapiens
tcctaccatagcgcttggcgtcacctgctctcccggtcctgccccagggccgagggattgcgtcccgaaccgggcttgggaatcggctgcctctcaagttggtgttatttatgtttgtcttt

SEQ ID NO: 185898 - DNA, 122 bp, Homo sapiens
gtgacggctgagcggtggcaggagctgagagcgagtgagctagttagcggtctgcacgcccgggagtcagcactgggatatgacagcatgtaaattaccctagaggggacggcggagaacgg

SEQ ID NO: 185899 - DNA, 122 bp, Homo sapiens
gagagccaaagcagagggtggagggagtccccagggtggtaaggggaatcccgggcacatcgggacctaggtgtgttctcaggactagaaggctaaagcggcagatcttttgcagccttttc

SEQ ID NO: 185900 - DNA, 122 bp, Homo sapiens
gtgatcctcccatctcagtctcccgagtagctgcgattaaatgtgcctgcaccatcagcccggctaatgtttttgtatttttagtaaagacagagtctcaccaagttggccagattggtctg

SEQ ID NO: 185901 - DNA, 122 bp, Homo sapiens
aaaatatttcctagcggctaaaagagctccaagcctaggcgaatctgccggtccgctcgccggaaatgcgggctctcctgccggaagctgcccctccaccattttgtggcccgctatggcgg

SEQ ID NO: 185902 - DNA, 122 bp, Homo sapiens
gtgagtgtctgtgggcccctccgggaggtcgggctgttattctcccatccctcccgaccgcgctttgggcagaatcctaggccatgaacccctggaccaccacttcctgacccaagggggtc

SEQ ID NO: 185903 - DNA, 122 bp, Homo sapiens
gagccggagatccgggagcccgcaaggactagggtcgaggggcagggagcccgggagaggcgggcactgggcaggcgccccactgtaccaggctgcgcagattgtcctcctgagactggacc

SEQ ID NO: 185904 - DNA, 122 bp, Homo sapiens
ctcccccatagcagagatgaccagtcagcttacagggtctctgctgggggacaatgcatacgcccaatcagaacctgaggagtgggctcacgtcaatggttgggacgtggcagaaaaaggga

SEQ ID NO: 185905 - DNA, 122 bp, Homo sapiens
ccttaagaacaatagtctatttcattgagataaataatttctgctcttaatactgcaccccgttacatgttctttccttctcaaaggttttagaataggagatatctttagaatgcatctct

SEQ ID NO: 185906 - DNA, 122 bp, Homo sapiens
cggattgaaccctcctgacatatttggggccattcttctcctttgttgctattttgctagcgacccgcgggtaatccccgcgcgggaggggggcgtgcattgtcgcgctgatggacgggccc

SEQ ID NO: 185907 - DNA, 122 bp, Homo sapiens
taataagaatattttattataacataatttattttttctgactcctgttgagtagtactacgttgtaatagtttacattgaccagcagcgtatgagaatgcctgtgacatgtatttaccaac

SEQ ID NO: 185908 - DNA, 122 bp, Homo sapiens
ccagtcagtctctccggacctgcctcgagcctcaggctgctgaaatcaccgcgcctcactcggtccgtacccagtgggcatcttgggtatctgggcggtcttcgatcccccgcgcgtgtgtc

SEQ ID NO: 185909 - DNA, 122 bp, Homo sapiens
actgggtctcctgggtaagatatttcagtccctctgagctcagtttccccatttcctgcacgtaaaatgggttcagtgatgaagctcctgctctgtgttaaagggcgagtgagccatgcccg

SEQ ID NO: 185910 - DNA, 122 bp, Homo sapiens
gctcccgggagacgaatgaggaaccacctcctcctactgttcaagtacaggggcctggtccgcaaagggaagaaaagcaaaagacgaaaatggctaaattcgtgatccgcccagccactgcc

SEQ ID NO: 185911 - DNA, 122 bp, Homo sapiens
cgaacgcaaatactccaccgaggcacagggaagccgggagcagccgaggaacgcggagggcgccgaatcagagcctgcggggcttgacagcttctcttgcggcgtccaaggtgggcgtaatg

SEQ ID NO: 185912 - DNA, 122 bp, Homo sapiens
ccaattgaccctgttggaatttacattagctcttgctgagatgcacagactcaccccattcggtggagagtgaccatcttactttcaatggtgttttgctgttccaaaagagcatccagctc

SEQ ID NO: 185913 - DNA, 122 bp, Homo sapiens
cagcagtgttttactatgtcacccagcctcgtctgcaactctggggtcaagtaatcatcccgcctcagcttctcaaaatgctgggattccaggtgtgagccaccacacctggccctgttgat

SEQ ID NO: 185914 - DNA, 122 bp, Homo sapiens
gagccacccaactctgtactctgtaaattaatatcttgcttttgcatgaactctctttgccggttttctccatcaattgccgtggtagagatgaggctggtggccaaatattttcttcttgt

SEQ ID NO: 185915 - DNA, 122 bp, Homo sapiens
ggagggggtgctgggcgctgagcggtggctctggcagggcttggtagggtgggggacggtcgcggggcgatctgtcagggagggggtgggcgtgaggggcgccgtccgcctgaggggctgca

SEQ ID NO: 185916 - DNA, 122 bp, Homo sapiens
ctccagtgaagcctgtcataaattgcactggttgctgttgacagagcagaatgtgccactcgccagaagacactcctttctgtctcacacacagcggggtgcctggctcccctgggggtctg

SEQ ID NO: 185917 - DNA, 122 bp, Homo sapiens
gcccagggtgccgggaagtcggggaccggccagccgccgaccggccgcacccctccccgccgagctcgcgcgcccgcctcgtcagcacctttcccgcagcgcagccccacagtggtcacgag

SEQ ID NO: 185918 - DNA, 122 bp, Homo sapiens
accagcaggagaacagcagatgagaggagagaggtcaggatattcattccccctttccctcggtgcacagtcactgggctgactgtgtctctctaccaaggccacatctcctgtcagtcctc

SEQ ID NO: 185919 - DNA, 122 bp, Homo sapiens
cgggctcgcacggcgaggatgtgatttgaataacaaaaggtggcttctccccagagttcccggtggcggggatcgccgatcccggagcgagaggccgccggcccgccaggaagcgtgtgtgt

SEQ ID NO: 185920 - DNA, 122 bp, Homo sapiens
ctaagaagcggtgcaacttttggcaggaatcggggttagcgggacctcaagggctcactgcggctaagtgaacgctgactggtcctccagcgtgagctagaacagacgtctctatggtcaag

SEQ ID NO: 185921 - DNA, 122 bp, Homo sapiens
ggctgaggcaggagaatcgcttgaactcgggagatggaggttgcagtggagccgagattgcgccattgcactcagcctgggtaacaagtgcaaaagtgcatctcaaaaaaagaactcacagc

SEQ ID NO: 185922 - DNA, 122 bp, Homo sapiens
cagcttccatttgcaggagacacggggcgaggcgacaccacagagaggcaaacagcagcgcgataggccacacatttgcaggacagctgatctggtttctgcaacaaatcacaagtggtggg

SEQ ID NO: 185923 - DNA, 122 bp, Homo sapiens
taagaatgaatgaagggaaatctgagagccaccacagcatttcttgagcaatgtgcttggcgctgcgccaggtattttatgcccttctcctcatttaatttaaccctccctcacaacgcctc

SEQ ID NO: 185924 - DNA, 122 bp, Homo sapiens
cagccaatcacaagccgggctgtgctcctacaccatccgaagagcgaatcgtgcagagaccgtgtctacgattggcctctccctgacaaggatttaattttgaatttttctttatggcgtgg

SEQ ID NO: 185925 - DNA, 122 bp, Homo sapiens
gctgggaaccaactgcacgtagacgggctgctctcaaacccggctacctctcgcggcgcgcgtcatgtgagccgggctactctgcttttgtgctcagggcattgaggaagaggcaccgcgga

SEQ ID NO: 185926 - DNA, 122 bp, Homo sapiens
gagctcccctcaggctgatcctgcaggcctgggtctttattgctctgccccttgtcaaggcgcctcagagagtggtctactccaatcagctgaatgcctctgcaggcctaagggagcccacc

SEQ ID NO: 185927 - DNA, 122 bp, Homo sapiens
caaacgggcacggagcatgtcaggctcagcctgagagggtgtctgcaaacgggcacagagcgtgcggggctcagcctgagagagagtctgcaaacgggcacggagcgtgcggggctcagcct

SEQ ID NO: 185928 - DNA, 122 bp, Homo sapiens
cccccacagtagaggttgagtccgattaccgcgtttcttttgaggccaaacattgccagtcgccgccgccgcctggctgagaaaactggggaagaccccgactccttactggaaggaagcgg

SEQ ID NO: 185929 - DNA, 122 bp, Homo sapiens
gaaactcctggattttgttttcttttggttttgtttgtttttaatgaagggtagcgttatcgtcaggtttttgtgtttaattaatggagcatatattggaaaggacagagaccttaaagcag

SEQ ID NO: 185930 - DNA, 122 bp, Homo sapiens
cagatccagaattattttctgtcagccaaaaccggctcctggggctggagacagacagggcgtggagccacccacagagcaggaatggctgttgggagcccgggatgatgagctgactgccc

SEQ ID NO: 185931 - DNA, 122 bp, Homo sapiens
gggcgcagcttggagacgcgcttgctcgttctgggaaggggcacgggacgcacggttccccggccccagctgcacagctcagctcggggctctcacctatcctcgttcagagccacattcgg

SEQ ID NO: 185932 - DNA, 122 bp, Homo sapiens
ggcagtctcaatctggcccccaccttttcttgggcttgtaggaaggtggacatgggctcccggagacaagacaagtgatatgttgaactgttcggtggctggaatcaactgctcctggagtg

SEQ ID NO: 185933 - DNA, 122 bp, Homo sapiens
atgtatggtggggagtgagttgatgtggaatcagtcatgaccgcgttgagttaggagcatcgcggatgtggagttacagctctgctgtggatgtttttgttttaagaaaacatcttttaaaa

SEQ ID NO: 185934 - DNA, 122 bp, Homo sapiens
gaggccgtgtgtgctgccctgtttgtctctttgtctcgctgcccctcggtgtgactctgccgcgtcccctctcttgttaggtgtctaataaggtcgctgaggatgtcgtgtcaggattgttg

SEQ ID NO: 185935 - DNA, 122 bp, Homo sapiens
ttctcctgcctcagcctccaaaaattaacgcccagttaatttttgtgtttttagtagagacggggtttggtttcaccatattggccaggctcatctcgaactcctggcctcgtgatccgcct

SEQ ID NO: 185936 - DNA, 122 bp, Homo sapiens
tttccatcttgttgttcggtctcccaaaaaaatttggttttaagtgggaagggatagaaacggtaccataagaattatttctttgatttgaaattgctgttttcttgcactgcaggactccc

SEQ ID NO: 185937 - DNA, 122 bp, Homo sapiens
ctgggctggggactgccccctcccctggcctggctcctgacgcccgtgctgccggtgaaacgctgttgacatgtcctgaattattaagcgtggggagggctccggagcacatgctgagcgga

SEQ ID NO: 185938 - DNA, 122 bp, Homo sapiens
accgagtctgccctctggtctgcagtcctcccttcagtcctcccacagcggcctccctgccgctcctccagcagcccaagcaggctcacagctgccacagggcctctgcacttgctgtgccc

SEQ ID NO: 185939 - DNA, 122 bp, Homo sapiens
gggccgcggtggggagcccggagcagggctgggtgcagggagcgctctcgctgcccggggcgctctgcgctgcgcgcccagtggggacagcacgccgccccgggagtctccaggcgcgggag

SEQ ID NO: 185940 - DNA, 122 bp, Homo sapiens
agccactgctctgagaatttgtgagcagcccctaacaggctgttacttcactacaactgacgatatgatcatcttaatttacttatttctcttgctatgggaagacactcaaggatggggat

SEQ ID NO: 185941 - DNA, 122 bp, Homo sapiens
ttcctgggagcattctagaaagacagcgtggaaacgcgcgcggcctggtggtcccggtagcggccatggtgctcagccccgcggcctcaccctgccctctaactccgtgtcaagcacctgcg

SEQ ID NO: 185942 - DNA, 122 bp, Homo sapiens
ttcacatgactgatggacccttagaacaatgccccttgcctttccccttcatcagagacccggagaatttgtattttagcagctgtgcaaggggatccacaattcttaattcttgcagtggg

SEQ ID NO: 185943 - DNA, 122 bp, Homo sapiens
ggagaccctcatccagctgatgcccttcttcgtgtaagtactgctcccacggacatgggccgccagccctgccagcatttttttctcggtcgttttggaaggtcagggagcacagcggctct

SEQ ID NO: 185944 - DNA, 122 bp, Homo sapiens
gaggctctaggcggcgaggtcacttgtccaggtcagagactcgcctccctggccaagggtcgctccagacggtggagggaggtctcaccttcgtggttgaccttgtagtgcagcgtgacggg

SEQ ID NO: 185945 - DNA, 122 bp, Homo sapiens
acccgtgggcttgcacctctagccttcaacaggaatttctgttgttaaagccaccctgttcgtagtactttgctagggcaaccccagcaaactaatgcatgtaatgcaaactaatagccttt

SEQ ID NO: 185946 - DNA, 122 bp, Homo sapiens
ctatgtttattacattttaatccaacagcatataatctaagctgctccctcatggagagccgcggctgtgccacctgcctgctttcgccatggagaccggagtcaggcctgcagggaagtcg

SEQ ID NO: 185947 - DNA, 122 bp, Homo sapiens
ttccaactcctcctctcctccaagtgtgttctcgttgtgtctgttctgactgctggctagcggtgtacgggagccaacaggtaccagctcacaagagctgaccctggcatctcttcctagct

SEQ ID NO: 185948 - DNA, 122 bp, Homo sapiens
tctccacatcacccggccgtcgagcccagcctcttgccgggacgcactcgtcctcgcccgcgtgagtcccctccgagtctccacgctcgtcacccccgggtcctcccccaccccgcccgtca

SEQ ID NO: 185949 - DNA, 122 bp, Homo sapiens
acaagcacctgccaccacgcctgactaatttttgtattttcagtagagatggggtttcaccgtcttggccaggctggtcttgaactactgacctcgtgatccacccaccttggcctcccaaa

SEQ ID NO: 185950 - DNA, 122 bp, Homo sapiens
tttttttttaaaggcagagtcttattctgttgcccatgctggagggcagtggcgtgatctcggctcactgcaacctccacctcctgggcttaagcgattctcctgcgtcagcaatccaagta

SEQ ID NO: 185951 - DNA, 122 bp, Homo sapiens
ctttcacacatacctgctagtgtccactaggtctccacttcttaccgtgaggctgggtttcgcgttctggttccaggctgtccccccactgcctgcccctgccccgaatcgcaggttttgcc

SEQ ID NO: 185952 - DNA, 122 bp, Homo sapiens
tatctctattttgtagatgagacaggtgaagttaagtgttgggtaaggcccaaagcaatgcgttgttcatacttaggacttcaaatccattcctgaattgtttgacttcaaaccaaatattc

SEQ ID NO: 185953 - DNA, 122 bp, Homo sapiens
aataaacaaaatctgctcaaccaccaaggccaatgtctagaatttgtaaatatccaaatgcgacacttcattttataagtaaaaaagacatgacaagtaaaagggcaagtaacaatttattc

SEQ ID NO: 185954 - DNA, 122 bp, Homo sapiens
aaagaaaattctgcccatcgaaatgaacttcatgaatggggcaggctggctgcaccgggacggaatcgtccacccgacccgaatgaattggcaggagccgcggccacatttaaagggccaga

SEQ ID NO: 185955 - DNA, 122 bp, Homo sapiens
gataaatgcattaggtgtctgagcccacttgctgctctctcccaccgaactgcaagcatccgtgatctccgaagttgctggagtgaataactaagctggaccagctgactccgggctccaat

SEQ ID NO: 185956 - DNA, 122 bp, Homo sapiens
gatggggctagagaaggtcagctcaggaaggagtctccacctaccgtctctcagttgtgccgaccagggccccagctgagaaattccccagcagcccagctctgtgcaaatcccaagtgccc

SEQ ID NO: 185957 - DNA, 122 bp, Homo sapiens
acaatgtctgttgtgggaatttatgatgtcagtgtctacggacatttaaccctatcaagtcgaatttaagtttcttggaaccataggaagtgccactgggaatggtgaaagctgtggaatta

SEQ ID NO: 185958 - DNA, 122 bp, Homo sapiens
tgtaaatcacataaaaggagcgacatatacttcccatccctaaaaaggaatgccccaagacggtggagatctggcttcatggcagcacttgagaaaaaacattaagtatctgaagggactca

SEQ ID NO: 185959 - DNA, 122 bp, Homo sapiens
aatcttgagtcagatcttaacaaggcatataagtcaaagagtaaataaagtaaaacaggccggtcaatggcaagaggagtgattcagaaaaacaggagagccagaagtgacagaaaccaagg

SEQ ID NO: 185960 - DNA, 122 bp, Homo sapiens
cctggctcctcaagggagctgctacctctgccaccatccacaagatgggggattgggaggcggccagtgtaacctttgagttcaaaaagacaccaccaaagtcatgacctgaggatcagcaa

SEQ ID NO: 185961 - DNA, 122 bp, Homo sapiens
tgaggggcggaagtgacgcctcacattttctctgcacccccgtcaagtctgaaatcgtgccggatgcagaggagacactcagctcagagtggctgctctggtttagggctgagggctcagaa

SEQ ID NO: 185962 - DNA, 122 bp, Homo sapiens
ggacgtaacgcaattcttttttccgattggtccgtgaagctcgggaggtcgttgggggctcgaccttgggatagaacgcctgccttttattggtcaatactcttcgggccgggcaatgtggc

SEQ ID NO: 185963 - DNA, 122 bp, Homo sapiens
ggagcaggaagcgaggctggcagctcctggggtctggagcatgagtccttgctctagctccgccgcccgggagagcttcccgtggccggcgactgctggtttgctcccctgggccccgactg

SEQ ID NO: 185964 - DNA, 122 bp, Homo sapiens
aaaggacttaagctgatttacactgtttactttggcaatgcagtggatgtattattatagcgttttcagaagtgtgtctgaaaaacttggttccgtaagatgctttaccagaaaggcttctg

SEQ ID NO: 185965 - DNA, 122 bp, Homo sapiens
ctgacgccggtaaggggggcggggcttggggggccagagcgtgggagcggtcccggctcccgggcctctcggcgggttgcggggatgtggggacccggcgcgggacctagatcagtagggcg

SEQ ID NO: 185966 - DNA, 122 bp, Homo sapiens
aaatattagcataataaatataaatggacccagaacgcgagggggcaggggccacgtgatcgctccacgaaagccacttgtagggacctttagagagttagcaataaggctggagaaggaaa

SEQ ID NO: 185967 - DNA, 122 bp, Homo sapiens
cgccggctcgggcgcgaaattcagcggtggcaagcggagggtgggcttggtaaccacccgcgcgcgcccgagccaagagtcgcgtactgtctgcccgcggcaaagttcgtctttctccgctt

SEQ ID NO: 185968 - DNA, 122 bp, Homo sapiens
aacgtgtgttctggaagggtgttttggaggagttgctgtggtttatcaaggtaaagaagtcgctgctattagaagtcagtagtctgttctcaacacagcagccagtgagatcctttcaaaac

SEQ ID NO: 185969 - DNA, 122 bp, Homo sapiens
agcaagctaagtgcgtcgaaaattccacaaagttagggaccgatgtgattattttcgaatcggtggtgttctggagcaaaacctagtaagaaacaaaatcccaccctctgttttatttgcaa

SEQ ID NO: 185970 - DNA, 122 bp, Homo sapiens
gaatttagtccttccgatgcccccagccagctgtgtgaccctgggaaagtaacttaatttcgctaaacctcagtgttctgaggaaaggtcatcattaaggtatttttaggctctagaagccc

SEQ ID NO: 185971 - DNA, 122 bp, Homo sapiens
tctcgtggcccttgctgcctacttcatgctagccaagtcgaatccagttttaaaatacgccggatgcagtgcaggagacactaagtggcgaactgcggttgccgtgctgctgaaatttagtg

SEQ ID NO: 185972 - DNA, 122 bp, Homo sapiens
cctggagccagaatctggaagaggctgggaagcattctcccccagcgccttcgaagggagcgtggccctgctgacaacttggtcagacttccggcctccagaactgtaaaagaatacttttc

SEQ ID NO: 185973 - DNA, 122 bp, Homo sapiens
gcagtaagtgatatggaggaaaatacagcaggggagaaggagagaggggtggaatgggagcggtgtgtcactttagaggggatggacagaagaaaacctaaagaaattgagcaaggaggccg

SEQ ID NO: 185974 - DNA, 122 bp, Homo sapiens
gggagtcagtggtgggaagccctggaagattccaagcaaggcatgacagtgctgtggcagcggatagttaatttggccaaggagtggaaccctcctttgtagcgtgagagtgttggaccaag

SEQ ID NO: 185975 - DNA, 122 bp, Homo sapiens
gaggccgcaagcctggctatcatgggcgtctgcaagacctcccagcagggctgcggagggcgagcggcccaggaaggctccttccagcacctgaagggggaacggcacagcatgcaggtgct

SEQ ID NO: 185976 - DNA, 122 bp, Homo sapiens
ctggagggtttttctcatccaatcagaacatgcagtcaggaatcctcctgtatataatctcggtatatgactgctgctgaagggaagtcaggctcttccacgttcccgtattttcctgtgga

SEQ ID NO: 185977 - DNA, 122 bp, Homo sapiens
ttacaatgatttgtgaattccagctcctgttcatgataacattggccataatgattcaaacgttcatgtgtcagaacgtttcagtgtaaaccagataaacttcccaggtcccttctatctct

SEQ ID NO: 185978 - DNA, 122 bp, Homo sapiens
acaagaaaaaaaaaaagttgtctgtgtgacatggccttagccttgctgtgattgctctggcgatccccaaaattttcctccaaagcaggaccttgggatcgagtttacagttgctgtttacc

SEQ ID NO: 185979 - DNA, 122 bp, Homo sapiens
aaacaactcaggtggccgctgatggtcatggtggacacagggctgccatgcccatgcccacgagagggaggggcaaaaggtgagccctcctaactcctccttgcgcatcttgcgccagtggt

SEQ ID NO: 185980 - DNA, 122 bp, Homo sapiens
tggcagtggaggccgcccgacccccctctcagcctccctgtgctgcgttccctgccctgccgggaaatggagattctgcgcctaaagacacacagtcacgctgctttcaaagtttcagttcc

SEQ ID NO: 185981 - DNA, 122 bp, Homo sapiens
ctcctccggagccccctcccacagggagctggtggcccacgaacccgggaggcagcctcacgggcagcgtctcctccagtgaaccctcatggcctggagtccggagggccacctgcccggcg

SEQ ID NO: 185982 - DNA, 122 bp, Homo sapiens
ggttacatgtgtcttttccccaccacactaagtccttcagggcaaggactgtgtccttcacgactgtactcctggccctgtacccagtgcctggtatatacatgaagcttggtcaaggtctg

SEQ ID NO: 185983 - DNA, 122 bp, Homo sapiens
gtccgccaagctagggtgagctgccgatcggggacgcgaacgggagcgcgcaggtgagggcggcggggcggggctggggcgggggcggggccactgaggctgcggccaatcaccggcgcctc

SEQ ID NO: 185984 - DNA, 122 bp, Homo sapiens
aagctggccaactgatagagtgacgaggtactgtgtccctgggaattgtaattgcttggtcggtgaaaaaaaaagaacatcagaccattgctgataatagcacaaggtgcattttgatagta

SEQ ID NO: 185985 - DNA, 122 bp, Homo sapiens
ggcgaggagatgaaggggtcgtcttcatcttcgccggatgatttccgcccacatagagggcgccagtgacgcccacacacgtgctggtgtcccgggaagagttcctggcaaagagctcagga

SEQ ID NO: 185986 - DNA, 122 bp, Homo sapiens
cataaaatcccgggattctggctggaggcagctcctgagactgctggcatgaaggggagccgtgccctcctgctggtggccctcaccctgttctgcatctgccgtgagtctgtgccactggg

SEQ ID NO: 185987 - DNA, 122 bp, Homo sapiens
ggtgcaggtctcggccaaagaccgtgacattgtagaagaggtgactgccaggctcctcctcgttgcctccggggaagctcggggtccggaccggggcggccctgcgggctcgtacccctgct

SEQ ID NO: 185988 - DNA, 122 bp, Homo sapiens
ggggactggggagggggcgctggctgcctcaggtgtcccctcccaagggctgaggccccccgagtatggatccgagctccctggtctttggtgctttcttgaaatcctcctggtggtggcag

SEQ ID NO: 185989 - DNA, 122 bp, Homo sapiens
ggggagggagcccctcgagggccgggtgacaggtctcgggggacggccccttgggctgggcggaacccccactgtccagaggaagggtgccccctgactcactgagggacaccccacttatg

SEQ ID NO: 185990 - DNA, 122 bp, Homo sapiens
tccatctcaccagatgctaggggtacaaaagaaaaataagccagggtcccgcggccccgtcggagctctcagaccagggcgggcagaccagcgagacagacacactgcccttatgagctgcg

SEQ ID NO: 185991 - DNA, 122 bp, Homo sapiens
gcacatactgtcttgataaacaccttaaacaacagcaaacagggttcgacagcagagaaccggtctgaccacaaatttaccagggcggagtttttccccaccctagtaagcctgagggtact

SEQ ID NO: 185992 - DNA, 122 bp, Homo sapiens
tgcgcgcgcctttgtgtggcggcagctgcggccccagcgcctttgaatgtcgagaggggccgggaagggagcctttccatgggccatctgtctccccgccagccgccgccccaccgccgccc

SEQ ID NO: 185993 - DNA, 122 bp, Homo sapiens
cacgtgtccccggtactcgccggccggagcccccggcttcccggggccgggggaccttagcggcacccacacacagcctactttccaagcggagccatgtctggtaacggcaatgcggctgc

SEQ ID NO: 185994 - DNA, 122 bp, Homo sapiens
ggtcgcagtgagcccgggagctccaggctcggccccgccccaccctgggcctcacgcacccgtgtaggagaggccccagctgtcctcatccctgcccagcaggctgcagaacgtgtggcggt

SEQ ID NO: 185995 - DNA, 122 bp, Homo sapiens
ggcctcacctctgcagttacaccctgtctctcccacacatggcctcccttcttccaaaggcgtttaaatcatctcctgtttaggggagaggaacagcacccaggcaggtgggttggaaaaga

SEQ ID NO: 185996 - DNA, 122 bp, Homo sapiens
agggggcggaggcccggcactcccgccccacccaccccgcgccgctgctggaacgcgaggcggtcccggagcctcttccgttcgctgcacagcctcgccctgcgcccgccaccgccctgcgg

SEQ ID NO: 185997 - DNA, 122 bp, Homo sapiens
cgtgatctgcgcgcctggtgtcgggactgggccgtggctactctcctgctctcccgggtccgggatcttcccagttggttttcgggcttgctattccccgtcccaccatccacagacatcct

SEQ ID NO: 185998 - DNA, 122 bp, Homo sapiens
attttcttaaacatgggctgaaatttccctcaaagtgcaaacgagttaaccgctaggtgacgcaaattaattcatttaggccactgagataaattctacccaaaattcagtcctggagttag

SEQ ID NO: 185999 - DNA, 122 bp, Homo sapiens
cctcacagggcggagggagggcttgcgggcggggcggagcgcgcggggaggcagagcgagcgagccagggggagctcgaaagagccaatcacctgccacctcccgaaaccccggcggcccgc

SEQ ID NO: 186000 - DNA, 122 bp, Homo sapiens
tcacttaccatgtgctaagtaagcaatctctgagcccagcgagaccggtgggttaatacgcggaggggctgcgggggaggacttaggggaccaggacctcagtgaggccccagaaagcaccc

SEQ ID NO: 186001 - DNA, 122 bp, Homo sapiens
tcacatgatcgccagagtctctcatttctctgcttccttctgccatctttttttttgagacggagtcttgctccgtcgcccaggctggagtgcagtagtgcggtctcagctcactgcaagct

SEQ ID NO: 186002 - DNA, 122 bp, Homo sapiens
tttaagatggaatttcagatcaatgctaggttataaactgaaaccacaggtgtcatgcttcgaaccgttaattacctggcattatgccgccaccttgtggctgatttactttatggatttca

SEQ ID NO: 186003 - DNA, 122 bp, Homo sapiens
ggctggcaggttaagcctctgggggtggatcctgaaaggtggtccagccgcctggccctgcgtgggaccctccacctggcagcaggtacccaaacaagggctggacagcaggtgggaagggg

SEQ ID NO: 186004 - DNA, 122 bp, Homo sapiens
attggccggccccaaagtaaatgtttgcgatgacttaaggccctgggcccaaggccagcgcgcagcccgagtggaggccgctctggaagcctcccagaggagaaagcagagctcatacacta

SEQ ID NO: 186005 - DNA, 122 bp, Homo sapiens
tctccgtctctccctctaactcaaatctctcattcccgagtccaaactaagagagactcgcgccccaggagtcagccagcggcgcgggcgccttccccgcacgcctctgccgtctggaggac

SEQ ID NO: 186006 - DNA, 122 bp, Homo sapiens
ttgctttctttcatgtgatcacaagaaattgggctataccatggtgctggcacactcacacgaagtaccttttgctctggaaagatgcagggtgagctcagtcaggcctctggtccactgtg

SEQ ID NO: 186007 - DNA, 122 bp, Homo sapiens
ctgggcgcgccgccggctctgcgcagggcctcacgggactggtagttcgaggcggtcccgcgatgctttccctgccgaggtgaggggagcgactacaactcccagagggtatggcggccgca

SEQ ID NO: 186008 - DNA, 122 bp, Homo sapiens
ctgagagtgcctggggccacaggaaaggcaggaacaggaccttctctctcccaggcccaacgcaggggccctcactggctgcagctgatctgtttccttataccagatcctcagtctcacta

SEQ ID NO: 186009 - DNA, 122 bp, Homo sapiens
aaatttattctaaagatatttgagtgttctttccttcctttaagtataggacatgaggcacgtaacagcgactttcttccgtaacccatcacctcaattcttcccctctgggattgcctttt

SEQ ID NO: 186010 - DNA, 122 bp, Homo sapiens
taccctcctttaatcgtgccaacagctttgtgaggttggcgttgactattttcaccttcacggatggaaaaaaaaaagactcaatggaaataagtgacttttccaaggccactctgccaaga

SEQ ID NO: 186011 - DNA, 122 bp, Homo sapiens
agggagcagcgggcctggagggaggccttggggctccatgatcgcgacccgggcagatctcgtaacttgctggaactggggtagggaaaggcagctgtccgggaaggaacttggagggggtc

SEQ ID NO: 186012 - DNA, 122 bp, Homo sapiens
ggggacactgtcctccgtcccgccccgctggcctcggagcagagcctgccggggtctggtcgcaggactgtctgcaaactcacctctgccgccggctccacctccgctcacattccggcccc

SEQ ID NO: 186013 - DNA, 122 bp, Homo sapiens
ttggtgcgagcttgctgtggtttttgctctgggtcctctgggatggcgcctggctgtggccgcgtggtctctcacgcaggggcgccgggcgggggaacgcggccaccctgagtctggtgagt

SEQ ID NO: 186014 - DNA, 122 bp, Homo sapiens
atttattattgatttatttatttttaatatgataccaactggttttgagctccctctcaccgtgggagtttagtctctggccccggcaacctctgccagtggcaagagctgacttattgctg

SEQ ID NO: 186015 - DNA, 122 bp, Homo sapiens
agtgtcacttccttctagaagacatccctgacctgggggatttgtagaaagttgatatgacgggagaaggagggagatgaagaaatgagtgaagccacctgaatgttctagtctagctccca

SEQ ID NO: 186016 - DNA, 122 bp, Homo sapiens
gtctccgggacatcttgagcccctgagacgacctgaaccctgggccatctcggtccaccacgccaaatttcccaccggcgcgctgagcaatcggcggcagatggccaatacccagaggccgc

SEQ ID NO: 186017 - DNA, 122 bp, Homo sapiens
aaacgtcaaagcctgacaggtgtgacaaataatgggcccctaggcaggctggggctggcgcgtgcctgtgcgcgtgcgcggggcgcggggtttttaacaccgcgcagccttcccggcggccc

SEQ ID NO: 186018 - DNA, 122 bp, Homo sapiens
taaactgtgtggagtgcaggcctcgcctgtgttactgtgccctcatctcaagctcagcaccgcgtcctgccctgggggcccccatgaacatgtgccgaatgaacgagcggaggaatgggggt

SEQ ID NO: 186019 - DNA, 122 bp, Homo sapiens
ggtctagtccaggggccaaaagcagtctgaggtattgggtatacttatactctatagggtcgttgaataaatggcttagaatgtggctgatggctgtgtgggtgatgagggatgaggcagga

SEQ ID NO: 186020 - DNA, 122 bp, Homo sapiens
ccatcttggacgcagcgtcccagaagatagcaaccttcacagacatcggcaacagcctggcgcatgtggagcacctgctgagggacctggccagcttcgaggagaaatcaggcgtaaggcgg

SEQ ID NO: 186021 - DNA, 122 bp, Homo sapiens
agacaggcgcccaggccaggactagatccccaaagggaacatggatggattgttcttcctcgtctctgacacatcagcaagaaggtgtctatccctgaagaccttatttacaaaatcgcccc

SEQ ID NO: 186022 - DNA, 122 bp, Homo sapiens
gaagggagctggacacaaggcagttcagcacagaggctctggggccctgcagcatggagacggtcatgggctgggctcccccagagggcagggaggctggaggtcggatgagctgggggaac

SEQ ID NO: 186023 - DNA, 122 bp, Homo sapiens
aacaattaaaagtagctaaggctcgcttaccacaggattcttccccattctgcgtttagccggcctcggcggccgccggcccccaagcacctggcgccccacccctcccggctcggtcgcgc

SEQ ID NO: 186024 - DNA, 122 bp, Homo sapiens
atacgggaagggcaggagaggctggcatgaggcacccgtggtccgtgctgtgggcacctccgggaggcagcctgggacaggcgggtcctgctccagagagagaaggggctgccgtccggcat

SEQ ID NO: 186025 - DNA, 122 bp, Homo sapiens
ggccgacccgggctgggacttcgggggtcctagcctgagcccgctgcgggagaacaggcccggccgctgtggggaggggccgcgcgctatcctcgccgggggcgctgggaggcgaacacgtg

SEQ ID NO: 186026 - DNA, 122 bp, Homo sapiens
ttttcaccttatcctaaaaagtatttaaggatgtattaggggagatttatcccagtctaacgttgatatggatggaatgcatagtctgcccatggctcccttaggttctgttcaggtcttgg

SEQ ID NO: 186027 - DNA, 122 bp, Homo sapiens
acgtgtatgtataaatccttcatagtcataggacttatgctcctgaaaaaaccataggcccgtcaccttagcttttggatatgagtcccagtttttctgctttactaatgacatgactctga

SEQ ID NO: 186028 - DNA, 122 bp, Homo sapiens
ccatagtgccccgggcggggcagcgcggtgcggggtgaacgccaccggcccggcggacagcgagtggcttcaggcgagagctcccagagcctctgtttcctcacctgaaaaatggtgacagc

SEQ ID NO: 186029 - DNA, 122 bp, Homo sapiens
gcatactccctgtgacatggcacatgacacgtgacacaacacattctcatgctccgccgacgcgtgacccacggcacgttcccgcgctccgccgacgcgtggcccacggcacgttctgacgt

SEQ ID NO: 186030 - DNA, 122 bp, Homo sapiens
tgagggagaggaagagttcaaggatgaccagattttccagtctggcaaccgaatccataacggtcacatctactgaatggggagtaacaaaaaaaagagtcaagtttgggatgtgggtaaga

SEQ ID NO: 186031 - DNA, 122 bp, Homo sapiens
ggctgctcctttttgggtaaggtctgttgcttctctaggaacagtgacggtggcagagcccgtggcccctctctcctgtcccagagccaagctgtttcctctccccactcccgggcaccctg

SEQ ID NO: 186032 - DNA, 122 bp, Homo sapiens
gctacagacgaggaccacgaggtggcaggggttgccttcaatgaaagggttcggggcggtcgggaccgccggggcttcagaacatccccgcgggtctgagccgggccgaccacggttgggtt

SEQ ID NO: 186033 - DNA, 122 bp, Homo sapiens
cttctggagagtgcactgtttgtggaacttttctagagtggcaaaaacgatctccactgtcggtgaaagggcagttcctgaagtcagctcatggtcctggctccccttctccccagcagtga

SEQ ID NO: 186034 - DNA, 122 bp, Homo sapiens
taccaaactaccaatttacagaaaatacaggtaatagaaatacattaaaccacaccttggcgtgcaatccacaaaatgcaaacaataggaaaccttaccatacaatataaatttcaaggaga

SEQ ID NO: 186035 - DNA, 122 bp, Homo sapiens
gaaaacgactaatgtaactatgcagagttgtttggacttcttcctgtgccaggtccaagtcgggggacctgaagaatcaatctgtgtgagtctgtttttcaaaatgaaataaaacacactat

SEQ ID NO: 186036 - DNA, 122 bp, Homo sapiens
ttcttaaccaaatgacataactaaaagtaagctaccatgaagctaacactgcaatgggtgcggcaataaattcagtagctttatttttaaatttcaattaggttccttggatgaacaagaaa

SEQ ID NO: 186037 - DNA, 122 bp, Homo sapiens
gagccaggcccagcaggaaggatgcgtttgtgttcggccctgcattcctgcagtgtccctcgggtgtgtggctggaaatgatttgtgtaaggcactcagccagcctcccttttaatcactcc

SEQ ID NO: 186038 - DNA, 122 bp, Homo sapiens
gcgagagcagttccaaatagggactgaaaagtaacaaaataatgtggcagcttcgtccggcgctggccaatgggagcgcggggcccccacgtggggctgcgggactcggcctacgactgggt

SEQ ID NO: 186039 - DNA, 122 bp, Homo sapiens
gaggtcgggtctactgggaacgctaaggttggagtgagagccctgcgggaaatgctaacacggggaagactggtgtctgcacggagtgctgagctagggggccagggctgcagccgctgctg

SEQ ID NO: 186040 - DNA, 122 bp, Homo sapiens
gaaatatggacctcgatgaacagataatagggagaatctcatgcacccatcctggaattacgtttttagctttgcccccatcactaccattggagggaagcagcttctgcgagaggcatttg

SEQ ID NO: 186041 - DNA, 122 bp, Homo sapiens
ctggatttggggcctggggaagggcactgtgagggcggccgagtacagcatcctcgctgccgtgtggtaagagtgacatctggtggctgccatgctcaggctcagtgctcttccatcaaccc

SEQ ID NO: 186042 - DNA, 122 bp, Homo sapiens
gtggattatttggtttgtggtggattattcaggcatccttgtccggccctttcccgttctcggggcagccgtggttttccatgcgtgaggctctcacgctgccctggcccagtgggtgagga

SEQ ID NO: 186043 - DNA, 122 bp, Homo sapiens
attctcattttacatacatggcaactaaagcatgaggagttgaagcgcatgcctaggccacgaagcatgcaagagctaacatcaaccttcacacctatgcactttgatgctgaccctgggtt

SEQ ID NO: 186044 - DNA, 122 bp, Homo sapiens
atctgggatcccaggtactgctcctgtacctggggctggccgtgagcacctgctcagaaccgggccctacactgtaccccataccttccctggatcctgtggtgtggcccccgccatacccc

SEQ ID NO: 186045 - DNA, 122 bp, Homo sapiens
catcgacagggaaattagaatcagtcaagcagccagaacatatgtaaatgttaccttatgcggcctgtgggaatgaagcacaacaggacacgtgggcgcggtagtgagcagggccggctcta

SEQ ID NO: 186046 - DNA, 122 bp, Homo sapiens
ccccccccggggacaccagcccgggagggagcgggcttcgttagggatgaccctgcctcgcgcttccccttggtctttgcattttaccggcttggcctctgacggggatggggatgggggtg

SEQ ID NO: 186047 - DNA, 122 bp, Homo sapiens
tcttggggccccaaatgacaagtcatcaaaccagtttctctccagcaagggtccttgatccggtagcagcaggtttgggtttcaggcactgcagagaccctttgcagttgggtttagcagct

SEQ ID NO: 186048 - DNA, 122 bp, Homo sapiens
cgaccgtgggggtcggcgcgccgggaacctccacagcctggccagcccctgcctggtgctcggttcagacaagctggggcccagcagaagcaaagaggcggtcactgccccacctacccgac

SEQ ID NO: 186049 - DNA, 122 bp, Homo sapiens
cggagaagggagacttttcaccagtaatggctcttaccgtagtgccatctttttctgtctcgggggtttggaaggtaatgactagcacttgtgtagacagttcctgttaatcccgtgaattg

SEQ ID NO: 186050 - DNA, 122 bp, Homo sapiens
ggcatcaggaaggcttgagttacaggtggtggaccctcagagccagcctgctccagagcccgggctcccaggcaggagctgggtagcgctggggtccatggatgtagttgagcgagtggggt

SEQ ID NO: 186051 - DNA, 122 bp, Homo sapiens
ctttgaagaacggagtctttgcacttacacacactcttcctgttctgccttcacctatgccgggataagcagagatctcatcaattagctcttctctgcaaggtcttccactatttctgtct

SEQ ID NO: 186052 - DNA, 122 bp, Homo sapiens
cgcctcggtttcccaaagtgctgggattacaagcttaagccaccgcacccggcccatgcccggctaatttttaaatatttttagtggacataggtttcacaatgttggtcaggctggtctcg

SEQ ID NO: 186053 - DNA, 122 bp, Homo sapiens
ttttgttgtcgttattttgcgatggagtcttgctctgtcacccaggctggagtgcagtggcgtgatctgcaacctccgcctcccagattcagacgatgctcctgcctcagcctcctgagtag

SEQ ID NO: 186054 - DNA, 122 bp, Homo sapiens
tggagtttatcagccagcagcgggtgcgtagggagcggtccaggcataatggatgcaggacgcatttgtatggattcctttacaccttgaaaagcggcatcttgtcctggactttcctattt

SEQ ID NO: 186055 - DNA, 122 bp, Homo sapiens
attgtcgctgcacctgctgctgtggctccggggcaccgcggggctcagttcagctttcggcgcagatggaggccatcggcagaaacccggagctacagccgagctgagcttacagtgctcgg

SEQ ID NO: 186056 - DNA, 122 bp, Homo sapiens
cagctgcggatcccggaaccgatgagcaacttcgcggggggcggggcgggggtggggcttcgtggtggggcggggctttggtgcgggggcggggctttggtgcgggggcggggcggggaggg

SEQ ID NO: 186057 - DNA, 122 bp, Homo sapiens
attacctcggaaacccaccaagggccggtaaagtaataaactgtgatcgcacagcgtacacgtcgagtcccagggagagcagggctcccaggaagccccgggaagcgtgcgcttccaggagg

SEQ ID NO: 186058 - DNA, 122 bp, Homo sapiens
ggacatcctgggacaggggtgggggtgcaggagctgcagtgccggccggtggggtcaccccgtcaccccgggggatggtcacctcttgagcttcagaagcatcctccccacagtggggacag

SEQ ID NO: 186059 - DNA, 122 bp, Homo sapiens
ccgggccgtctccaggccccaaggggtcactatcggaacccgtcatcacagtacctaatgcgaagacccggaaaggttgtgagtgaggccgtccgcaacctcaccctgcgcttctgccgcgc

SEQ ID NO: 186060 - DNA, 122 bp, Homo sapiens
tccgctagaactgctcaacaggtgaagaatctttttccagcactcctgagcccttcgggtcgcggaacagtgcgaagattattccaatgcctcattcggagaggtgataatctggtctgtgg

SEQ ID NO: 186061 - DNA, 122 bp, Homo sapiens
ctataattactccactagcaagtgtctgcgctgtgattatgaacacggggcatctggcttcggcattcaggtgcccagcctctaccctgaactgaagcagacagaattccccccttggaatt

SEQ ID NO: 186062 - DNA, 122 bp, Homo sapiens
tcctattgtttcctcttttgtgccatctgatcctccaaacaccttgtcctaggctctagccggacatttctgacatctcaagacttgagactttgatttctgagcccctcagatcacacggt

SEQ ID NO: 186063 - DNA, 122 bp, Homo sapiens
ctgtaacacgtcgtctaaggcagagctcctgaagcaccttctctggtcagccgtggcaggcgagcagatgcctgggctcggcctcgcaaagcacaaaggtggacacagaacccactgtcctt

SEQ ID NO: 186064 - DNA, 122 bp, Homo sapiens
cactgttctttgggtctaaatttcttcttgaggggcttggagggagccacacccctgagtcggttaacaatttctctgccgaccccaatttttaaacaaagctgctcttccttaaccaacta

SEQ ID NO: 186065 - DNA, 122 bp, Homo sapiens
gggcctccagccccaggagcgccaggagctctggcgccttggtcccttcctcctgtccggcgcccccagctgtactctgcctcattaggagtcgacccctcctgggaggtgtggtctctggc

SEQ ID NO: 186066 - DNA, 122 bp, Homo sapiens
ctgattctatttacaaagtatatgcatattaatacagaaaatcctaaggaatcggccgggcgcggtggctcacgcctgtaatcccagcactttgggaggccgaggcgggtggatcatgaggt

SEQ ID NO: 186067 - DNA, 122 bp, Homo sapiens
actgtatttgtctttttgtggctggcttatctcactcagcataacgtcttcaaggtcatccgtgttgtgacgtgtgtcaggattcccttcctttctaaggctgagtacgaatccattgtatg

SEQ ID NO: 186068 - DNA, 122 bp, Homo sapiens
gcatttcaacgtgaaaatgccctggcaagactaccctaaaaggaaaacgccccggggtgacggtttaggaagctggcaccttagagccgcacagggagaggatgctgcccaccgctcagggg

SEQ ID NO: 186069 - DNA, 122 bp, Homo sapiens
tagccctaccatacagctgccatcctaagagtacgtttcccgttttcagtatcatctgcccgttctgagccatttgctctctagctgtgccgtacagctgccatcctaggaattccgagtgc

SEQ ID NO: 186070 - DNA, 122 bp, Homo sapiens
ccgcctagctgggccctgtgggctcccctccgcaaccctaaggcgggaggccgagggcagcggggagtcgcgcttcaccttcgcccctcatttgacccatggactcattaatggaagaaccg

SEQ ID NO: 186071 - DNA, 122 bp, Homo sapiens
ggagatgctgggatgcagaaccgcctgcgcttcgccaccagacagagcccgcctcgctaccgcccttggggccttggctgcagctctcagaaaggacaatgggaccccaagttgcggggtgg

SEQ ID NO: 186072 - DNA, 122 bp, Homo sapiens
aatagatcccccctccccgccgctgcagcaaatcaacatttctgctcacagggagagcagcgaatctaaagacatggccactgacgcgcatccccttaaaccgcagcggctagggtccagga

SEQ ID NO: 186073 - DNA, 122 bp, Homo sapiens
acgatccggtctcggctcccagaccggaataccacctacttcgtcttccctaacgtaagacgctgttggcaacctatggatgttctgtactgtcaatggttttgtggaaccactcgcccaca

SEQ ID NO: 186074 - DNA, 122 bp, Homo sapiens
atcccgtgggagagaaccacatgacgggccagcccaatcctgtgggagagaaccacatgacggtggagccacacgtccaccagagcctaagcgttggggccccgagtgaccacacggaacca

SEQ ID NO: 186075 - DNA, 122 bp, Homo sapiens
gtgatgccctcaaggtcagttgccaggcccaaagcataaattatcctaagtgtagatgaacgcttataggcacaaagtcctaccctatgaggatggataccactttagaaattgtgtttgag

SEQ ID NO: 186076 - DNA, 122 bp, Homo sapiens
tccctccagcttcaaaggcctgtcctgtccggccctacctctacctcatgtggtctctgacgggcattcattgggcacctgctgtatacccggaaagcatttattgagcacctgccatacac

SEQ ID NO: 186077 - DNA, 122 bp, Homo sapiens
actgcttgcactctgcggctgagcccttggccgggaggggcttcttgccaccaccgcccgcgctaccacctgcgccgccgcccccagccacacggggccgcttcctcttgcagccttccgcg

SEQ ID NO: 186078 - DNA, 122 bp, Homo sapiens
gcaaatgcaagagggcatgcaccacaaacatgtcatactttttaactgcagtactctaatcgttgcattttgtgtgattcaaatatcattctttacagttgtgctcttcattactgattgct

SEQ ID NO: 186079 - DNA, 122 bp, Homo sapiens
cacctaagtcaccgaggactctgaaaccgctaaaccatgccacagggccagcattcaacacggaggcactttgcacccagtaaaatccaactgaaaaaatgtggggcttggtcctccgcact

SEQ ID NO: 186080 - DNA, 122 bp, Homo sapiens
gacgttgtcccagtcccggtgatcggaagttctccgtgggcactgggcggctgaaggctccggaactgcgcctgcgcttttcggtgagtcatgcttcaggtttgccagggcctgtgtcccgc

SEQ ID NO: 186081 - DNA, 122 bp, Homo sapiens
ggcccgaggacccggaagaagctgagtggggtccggttttcacacttttattgtaaagctcgggaataattacacgggtctttcattgacagctcagcaaacaaaccggaaacgaaccgaac

SEQ ID NO: 186082 - DNA, 122 bp, Homo sapiens
ccgccaactgggcagggggtgcgggcattgggctgagggagcaggcattgggctgggggccggctggggatgttccaaacgaggtcgctgcgtcgggcgggggcgcaggggggaggaggtga

SEQ ID NO: 186083 - DNA, 122 bp, Homo sapiens
ctatacccactctcccaggctaccgtccccgggcagggatccacactgcagagaaactgccggcagtggaaagggactgaccaggacaggcaaagaaagtacaggcaagatccagattctcg

SEQ ID NO: 186084 - DNA, 122 bp, Homo sapiens
gtgtctccaacgccgtgcggcgcagcctgtacatcagggacttgctctagttctctgagccgcggacatgccctcgcattgcttcccgcagagtgcagagacaggaagctggagatgtcttt

SEQ ID NO: 186085 - DNA, 122 bp, Homo sapiens
atgtagttctgccgcctttgcgggagaaggaaaggagaaaagaggtcagcgggagcacctcggcagcaatcctccattgccagacagcacagctgagctctacatacagcaggagggatgga

SEQ ID NO: 186086 - DNA, 122 bp, Homo sapiens
atctatatcttaatgaatgcttaatcttatgcattcgttgaacacctgttctggataaggcgctgggcttggcatttggaaaatatagtgaaggcatagtcaaagtctctgccatttaaaaa

SEQ ID NO: 186087 - DNA, 122 bp, Homo sapiens
gcccgatgccccgaagtcctgtgggcagcctagccacagtaacttggtggaactcattagcgcaggccgttctcatcagcgccacggaggacggagacgccggggttcccggctttgagcct

SEQ ID NO: 186088 - DNA, 122 bp, Homo sapiens
ttccatagtgtgcagccctgtgtaggtctcctgcgtggctctctggtgtgagtgtgtgcgcgcgtgcaaacgctgcgagcgaattttaaagggcattccgaggatttcatttttcagcggag

SEQ ID NO: 186089 - DNA, 122 bp, Homo sapiens
gactcatcttctatcttattcattggggtttattttaaatatttccaaggattctccacacgcattccccgttgttttttctattgtccttttcttagcaggtaaaaggctccaagcttcct

SEQ ID NO: 186090 - DNA, 122 bp, Homo sapiens
atgaagtagtccgaggaaagtgacgatgaagacagaaagaatctcctggtctgtgctcggcggtccaggaaaggtcttgaaaggaaaagtctttgatgtgggcagagccttcagcagcagat

SEQ ID NO: 186091 - DNA, 122 bp, Homo sapiens
cctaggaactccagaaggtcgcaggtgtgcggcggggtggagacagagcggcggaaccgacggaaggacagggcacgccgggggccagaagtggccgggagacccgggagtgagcagcccgc

SEQ ID NO: 186092 - DNA, 122 bp, Homo sapiens
aagttttgtaaacatagcgcagaatcaaagccaggacctgacactggttcgaggtgtgtgcggttctgtttatcatgtgggcgggttaggataagcagcaccagagccaggctggagctcct

SEQ ID NO: 186093 - DNA, 122 bp, Homo sapiens
gcactgagccttggtcttaagcggctccagccccatgcacgccacagagaaggagtgaagcgcgttccctgcccggcatcctgagccccactggaccttctggcagggtgagggtctgggcc

SEQ ID NO: 186094 - DNA, 122 bp, Homo sapiens
gggagggatctgtgctcactttctccaatacttggcttggagggtcagttttcctgtttgcggggtgcttgaattcttggatgagaaaaagggctgacttggggcgggagccgctgaacaga

SEQ ID NO: 186095 - DNA, 122 bp, Homo sapiens
taggctcgaggaagcgtgactgcttacgtgttgaaaataaaggttctgtaagtcccaccgcgggtgcatattgaaaagaaagggatcattagcacgcgaccctcgcctaggagtatataaac

SEQ ID NO: 186096 - DNA, 122 bp, Homo sapiens
tcagaagataccccgaatacaagtagctgacgctcagagagcagtattaaggcgagcacccgcagaccggacctggataactccttggagttcacctctagcggccccctccccttggagct

SEQ ID NO: 186097 - DNA, 122 bp, Homo sapiens
gtcgtcgggaaaacagttagaaccaatgaatgcttgtcaccttcacactgcctcccaccacggcagggtccatggccacagccagcgtttgcgagaccccaggcctgcggacggtggggctc

SEQ ID NO: 186098 - DNA, 122 bp, Homo sapiens
acgacttcagtagagctccgaagcccagcctggactgggtggaaggaacacaaccagctgcggccccagtgagcgctccaggtgccagaaccgcctacccctggcgtcaaccaggttcttta

SEQ ID NO: 186099 - DNA, 122 bp, Homo sapiens
ccgagacatgggtgagctgattgagggcatgcgggcccgcgcctttctggacggggacgccgatgcccaccagaacaacagcaccagcagcaacagtgacagcggcattgggaacttccacc

SEQ ID NO: 186100 - DNA, 122 bp, Homo sapiens
tctgtgaatgtatcaaagcctttgttgtttgtgttaccttttcaatgaaccaggcttcagcgtccttccgattctgctcagcgatggtttcatactgcgcccgcatatcattgaggagcctg

SEQ ID NO: 186101 - DNA, 122 bp, Homo sapiens
gcgacggagctggcgctgcggcggcacaaggcgattagagcggtggccaagagcctccagcgcagcatgaactcccactgagcccccgagcctgggacaaacgcatctcccggggaagagcc

SEQ ID NO: 186102 - DNA, 122 bp, Homo sapiens
gatactcttgccatgagagatctaccctggaggaggaagttgctctggttggggagcttgcggaggggacagaaccagaccagcaacaaacttccgaagggaacctgaagagcctttaaact

SEQ ID NO: 186103 - DNA, 122 bp, Homo sapiens
gaaggcgattaccaccctgagcccctgaccgtagaggtgcagatccagctgaaccagtgccgctcggcggaggaggctctgcgcatgttcgccgtgtagggcgtgggcagtaaaggctgttc

SEQ ID NO: 186104 - DNA, 122 bp, Homo sapiens
gccgtgcccccgagtccccgtccgcgcagcgatggggcacctgcccacggggatacacggcgcccgccgcctcctgcctctgctctggctctttgtgctgttcaaggtaggggagctcctcc

SEQ ID NO: 186105 - DNA, 122 bp, Homo sapiens
caacccatcgcgcatggcagctctgaggaccgaagatgttgccgccatctttattgaggacgtgagcgttgctcctggtgctgaacagagcgcgaaggttcgccgtcgttgggtccgccctc

SEQ ID NO: 186106 - DNA, 122 bp, Homo sapiens
agcttctgctcattcttcaaaaccctagtcagatattgttacttcactgaaaactctcaccgccagccagagttccttgttcttccctttgtgacctcgtagccttgtcacagtgctctctg

SEQ ID NO: 186107 - DNA, 122 bp, Homo sapiens
tagtcaatacgctcttgacttacaatggcaaaaatctacttaaaatagtttgggtgatcccgggaatatggcagcagtgaaggcgttgttgtgtctccaaatgcctacataaaagtagacag

SEQ ID NO: 186108 - DNA, 122 bp, Homo sapiens
atcaagctgctcaggaagccagtgagtagtaattactcccccagagaactggtcatcttccgtgtcctacctagtggcaacggagtacagctgagatttataccctcctccacaccaaaata

SEQ ID NO: 186109 - DNA, 122 bp, Homo sapiens
ggcaggtggcggcaccaacaggcccgggggggacctttcccggacacctggcctcctcggcgaggcaggtggcagaactggttccacgtctgatcttccttagacaaacctgccttcagagg

SEQ ID NO: 186110 - DNA, 122 bp, Homo sapiens
aagaaaacggctcccccgtacagagggagcggggctccaaacggacaaaccccgtgtgcgcggaaagtagtcctttatattgggaggctggaggaggcagtgtctgatttgcatagggccca

SEQ ID NO: 186111 - DNA, 122 bp, Homo sapiens
ccctatgttgcccaggctggagtgcagtggtgtgatcctagctcactgcagcctggacctcgggctcaagtaattctcacacctcagcctgtccagtagcaggggctacaggcgcgcaccac

SEQ ID NO: 186112 - DNA, 122 bp, Homo sapiens
aatgaagggccacacgtacagttgattcatttaacaattgggcgaaagaataaaggaagacgtaatgcatcagaggctggggttaaaatagcgttcgctaccactgaggcgcttattatgcc

SEQ ID NO: 186113 - DNA, 122 bp, Homo sapiens
aggccgctgatgagggtgctcggggcagggctcttctctgagtgacgttggaggttttcacggtgaacacagaaaggggcactccgtccgagctgagcctcagggaccgtgaggcttgctct

SEQ ID NO: 186114 - DNA, 122 bp, Homo sapiens
gcagatgggtaggaagacatgtggcggtggggcacagcccctccacagcagcaggtcatacgcctgcctgggccacttctgcccaatcagagaagggagccaccagacactggtgaaggccc

SEQ ID NO: 186115 - DNA, 122 bp, Homo sapiens
tcagcaccacagagtgcttgggctgagggactgactgttggaacccgtgcatgtagctgccgggtcatcagcaagaaatgaattggaggcaggaagagtccaagcctgaataataacacccc

SEQ ID NO: 186116 - DNA, 122 bp, Homo sapiens
cttacatttttaaaagaaagcatttatgagcaagttcaaacttaacctaaacctgtgtctcgtctcatctcgtctcatctcttttcttttctttctttttttttttgagacagagtcttgct

SEQ ID NO: 186117 - DNA, 122 bp, Homo sapiens
ccgggcccaggggctccgcacagcaggtgaggctctcctgccccatctccttgggctgcccgtgcttcgtgctttggactaccgcccagcagtgtcctgccctctgcctgggcctcggtccc

SEQ ID NO: 186118 - DNA, 122 bp, Homo sapiens
tgcagaggccccagccgcgggcctcattcactgcggaaaccagggactatgagggttcggcggggccaccacccccgggtgcacagtggagtcttcccccctgtcccctccctgcacacact

SEQ ID NO: 186119 - DNA, 122 bp, Homo sapiens
acctgctgtgtgccaagcacggttgcaagtggtttcacatgtatcaatcaatgaaagaaacgtcactgccctggagaacatttttttggggggtagggagcagacaataagccatacacata

SEQ ID NO: 186120 - DNA, 122 bp, Homo sapiens
gcgtccctggggggtcaggactgggagtttgggacaagtcaggcacttgttactcccctgcggtccgggtggacgcaggcgaccggcctggcagggaggagatggcaaggggtccatactcg

SEQ ID NO: 186121 - DNA, 122 bp, Homo sapiens
aagagaaaggagagccaggagcatttaaaaatcagcatctgggccaggcaagatggctcacgcctgtgatcccagcattttgggaggccgaggcgggtggatcatgaggtcaggagatcgag

SEQ ID NO: 186122 - DNA, 122 bp, Homo sapiens
ccagctgcgaatgctgatagtccccagaccaactgacagctggatgttcgctggcctcagcggtgtgcattctcagcgacacttatgtcctcaatttattgctacgttcactcggtcagagt

SEQ ID NO: 186123 - DNA, 122 bp, Homo sapiens
cctaaaacttgcgaggagggcggggccgcagaccggtcctttaaaggttggaagtggccccgaggcgccggcagccctgggcggtcccgggaatcgcacaggacccggctcccctcgcctaa

SEQ ID NO: 186124 - DNA, 122 bp, Homo sapiens
agccttgggtgagaggcctgtggcatcgggagaagactccccaggcaaagggccactgcccggagcgagggccgcagcactggagaggtaagagagttcttcaggcagcgcttcccccaggc

SEQ ID NO: 186125 - DNA, 122 bp, Homo sapiens
gaggtagcagaaacacaagggagatgtctgtctgcagacaggcccaacccaaagctgtctcggcttcgtacagagcccccgaggttagccttcgtgctactctccagcggaagcgcagagac

SEQ ID NO: 186126 - DNA, 122 bp, Homo sapiens
tgtagagatggggtctctctagactaacagctcttgtagagcaaggatcaaaccacaaaccgcttttccccctatctttctgtacagttcctgactgaaagagctatgtgttcaatccaaaa

SEQ ID NO: 186127 - DNA, 122 bp, Homo sapiens
agctgcggagaggtagctgctccgggttttgcctggagccggatggggccaggacgcaggcgaggacggtgaagaccgcggacagccgaggcctgagcaggcggactggagggacaggggtt

SEQ ID NO: 186128 - DNA, 122 bp, Homo sapiens
gcaaacaacccagctgctgtctctgggctgctgaacctggcagtggagctgccagagtagcgtaatctcagctgggcagcttctatgactctcacactaaatcctgttctccagctgctgct

SEQ ID NO: 186129 - DNA, 122 bp, Homo sapiens
gctgggtgagcgccaggtctccccaccccaaggatagcgcgcacagggcgatctgctgctcgcgaggtagagagtggcttacttggggagaaaacattgaatctgtaaattaccttgggcag

SEQ ID NO: 186130 - DNA, 122 bp, Homo sapiens
ctgctcctatgcgccgcgccccgctccctgcgcccgggtgagtgcccgccggccgagccgcgcacccccaaccaaacctggctcctcgcgctttccaccgcggcctgacccctcgacagcgc

SEQ ID NO: 186131 - DNA, 122 bp, Homo sapiens
aaggttatggaccagttaattggatgttaggacgaggagaggactgagacccagccagtgcggaaagctggtgcagaggacaccaggtctttggaatagaggatgccaggagattatggaga

SEQ ID NO: 186132 - DNA, 122 bp, Homo sapiens
ggccacgtcgagttaaccccgcgagccccgtccctgggacttctctggacgtgtcattcccgtcccacctccaggaagggccacctgggccctgcttcatgtctcagcccagacgggtcctt

SEQ ID NO: 186133 - DNA, 122 bp, Homo sapiens
tacccacactaaataccaactgctcttcctcagctgtagtccccaacatcagacttggcacgtggtggacactaacacacaggcactcaatgaatgagtgaaggaaataaaagtcaccccgt

SEQ ID NO: 186134 - DNA, 122 bp, Homo sapiens
gatacgccccgcggacaccatgcacccaatcagcgacgagctgtcgcggatcgcgggacacgccccctgatccaaaggcccgagaagctcttgcacaggacagcctctggaaccccgcgcca

SEQ ID NO: 186135 - DNA, 122 bp, Homo sapiens
tgagctcagagtgtgactggtttaagaggcagtggcaaaaagatcacatacttgggtctccgaagcagaacatcctcaaatatgacctctcggggttcccgggtctgggcttggagctcttc

SEQ ID NO: 186136 - DNA, 122 bp, Homo sapiens
ggagctggagggagcgcggatgggggaaaggctgcaccgtcgccagggggcaccggaaaccgcctgcattcatttacaagtgtccatctcgaagaatgcctcagaattgaatccaaagttcc

SEQ ID NO: 186137 - DNA, 122 bp, Homo sapiens
atccacctgccttggcctcccaaagtgctgggattacaagtgtgagcagtggcgcccagccgacgacaatgttttattggtgttaatttatttttaggtttaaagtataacattagcttata

SEQ ID NO: 186138 - DNA, 122 bp, Homo sapiens
catgatccgcccatctcagcctcccaaagtgctagaattacaggcatgagccaccacgcccggctggaagatacattttttaaacaaaaagaggagcagaagaaactggaggagctgaaagt

SEQ ID NO: 186139 - DNA, 122 bp, Homo sapiens
gtcggggtgagtggaccaccctttaggcggagtccttccttaagctcccgcccgcggctccgaactgagtcctctcagccgcccgagggcgctgcgctgagccttacactctatgattgctc

SEQ ID NO: 186140 - DNA, 122 bp, Homo sapiens
tgggagctggacgtgcacctgggcctcctccagaatgcggcggtgcaggacgcggcccagcgaggccatgccgacagcaaccacacggaccttggtggacgtgctggccagcgagtggtcgc

SEQ ID NO: 186141 - DNA, 122 bp, Homo sapiens
tttggttttctctttgtcaaattttcatggaataactacattcaggtgtagtaatagtaacgcaaagctctgaacaccacgagacaattcgttgcttccgaaacgcagccggcagcaggtac

SEQ ID NO: 186142 - DNA, 122 bp, Homo sapiens
gggtcccagcctggcgggtgaaagggcactggcggttccccgtgagccgatgtctccatgcgcggctcctgggggtcctcccttttgcgcaggcgaggaaacgggcttggggttcaggaagc

SEQ ID NO: 186143 - DNA, 122 bp, Homo sapiens
ccagggcgcgctttgcttggaaaggcacaggtaggaagcgcgggctgccgggtgcacgctcgccgccctgggaggagtctccctcccttggctctcctttctgggaactgccggctgtcccg

SEQ ID NO: 186144 - DNA, 122 bp, Homo sapiens
aataaattcacttgagatgaagctctacctcactgctgtagaattacactgttgggaggacggcagtgccccctgatttgaggttttgctttctattgtttcagtctgaaaatgttacagta

SEQ ID NO: 186145 - DNA, 122 bp, Homo sapiens
ccagtaacaacattcgtgaaaacaccctccagtagggccgggtcagcctggaagttggggcggggccagagggcaagcaaggcacagctggcagggcaaggaggagtgcccttcagtggggc

SEQ ID NO: 186146 - DNA, 122 bp, Homo sapiens
caagcgcagcgtgcggaggaacctgagctacacgtgccgcgccaaccggaactgtcccatcgaccagcaccatcgcaaccagtgccagtactgccgcctcaaaaagtgcctcaaagtgggca

SEQ ID NO: 186147 - DNA, 122 bp, Homo sapiens
tgtgcccaagtacataggtgattagaacagaaaggcctgggctggtcatccaagctcttccggtggccacctccgaggaaggtgggggtgtgaaggaaatgactaaggacttggagagttaa

SEQ ID NO: 186148 - DNA, 122 bp, Homo sapiens
aaaggctgccccaggtgggaagacccatgggtgaaaagaccgggctccacagacggctcacggagcaggtgcctccatatgtggctggagcccccagcgagggaagaggccgctgtgctggg

SEQ ID NO: 186149 - DNA, 122 bp, Homo sapiens
gctgaaggtccgcgtgaccctcttctgcatcctggcaggcatcgtgctggccatgacagccgtggtaaccgaccactgggctgtgctgagcccccacatggagcaccacaacactacctgcg

SEQ ID NO: 186150 - DNA, 122 bp, Homo sapiens
cctcataatggcatccgcaggagtctccaggattgggtgaggccccgccttcccggcccccgacggaacgcacacctccaaggggccccattaccgcccccaacaaataaatgtagaatcta

SEQ ID NO: 186151 - DNA, 122 bp, Homo sapiens
ctggtccgcagggaagcctttggcttccccaccggcaatggagcggttgacgttgcctctcggcggcgcggcggcggtggacgagtacctggagtaccggaggtgaggctgtggctccgggc

SEQ ID NO: 186152 - DNA, 122 bp, Homo sapiens
agcagtcctcctgcctcggcctcccaaagcactgggattagaggcgtgaaccaccatgcccggcctcacaggattttgctgggggctgcatctctgcttggtttcctctccttccttgaccc

SEQ ID NO: 186153 - DNA, 122 bp, Homo sapiens
gagccactgtgctctggcctctgtatcatttttattctgcctttttcatcaccactcccccgccccccactgaacagatcacagtcccccatgtttctatagagtcttcataatgataacat

SEQ ID NO: 186154 - DNA, 122 bp, Homo sapiens
tcctcccatttgaactgcacctcttctcctcagccgctcatggctatgcccctgcttctgcggtggcactatggcaccaggaggaagttatctgggttcatgtctgctctctgtattgagct

SEQ ID NO: 186155 - DNA, 122 bp, Homo sapiens
cagaccctggcagtcctcactgaggccattggcccagagcccgccatcccccgagacccccgggagccgcctgttgccacgtccacacctgccacaccctctgccgggccccagcccctccc

SEQ ID NO: 186156 - DNA, 122 bp, Homo sapiens
ttgccgctgcaaggtcgtgcgcagctccgcctcgtagttgtgtctgcacaccttgtccaccgcggcccgctcctgctccaagaagtccttatagttgttccagtcctcgatgctccgcccca

SEQ ID NO: 186157 - DNA, 122 bp, Homo sapiens
tacctactcttcctgtccttacctcccaaaacactttttatattatgtctctggttatttcgtgattggtggcagacattttcttccatctggagggcagcatgttttctcaggcagatctt

SEQ ID NO: 186158 - DNA, 122 bp, Homo sapiens
tgacttataattgactgaagttataacagttttctcatgtcaagtataaaacaggccaggcgaggtggctcacacctgtaatcccagcactttggtaggccaaggtgggtggaatgcttgag

SEQ ID NO: 186159 - DNA, 122 bp, Homo sapiens
accccgcccttccttggctccgccccttccccgccctcgtcgcggagccaggttctaccccgggacatctcgctggactcagcctcccacaggattcaggagtgcggggatgctctttgtgc

SEQ ID NO: 186160 - DNA, 122 bp, Homo sapiens
atttaagttccctagtttcccctgggagatctggccaagaactacccggtcggggcggaacgacatccggtaacgcccctcacagttcacttccgtcctccacctgcgtctctgcttgcgcc

SEQ ID NO: 186161 - DNA, 122 bp, Homo sapiens
ttcctcgcgagcctcttccacggtacagagcccgggatcccagctcactctggcagggagcgctaagggggaaggggatctctgcgggaaggggccgttaaggagcgggagaaggcggtgga

SEQ ID NO: 186162 - DNA, 122 bp, Homo sapiens
cagtcttcggatctctttctctggaggcccaaattcccctaactgagcagctcaggctgccgtggctcacctgtccaaagtcagagagtttcctgcccaagcctgggttttccaggaccgca

SEQ ID NO: 186163 - DNA, 122 bp, Homo sapiens
caaagagaaaaaaaataatgctgtggctcttcaccgaggcagcttcagagatgcaggctccgcaactcgcgaggtgcgaaaattcaaatgaagccctgtcgctcacaagtgcggcatctccg

SEQ ID NO: 186164 - DNA, 122 bp, Homo sapiens
gagacggggtttcacactgttagctaggatggtctcgatccgctaacctcatgatccacccgcctggcctcccaaagtgctgggattacaggtgtgagccactgtgcgtggcctgttcttta

SEQ ID NO: 186165 - DNA, 122 bp, Homo sapiens
aagagcctcaatttcctggtgtgtaaaatgagaccaggagtggctgcaaccctgcggtgccgtgatgaggtatggagagacaagaacacagagggctcagcgcggagcccggcgtggccacc

SEQ ID NO: 186166 - DNA, 122 bp, Homo sapiens
gtgaccaaatgtgacaagaaagttttttgtccaaggcagtttggaagagaagttggtgaccgtcgggataccacagccgccccaggacggcctggttgagacattcactggagggtctgggt

SEQ ID NO: 186167 - DNA, 122 bp, Homo sapiens
ttctgccagccattgttttttctaataaagattgtgtgttctttttaaaaatttcccctgcgcttagattcttctactcaaaacaaaagagccaacagaacagaagaaaatgtttcagacgg

SEQ ID NO: 186168 - DNA, 122 bp, Homo sapiens
cctggccaggcctattcagaaactcagaattacggccatttccacaagggccgtgcagtccgagggacacagcagtaaggaccgggaaactgcctgcacgtgcacctgtgggtcacaaaacg

SEQ ID NO: 186169 - DNA, 122 bp, Homo sapiens
tctcaaggaggacgcgcgagaagggagaccgcgagcccagctcacctctagctctcagctcgctccatggactcaatacccgatccgcctcggggcctgggaaagttccctccacgactccc

SEQ ID NO: 186170 - DNA, 122 bp, Homo sapiens
gcccacacactgagcggacattggggcaggcaggcaggcgccggggggcggggccagcgtcgccccgccccgtcctgcctcgccctgttcgcgcgtccgctgtccggcctccggtcacgtga

SEQ ID NO: 186171 - DNA, 122 bp, Homo sapiens
agagctcccaagaggagtccggccattaaaaagagccagcagaaaggagccagggagtaacgcaccccagacccatggcagcagaaccaggatggagctgggactgtccagctctgccccct

SEQ ID NO: 186172 - DNA, 122 bp, Homo sapiens
gtccctgagtccgcgcccggcgctctgagagggtggccgtggttaattcccggtagtgaccgccatagcgccacgtggccactgcttgacaaaggaaacttttttcaacctccagtgagcct

SEQ ID NO: 186173 - DNA, 122 bp, Homo sapiens
aggaggtcacgcgtctcttttgaagtctgagtcacaggacgaagattccatttaacgccccgataaagcaaaaccactgagaaaacaaacgagaggctgcccaggcatgaaaacgcccaccc

SEQ ID NO: 186174 - DNA, 122 bp, Homo sapiens
gggaaataagcacaggcctatttctttctcaagacggaaaaaccgagccccagaaaatggcgataagatggggatgcaggaaaaagctagctaatgaacagttcagcagtgggcaccgtgtg

SEQ ID NO: 186175 - DNA, 122 bp, Homo sapiens
gcttgggatcaagtcgctgcccctctgcttattaacgtgtgaccttgggccagtcatggacgctatctgcttcagctcagcattcagtgctctccgtcacccgaccccatctatccaggatt

SEQ ID NO: 186176 - DNA, 122 bp, Homo sapiens
gatataacctacctacatacacaactttaaacagaaagcaaaatgcttccctttctgtaacgtaaaggggaaatgaaagaaaagtaacttgcaataaaataacataaacagtattttaatgt

SEQ ID NO: 186177 - DNA, 122 bp, Homo sapiens
aaatcaatgaaggacacttgaatgagaacaagcaaagggtaggaagagtcaccgccatcacgtgcaacttgaggcaggcatggggtgggaaagctttagaatggtcaaaagggaaggcttcc

SEQ ID NO: 186178 - DNA, 122 bp, Homo sapiens
tggcaaactctgcgctttccgccgggcaccgctgcccgcagcgctggaataggtcttccccgactcagccctgggcttcctgggcgagtcgctgtctcctgcccggttccactggcatggcc

SEQ ID NO: 186179 - DNA, 122 bp, Homo sapiens
tgggtgccagatgcctgcatctcactgaggaatgtgttcagggaagatgtcaacactggccgggaaaaacatcaggctttcacctcactcatggcctccataaggcgagcgctgtttgtgac

SEQ ID NO: 186180 - DNA, 122 bp, Homo sapiens
tctgttcggggttccccaagtgtccctgatctatggagctggccatggtgactgcgagtccggggtggggggaaccagtctggggtgagacgtggtgtggcgaaggctggggctgtatccgt

SEQ ID NO: 186181 - DNA, 122 bp, Homo sapiens
taattgttgtagaatgcaagcaacatctccttatacattttatagaaggctgtagattcacgatggcatttagttcattgggcattttatagtaacccaagagtgtttaagatattttacat

SEQ ID NO: 186182 - DNA, 122 bp, Homo sapiens
aggagatactagcggttgtaggagcgaaaaagtgacagcactgagaacctaaggaccccgcgaacgggaaatgtcacgttgggtgcagcaactgagaaaacgcccagtgggcgccactggca

SEQ ID NO: 186183 - DNA, 122 bp, Homo sapiens
ccgcgctccccggaccagcccggtgcctgggtcccgatcccgatcttggggtcccgatcccgatcctggggtcccgatctccatcctggggtcccgatcccgatcctggggtcccgcccccg

SEQ ID NO: 186184 - DNA, 122 bp, Homo sapiens
tgcgcgcgcacgctacccgacagccccgcgcccactcgccgcgttccacccgcggggcggcggattcccgcaggggccacactgccacctactgtcccatctccagagctggagccacgggc

SEQ ID NO: 186185 - DNA, 122 bp, Homo sapiens
gggcggggctcacgggcggggcgggtgagtgggcggggcctcggcgtggtaggcgcgctgcgtaaagaggcctgcagtcccgcggcgcggggcaggttccgggctgcttaggttggcaccgg

SEQ ID NO: 186186 - DNA, 122 bp, Homo sapiens
gtgggctggggtgtcgtccccgtcctctgtggccgggccaagcgtggactcaggcagattcgtgtcctgcccatgctggtcagagatggactgggcctgactctctgtctcacctgctcccg

SEQ ID NO: 186187 - DNA, 122 bp, Homo sapiens
gcagggaccgcggttggaggacagaatttccccttctcaatcttcggcctgtgtcctcttcgctcttaagggaggtagtgaacaatgagacagcccctcagagaaaagtcgccaggcagggg

SEQ ID NO: 186188 - DNA, 122 bp, Homo sapiens
agccggccctgcagcgctactttctgccagcggacgcggaccctgacacctacagctgaccggactggtggcctcagcccgcctggctctggggcctgtcattggtatttggccaaggcctg

SEQ ID NO: 186189 - DNA, 122 bp, Homo sapiens
acctgcctaggtctaattagtccagtccgtaagcaggcctggctccgtgtctgaggcatgcgtgcacgtggatggtgtgtgtgcacacgtgtgtgtggcatgtgcacgtgtgtgccctggca

SEQ ID NO: 186190 - DNA, 122 bp, Homo sapiens
aggattttaactagggttcagttagctccgcccacactataaaaggctctttctaaaaaacgaaacatgattaagggcacacggctccagcgttaacaaagctctttgttagctgggaaatg

SEQ ID NO: 186191 - DNA, 122 bp, Homo sapiens
tgaaatcatgactgaccgaggcagtggcaagaaaaggggctttgcctttgtaacctttgacgaccatgactccgtggataagattgtcagtaagtatcagatagtggcatttagtaagggtt

SEQ ID NO: 186192 - DNA, 122 bp, Homo sapiens
agcacaggtcccggtagacaagagacacagagctcaggatctccatgggcctcatatgtccgggcatatttcctcccctaccctcttacctcccttaacaagctgacccaagtcacgtagca

SEQ ID NO: 186193 - DNA, 122 bp, Homo sapiens
ggcctcatttttgccctcttgctccccaggattaaatcacagcagtcgagattgaagcaacgttcaaatcagtttcaggaccttgttctcatactcctaaatcttgagctaacaaagccttc

SEQ ID NO: 186194 - DNA, 122 bp, Homo sapiens
gcagtgcacgcagcgctactccaaggggagcaagctctgcaggacgcgctgatcccctggcgtctgcgggtcctcgagccttcgcagcatagcagctccacactcgggcagcgcacaggcag

SEQ ID NO: 186195 - DNA, 122 bp, Homo sapiens
ttacgggattggggcggggccgcaagcatttcctggatggggcggagccgagcggatttccgggatccgggcggagccgcaggaggaggcgggtggttcctgctaaagaagccagttttctt

SEQ ID NO: 186196 - DNA, 122 bp, Homo sapiens
taggaccctccgagccagttgcaggatacaatctcgtggtgcaccgttccctaagcagttcggaaaagcgtaatatttgggtgggagtgatccgattttccaggtgcgtccgtcacccctct

SEQ ID NO: 186197 - DNA, 122 bp, Homo sapiens
cttgtttttcttgcagctcccaaagtctcttgctttctaagccactgaaacaacgtatatcgtggactccataaacctccattgcctataagcagtagtaacattgtctgcctcctgttaat

SEQ ID NO: 186198 - DNA, 122 bp, Homo sapiens
tggcaagtgtcctagggaaaggagcaggcatggggtgaaggtgggaacaagagtgcctggcgtgaccatgtgaggcagggcatttggctatgtgttgctgtgtgctctgtctcacccccgtg

SEQ ID NO: 186199 - DNA, 122 bp, Homo sapiens
gggtcttgctctgttgcccaggctgacaggctgaacttgaactcctggcctcaagcctcacgactcagcctccctagtagctgaaactgcagatggcctccactgacagtggctaccatata

SEQ ID NO: 186200 - DNA, 122 bp, Homo sapiens
ccccaattcaaggtttctgagactctttccggagctattctgttcacatttcattcaccacgctcagatcttcgctttctggaaccatccccctcgcgaaatgtctgggactgtctgtttcg

SEQ ID NO: 186201 - DNA, 122 bp, Homo sapiens
tgatgtcatctttctgcagaaaaccattagaccatccctccagactgccaccctcaaagccgtctgcccaggccccatctgacactcttgacatctgcaggtcccagaccctatgatgtgtc

SEQ ID NO: 186202 - DNA, 122 bp, Homo sapiens
caggtgacccacgtggcttcagggcccaggcctgccctgtgactcacgcggcctgtcacccgccgtttcatgtttcaggcctcgcctgtacactggtgcttctcaggaagtcttagggaaga

SEQ ID NO: 186203 - DNA, 122 bp, Homo sapiens
ggccggggccggggacgggcagggccaggggcgcgctcagaattgagtttctgaaatgcccgggattaggggattggctcctggcccgggcctgggctacgatttgaggtaggggacaagtt

SEQ ID NO: 186204 - DNA, 122 bp, Homo sapiens
ctgataccacaaagaagctttttaatgaagttagcctttgcctttctcaatgccactatgcgcctggcttgttttgcccactttctgttttcaaagctaggtatgatcaggaaacacgtggt

SEQ ID NO: 186205 - DNA, 122 bp, Homo sapiens
acggtcacatgctgggccacagggagaggtgagttcagcgacaaaggacactggacttaacgtgttcagagtcaattttccaaaacagatatggatgacacaagctgtgggccagacccgtc

SEQ ID NO: 186206 - DNA, 122 bp, Homo sapiens
tcatttctgcctcctttgcggttacaacaatcccagctccgtagagagccaacgaggacacgacccaaagcgcgctttcgctcaaggaagcgtcgcagggtcacagatctgggggaaccccg

SEQ ID NO: 186207 - DNA, 122 bp, Homo sapiens
cggccccactcacctgcgattcatgggccggaccctcacggccaccttgaccgatgccatcgctcatcccgaaccagcccgcgcggggtcccactagcccagaactccgcggtcgccggcga

SEQ ID NO: 186208 - DNA, 122 bp, Homo sapiens
tctgccagcttgtatgaaagttgagaaggctaacttgtcagcttgcatgcaggctaacaccgcgggcccttcacagttcttgacaaggactagcttccctaaaggcaatcattctacctgat

SEQ ID NO: 186209 - DNA, 122 bp, Homo sapiens
aacagaacagtggttgtaaccacaattatggtaagtgttggtctatgctttatggtgttccgttttgtccacaggcaattttaactccccagcgacggtgaacagggagggcaaagctgact

SEQ ID NO: 186210 - DNA, 122 bp, Homo sapiens
agaagcgggcggcgtgcctgtgcttccggagcgagcaggaggacgaggtagggcgcccggcgccgcacgctgccctccggggcgccggggtctagggcccgggtgcttcccctcgctccccg

SEQ ID NO: 186211 - DNA, 122 bp, Homo sapiens
aggcctctttgaaaaggggaccttcgtgcaaagacgaagggtgttagcctcctggcgcgccgcggaagggcagcctgcccggcaggggaagcactggaagggaaaggctgggcagacttggc

SEQ ID NO: 186212 - DNA, 122 bp, Homo sapiens
cgggggcggctcggaaaccccagcggaaggcagcaaggggcgcgtggggccgtggagtcacgaagctgggcggcaggaggggcggcctggagctcccgcggggcacagcgcgtgcgtgaggg

SEQ ID NO: 186213 - DNA, 122 bp, Homo sapiens
gcccacccacgggcgcggcgcccagtcctgctacagggagacgccggcgccagctctccccgcagagcccgcaaaacgctctgttcgcgcttcccagagtccagcgcatcgcaggaaccgcg

SEQ ID NO: 186214 - DNA, 122 bp, Homo sapiens
cttctttagttcctttgcaagtttctcctcctccatcaggccattaggtattagagttcccgattcttccttctagtgtctccttgttttctactctgtattatctctctaggccagtagta

SEQ ID NO: 186215 - DNA, 122 bp, Homo sapiens
gcaaggccacggttgtactgtgataggaacgtgtcctacgggacctggaacagggagtaccggttgtggaggagagatgaggcttgatatatgtggagccggaagtctgtggaaaattcttc

SEQ ID NO: 186216 - DNA, 122 bp, Homo sapiens
gcttggagcttggagcttggagcttagagtttggagcttgaatttcgctcactcccgccccgcgcatgctctgtgcgccgtggagagggacacagccaaccgacggcctcgcggccggccaa

SEQ ID NO: 186217 - DNA, 122 bp, Homo sapiens
gctccaaggtgaggtgtgtcaggcaagagcgggggcagagctccggtgacgcggtgctcacgtgacccgcccggcgcctacgtgggcaccagcccccgcgcccgcccgccagcccgcccagc

SEQ ID NO: 186218 - DNA, 122 bp, Homo sapiens
ttgtcaataaacacaattgtttgttaaccctgggatgccggccagtggggcaggccgaagcgggcgctgccagtcgctccaccgcttcggtggcagaacccggtgtgtgtccaggggcagga

SEQ ID NO: 186219 - DNA, 122 bp, Homo sapiens
cctccctcgcaactcgcctctcgcttagtggacagacgactggagccggagacttccatccgagaagacctttgagagtgtcagcctactgctgtcccctggtgccaccaaccaaagttcca

SEQ ID NO: 186220 - DNA, 122 bp, Homo sapiens
gtaaggcgctttcggtgatacctcctttcccccgtgcctgctgcatggcctggggatgctcgctgggcagggtccagccgtggggggtgactggccattctcaggaggaagcgccgagtcac

SEQ ID NO: 186221 - DNA, 122 bp, Homo sapiens
agtgctggagaagtggaagaacatcacgggccacaccctgctggagcggtatggcatgaccgagatcggcatggctctgtccgggcccctgaccactgccgtgcgcctgccaggtacgagca

SEQ ID NO: 186222 - DNA, 122 bp, Homo sapiens
gagccctgggggcgagccccgtgcccaccctgcttgcgcctccagctccggggcccttctcgagactggccctcctggggctcatgccccgcctgctgagcctgctgagagactgccctcag

SEQ ID NO: 186223 - DNA, 122 bp, Homo sapiens
cctgccctgggagccttgtagggcggctgctgctacttggtctcctgcttctccctggaacgcagggggtcgcggcgtgacttcagccttgcgctgtggtgtgcctgctgtcccgtgtacca

SEQ ID NO: 186224 - DNA, 122 bp, Homo sapiens
gccacatcttagtattattataaaaatagttccgccgccatctttcttcctggcaggggccgacgcagggaccggcgcgggggtgagagcgcgcggccggattcaccacaacatggcaactc

SEQ ID NO: 186225 - DNA, 122 bp, Homo sapiens
atgtccacagaaaacctttgggtggagaaccttctggtctccccagcatcatcgggcgcccgccatgccccgtgcctcacctggaatggccatccactgggctatcgctgacagcgcagtgc

SEQ ID NO: 186226 - DNA, 122 bp, Homo sapiens
tcttccacagacctcgcataaccacctcctgatcgtgagcacagctgagatcttgtttaacgattccgtgttcaccctgctgccgggacagggggcgtttgtgaggtcccaggtacctgtct

SEQ ID NO: 186227 - DNA, 122 bp, Homo sapiens
atcagacatccggcagcctaaagcatccggaacggctccgaacccggaaaaaaaaagcagcgtctctggctgcgagcgagcagctcctgaaaaagccagcaacagcgaaaatagccgaaagc

SEQ ID NO: 186228 - DNA, 122 bp, Homo sapiens
cgatctagacacaagcagagcttccagagcccctcctaattcaggacagtggggagcctacggcaccacgtggggcaggagagcagaggcgcagggcggtgcctgcagccaggatgcccccg

SEQ ID NO: 186229 - DNA, 122 bp, Homo sapiens
cggaggggaggaagccgcagagagggtgtcgtgagggaaaggtgggtgcaggggaaatggcgctttaacccactcagggccagaggctcagccgagactatccaggtgggaacttgtccctc

SEQ ID NO: 186230 - DNA, 122 bp, Homo sapiens
acgggagcgctgtctccctgagatttgcagggctcgggcttatgcagcagactttgcgggcgaacccagccatgggtgtctgcggggaggcctgcgcgcgtgcagactccgcaggcgggagg

SEQ ID NO: 186231 - DNA, 122 bp, Homo sapiens
tccaaacacggggaagtgctctcggcagttcctctccctgcactaccaatgaccagggcacgggcagctcatgatcactttcgaatgcaggggcagaaagggcagagggcaagcccagaaag

SEQ ID NO: 186232 - DNA, 122 bp, Homo sapiens
ttttttttttgagacagcatctcgcactattgccagggctgcagtgcaatggtgtaatctcggtttactgcaacctctgcctcccaggttcaagcgattctcctgcctcagcctcctgagta

SEQ ID NO: 186233 - DNA, 122 bp, Homo sapiens
ctccatgctcttgcccataattagcataagcaaagtcagtacattcctggttgccaggcacgtatgcaccttcacactaccaccaagggaggcataacacagacctgcctaatagtgcttca

SEQ ID NO: 186234 - DNA, 122 bp, Homo sapiens
gcgcccccccacccccagctccgcggtcctccaggcagcctgcgcccctcgcgccgcgcccgtggagctcccgggcccggctgccccgctcccgccccagcgccatccctcctggctggggc

SEQ ID NO: 186235 - DNA, 122 bp, Homo sapiens
ctggctccttgagtctagggcaaatgccacatatatctttgtatccctcttaaccatgagcgtgaaacttcctggagcaggaacagaaattgatttttatcactattcttagggcttaggat

SEQ ID NO: 186236 - DNA, 122 bp, Homo sapiens
acaaaagacggtcgactacaccggccaggccaaggcgcaggtgcggaaggccgtgcagtacgaggagaagaacccctgccggaccctctgctgcttctgctgtccctgcctcaagtagcagg

SEQ ID NO: 186237 - DNA, 122 bp, Homo sapiens
cagctctggccctgcgacaatagagtccggaagtgcaggcaaagcggctcccgggagcgccgcgcggtcctgcgcgggatcagcgagggccgcgccccggcgggcgggcggcatggctgcag

SEQ ID NO: 186238 - DNA, 122 bp, Homo sapiens
aggaagttggtatgagatgtggtcagcaagacagccatgggtctgataatgcagagaccacggagagtgtctggattttcttataaatagacttggaaggcactgggtgttttaaatacaga

SEQ ID NO: 186239 - DNA, 122 bp, Homo sapiens
tgcaaagcgctgtggttggtgggatattttgtttgtgtttaaaaagtgaagtcttcctcccggcccgtgtttcaggcacggcaacctcacgtgctggttcatctacatttttaagctgaata

SEQ ID NO: 186240 - DNA, 122 bp, Homo sapiens
gctcactgcaaactccgcctcctgcctcccgcctcccgcctcccgcctcccgggttcaagcgattctcgtgcctcagcctcccaagtggctgagactacagacccacgccaccagcctcgct

SEQ ID NO: 186241 - DNA, 122 bp, Homo sapiens
cagaatctaagagcgatagcgtttctccaaataaaccgccaataaatcagctcccgggggcgcctgctgaagagctctggtgaccttgggggatggtttttctgcctgacccgtctgagcac

SEQ ID NO: 186242 - DNA, 122 bp, Homo sapiens
gccctccaccgcgcacctggctcggtcagcggctagtgcggagagacacagcggagatagcgcgcctgctaaaggctgccgccgccaacaccttaggtgaataccgagctccaggaaggtcg

SEQ ID NO: 186243 - DNA, 122 bp, Homo sapiens
tatttccattctgtccccactgtatcctgtattttgcactgccagaattctgatagctgccgtgaagcagggctgtggcaagtggccaagtgtgataaaaacctatttttcattttaaaaca

SEQ ID NO: 186244 - DNA, 122 bp, Homo sapiens
gggcaggggtgccacccaacaggaagatgtgatctgagcaatagtgtggccttgtttctccgcttctggttgtggctgtgtgtacagggctacctattttgacttctgacaggtgtcactga

SEQ ID NO: 186245 - DNA, 122 bp, Homo sapiens
gcggctacggcgggggctgcgacgcggaggcagggagccgagccagggagcggagccgagcgagcggctgggccaagggcggggcggcgcggacggcggcggcgcggacccgcctcccctcc

SEQ ID NO: 186246 - DNA, 122 bp, Homo sapiens
agcagcaggaagcgttttcggatcctggaatacgtgggcggcccgtgggaggggctgaggcgcagtttcctactcacccggatccgaatcctccgcggtgctgtttcaagagagccggattc

SEQ ID NO: 186247 - DNA, 122 bp, Homo sapiens
gtcggagccgcagtccgggagccgcgatagactgaggccgagcgacgggccagggggggacggcagtcctggctgctcccaatgggcccttacgggcattattagtatccctttttaggggc

SEQ ID NO: 186248 - DNA, 122 bp, Homo sapiens
aattaagtgacggacacagtagctaaggagactgcctgattgacacgcatgattaccaaccgacttccggaaactccagtcagggcctgcccggcgcgtggcccacggcccaattaaagaag

SEQ ID NO: 186249 - DNA, 122 bp, Homo sapiens
ccgagttcggaaggaaggcgatggccccgcctctggggtggaggggggtcggggcactcacgagtgacgtccgggtctgactgtcttgcgtaactcccgccaactgtgggatgttctctttc

SEQ ID NO: 186250 - DNA, 122 bp, Homo sapiens
cattcaaacacatatacccatttacttagccatttaaaatgacacaggggaggccaggcacggtggctcacgcctgtgatcccaccactttgggaggccaaggcaggcggatcacctgaggt

SEQ ID NO: 186251 - DNA, 122 bp, Homo sapiens
aaccaggttgcgaagagtacatctcttctaggtttcccactgcttcagaatgggggaccacgtgctttacatggcagtgcctaagggggacagtgacaaagctgattgcaactagggggtcg

SEQ ID NO: 186252 - DNA, 122 bp, Homo sapiens
cccgcagaatcgatgtcagggctcgactagagcaagcgcccgcactccaccccactccctcgagatgtagctgacgttttttcttatggctgccctaggtctgtagcccgtcggggattctc

SEQ ID NO: 186253 - DNA, 122 bp, Homo sapiens
gccgtttactcgggaggtgcccgagaaccagggtggggcgatctcacattttaagcaagacgcccgctgccttaccaaaatagccctctccgccaaaggaggggcagcctttcacgctcagc

SEQ ID NO: 186254 - DNA, 122 bp, Homo sapiens
ggcgcctagcgcgaggcagggtgggcgaggcgagggcggcgccctgcgagggagggcggtcgcagaacctgcgggccttcagcgccccctggcgaggcttccctccaccgccggcgggaccc

SEQ ID NO: 186255 - DNA, 122 bp, Homo sapiens
ccgacacccagcttttcctgacgggaactaaatacaatgcgtatcggactcgagaaattccgaggaatggaaaggaaaatcgccggtagcatccaccgcgcatcagacacgagtcacactga

SEQ ID NO: 186256 - DNA, 122 bp, Homo sapiens
attcaaagagctgctgggctgggctgtggggggccgggtcctgggctgggagtggattctcggtgcttccccccagcggctgccacagtggcaacccggggctgaatcctgtgagaccttcc

SEQ ID NO: 186257 - DNA, 122 bp, Homo sapiens
ccacgagccctggggtggaactgcctccacttcccctctgggaacagaagagcctggtgccgtctcctggcagggatactgcagctcacagctggctctgtgggatcatgtccccaaggctg

SEQ ID NO: 186258 - DNA, 122 bp, Homo sapiens
cttgggtggtcgatgggactgggcgccctggagcagggggtggcactcgtccgggaggctcgggccacacaggagcccatggagggggtgggaggctcaggcatggcgggctgcaggtcccg

SEQ ID NO: 186259 - DNA, 122 bp, Homo sapiens
aatcaggtggcagagcacggtgggaaagccaggatcgacgtcctacctattttcttgttccgctcttctccacggttgtgtgcgataattggtgaatagatgaaaggacttttggttgacac

SEQ ID NO: 186260 - DNA, 122 bp, Homo sapiens
cggttgacaaactcctggggcctcctcagcacgcggaacacactggaatgggccacgacgcggtaggtggtcttgttgcccacatcagctgagtagccagtggtgggtgcatcattcatgcg

SEQ ID NO: 186261 - DNA, 122 bp, Homo sapiens
caggagttgtattggggtgggcaagccagcatgccaggaaatcccaagggaaaaatgaaacgccggggaagagagtcaggcggcgtgttctaccccacgcccaccttaaaccctgacagtcc

SEQ ID NO: 186262 - DNA, 122 bp, Homo sapiens
caaaacaaatgagtgtggctgtgttccaataaaacttaacttacgcaacaggtggtgggccggatttggcttgtgggctatcatttgccagtccctggtttaacagatgctcagcctaccaa

SEQ ID NO: 186263 - DNA, 122 bp, Homo sapiens
ctgggtgggcagagggcagaggcctgggccaggacagggcccgaagaacgactcagatcccggactgtcctccgggcgcgacggaggcggcggccggggcggaacagcggcgcccgaggcag

SEQ ID NO: 186264 - DNA, 122 bp, Homo sapiens
gtttcacgggcccttagagaaggcagaggtaaaatggagggattacagaaagtgggcacccgtagcccaaagtacaagagtccagaggtggaagaaagccacactgatactaggcaccctgg

SEQ ID NO: 186265 - DNA, 122 bp, Homo sapiens
cttcctggaacctcctctgcatgccccaagtggatttctcaaaggaacagtaagcaggaacgtggcagagctcctgcgggcctggctgacccaggtggcgtcttgaagtcccagccgcgttg

SEQ ID NO: 186266 - DNA, 122 bp, Homo sapiens
aaaaaggtgcttctggccgagcgggaggcggggggacgggcggcggaaagcccccagccccgagttcttctcaataaaatcggacaaaaaattcagagaaaaataggagcgcttgagagagc

SEQ ID NO: 186267 - DNA, 122 bp, Homo sapiens
aaaccatggcaatactattcttcaccaattcaactgccagcattgaaaatatgttacttccgagaatagaagagagtgccaggaaatgggtaatttcctaacttgctggtggagagtaagtt

SEQ ID NO: 186268 - DNA, 122 bp, Homo sapiens
gtctaacaccctccagataatgtatggctgcgacttggggctggaagggcgcctcctccgcgggtatgaacagcacgccaacgatggcaaggattacatagcccggaactaggacctgcgct

SEQ ID NO: 186269 - DNA, 122 bp, Homo sapiens
tgcggcaggctcctgagccaagacgcagcagacaccgctactgtcacccaagaggcaaagcgagggcccaacaggccccagggccttgcacagcaggtactgtaattcagtaaccagtgtgg

SEQ ID NO: 186270 - DNA, 122 bp, Homo sapiens
caaggagtctttttctgggaggctggagctgcagttgcagtgaagtcacaggttccgtgacgtcacaggtgggcaggcgcactagtctgtaacggattggcttggccttacccgcgaggctt

SEQ ID NO: 186271 - DNA, 122 bp, Homo sapiens
tgagatagggatgcgagagagggaagatgaaggcttttcccaatctaggtcacttctttgcggagaggccttctcagagctttgggtaagtgaagaggcgccttaagttcgcggtcccagct

SEQ ID NO: 186272 - DNA, 122 bp, Homo sapiens
tttttgtcgggtctcggggtctggcagcagcatggcggactacctgatcaccagcagcaccggctacgtgcccagggatgggctcactgtgccccagctcttcgtcggcgctgacggcctca

SEQ ID NO: 186273 - DNA, 122 bp, Homo sapiens
gccgccggacacgtgagtgcgccctgagcgcgggacagggctaggtctgcctgggaggcccgggccgagacgcgccagcagagggctagcgagtttgtagtgcagtgacgttaagtgtccga

SEQ ID NO: 186274 - DNA, 122 bp, Homo sapiens
aaaaacgtatgctggttggtatttcaccccctcctccttgcccccactcttgtgtgaacacgcacatacacgtggatcacatgcacacgcactccagccagggacaggaaatggtcctgtcc

SEQ ID NO: 186275 - DNA, 122 bp, Homo sapiens
cactggtgattgtttttcgaggaaactgagcagatggagggggaaggccattgacatctgcgtgatggatttgaaaagggtcaagaaaaagccagagaatcccatggtgaaggttttcactt

SEQ ID NO: 186276 - DNA, 122 bp, Homo sapiens
ctcctcaatctcacccactaattctggcatccgctggtgggtcctggcggtggcagacgtcgctgtgggctcctcagtggctttccttcctcactccttccatgtttatcacgtggaatttt

SEQ ID NO: 186277 - DNA, 122 bp, Homo sapiens
gaatcgctccgggatgaagtaactcaggctggcgatccggagggcccagcacttagcccgcgctgggcacccagcattttcccggagtgctgggtcctgttggttctggaggcagaagaccg

SEQ ID NO: 186278 - DNA, 122 bp, Homo sapiens
ctcctgctggtgttcagaacttggtcaagcagggttttaatgttgtcgtggaatcgggtgcgggcgaagcttccaagttctcagatgatcactatagagtggcaggtgcccaaatccaaggg

SEQ ID NO: 186279 - DNA, 122 bp, Homo sapiens
ccaaggcactatagcaaatgtaatccacaagcgtcatctagtggtacaatctgtcagtgtcggccaagccctgagctctgagcggcagctctgccgggtgagaagtctacactcggtgccca

SEQ ID NO: 186280 - DNA, 122 bp, Homo sapiens
acagggaatcgtgtgtacactgggaccctcttgtcctctgagagttatttagcactgtgtcgaaggcctcttatgtggaaagcagtgcagggagccgtgccctctcacaaatgaagattaaa

SEQ ID NO: 186281 - DNA, 122 bp, Homo sapiens
caagatacctttgcaaggtcattcacgttaccctccccgctttgtgagtgtgtgcttacgcgcgcgcgcgtgtgtgcctgtgcgtttggttaagtgaccaaactacttagaggcctgagggg

SEQ ID NO: 186282 - DNA, 122 bp, Homo sapiens
tcaatacctggaattcgaaacgtctcagttcctccgccttagttcctcttttcccgggttcggaggccacctgtgcagcagggcacacctgccactctcatcgccctcggagccggcaacca

SEQ ID NO: 186283 - DNA, 122 bp, Homo sapiens
gagagtgtcgcccgcggaccgccatcttgaaaaggtcagcagttaggacggctccataagcgatatggggaagaatgtgaattattctaaagaaatttcgaagaaattagcacactttccaa

SEQ ID NO: 186284 - DNA, 122 bp, Homo sapiens
aactgtgtggggtgttagacttagaggaacgcacagagcttccatggctgaccttgacctcgggaggtggccagggacctggcagtctctcatgcaaggctctgctcagagagctgaacact

SEQ ID NO: 186285 - DNA, 122 bp, Homo sapiens
tgcacagttcgccttctccaaggcccggcccccagcggagcccagcactgaatcgcatggcgccccctggagccctggcgggggtaaccagtggaagaccccacctcccagggagaggaccc

SEQ ID NO: 186286 - DNA, 122 bp, Homo sapiens
ccacctcctggagcgcaagcccagtggtggctccgctccccagtctgagcgtatctggggcgaggcgtgcagcgtcctcctccatgtagcctggctgcgtttttctctgacgttgtccggcg

SEQ ID NO: 186287 - DNA, 122 bp, Homo sapiens
taataaattattatttgtgcttttaaaattgtggccataatttatcatcattacttttcacgtttaagaggagagaaataatgtgatgacagctgttcccagattatcagattagattttgt

SEQ ID NO: 186288 - DNA, 122 bp, Homo sapiens
cagccaagatttttcacctctgagctgaaacaggcctccttactccattcaggaagaattcggcccccaatattgacttttccctggctgccagccaaccacatgtgttaatcaagagttct

SEQ ID NO: 186289 - DNA, 122 bp, Homo sapiens
ctggcacatagaggtgcctggtacgtgtttgttgaatgaatgaatgaatgagtgaatgagcgaacatgccatttcaccttatatatcttgtgaacctgccaggcccgggcctgatgtcatag

SEQ ID NO: 186290 - DNA, 122 bp, Homo sapiens
gtttggctgtatggagggcctaccggcagcgctcctgagctagaacgccgagagaaagagcgccagaggagccagggaggaggagaagagctgctaaaggaataaccccgagaaagggggtg

SEQ ID NO: 186291 - DNA, 122 bp, Homo sapiens
gggacaagaggttcaggttccggcctgcgccttccactccgcggtggcgctctctgcctgcggttttccaggaggccgatctaccccagggacactctcatccttcaggcggtctcctggac

SEQ ID NO: 186292 - DNA, 122 bp, Homo sapiens
agcgcggacgcaggtgcagcgacctgcagggccttggaggcagactcaggggatgccccgcggggcccagcgcccgaggagaacgtcagaggcacaccatcaccagcggcgtggactgcggc

SEQ ID NO: 186293 - DNA, 122 bp, Homo sapiens
tcccaaagtgctgggattacaggcgtgagccaccgcgcctcgatgctctgcctgcatcaccgggcatgtccaggtgtgtaccattcctccgagcaccaggatgtcccttaaggcgtccgtgc

SEQ ID NO: 186294 - DNA, 122 bp, Homo sapiens
gcaccagacagattgtagcctggaaaatccaccatcctccctggaacaaagacaaggaaacgctgtgcctaagtgaggctgtgacacacccggcacactccatggcttccattggttatgca

SEQ ID NO: 186295 - DNA, 122 bp, Homo sapiens
agtatgggagaaacggcacccttttatactaatgagaactagtaacaacaaaaaaaaccacgctgtagaagacagagggaaactgctggatgggtgccttggaggaagccacaggccgggga

SEQ ID NO: 186296 - DNA, 122 bp, Homo sapiens
aaccgtaagccgcggacgcccttcaccaccgcgcagctgctggcgctggagcgcaagttccgccagaagcagtacctgtccatcgccgagcgcgcggagttctccagctcgctcagcctcac

SEQ ID NO: 186297 - DNA, 122 bp, Homo sapiens
caggtcctgcagatgcttcttcacctgtggacagaaacgtctcatcagctggggacagcgcgcctcgaggccagctctgtgagctcagcctcatgtcaggagacgcgcgatccaaaaggaaa

SEQ ID NO: 186298 - DNA, 122 bp, Homo sapiens
gctgccgagcagcagtaggaggagggcgaggccacaggacggcacgcgggaggcgccagccgcagagaacacgcacaagcctgacggctggagcagcaccacgtgcatttccttaaagaacg

SEQ ID NO: 186299 - DNA, 122 bp, Homo sapiens
tcggtgctgccctttttatagatgctcttgacagtaagccataaataatccctcttggagcgctctcctactgactggagccaattaaacattaagcaagaacatacttgaaaacaaaacaa

SEQ ID NO: 186300 - DNA, 122 bp, Homo sapiens
gctttctcgaggctgcatccaagcttcttcctccggatcttgcagtgcccgaggtcccgacggtgccaacatcccgttggcccccagcctgccagtctctcatgccctttctcttccccatc

SEQ ID NO: 186301 - DNA, 122 bp, Homo sapiens
cggtgccccccaggcaccctggggtggaagctaaggactccaatgtaccccaggatccggcgtagggcctaccaggaaggaagtggcctccgtggaaagaccctagcctcctcttcagattc

SEQ ID NO: 186302 - DNA, 122 bp, Homo sapiens
tcctgaaacaatccctgctttctgctagtgcttgtgctcctggctcaggagggtgtactccgaagaagcagcctggcttcagaaggaaaagaaagcagcctttaatttcagccctagagtga

SEQ ID NO: 186303 - DNA, 122 bp, Homo sapiens
cctggcagtcccccgcgctcagtctctcggggtcccgggatggggatgggggctcagggccggctgcccaaccagcctcgaacccattgtctggctggagaggcacctcacggcgcgtgtgc

SEQ ID NO: 186304 - DNA, 122 bp, Homo sapiens
aagaaggatgcaccttctgaggtggcgttgggggtctgcgccccgcccgcgcccggggggcggaggaagagtggcgccagtagcagcagcagcaacatctaagtgagaggcggccatgagga

SEQ ID NO: 186305 - DNA, 122 bp, Homo sapiens
ctctctagggctgttgtctgtcaacagcgagatgagaacaacgggcaacagcagcagctccgtcggcccacggccgccccaggggccctgggagggcgggaagggagacactgccagacctc

SEQ ID NO: 186306 - DNA, 122 bp, Homo sapiens
ctcctttgctcccaccccttccacctcctcctgctgctccgaggtctgcctcaactgatgcgccagagaggactaacatgggtaaaaaacactctgtggacacaaattagggattgtaattg

SEQ ID NO: 186307 - DNA, 122 bp, Homo sapiens
tggtctcttctggagatggaaccctcaggaaaaacttgaaattcttcctgacagcttgttcgaaggttgccatttattttggtgagtgggttcattttgctaccgctgtgtaaaaatgggaa

SEQ ID NO: 186308 - DNA, 122 bp, Homo sapiens
cctgacccttatcgagaaggacatccgtacccccaatggcctggccatcgaccaccgtgccgagaagctctacttctctgacgccaccctggacaagatcgagcggtgcgagtatgacggct

SEQ ID NO: 186309 - DNA, 122 bp, Homo sapiens
agcacgcttgccttccattcccgtgggaggcccttaggagaagcttctaatgagaagtgccgggtctcccgccttctatctctaagaccttcaggagtttccttctcctatctgagcctcgg

SEQ ID NO: 186310 - DNA, 122 bp, Homo sapiens
ggcgactgaactaggatgaacacatgtcttgtcagcttcagaagaggaaaacagcattcccggcgaaataagagcatatatctatcatgtaaggatgctggaagcgccacaccttctctatg

SEQ ID NO: 186311 - DNA, 122 bp, Homo sapiens
aggttagaaacaaaagaccaaaggacggcttctacaaaaggccccctgttaaagcccagccgtttgttgttgttttagttaaacagaagtggactatttcaacctaaccgaaaaagattgct

SEQ ID NO: 186312 - DNA, 122 bp, Homo sapiens
gctggccgtgcctgaagggctgtgcctggcatggcctgtgactcctggagaagcctgcctcgcgcccaggcagggaagatacgccggcagccaccgcctctccagctccctcgcacacacat

SEQ ID NO: 186313 - DNA, 122 bp, Homo sapiens
cgtttcatgccagccctgtcacagcccccaacgacgatcccgaagcttcggtgatttgaccggtcagagagaatgcctttgttttcctgactgacgtgcaatcctggggaaggcactctggc

SEQ ID NO: 186314 - DNA, 122 bp, Homo sapiens
tcagcttgtaaagttttaatgtaggcccttgtcaatgcttcagaaataagcctctggcggcgcgacagagcaaaactccctcaggaaagaaaggaaagaaatggagaaagggagaaagggag

SEQ ID NO: 186315 - DNA, 122 bp, Homo sapiens
ttgtttgtagaaaaatactgaatagtagcacagctgttactatttatatgtaaacacaaacggtggctggccgtggtgactcatgcctgtaatcccagtgctttgggaggctgaggcgggag

SEQ ID NO: 186316 - DNA, 122 bp, Homo sapiens
tcggcacttctgcagctctcccagccacgtcagggtcaggaggcgtttacaggggcagggcggcgaggtggggggcggggggcacatgtgggcggagactaggggggcttcggggagagcag

SEQ ID NO: 186317 - DNA, 122 bp, Homo sapiens
agctcagagtcagttttccagaagcaggtttcagtgcagagttttcctacacttttcctgcgctagagcagcgagcagcctggaacagacccaggcggaggacacctgtgggggagggagcg

SEQ ID NO: 186318 - DNA, 122 bp, Homo sapiens
acatagaggacccacttggacaagggatgttaaagctctattttatcaccaacagtcggccggacattagaaagaaattacaaaagatagaaaattggcaagactgctccatagaggaactt

SEQ ID NO: 186319 - DNA, 122 bp, Homo sapiens
gaaattgatgcttctgtgacccaatctcatggtcactgaagttagcacagacatctaactcggtggagatatctcttactgtctttgcagctacgtaaaagggtgtttgctatattttatgt

SEQ ID NO: 186320 - DNA, 122 bp, Homo sapiens
gaagccggcatgagatgtgcagaatgcggtatctctggaaatttctgcagcatatgcccacgccggtgtgcagggacggccccataactgctgtgaatgtggcgggtcgaaggcttcatctc

SEQ ID NO: 186321 - DNA, 122 bp, Homo sapiens
cttgatcttgaacttctgtctgcctgaaccgcgaggcaccaatgtccgctttaaggctcccgttgggggccatttgttatggcagccccaggaaatgaacactggtagcaaagatgagcgca

SEQ ID NO: 186322 - DNA, 122 bp, Homo sapiens
ctcccggtcctctgggggcgtccctcggggctgctgccacctccggggggcggggctgtgcgtcacttgcactggtccaagttgccgtcaggagtccttgcttggtcggcatccagggacgc

SEQ ID NO: 186323 - DNA, 122 bp, Homo sapiens
cccaactcaaacaggcagataaagagagatcaaagagatgagcatgagatacagtcccctcgtgcccaaggagacagggtggttacagacatggaaaatctgagaataatcacctctgataa

SEQ ID NO: 186324 - DNA, 122 bp, Homo sapiens
tgcagtacggccaccctttctgatcaagtgcaccaagctgtgtcagttatttggggtctgcgggccgcatcggttatctggggtctgcaggctgcgtcagttatttggggtctgcgggccgt

SEQ ID NO: 186325 - DNA, 122 bp, Homo sapiens
aacattggaataacgctccacacgcactgcttgattctgcgctagaaaccctgttatctccgaactgttggtgttattctgagtcacagcaccagctcttttataaagagggagacccgctc

SEQ ID NO: 186326 - DNA, 122 bp, Homo sapiens
gctgttctgtcatgtgtgtcttgactcagaaaccctgttctcctctacatatctccccaccgcatctctttcagcagttgtttctaaaaatatcctcctagtttcatttttgcagaagtgtt

SEQ ID NO: 186327 - DNA, 122 bp, Homo sapiens
gcatctagaccttagtgccttcttcacctttgaagataaaacctgccaggtgtagtggtgcgcgcctagagtcccagctattaaggaggctgaggcgaaaggattgcctgagccctggaatg

SEQ ID NO: 186328 - DNA, 122 bp, Homo sapiens
tctgccagttagagtgtcagctccttgagagcaagaagccttatggttctattgcttccccgacagtatccaataatgctctgcccaggatagtaaattatgagtaatcaattgattgcttg

SEQ ID NO: 186329 - DNA, 122 bp, Homo sapiens
acctaggagagcacttcttgggagcctgacacctaggcaaaacatgctcttccttgcatacgtgtacttgctaccacctcttataatgctccttttccactgtgagccaagtgaccttggga

SEQ ID NO: 186330 - DNA, 122 bp, Homo sapiens
aagacacaaattttcagtcagatccaagtttctgtttaaattggaggaaggcttgctgtgcgtgacacaagcctaccaagacaactgccatggccttctagtccattagtacataaccccac

SEQ ID NO: 186331 - DNA, 122 bp, Homo sapiens
aataaacccaaccatcggtagtttatcaacaccagccgccagccgaatttcagtatcggccgtctccagaggttcagtatggatctcaggaggtgcgtcctgtgccaaatagcaaggcacta

SEQ ID NO: 186332 - DNA, 122 bp, Homo sapiens
cgtcatggccattccagagagaaaaggtccaagttcagtgcctcgaaccttgttgccttccgtgaaaggaagcagttgaaatgagctttgcccctggtgacactcttccttgtcactaatta

SEQ ID NO: 186333 - DNA, 122 bp, Homo sapiens
gtaacttgtgacatgcaaacatggctgcacacgcctcagtccacaccacaaccagtgacccgcactgcacacctgtccacgcctcagtcacgccacaaccagtgacccgcaccacacacccg

SEQ ID NO: 186334 - DNA, 122 bp, Homo sapiens
tacagcaacagagtttagactgtctttgcttcatcatctgaaggtaaaattttccagatacggcagacggctttcagagtacaataaacagggaatgagaactatttacatggaagtttctt

SEQ ID NO: 186335 - DNA, 122 bp, Homo sapiens
acttcatgcccagcgcgtcctggcccacgggttcccgccggcccttgtgaccagaggccacgtccttgtgcagtgagaagccctcagggaaccagagggtgctgtgctcgcgcttgcgccgg

SEQ ID NO: 186336 - DNA, 122 bp, Homo sapiens
ccggctcaaaggcatgagttagaggaaggactgtatgccgtgaaggtctcctccaccccacgctgggtccctgcatctgtgcctcagttttcctgccgaatctatcaatgagatgtctctct

SEQ ID NO: 186337 - DNA, 122 bp, Homo sapiens
ctggagcctaaagacctgtgcttgcagcccctagcttctttttcctgcacaagggatttccgggtcaggatgaacaaacacttcttgttcctcttcctcctttactgcctcattgtgggtga

SEQ ID NO: 186338 - DNA, 122 bp, Homo sapiens
atcagatgccagttgcgtgatggcgtgggtggagccaaatgtggacctgtgaggacgccacgtgagagggaagcccgtgaggcaagcgcctcaggagtgcgtgaggcccacgcagaactcgg

SEQ ID NO: 186339 - DNA, 122 bp, Homo sapiens
gtagtttctttggtgaacatctcacggacggcttgcaaagcattttgtgctttgagatggcgtgtatatccctgggtctgtgaaaggccactgctgcagggtggggagacaatagtcagctc

SEQ ID NO: 186340 - DNA, 122 bp, Homo sapiens
tcatctctgctgcttattgattttgtgctgtggacaaatgacttggcttccctgtgcctccgtttctatattttttaagtggggataatgatacaaactagttcatggggctgttgtgagga

SEQ ID NO: 186341 - DNA, 122 bp, Homo sapiens
tcttgaggagaaggcaggggcgggagagccccacttgcgggaatctcgtgcggaccgagtcggggcgggagagggcgcgcaccagccaggctagggcgcgcggggcgccgaggggcgcgggg

SEQ ID NO: 186342 - DNA, 122 bp, Homo sapiens
taaaaattaggaggatttccagatcgattcccagacttctgcttcacagaaatgtcaatccgcaggaatcccaaccggagatctcaagagctcgagaaaaaaaaaaggcagcggcggcggca

SEQ ID NO: 186343 - DNA, 122 bp, Homo sapiens
tccctcctccctggagctcaccttgctctggggataggggcccaggccgcagatggcgcacgctatagctatgggctgggtcccaggctgccaccactacccaccccaggcccccaggctcc

SEQ ID NO: 186344 - DNA, 122 bp, Homo sapiens
cctcaaatcttgtcttctgtgcacccacaggcacaacaccatgtggaagctgccaaagttcgaggtttgcaccttctgaaaaaatgacctgagctatatgttggccccatttagccacggct

SEQ ID NO: 186345 - DNA, 122 bp, Homo sapiens
tggctttcctgccttaattcggggtatcctttttccaccacataatcttccctttgtccgcgctgattcctgtttagtttggcagggccagctgctggcaggctcccccagtgctgaatgct

SEQ ID NO: 186346 - DNA, 122 bp, Homo sapiens
agagagcgggagccttagaatctgttatttgcgtcactcgaggagccggggctatctgcccgacaaacacacagaattaatccgagttacagccatagctgtctatgctacagtgaccagat

SEQ ID NO: 186347 - DNA, 122 bp, Homo sapiens
ccaccgctgtcctacctggaggcggcaatctcggccttctggcgcgcgatagcagcggcgcgctgggcaccctccacactgtgctccactttctggcggaccttgttgctcttgagctgcag

SEQ ID NO: 186348 - DNA, 122 bp, Homo sapiens
gccacattatagtcacattatcattatcactgcccccatttggaaaaagttctaaagagccgccacagatttatagatgaatggattccaaaaagctccaagttcttggctccacgttttcc

SEQ ID NO: 186349 - DNA, 122 bp, Homo sapiens
agttttctgcctgtggacagagacacgcttggaggcatccccgcgggcttggtcccctggcgtgtgtcatcaggcctgtcccctctcactcctcgagccccgcctggtgtcctctcctgttc

SEQ ID NO: 186350 - DNA, 122 bp, Homo sapiens
tggcagagggagagagagcacaagctctcttgtctcttatgataaaggtactaattccatcgtgacagcccgaccctcatgtccttatctaaacctaaataccttccagaggccccatctct

SEQ ID NO: 186351 - DNA, 122 bp, Homo sapiens
ctcacagagactggcttttgttgtttgtttagtggaacactcaaatcaaaaacaggctcacggtctgaatagtcttctggtctaagcaactcagcaccagcgccgccaaggggaggccgccc

SEQ ID NO: 186352 - DNA, 122 bp, Homo sapiens
acccccagcacggacctgaccccagggcgcggacctgacccccagcacgtacctgatccccgagctcggacctgacccccagcacggacctgaccgccagcacggacctgaccccagggcac

SEQ ID NO: 186353 - DNA, 122 bp, Homo sapiens
atctgaggttctccctcaccatctcctcagccacacgccctgactccggacttctgctgccgcctcggcgccgccaaggccctagtgttgacgcgttaccttggcaaccactagcccgcgtt

SEQ ID NO: 186354 - DNA, 122 bp, Homo sapiens
atttcaggtgatttaaactgtttcattctgcacctcctcatgggtggaatggaatccagacgcatcaaagagttaggaaagggtatgtacacatgggtaagcttcagactccagcaagtgct

SEQ ID NO: 186355 - DNA, 122 bp, Homo sapiens
caaactcctgacctcaggggatccacccacctcggcctcccaaagtgttgggattacaggcgtgaaccactgtgcccggccctattcagacctgtgaaaggtgctaaactcttaatctcttc

SEQ ID NO: 186356 - DNA, 122 bp, Homo sapiens
tggacaatgtcccagagatttggcagcatgcactgtgtgatcccagtgagaattcccatccggagacaagcggggttttcatccggctcctgctgtccagatttctgagttatctctgagaa

SEQ ID NO: 186357 - DNA, 122 bp, Homo sapiens
atcttggtttcagattgtctccagctttaagaccacgacatcgagagctgcctgccagctcgtgaaggagtacatcggccaccgggacggcatctgggatgtcagcgtggccaagacacagc

SEQ ID NO: 186358 - DNA, 122 bp, Homo sapiens
gtggatgcatggctgcgagctggggcccgacgggcgcttcctccgcgggtatgaacagttcgcctacgacggcaaggattatctcaccctgaatgaggacctgcgctcctggaccgcggtgg

SEQ ID NO: 186359 - DNA, 122 bp, Homo sapiens
tcaccaagccttgtcagctgtgctttcaaaatctatgagaatttaaccattaaattttaccgcctccatggtccccaccctgggccaaactgctgttatctctcacctccattatttgaata

SEQ ID NO: 186360 - DNA, 122 bp, Homo sapiens
gtccccccgcaccctggcacacagccagacttcccttccgcccgcgcaacccaccctccgcgagtggaggggtggacacctgctcaacagagaattcgattttgcaaacatttattgagcgc

SEQ ID NO: 186361 - DNA, 122 bp, Homo sapiens
aaaagttcctgcatgcattatttgtaatagggacatgctcacctataaactgatgtaaaacgtgtccctttttggctgtgactgcctaagtaatgaggcaatggagagagtaaaatttccca

SEQ ID NO: 186362 - DNA, 122 bp, Homo sapiens
cctgggtatggaatcttgcggcatccacgagaccacgttcaactccatcatgaagtgtgacgtagacatccgcaaagacctgtacaccaacatagggctatccagaggcaccaccatgtacc

SEQ ID NO: 186363 - DNA, 122 bp, Homo sapiens
ggatgcagtggaagtggttggtagccttgctgtacacgcagccctcgtacttgcactcctcgtacttgtagaacttcttgaagccgtccttggcgtaggcatcgtccttgatgtggtagctc

SEQ ID NO: 186364 - DNA, 122 bp, Homo sapiens
tccgaggcggctgatggctttgggcaggcatattgctcgaggtctgcttccagggccccgcggcattggctttgtcttaagctttccagggtgtctttttaggtgtccttatagtttccgtg

SEQ ID NO: 186365 - DNA, 122 bp, Homo sapiens
accttctaggacttagttaatttcaccctgcttttgtggaggcctttagcaaagattccacgttcatgctgagaggaacactgtgggagttgggtgggtatgttgacccattttacagctgc

SEQ ID NO: 186366 - DNA, 122 bp, Homo sapiens
ttgaaaaagtgactatgaataagacatgaagatgacgtatgctagcaggaccgcaagcaacgtggcccacaacgcagagatgcctctggcaatctctccggaaaaacgaagattccttacct

SEQ ID NO: 186367 - DNA, 122 bp, Homo sapiens
acatatgaattcaacaaaacatcagggatggtttgccacgtttgcgagcagcacagaaaacggcagtttgctccaagttcccagcacaccaaagggggcagtagtgcgtctgtaaagcgcgt

SEQ ID NO: 186368 - DNA, 122 bp, Homo sapiens
agggaagcaagagaaagggtgtgatggaaagactcggtccctagtctccgagttttaattcgctttggaacttgatagagtgattaagtggtgtgtggagggtgaggcgctgagctgataag

SEQ ID NO: 186369 - DNA, 122 bp, Homo sapiens
atgacttggtaattaaaagcaaagagatcttttctatttgtatgagcccttcaccgtgaacgatttgtaaatctgtttcatgttatgttttgtcatttgtcatggtgaataagttgtactgt

SEQ ID NO: 186370 - DNA, 122 bp, Homo sapiens
cgcgggctgcacctgctcagggagctgcccctctgttgttgttgttattttccttcttggcgtgccatcgaggcttttgggggaaaaaaaggtatgaaagtatttacctttggactttcatg

SEQ ID NO: 186371 - DNA, 122 bp, Homo sapiens
ccgttactctggcgatggccgactccttcattccgcacaactctctcatcttgagtcgcccgtgactgcttgtgaatgtgcccccagagatagggcctgagctgacaaaactgggcttcaga

SEQ ID NO: 186372 - DNA, 122 bp, Homo sapiens
tatatataggaaaccctaaaacttttttcttttttcttgtctgattactcctgcagtcagcgtgtctgattgctcttccagtactatgttgaatagacgtggcaagagtgggcatctatgcc

SEQ ID NO: 186373 - DNA, 122 bp, Homo sapiens
ggtaacagtcattcattttagacaaagttgtatgtcattcttggtgtgtcgcttgcaggccgctttgaagaggaatttatcaaaatgcgcatggagagacttcaggcctggatgaccaggat

SEQ ID NO: 186374 - DNA, 122 bp, Homo sapiens
ggctctgagtcaaagccgaatgcagggatgtcatactcaggctcctcatacttgagcttccgcggggagtcctggctctcactggcccccgtagggccctcctcggcctccttgggcttgct

SEQ ID NO: 186375 - DNA, 122 bp, Homo sapiens
gtagttcagatatgaaaaaagggtaagtaaggaaagaagcaaaatctgattgacagcaaacgctaatggtaaccaactcttcccaaagagactacagtggagtgtgaataatgatataaatc

SEQ ID NO: 186376 - DNA, 122 bp, Homo sapiens
ggcgccatccggatcggagatgggcgcggctgcatcgccccagggtaggaagctcatcttcggagaccgcgcggctccgagcgaccaggaacgccccctgcgggctgcgggcgggagcgcgg

SEQ ID NO: 186377 - DNA, 122 bp, Homo sapiens
catgggaaaaatagattgcgtcgctcgctttgagccgcttggataaggaaatggaagcagcggcggcggagctcctgtcttttaaatggaggatcattgattgtgttggtggttgctgttac

SEQ ID NO: 186378 - DNA, 122 bp, Homo sapiens
gtgaggtcttcataaaggagaaagagaaacaaatactgacattcagagaaagtgagagaccgagaggccatagggacctttgacatatagtcaacccactgaagtccctctttatcctccaa

SEQ ID NO: 186379 - DNA, 122 bp, Homo sapiens
acgccaaatttctccagagctgaatactccgtgtctgtctgcataccccttccctcccaccgattcctggaatcccagaggctgcgggagttgctgcagaattcagggaaaggtgcatatct

SEQ ID NO: 186380 - DNA, 122 bp, Homo sapiens
cttacccactcccagggctaggggtgcgaggttcaccgacttgattctctcccactttcccgccgggagctaaccgcgccggtgtgcgcggcacctcgcgccactgctcgctcctggccccc

SEQ ID NO: 186381 - DNA, 122 bp, Homo sapiens
gatcgcgaccgggaccggctgcgcttcttgttgtgcttgctgctcttggtgtgcttggagcgggacgagctccggctccgagaccggcccatccttccgggagacgctctaaccgctcgcct

SEQ ID NO: 186382 - DNA, 122 bp, Homo sapiens
acccggctaaagccctgctgtggtgggagaagtgcagagattaagggtcaaggagttgttcgtcctccatccccgactactgctttctgaacctcgacaccatgtcggaggtcggaggtggg

SEQ ID NO: 186383 - DNA, 122 bp, Homo sapiens
tctagctcctgaggtgatggcgagggaatgtccctgcccctccacctccaagtcggcgggcgacagatgcccctcaccccgctgaggaaaagggaagctccctggtcgtcttgagagtcggg

SEQ ID NO: 186384 - DNA, 122 bp, Homo sapiens
cccgctccctccgcagagcccgttcccagcggcccggccggccggcccgggacccccacccgccccccgcggcccaaccaactattattaatggagattgatgaggccggacacgccgcttt

SEQ ID NO: 186385 - DNA, 122 bp, Homo sapiens
gggtgagtgctgtgattccctctgtgtcccatgtagcaggtgaacctctgctcctctcctcggggaatcctggtggccatgcaggtctggtaggtcccattcccattgggcaggacacccct

SEQ ID NO: 186386 - DNA, 122 bp, Homo sapiens
ctaaagtttctttgtttgttctgctttgtagcttcctttgacttttgtttctaaggcttgcggggggctgccatttggtttctcttcaagaattaacaaaccacttactcttgaattctctt

SEQ ID NO: 186387 - DNA, 122 bp, Homo sapiens
tctatcagcacaattaagagtatgcacaattaagagtataacattccacttttattactacgagctaacaactgttcatacttactgacaggtgaacaaaattacaaattattcaatgttct

SEQ ID NO: 186388 - DNA, 122 bp, Homo sapiens
gcttccaggaatgaagccgtgggccgcagtggcgagtgttacagctagattagagaaacccgcggacccaaagagggtgcggtggcaagatttattagagcaaaagcgaaagtaaaatgaaa

SEQ ID NO: 186389 - DNA, 122 bp, Homo sapiens
ttttaagggaaaggaggagaacagtgttcagagagttgagcgtcactgtatgaatcccaccggactcctaatcacagataaaatgaaccttgggttactcacggattcaagtttcttccccg

SEQ ID NO: 186390 - DNA, 122 bp, Homo sapiens
ccgccacgcccgagcccctcggacggctcccatcccacagcccgagccccctttcattcacggcgaggaggccctcggggaacccagccctctcccggcagcgacatctaagaccttagtag

SEQ ID NO: 186391 - DNA, 122 bp, Homo sapiens
aacagaaaaggaaagcgaattctctctgacaccaagaccaacgctctagcaaagctcctccggcggatattttgttttcccagcaggttctgccttaacaataaggtcctttgtaggccaaa

SEQ ID NO: 186392 - DNA, 122 bp, Homo sapiens
cagctgcggtaagagaagcgattcctaccgcctgtatttcacatgtagcctgcagctggacgtgtgaagccctcatgcgcatatcacatagcacatacagggaatgcagcaccagtgccata

SEQ ID NO: 186393 - DNA, 122 bp, Homo sapiens
tgtcaagcttcttttttaaatttgtaaacctatttgaatcaatttgtgactcctgcattccggcccggcagaaagagctcgaagagacgcagagcgcggcgcgctcccccacggccctccag

SEQ ID NO: 186394 - DNA, 122 bp, Homo sapiens
gtcactaattggatagtaggtgtaagtgtgtcagtgggagtgcttgtgaaggggagcttgcgccagtgtgagggagtgtgtctggatgggatgtccacatgtggaattttctagcatgtgcc

SEQ ID NO: 186395 - DNA, 122 bp, Homo sapiens
aaagtgagtgtggatcacacagctgaggatcacacgggctccatctgcctgtcgtcctcacggctacaggagggctgcagtgactccagacatcacacacgacactgtggtcaccggggaaa

SEQ ID NO: 186396 - DNA, 122 bp, Homo sapiens
gatcttctggtgcaaaatgcgaagtcattctctgagcccatcccggatttactgagcgagcgaaggaagggtagagcttcccgtgagcggatcacttagatttcatcccgctattcctggaa

SEQ ID NO: 186397 - DNA, 122 bp, Homo sapiens
cgcagagacagggacacagagaaagcgagcatgtcggcccatggctgagcatgaccagcacggagctgcccgcaccctccttctcctcctcgaggccggtgcagcgttctgcaggttgccct

SEQ ID NO: 186398 - DNA, 122 bp, Homo sapiens
caaccctgcgggccccggagcgagaactcggcacaggagagcagcccttgtcccccacgacggccacgtccccctatggagggggccacgcccttgccggtcaaacttcacccaagcaggag

SEQ ID NO: 186399 - DNA, 122 bp, Homo sapiens
tccccgacatctggtggttttcaaaggacaatgctcagaccagtgcaccaggaagtgggccgggcgagtgatctgcagtccatcgggatgtccaggagatgctgacacaggctgagaagctc

SEQ ID NO: 186400 - DNA, 122 bp, Homo sapiens
agccggccccaggagacgggccgcgaggttaggttggaactcggcggcaaggaccttgaacgccgggctggggcggctccaggtgcttgggagtcgggggactgcggaggacgccaagtctg

SEQ ID NO: 186401 - DNA, 122 bp, Homo sapiens
gcctgccaggagccaggctcaggctttaaataacaagggtggaaacctgaaccgcggagccgtctgcccggcggatcctggcctcccctcctggtagagcaggcatggggcggcctggaccc

SEQ ID NO: 186402 - DNA, 122 bp, Homo sapiens
ctaaacctgaaacttaaaattacattaataatagctaacatttatgcagagcttaccatacgccaggcgctcagcaagtatattacatacattatttctatttatccttgacaacaacacta

SEQ ID NO: 186403 - DNA, 122 bp, Homo sapiens
tgtgagagtgagggtgatgggagagctccgctggcactgcagcatgtctgggggttaggccgcaggaaggtttacgtccagcagaggaggcagagatgcaagaaatagggaaacaaactaag

SEQ ID NO: 186404 - DNA, 122 bp, Homo sapiens
cagtggttacgttggtgagcgacgtccgccggcgctagcccagcctggtcccgcagctctcgggctgcccccagccccagcagtagctgggctacttccaccgctccttcccgcgccgccag

SEQ ID NO: 186405 - DNA, 122 bp, Homo sapiens
tcctgcgaatttctgctctctgaggtctcctcgctccttttcccatctgggtgttggaggcggagccgccggctgggttcggagccccacccccagctcccatccaatcaccgtccctccct

SEQ ID NO: 186406 - DNA, 122 bp, Homo sapiens
acctcaggtgatccagctgccttggcctcccaaagtgtggggattacaggcgtgagccaccgcgcccggcccataagtaccatatattatataagatgatatagtcacagtgatgagagctt

SEQ ID NO: 186407 - DNA, 122 bp, Homo sapiens
acatcagcggcttcatactggcatttccattgtggtgcagcaacaatctgagtgagcctccgtctctagccacatcatttgacaaccggtcccagaaggtaactggaagtcatgatgacaac

SEQ ID NO: 186408 - DNA, 122 bp, Homo sapiens
tggcgacaggagcaggtggtggacggtgactcacaccgtgccgcgaagcgggggcgcctccgggccccgtagaaactctgcttgggctcagcccgtatggatcagctccgagaactccattc

SEQ ID NO: 186409 - DNA, 122 bp, Homo sapiens
attgtgcatctgaccaggtgtgctgtttgttgtgacagcaggagcattctgggtgactggcggctcctcattgggatttgcagggaatgttaaaaagcaacatctgaaatgagataagcttt

SEQ ID NO: 186410 - DNA, 122 bp, Homo sapiens
cgaactcccaacctcaagcgatccacccgcctcggcctcccaaagtgctgggattacagacgcgaaccaccgcgcccgactgtcctgtgttttaatgcttgaaaataatctgaatatggaaa

SEQ ID NO: 186411 - DNA, 122 bp, Homo sapiens
tgcatttgcagcttccctgtgtgttgcccaggagctctccacctccgatgaacccagggccgttcccttcataccctttcattagtagctctaagatgtttgattaaggtgtacgtttacag

SEQ ID NO: 186412 - DNA, 122 bp, Homo sapiens
catcacgtgtgcctcaaccacacagctccatccccaacctgccgcgctcagaaccctcagcggggaatgtcatccccacttcacaggcaaagaaactgaggctttgcagaaggcatgtggct

SEQ ID NO: 186413 - DNA, 122 bp, Homo sapiens
ctcctcggttcaaactgaaagcctgagactttcccaactccgtatggggcagcctgggcccgcccggcttccgggagacactcccgccccagcctgcgctccggccgcgaacccccactggg

SEQ ID NO: 186414 - DNA, 122 bp, Homo sapiens
gctggaggatgctgttggccggagacaggcggggtggtgggagcattatgttgggaggaccggctgctgaccaggggttatcactataaaatacggtgggcgtaggaagtggagccagcatg

SEQ ID NO: 186415 - DNA, 122 bp, Homo sapiens
ttacggtactcttcactaaactatagattttatttgtattttatcggtttctccatgaaccgtttttctgttccagaatccagtccacaataccacactgcacttagaaaactcgaaaggaa

SEQ ID NO: 186416 - DNA, 122 bp, Homo sapiens
ggcttaggtaacctgaaggccctgagaagtattggatcctttttaaatgggggaggaacccgagacagccctggtaacttggtcaaggccacccacttgcagcagacacggcaccaggattt

SEQ ID NO: 186417 - DNA, 122 bp, Homo sapiens
tgcgtctgcactcctcagcccttgggcggtcgatgggaccgggtgctccggagcaggggacggcaccccttggggaggctcaggccgcagtgggagcacaccacagtgcggctcgggcatgg

SEQ ID NO: 186418 - DNA, 122 bp, Homo sapiens
actttttgtgcttttgttggtgattttgctatttaaaacggccccaaagcacagtgttgccgttctggctgtgctgccctcacgaggaacaggtgtggtggagaagctccactcaggaatgg

SEQ ID NO: 186419 - DNA, 122 bp, Homo sapiens
cctccctcctccctacgtgtgcagcccctttcagtgtggtgtggagtgtcacttaatgtccgtttatcttccattgctggttcgtttgtttgtttgttttgtaacgggacttttcggaccat

SEQ ID NO: 186420 - DNA, 122 bp, Homo sapiens
gaggttgcacagtgggcaggagcgcagagaggtgcactcgtggagggtgagccatgtgtccggtattgttctaggatcagcagtgaccagggcatatgcagagtctgccccgggggcaggat

SEQ ID NO: 186421 - DNA, 122 bp, Homo sapiens
gaatccttggccttaggggtggggtaaagccagcgttgggaaagcctgtgcattaggcagcgctgttctgcctgcagggaacgattgcacaactgataacttgggcctaggctcagctggat

SEQ ID NO: 186422 - DNA, 122 bp, Homo sapiens
ggtttccccgtcaaggaaagttggaaaaaattcaggctgaatgcgcgcagaagctctttgcgcacagacatctctccaaggtgacccatttggcacagctgaaataaataaccccgctcatg

SEQ ID NO: 186423 - DNA, 122 bp, Homo sapiens
tccccaaacagaaacttcaaatgcagggcctctgagtcagtgatgtggcttccaggtgaacgaggcctgtcaaatccactggagttgggggacatggcctgggctgtgaatttcggtttcct

SEQ ID NO: 186424 - DNA, 122 bp, Homo sapiens
agttccttgtcattaggggtatccaacccacaagtgaggggttggcctagattgtgaccccgggggctgcatccagagctccatccccaaccttgggcatagtgcctgccaatcaatgcttc

SEQ ID NO: 186425 - DNA, 122 bp, Homo sapiens
ggaggcctgctcagcgctgcagtttctgtaacctcctgacatggacggcgactctggtctcgcagaccccaggcctgtgagggtcgctcactgcggtagaggctgcgtggagtcagtggagg

SEQ ID NO: 186426 - DNA, 122 bp, Homo sapiens
tgctcacttcccatttctaattgactacagcaattgcaattcttgctgaaccattctcagcgtgtttgagttacttgaggcatctgactgtaggctctacctataccctgatgccaactcta

SEQ ID NO: 186427 - DNA, 122 bp, Homo sapiens
cgggggcatagcgggccagtaagggccgctcctcctttgaagaggttttgcgtctctttccgccggtggcgtcggcgctcacgcaggggcgggtcccggtagcgccaggcggtgcagggcgg

SEQ ID NO: 186428 - DNA, 122 bp, Homo sapiens
gcggggctgggagggcggggctcataagatggacgtgcacacagcagtcgggtgagcctccggtgcccctggaagcctgctgaccacgcagcgcgcagcattgcccctccctagctgaggcc

SEQ ID NO: 186429 - DNA, 122 bp, Homo sapiens
tgtaaatggatgttcagaaaggccattttcattcagccccttcagagcagttgaacatttcgcccatcatcataacatcgttaataatgaagtttaaacacataataacgtaagcctagtcc

SEQ ID NO: 186430 - DNA, 122 bp, Homo sapiens
aacaggagtctctgccatggagcatagacccttggagctttccagaccagctcagaagcacgggcgcacacacagacaaaacaatgccttgtccacgaatgaataaaggacacccatgcccc

SEQ ID NO: 186431 - DNA, 122 bp, Homo sapiens
cattctcacaaaacctggctaggtggacctttggatcacactcgtcttaatgatggcaaacgtggtatcttgagaagtgacttgctggaggtcacacaaccagctagtggcataggcatggt

SEQ ID NO: 186432 - DNA, 122 bp, Homo sapiens
tgtggattctccagtggaaggagggcagtcagaagcacctccttctctggtatcctttgccgtctcatcagaaggcacagagcagggagaagatccacgctcggaaaaagatcacagcagac

SEQ ID NO: 186433 - DNA, 122 bp, Homo sapiens
tggcgcgagggcagatccgcgaacaggggctggggaaatgatccagatctggcattgccgcggagacccccatacgtagctgtaccgccacctctccacctgctcccatcctgacctgaagg

SEQ ID NO: 186434 - DNA, 122 bp, Homo sapiens
ctcaagtgatccgcccatctcggcctcccaaagtacagggattacaggtgtgagccactgcgcctggccagggttccttactcttggcccatcctggccgtagggggaaggcctggtctgat

SEQ ID NO: 186435 - DNA, 122 bp, Homo sapiens
acgccctgtctctggatgcacatcaccatctgcttgccggatcctccctcctgttggccacgcctgcccactccgccccgatccacgtgtgtgctgggcatcggtccattctggtctggaga

SEQ ID NO: 186436 - DNA, 122 bp, Homo sapiens
agatcttgggtttgtgagtgacttgatcagaggtggccagggaggtgaagaggccaaggccggttgagggactgtcatggcacacccagagagacatcagcacagaaaagagcaagactcag

SEQ ID NO: 186437 - DNA, 122 bp, Homo sapiens
gaggctggagctgggagtggctcgggattaacttcttccgctggaggttggcttaaggctcgcgccaggctcctggcggatggaatttcagaacgcaataaatggggtttttctctacgccc

SEQ ID NO: 186438 - DNA, 122 bp, Homo sapiens
tttttaaaaatattttcagcatggagataagttacccaccactggggcatgtttccatcacgttcttagctgcaacgaagcaaatttaactctggctaatttaaacagaagaggaggctgtt

SEQ ID NO: 186439 - DNA, 122 bp, Homo sapiens
attccagggttctccggtgttttaattggccccgctgtggcagccggccagcacgagggacggcacctcgtgacgcccaggacagaccgggcttgttgctggtctgtggtcctcagtcaggc

SEQ ID NO: 186440 - DNA, 122 bp, Homo sapiens
ttcgagacctgctgcttccgcccggagttgttgtgggctccagcagcgagtagccacttccgctaggagtccctagcggccagggcgtggaagcggattctgaggcggctttctcctactgc

SEQ ID NO: 186441 - DNA, 122 bp, Homo sapiens
agatgtggatggggcagggccgagcgtggggactgggcttttcaatgacgggcggggttacggttgggcagcaggtgggcgtggcaggcataggcggagtcaatctatgagtgggtgggcct

SEQ ID NO: 186442 - DNA, 122 bp, Homo sapiens
gcggctcttggagagccttgtgggtgactccgatgcgccgcagcacccgcatttactctccgcttggtagaagcagctgtgtcctcacccctgcggtcacccaagttacctgtcccctggag

SEQ ID NO: 186443 - DNA, 122 bp, Homo sapiens
gtgcacttatcacacaaccatcttggactcaggaggcgctgtgcagatggcagctgtgcacgtcacagtgagtctcactcgctggactctctgccgactcccagcatcagcacctgtagggt

SEQ ID NO: 186444 - DNA, 122 bp, Homo sapiens
cgcagcagcttctgaagaccgagcggcgccaagtccgtctggccgtctctggggaaactccgtccccatcaggtccctggcgctggggttttattcagttttcccaaaacaagaggggtgtg

SEQ ID NO: 186445 - DNA, 122 bp, Homo sapiens
caccctgctttggcggcccggccggagggcaggaccctcacctctcccccaaggccactgcgctcttgggaccccagagaaaacccggagcaagcaggagtgtgcggtcaatatttatatca

SEQ ID NO: 186446 - DNA, 122 bp, Homo sapiens
gaaccccctccgcttccgggtagttggcgtcacttccgggcgagccccccaatcgcacggcgcccgcagctccccagccctaccctcccggccaagatggccgccctcctgtgcctcagctg

SEQ ID NO: 186447 - DNA, 122 bp, Homo sapiens
caagcctatggtctatcctggagaatatttgtgtatgtgacaatgtatattcttcaacatcgtagactcgattttgggtgctcccatcgggactgtgtgtacctgtcctggaactcaagtgc

SEQ ID NO: 186448 - DNA, 122 bp, Homo sapiens
tctacgggaagaagcatgtgactgtttatttgaagttgtaaataaaggaatggaccctgtcgataaaatgaaactagtagaatctttgtgccaaggattacagtctgctgggtctttcagca

SEQ ID NO: 186449 - DNA, 122 bp, Homo sapiens
tggctgtaccttagaattacctgagagctttaaaatgctaccaatggctgcactgcattccgcagagactctaaagcaactggactaggctgaggcactgagcatctataagtagctatttt

SEQ ID NO: 186450 - DNA, 122 bp, Homo sapiens
gtggggagggcactgagacccccaccccaccgtgacgccgagaaccacccccgcgcccaccgacacacacatgggggccacagcaggggactgctccccactgctcaccaggctgcgagcca

SEQ ID NO: 186451 - DNA, 122 bp, Homo sapiens
tacaggaagggtttttaaaacagaacgggacgggagggagttttagttatgcatcgtgagcgttacgctgtgaccgggtaggtaggcttttcattagctcagtcttgcgccacttaaacgtg

SEQ ID NO: 186452 - DNA, 122 bp, Homo sapiens
taccccgctgcggttttcccgggggccgacgggagtcgaagttcagggacagggcgcaaccggaagcggctccggctcccggcaggcaacgcgaggaggcggaggtctggtggccgctcggc

SEQ ID NO: 186453 - DNA, 122 bp, Homo sapiens
ctctctttcttcagctgaagccggttctgttagcacagaatttagaaaataatagtgagacgtggcatgaattggcttgtatcatcatttaattaataacagaaagggacacttgccataaa

SEQ ID NO: 186454 - DNA, 122 bp, Homo sapiens
ccggctgccggatgtcaggtggcctcagtggtcatagcagccaccatgcaaaaacaagcccgagctcagctggtgctgggaagattcacttattctacttgaatgcacattaaaagagggac

SEQ ID NO: 186455 - DNA, 122 bp, Homo sapiens
ttcttgtgttgaatgcttgtttcagctatgtttactcttccttaataatagcagcctttgcgactatcattctgcctctgagtatacccgtggttgcaggcgatcatccttgttatgttctg

SEQ ID NO: 186456 - DNA, 122 bp, Homo sapiens
ggacggccgtgtggggcctgtgctcccgggactcccggcacatcacgcacagcagcttcccgtcgtcctcacagtagtagtgcagcttctctcggtgtcgctcgcacaactttgcatcctgc

SEQ ID NO: 186457 - DNA, 122 bp, Homo sapiens
gctcgctggagggattgggcggaactagggagcgagctccgtgtgttccctcggattccacgtggactcgggctcccagccaccaggacctgcttggaaagagatacttcttcgttcccttc

SEQ ID NO: 186458 - DNA, 122 bp, Homo sapiens
ggggttgcaaactgctatttgtcatgtaactgttgctggacaaccacatgtctcagcacacgtaggcacgcccccacacttgtgtgcgtgcacacacacacgcacggtggctgtgctctcct

SEQ ID NO: 186459 - DNA, 122 bp, Homo sapiens
accataatttctacagcagtgacctggagcactttaaatccaacctggggcctcagtatccgggtcatttcttggctgcctatgttcttagctgttcagtaggtgttgggtggcttttaaac

SEQ ID NO: 186460 - DNA, 122 bp, Homo sapiens
aagggcaccgctgcgagagggaggcgggcgccggtcatgggaagggcggggggggtgcagcgaagcagacacattttccctggaggactggggctggcgggaagcgtctctcaactccattc

SEQ ID NO: 186461 - DNA, 122 bp, Homo sapiens
cacgcacagaggccctggggcaggacctgcctggtgtgtaggagaaacagcgacgaggcccgtgcagctggagcagcgtgagcaaggagaagaggagccgggaggaagccgatgcggcgggt

SEQ ID NO: 186462 - DNA, 122 bp, Homo sapiens
cctgagggtggtcgccgggggctgggcacgcccccagtcctgcgccgccgggggctgcggcggtgctgcccaccccagagagccctcggcctggggctccggcgaagcaagtgccttcccgg

SEQ ID NO: 186463 - DNA, 122 bp, Homo sapiens
gcagcctgaagtccacgtcgttgccgatgccaatggtgaagatgcagacttggcctcgggcggcctctcgggtgttgttgaggatcttgagggtgtgcgtctccccgaccgtgggcttccca

SEQ ID NO: 186464 - DNA, 122 bp, Homo sapiens
gccagcggtgcccttctgcggccgcccttgctgcgtttgtgtcccctctgtctcgcgggccgggaaactgctctgatgggaaaataaacagcccaaaaccaagtgggtgtctgttaggaggt

SEQ ID NO: 186465 - DNA, 122 bp, Homo sapiens
agaggacagtgtgagcatctttacaaatcccagcctacttttaggaaatagtgagggcatcgaattcaggaaccccaggactctgggtaagaccccagtgggtggtgggaaaaaagccctat

SEQ ID NO: 186466 - DNA, 122 bp, Homo sapiens
cccatcgtctgggatgtggggagtgcctctgcctggccgcccagtctgggaagtgaggagcgtctctgcccggccgcccatcgtctgggatgtggggagtgcctcggccccaccgccccgtc

SEQ ID NO: 186467 - DNA, 122 bp, Homo sapiens
tttatcttcattttctgtcttaattattgatctgagatttagttgcccttgaaactgatgcgctcagcagctccagggtggtggagtgagatggttgctaggcaacctcactagtatcagac

SEQ ID NO: 186468 - DNA, 122 bp, Homo sapiens
tatggattgaattgtttcataactcttaacccttagtttcccaaaatctcgtgctgaggccgttgcaaggtggtcaactcctgcacatggtatccatcctgaattacaattacctacttcct

SEQ ID NO: 186469 - DNA, 122 bp, Homo sapiens
ggaatccgtggtcatgccagaatccgtggccatgccggaatccatggccatgccggaatccgtggtcatgctggaatccacggtcatgccggaacccatggccatgccggaatccgtggtca

SEQ ID NO: 186470 - DNA, 122 bp, Homo sapiens
tgtttgtttgtttatttaaagacagagtcaagctctgtcgtccaggctggactgcagtggcgtgatctcggctcactgcaacctccgcctcccgggttcaagcaagtctcctgcttcagcct

SEQ ID NO: 186471 - DNA, 122 bp, Homo sapiens
agtcgcaggaggaattgatgcagcatggtgggagtggacgtcactttcaaggtgatcagccgtgaagagcggcaaacacagcgtcttggctcgagttcccccaaacggtgccccctggaaca

SEQ ID NO: 186472 - DNA, 122 bp, Homo sapiens
ccctactgtacgctcaaaggcaggcgaccctattcccaagccccttacagctaagacttacgagggaagcgacatttacatctgcactctctccgaataagtgctcttggtattctgcctta

SEQ ID NO: 186473 - DNA, 122 bp, Homo sapiens
atacccccgcctctgggcaggatcttccggaaggtgggccagcggctgctcacccagtgccggccaccctgtaagtaccacccccgcccacacctgcccaacacctgcccacgcctcccacc

SEQ ID NO: 186474 - DNA, 122 bp, Homo sapiens
cctgtctcaaaaaaaagaaaaaaaaggaaattagtggtggaaggtgactttgcatctgggcgtatctgcctgcagagttggtgtccttaccttgaagaaaccctgctttagttggagtatcc

SEQ ID NO: 186475 - DNA, 122 bp, Homo sapiens
gtgaggaaaccccgcggacagcgcggtaaggaccccacccagattactggatttcaccaccggccgccttcgatggaggagtcctcagtctccacatccgcacggcacagacggaggggggg

SEQ ID NO: 186476 - DNA, 122 bp, Homo sapiens
ttattaggaacctttttgtttttgagaccattgcattctggctggtttgtgctggtttaacgacatctaagaaggtttagaaatggtgagaccaaaacaataactgttaatgatggacagca

SEQ ID NO: 186477 - DNA, 122 bp, Homo sapiens
gtcaaacctgctgttttaaaatatgtcattccagggcacagttaaatatacaacttgctccgatgaggtgggagaagtgggccggtgagctgtgaaatgaaatctgcctaatgagggtcgag

SEQ ID NO: 186478 - DNA, 122 bp, Homo sapiens
taaaatgcaaattaatcagactagtggtgaggccctccgtggtgtgactaacctgcatcccgacgttttcaccctactttgatccagaaagcacctttccgccccatctcttctcctttcct

SEQ ID NO: 186479 - DNA, 122 bp, Homo sapiens
cattcaacatttatgtagccaggcacagtgccagtgttccgttaattattttcatattcacgcagagtggcctccattccttcggtcattcttcaaggggcgtaatttccagccttccagcc

SEQ ID NO: 186480 - DNA, 122 bp, Homo sapiens
agggtgtcttgttccacacaagacacagtgagcaggggttgggggaggggctcctggctgcgggaggcacaccacactcacccaaatggcatctgtactcaataccgcacccttccctgggg

SEQ ID NO: 186481 - DNA, 122 bp, Homo sapiens
aggtaaaaatcctattcccagggccatgtgctgggcacctgctttgctgcacaagatgaccgtccactgtctcctgccagccccagatccatcacacagctgggctcctctcaggggtgcat

SEQ ID NO: 186482 - DNA, 122 bp, Homo sapiens
tgcatcctaatattggttgaaatttgtgtctctcaatagttttcaaacctcagccaaccccggaagaacctttggggtattaagagtactgcagtccgaaacataggtgagtgctgttaggg

SEQ ID NO: 186483 - DNA, 122 bp, Homo sapiens
gcttccagttcctgcgcctctgcgtgggggtaacctggggctgactccgcagggtccagccgtggagcctgacagtcccagaggcctgcgatctgctcctggaggtgccccccagtcagggc

SEQ ID NO: 186484 - DNA, 122 bp, Homo sapiens
gccgtttcttctcagtgcacccctgacaaattaacctgtttgaaaccgactcttcttgtccgcattgtcagtgtagcaatttggtctaattggattctaaggcgggcgttaggagcccaacc

SEQ ID NO: 186485 - DNA, 122 bp, Homo sapiens
aagccggaagccaacgctggggcagccgtggcgtttaggagagtgacaggcagagccgcccgcgaggtggcccgagacgcagaccggagggcggagggctgggggtgcgaggtagggagcgg

SEQ ID NO: 186486 - DNA, 122 bp, Homo sapiens
ggccccgcggatcagccgcaggacacgcccaatccgcgccaggcggatcacacggaacagcgtgggtgacacgaagtacttctggatcaggtcagagagggcaaggcctgcggggagaagct

SEQ ID NO: 186487 - DNA, 122 bp, Homo sapiens
tcatttcccttcccctcctccctgcttgaaaaggagcattaattaaaccggtaaacaagccggctcccattctaaatcagagctgcaggcaaaggagagataacttaggctccggagaagag

SEQ ID NO: 186488 - DNA, 122 bp, Homo sapiens
aactgtcctcatgaacgtgcccaataaccacaccataaaattgcaagcttgttaagatgccggtttgagaaactatgataatcaatcaaattaaccattgttgttaagtgcaaataatcctt

SEQ ID NO: 186489 - DNA, 122 bp, Homo sapiens
gagggagtggaggagggactggcaccccgcacggtggcatcttccagaaggtcatgcgtccgtccccacgtctttccagggccggttctccccggtggggcccggggtcttggagaccagtc

SEQ ID NO: 186490 - DNA, 122 bp, Homo sapiens
gggttgtgggtgatttttttaagggtctgcgggtcccttgggggtcgatgatcacccttccggacccccgagaccttgcccctgacgtcttcactggtccttcttcgggggagttcgctccc

SEQ ID NO: 186491 - DNA, 122 bp, Homo sapiens
ccactcccacttcccggcccccaagcccgggcccgtgaggtaatgtcacgggtggcgacgcgggtctcgtccactgaccacacatttcttgccgaggaaagtgaagagggactcgttctcct

SEQ ID NO: 186492 - DNA, 122 bp, Homo sapiens
gcagcatctgcctgtgggaagcagctctccacaccagccaagggggcccccacactcccgcgctgctctgcggctcagggagcagcccacctgctgggtgtgctgatatcaccctcccttct

SEQ ID NO: 186493 - DNA, 122 bp, Homo sapiens
ctgcgctcgccagatcaggcggcacccttccccgcgtgggaggggcgcgtctcactcaaccgcctcgacccccacaccaacgagctccctcaggacccactggtggacatcgcggcggtgac

SEQ ID NO: 186494 - DNA, 122 bp, Homo sapiens
tcgctttgactggtgaagtctcggcatgtgttgctcggaggtcggattgtgctccgaggtcgccccaaccgaaatttttcacgcaggtttgatagtttagggcctgtggacttgttaagtgt

SEQ ID NO: 186495 - DNA, 122 bp, Homo sapiens
tttgctgctgcctttttcggcttcgcttccacttttgcaggagcaggtttagcagacaaccgcgccgatctcctcttgggctcttccttggcggccccttccgcggagctgaccttgctctt

SEQ ID NO: 186496 - DNA, 122 bp, Homo sapiens
actgagcgaagcctccctgctactgcttcccagccatgcggcgagctctttgaaggaagccgtggcggtatatttctcttgtacctctgctgagctcagtatcagaatgtgcacacagcagg

SEQ ID NO: 186497 - DNA, 122 bp, Homo sapiens
acctgaagctgtcctgctcagtgagacatcctgccgtatgacaggtttcactgaaaggatcgtgtcctttcttcttactgaattccccacatctagaattcgttctcacagtttaatacgtg

SEQ ID NO: 186498 - DNA, 122 bp, Homo sapiens
gctaggttactaagaggcccaaggctggaccctgcaccttaacagcctagccagggagggcgctgtgcctcagcaagggtgggagtggggctcgaggaggaagcctgagtcctgggtggcag

SEQ ID NO: 186499 - DNA, 122 bp, Homo sapiens
gctgtgcaggggatcgctggttaattgatcagagccagttttctttatcaatgctgggaacgcgggggtgaggtgagtcagtcccagcttgtactctggtttctgagctgtggaatccaaca

SEQ ID NO: 186500 - DNA, 122 bp, Homo sapiens
cagcgagtcgacagcaggtttccagaagtgccctaacaggactgactagcagccaggaggcgcaggaaggggcaaagagcgtgtggagagcttcgcccccggcgaggatggacgccccgggc

SEQ ID NO: 186501 - DNA, 122 bp, Homo sapiens
tcccaccgcggcctcccttcctccgcagtctcggcagggctacctgggctgacgggactgcgagtgacttctgacgcagattcccaagatgagagaggctggagctgggggaggaaagccaa

SEQ ID NO: 186502 - DNA, 122 bp, Homo sapiens
gctctcccaggtgagtgactaaactttccgggtcacgtgacagggcggagccggtggggtcggacccacagaacgaccgacggaccgagggttcgagggagggacacggaccaggaacctga

SEQ ID NO: 186503 - DNA, 122 bp, Homo sapiens
caccgcatggggaccgcaccagccccagcaggaagtggctggccccttcccaccccctgccgagccaggccctcctgcactcacacttgggaaccagccagcctgaaagtccctgttctcag

SEQ ID NO: 186504 - DNA, 122 bp, Homo sapiens
ccgcgccagccagtgcactaggttcaaggcgtttgttgccatcagggactacaatggccacgtcggtctgggtgttaagtgctccaaggaggtggccactgtcatccgcagggccatcatcc

SEQ ID NO: 186505 - DNA, 122 bp, Homo sapiens
accatctgtctatcttctgtggctccagaatccttcctggttccactctaggagctgattcggaggactggggtccaggaaacaccccccgccccagttccttgatcctggagaaggggcac

SEQ ID NO: 186506 - DNA, 122 bp, Homo sapiens
aaacctatctcatcgctttatacttaaattttttttctatcggtcttttttcagtatttgcgattttattaagaaggaagtttagaccatgggtggcttaacatgccctaataggtgaattt

SEQ ID NO: 186507 - DNA, 122 bp, Homo sapiens
tgttgaacttcctgcaacatctgcgtgagtttgggcttgttttccagaggaaggtatgagcgcctagataagtggcttccagggaagaaacagggtggtgtgttgcctttgcctttaaaaag

SEQ ID NO: 186508 - DNA, 122 bp, Homo sapiens
taagatagcaagaaatttaaaactgtaacaaggtggactgctttcccatacagtgcatgccgggctcctctgtgctatcagcgtggggcgtttattgaaaaggggcaaatatacaaggggtt

SEQ ID NO: 186509 - DNA, 122 bp, Homo sapiens
attccatatataatggattgtatttcttcagccttcaaaaacagtagtccctgggtgttgcgacttgatgggcaagcagctaaccaaagtaacgaagtctcaccaggctgttgcactgataa

SEQ ID NO: 186510 - DNA, 122 bp, Homo sapiens
ggccagtactcaccgtcaggctgtggcaggtacagtgaaaggaaaaactccatgagagaacggtggaaagttcacctgagagtgaaacgcatgccagttagagtggctgaaaaatagcatgg

SEQ ID NO: 186511 - DNA, 122 bp, Homo sapiens
tggcgaggtccagatgaaggctgagggctcagatcccccctaggcctgggctccggaaggcggggagagattgcacaagacgatcttcccatgaaccctgggctgacctctctctctgctcc

SEQ ID NO: 186512 - DNA, 122 bp, Homo sapiens
tgagagaaatctaacatggctcactccatcttgcttctagcctcgcaggccggctgtcttcgctcattcctgggcataaaccaagctaaccatgggagaatttatagtttaacttttaagca

SEQ ID NO: 186513 - DNA, 122 bp, Homo sapiens
ttcagatttatcttgtattagaccctgattattttaggagtctattcactgagtttttgccgctgatgttgtcccctttccatctatcctatacagtgtcatcaccttcatcttccccaaac

SEQ ID NO: 186514 - DNA, 122 bp, Homo sapiens
gcgcccgaggtccctggtgcccccgcgggggagctgaggtttgcggtccctcctggggttcgcttcccgcggggctaaaccgcggcgaccagggcccctttctccactggtgccttttccgg

SEQ ID NO: 186515 - DNA, 122 bp, Homo sapiens
accaggtcatcccaaagccacacctgtctcgtgggtggggcagcacgtggggtagaccatcgagcccctctattcccagcgtaaagccaggtagccagagcgtgcaagggaaagagacaggc

SEQ ID NO: 186516 - DNA, 122 bp, Homo sapiens
tccggcaattccacagctcaggcttacattttcccatattctggacgctggtgcccaccacgtgcaccaggcactggccagacagaactaccacccccagcatgccgcgcgcatttgggccg

SEQ ID NO: 186517 - DNA, 122 bp, Homo sapiens
tggggtagacacgcatgaaagccggtgtgaaatgcagcgccctggattgaacatcagagacggagcccacaggagtcgtgcgtttcctgcgggggctgtaacagattaccatagacataagg

SEQ ID NO: 186518 - DNA, 122 bp, Homo sapiens
gggtcggggcgcgctggggcagggcatggggcggaggcgggcgcggcctcagggagccttcgcaggccctgccaccgcctgctccccgccggccagcgctctcggcgcggtgccctgcgcac

SEQ ID NO: 186519 - DNA, 122 bp, Homo sapiens
tatgaggtcataacctcatacaattatgaccatatgagggcatatatggtcaagggatggcggacatggagagatattggtcaaagggtagaaactttcagttatagaaaaatattctcacc

SEQ ID NO: 186520 - DNA, 122 bp, Homo sapiens
gctgaaagtcatgatcaccttgacaccatctggactgttttcactcatttcttttgtttgcgattttctgttcggtgaaaaggtggcagttgaaggttggattacatgaacattgaatcagg

SEQ ID NO: 186521 - DNA, 122 bp, Homo sapiens
ttaaaatgtctaatctttttcagttatgggttaaaatgtcttctgtcagtctgtggcttgcgtttgctctttatctatggtgtcttttggtatacagaagtttcagtttttatgtaatcaga

SEQ ID NO: 186522 - DNA, 122 bp, Homo sapiens
caactcttcagacagcggaaacccacccgggcgccctcagagacgacgagcacgcaacagcgcatcccacacccactccttgtgcagcacctcagaggaagctcaacaacagttctctgcgt

SEQ ID NO: 186523 - DNA, 122 bp, Homo sapiens
cccggagagtcaggcccacagagcatgcccatgtgggccggcggtgtggggagccctcggcggggcatggcccctgcgtccacagatgacctctttgcccgcaagctgcgccagccagcaag

SEQ ID NO: 186524 - DNA, 122 bp, Homo sapiens
tgaattaagagggtctccgaaggctttaaacgtccaaagtctatcaattggaatttctctcgtaatgagaaccagtgcccccttctgacaaccagcaaacactgcataggtggtcaatacaa

SEQ ID NO: 186525 - DNA, 122 bp, Homo sapiens
tctgctggaacccccggatgtggggccctctgaccccagatgagggcgtcagtgatgctgcggtgctgcacctgcccgacccctgcacctgacccggggcctcttctccatccctcagccac

SEQ ID NO: 186526 - DNA, 122 bp, Homo sapiens
gctgtgccaatctgtttctgtggtggcgggtggcggctcggtgttaaatttggagacccccgtgggtttcccatgccgacctgcatatgtctgcgggcacggggaagggagggccgcagacc

SEQ ID NO: 186527 - DNA, 122 bp, Homo sapiens
gcggaggccacaccatgaggtttccagggtcatagatgccctttggtcagcgctgtctgccgctgcacgggcacccctcctgttgggtgtctgggtagacttgggggtctgtccggctggcg

SEQ ID NO: 186528 - DNA, 122 bp, Homo sapiens
aaaaagcatccagcttacaacggaacctggagggttggtaaaggccccctgcgctggccccgccccatgggaccgggcggcgtgggcgtgagaggcggggcggggccgcgctctgcttgcca

SEQ ID NO: 186529 - DNA, 122 bp, Homo sapiens
catgagcagcagctgcctcccccccacacccttccttggtggccccgcccctctgatctccgtgagccaggatctcccccaggatccctatttcccacgggcttttggcaatgggctgctca

SEQ ID NO: 186530 - DNA, 122 bp, Homo sapiens
agcgcaggtggttggctaggttgaagctgtgcttgaaacccttgccgcagcgcggacatgcgtggggcttgagcgctgtgtgccgggcaaagtggcgccgcaggtctgagcggtagcggaag

SEQ ID NO: 186531 - DNA, 122 bp, Homo sapiens
tctattacgttcccttttcctgccatgacaggcgtcctagttgtccccttaggagttctccgatgtcctgtatgggacccccaacgaaggccatttctcttccatacgaacccttggccatc

SEQ ID NO: 186532 - DNA, 122 bp, Homo sapiens
cgtcactgagtgctcactctaggcagccctctgctaggcgcaagtggcaggatggaggagcgtgccaaggactaggagattacatggagaagctaacattagccttagtgcttctttgccat

SEQ ID NO: 186533 - DNA, 122 bp, Homo sapiens
tgggggtgggggcgcaaggagagccgggctctgcctcggtcaggacggggcgcggggccgcgtgtgaagttagctggagactcgtgcaacttttccccgcggctttggtcctgatcccgggg

SEQ ID NO: 186534 - DNA, 122 bp, Homo sapiens
aaggaagtagagtgacctgggttttcaggggaggctggggctggcatcggggatgaggtgcgagggagtggaaaggaaccaggaacccaatcgcaactccccttgtgtcacctctctccagc

SEQ ID NO: 186535 - DNA, 122 bp, Homo sapiens
caaaccccctgccccaaataaagcaaaatgcccttttcaagaaaataacacagatcaattcgtggggttgtatattgggacagataactaagcctgctaagcttgactctcagatactatag

SEQ ID NO: 186536 - DNA, 122 bp, Homo sapiens
ctgacttctagaatgaagccgcggagccttgcggtcagtgttacagctcttaaggtgacgcgtctagagtttgttccttctgatgttcggatgtcttcggagtttctttcttctggtgggtt

SEQ ID NO: 186537 - DNA, 122 bp, Homo sapiens
gacacgtgagcccccaaaaaggcattcaaggttaaagaggcagtagctgggtcatggtcacggggagagatgctgcgcgctctctgcggtgcttgggccggggacacttgtgcttgtcaatt

SEQ ID NO: 186538 - DNA, 122 bp, Homo sapiens
ataagcatcaaatctactttactgttctcacctttctcttcctcctccattttttaaatacgataatgaataattttaaatcattttcctctctcttttgcctaaactatggtcattagata

SEQ ID NO: 186539 - DNA, 122 bp, Homo sapiens
gggaagggggagaagatagctggagcagagctggagaaagagagctgggggtgagatgggcgcagtagtctggagccagatatcacagggccctgcgggcacaaaagggattttctgttatc

SEQ ID NO: 186540 - DNA, 122 bp, Homo sapiens
cggggcgccggccaggagctgccggaaaggcggggcgggccccgggggtgtggaagccggcgacgcagaagcccagcatatggggcactcagcgcagcagtggcagcatggcggagaggact

SEQ ID NO: 186541 - DNA, 122 bp, Homo sapiens
cccagagaagggcaagtggccgtttctctcctggacatcatagcaggcccagccagcacacggctcggctcagagcaggtagttaataaacatgagccgaatgaaagaattcctgagatcgc

SEQ ID NO: 186542 - DNA, 122 bp, Homo sapiens
ctcggcaccctcgcctacccccctcgcagcacctgtcgcctccgcccctcactcggaccccgcgcatctggcgcagcccctcccgcactcccgcccagcgccccgcgtccccggcccccgct

SEQ ID NO: 186543 - DNA, 122 bp, Homo sapiens
ggccgagttcccagaggcaggccttgggcctcgtcttacctgtggtccagcctcctgggccgctggcgctgggtagcccgtgagcctcgtgagcctgggaggagcggtggagaactctctga

SEQ ID NO: 186544 - DNA, 122 bp, Homo sapiens
gctcaggggcatcccacctccgggctctgggttcctctgccctggaagggctccaggacccgtcccaataaccacccacggccaggagggccaaggccccgtgctggatatttaaatttagg

SEQ ID NO: 186545 - DNA, 122 bp, Homo sapiens
aatgacagtgaaggggctggcagttctttcaccagtggtgtacaaagttgggtcaattatcggagctttttggaaagaatacccaaagctttcttggagatccagtatctgtttgtactttg

SEQ ID NO: 186546 - DNA, 122 bp, Homo sapiens
cccaggcgtccatggagcgtcgcctccgcccggtccctgccccgacccccgcctgcggcgcgctcctgccttgaccaggacttgggactttgcgaaaggatcgcggggcccggagaggtaac

SEQ ID NO: 186547 - DNA, 122 bp, Homo sapiens
atggccacggtcggagagtggtcctgtgtgcgctgcaccttcctgaacccggccggccagcgccagtgctccatctgcgaggctccccggcacaagcccgacctcaaccacatcctgcggct

SEQ ID NO: 186548 - DNA, 122 bp, Homo sapiens
agtcagtaattttaaaaagaatagtctctcttaggaattctgccctgcttggaatttctacgcctttttcaaaatttctaattctttttctatcaatctctgacctcagcactcagagtcta

SEQ ID NO: 186549 - DNA, 122 bp, Homo sapiens
cgggacagctgcccgccctcctgctcatcagcccggcctgccttgcctttctcaggccttcgcaaagccggcgactctcccaacacatatgctgggagagccagatgccccagaccccccga

SEQ ID NO: 186550 - DNA, 122 bp, Homo sapiens
cccaggatcgacatgattctgaaggtgattgtcatgggtgcagggagcaggcggcgacaccgtctaggcttcctgggggccgtcctgggcctcggcggccacggtgctggactggagcagga

SEQ ID NO: 186551 - DNA, 122 bp, Homo sapiens
ttggaagcaggtatctgcttaggagataatctccaactcaggttccaacatggggggcaccggcagcccagcagttggttgcttgtctgtgctgagcctcactacccagggagatgaggatc

SEQ ID NO: 186552 - DNA, 122 bp, Homo sapiens
cccactgccgccacctcgacggctctgccggggtccccagctgttgggactggtgggccccggtctggggaggccttgactctcctacccaaatgcgggggcccctgcactgtcccggagcg

SEQ ID NO: 186553 - DNA, 122 bp, Homo sapiens
ggggcggcgcgattgtgaggtggcgctgacgcacgttccggggttcttaagcggccagggcggctacggcgactgcgacggcggcggcggcggcgatcgccgcgaggggtggtggggccgaa

SEQ ID NO: 186554 - DNA, 122 bp, Homo sapiens
gcactgactcactgcgcctgcgcggcctcccgcggggcaccacgggactagtggtccggccgacgtgggcaactcccgcccaacaaacgtcagactacaacacccaacagcccctttggcag

SEQ ID NO: 186555 - DNA, 122 bp, Homo sapiens
atgatccacactggtcacctggtatgagccagacatttcacccacataatatttaaacctcgcatctcaaccttctaaggtagatactatctttcttactttataaatgaagaagctgatgc

SEQ ID NO: 186556 - DNA, 122 bp, Homo sapiens
ggcttatccccagagaaaacatcctttcccaccaacactgcactaatagcccccagacctcgagtcaccacatcaggcgtaatgtagagggagaggtcaaccaagccagcccctggccccca

SEQ ID NO: 186557 - DNA, 122 bp, Homo sapiens
gtaaatgaaaattcgttttgtgacaccgaccacctccaaggaatgaaaggagcagtcagccgaaacgacagcattacttgcgtccttacctaattggaaccttatccgtggctgagggtgcc

SEQ ID NO: 186558 - DNA, 122 bp, Homo sapiens
cctggacggctgacctgtcaagggtggaggccctgggccgaccctctgcgggggaggatgcgggcgggatgcgggcacaccctcccggcgcggcgtgtcccggtggccttggcctctttcag

SEQ ID NO: 186559 - DNA, 122 bp, Homo sapiens
ttccggtccgctctaggattccaggtggtgccgtcttctcactggttgtgcaaacacctacggtaccagtaattctggggaggcaagtactctggaaacgacggagaattaactccggaatt

SEQ ID NO: 186560 - DNA, 122 bp, Homo sapiens
tcagccggcatgcaaacactcttggctacagccccatctccgagtgcgttcggctatttccggaaaccgtcggcatctaggctcaagtccgctaaattctagtgcccgtaggggtcgagatc

SEQ ID NO: 186561 - DNA, 122 bp, Homo sapiens
gaaggcacacgaaatgctgggtgttatcgtgggcatgactggagtgcacggtgggatgggcgtgccagggggaaaggacactgtaaacaaggtgtagaggcaggaaagcccaaaacctgttc

SEQ ID NO: 186562 - DNA, 122 bp, Homo sapiens
gatgagttggggactttgtgcagccggaagcaacctgagaggctccacaagccatgttcacgcgagggctccttgggcacaaatcacctgggggaattcatcacagtgaagattctggcttg

SEQ ID NO: 186563 - DNA, 122 bp, Homo sapiens
ttgagaaggttctgtccctggagcctggactgatagaagccacatcagcttcgcttatcacgctactgttctgacttctgattggccagatggagttcactaactgccctgattggtccatc

SEQ ID NO: 186564 - DNA, 122 bp, Homo sapiens
acggtgcccgctcctcccacctccccgagtgtgcccacggtgcccgctcctcccacctcccgagtgtgtggccaggcccacatcttatgtctgcgaacccagcagcactgagccactatcaa

SEQ ID NO: 186565 - DNA, 122 bp, Homo sapiens
tcagggaggaccttgaatgaagaacaggaggagccagaacagtgatgtcccatagaaacccgactccgctgtctgccctcacaggacccaaacatccctggcctaatgtggctcatcaaaac

SEQ ID NO: 186566 - DNA, 122 bp, Homo sapiens
cgcctccggcttcgggggtcctggattcggatgctaagatgcgggactgattggctggaacggggcagagactgctgaggtcaaccccgcctcgcccggcgtctcccgggcccggcttgtgg

SEQ ID NO: 186567 - DNA, 122 bp, Homo sapiens
ccatgagtttgccatgttgagcaggactatttctggcacttgcaagtcccatgatttcttcggtaattctgagggtggggggagggacatgaaatcatcttagcttagctttctgtctgtga

SEQ ID NO: 186568 - DNA, 122 bp, Homo sapiens
taaaaacagtcctgaatcaagcttgtcttctcatttctctcccagcaatcagcatgctcccgtccactacaataaatctgaaaagacatatatacccatttgcctgactaaactcaagacaa

SEQ ID NO: 186569 - DNA, 122 bp, Homo sapiens
aagatcacaacacactgcacaaggcagaggcaagatgtgagaatgaatgcaagtccttgccgggagtccccatgaccccatcagccacaggccggggcactgcaacagaggcagactgcaca

SEQ ID NO: 186570 - DNA, 122 bp, Homo sapiens
cgctgtcagatgtgtgtccaggaaaggcaaacaccaaaggcagaggactagtccctacaccgaatactccggtggccttgcttgggggctgggttttgacgtgctggaggctgtcctagact

SEQ ID NO: 186571 - DNA, 122 bp, Homo sapiens
cacgccccagcagttcatgggcaccaccttgccaggcgccatgtccttgatgaagacccgcggcctcaccagggatgggagcgccttccagctgcccagcggcgtccgcgggccctcctcac

SEQ ID NO: 186572 - DNA, 122 bp, Homo sapiens
actttcttccgtcgttccgaatccgggttcatcccacaccagccgcctccaccatgccaccgaagttcgaccccaacaagatcaaagtcgtatacctgaggtgcaccggaggtgaagtcggt

SEQ ID NO: 186573 - DNA, 122 bp, Homo sapiens
ctcgcgcaggcagcgggcgcgtgtggcccgggctgggcaagccgaggaacagcgagcccccggacgctgactgcaggacgtcccagtttgtgcccgggtctccgtccctccccgtacggggc

SEQ ID NO: 186574 - DNA, 122 bp, Homo sapiens
cacgaaaagtgtcaccaaagtactgtggccagggctgtagaatctttttctccctttctgcgcctattcaatatgcaccggaacgattctagctgctcttgccggaagtgtggctagcttag

SEQ ID NO: 186575 - DNA, 122 bp, Homo sapiens
aagtgtgtgctctctggagcctgtggagctgaagccaaaggtagttatcctcatcagtgtcgtggtgggtgagtcccctgagctggtcctctggaggcccgtttctgttgtttggtagaaat

SEQ ID NO: 186576 - DNA, 122 bp, Homo sapiens
cccacccagcttgtcatggtttacttctgattggatataactagatgataacagggatcacgctgcatccattgaggagaaagatgattcaaccctctcgcgggctgctggggaatcgatat

SEQ ID NO: 186577 - DNA, 122 bp, Homo sapiens
gaaggctgtgctctgagcgtggggttgccaagtcagctcccaaggcagctctggcaccaacgacccagagaaacaggcccagaggggagaaacgacagatatcctgacacgggagattgaaa

SEQ ID NO: 186578 - DNA, 122 bp, Homo sapiens
aacatcctgcaaagtgccattctctctatttggtcaacgatgagtatcgatcaactcaaacgtctattaagcagccacaatgaacacatctgtataatgcaaaagaatacaaagcccctgta

SEQ ID NO: 186579 - DNA, 122 bp, Homo sapiens
gggtggagggtgaagctcccgggagctcattggcactagaggttctggccacgccctctccgcgagtccagtcccacgcgggatgaagagggcaccctccgccaagaggctgctgcgggacc

SEQ ID NO: 186580 - DNA, 122 bp, Homo sapiens
ggtgtggcgccctgctctcagcccgaggtcactgcctgtcctgagatggctgctccctgacgcacccgacttgagtcttccaagcccccttccaggttgctctacgctcacattgcacagaa

SEQ ID NO: 186581 - DNA, 122 bp, Homo sapiens
gtgctgtgctggttgctgcgaatccagcagagaacaaggtcctggagttccctgacctcccggtgtcacaatccaacgagaggagacatagagtaaacaagcaaacaaaaacacatacacaa

SEQ ID NO: 186582 - DNA, 122 bp, Homo sapiens
gtggggaaataaaggccacaggtgggctcctgcacaatctaggggacttgagactttccccgagtgctgggtgggtgtattctgtcccacacctttgtctccacacactccactctgctttg

SEQ ID NO: 186583 - DNA, 122 bp, Homo sapiens
ttgcccagcactgctctcacaacacccgccctggggccggccatagggtgccctctgctccgccttctgctcttgcagcacccgccccggggccacctcttggtgcctctgcccagcccata

SEQ ID NO: 186584 - DNA, 122 bp, Homo sapiens
agcaccagagagggagggataaaaattacacagtcttgcagataagcagggcccatttaccgggcactgatactcttctattagctctagagggtctcaactttcgctgcacactggaatcc

SEQ ID NO: 186585 - DNA, 122 bp, Homo sapiens
aacaggtgctgacagcagttccaaaaagttgaatgaatcaccttaaccttccagcaacagcgaatgcgagtgtaaaatattatcacctcaccaacactgtattttttttttttttaactctt

SEQ ID NO: 186586 - DNA, 122 bp, Homo sapiens
cggtgacctacgaggggcggctgggtggtggccattgggcgacggcgcagggtcaagggccgggctctgggatcgtggggagaccgggggtcccggagccccccagccccgcaggccactgc

SEQ ID NO: 186587 - DNA, 122 bp, Homo sapiens
ccaggatcatggcccctcggatggcagtggctacctcctcggagcacttaacacccagaccgacgtggccactgtagtcccctgtggccaccaacgccttgaacctggtgcactggccagca

SEQ ID NO: 186588 - DNA, 122 bp, Homo sapiens
atggggattagaaacaattcatgtcaagtgcttggcacctaagaagtgctcaataaatagcgactgtaccacacctcctaggagccctcagcgtactgaattagagttctctataagtctcc

SEQ ID NO: 186589 - DNA, 122 bp, Homo sapiens
cgaggcaggtggatcacttgaggccaggacctcgagaccggcctggccaacatggcgaaacgctgtatctattaaaaatacaaaaattagctgggtgtggtggcacacgcctgtaatctcag

SEQ ID NO: 186590 - DNA, 122 bp, Homo sapiens
ttaaagacatataaaactgccaatttgagcttctgatgattctaagaacatcagtgttaccgtccttagtatcaaataaatgcaggcaaaagcacaagactacggagttttatttagcctga

SEQ ID NO: 186591 - DNA, 122 bp, Homo sapiens
ataagagtcggcaacttattaactatcatgtcatcattactctgtgttattgtccatcaccgttaaaggagttggtactaaaatagatcaaagaagatgagaattgccattagtgtgattac

SEQ ID NO: 186592 - DNA, 122 bp, Homo sapiens
ggaaatgttgctttctttgtcccttttttctacaccaacataaatgataattgtcactttcgcttgttaattgactaattatgttttggttccataatgtgccagtatttgcatttttagtc

SEQ ID NO: 186593 - DNA, 122 bp, Homo sapiens
gcgggccggggatcccgagcctcacctcacctcaagcgaagggcagcgcgcgggcgcccgcggaagagcccagggagcatggctccatgtagtccctcccggaactttcctgacatagcact

SEQ ID NO: 186594 - DNA, 122 bp, Homo sapiens
aaacattttaagctttctagaacaaggcacgagacactgcttagaaccctgtatccccggcgtacctttctggcagtgactatgagtccaacatcgttcgacaaactgcccgttgatgacgg

SEQ ID NO: 186595 - DNA, 122 bp, Homo sapiens
aaagaaggaggagtcgcctcctgaaagtgggggagctttggtcttccttgccctgccccgcgttcaagtgatacacaacatgtggatgttgagatggattttctcctcaaatgatccctcca

SEQ ID NO: 186596 - DNA, 122 bp, Homo sapiens
ccagaccttctgcacaggaagctggcttgcatcatggaggcagtggactcctgatagtcccgcctgcgcaggcccctttaagacactgacacaaaagactgcccagagtggcatttgctgct

SEQ ID NO: 186597 - DNA, 122 bp, Homo sapiens
tatccgtttgtttgtttgactcctccaatagactataaactcttgaaggcatgttctggacggttcttattcaccaaatgtcccaagagccaagcagctaataagcacacaaatgtgcatgg

SEQ ID NO: 186598 - DNA, 122 bp, Homo sapiens
gggaatcgtagtgctcgctacacggtgccctctgcgcaggcgcacaccgagagccacttccggaacaagcgtcgcgtttctgaggagaaactcttggtgagaattcccagagtgataatggc

SEQ ID NO: 186599 - DNA, 122 bp, Homo sapiens
agggtgccaggctgtagtcagggtcttgctgtgcccacccactagtgcctcaccttgaagcggcggtcgtacttggtgaccgaatcggcgaagtccacccgctccctcttgcccaggaactg

SEQ ID NO: 186600 - DNA, 122 bp, Homo sapiens
cagatggggtttcaccaagttggtcaggctggtctcgaactcctgacctcaagtgatccacgtgactcagcctgtcaaagtgctgggattaaaggggtgagccacagcatctggccaaaacg

SEQ ID NO: 186601 - DNA, 122 bp, Homo sapiens
cccccgaaacctgcgggagccctggaaccagactggcggctgcgggagtgaggctcgctccgcctggccagggacgcggccggcggctgcacgagtcaggcttgctccggctggccagggac

SEQ ID NO: 186602 - DNA, 122 bp, Homo sapiens
gtctgtctatgggggcttgccccaggcttggcttctcctatccaacacattcctactggccgcccctccccgcccccagagcctcctgtataaacagaggctctgactcagttggtctctta

SEQ ID NO: 186603 - DNA, 122 bp, Homo sapiens
gcccactgccctcctcccattgtttcctcaattccctgactacaaaataccttctaaatgcggatggcttgggctgtctcagaggcttcagcaggtttcccatattggttagctcatcagag

SEQ ID NO: 186604 - DNA, 122 bp, Homo sapiens
aagggtgagagtccagccaatagtgcggtagggcctgaattagaacgacttccccacttccgtcgggttccacccatgcgctttccccaagccttttctttgcctacttgtcctccatcttg

SEQ ID NO: 186605 - DNA, 122 bp, Homo sapiens
gttccatagaactagattgtgtctgaatcattagtaacttggaagtggttacttttagttcgacctccagaaatgaatgagaaggtgacaaacagaagtgaaatgagaatttttaccttttt

SEQ ID NO: 186606 - DNA, 122 bp, Homo sapiens
ttttaatttattttcatcttttttagatgcctcagcactaatgatcatgatcagagaccccgagttctctcgtgctgctacgcttcgcaacacatagcacaaatggaatatgtgttgacaca

SEQ ID NO: 186607 - DNA, 122 bp, Homo sapiens
cgctggagggcgatgggagctccacacaggtgggacgagcctagcaggtaaaccttccaccggcccgagctccgcgacgccgcgcccccagccccgccccgccttaaaaaaaaaaaaaaaaa

SEQ ID NO: 186608 - DNA, 122 bp, Homo sapiens
cgaactcctgacctcaggcgatccgcccgcctcggcctcccaaagtgctgggattacacgcgtgacccaccgcgccgggccaaagtctggctagtttttaaattttttgtagagacaagagt

SEQ ID NO: 186609 - DNA, 122 bp, Homo sapiens
agccagaggtgagggaacagcctcttgctacaaacatctctcctccggtcgaagggtggacgagatggtgatcctagagagcataggggaaagcaaaagaaaatatccacgggtagaggact

SEQ ID NO: 186610 - DNA, 122 bp, Homo sapiens
cagtgttggcagtcgcggctgcgagatttgggcacttttgggggtgccggtggcccgggccgatggcgcaaggttgggcaggattctctgaggaggaactgaggagactaaagcagactaaa

SEQ ID NO: 186611 - DNA, 122 bp, Homo sapiens
cacttctccaacagccgcctctcgcgcgcgcgcgcgcgccgcccgccgcccgccgctccgcggtccgccttcagcaagggactcctcggcggccacagcagccacctcctccacctcttcct

SEQ ID NO: 186612 - DNA, 122 bp, Homo sapiens
gggcagcctcagagaggcagaaccagcgggagagccggcttccctgcagctgggcaggcccgtggccagggacagcccttgctgtctccggggtcacctggtgcctgtttccctgcaccgtc

SEQ ID NO: 186613 - DNA, 122 bp, Homo sapiens
ccgcctcggtcttcccaagtgctgggaatgcaggcgtgagccaccgcgcccggcccaatccgcagattttaagcggggacgacttaaaaacaggattgctgagctgcgacgaggggggctgc

SEQ ID NO: 186614 - DNA, 122 bp, Homo sapiens
aggggtgaatttctgaagccagttcttgcacgagcctgaagctccagggggactcaggcccgagcagccagaggtcagcatctctgtttccatttttcctataaatggcagtccaactaggg

SEQ ID NO: 186615 - DNA, 122 bp, Homo sapiens
tgtttattttaggtcaaataaccccataaatacgtaagtaaataaattggtcacttgcagcgatcgtggggtgggggagggcacagcgccctgcagcgcaggcgacggaaggttgcagaggc

SEQ ID NO: 186616 - DNA, 122 bp, Homo sapiens
ccgggtgtaaacagaggagcctcagcctatcatgtctggccgccgcgcgcagcccgagcccggagccaggcgctgtaacacgatacgctccagacccaggcaacttggcagcgctgggctcg

SEQ ID NO: 186617 - DNA, 122 bp, Homo sapiens
gccatttacttctcccaggaggagtgggagctccttgatgagatgcagaggctcctgtaccgcgatgtgatgctggagaactttgcagttatggcatccctaggtaaggccctcctattcct

SEQ ID NO: 186618 - DNA, 122 bp, Homo sapiens
cttctcatggataacaggattataaacacaatttctttccgaagctatttcacaggtcttcgaagcccacctaccactgtcagctgagcagactgtagttacgtgatgggacaggagccaac

SEQ ID NO: 186619 - DNA, 122 bp, Homo sapiens
gaaggggggccttacattatttgctaagcatcttctattgtacccccatttgacagatgacgacacacagcccaaagcagtgcagtgacctgctgcaggtgggcacttgtgtttgattccat

SEQ ID NO: 186620 - DNA, 122 bp, Homo sapiens
tctctgtccccccaccactggccgtgtcactacctccagctcttggtgacagcaggacagcgcggtcctctccactgccctccactgtctctgctgtggccctttctctccccttaaactgg

SEQ ID NO: 186621 - DNA, 122 bp, Homo sapiens
ttctggcccacgtcgctgaggtccgggtgcggattgagcttggtgggcagggtctgctcgcgacagcccccgctagacaggagttcgcgctccttggagttccgccatttcatgcgtcggtt

SEQ ID NO: 186622 - DNA, 122 bp, Homo sapiens
acccatgcaaacctgtgctgccagtgacttccaccagagggcagcggcagcaggtgccggcgctggggcaggactgggaggagtctcactctgggggcgcctggttccccgtggctctaata

SEQ ID NO: 186623 - DNA, 122 bp, Homo sapiens
ctgtcagcttcctggctatttctgccctgcctgagcctgaggatttagacatcactttcacgtaaatgccataaatgccagcttccaggtctctccacacattaatgacattgtggtgagaa

SEQ ID NO: 186624 - DNA, 122 bp, Homo sapiens
ctatctttacccgaaaagccagcgctgagaccacaactcccatcaccctgcgagcaccagcgccttcagagcgcatcctccgaggggcaccagcgccattgaccaccctgctggccgaaggg

SEQ ID NO: 186625 - DNA, 122 bp, Homo sapiens
gctgcagcgagagacaaagaccccgccacatcccggaagccgccctttccgctccaaccgcgtgcctgattggacagttcccaggccagcgtctctgacttgttaacgtttaagatccctcg

SEQ ID NO: 186626 - DNA, 122 bp, Homo sapiens
ggggttggccaggaggggccattgtgtgtttctaggcggcgcccccgctgcctaggcaaccgcgcaggaaggtgtccggccacctgcgcgcgccgccggctcccctccatttccccccgact

SEQ ID NO: 186627 - DNA, 122 bp, Homo sapiens
agagtagaggtggccctgggagccctgcgtggtgattagaacagaaccacagctgtttctcggggatcagagataactgtctgtagctatgccgggcttacctacgtggctgggggtctcac

SEQ ID NO: 186628 - DNA, 122 bp, Homo sapiens
ccatgttaggtctgaggcggctgccacaggcgcgacggatactgtggatcgcctgacagccgcctggggtccgccgctctgcgagcgccgggagctgcggtggcaccatgagcggggtcacc

SEQ ID NO: 186629 - DNA, 122 bp, Homo sapiens
gcatctccaggctgatgtacaggatgcgctcgtaggtcatggctatccgccagtcatccgcgccattgtcgatcacgaagagctggtgggagcagaaagtccattagtgtggccaggaccag

SEQ ID NO: 186630 - DNA, 122 bp, Homo sapiens
gcggcaacagaaataagggaggaccccgcaccctgctgtgaatggaaatgcgatgaatgacgtatttaccagtaggactccaaaaccatcaggtgcttccattaggttctgcctgaactacg

SEQ ID NO: 186631 - DNA, 122 bp, Homo sapiens
gaggggggcctctgcccgggggccgggctctctggggccgccgtcgcgccgccccctccccgcaccgcataccttgcccacagccgagcagctgggaggctatttataaaggcgggtgagat

SEQ ID NO: 186632 - DNA, 122 bp, Homo sapiens
ctcactagttcatcctttgcccccagtcagcaaagtcatgtgtgtggtgcctcaagtttccgtagtggtgtggatctgcagtggggctgcttttcctgacctattggccaggcttacctttc

SEQ ID NO: 186633 - DNA, 122 bp, Homo sapiens
cgtggggtctcctgtggctgtgggactctcccacggtgtccggcggccctgtctcctgagcgtcgggtttcgtcagttggattcagacccgcgttcctcctgaaaaggatcggaaagctggg

SEQ ID NO: 186634 - DNA, 122 bp, Homo sapiens
gacagagcgaagaaggggcagttttacccaagctcgccaaccccactccctcccgtagtccgcagctgctgccgcttcccggtggaccccaatgcagttacctgccctagctcgctccggat

SEQ ID NO: 186635 - DNA, 122 bp, Homo sapiens
ccccagccgcattgctgggcttctgttgtttcgaaccaagacactggctcccgaatttgccgaagttgccaaacatccactgggacttgagctctttgctgacctcctgtttctttccagca

SEQ ID NO: 186636 - DNA, 122 bp, Homo sapiens
tcatcagactagacagagctgggggcatttgaagatgcagacttcacggaacgttaccaacgttccacgttatcacggaaagttaccaacgttccacgttaccacgttaccaacatgcctcc

SEQ ID NO: 186637 - DNA, 122 bp, Homo sapiens
caaattcccattcttagtcttctaaatgattagctgagctgcttttccccactgattaatcggaataaaatgctcattaaccaaacttccctcctttccccaggtccctaaactttcctgag

SEQ ID NO: 186638 - DNA, 122 bp, Homo sapiens
ggaagaccaggatgggtaagagctggggctgtcccatttcatcatacataaggtggcaatcgctgataccaaaatctgagcacctgggaactttctttgtatggcaggcttccaggaagaga

SEQ ID NO: 186639 - DNA, 122 bp, Homo sapiens
agagactcccatggcccctgtgcccctgggcccgctgggagaaacttactgcgaggagcacggcgagaagatctacttcttctgcgagaacgatgccgagttcctctgtgtgttctgcaggg

SEQ ID NO: 186640 - DNA, 122 bp, Homo sapiens
ctggccaatgtaagtgctcatttacctccacattccaccgcctgtgccttggagggggaacgtgcgaagcagcgttaggagccgggaaaagggcagggctactttactttgtctttgcgctt

SEQ ID NO: 186641 - DNA, 122 bp, Homo sapiens
cacgctcatggtcagtgcccgctcctccctgccacgggcatcagccatcaaggcactggacgtctacttctggatctgctatgtcttcgtgtttgccgccctggtggagtacgcctttgctc

SEQ ID NO: 186642 - DNA, 122 bp, Homo sapiens
tctaagtacattagagtcaggaacggcgctttccagcgtccgccatttttgtggcgtcaccgcgtcgctgctacgccatccccagcgcagtggctgccgcgctcctgtcccagtgtcccccg

SEQ ID NO: 186643 - DNA, 122 bp, Homo sapiens
ggcaggggggctaggggacagcagtgtgtccaatgcccaccctttttcttgcaggtgctccgaaccctgggttatgtggacgaggcgggcactgtgaagctggcagggcgggtggcttgtgc

SEQ ID NO: 186644 - DNA, 122 bp, Homo sapiens
gagtagatcgggcttgtgacacctgtgtgtgtaccttcactcaatattatctttctggaacggagcagaaaaaaataaacttcaattaggtgaaagtttgtgtatttgctcttctcttagca

SEQ ID NO: 186645 - DNA, 122 bp, Homo sapiens
aagggtacatagttctcaagaagttttgctgagcacatctgtaatcccagctatttgggacgctgaagtgggaggactgcttgagcccaggagttcaagaccagcctgggcaacatatcgag

SEQ ID NO: 186646 - DNA, 122 bp, Homo sapiens
agaacttttctcttcccaaacagtagcaggggggaggaggctgggggaccctcctagaaacgagctttggcgtggtttggcttcgtgatgataatacattctcatttagccttaatatgagc

SEQ ID NO: 186647 - DNA, 122 bp, Homo sapiens
tcccagcccttcctaacttgcaggtcataccaggtggagctgggggccatcttccaggaacgtgcatccccagaggtggatagaggaggggtaccatttccacaggacacagccaaggacct

SEQ ID NO: 186648 - DNA, 122 bp, Homo sapiens
caagagaagccacatgcaaatctccctccctccaaacaattctcccttagagggcatccgcgctcccctggggtggcagtcagcgagaagtttccgtgtaggttctccccaggcttaaacag

SEQ ID NO: 186649 - DNA, 122 bp, Homo sapiens
ggcgggcagccgcagagcagcacgctgggccttggctccggtagcagcaagttcgaaccccgctcctgctccgcttcggttctcgctcctcggcccttgggcctccaaacaccatttcctgg

SEQ ID NO: 186650 - DNA, 122 bp, Homo sapiens
tatcctcaataaattgaagacaatagaacagtgtatcatgcctctgcaccccagcctgggcgacacagcgagactctgtctcaaaaacaaaaacaaaaaagaacagtgtgggaagtttttta

SEQ ID NO: 186651 - DNA, 122 bp, Homo sapiens
gactctaaacagcgtcccaccgggaattgttgtttgagtgataaagaactggtggggcctcgcgcaagactcaagcaagccacagaggcccttctcggcgaaatggaaaattcatcaaggca

SEQ ID NO: 186652 - DNA, 122 bp, Homo sapiens
aacgggaaagagcagctcttggtttcttggggctcggtagcatgacaacacaagggtaaacgtttcgaaaggcggaccttctgagtggtgtgtgctggaagacactgaagatggagaaaaaa

SEQ ID NO: 186653 - DNA, 122 bp, Homo sapiens
gaactcgatggagaagcacatcaacacttttctgcagaacgtgcagattctgctcgaggccgccagctacctggagcagatcgagaaagaaaacaaaagtaagtttgggggcccctgctctt

SEQ ID NO: 186654 - DNA, 122 bp, Homo sapiens
ctcctacttctctagcgctgtggctcactgaagcgtactacgccggatgtcttaagatatcgcgagacctttacctctggtttcttacacatcctttagaaactggaatttagcgagaatac

SEQ ID NO: 186655 - DNA, 122 bp, Homo sapiens
gcctgctggtcatcacttctgcgatcatgctttcatctccactcaattacgtcgcctccgcgtacttctgggctgctggtttatcatgtaagaatataatttaaaagtgatccgcccctcac

SEQ ID NO: 186656 - DNA, 122 bp, Homo sapiens
agtaatcccggctcactgcagccttgacctcccaggctcaagcctcccacctcagcctcccgagtagctgggattgctggtgcgttccaccgctctcagctaatttttgtattttttgtaga

SEQ ID NO: 186657 - DNA, 122 bp, Homo sapiens
tcactcgcatgctgatattcctgaatattctagtagaaatgacaatataatagtgatttccgaactggaaattgagttcacatgatgatgagtccaaatctcaatttctagtccagaacttc

SEQ ID NO: 186658 - DNA, 122 bp, Homo sapiens
ggatgctttgacttccaagtaagacccaaaagaactagctcaacaggaagccactcccgtcgcctgccggcttctggctagcagcgcagaacagctgcagctgactccagcggccaggctgc

SEQ ID NO: 186659 - DNA, 122 bp, Homo sapiens
agcaggtaaatgggagagaggcatcaggtgaggtattggggggtggggacttggggcttccgtgccccctctgggtgtgccatcctcccagcaggtcagtgtgtttaagcgtttatggagct

SEQ ID NO: 186660 - DNA, 122 bp, Homo sapiens
ctatgcatgtggacagggactgcttagacccatgcacacagcttggtttctagccagatccgtgggactgtgggtgaattctttccttcaacagcattgatgctgctataatgctgtctgtg

SEQ ID NO: 186661 - DNA, 122 bp, Homo sapiens
aacatagtgataccccgtctctacaaaaatttcttttaaaaattagccaggtcggctgggcgcagtggcttacgcctgtaatcccagcaattcaggaggccgaggtgggtggatcacgaggt

SEQ ID NO: 186662 - DNA, 122 bp, Homo sapiens
gagaccagcctacagccgcctgcatctgtatccagcgccaggtcccgccagtcccagctgcgcgcgccccccagtcccgcacccgttcggcccaggctaagttagccctcaccatgccggtc

SEQ ID NO: 186663 - DNA, 122 bp, Homo sapiens
tgtctcctctcccgcaggcagatggccagggcggcccgcatgggcgagggcacaggaaatcggacaccgccaccgtcttccccagcctggcctagctcaggctttccagtccgccagcccgc

SEQ ID NO: 186664 - DNA, 122 bp, Homo sapiens
ctcccaacgtgtttttcaaatccaccaatgggcacacagcttaggctcgaaccagccaatcggaatgcggagtcaccgggaaatttaaatcgcgccggccggctgcacgagccacacggtct

SEQ ID NO: 186665 - DNA, 122 bp, Homo sapiens
gattagttgggcattccgtttctgaacgatttggatcttccagatgaagaacgtcatggccggaggagtcgggggacttgttcacctgtggtctgtaaccagccgggacataaacccaggcc

SEQ ID NO: 186666 - DNA, 122 bp, Homo sapiens
ggggcctctacgagccgcccctggcgaactccattactggggggcctctacgagccgccccggtgaactccattgtcggggggcctctataagccgccccggtgaactccattgtcggaggg

SEQ ID NO: 186667 - DNA, 122 bp, Homo sapiens
ctccggcctcaccctcctgcccgtcgcccgtcccgcagcgccgctcgccggtgccgccgtcgtgccagtcccccagcccgcagcgccgttccccggtgccccccagctgcccggccccgcag

SEQ ID NO: 186668 - DNA, 122 bp, Homo sapiens
cgggttccctgcattgtcaccaaggccaacctggaggagggacaagcaggaggccttgcccgggccacaccctccctgtgggcaggcccctgtcagctgccttccaagcagaggcaaaggca

SEQ ID NO: 186669 - DNA, 122 bp, Homo sapiens
tagcgagtgtcgggagaaatcatcactacgaattcgtttccatataggggcaacgccaggcggggcacaatgatctgtccttgaggacaaagagtgattccggagagagcaggtttttgtcc

SEQ ID NO: 186670 - DNA, 122 bp, Homo sapiens
atgatgggtttggttttctaataaaaagactactatcaaagtggcaggaagtcttgttcacgcaagtctttaaaaactgctgcagtaattcaggccagcatttagtaacatcacaaccagga

SEQ ID NO: 186671 - DNA, 122 bp, Homo sapiens
gcgctgctttaacctgctgcgtttcgggtggtttagttcccgtgttgtgcgtggacgcatcgtggcacgggggattctgcccagcaactgctctgtgttctgagacactaaaggccagtgca

SEQ ID NO: 186672 - DNA, 122 bp, Homo sapiens
aagcacacagccgctgctataaatgttaactaacaaccatcttcagcacatcaaatgtcccgccctcccttttgcttgcatatagacacccacagagatgcccgttctttttctactagttt

SEQ ID NO: 186673 - DNA, 122 bp, Homo sapiens
ggattgcccaggggcggggcgggatcggggacaaggctcaagtgctgaggaccagacatgcgccggaagcccaagcccggctagcgagtaggagggtggatggtgggggatgataggctagg

SEQ ID NO: 186674 - DNA, 122 bp, Homo sapiens
gcggagcccgcggtgactaaggcacatgacactcagtcgctggtggttctggcctcaagtcggcgtcttgtagctgcgctgaagcctgccttatctgcgcagatttctcagtcctagtgctg

SEQ ID NO: 186675 - DNA, 122 bp, Homo sapiens
cctcctccctcctccccgggcgagcgaggctggccaacggctcgctgagcgactgcgttacgttgttttatgtcaagttagaaaacaaatgaccgaaggctctaaccctgccctcccgctaa

SEQ ID NO: 186676 - DNA, 122 bp, Homo sapiens
gcgaggcccagagttctggccctgggaggaaacgcatcccagcctacaaaggctccggcccgaagaatggcctggcgtgtaattcaatgcaggcccagtgaccacactggagttgtagcctt

SEQ ID NO: 186677 - DNA, 122 bp, Homo sapiens
ggctgcctctgcaggcctcacaggtttagctccatgacgtggctccccctgctggtggcacgtggtaccccccggcctcttagaatgccggggttttggtttggcactggtgcagcctggca

SEQ ID NO: 186678 - DNA, 122 bp, Homo sapiens
ggggccagggccaggccgagggcgcgaggtggcagccggcccggggaggcggaggctgagcgagcggtggtgtttgtggagctgtcggctgcggtggaattatgaaaaatagcaggcatcgg

SEQ ID NO: 186679 - DNA, 122 bp, Homo sapiens
cctgctgcttcgagcaggggaggctttgcactcccatcgcacttttctcgtccgaagatacgaaactccgtccgggcgtcgcaaataattcgaattcggctctctgacacctacctcggcgg

SEQ ID NO: 186680 - DNA, 122 bp, Homo sapiens
tccccctgcgcacctgctcatccaggcccccaacgatcaccaggtgcgcgctggcatctgcgcagtgatcctgcgccgccgcccacgtcgtctttggcacagagaaaaagtagcaggagccc

SEQ ID NO: 186681 - DNA, 122 bp, Homo sapiens
gtccggaaaattaaactgcgaaaagataaacattatttccagtcggctttgcgggattaacgcttgtaataaagagcattagctggaggtttctttcaaggcactctcgaccccacccccta

SEQ ID NO: 186682 - DNA, 122 bp, Homo sapiens
cggcgagatctgcttctggatctttgagaagaaacggatcttctttttggactcctggaacgtgaacgacctcgtctaggactcctagagtgccttctattccagacaggtctataaccacc

SEQ ID NO: 186683 - DNA, 122 bp, Homo sapiens
caaaaaccgaacagatcctaggcatcaaggggtgtgaatttcgaggtaggctccgttgcccgggctctgagggtcagggttcccggcggttgggcctgggacggcgaagcccccgctccccc

SEQ ID NO: 186684 - DNA, 122 bp, Homo sapiens
ccatagacgcaaatttcaccccccagaagacagttgtgcaagggcaaagctgcagccattcgaaattgccaaataaatatattttggaataaaatattttaattgctttcacctctattaaa

SEQ ID NO: 186685 - DNA, 122 bp, Homo sapiens
catccatccctgtgtccacctcctgcctctaccatggccaattagccaggggaaggccttcgacttgagggcagagcacaggaactagctagcatgctgtgaagaatgtaaccagacccctc

SEQ ID NO: 186686 - DNA, 122 bp, Homo sapiens
gcgtccgggtctgtttatatagcgtctggaggccgggaggcattgcccacccccgccaggcggcccgccctcccctcctgggctccgggctgccgcacgtggcagacaccagcgacgtctcc

SEQ ID NO: 186687 - DNA, 122 bp, Homo sapiens
ctttctaagataaagaccctttggataaggactattggtgatgctcggattccctgtactcgctggcttcattttggaaaagggagtgaagtttttctttactccctgaccctaccctgaaa

SEQ ID NO: 186688 - DNA, 122 bp, Homo sapiens
ggggccgacctcgccacgcccccggcgtcctggggtccccgaagtccctcccggccgcggcgtgggcccttctcctgggcctgcaggggaccgtgcttccccgccaaaccctttgcgccccc

SEQ ID NO: 186689 - DNA, 122 bp, Homo sapiens
cgggaggattcccaagtcagttctctctggctccaaagcttagactctttctttcacacccgcacattccagtcgtttcacagaaggatgactcagaaattccctcagaaatttaaaacacc

SEQ ID NO: 186690 - DNA, 122 bp, Homo sapiens
taaaagaaccgggatggcaaaaggcgagttatctcttggaattaccctggaattagagcacgttcttttttgcactaccccgagggcacagtttgtaagaacggaatagagcggcgagcagg

SEQ ID NO: 186691 - DNA, 122 bp, Homo sapiens
atcccctccgtcacctgctccacgtaactttccagctaagctgtgcattgcaagtttacacgtggatctacagtttcatctgaaacagccgaggaagtcatggtttgtatatctctggcaat

SEQ ID NO: 186692 - DNA, 122 bp, Homo sapiens
ggcttcaccctgggctactctcagaataagagaagctcgagtgagctgggatagtgctgtcgtaatttcctgccaggtggactgagtatctggaaagccagtctgcaggatgggttctgagg

SEQ ID NO: 186693 - DNA, 122 bp, Homo sapiens
gcactcaccaagctcatctcagaccagatggcctgctttcacttccccaaatcagggactcgaatgcctcgagattctgtccacactgcggcccccacccccgccccctcaccacccaccac

SEQ ID NO: 186694 - DNA, 122 bp, Homo sapiens
gagcagctgcaggcacacgcctggcttccagcagagccttgcaggtggtggcgagggtggcggttcttactgttcgagtagctcagccctgctgccctctgtggtgatgaggcaagagagcg

SEQ ID NO: 186695 - DNA, 122 bp, Homo sapiens
aacccacgctggctcccgcctgcacctctcccttcacacctccctgtgagcagagggagccggctctggcctcggccagccccagagaggaggcccctacagtgcagccgtgggctgaaggg

SEQ ID NO: 186696 - DNA, 122 bp, Homo sapiens
tactaccctgaaatagagttcacatctttctttaccaacttgcctttcccaggaagacatcgtggtgggtttgcagttcaggtttcctcacagcctctcctgggggtctttttccctctctg

SEQ ID NO: 186697 - DNA, 122 bp, Homo sapiens
ccatgtggtctgggaggaaaactagtgtttctgctgccgcgtcggtaagcgcaactattccgatcagcagggtccagggaccgttgcgggttcttgggcaggggttgtttctgctgctgcgt

SEQ ID NO: 186698 - DNA, 122 bp, Homo sapiens
aaagactgtgtcattatcgagctgcagatcgtgtctgcgggaatccgacttgcaaagcagcgcaggactctgggaaagaaatctttatttttcccgcaggggtttttagagcctctcggccg

SEQ ID NO: 186699 - DNA, 122 bp, Homo sapiens
caaggtgcagtgggcgcctgggctgctccaacaatttcttcgcttctatttctagacagacgccagttacactccaaaagtgcccagcaacttccctcaattacctttgtaattaatatgta

SEQ ID NO: 186700 - DNA, 122 bp, Homo sapiens
atcaggggccctggtacctttcagccgcggccggtctcacggcctctggaccctgagagtcgtgggcgttcagggccgactctggcttttggcctcagagtacagtcctccgcctcctcgcg

SEQ ID NO: 186701 - DNA, 122 bp, Homo sapiens
gaattttagatttcaccctgtatgtgtccctagcgtgttttaataaaataaattgcttcacgttatattggtatgtggatttccagatacacttctcaccatttaattcaaatgctccccac

SEQ ID NO: 186702 - DNA, 122 bp, Homo sapiens
tgtatatccgagacatccctaggtcaccaccctgaacgcaaaatcaaaagttttggtacacgacagtgtgaagaaatgacactagacgcaccaggtgacatttcactccgacttgcaaaacc

SEQ ID NO: 186703 - DNA, 122 bp, Homo sapiens
aagaacctcttcctgaagctataagcaaacttacagctgatattaaaaagttctgaaatacgttattcagcatttttgcatacaaagtatacataaattacacatatcagtatcaactcttt

SEQ ID NO: 186704 - DNA, 122 bp, Homo sapiens
ggcccagatcgccaagcagcggacccctgcggtccgccatgccactcccggctcctagagcgccgctcagcacaccgtgagcgcccaataactgttgggcttcaatgacgccgcggaggcgg

SEQ ID NO: 186705 - DNA, 122 bp, Homo sapiens
tgcgctaatggcgggctgcatccaggaggcccgtgagcgatggaacttcgactttgtcaccgagacaccactggagggtgacttcgcctgggagcgtgtgcggggccttggcctgcccaagc

SEQ ID NO: 186706 - DNA, 122 bp, Homo sapiens
aaggcgattggatgcggcggcggcggcggatcccggagagccccggagtgagcggagtagcgagtcggcaacccggaggtaggaaacaattcagttaacggaaagaaaatgtctctcttctc

SEQ ID NO: 186707 - DNA, 122 bp, Homo sapiens
gaatgaacgggcaccgcctaacgagttgggtcagatggaggcgtggctcagagatgtcagcgtcaaggccaggtcgacgtgacaagccgggtcccgccctgccctcgggtgcatggacttcc

SEQ ID NO: 186708 - DNA, 122 bp, Homo sapiens
ccgcgtctccaccaaaaaaaatatgaaaaccagtcaggcatggcggcgcgtgcctgcaatcgcaggcactcggcaggctgaggcaggagaatcaggcagggaggttgcagtgagccgagatg

SEQ ID NO: 186709 - DNA, 122 bp, Homo sapiens
aataggcacctccagctacagcaaataaacacattcaaagtaaacaatgggggccaagtgcggtggctcatgcctgtaaatcccagcactttgggaggccgaggtgcctgaggtcaggagtc

SEQ ID NO: 186710 - DNA, 122 bp, Homo sapiens
atatctaacagatacagattttttacgtaaccataatacatgatccccctagcaaattaacgatataattcagtacccagaccatttccgtttatttcaatagttaaaaactgtctttttaa

SEQ ID NO: 186711 - DNA, 122 bp, Homo sapiens
cgcagatgctgcacctgtgagctggcagggaggtgcgctccggagggaggccttgcgggccgggcccccttgctcacaggctcacagctgcctggctggctcagtgactcgcctggcacagg

SEQ ID NO: 186712 - DNA, 122 bp, Homo sapiens
ctctgctaactggaggcgccggctccacgctcggcttcatgtgctttgcatacggctctgcgctttcatgtccatctccatccagtggctcacggagtcgcttgctggctttcgcctccgat

SEQ ID NO: 186713 - DNA, 122 bp, Homo sapiens
caggcttcgatggctccacaaaggttgcgtgctggaccaaccccacacctcctgcttccccgtcgcaccgccctggccaggttcacatggtttcatttccagagatgctttgctcttcgcag

SEQ ID NO: 186714 - DNA, 122 bp, Homo sapiens
gccctcccgcccggggcaggtgtgtgtgggaccgcgctaaacctgcggtcctcgcctcggcgcaggagcagagctgaacccccagtcaaagtcagttcgcgttgccgacctggcgacatctt

SEQ ID NO: 186715 - DNA, 122 bp, Homo sapiens
gctttggccatgtttcacggggagttgttggattcccacaaggaaacggccaaatgggagcgtaggggggtatctcggcccaatttgggcggcggggtcaggaggcagcctagaggaggcct

SEQ ID NO: 186716 - DNA, 122 bp, Homo sapiens
ggcctgggaggtggccggcagctgccacttcacagaaccagaagatggaaggcccaagggcggaggagtcaggactagactcagttgggtgggatagaaaatccattcccccagcagcacag

SEQ ID NO: 186717 - DNA, 122 bp, Homo sapiens
ctgcagggtcttcagccgcccccagagggctgtcagaagtctccaactcttgagttccggcgtgccccaacctctgtttccaaatttttccagcggacgcgcgcccttttctgggaaccctg

SEQ ID NO: 186718 - DNA, 122 bp, Homo sapiens
tgagtccccagccctggtcccgcggcgctccggggagggagggacccgcagccacaggggcgcgccccgctccggcctcgcctgagaactccaggagctgagcggattttgacgccccgccc

SEQ ID NO: 186719 - DNA, 122 bp, Homo sapiens
gacagaaaatgcaaggctagttcaaaccaaacaacactcaggtgctccagtgttgggaatcgttgagttggaagagattctagaattcatctggcctaacctcctgttagaatgccttcctg

SEQ ID NO: 186720 - DNA, 122 bp, Homo sapiens
gcagcggccatagcctgagcaggccaaaccctaggcctgagagcatgggtttttacactccgtagacgtcgccgcggtgtgcttaagggaactccaagtttcgctttcttgccctctgcggg

SEQ ID NO: 186721 - DNA, 122 bp, Homo sapiens
atacatttgaggtaaacattggtttggcctggaaagatgggacaactcaaaacaggggcgcggagagggttatagctcatagatggatttaaagattttctgattggcagttggttgaaaga

SEQ ID NO: 186722 - DNA, 122 bp, Homo sapiens
ccaccttggctctgaatgttctcatcggtgaggaaggaactggtgctgtgcctgagtgggcgtgaacttgttttgcctgtggttttctttagaaagctgcttggttcctcttctctcaaagg

SEQ ID NO: 186723 - DNA, 122 bp, Homo sapiens
agctcaggccgccatgcgggacaggacccacgagctgagacaggtgagacgccagggcagcggggatggggacgggcggacgaactggaacgcaggacttctggtcttcgggatagggaggg

SEQ ID NO: 186724 - DNA, 122 bp, Homo sapiens
cttgcacatccgctgtcgtcccaacttgcgcagccgcggttgtcccaccttgcgcagccgcggtcgtcccaccttgtgcatccgcggtcgtctcaccttgaggttgaggaggaggagatgga

SEQ ID NO: 186725 - DNA, 122 bp, Homo sapiens
gactaaatgcgtcccgtgcacctgactaaatgcgtcccgtgcacctgactaaatgcgtcccgtgcacctgactaaatgcatcctgtgggagcttcatgccaggctctgaccgacctatgact

SEQ ID NO: 186726 - DNA, 122 bp, Homo sapiens
tcttggacaaaacagatgcaggcacacgcaacaccggagatgtggcgtttcaggagaagccgcattccagaaaccgctttagggcacagtttccccagtctctttcccagaaaggcggccaa

SEQ ID NO: 186727 - DNA, 122 bp, Homo sapiens
ggagggggcgtcctcctctccggtcattcaagaggcctgaaggtgacagggacttggggccgggctggcgggctccagggggtggcgggtggggggtggggagggaggcagccgccaggcag

SEQ ID NO: 186728 - DNA, 122 bp, Homo sapiens
tggcggccaggggaaagggcttctggaatttattgcccgcgtccttgttttgcagctgcacgcttccattcccagccccagccagagaagaggagccaactcctcacggcagatcccttgat

SEQ ID NO: 186729 - DNA, 122 bp, Homo sapiens
tcgaaccacagctccaggccttgcccccgcggcggtcgctgggagagactgagggcccggcgcctagaggccgcttatctgctcccaagcacgtgacccgatccctgggaccaatcgccggg

SEQ ID NO: 186730 - DNA, 122 bp, Homo sapiens
atgggacttcagggagacctggcttgggctaaaatcgaaatacaatatatataggctgctcgaaggtgtgcggctgtttctgtaaaggtcccgaaagttctcggtcccttcgccacggagtc

SEQ ID NO: 186731 - DNA, 122 bp, Homo sapiens
tgccagcccgccccggatgggcatcgtggagccgggttgcggagacatgctgacgggcaccgagccgatgccggggagcgacgagggccgggcgcctggcgccgacccgcagcaccgctact

SEQ ID NO: 186732 - DNA, 122 bp, Homo sapiens
taagggagcctggtggtgcatgagcactcggcggccggaacacagcgggggcggggcggtcgcggcgcctccacttccggccaaggcgggtcctcccacctcggggacggtgctggaggtca

SEQ ID NO: 186733 - DNA, 122 bp, Homo sapiens
tggtgttcccatattagatattactgactctcagtccagttctgtttgcatcccattctgcggcatcccacagttatatggtgctgtgaattattgcactggggttgttagggtagagaaaa

SEQ ID NO: 186734 - DNA, 122 bp, Homo sapiens
ggccgtttttgtggccagcctgggctcgacatgaccagcgtggcaatgtggacctctctccgccggcgctgcccatgtccaggcccccgcgagcgcctcccctgcttccccggcattgtccg

SEQ ID NO: 186735 - DNA, 122 bp, Homo sapiens
tgtctgcacaagttcctgtggcacagtgcttagggctgctgagttcaacccaaattactccggtgtaagatacgttaaaatacatagcttttatccatattttgtgcgcccagaactcatcc

SEQ ID NO: 186736 - DNA, 122 bp, Homo sapiens
aggacttgtagtaggctttggcgcagtccgggaagggacagcggtggctcttggcggcggcggagggcgcggcgccgggggcgcggcccgaggacggggacgaggcggctgaggaggaggag

SEQ ID NO: 186737 - DNA, 122 bp, Homo sapiens
aatgatgccaggtcccctaggtttttcaaggcaagctgaaaaatctgtatttttgcatgacgttttctaattttaaaatattggcaagtagttcaaacaatgttgacctcataaggttcaaa

SEQ ID NO: 186738 - DNA, 122 bp, Homo sapiens
tgctctttccttgcggttctccacacccgcctgggctctggggtggggcaaatctgcgctcgcatccttggtccctcaaatattggcccagcccgaagtcctgataaaatgattcgaactct

SEQ ID NO: 186739 - DNA, 122 bp, Homo sapiens
cagtacaattatgaaccggaggctctgtgtaatttttgtgtctatttcctgggcggtgggcgttcttcattctgtgagccacttggcttttacagtggacctgccattctgtggtcccaatg

SEQ ID NO: 186740 - DNA, 122 bp, Homo sapiens
cccacttcctggctggagtttccttccaccaagatgaggcagcatcctggccccacgggtcgcaggttgagctgagctctgcactgcgggatttccccagactgtgctctctgagtcagccc

SEQ ID NO: 186741 - DNA, 122 bp, Homo sapiens
tcacctgggctgttggcagactcctcggccgtcatctgcatgagaagggccacctgctggcgctcggagagggggtagccggctcggattccagacagccccatgccaaacagcagcccggc

SEQ ID NO: 186742 - DNA, 122 bp, Homo sapiens
aaaaaccagaagtaaaaaatcctggcgaggttggaaagaaaaagaaaactcttatgcactcgtggagggaatgtaaactagtaaaaccatggaagtttcttaaaaagctaaaaatagctctc

SEQ ID NO: 186743 - DNA, 122 bp, Homo sapiens
tctacagactcacaaagctaaagaacccaatccacacacagacatgtcataattagatgtcggaaaattagacagaatgagaaatcctaaaagtagccagagacagcacattacttagaggg

SEQ ID NO: 186744 - DNA, 122 bp, Homo sapiens
ctcaggaaacttacaatcaccgcggaaggcaaaggaaaagcaaccaccttcttcacaaggcggcaggagagcaagcaagcctgcgggggaaacttccaaacgctttaaaaccaccagatctc

SEQ ID NO: 186745 - DNA, 122 bp, Homo sapiens
cggttaaagctcctgtcctttctataggcataagcgggtggtcaccacggattggggatccgaatccctggctccagatagacttaatgaagaagcaccggatccgggccgtggccacacag

SEQ ID NO: 186746 - DNA, 122 bp, Homo sapiens
taggggaagggagagggcggctgactagctacccgtaatttcggctcctgtgcgcaagtgcggaagtgcgctggccaggagcgtgatcggtttccggtcagtggtgtggtaccgggtacccg

SEQ ID NO: 186747 - DNA, 122 bp, Homo sapiens
tggccaacacggagatcaacagccagcgcatcgcggcagtggagagctgcttcggggcctcggggcagccgctggcgctgccaggccgagtgctgctgggcgagggcgtgctgaccaaagag

SEQ ID NO: 186748 - DNA, 122 bp, Homo sapiens
acaacagccgtctgcgctcagaccccaccatctccctcaaacacagtttcccagcagagccgaggagatgacggcgcgggcaaacccttcctgtccaaacaaagctcactacatccctggct

SEQ ID NO: 186749 - DNA, 122 bp, Homo sapiens
cgcccctttccagccaattgtagcctttttccccataatgcccagcagccactgccaaaccgcgcactgcaaccgaactctacctaactccacctctctagccgcccagcccagttcctcat

SEQ ID NO: 186750 - DNA, 122 bp, Homo sapiens
aaagggtggggcaaggctgatgcggtagtgggcggggccaggtgggctaagcgggacgggcggtgtgggcgggacctgtttggtgggcggggcctgttattcgctctgccttccacccagca

SEQ ID NO: 186751 - DNA, 122 bp, Homo sapiens
ggtggagattgcagtgagccgagatcatgccaccaccgcactccagtctgggtgacagagcgagactcagtctcaataaataaataaataaataaattatttggattgattgttctgttatt

SEQ ID NO: 186752 - DNA, 122 bp, Homo sapiens
acccccctagctacatattagtgtaaacatgttaaattttaaataaaaggcagtattaagcgtatgtgtctctggcacatacaagtaagtgaagctttcatgcagttgtatatcaaactgta

SEQ ID NO: 186753 - DNA, 122 bp, Homo sapiens
cagcaatcacacctgcatccttagtagcctgacgttgagagtcattgaaataggctggcacggtaatcactgcattggtgacagggtggcccaaaaaggcctcagcagtctccttcaactta

SEQ ID NO: 186754 - DNA, 122 bp, Homo sapiens
gtggggtcgccagggccaagaagcactggtttagaggtcgatcccgctctgtgtgtctgccgaggccccggcatgagggcaaatgtgccctgtgtgggaggggacacagtcacccagtggag

SEQ ID NO: 186755 - DNA, 122 bp, Homo sapiens
gctctaacaacaagtgttcttcgaagctcggcatctagttcaaaatcaggagccatctcccgttctacgatttcaacatctggaatcaccgctggctccccaacacctgcatcgttgatggc

SEQ ID NO: 186756 - DNA, 122 bp, Homo sapiens
aagggggaggggatttaatctgtcgcctctccttccctttggaaagtaaatacgttcgggcgccattcaaacggaccaatgagtgatcgacgtttttgtggttggccttcaccgattggctg

SEQ ID NO: 186757 - DNA, 122 bp, Homo sapiens
ccatccaagtggtcttcgtccggagctctggcagggaaggaggcagccctgggccaccaccgcctgccccgggtcccatctcccccggtgctagtgtggtcagccccagccgcagggaacct

SEQ ID NO: 186758 - DNA, 122 bp, Homo sapiens
acgggccgggggttcgagctggggggcaccagggcccaaaggctggcatcttggggaagccggaaggagctggggcgagggggcaccgggacgtagcctttgggcaacttgcaccagcgatc

SEQ ID NO: 186759 - DNA, 122 bp, Homo sapiens
gagctcagcctgctaagagcctggcaggcagcgcgagctcccctggagttccggccgctccgcccagtggctctgtgcagcgcttcccgcccggagaacctagtgccccgttccagcccttc

SEQ ID NO: 186760 - DNA, 122 bp, Homo sapiens
cagttttattctccagagtggagaacaacaaatggctacccaaatggagactagaaacaacgttaactcccccagagattcacaccactgttttggccattatctcagaacatgttcagcat

SEQ ID NO: 186761 - DNA, 122 bp, Homo sapiens
ggtgtgttggttccaccattctctccaattttgaatcagtcttggaactggaaagagcctcgggggtgaattataccgattacctccctctttctcctccttcccccgaaattcatgtgcgg

SEQ ID NO: 186762 - DNA, 122 bp, Homo sapiens
tttccggaggatggtgagtatttctggtgggtggaggtttcctccacatggcaatgtggccggggcatggtctgcatcaagctggcttagtgtggagggtccaccctggaaggagatatcac

SEQ ID NO: 186763 - DNA, 122 bp, Homo sapiens
gaccagggctgtggtcattttgtgtattttagggagttgcagataaaatacatgcacgttcgcacacacagcacagacgcctgcatcttcccatgcgtggtttctgctcttgcctctctggg

SEQ ID NO: 186764 - DNA, 122 bp, Homo sapiens
gtcactctttcttcagcctagggtgtgatcacatcttctatcactcagggtctgagtaggcggggccttaaacgttatccaactagggacgttgggctgggaactgtccaatcaggcacaca

SEQ ID NO: 186765 - DNA, 122 bp, Homo sapiens
ccctctgcccttcacactctcctccaaaagagcctccatctgtaaggaagcaggtctccgcgaggggtttctttccatgtgttttcctcctgttgttttagaacttttttaaaaaaacagac

SEQ ID NO: 186766 - DNA, 122 bp, Homo sapiens
aggaaggctggccaggggcccttatgggatcttttagtagaagctagccttctgagacaacgcagccaagcacaagccagtaaatgttgcaagagtgaagggagaactatacctaaatggct

SEQ ID NO: 186767 - DNA, 122 bp, Homo sapiens
agtccgccttcctggcagagcgttgcgtggtcacagctgaggtctggggagcagaggcggcgggcgctcccggggggagctgggcgattccggcggggggaggtgccgatcgagcggccgcc

SEQ ID NO: 186768 - DNA, 122 bp, Homo sapiens
ctccccactcccgccccccccttatccccctctgaagacgatgggcagaggagtgacagccgcagacacacgacagccggcagcaactggaatggcagcaattaagggtggggggcgggggt

SEQ ID NO: 186769 - DNA, 122 bp, Homo sapiens
gcctcagggagcagaactgagatccatggatggaagccatagagaaaaggagttcagacacggcaagaactttctaagagccagagctgtctagagaaggaaaagataggtagtgagctccc

SEQ ID NO: 186770 - DNA, 122 bp, Homo sapiens
gagtggcgaatctgtaaacgcagacacagaacagcctacatttcttgagtggatggtttccgaagactgggcaggggtagggtggcgaaagacacgtagaacaaactcgcgaaagggtcgtt

SEQ ID NO: 186771 - DNA, 122 bp, Homo sapiens
gtcaccggctccgtggtggtaacaggggctccaggccctgccatattgtgtgcccgcactcggaaaagcagccgggcccccgtgggcaggtccttcaccagtatcgatgtgtgctctgtcag

SEQ ID NO: 186772 - DNA, 122 bp, Homo sapiens
caggatcttccttcctaaggaaaatccactggatgtggttcagtagggctcacactgctccgtcatcttctcgaactccagacctcaggtgatccacccacctcggcctctcaaagtattgg

SEQ ID NO: 186773 - DNA, 122 bp, Homo sapiens
taagaagagcaaccatctctgagtctccagagctcctctctgcaggaaggtctgggtcctcgggcactgggacctctatgaagaaaagaaggcaaagatcagtaatatgcagcatgccccaa

SEQ ID NO: 186774 - DNA, 122 bp, Homo sapiens
gaggaggggcagcagcagcggcagcagcagcaaggatggagtcaggacccgtcccagtcccgggtgagcgcttttggatctgggttctggctcaacccacgtaatgccccaatctaaagttt

SEQ ID NO: 186775 - DNA, 122 bp, Homo sapiens
cccccgaccctcgcagagccaggggcacagtaggcgccttagccactggcagaatttcaccggcgctctgcccgacgcccccagccccagggccgggcgtgggtggaagtgtctggaagggt

SEQ ID NO: 186776 - DNA, 122 bp, Homo sapiens
ggcgcgacccctgctctaaccttttcccatagccccatttaatttcctatgtgagttcaccgtcacctgggaagtcacagaaagcttgaagaacataaggtatacactggggatggtttggg

SEQ ID NO: 186777 - DNA, 122 bp, Homo sapiens
ttaggctttcatttatttaggcctgccttgcctcagcgattaaaacgatgtcagccaggtcggctgctttgccgcagcgtccccttgcggccctatcaggaccggaaggaacacgcagaagc

SEQ ID NO: 186778 - DNA, 122 bp, Homo sapiens
gggaattccggaaacccgagcctggaaccctgatctgggaccagcaccccgagatccggccgtggaaccccaagatctggagcctgaaccccagtatatggggctggaatctcaacatcggt

SEQ ID NO: 186779 - DNA, 122 bp, Homo sapiens
cagtaaagtagacacagagatggtttaggtagcagcatctaccacccctatcctggcactcgccaaactctaacagaatcgcctcttttcttgtctacgtcctccactagaggattatgagc

SEQ ID NO: 186780 - DNA, 122 bp, Homo sapiens
aaaacccattcatgggcaactcaaaggtgtcgagacatcagggtgtgtggccgagctttccgccatgggggcagcgagcctccacgaagcccaggcgacttgccgacggccccactccaggt

SEQ ID NO: 186781 - DNA, 122 bp, Homo sapiens
gatgctaataaaaccattaggttaagagaatggtgagacagagggcaaatggattcaacccggaaggtggaaatttttaaatggttattaagaagtaaggtaggccgggcgcggtggctcac

SEQ ID NO: 186782 - DNA, 122 bp, Homo sapiens
tcacttttgtgtccacagcatggattcagctgaataatagttctgtaggctgagctgagccgtagcatccaaggcacagatggagctggagagtgacatagcttgtccttggcttgattttc

SEQ ID NO: 186783 - DNA, 122 bp, Homo sapiens
ttctgggcacccgcctcacgcctcctgatgcacatgtactgggcaaggccttggaggcggcgggccaagacttctccctggacctccgcagcactggcatttgcccctctggattggggagc

SEQ ID NO: 186784 - DNA, 122 bp, Homo sapiens
ctgtgggatgtagattctgatgtgaccgtatgattgtcccttgctatccctgtcctgcctcgcccttggtcatgaaccccagactgaccaggactgtcttccagcaggaggccactgtctgc

SEQ ID NO: 186785 - DNA, 122 bp, Homo sapiens
aacaaatttatagctatttcatacttccctttgcattttctttcttcctcaagatcattacgtaaatgatgcgacttccaagttgtaagaaacaaagatgcactgcaaatcactgagtcgag

SEQ ID NO: 186786 - DNA, 122 bp, Homo sapiens
agacgagctacacggtctaagccagctggggctcaccagcgccgggcaaggccagacctgcgacctgtcgagaagatgtggtcctccaggaaagctctacttcaacgacaaataggtggggt

SEQ ID NO: 186787 - DNA, 122 bp, Homo sapiens
agtgctgagccggggacggtataaatagagccggcagcttggcgctagcacaggtggctccgcagtggggagactttggccacagagctcacggcctggctgggcggaagggcgccgacgga

SEQ ID NO: 186788 - DNA, 122 bp, Homo sapiens
cccatgacccacctgccctatccttccagggttgagtggcagggagggccaagggttcctcgtgtgcatgactgtcactgttttacatggatctcatctcatgagtccatggtgggagagca

SEQ ID NO: 186789 - DNA, 122 bp, Homo sapiens
aggggacggaggccagcgtaagcaggagttcgcgagcgggtcagggatcgggtttcgtaccggctgcacccgaagatgccctccacaccagctgcaccacgcccaatacctgggagcacaca

SEQ ID NO: 186790 - DNA, 122 bp, Homo sapiens
gaggtccatcaggtaagcagttcttaggggacatcagagatgcaggcaggtgcccctgaacggtgcccacagtctttccgtacacagccagcatcatggcgtttggagttgaaaggcccaca

SEQ ID NO: 186791 - DNA, 122 bp, Homo sapiens
ggtggggcgcaggctgcattgcgcttctgtccggggccctgggtcagaggggccggcggacgaggcctcgggtccgggcttggggagggggcggtctgcggggtcggattgagggccgggaa

SEQ ID NO: 186792 - DNA, 122 bp, Homo sapiens
gcggtgcccaggccgcagctggcagtgagctcttccgagcaggcacagggccggggtggccgggaggtcgactcggaaagaggcttctcacagacgggagagttcctgcagacagaccacgg

SEQ ID NO: 186793 - DNA, 122 bp, Homo sapiens
ggggcttcagaaaccgctcggccgagctctgactgccgggcgagtgaccaggagatcgctcgctctctaagaagcagctttgttgagtcataattaataaactatgatgagatttggggtct

SEQ ID NO: 186794 - DNA, 122 bp, Homo sapiens
cccgccaggttgagggtccccgcgcccaggtgacgttctgggggctgtagggatgcgcaccgtgcccacaaaaggcgctttaattgagaacgagcttcccaaatccaactccacgaggatgg

SEQ ID NO: 186795 - DNA, 122 bp, Homo sapiens
acagaacaaaactttccatgacgggtctcactcccgagtaacggcactgggcttctgcctcgtcgtggtgcagaaagcacaggtttgagatttcactggaagttggaacggcagtttctgca

SEQ ID NO: 186796 - DNA, 122 bp, Homo sapiens
cgggggcatccgtggattaggatgtggattgcaggacagacctttgtttggtcacattcgcgacagggattgggggaagggtcgtcctccttcgagatcacgctggatttttatagactcgc

SEQ ID NO: 186797 - DNA, 122 bp, Homo sapiens
gagagagagctctccgcaccttccttcccccacctgtgagacggcgatgagttggctggacgctacgatctctaggaaccccattaggctctaaaatcctggcagtttctaaaatgcacagt

SEQ ID NO: 186798 - DNA, 122 bp, Homo sapiens
gagccgcagtcccctccagcacctcctggtgggggccgcagctgggatgctggcttcgggcgccggcggccggagcagcggaaagcatccacctacagaggctgcggtggagggggcggggc

SEQ ID NO: 186799 - DNA, 122 bp, Homo sapiens
tctcccagcaaggtccagggcgggagagggcaccgtggattcagatggatcaggaaaggacgttccggacctttctctgcaaacctgcagcctggggctggtgccagcccttatcctgcggt

SEQ ID NO: 186800 - DNA, 122 bp, Homo sapiens
gtgctaaactattagtagccaaaagaggatgccaggcaacctacattgtcccagaagggccgtcacacttcccttgtggatgtagaccgtgtttcccgcaatgactgcttcaaagagcacct

SEQ ID NO: 186801 - DNA, 122 bp, Homo sapiens
ggcgcaatcactcgaggctccgccccaagcgaggcggggcggaagcgtgctgtgcacaggcgcaagatgggtcttgggcagcccagagcttccgattggctcttctgtggtggcggggcggg

SEQ ID NO: 186802 - DNA, 122 bp, Homo sapiens
cgctgcagctggccccgctctgtttttctgggactcagcgctgacttcaccgacactccgcggacaaccaatgggctgcggtgcccgccccctcattagcatgcctctggaaccgtccactc

SEQ ID NO: 186803 - DNA, 122 bp, Homo sapiens
ggagtccccagtgccagctcggaggggagttggcacggatggaggctggccagcgtctcgcggctgagtataggcacgcttcttttttttttttttttgtattttaaacacacacacatatt

SEQ ID NO: 186804 - DNA, 122 bp, Homo sapiens
gtgaagagttctgaatttaatttcttcttttctcagatatgtgtcacaaagatgtctacacggaactgccagggaatggactcagtgatcaaacccctggacacaattcctgaggataaaaa

SEQ ID NO: 186805 - DNA, 122 bp, Homo sapiens
tatataactgctatttattttccttttcattttctgcttttgagggagtttccatagtaacgtgtccttccagtcgcctagcctgaagggaagccccggagctccagcttcaaggctcagct

SEQ ID NO: 186806 - DNA, 122 bp, Homo sapiens
tatcttcccttctgctccttcttgacgcattgaggaggcgcctgtttgcgtgacaagcaccgtgggtgcgaaccagggatgccaggaagtcctgggccctacgcagaggctgctgggaaggc

SEQ ID NO: 186807 - DNA, 122 bp, Homo sapiens
gctgctaagtcctagaaaacacgtaacaggacgtgaggtgccctctgcgccgtgtgggcgcgtgcggggagacccgggccccaggacgtgaggtgccctctgcgccgtgcgggcgcgtgcgg

SEQ ID NO: 186808 - DNA, 122 bp, Homo sapiens
cagccatctgtacttcacatcactggcctgaattttcagcctcattaaattctttcaggtcgtctggtcccaatctttgtggttacccaagtgtatatttatgtctcatgagttattgccat

SEQ ID NO: 186809 - DNA, 122 bp, Homo sapiens
atttccccccaatcagcgtgcagcggttttgggaggaggaatgcgactgcatggcgcgctcgctgcaacctcagtctgcagcctgctagggacgcacggccacactcctgtctttcagcctc

SEQ ID NO: 186810 - DNA, 122 bp, Homo sapiens
cgggtccttcgaggggaggggcgggctcggccagtgagagcgcagaaaccgtggcacgggcgctcccggaactggcgattgcaaagcgcgagggctggaactcagacccagaggggcggtcc

SEQ ID NO: 186811 - DNA, 122 bp, Homo sapiens
gctgcttgtacgggagccttgtttggggagaggggcttgtgaggctctgacgaatgccctcgaggccccgggcacacaccgcaaccatctgtccatggctctgcgagccactggcttctccc

SEQ ID NO: 186812 - DNA, 122 bp, Homo sapiens
ctttcctccttcctgctgcctcttcttttaaagcggattctttggccacaaatagcaactcggctgcccccctcggtgcctccctccccttctcttcttccccccaaaagtgaagcgcacgc

SEQ ID NO: 186813 - DNA, 122 bp, Homo sapiens
gaaacttgtgccgaaacctacaggccaacagacctacaaacctgcaaacagacaagggaccgaggggacggagtgcttggtggacggaccagcacccgggacactagaacctttcttttctc

SEQ ID NO: 186814 - DNA, 122 bp, Homo sapiens
gtttttctgtaactatttccctggtggagagctccctaaagcctgcaggatctatcccaacggactgcatgcctgatgcttccagggatggagaatgcacaaagcagatattgttcccctgc

SEQ ID NO: 186815 - DNA, 122 bp, Homo sapiens
actttctaatgctatcccttaatttctagattcagaatttcccgtgtcctggggttggttcgatgccctagattttaacaccagtttctccctagctcgtcacaatatgaactttcacttta

SEQ ID NO: 186816 - DNA, 122 bp, Homo sapiens
ttttagaagatgcacttccaaggcttaagaaatggtcagattccaccattcagatcatggcgatgtctttaggggagtttgtgtaaattagggagacaactttgttattgtttgttctgtat

SEQ ID NO: 186817 - DNA, 122 bp, Homo sapiens
ggaagtacctgtctctgtatctcagtaaagcggttgtccgcctctggcgctgggaataggcgtggggtctgttggaaaaggcgcgcacgtaaaacaccgttcaatgaattttatctcaaaga

SEQ ID NO: 186818 - DNA, 122 bp, Homo sapiens
tgccggcagcgttctccgcggtgcagaagtagtcattgtcgtggataaagctattgaaggcggagggggagaaggggtagagctgcagcgtcccgttggcgtggacgtgccggatgtgcggc

SEQ ID NO: 186819 - DNA, 122 bp, Homo sapiens
aggggaggcagaggggacggcaagtgagggccaatccttgtgttgtcctgaagggccccacggccactactgctgtgccatcatgtgggggtagcccatggcctacacccgtccaggcactg

SEQ ID NO: 186820 - DNA, 122 bp, Homo sapiens
ccactccttccggtctgcctggtttttaagtccgcccccagtcagtccccactcagtcttcgcagcagctctcatcctccacttggcctcttggagttcctcgccggagtgctgactagtgg

SEQ ID NO: 186821 - DNA, 122 bp, Homo sapiens
tcgcaggtgcctgtcgggtcactagtgtgaacgctgcgcgtagtctgggcgggattgggccggttcagtgggcaggttgactcagcttttcctcttgagctggtcaagttcagacacgttcc

SEQ ID NO: 186822 - DNA, 122 bp, Homo sapiens
ctgcccaagctagctcaaggacgaggcccgcctggactcagcttggagccacgtgatgggcgtgagtgtgtgagctcctggtaaggcgcagaggtcagatggagaccttgcatcctgcccga

SEQ ID NO: 186823 - DNA, 122 bp, Homo sapiens
gctttgtgcctcggtgaccagccatgctcacgtgcgcatacacagaataggtagtatacacggtctgcaatgtcactttgcttattttagaggaaggagatgactgttagaccttgttttct

SEQ ID NO: 186824 - DNA, 122 bp, Homo sapiens
ctgacatcccaaggaaggcggaggatgggaggacgtggcactttttactttgggatgggacggccagtgggtttccaatcttggttaaagacatctgtgtctaaaacagattttgtgaatct

SEQ ID NO: 186825 - DNA, 122 bp, Homo sapiens
agcaactaagagctggagataccatcgggagagcttatgtgacaaaagggtatggatacacgtcagttagaatttaggatgaaatggcaaatactatatgcaatagtaaattaggacgcctg

SEQ ID NO: 186826 - DNA, 122 bp, Homo sapiens
gcgcctctcccggggtggcaggcgcctcgcatggcacactcagaccgctgggagggtggccgcatgggtgcgtgaggaggtgggcgaggcagcccagtgcacccctcccctaggcctctagc

SEQ ID NO: 186827 - DNA, 122 bp, Homo sapiens
accccttcggcgccgcctgtcatgtggatgctgccttgcctgtcactcaacttcttaccccgcccccgcgtctggcctaaccgtcgcttaccttggtttccacagcgacgccatcagggggc

SEQ ID NO: 186828 - DNA, 122 bp, Homo sapiens
gggaggagagcctcactttctgtgcttctcctctttgtcactgcttttggcgttgttgtccgtgtggctgttggggttgttgctgaggtacattttgtccatggccttgagggcctcggtga

SEQ ID NO: 186829 - DNA, 122 bp, Homo sapiens
gcctcagctggatgggccccagtgaatactctgagtcatagatacagatttcctgacctccgatgagtagcagcagctcaagttttccccgttaataagtccactgtgtacactgtgctctt

SEQ ID NO: 186830 - DNA, 122 bp, Homo sapiens
tgtgagatgaaagctgagtgggaagctggaccctacaaaggagtctgggggcgccgggaccggaccccttcggaaaggtttgcgggaaggggcttccggggacgatggttattgttgtaacg

SEQ ID NO: 186831 - DNA, 122 bp, Homo sapiens
caaggcagcctcggcacacggacaaccgacaagggtcctgagcaaggaggacgcacagctcgagctggctttgacattcgtgctcagtgtacagacacgactgtacacacagagttaaacag

SEQ ID NO: 186832 - DNA, 122 bp, Homo sapiens
tccagccaggcgtggaggccgcgcggggccggggtcgagcccagcatggcggggggggtgcggggcagtggcccggacaagggcatggggccggaagaggcggggccgttgccaggagacga

SEQ ID NO: 186833 - DNA, 122 bp, Homo sapiens
cagacggggtggctgccgggcggaggggctcctcaattctcagatggggcggctgccgggcggaggggctcctcacttctcagatggggcggctgccaggcggagggtctcctcccttctca

SEQ ID NO: 186834 - DNA, 122 bp, Homo sapiens
tggggctgggcggccttctccatgaggacggccgtgtggggcctgtgctcccgggactcccggcacatcacgcacagcagcttcccgtcgtcctcacagtagtagtgcagcttctctcggtg

SEQ ID NO: 186835 - DNA, 122 bp, Homo sapiens
aaaggggctgggttctgccatagggcccagagcgggcaggcgtcccgggagtcttgagcgcggcatggtctctgcggccctaatttcgcagtctctccccagatcaccgcacagcagatcac

SEQ ID NO: 186836 - DNA, 122 bp, Homo sapiens
gctattctcactgatgttggaggtcagtgaatagcactgacatacagtgtcaactcccaccgaatctgttctatgaaaagaggtccggtttatgttaagaggcaacaccaaagccagaaaga

SEQ ID NO: 186837 - DNA, 122 bp, Homo sapiens
agaactcagaagcagagaagtggtggtcaccaagggctgtgggatgggggaatggggagacgtgcaagggaaacaaagccttagtcaggagaaataaattgtatttttttttttttgaaacg

SEQ ID NO: 186838 - DNA, 122 bp, Homo sapiens
ctgcagcagcgccggctcagcaccgccggctcagcaccgctccgcagcccctgcctgccacggtcagctacgtcccacctggtctgctgcggagtccccagcccagtgcctagcccagtgga

SEQ ID NO: 186839 - DNA, 122 bp, Homo sapiens
cccatattcacgtgtctctctggcgatctgggaatctgtgtccctcacgttagtctctgtcgggttttctttttttttccttggaagaggagatgaagggaagtgaaaggcggaatcaaaag

SEQ ID NO: 186840 - DNA, 122 bp, Homo sapiens
cttcatggcgccggccggactgtgcagcggggtcgacccgcctccctcatgaatattcagcgagaggccgggtcgtggacatcctcgagggctcgctccacctatattacgagaccattggc

SEQ ID NO: 186841 - DNA, 122 bp, Homo sapiens
agaggataaagccgactagcagagccgccgctaccaagtaccacacaggcgccaccatgacgagggcctcagtgcagaaccactgcgtccaccctgaggccgggatctcataggccccgccc

SEQ ID NO: 186842 - DNA, 122 bp, Homo sapiens
cgaccgcagcctccgcctcagagccagatcctcttcctcttccttagtaggcatcttctccgactcggcttctaagtccggctctttttgtgtgggttccagggccctgccgtgggggcaaa

SEQ ID NO: 186843 - DNA, 122 bp, Homo sapiens
tccccttgtcttgcccatgttataggtcatcagtcatttggattttctgacaatttgatacgtgagaaatggtaactcagtatacttggaattggcatttctattatgaaaatagttagttg

SEQ ID NO: 186844 - DNA, 122 bp, Homo sapiens
tcaaggagcgaaacaagagtgtcttagcaaccagcaaggaagtcctgccccctcaccggacgttgacgagaatttcacttattattggtggataaaagtatcaatcagagtgaaaggccctt

SEQ ID NO: 186845 - DNA, 122 bp, Homo sapiens
atttggtgggtaaggggtcggaaagtggggaatactgattgatagaatcagagataaaatcgtggtcagtagaagctgtcctcttgcactgagtccgttcctgggtggagaccacaagacta

SEQ ID NO: 186846 - DNA, 122 bp, Homo sapiens
tatactaaaggatatgtagcccatctcttgagctgttaaactgttttgactactttaaatcgtgcagctgtgagcatctctgtaaatttagtgtacacatgtatcccctggagtggcattgc

SEQ ID NO: 186847 - DNA, 122 bp, Homo sapiens
ggttccgggaggtcaggttgtattcctggcgggtcgtctggctgggtgggccccggaggtcgtggctcgggagcagggaggcgtaggggggccggcctgctgtgatgacattccaattaaag

SEQ ID NO: 186848 - DNA, 122 bp, Homo sapiens
tccacttgccaagcctgtggaagcgagacgcggggatcggctgggaatgcctggaagcgccggcgcgcggagccaggtgggaggtgcgaggtggccgcgcggggatcttgggtgacagggca

SEQ ID NO: 186849 - DNA, 122 bp, Homo sapiens
gagcaacagattcgagtgcgcgcgcgttggggctgtgagttgtgcaacccagggagggggcgccggggctgcggcccgcggagagggcgcgcgggcgggcgcggcttggcgcgggagggccg

SEQ ID NO: 186850 - DNA, 122 bp, Homo sapiens
gagaaacacccacacttagtctctggccctcggctcccaggaacgctgccggagcaacaccgccgtctaggctggacgctgagagaggatcgtccacgactcacttcaaggctgaaccaaga

SEQ ID NO: 186851 - DNA, 122 bp, Homo sapiens
agtgcggggctttagcacatgcagttcctttggcttgaatgcccttccccagcttttccccgtggacttcacaactcggtcaagggtccctttttccaggtctttcctgatatcccggacaa

SEQ ID NO: 186852 - DNA, 122 bp, Homo sapiens
gggagaacttacctaatccttgaatgttaaaaggctaaaaactccactagtcggaagtgacgtgccagcttagccccgcaggtccgccacgtaattggccgccgccacagctagccaccctc

SEQ ID NO: 186853 - DNA, 122 bp, Homo sapiens
tatactcttgtctcttttaagctgttgctatttgggttgtctgttatatgcagccaaactcgacccctaacagacacacatatagacaactcccatcccccaccctgggctctgggctcctc

SEQ ID NO: 186854 - DNA, 122 bp, Homo sapiens
gcaacgggccacgcgccacacgggcaaagtgattactggtcggatcaaaagtcaggcaagcggctcagccccatcctcccagtcctcgggcacggggacagcagcaggcgcgcggcggggac

SEQ ID NO: 186855 - DNA, 122 bp, Homo sapiens
aaaaaaattatggctttttatatctcccagaataaagccaacaatgactctggggctgggcgtggtggctcacacctgtaatctcagtactttgggaggacaaggcgggtggactgcttgag

SEQ ID NO: 186856 - DNA, 122 bp, Homo sapiens
tccaagcccgcctgccctgtgtgttggggctggctgagtttcggtctccccatcaccggccgcctcgtggagaaggcagtgccacgtgggaggacaaggccacgccggcagcttccagccct

SEQ ID NO: 186857 - DNA, 122 bp, Homo sapiens
ctcccctcctcctcctcctcctcctcttcttctgtttacctcaagtttgaattttatctgcgcaacattagctggaatgcggacattgaaaaaaaaaaaaaaacactctctcagcccggcag

SEQ ID NO: 186858 - DNA, 122 bp, Homo sapiens
agttggaagagctctacaaaattagtaccagggaaggctttagttaacacttgccccagacgctgggacccagaaaggctaagtgatttacctaaggttacacagctggcagcagtgtctag

SEQ ID NO: 186859 - DNA, 122 bp, Homo sapiens
acaatgatgtcagaaactctgtctcttgaagctacttcacctttgtccatgcctttatatcgtatatgcaattttattaatatgacaaaaatgcatgatttttaattataataacataaagt

SEQ ID NO: 186860 - DNA, 122 bp, Homo sapiens
cccggccgcagccgctgaagacgatggcgcgcgtggctggctgcgccatgctggcggtggcgaaggccatcaggttccggatcttgctgccttccttgacccgcatgtgcaccgcgcccggc

SEQ ID NO: 186861 - DNA, 122 bp, Homo sapiens
tgatgaaatccaaagatgtctaaaatggcaccaaagatctccaactgtgcagactccaaccgaggacttcaatgttggcattgttcctgaaggaataaaaaaaaagaaaaagaaaatgttga

SEQ ID NO: 186862 - DNA, 122 bp, Homo sapiens
tctgcatggctgagcaaattcacccgtaaatccaagtttctcttcatttccatcactatacgtctccaaattacagagaattcattcctgagctggagaggtgccagaagtttctcatctag

SEQ ID NO: 186863 - DNA, 122 bp, Homo sapiens
agtgccccagggaggaatctggcccagtgccttcttgcccagcctcacttcggtgccagtcgcgaaagcccagggattgtctgcccgggagcccgacgcacacccctggacacagaagtgct

SEQ ID NO: 186864 - DNA, 122 bp, Homo sapiens
ctgacgctaacatcacaacaaagacaagacaagaggatgccacatacatcctgatggaggcgcctccgaccaaaagcaaagaacccggatgtgccccagcctcgttccaactagcagttccc

SEQ ID NO: 186865 - DNA, 122 bp, Homo sapiens
gaaagatatgggaaagccccctggctggacttccgcggcctaggagtggggctgtgttggcggctgggggcgtctgtcacctgggtcctgaatcagggatctaagcgatgtggactcaggcc

SEQ ID NO: 186866 - DNA, 122 bp, Homo sapiens
aagcagaccaaacattcaaatcttcagatccccccatttaacttctggaagaaaaccaagcgatctcctggcttgggccctttcttccttaaaaatctatggaagactgttttctttctttt

SEQ ID NO: 186867 - DNA, 122 bp, Homo sapiens
gtccccaggctctccctggaccacaattttctctccatcttcaaactggacgggctccagcgcatccgccacggtcagacgctcccacttctccagggactctgtcgggggaggatgaggac

SEQ ID NO: 186868 - DNA, 122 bp, Homo sapiens
acctgccagccagcgcctgcgcctccgcctccgcctcccgccggaagtcccgccccgccacgttaggttaagtcccagagtccggaaccgctgcctgcggcttgacacagggttggtacgta

SEQ ID NO: 186869 - DNA, 122 bp, Homo sapiens
gtgctggtcatctccttcactagcaaatcagctcaccaagttggggctttgtctatttaccgttgtgttcccagtggacactcgatgttaagattcaacgaatgaatgcctggacgagtggt

SEQ ID NO: 186870 - DNA, 122 bp, Homo sapiens
gcaggtgtggagccccctgagcctgggctctttatatacctgtccagaggtcagggaggacgcagggtcctttccttgtgactgtttacactatttttccagagctctatttttttcctctt

SEQ ID NO: 186871 - DNA, 122 bp, Homo sapiens
gcagtgagcgggggctcagcagagccaggcagagtcccaaagggtgagtcattgatgtgccgtgggccagagccgttgcccggcgggctgtcaccgggcggcacgcgtcccttcagcgcatt

SEQ ID NO: 186872 - DNA, 122 bp, Homo sapiens
ggccagtgcgggctgcagaaggctgtttctctgctcgctcccgtttctgccttttttcaccggcactccaagaaaattgggtgtcctaagagccactccgctccgttccaccccatccccag

SEQ ID NO: 186873 - DNA, 122 bp, Homo sapiens
tcttaagcttgatcttgcggatccggccgtacttgtagaaaaggtcttccacgtccttctcgcgcacgttggaaggctcaccacgcagatgcgctcatccgcccagcccaacatcggcacct

SEQ ID NO: 186874 - DNA, 122 bp, Homo sapiens
ccaggctgggctcaagacataaacacaggcccctttgcccagctggacgcaggccccatgcgccattcactccttcaagccagttccagcctggggacttcccaaggccagctaagtccaca

SEQ ID NO: 186875 - DNA, 122 bp, Homo sapiens
gttgacagaatcctcttcctgttctttttaaactgcaattcctgaactacaaatcctggccgggcgtggtggttcaggcctgtaatcccagcactttgggaggccaaggtgggcggatcgct

SEQ ID NO: 186876 - DNA, 122 bp, Homo sapiens
ggctcttcagcagcgagtgcagattgctcccccgcggccgcagatctcccgtttgcgccgcgttcagctgctcccgaacaacttttctgccggcccagaggccccagggcgtcgcagcgccg

SEQ ID NO: 186877 - DNA, 122 bp, Homo sapiens
agcaatctgcctggtgctaatatttatataacacactcgccagactccatggcctgagtccgggggtggcttttcgtggtgcagcttggatggcatcggaacctgcaagaagccaagacgcc

SEQ ID NO: 186878 - DNA, 122 bp, Homo sapiens
caggccaccgaacggccctgccccgccccctgccacgccctgtgcgtgcatccgggtccccgcgcagtggctgcacgcagcccacctctcccgacgatccgggtcctcccgcccttcgcggt

SEQ ID NO: 186879 - DNA, 122 bp, Homo sapiens
accataatttttttaaaaattgaggatgatcacagcatcctaggagcttagaggttaccacggtgaccagagccaacattggccaagtttgtcgtggaacagccataccacctgtcctgaat

SEQ ID NO: 186880 - DNA, 122 bp, Homo sapiens
ccgcgccgccttagagtcgctcatgttgctttacctcacacgcgaagtttccccgaaacgcgtaatttaatatctaaagattagagcagaagcttcctcttgggcttattgaagatgacata

SEQ ID NO: 186881 - DNA, 122 bp, Homo sapiens
tgggaagtgcggtcgtccctgctgcagggccccagtgaccgtgtctgtgtgggtgtggcacggttggtgctctcctgcccaaaacccctgagcctgcaattctacccagagccacattcccg

SEQ ID NO: 186882 - DNA, 122 bp, Homo sapiens
agtttactgcttgtaatgaacatagtgatcactgggaacctggaagtagagactcctttgcgccgtcccgccgtccctctggctgctgcgaatccccccgccagcctccaggaccccgggct

SEQ ID NO: 186883 - DNA, 122 bp, Homo sapiens
caccgtgcgcgagctgaagcagggcgaggcattgcctcacttgggaagtgcaaggggtcacggagttccctttccaaggcaaagaaaggggtgacggacgcacctggaaaattgggtcactc

SEQ ID NO: 186884 - DNA, 122 bp, Homo sapiens
aagcacaaagcaggagcggattggaggttttacaaactgaccaaccccgccgcccgcgcccgctggagggagacgcacacctttgccctgcatattcgcttccaggctctgcatctctgctc

SEQ ID NO: 186885 - DNA, 122 bp, Homo sapiens
aatcgtctcagcaggggctccagacttccccagcaggcggcaggtttcctgtcatgctttcgccttccttctcatatacaccagtgctagagttcatcatgtgtcaaaactataagggagaa

SEQ ID NO: 186886 - DNA, 122 bp, Homo sapiens
gggtaaaaaagacggatgagccccaaattaatgcgccaagctctccgccggcatccttcccgcccccaagcccaagacgctgaatcgggatccccgcgatcaccagagcagacagaaataac

SEQ ID NO: 186887 - DNA, 122 bp, Homo sapiens
cggggtgtggctgaaggcggaggttgtgacgacgcatgtacaagcctgcaggagcatccgcgagcaccgctggccccaccggaaaccgggaagaggcaggacagcttctaccccgagcctca

SEQ ID NO: 186888 - DNA, 122 bp, Homo sapiens
tcgacgtgccaagaacctggacagctctcagccgagacccttcatctggtgacgaatggacgttgagtgagtgctcaagctcagacagctgcctaacaaggttctcgaagtccccgccacac

SEQ ID NO: 186889 - DNA, 122 bp, Homo sapiens
ccggagccgcccaccaggttgccaggaggaggcgggagcggggaggcgcccgaggtgagacgggggcaccctctgcatcataaaggacccagaccccggcaccctcaacatcataaggaatc

SEQ ID NO: 186890 - DNA, 122 bp, Homo sapiens
gaagtaaacaaacctatcagcggccaagctgcttgtcacctgtgagtgcttccaaggaaccggatgtgggctcccccacccttaccccagcatctggcacagctgaaggcagatggaaatat

SEQ ID NO: 186891 - DNA, 122 bp, Homo sapiens
ggccctgcgccaccactgcccggggggcgcgggtgtggtgtcccgcgggggagcgggagccgggtccttaccatcgactcacccagtttctccgggctgcacctgcgacccctccgcccccg

SEQ ID NO: 186892 - DNA, 122 bp, Homo sapiens
tgcccaggctggtctcaaactcctgtgctcaagcaatccacccgccttagtctcctaaagcgttgggattaaaggcataagccacagtgcaacactttaaaaaagcctaacaggacaaccac

SEQ ID NO: 186893 - DNA, 122 bp, Homo sapiens
cccctcagtgccaggctacctgggatgctttgtggactcaggggcacccccagccctcagcggccccagcggcacctccacgaagctcacggtccaggtgtgcctacgcttctgccgcatga

SEQ ID NO: 186894 - DNA, 122 bp, Homo sapiens
tgatttgaggctgctcttcctctaacctgtgcggctctgtgaaaagccaattttaagatgcgatgcctcctccagaattcgcctgtatgcagaagaatgatgcagaaggaggcagaaaagcc

SEQ ID NO: 186895 - DNA, 122 bp, Homo sapiens
gcgcggcctgggcttcgcagcgctagctggcttggcttcactctggcgaccgggtctttgcggcgcagggaacccgccccctctgagcccgcctgagccttggccccgcccccagccatccc

SEQ ID NO: 186896 - DNA, 122 bp, Homo sapiens
ccgctgcccattcattgacaaattgccttttcgcttttgcactgttcagtgcacaccaagcgcaaaagaggacgaaagcagtgcactgcagactccaggctcttcgctccatagctcacaca

SEQ ID NO: 186897 - DNA, 122 bp, Homo sapiens
cctgcactttaagaccaccttatgacaccatctccctgaacaagggtgaagtcacagcagcggaccttttcaggctcagagccgggctgttccaagatcaggaaaagtgactggttaacaga

SEQ ID NO: 186898 - DNA, 122 bp, Homo sapiens
tgtgtcatgcatggaggggcaaaagaggttctgatggctattcattcagatagaagttatcgaggccataggaagtgagagcgccatcatactaatgttaaatagactgaacaatgggaaat

SEQ ID NO: 186899 - DNA, 122 bp, Homo sapiens
cctgctccttgctctgggacagtgacttacaaagcactaaccctgtgcaggcagcgagcccgaccagggagcagatcaggtgtccgtccagcacgtgccccgcgagtccgcaagcgagaggc

SEQ ID NO: 186900 - DNA, 122 bp, Homo sapiens
cgaggacacctgttgcgccccagggagaggagaggcctaaccagagggtggacacacctgcggccatcaggtcaccgccgcggccatcacgtcaccgccgcccccagtgcaggcacggggct

SEQ ID NO: 186901 - DNA, 122 bp, Homo sapiens
caccctcaaacattcccacaagtgtagaccaatggctctcaactgggttggttttgctcacgtaccactcccttgccccacggcatttgaaaccaactggagacatctggggtagccatagc

SEQ ID NO: 186902 - DNA, 122 bp, Homo sapiens
agttatcacgcaccatgtgacacccggcagctccagactagaacaaggctctgcactgaacgtgataattgaacttttaatgccaagtgtcacttttctttcaggtaaatgttccgccgctg

SEQ ID NO: 186903 - DNA, 122 bp, Homo sapiens
ggttaatcacttctagggagaaaggtgggagttttgactgggaagaaatcttttgggtaccggtgatgttctagctcttgacttgggtagtggctacatatgtttgctttccaataatttca

SEQ ID NO: 186904 - DNA, 122 bp, Homo sapiens
gcctctccaggccgccccccgccccgcagccaggacgcagacccccgacctgcgcacggacgggtgaccctccacctgcccagctctcctgggaactcctgggccagggcccgggccggccc

SEQ ID NO: 186905 - DNA, 122 bp, Homo sapiens
tcatgttggaattgacccaacaattcacagatttaaaaaaaaataagacaaggcgaatcacgttggaaaaagttgcacattcttttcgtcacatggtcctgctgaccccacaggcccagttc

SEQ ID NO: 186906 - DNA, 122 bp, Homo sapiens
cctgccccgccccgccccgcgcggttctacgggcgcccaggtgtggtgggcggggccaggcgcagctgctgcgccccccccacccggggtccggcagtgttccgctctcgcaggctcttcag

SEQ ID NO: 186907 - DNA, 122 bp, Homo sapiens
gcgctcccgctccttcgcggcccttccccttcccccgtgagggactgatgcccccctccccggggagaggcagcccgtgccctcgctctggcttccgtgcctcccagcccttaccactgccc

SEQ ID NO: 186908 - DNA, 122 bp, Homo sapiens
attaggcgagcttcccatctgtggtctccaagtgtctgcctcttgatttaactttgtccccgccccgcctccgcggcaacccctcccagcccagccccgcgcttcgggtgccgcggccaccc

SEQ ID NO: 186909 - DNA, 122 bp, Homo sapiens
aaatgtataactatttatagaagtgtgcaagcgtgaaagcgctggctcccaggacagccacgaagccacgggtcgttgacacagccgagtgggcgccattgccggagcgggaacccgcctga

SEQ ID NO: 186910 - DNA, 122 bp, Homo sapiens
cccctctcctgtgaccccaggtaggccgccgatcggttcccggctgaggtcccgccccagcgcccgcctcccgggctccaacctctttgctcagcccgggaggctcggctggctggggcggg

SEQ ID NO: 186911 - DNA, 122 bp, Homo sapiens
ctctccccttgaggaatttttttaacttgggggcaatttataatccagattgctggccagcgaacagtggtcagaatgctctggaaaccttccccatctctctggagtcatcaggcccttgc

SEQ ID NO: 186912 - DNA, 122 bp, Homo sapiens
agtaaccttttgtccactgttgctaggagccccagtgccggtcatctgccgctgggcagacgtcaggcaccaggctggctgccgggcagggaagggagcacagcctgacctttgcaggggag

SEQ ID NO: 186913 - DNA, 122 bp, Homo sapiens
tctgtgtccaggggcactgctgggcctctcgctcttgctgaatggccgggacattggcatcgccctggctgacgtgaccgggaaccacaagtggggcctgctgctgaccgtgtgcggtgtgg

SEQ ID NO: 186914 - DNA, 122 bp, Homo sapiens
ctcaacagacctataataaaagatagaatccgtactcaaaaatctcccaacagctgggcacgatggcttatgcctataattccagcattttggaagaccaaggcggctggatcacctgaggt

SEQ ID NO: 186915 - DNA, 122 bp, Homo sapiens
cttttggtttccttgctctgcattatgtcagggaggttctgacacctcaacttcattaaacgtaggccaaagttaagtcaaagttttagccaaaattgaagtaaactataggaactaattcc

SEQ ID NO: 186916 - DNA, 122 bp, Homo sapiens
cgagaaggaggcggcggggggcggagcgggggccatggccggagaccgcagctcccagcgcgcagcccggcgtctgctctgctgccaccctgagcgcctctaacatcccgggagccccgcgg

SEQ ID NO: 186917 - DNA, 122 bp, Homo sapiens
cgagtccctgccgaggcctggagaggctgcgtgggcttctaagagcatctgtgggagacccgcaacaggggcggggtcaaggcccccaaagagcccgtccccgcctgggcgggtgactccct

SEQ ID NO: 186918 - DNA, 122 bp, Homo sapiens
ccctgggcgctggggaagagatggctaatgtgggctgggttttgctatttactaagcccacgtcactgctccatttaatccagagagatgctcccaagccattccctagagcctaaagctca

SEQ ID NO: 186919 - DNA, 122 bp, Homo sapiens
aaatacaataataaagataaattttaggagagttttaaataaattattttctactttcagcgtgaatattgtttaatgaaaaggtttttttgtaacgaatgggtttactggtatttaaatat

SEQ ID NO: 186920 - DNA, 122 bp, Homo sapiens
cctggcacgcccgctctcctaccttcgcccagggctggccgttatctctgtgctgtcacgcggggaagtcccatctgaactggggccttatgaccttcggtacttttattcgaacgtagcct

SEQ ID NO: 186921 - DNA, 122 bp, Homo sapiens
tctcgaactcttggcatcaagggatcctcctgcctctgttactggatggaaggtcttgaccgtggattgcccaggttcttggcgtgttgaacaaagaattgaacaaaatgcacaaagtagca

SEQ ID NO: 186922 - DNA, 122 bp, Homo sapiens
agtatcacttttaggtagccattttctacacctcaatcagattaaaggtctatttttcatcggtttacttagagtgaatttgcactgctgcatggtgttgttagtctttgttggataccata

SEQ ID NO: 186923 - DNA, 122 bp, Homo sapiens
cctgtttactctaaagactccggcagcccacatgtgtgcacgctgaataaaatcgtgctgcgggaccacagtgcggggaggcaccgactctgtcattctgtcaacgcaccgcacagtcacga

SEQ ID NO: 186924 - DNA, 122 bp, Homo sapiens
cctccagctccaccgcatacttggcattgaaccggaagaagtcgatgagttccgctgcagcgtcaatctccgcttggatcacggtcttaccctgcaaggcagagggccgggggtcaggagca

SEQ ID NO: 186925 - DNA, 122 bp, Homo sapiens
tggcagcacttggacaggatgctgcagccggggagagaacagggagagaggccgactcagcgagggcccgaggaagcctccaggggagaaggctcctcccagagacaggatgactaggaaag

SEQ ID NO: 186926 - DNA, 122 bp, Homo sapiens
aagcagtctttccacctctgcctcccaaaaaagtgctggaattacaggtgtgagccgccacgcccagcctgtctgtctcttataaggatacatgtgactgcatttagggcccactgtgataa

SEQ ID NO: 186927 - DNA, 122 bp, Homo sapiens
gcccttcctctgctggccatcagggtggagtaggagtgactcgtggcagatcccgggaatcgggatttttctggagctgctggctaacacttatgtgcagagccagggcagaagagcccagc

SEQ ID NO: 186928 - DNA, 122 bp, Homo sapiens
gaggaaaagtgattactgctcgcttccacttcacaggtagaactactgatgggggtgacgcggtaaggtgggagggcatgaaggcaggggacgcggcctaggtcaggagggacgcagaggag

SEQ ID NO: 186929 - DNA, 122 bp, Homo sapiens
tcttgtggtcagctgcaaacttagtttgcagttttttgggtaacacttattgttttcatccgattaaagaataatgcatgccaatggttgaaaaattgaaaaatacagtgaagtataaaaat

SEQ ID NO: 186930 - DNA, 122 bp, Homo sapiens
agggacaggctgctctaagccacccagtttgcagcactgctgcggccgccacgagaagctcgtccagggaggaggctgctccagccctgagccccacgcgactcccgtgagcacgaggactc

SEQ ID NO: 186931 - DNA, 122 bp, Homo sapiens
cagcctgctacttacctcctgacaactgcatggagtaaaccacaccgccttgttaaatgccgtcgccgccgccgccgtcttcgtcaccgtcacagtcgccgccgccatctttgttgtgtctc

SEQ ID NO: 186932 - DNA, 122 bp, Homo sapiens
cctccgagaaactgcctcaaatagcaagcagctcatcctaacgtggataaagtatgacctcgggcttcagggagaagagggtaggagagcgggtagccagccacatttacagaacactcctc

SEQ ID NO: 186933 - DNA, 122 bp, Homo sapiens
ggagctttgggaggctccgggtggagactggacacccgacgactcttgggaagctccgggcggagactggacactcgacgagtcttgggaggctccggaccgagactggacgtccgacgagt

SEQ ID NO: 186934 - DNA, 122 bp, Homo sapiens
gccgagctctgcaaaccaacgagccctggcttatgaatcatcgtcttgagctttctcattcgtcatttgtgtgctttgggtgcagactttcccccgctttttgaaccacactgaatagggaa

SEQ ID NO: 186935 - DNA, 122 bp, Homo sapiens
ggattctgcccctgggtggatagtggaggcaccccccgggaagtgggctagagcagatttcgtgtaaataaagattcatctttgaacgcattaagcttgaggtgggtcaggaaggctgttgg

SEQ ID NO: 186936 - DNA, 122 bp, Homo sapiens
acaaataataaaaattattctttaaagtaatgtctttaaaggcaaagggaagggtaaagtcggaccagtgtcaaggaaagtttgttttattgaggtggaaaaatagccccaagcagagaaaa

SEQ ID NO: 186937 - DNA, 122 bp, Homo sapiens
gcgccaaagtcccgacagtggcggacgccggcaccaggggcgatggagagcaggcgacaccgagggtgtccatccggtccacccaacctggtgcaaggctctgggaagcgcgctgacaggat

SEQ ID NO: 186938 - DNA, 122 bp, Homo sapiens
ctcccagaactggcctaggtcgggaaggtgcagccacgcgggaatcaatggttcaggaaccggatctgtgcagcctcgcccgcagcgtctcggacttcaggactctatactagtccttgtct

SEQ ID NO: 186939 - DNA, 122 bp, Homo sapiens
accacccagaatgctggaagacatggcgcgcaattatcagctccaacaatgagccaacggcggccctccgagcaagcccagacaaagcacagagaccttgcagctgaaaaggctctgaatgc

SEQ ID NO: 186940 - DNA, 122 bp, Homo sapiens
ttccggactcgcccgcggccgggcggagccagttgcctccaagcgacccgacccaccccgcgattgtagtcctagaggcggagtcctcgccagagttcagcaaaggttcgctggccgaggcg

SEQ ID NO: 186941 - DNA, 122 bp, Homo sapiens
tcagagtgtcctcctcccctgaacaggaaaggaattgaaactaagactttctcttcagtccggatggcagatggcagagaaggaaatgcctgaacagccctgacaactttcctgttagggga

SEQ ID NO: 186942 - DNA, 122 bp, Homo sapiens
gccggcctgggtcagataaggggtaatcataaacatcagctacctgtatcactcaggtcccgcccaaaccgggcagtgaggctggttgctaaagatcagtttcagctcctgcaggaaagacc

SEQ ID NO: 186943 - DNA, 122 bp, Homo sapiens
tcttgccgtgttgctccttgaggtgccgcctaatggcaggcttgtgggcgaagcgcacgtcgcagtaggagcagcggtagggccgcgctcccgagtgcaggttgaggtggtcgtgaagggtg

SEQ ID NO: 186944 - DNA, 122 bp, Homo sapiens
ggagggagaggcgctggggggaaccaggactgcgcgagttccgggtgggcgtgggctctgcggacccgcactcccagcagtcggccggccccaccgcccggggcagtgaggggtttagcacc

SEQ ID NO: 186945 - DNA, 122 bp, Homo sapiens
cgttttggagagatttttccttcttaaatgaatggcatgactcaatactcgaaggcatcacgggctctaacacacagccgcccttgcagctgtgcgctctggaaagctggagtatgggcccc

SEQ ID NO: 186946 - DNA, 122 bp, Homo sapiens
ttcttgtctgcaagataccaacacagaagtaagcccagcaggagccttcagggttccctccgcaccgcttggcagcatttcacctgcgccgccgcaaactcctagctaagagccacctgcat

SEQ ID NO: 186947 - DNA, 122 bp, Homo sapiens
gccaggtgggccccacactcaagggcctggatatatcagcctctgttctgtggtagtgcccggggcctggaggcccagggtctgagttgagccctgaaaagaggggtctcctggccctctcc

SEQ ID NO: 186948 - DNA, 122 bp, Homo sapiens
ataggacttgtttttcttcaacagcagcgccggaggcggaagggccaggacttcacttgccgtggtcccggcccctctcctggggcccatcctgggtcttggcctgggctcagggcccactg

SEQ ID NO: 186949 - DNA, 122 bp, Homo sapiens
tcacagagggaggaaggccgaaccgcgggagcctacagatcccagaagacaccgcgctaccgaggactgcagtctggagttggagcccttgtcccaaccagggctggataagaaggtgttgg

SEQ ID NO: 186950 - DNA, 122 bp, Homo sapiens
gccgtgtcagtcatctgggggtcccttagcctccgcagagtaaagctgtgggagtcaccacgggtccccatgttgggattgggaagcagtcacctaccagatgagcgttccttccgcgaagg

SEQ ID NO: 186951 - DNA, 122 bp, Homo sapiens
gtatttacataaaagaaggggcaaaccctagaaagcatggctttctttttttcagagtagcggtacatttactggcagaccgctgaggcatctgttattctgaatcaataggttatttcaaa

SEQ ID NO: 186952 - DNA, 122 bp, Homo sapiens
ttctcgctcccacgtccgtccctcccgttccccagctcgcgtcagcccaggagaagccttcgaggcctggagaggccaagtgcccccaacatgagccccagcctctgtgccttgagggtgcc

SEQ ID NO: 186953 - DNA, 122 bp, Homo sapiens
ctcaggtctaactaactaccagcccagagctctttaacaatgccattgaaaggaggtctgcgtgtccgtcctgactctgcctccagctgctgtgtgggtcttgggtagcccatttgtcctct

SEQ ID NO: 186954 - DNA, 122 bp, Homo sapiens
cagcgcggctcttcccaacctcctgatcctgtcccctgcctgggtccccagccgcccgcccgtccctatattatagcaacgccagaaatgtggtggtggtggtcgccacgttagggtccgcg

SEQ ID NO: 186955 - DNA, 122 bp, Homo sapiens
aaatggtcctcctatgtgctgagtcacttctggatggggcctcaggagcagttggtgggtcgaggtggagccagacatgcaagaaatctgaaaagatacctcaaaaggccaatcttaggttc

SEQ ID NO: 186956 - DNA, 122 bp, Homo sapiens
gccgcagccgccggcgtgagtgggcgggggtcggggcgcggggggcggcctcgggacctgcgcggcccccgccctcgcgtccgctcgcagaaggggcgggggccgcttccgagggccggggg

SEQ ID NO: 186957 - DNA, 122 bp, Homo sapiens
ttgctcctgcccaagcccctgccgttgggccccggtgttgggttcggttgtgctgtctaacggctgcctggccccctcccccctcccctgtacaggaagtgtctgttggcggctaggtcccc

SEQ ID NO: 186958 - DNA, 122 bp, Homo sapiens
tgagctggattgttggggggggtggggttcgcgggtgcgagccaagaacgccccggggcgcgcagttggaggcacatccccaccgcactctccacccttagggactgcaggggtgggggatt

SEQ ID NO: 186959 - DNA, 122 bp, Homo sapiens
cccgcccacgcggctcactcagtgtgggtctctttgccttggctgtggtaaccccctttgcgacacacacccattattttacaccgtccgcccctcccccaagcactctcctgtcgtcgaac

SEQ ID NO: 186960 - DNA, 122 bp, Homo sapiens
ggattctaacactcactccctggcctgcagggccccttgggaaagtgagttttagatgcacgtggggaggagagagtatgtgcaggagccagcaactccacaaaacgcccataaattgtgta

SEQ ID NO: 186961 - DNA, 122 bp, Homo sapiens
gcgtcggcgcctgccccgttgtgaggtgataaagtgttgcgctccgggacgccagcgccgcggctgccgcctctgctggggtctaggctgtttctctcgcgccaccactggccgccggccgc

SEQ ID NO: 186962 - DNA, 122 bp, Homo sapiens
ttcttttggaaaggagttgacggtaccttgtttcccgttgtactattttgaaagccccagcgatgatccttagtgggaaagtatagcttacattgccagccaggtaagtgagagactatatg

SEQ ID NO: 186963 - DNA, 122 bp, Homo sapiens
ctttccctctgccgtcacaggacttgcttccatctctgaacgtgaaagatgctgtgggggcgtctgcagcccctggagctggagcccccgccctccttcccctctgcctttatcttcctccc

SEQ ID NO: 186964 - DNA, 122 bp, Homo sapiens
ctgaagaaatgttgattggtcctcaccagtttcttgaattccccttttcccatttcacagcgggtcctccctactaaatcatattttccacctctgacacttagagcaagggcctcacttaa

SEQ ID NO: 186965 - DNA, 122 bp, Homo sapiens
tgaaactcaacattgcacaaggttgaaatttgaaaacaacaggaaggtaagccagcagcccggccctgggagagacgctcttggcagccaccagaaaggagctattgaccaagagaagagga

SEQ ID NO: 186966 - DNA, 122 bp, Homo sapiens
cggcgtctgtctggataaagccgcctccttcagctgatccgagatccggcgctgatggagcgattagcggcgattagagcccggcgtgcggctaatcctcctgctgagggacaggtgaagca

SEQ ID NO: 186967 - DNA, 122 bp, Homo sapiens
tccaaaaactacaaaaattagccgggcatggtggctcgcaccttgtagtcccagcttactcgggaggctaaggtgggaggtttgcttgagcctgggagtttgaggctgcagtgagctatgat

SEQ ID NO: 186968 - DNA, 122 bp, Homo sapiens
aacccagagacggacaagagcaggaaactccaaacccttcagcgggcaggacagagggtgcgggtgagggttccagtgctgtgggctgggccagcctggtaggaatgagaatccatatgcta

SEQ ID NO: 186969 - DNA, 122 bp, Homo sapiens
agcgaggtggctcggtggaggggcttcagatccccttcccaggaccctgtgacccgccatcggaagagagtggacctcattctatttcaatgtctgcatagtacagacatttgctgtgggca

SEQ ID NO: 186970 - DNA, 122 bp, Homo sapiens
gtgagtcaccactgagtcatccacaaccctcaggctcagggctgctttcccaagagaagccggaggaggcagaaaccccctggggagtgtggcactctgcttggctccatgtccaacatggc

SEQ ID NO: 186971 - DNA, 122 bp, Homo sapiens
gccaaattcagccccatcctgttcatccaggctaggagtatctgcccctgaagtcacacccgtctgccaagcagccacccacgccttcctgctctgatggggatgaaaaagggcatgttcca

SEQ ID NO: 186972 - DNA, 122 bp, Homo sapiens
gcccctaagtcgggaaggttccttgcggttcgcggcgtgccggacgtgacaaacggaagccgcacgtctcactagtaccctcgcagacggacagcgccagggagcaatggcagcgcgccgac

SEQ ID NO: 186973 - DNA, 122 bp, Homo sapiens
ccacaggcagccactttgcatgtccctgcttttgaaagacaacttaggaatgaagctaaacgagacatcagcagttttccaaatccaggtgaagaaagtgaatgacttcagcatgaaagaca

SEQ ID NO: 186974 - DNA, 122 bp, Homo sapiens
ttccagacctgcgagcactggaagcagatattcatggaaatcgtaggcaagcggcagcctcgcccctccatcctgggtgggcaggaggcagagggacctggggccgggagggcacagagcgg

SEQ ID NO: 186975 - DNA, 122 bp, Homo sapiens
ggtcctgggccgggcgccgccgaggggctccgagtcggggagaggagcgcgcgggcgctgcggggccgcaacacctgtctcccgccgtggcgccttttaaccgcaccccacaccccgcctct

SEQ ID NO: 186976 - DNA, 122 bp, Homo sapiens
tctcaaaaatgagaattctttaggagctgtttctaggatttgcaagggtaattttgacagcgtatatgccttattcactgaccttcggacctaactcctgtgttaagatgtgactctactgt

SEQ ID NO: 186977 - DNA, 122 bp, Homo sapiens
cggatgcggacctgaaggacagggttctgtctggctggagcgcagcctgggatgggccggcgctcagggaatggcttgtgcctgcgggatcagtgggcaccttcatggagcagctggcccca

SEQ ID NO: 186978 - DNA, 122 bp, Homo sapiens
agcgcaaagttagaaagcaaatttgcatacagcccctgggaagctggcctacagtttaaccgcctcaatttatttaacaaacctaagtaataaactttcttcacccacatgcttctcaacta

SEQ ID NO: 186979 - DNA, 122 bp, Homo sapiens
gggcgggcgtcccaccctcgcagccgcccaggcccggccggagctgatgagcgggtggcccgtcctgtgtccacagagggggcaagaatgagcccgaaccagagcagcccattcctcgcaag

SEQ ID NO: 186980 - DNA, 122 bp, Homo sapiens
ctcgggcggcaccgggacggcaggggctggtaccctccgcgccgcctgatgaggcttgtacggtgctccattctgcagacacgccgtcggaattaaaaatccacaggacccggccagagtca

SEQ ID NO: 186981 - DNA, 122 bp, Homo sapiens
gcctcattacgggatgccaagcattcccaccagtgggcagcctgtggcacctagaaggtccgctccttccacttgctttccttacacccagcccagtgggaaggagggtgtcacttcagcag

SEQ ID NO: 186982 - DNA, 122 bp, Homo sapiens
ccgggcttcagccccagctcctactgccttccagccactctcccctgcctttcctttctgcggctcttaggatgttgttgctgcccttaaaggccgtcgtgtgagtgccctgtcagaagaaa

SEQ ID NO: 186983 - DNA, 122 bp, Homo sapiens
tttcccatttttcagaacgcgtctgcggtcacagcgcacgtatttttcagaacgcgtctgcggtctgggcgcaagtagttttcagaacgtgtctgcgatcacagcacacatttttcagaacg

SEQ ID NO: 186984 - DNA, 122 bp, Homo sapiens
taggaccctccgagccaggtgcgggacacaatctcctggtgtgctgttttttaagcccgtcggaaaagcacagtattcgggtgggagtgacccgatcttccaggtgccgtctgtcacccctt

SEQ ID NO: 186985 - DNA, 122 bp, Homo sapiens
ggcgccgccggcggggcggcttcgggagggcgcggcccctttaagacgccccgccggccccgcccccgagccccgcctcccgccgcccacgtgaccccggtcttgtgactgggcccgggagg

SEQ ID NO: 186986 - DNA, 122 bp, Homo sapiens
gtgctattccccttggtcctgtttgggtgcaagtccccctcacgcattgagttcctgggccgctcaggctgctcctgtgtctccccagggaacatgaaggtcttgcaggagcccacctgcgt

SEQ ID NO: 186987 - DNA, 122 bp, Homo sapiens
tccgataacacaagccaagggctgtaaaattaaggttaaatcaagactgaatttcccgcacggaccagcaggaaagccagttacctaaaagagcctaatccccaaatccgctgaaggtgcag

SEQ ID NO: 186988 - DNA, 122 bp, Homo sapiens
aattctcattatttttagtcatcgggtcaagcggacacagggatgtgtttccagactttccgaacaatggagattaaaaaggcacagcaatcacatggccccccgggacagacgcccaggga

SEQ ID NO: 186989 - DNA, 122 bp, Homo sapiens
agtgggaggggccctttggggtacgcagctccgcaggctcagtcagaaacatccttcacccgctacctttctcagttgggggactcctaagtatttatcccggtcctccccaaaacctacac

SEQ ID NO: 186990 - DNA, 122 bp, Homo sapiens
catttctagtcaatggccacacttctctccctagctcagcaccatggtgctgctcacacacgggcaggcattctagatgagtcccccatctggcctaggaacttcctccctggcacttggtc

SEQ ID NO: 186991 - DNA, 122 bp, Homo sapiens
tatctcctcccgcatctcttagggcctggggactgaaacgagacaacatctctccaccaccgtccccagcctcttgtttgtttggtacgtcaatgccgtgggcatgtttttgctaatttcgt

SEQ ID NO: 186992 - DNA, 122 bp, Homo sapiens
ggggcggagcttaagcagcctggctaggaggctcaggttattcatttccggcggcggaggcggcagtttcctaagcttggcttctctccggtccgctgaccggcgtcagggaccaggttttg

SEQ ID NO: 186993 - DNA, 122 bp, Homo sapiens
tgggcactttcccactcctgcctcatcttcaagccaggctgtgccattaaggccaccacacgtttttcaggcagaatgattcctgaaatgatattgaaagctgggatttaaaaaaaaaatgt

SEQ ID NO: 186994 - DNA, 122 bp, Homo sapiens
cagttgttagtctttggcctgggacaacagatatggccatggcctttgccacttcacccacgtggctaaaggtcaccactaagatgtagtattctcagctctacctactcccaccccacccc

SEQ ID NO: 186995 - DNA, 122 bp, Homo sapiens
acctgccggaaggctcagcttcctgaccgcagggcggggacgtggactgtgcccatggggcggccgaggaggacggaggggaacccgccctgacctcagtgctgccggccctgctctcacca

SEQ ID NO: 186996 - DNA, 122 bp, Homo sapiens
tgtcccgtccctgcgcggccactgcggccctggccctggaggcctgtctgggcagctccgcgcccgcagtcctgcgtctccccagattgtgcggctgtaaccggcacaggttcgcggcccga

SEQ ID NO: 186997 - DNA, 122 bp, Homo sapiens
cctggcagatatttttgaagaaagagaacaagcaaacacagcagtggtggaggatggatccgattgcttagctgctgtcttgaggacttttggccacctatctcttggtcagatttgttgcc

SEQ ID NO: 186998 - DNA, 122 bp, Homo sapiens
tcccctcccggcagcagggcctcccccgcgaatctgagcttctcgcggattccttccttgcgctgttttggtcaacagcctcagcatctgcacagacgcccgcaggagcagccgagccctcg

SEQ ID NO: 186999 - DNA, 122 bp, Homo sapiens
gaaagcctacatcaggccagatgttccctaaacactggaaagtgggtttggggtaagtttcggacacataatccttccattagagagattaaaaggatgctttagagataagccgacttcac

SEQ ID NO: 187000 - DNA, 122 bp, Homo sapiens
ggagacagagtgtggcgagaacccccagggaccccctcccagggctggccttccaccctccgcccccgccaaccccacccgcattccagcgggatcagggggattaaagggcacagcatgtg

SEQ ID NO: 187001 - DNA, 122 bp, Homo sapiens
gtgctgggattacaggcgtgagccactgtgcctggccaagtttcgtagttttagctcttacgtttaggttttttgatccatttttgagtacatttttgtatatagcataaggttaggatcca

SEQ ID NO: 187002 - DNA, 122 bp, Homo sapiens
ctgcaggcgtcaaggacgcggaagcctttggagcgcgccaggcctgtgaggaaggcccggcggctgcgacccatgcgaggctcgaccaggtagatggcgactcccgggaagcgcgtcgaggg

SEQ ID NO: 187003 - DNA, 122 bp, Homo sapiens
caaactggggcgagaagcgagtgaggaggagatgcagaggaaggcaaagaacaactctagcgacccagggtgatccgggtgccggaaaacagaagctggaaaaaggagatctgccccggaaa

SEQ ID NO: 187004 - DNA, 122 bp, Homo sapiens
ttaggaactatgagcatgtcatgaagagccccagacataagccccagatgattgagagaccgggctacacacgtgtggatgtcccccgtgcatacacacaagcacccatccgataggctggg

SEQ ID NO: 187005 - DNA, 122 bp, Homo sapiens
tctggagcctcccggtaaatggtggacgtgggtggccgcagcagcaggagctggtggtggcgttggtggtgttggtcaccagcgctcttcgctcccccaggagttactttgttctcttcttt

SEQ ID NO: 187006 - DNA, 122 bp, Homo sapiens
cattgacacatgtggccagggcgtggcagtggctaagcccaggctcagcgcactcatccacgtctgtgcagccgagaccgggcgacaggcggaagccttcggggcagacgcaggagaaggag

SEQ ID NO: 187007 - DNA, 122 bp, Homo sapiens
gccgctgccgcaagcctcctctgctaccccagctgcgggcagtttggcccggcgctgtgccgctgtagttcggtgtcccttcgcccatcctgcaggccagcttggaaactgtgtcccatgct

SEQ ID NO: 187008 - DNA, 122 bp, Homo sapiens
gacacagaagcattcaatatgaatgaatgaaatttatcagaacatagatatttaagtgagcgttgtgctttaaattaagtatactgaaaaaacaggtttgtgcttgttgtactgattataaa

SEQ ID NO: 187009 - DNA, 122 bp, Homo sapiens
aatccaagcacctttccttgtctgaatgtgaactaggaaagggtgaggttcttctcctttcggaggttagtccatcaacttactaagccacagaatatctgaaagatgcaaaggcatatgtg

SEQ ID NO: 187010 - DNA, 122 bp, Homo sapiens
agacgtgagccactgcgctcggcctactgccctctttttataggggaagaacctgaggcacggagtgatgaggtgacacccatttggctagaaattgtagactagcaattccaagcttgaga

SEQ ID NO: 187011 - DNA, 122 bp, Homo sapiens
gcagaaaagcacacagtgaatgcagaggtagataaaatgcacattcatgcagcaaacaaccgctgagcacctaccaccgtgtgggttcaagataatgaacaaaacagaggatgcttgtcctt

SEQ ID NO: 187012 - DNA, 122 bp, Homo sapiens
ggaggagggcagaactcctgtgggttggctgcgaatctccacccaaccctgcctgggatccgcggacagtccgcactcctgcaggtgccagcgtggccctggagatgcgcagggaggtgggg

SEQ ID NO: 187013 - DNA, 122 bp, Homo sapiens
agaaggtgcggcttccagaagggagatcctgggaacgaggccgggagacacgcttggctccggagcctaggactggctccggggcacgagccgcagtcccctccagcacctcctggtggggg

SEQ ID NO: 187014 - DNA, 122 bp, Homo sapiens
tcaatgccgcactgaggtgtgcctggcttcgatctaccctaggaagggtctgccctggggcgccccattccgcgactgtccccagtgggaaccacgccctccatctaccagagccatttctg

SEQ ID NO: 187015 - DNA, 122 bp, Homo sapiens
ggggtgtgcagtgagcagtgccccggtgttcctgtgagggtgtgggcgtggccaccctgacgctgtccctgtccctgtctttgcaggacggctgtcctcagcgaggggccgtgcacccgctc

SEQ ID NO: 187016 - DNA, 122 bp, Homo sapiens
gatgggagccctggagtgggcaagaccaggccacctgctgaggtcgctgtggagcaccctcgctcctctcctggctactagctctggccctgcacctactctcactggccacctctggaggc

SEQ ID NO: 187017 - DNA, 122 bp, Homo sapiens
gcgagatgatgttttccagccgcatgttttatcaatatcacacttcccacagcctgacagcgcacggggtgcccccccccatcttcctgccgggctgcccggcccagatgctcactccttcc

SEQ ID NO: 187018 - DNA, 122 bp, Homo sapiens
ctgctgtgacccctcgggccccgcaccccagtcacacaagccagcccgttgccaagaccacggcagcccccaccacacgtcggccccccaccactgcccccagccgtgtgcccggacgtcgg

SEQ ID NO: 187019 - DNA, 122 bp, Homo sapiens
ccgaggagcccgggcgggtccggctggggcaggggcgcagggagccaggggtcagggctgcggcttccccagaggccgaggagcccgggcgggtccggctggggcaggggtgcagattctga

SEQ ID NO: 187020 - DNA, 122 bp, Homo sapiens
caagattatgtcaattggttagagccagccgggaatttcgtgcgggtgctgaaggagctgcgggagccggagaagaatgaaactgcgtggagtcagcctggctgccggcttgttcttactgg

SEQ ID NO: 187021 - DNA, 122 bp, Homo sapiens
cgtgggcaccaagccggcagtggagtagggcgccatgaaggccagaccgcggctgtgcgccgccgccgcggagtaggccaggcgcagggggctgaggccgagcggcgcgcccagcgggtagg

SEQ ID NO: 187022 - DNA, 122 bp, Homo sapiens
gccgtgagtcgacgaagggagcgcgggcgcgcgcccgcgtccgcgcactgagagtcgcctcggccgctcgctttctcgactcccgcctcgcgcctcgatcctgttccgcctccctcggccct

SEQ ID NO: 187023 - DNA, 122 bp, Homo sapiens
tccataaaggctgaggtttttgtctgtctgttttgctgctgtagccccagcaccaagaaccgtggctggcacacagtaaattcacagtaaaaatgtcgagtcaatgaacaatcttgacttgg

SEQ ID NO: 187024 - DNA, 122 bp, Homo sapiens
gttttgtccccccaaagtttcaagtacacattacgctctggcagtcaggacttccagagacgtacagagaaagaaagaaagaaaaggcgcggggagcgggctggaggattctgcaagcacag

SEQ ID NO: 187025 - DNA, 122 bp, Homo sapiens
gcgatcatcgagccctcggtctacttgacactgaggctgagcctcccaggtgcgctgattcgcctcccctccggttccagattgtgcacgcgccggagcagcggcgcaccagcccccggctc

SEQ ID NO: 187026 - DNA, 122 bp, Homo sapiens
cgggcgctcctggactctcggagggagtgagcctcaccgcgtactgccacccccagccggcgcccattcactttatggcagaccagggcgcccccagcccgccgcggcgagccgcgcgcgtc

SEQ ID NO: 187027 - DNA, 122 bp, Homo sapiens
gccaccgggctataaaaaccggccgagcccctaaaggtgcggatgcttattatagatcgacgcgacaccagcgcccggtgccaggttctcccctgaggcttttcggagcgagctcctcaaat

SEQ ID NO: 187028 - DNA, 122 bp, Homo sapiens
ggtgaactgcttgggcggctcgtcggcggcgcccgggttctggatgcagcactgggcgcgcgcgcagtccacagtcaccacgggctggcagcgcagctctcgctcccgctggttcatgggac

SEQ ID NO: 187029 - DNA, 122 bp, Homo sapiens
gatatctccatagcgattcccaattgtcactgccctctactttcagtccttcccaataagcgccactaaaaaccccagcgggcagagaaaacatctgtagctgcaggatatttgtatatcca

SEQ ID NO: 187030 - DNA, 122 bp, Homo sapiens
cgtctctaagacgcctcaccactgcctaagaagcaatcaaggtgacgcgcccaccggaaacggaagtagtcgactcgaggtgtgggactacctttcccagaaccctccgcagcgcagtccga

SEQ ID NO: 187031 - DNA, 122 bp, Homo sapiens
agtcagaaaacaccacatgtatatggagcatttgcgttagacatcagaagctagaggcggcgcccttctctgcagcaccctcagctaccctgggccggggcacctgcagggaaaacgctttc

SEQ ID NO: 187032 - DNA, 122 bp, Homo sapiens
ggtgggggctcggccggcccctcgtggcggacgcgcgggcacgccggattccgaggcgctcgcccacctcgtgctccacgctggccaggccacttacatcgagcccagggtgcccatccgtg

SEQ ID NO: 187033 - DNA, 122 bp, Homo sapiens
tccgcctactttggctggcgtctcctccgacccaaaggagagctgtggtgtatgtgagtgcgagtgagcgaggcagaggcggagaaactacgcggtgtggctgcaggtggagccttggacca

SEQ ID NO: 187034 - DNA, 122 bp, Homo sapiens
tcttctccctccctcctcttctgcctccctctgctctgggaggcagcagcattggcggtccgtgcagccgcgtgcgcttgcgcaagaccccccccctcctccctccccctcagtctccccat

SEQ ID NO: 187035 - DNA, 122 bp, Homo sapiens
gaatgaatcagaagctagaatagccgggaatcacattccatgccaaatgaggcaagcagtcgggcagcctgtgaaaggccagatatccggctatcatatgcaggccagtatccagagcgggt

SEQ ID NO: 187036 - DNA, 122 bp, Homo sapiens
tttaagatgttaatgattcacctgatataggcactagcatgtgcagcaatagcgcatgcacgtccagagaacagtccagagagtgcttaacagtgacaccccttcccaccccttcatgaata

SEQ ID NO: 187037 - DNA, 122 bp, Homo sapiens
atcgcacgggtccttccagaagcctcccctcctctgaagcccacagtccacagccccccacggttggcctccgccccgcttaggctccatccccgaactcaccggccagcccggtcctgcac

SEQ ID NO: 187038 - DNA, 122 bp, Homo sapiens
cacagggcctagcggctcctttcttccccacactcacctggaaagagcacatgagggtctcgtccacactcatcatggcgccagcattgtcaaactcgccacagtagttgggagctgagaaa

SEQ ID NO: 187039 - DNA, 122 bp, Homo sapiens
ttttttttttttttttgagaccgagtcttgctgcgttgcccaggccggactgcagtggcacgatctcagctcactgcaacctccgcctcctgggttccagcgattctcctgcctcagcctcc

SEQ ID NO: 187040 - DNA, 122 bp, Homo sapiens
ccgtcgacggccccggcctcggctcgttgattggagaaactgttcctagggtgtttgcggcgggcgggtttccgagtgcggtagcaggagggggcggggaggtaagcggaggctccgagctc

SEQ ID NO: 187041 - DNA, 122 bp, Homo sapiens
gtcagagtcggcccgtaaatcagctccagaacattccgggcaatgtcaaactcaggcttccgtctcctcttcagcttcttctcggagataatcctccacatcaattccccgaaaagcgtgtc

SEQ ID NO: 187042 - DNA, 122 bp, Homo sapiens
actccgaaaatccagatgtgtttgggggtcattcaaggcacactcccagggttcccttcgcggtagcatctcctggctttatggatcgaggggtgggaggaggagggagtgctcccgccctg

SEQ ID NO: 187043 - DNA, 122 bp, Homo sapiens
tcaactgtcaatttatttactcatctatttatagaaaccacctttcccaaagtcctgttccgagtgagggttcttaggggtctgtgctggagcaaggatgacctctcgtggctgagtcgcgg

SEQ ID NO: 187044 - DNA, 122 bp, Homo sapiens
gctgcagtgtgaatttacaagctgcagacaacaacctaatgagggagccaagctgttaggcgggctgctcgctccatgatgagatgctaaatgaaaagctggtgcgacacacgcagtttgtt

SEQ ID NO: 187045 - DNA, 122 bp, Homo sapiens
ccagcgtcgccctaggctgggactctagtaggtcttcggctcagttttggctgcagcgcccgcgtagatcgcttcggccgggttctacgcccggctcaactatgagccggtgcgcccaggcg

SEQ ID NO: 187046 - DNA, 122 bp, Homo sapiens
ttgtaccacagcaaccaacacagaaagcttgtgaacaaatgtattgggattttttctcaccgacaggcaagtaaacaattctgcagtggacaccagctgggtgttctccaatccaattcaat

SEQ ID NO: 187047 - DNA, 122 bp, Homo sapiens
ccgagctgttgccgtccgttgccacggtaaccacggagccgcacagcctagcaagccgcgcgatgattggaggaggcaagcgtcaatagcaaccaccgccccagctgctaggtgcaaaagaa

SEQ ID NO: 187048 - DNA, 122 bp, Homo sapiens
gccacaggaccccctgcctcagtgctttccagctgttaaagcaaactaaatacggccatacgtctatatttgagttcttgtggatgaactgtaacctagcttaatagtcagacaagattgaa

SEQ ID NO: 187049 - DNA, 122 bp, Homo sapiens
gcacgggcctcctcacccaccatctctcccgtgcgcccactcgcttccctctcgctcactcgcacgcactctctcgctaggaaacacggaaggtattttgtgtttggagctagtaaccttgg

SEQ ID NO: 187050 - DNA, 122 bp, Homo sapiens
tccaggatgcctgttccttcactgtccgtgggattccaggatgcctgctcccgcggcgtccgtggattccaggatgcctgcttccacaacgtctgtgggattccaggatgcctgttcccaca

SEQ ID NO: 187051 - DNA, 122 bp, Homo sapiens
ttgccccagcaccatcaggccccttctgaacgcgcacagcctctggagtccagaacccagcgggacccgcattccccccactgagcagtgtactcagaacaaaaccaccccgaagcacctgg

SEQ ID NO: 187052 - DNA, 122 bp, Homo sapiens
gtcacagtgagtttatgtactggcgcctgtgtgtgtcaagatatgtgtgagcctgtgagtcgtgggtgcatgtgtcgccatcatttctctgtttgaatgtgtatgtgcatgccactgcaatg

SEQ ID NO: 187053 - DNA, 122 bp, Homo sapiens
ggccaggcgggccctctgggtccctaagagccagaggagcgcccagtgcgccccggcccgcgcccccgcgccgcgccccgccccgccccgcccggtgctcccagtccctcccccacccctgc

SEQ ID NO: 187054 - DNA, 122 bp, Homo sapiens
tccagctgggggtcccggtagaactctaccacttccttctcctccagcctctccaagggccgctgggtcctcagctgcagcagttggctcctctgcgcctccagctcatgctgcacccgggc

SEQ ID NO: 187055 - DNA, 122 bp, Homo sapiens
cactccagtttctaatttcttctcctgttggcaagaaaactacaacactcttgtttctttcgaggtggtaaatggctttgctttggacttctcgggaatagtacaacgcactctgcgggaaa

SEQ ID NO: 187056 - DNA, 122 bp, Homo sapiens
gccggggtcgcgcccagtcacagggaaccgcgtgtgaggaccatcagtcagacagacagacgcaaagacgcacagacccggcgaggagggacagagtggagctggcgccggcctacacgtca

SEQ ID NO: 187057 - DNA, 122 bp, Homo sapiens
tagatgttgattcaactactgattctcaagggcgatgggaggggaggccccccatacacacgttataaggtctggagacattttgggttgccataactggtggtgggggttgggggagcact

SEQ ID NO: 187058 - DNA, 122 bp, Homo sapiens
gtgagtgacatagaatctactagaaaagagggcattttaaaaaaagtaggctgggtggagcggctcacgcctgtaatcctgaagggggccagcccctccacacctgtgggtatttctcgtca

SEQ ID NO: 187059 - DNA, 122 bp, Homo sapiens
ttgctggattccctgggaagctgactctgagatggagattagcgtgcaggacatttcttacgggttgttcttgggatcaatacctgtggagaggagaagctgaggcaggatcaggaagcggg

SEQ ID NO: 187060 - DNA, 122 bp, Homo sapiens
tttatcatgttcattttctaggcacactgccttttatgaatcaaattaaacttcattatgcgtctagtctgtgctcacattccaaatttgtgttgtctcaacgaagaagacctggctttatt

SEQ ID NO: 187061 - DNA, 122 bp, Homo sapiens
tagcagaggctctcaatgagggccccacccctgctgcaaacttctgcctgaatatccaggcgtttccatacatactgcgaaatctaggcggaagtccccaaacctcagttcttgacttgtgt

SEQ ID NO: 187062 - DNA, 122 bp, Homo sapiens
ccccgggcccgggcggactctcatgccgagagaccggagcggaaactggggaagctgccgcgcggagccagggtcagcgaggcccggcccggcccctgccgctcatggcccggcctgccgcc

SEQ ID NO: 187063 - DNA, 122 bp, Homo sapiens
gtagctgtgtgccttggacaggtcatatcagattaggaaaggtgagaatgagttgaggaacgcagcactctgggatcatggttccagctccgggcagagggttacatcgtgtcaagtgtgtg

SEQ ID NO: 187064 - DNA, 122 bp, Homo sapiens
tcgccgagacacgaaatgaaccaagaacacaactgaaatggtgcgtcccgctgccaaacacgtccccgccctctcttccgcttccggcctggcgccttcctccccctttgcgctccggtggg

SEQ ID NO: 187065 - DNA, 122 bp, Homo sapiens
agaaagagggtggtggccgatagctggtcctctttctccaacacctagcctgagacttggcggcgcggctgctatcctgaactagcttggtaagtgttgtgtcccgaaccagcgtagagaga

SEQ ID NO: 187066 - DNA, 122 bp, Homo sapiens
gccccagaaggcccctctttccgccttgctggatggggatggcctgttttcctggctcaacgcagggcagagtggtagttaggaggcgagactgacctgggttcaaagcccacgctgccaat

SEQ ID NO: 187067 - DNA, 122 bp, Homo sapiens
ctaggcccctcactgcccagtgccggcggggccggccggctgctccgagtgtggggcccgcggagcccacgcccacctggaactcgcgctggcacgcaagcaccacgcacagacccggttcc

SEQ ID NO: 187068 - DNA, 122 bp, Homo sapiens
gaggggtgcggtctagcttcgaatgtacaggttatgggctatgctgggtacggctttctccggatcctattttgagagattccccaccttgcgttgtattttacacctaaatggagagaaga

SEQ ID NO: 187069 - DNA, 122 bp, Homo sapiens
tgaaaaaggaagcggcccaggaggacgactcctttcagtcctctgtagagagaatacgcacgatggctgcgcttctgaactctcccggggtggaagctgcagcctggcttttaaccggaatt

SEQ ID NO: 187070 - DNA, 122 bp, Homo sapiens
acatgaagaactgaggccccagccaagagccagaaccaactattagatgtgtgaggaaagcggccttggacatcccagcctcagtcacacctccagctgaatgcagccacaagagtggcccc

SEQ ID NO: 187071 - DNA, 122 bp, Homo sapiens
tctttcccaactgcttttttcagggctgcattccagtatggtatcaaaatgtctgaagggcggaaaaccaggcgcttcaaggaaaccaatgacaaagcagagcttgatcgccagtggaagaa

SEQ ID NO: 187072 - DNA, 122 bp, Homo sapiens
tattaacaagagcatggtggtgagaattaatcatcatccaagagcctggctcataataagcgcacaatagtattgttattttcattatgaaccatgaaatatttcagctgaaagggacctgg

SEQ ID NO: 187073 - DNA, 122 bp, Homo sapiens
cgtaggggccctcggaaagaacggatattgctgtgacaccgcggggacgctctgaagggacgagtgtcggtgtggcaccggtgcacgctgaaggagccggcggaaccgggtggccatgggga

SEQ ID NO: 187074 - DNA, 122 bp, Homo sapiens
ctgcacagctgcgggatcaccacactggactcaaataccatagcccaatattggtatttccgagcatggatgtttttccagagctcttccaggaaccgccggtccacaaagttatcaggaaa

SEQ ID NO: 187075 - DNA, 122 bp, Homo sapiens
ttttttttttttgtatttttttgtagagacagggttttgtcatgttacccaggctggtctcgagctcctgagaccaagcgatctgcctgtttaggcccaaagtgctgggattacaggtgtga

SEQ ID NO: 187076 - DNA, 122 bp, Homo sapiens
ttaacacacgtaagctgcctggattacaggcgcaggcagacgtagaggaggacccctgcgcgctttgtccaccagcgacgcctggcatagagtgcgcagggccgtattaatgagttctagag

SEQ ID NO: 187077 - DNA, 122 bp, Homo sapiens
ccccagcccccgggtgcagtccccagcatcggctgcccccgccccccgcgcgccctctgacgcaaacgcacgcccctgccccgcacggaggaaagcgctcttgttggttttaattgagcctc

SEQ ID NO: 187078 - DNA, 122 bp, Homo sapiens
gatgctttaatagaccaacaccagaggtggcaattgctcccgcacggccactcgtgcccacggattctaagactccaccttccaagggaggggccttaaccccccagagcctcccagagtag

SEQ ID NO: 187079 - DNA, 122 bp, Homo sapiens
ggaaaagcagttggaggtctcttccagattgctcttctgccgaattatttgtatctattccgagctgattatgtaataggatggaaaaagtaaaaaaaaaaaaaaaaatctaatttgtattt

SEQ ID NO: 187080 - DNA, 122 bp, Homo sapiens
ccattcttaatgctttgtgtacaacaggggacaactgggcccaagaagtgctggagcttgcggaggtcacactgtgttagaggacaaacctgggctccaaccagatctgcgactctaggagt

SEQ ID NO: 187081 - DNA, 122 bp, Homo sapiens
ctattgctgttctctagaatccagcccaattctcatggttaaatataaggtatgtatagtcggcattgctttttgaaacaaggaactggagatggccctgataggggtttatgttctggatt

SEQ ID NO: 187082 - DNA, 122 bp, Homo sapiens
agctccgggggcttttacgactggcatcaggtcctgctaattacagggacacatgtgtgccgggtgtgcgtgggagtgtgtgtgggagcatgcgtgggatcgtttatttgagctggatgagg

SEQ ID NO: 187083 - DNA, 122 bp, Homo sapiens
cccagtccttcacgcacagcccgtccggggaccccaaggccgacaagcgccgtggcccaacgccggccgatagggaccgccccagtgtcccagccccagtccaggcagggggccgcagctcg

SEQ ID NO: 187084 - DNA, 122 bp, Homo sapiens
tctgaatcgctcccgggtgaagtaacccaggctggagatcccgagggcgggtgagcacaccgccggccgatgcggccgtgggccgagcacacagactgcactgggcacccaagattttcccg

SEQ ID NO: 187085 - DNA, 122 bp, Homo sapiens
gaaagggttcacttccaggacagctcaagccccattaaagcttgctatcacaggtcatgccgggtgcagtctgtaatcccaacacttcgggaagccaaggcaggagaatcatttgagctcag

SEQ ID NO: 187086 - DNA, 122 bp, Homo sapiens
agaagaggccagactggagctcaataaagccaggactcactgcttttgtggacagcagtgcgcagacttaggttctcctgcttgagtttctggttgctgtgttgcagaaagcgaatgtagtc

SEQ ID NO: 187087 - DNA, 122 bp, Homo sapiens
cctaggggaggaccggcgtcgggaaagttaagaggtgctcggggtggggtcaggaagggccgctgctgccctcctgtggccaagcggccacccgctcctgctgcacctgggacctcgcggga

SEQ ID NO: 187088 - DNA, 122 bp, Homo sapiens
gcctgaagccatccgcgccatcttggttgaggacgagtgccaggcctggaggggcggggccgggcgctgcccggtagggcttgtggctggaaccccaggctaggcctttggggaaacgggac

SEQ ID NO: 187089 - DNA, 122 bp, Homo sapiens
gtgcagtgactttatccaccacttctctgggccgtccaggttccccttcttgggggggggcggggattttttttttaatttaaaaaagaaaaagaaggaagggatggggcttcacagaaccc

SEQ ID NO: 187090 - DNA, 122 bp, Homo sapiens
ggttttttaaaaaaattaaaatacaggtgcaggggcttgggctcgggactcctggacccacgtggggctgagcgtggatggtgtttggtgtccggcttcactcccaaaccgcacccggaggg

SEQ ID NO: 187091 - DNA, 122 bp, Homo sapiens
atgagggattgtcacgcagccagacatctcaagacatgattctgattcctccacgttgctcggtgtagatatattggctactaagatggcattggacctgatgtgggagatgatgccattct

SEQ ID NO: 187092 - DNA, 122 bp, Homo sapiens
gcgccacccacatgggtgcctaagacgcccgagcccctgtgacagcacaatgccactccacgcccctgcagggccccctgcccccggcaccctacaccgacaccggcgtgtcacccatattg

SEQ ID NO: 187093 - DNA, 122 bp, Homo sapiens
gcgtggccctgccggcgctcctgctgcgccgcctgcggaggggcagcctgtcggtgcgcgcgctcctgcctgggccgccgctgcagccgcccccgcctgcccccgtgctcctgtacgaccag

SEQ ID NO: 187094 - DNA, 122 bp, Homo sapiens
ttccactgcagccagtgtcagcgcagtttcagctccgccaaccggctgcaggctcatgggcgggcccatgttggtggcacacatgagtgtacaacctgctccaaggtcttcaagaaagcagc

SEQ ID NO: 187095 - DNA, 122 bp, Homo sapiens
gtgagggagggagctgcgggaggcggggtctggacggcgggggccgagcggggcgggggccgagcggggcgggggaagcaagggaaagttgatcgcggacttgagcggcggcggcggctcgg

SEQ ID NO: 187096 - DNA, 122 bp, Homo sapiens
aaatttagctaaaataaaacctttttttaaaaagtaatcaatttgccagagttacctaaccgggggaataaaaaggggaaaagaatctaattatatcacttccttgcttaaaaatcacctct

SEQ ID NO: 187097 - DNA, 122 bp, Homo sapiens
tgaggaagccccgcctcggccgcagagcgcaggggaggccgcctttgcccgcccggcctccggttctcccagacaggctctgcaagtggccccatcacctgaatcatgacactgtttgttga

SEQ ID NO: 187098 - DNA, 122 bp, Homo sapiens
ctcatcctaaggaggggccccataggcagttcaaggagtccacacataggcatttcaaaacgggctttaaatactcatcagggtgccacacaaaggagctggggtgagaacttcgtacatgt

SEQ ID NO: 187099 - DNA, 122 bp, Homo sapiens
ggagtgtgggtagggatttggggctgtgtacacatgagcagggctgaagtgggaggacatcggagtagtgacatgaggagtgttttgccaaacttgcaactggagttaccccaaaagtggcg

SEQ ID NO: 187100 - DNA, 122 bp, Homo sapiens
aaatttataacacaaatgaaagatagaaaagtaaaatgtggcttctatcgtacagtcattcgggtgaattattaatgaatgtttcatcaggatgaatgtagtgctaaacttctattgtttcc

SEQ ID NO: 187101 - DNA, 122 bp, Homo sapiens
agccacgtgtcaggagtcacgtgtcaggtgtcacgtgtcaggcgtcacgtggctggaggccgttggagcgcctgcgcagcttttccgcacgcgcctcgccggcgcgcggctctctcagcgtc

SEQ ID NO: 187102 - DNA, 122 bp, Homo sapiens
gccgtctgccaccaatccgcgcagggcagcgaggaggagccacagggctgagctcggttgcggcgcagccccgccgcagtgcgcaaagccatattcgcgaagtctctgaggctgagccagtg

SEQ ID NO: 187103 - DNA, 122 bp, Homo sapiens
cccctcctctgttttgattcgagtgaccacgtcactcttagccacaagacccggatctgccggctcccgcgggcggcggcgcaacagattgcagcgcctggagactccagctgccccgcctg

SEQ ID NO: 187104 - DNA, 122 bp, Homo sapiens
tatctttaagccagatagtggtggttttcttgtgtattgacattttggtgctctttaaagcgactgataattgggctaaaattaggattaagaggcctgacagatttccaggctgttacatg

SEQ ID NO: 187105 - DNA, 122 bp, Homo sapiens
tccctctgcctctggcctctaccccatttccatgtcctccccgagcacctgtgagagggacgcaggtggcctcactggcctgcaggctcttagctttcctgggctgccctgttgctggccct

SEQ ID NO: 187106 - DNA, 122 bp, Homo sapiens
gcctgcgcaagtgggccgagcgcagacattgcgcctgcgcagcaatgccatcggttaaagcgcatgcgcaagatgagctattgcggaagtgaggggagggagaggccgagagaaatttcggt

SEQ ID NO: 187107 - DNA, 122 bp, Homo sapiens
tggtggggtgcttcactgacagcttgaagaatatcccaccattgtctagagagcgttgcccggtgagagtatgggctgacagggatgtggcaaaggcgagacagaggagttgtgcatgtatc

SEQ ID NO: 187108 - DNA, 122 bp, Homo sapiens
ccgccgcccgaagttgcatcttcccctatcctggaattgacgagcagagcaactacccaccgggaaagccaagtagccctccccgcgcccggggggcccctccccggcgcacccccctcccc

SEQ ID NO: 187109 - DNA, 122 bp, Homo sapiens
aaacgcggcaccaaaacctacgtccgctccaagggccggaagttcgagcgtgccagaggccgactggacaaccaaggccacaaaaactaacccggggctgggagcggtggctcacgcctgta

SEQ ID NO: 187110 - DNA, 122 bp, Homo sapiens
gccgacaatggaaaaaaaattaccctgcgtttgtccgggggagatgtgtgcgtgggtccgcgcgccccgcaccgacactgagggctggcacgcccttactgtctttcgattgtgctggactt

SEQ ID NO: 187111 - DNA, 122 bp, Homo sapiens
ttagaaatacctctcttgttttcccagggcttgctatgagagtatcactcacccatcccccgcccctggtcctcctgctgaatttcagagcccatctagccatcaactacccgcgcctccac

SEQ ID NO: 187112 - DNA, 122 bp, Homo sapiens
agagcatgacaatggggacagggagccaagtgggaggggtgaggactaaggctcaccagacggcctacattaaaatagaattggcctgggaggctagggtggagaagccagagcaccaggcc

SEQ ID NO: 187113 - DNA, 122 bp, Homo sapiens
atggccctataaattgttatttcaatgtgcattttaaataaaagcgttcgggcaaaaatgcgctgttctcattcactagagcctcacatgcaaagataagttatctaagtgaagcgtctgga

SEQ ID NO: 187114 - DNA, 122 bp, Homo sapiens
agactcttaagtcagaagccttactgaaatcagccagaaagagctgggatcttcttcaatcgtgatctcaattaatgaaggccctcacctcctagcccttcaatcatctccactcaccagca

SEQ ID NO: 187115 - DNA, 122 bp, Homo sapiens
gtccacgacaacgctgccttcccagtgtgggtggaagccaggaggcgattactcaagctccgaaactgaatgtgctgagcccacagtcccgcaggaggaagatgaccgggtaggtggggaag

SEQ ID NO: 187116 - DNA, 122 bp, Homo sapiens
cactgacgaagcagtgttctggaaggcccctatggggccaggcattaacccctaagctgccggatctgaagcagtgttgggggtgtgccaggacaattagggacactcagaggggtttgaag

SEQ ID NO: 187117 - DNA, 122 bp, Homo sapiens
gtaggctggaccaggaaggagacctggttcgtttcgcccaggctgtcacggcttcaagagcgcctctccgctatttccgtcgctcgacagacgggctgagctctttggagtgatgttgggtt

SEQ ID NO: 187118 - DNA, 122 bp, Homo sapiens
tcatcgagccgatcggcgctcggcggcctggcgccaggcggagggggcgggtccagggcacggagataatcgaggaagtcgatccgccgagccctattcacctaaaagagcccgaacccaca

SEQ ID NO: 187119 - DNA, 122 bp, Homo sapiens
agacctgacaacagccgttactctggctgacaagtcattggatttctggcgcacgcgcggcgcggcacgggcagcttccggtttccagccttgcccccgcccctaccttccgccccacctcc

SEQ ID NO: 187120 - DNA, 122 bp, Homo sapiens
tgcaaggactggagaatgcacttgactgctggctggtccatctcttaattggcgagtgcgcgtgacaaggctcagccctggctccacagggagccaccaagctgactcaactgatacaaatg

SEQ ID NO: 187121 - DNA, 122 bp, Homo sapiens
tggggatggggttctggctcgtgggcaatctgggtgtcaggcttacggccccagtggctccgggtcatggccttggccccacaatggctgtgctgccccatcagtggtctctgcagctgggg

SEQ ID NO: 187122 - DNA, 122 bp, Homo sapiens
tccgtaggtggagaatgtaggtttcacccaggtgccgcttcagtgtccgcctcagctcagcgggcaagcatagggtgggctctaggtgttccagagccccgtggcctgtgccgtggcaagcc

SEQ ID NO: 187123 - DNA, 122 bp, Homo sapiens
gagccccaggttcttcctaggtgagttgtgaagcttgaaacgatcattttacccctgaggcgcagtgtccttacctgcccacgggttcctgattcccacctgccaagtgggttgtgagggca

SEQ ID NO: 187124 - DNA, 122 bp, Homo sapiens
tcagacggctcagagggcggctgcggaactgagaaggcatctgctcactgcactagtgtccgcagcagggccggaaagagatgatcttcgcctgtacacttcatggagtcttgaattaatta

SEQ ID NO: 187125 - DNA, 122 bp, Homo sapiens
accacgcttttcccgtaggaagaaccgatgatgagccctgatgaaagaaggaagaagacccgctgtctgcgaaggcctaaaggttagaaatacagcaatttttctcatgccgaaggaaaggc

SEQ ID NO: 187126 - DNA, 122 bp, Homo sapiens
ggcttttaatggactgcattatggaaggccgtgcggggccagtcggtggggagataaggccgctgggcgtgcatccatctcatggctcagtcggcccagtgtctctcagtgctcacgtctgc

SEQ ID NO: 187127 - DNA, 122 bp, Homo sapiens
cccagccagcgcctgctgccccggaggccccagaagcgtgggacgcgcggagatggccgccggtgtgatccggcccctgtgcgacttccagctgcccctgctgcgccaccaccccttcctgc

SEQ ID NO: 187128 - DNA, 122 bp, Homo sapiens
cagattcccccatccttctggtataaaacattcttgaaataccttgtctatgatttctaacgtcagtgtctttagatggagaacttaaaatgcttggtaaacaatctgagtctggaattctt

SEQ ID NO: 187129 - DNA, 122 bp, Homo sapiens
ttcctacccattggcttgcatgatggaatcaccacctcttcagacagctgctgttatccgcgactcttccttcattctcgctgccagatcccacttcgtctccggtgctacctctgtatgcg

SEQ ID NO: 187130 - DNA, 122 bp, Homo sapiens
ggaaactttaaatgaggcaacaaggagaagcagtcggggccggggaatccatgttgctgccgttcttggggccaagggcctccagaggggactgggtgggaagcagagtgggcagccgtggc

SEQ ID NO: 187131 - DNA, 122 bp, Homo sapiens
acatttagaggagccttaagaaggaggagatgctttcattcaattatatgttttgtataacgattacttctattttgctgatggacaaactgagaggaatccacttagaagagtagaaaaaa

SEQ ID NO: 187132 - DNA, 122 bp, Homo sapiens
ctttcttggccgcctgtgtccccgtctgccggctccgtccggccgtccctctctctgccgcgtctctgaccctcggcgccacagctcctcagctcagggcccgtcccagaacctccttccag

SEQ ID NO: 187133 - DNA, 122 bp, Homo sapiens
atctcacatagagctttctgataaatcatagctctgccagcacattcatttcagacttctcgcttccagatctgtgagagaataaatttctgtcgttttaagtcacccaatttgtagtaatt

SEQ ID NO: 187134 - DNA, 122 bp, Homo sapiens
ggaacacacttacagagaggggtagttgcaaagtctgttacgtaaatctcaatgccctagcgagcgtgatgctctagttggcccctgttcttcgggaggcaacttagaagagagtattgagg

SEQ ID NO: 187135 - DNA, 122 bp, Homo sapiens
aggtttatttgttgcagggcctctctgagcctttaaaaatgctgacagcgtggccaggcacggtggctcaggcctataatcccagcacttcgggaggccgaggtgggatgattatcggaggt

SEQ ID NO: 187136 - DNA, 122 bp, Homo sapiens
cgccgccgccgaggccaccgttgactctgattctgtcccaggccgccgggccacggctgccgccgccaccgccagcaccgcctccggcctcccacctgctgctgctgaggctgctcctgcag

SEQ ID NO: 187137 - DNA, 122 bp, Homo sapiens
cgcacctgcttggggcacctccccgggccctccacctgtctagggtatcttcctgggtcccgcacctgtctggggcacttgctcagacactgcacctgccccgggtacctgcccgggccccg

SEQ ID NO: 187138 - DNA, 122 bp, Homo sapiens
tgccgtgctctgcctgcccaatgctgccggcaccaggttaccacgcagggctccatgggccggcatccactgcacatctcgagcacatcctctggtttgacatggggtcacacggtgctgcc

SEQ ID NO: 187139 - DNA, 122 bp, Homo sapiens
gccagtaaagttctgtgtcacgtggggcctctcaggaggggtgcggaggtgggggaggggcggggagcaggactccactgctttggcctcaaggagtttggtcgacacttgaagactgacca

SEQ ID NO: 187140 - DNA, 122 bp, Homo sapiens
ttattcattcatggtaaacacacctctaactgagggtattcttaaattgcaggtttagtccggaagtatctgggggtctttctatttttgcaaaggaagcctaaagagacactgctaggaag

SEQ ID NO: 187141 - DNA, 122 bp, Homo sapiens
gggctcggggcccaatatcaggcatgattttttaaactacacctatttttccacaaagttcgattctctaagcttttgtaagtttttttgtaaaaaaaaaaaaaaaacaaaaaactggttga

SEQ ID NO: 187142 - DNA, 122 bp, Homo sapiens
cacacatccacacgcgcgccaggaaacacactcgcaggtcagagggcgcgcgcacacacgcgcacacatggcagcctgccccaggatggcaccccgggcaataagagtcccaccgtttgcta

SEQ ID NO: 187143 - DNA, 122 bp, Homo sapiens
gggtgtccctgagaggccacctttcgaccttcgagggccaggaggatacggggaggtggccggagggagttcccgaacacaggtcttcctgttcccgccgagcaggtgttggcggtgccagg

SEQ ID NO: 187144 - DNA, 122 bp, Homo sapiens
tggggggcaagccatgaccggggtcccaggtcacagccccagagctgaccgcgggagggacggggccaccagctccatatgcggcccgccagccgcatcccgccggctccaccagcccatcc

SEQ ID NO: 187145 - DNA, 122 bp, Homo sapiens
aggatcacacggaggatcacaccaccggtggtcacgagacagactgaggtaaagagcaggcgcccacaacatcccaagggaggatcacacggaggatcacaccgccggtggtcacgagacag

SEQ ID NO: 187146 - DNA, 122 bp, Homo sapiens
acatatatattctttctgtaacttacttattttctgtctttctttagaatgaaagctctacgagagcagttgctttatctcttttgctttgtgtttcccccagggcctggaacagtagccac

SEQ ID NO: 187147 - DNA, 122 bp, Homo sapiens
cccatcgtggcaaggcaggcaaggggacggccaggatggtaggtggggccccaagtgttccggtgttttgtcagtgtggctggggactcccagccgggcaggtgctgcaatgcgctggctcc

SEQ ID NO: 187148 - DNA, 122 bp, Homo sapiens
agggaaaactagaagggagccttacccaatacaaaggacaagggaatgaggtctgctgagcggttgcagtaccgggccacctgagcatacacgtacctctgctcctgggtcagcagcagcct

SEQ ID NO: 187149 - DNA, 122 bp, Homo sapiens
ctgtttgaatacctccaaggacagggagctcactacctccttgggaggaagagctgcctccgccccagttccgggaaggcttacttgacttcccgggaaagacatgaatcagcaggtctgga

SEQ ID NO: 187150 - DNA, 122 bp, Homo sapiens
gtggtcaggagactcggagctggtgtctgcgggagggcacaggcctcagcacagagcgggcgtctgtggggagggaagagtctgcccacccgccgggcccctgctcaccgatgttgtagatg

SEQ ID NO: 187151 - DNA, 122 bp, Homo sapiens
ctccgcccctcaggaggcttagagcccctcctcgcctccccgccagccccggacgggacgcgcattccggtcccgctgcaccgctagggtgagccaccggcgcccccagcccccgccaggag

SEQ ID NO: 187152 - DNA, 122 bp, Homo sapiens
cgtgttcgctctgggttctcgttaagtgcaagcatacagaggcgccgagaccccgcggctcgccctcgccgcttcctccacaggagccgggcggagctcccggcgcgccccggggctgcgcc

SEQ ID NO: 187153 - DNA, 122 bp, Homo sapiens
cagcgtgagaattccaaaaggttctgcacactcggtggagaagattgaattcagagcaagcggatgcccccgaaagcaggctctgtccctttaaatgggttgtagtggtgggggaggggaac

SEQ ID NO: 187154 - DNA, 122 bp, Homo sapiens
ggacgccacgctccttctgcactgaggtgagccctagctcaccatgaggattgccatcaccgggcaatcctctgccctggcaaagctcagaaagggcaccaattccctgtccagcggcatcc

SEQ ID NO: 187155 - DNA, 122 bp, Homo sapiens
gacccccgccccgcccagcgatctccgtgccctgagtcccagtgacggccccctggacagcggagcctgctgcagcgacgcgacgcgctgggtacacaaacataaacattgcgccacccgcc

SEQ ID NO: 187156 - DNA, 122 bp, Homo sapiens
gaggtgtctgggagttgggcgagagctgcagacttggaggctcttatacctccgtgcaggcggaaagtttgggggcagcagtgtcattggcctgacgtgaggaggagggacttttcgaagtt

SEQ ID NO: 187157 - DNA, 122 bp, Homo sapiens
gaaggagagacaaagcaaccgccaggcagatcccggaagccgccctctcctttccggcggcgcgcctgattgaacggtccccaccccagcgcccctgattggatggggcttcaggccccgcc

SEQ ID NO: 187158 - DNA, 122 bp, Homo sapiens
ctcgttaactctgtaagtgccacgagggttggggcaaggggaggaaataattggaggcagcgaagcgcttcactgccattagcacctaaaggagatcctgggacccaagtccagctgccagc

SEQ ID NO: 187159 - DNA, 122 bp, Homo sapiens
acaggcaaaaagaagctatacaactgtgtccagtgcaagagaccaccaatcaatggggaacgtgtttcaacctgacaacactgcagcagttatttctgtattctaacttacggaggttccaa

SEQ ID NO: 187160 - DNA, 122 bp, Homo sapiens
ctgccatcttaggcccagtccccgctgcgcgctgccatcttaggcccagtccccgctgcgcgctgccatcttagggttttgcttagggggcagatagaaaatagtaaatgaaaccctttcag

SEQ ID NO: 187161 - DNA, 122 bp, Homo sapiens
cgcctctctggacctcttttttcatctgtagcttggggataacactgactaacatggccacgctgagcactgcaaatctagcctgattgccagtcagaatgcacgcccggcctcgctgtttc

SEQ ID NO: 187162 - DNA, 122 bp, Homo sapiens
gaggctcgatgaaacctcgactcgcgttgcagcgcacgtccgaccacactcgcctttgatcgcatttatcactggggatccagaggtcagggctttgtgtctgcagcggtccctgggaaaca

SEQ ID NO: 187163 - DNA, 122 bp, Homo sapiens
gagccaggactcagctgcagtggatggagcagacacacaagaggtgccccactgtgagaacggtgtccgtccctggcaaacctctcgacccctccccgctctctcttcccttttgttcaatg

SEQ ID NO: 187164 - DNA, 122 bp, Homo sapiens
tgcctcaagaacttgtccaggatgaagttgctgaagttgcggttgagctgctcgaattcgcggaaaacggtgcgcaccgggttggggaagtactgcagccagggcatcacgtccaccaggct

SEQ ID NO: 187165 - DNA, 122 bp, Homo sapiens
gcctcctcccttggcgactccgcctcgggccgctgccggggctccgcccacttgagccgccgccacgtccccacctcacgctccacacgcctgcctgcgtcctggtccccagctccggtggc

SEQ ID NO: 187166 - DNA, 122 bp, Homo sapiens
ccctccggcgggaagagctgggcagggcccgcggagtgcagggcggaggcactggcggtccgcacccgggtgaggtgaggcgcgtaaccgcatctgagccggactctttaggacgagtcccg

SEQ ID NO: 187167 - DNA, 122 bp, Homo sapiens
gaaggggaacgggagactggagtcagcaggcggcctcccaaagtggagaatccaggtccacggtccccttgcttgttccgctccacattcctacagcagcttagggaaagtcatttaaactc

SEQ ID NO: 187168 - DNA, 122 bp, Homo sapiens
tgagggacgccctcaagccggtccatttgtgcggctgggctgccctctggcggctttatccgggtgccatccagagtcaaaccctcgaaatcgcttttcgtactgagttggtctgcagaaag

SEQ ID NO: 187169 - DNA, 122 bp, Homo sapiens
acacggcagcaggggcagccgggatgtggcttacgtgcctggggctgctccgtggccatccggcacatgtcctccgggtctagctccacgggatcatagcctagcttggccttggcggccgc

SEQ ID NO: 187170 - DNA, 122 bp, Homo sapiens
actgcatgtaccgtggcttggtcacagcccgctgtgctttttcctcctcggtgggggcctcggggtccacctcgatcatcttctggtacatgtccttccgcaggctgggcttcttccgggcc

SEQ ID NO: 187171 - DNA, 122 bp, Homo sapiens
aagatttggaggatgtcaaagagcaagcggtacagacatctgaggaagagtgctccaagtcgagtccgtatacacgcctgacgtgtccgagaagactcatgatgtggcctgagcaataccga

SEQ ID NO: 187172 - DNA, 122 bp, Homo sapiens
gtcggagcggggcgcgggcgcgcggcggcgggggcgcgggccgggcgcgcgcggcggcggcgcgcagacacaagtagtttacattgttgggcgacttttgcaacaactcgccgcgccgcggc

SEQ ID NO: 187173 - DNA, 122 bp, Homo sapiens
gcaaagctctgtgctacacgctggcatatggccaagtcctaacccctcaactgtaggctccgtgaagcggctctacttcaccggtaagttcaggaactcgctcctcggaatcgatggctggg

SEQ ID NO: 187174 - DNA, 122 bp, Homo sapiens
aatataaggataaaggaaaactgttttgtttccatcttcttaatgaaagagaataatcttcgagatgcaagagggcagaaatgattaagaaacgtgagccccagataagttagagctgacaa

SEQ ID NO: 187175 - DNA, 122 bp, Homo sapiens
agacatgcagagtaatcaaacccagggaagatcactcatcctcgccagtaaccaaagaagcgcaaattagcgcaaaaagcaacgccgctttgctgccggagcagcaaaatattaaacactaa

SEQ ID NO: 187176 - DNA, 122 bp, Homo sapiens
ccaagccttgtggaatttcgaaaatgtgcgccagggcgacacctcttgatggtaagaagacgccggcggaggggagcgtgcagtgcggtcctcccgcgggcagggggcagtgcggcaaggcg

SEQ ID NO: 187177 - DNA, 122 bp, Homo sapiens
atcagccctgcaacagaattatccagccccaatgtcaatagtgccatggttgagaaaccccgtggctgaagaatagcagactagttcaaaatgctctctcaaagacactcagcagctagaac

SEQ ID NO: 187178 - DNA, 122 bp, Homo sapiens
ccgggctgggcgctcagaggtcgggtgggcgcccactccgttcgctgcgcgcacagcgcccggcgagaggctcggagtttgatcacacacagcgtccggcttcctgtccccagcgccccctc

SEQ ID NO: 187179 - DNA, 122 bp, Homo sapiens
tgccatatccccagggcagacctcaacaccccagtcacaccatgacctcaggttcctgtacgcccatactccaactccaggatgtcctatttctctcttttagataaccccaatatcaagac

SEQ ID NO: 187180 - DNA, 122 bp, Homo sapiens
agccgccaactccggggggagggggcatagatttgatttttaaattaatatccatggacacgtatgcaagggccgctcgtgccagtattatgcgccatctttgctcttttattgcaaagcaa

SEQ ID NO: 187181 - DNA, 122 bp, Homo sapiens
caccgaccaccgtaggtcccaccgacagccacaggtcccattgacagccacgagtcccaccgacagccacaggccacaccatcagccacgggtcccaccaacagccatgggccacaccaaca

SEQ ID NO: 187182 - DNA, 122 bp, Homo sapiens
ctcagggaggccccgccccgtgctctcgggccgcccctcttcgccgtctccacgcctccgcgggcagttaccagctttggctgctcgcgcctccccaactcgggtaaagctcctcggcctcg

SEQ ID NO: 187183 - DNA, 122 bp, Homo sapiens
cccaagtaatttgaacatggagctcacatcactcccccatgaagactcctctgagcactgcgtcaggagcaacctccaaggccccgcaaagtctgagcctgcttctcctcccttcagtccct

SEQ ID NO: 187184 - DNA, 122 bp, Homo sapiens
cacccataacaaccataaagtgtaatgagctgctcagtgtgcctccctacatcgttagtccgaggagagggtccctcggtgcccagcacagtgcgtggcacagtcggtgctcagggagcgat

SEQ ID NO: 187185 - DNA, 122 bp, Homo sapiens
ctttaccctcctacgagctcattgctgctagggattgggttctatatttagtatactttgcgcattaaaagaattcagtaaacatttgttgattgagtgtttaaaaagtgctaagttgggca

SEQ ID NO: 187186 - DNA, 122 bp, Homo sapiens
agcgggggtgggggtgcagagtcagaggtgcacgtggacagagacagagagacagggacacgtgggcagagacggataaagacagagacccagagaaagccagatatgttgacagacacaga

SEQ ID NO: 187187 - DNA, 122 bp, Homo sapiens
cttgcaggaggccaggcttcctgtcacattgaagctctgctgatagcccaaggccacgtgcggcgatggcacctgctgggtggggatgggtggcctggtgtcagtcctgcactgtcattgtc

SEQ ID NO: 187188 - DNA, 122 bp, Homo sapiens
ttcttaggggaaatagccctgagactggggctgtaccttacacagctctgggtgctgatacgcaccccatgtcaagcgggaaagatacctgggcacatgctccgaggtgtagggtacaagga

SEQ ID NO: 187189 - DNA, 122 bp, Homo sapiens
ttggtggggtctatgtccaccccaagaggtctgtactccttcagtgggccctcagattcccgccctccttgggattgggcagactctcggtctcccatagagagattttttttcagcttagg

SEQ ID NO: 187190 - DNA, 122 bp, Homo sapiens
tgtcacgtcttctttatgactgaaacagttccctccgtctttccttatcttttatgacctcgacattttgaagagtacagtcaggttactttgtggaatgtcctttaatttgggttcgtttg

SEQ ID NO: 187191 - DNA, 122 bp, Homo sapiens
ggccggggatgcctcgggccggggggggggtccctgcacctggggatccctggcatcctgcggccggacaacaccacgcttccagcatcccgaggcccagcatcccgtgggcctcgtccccg

SEQ ID NO: 187192 - DNA, 122 bp, Homo sapiens
tataaggggaagactaatgtattttccaggggcccataaaatacctttcccctccacccccgcagatcctgagctgcatgcagatggggcagagctgaatggaaagactgctgaatacctac

SEQ ID NO: 187193 - DNA, 122 bp, Homo sapiens
aacactaatcctttgcctatcagagttgtcctgagattaggctagatcttacaatcactacgaaaacttattggaaagtgaaaaacttagataagcaactgcttcttcagtttctgtaatag

SEQ ID NO: 187194 - DNA, 122 bp, Homo sapiens
ggccacttgtcggtgcacatcagcttgcgaaaaggagcctcgggcctcccagcctggtcccgtgaaatacacctcaatgtcctctgcaggagatgcggtggcagtgtgggtcagtgtgtcta

SEQ ID NO: 187195 - DNA, 122 bp, Homo sapiens
ttctcagagctaggagtccgggagctctagagagtgggttgggctgcagtgggcgctggccgcggtgctgaagcgcctccaacccgcgcgccccagtttaccctctcccccgctgctatata

SEQ ID NO: 187196 - DNA, 122 bp, Homo sapiens
ctccacatgccacagttccgtgcagctctggctggcagctaaacctcctaccctgctgtgcggagttgctaagaaaagcagttgaaagccctttccagagcgaaaaggcttttagacagaaa

SEQ ID NO: 187197 - DNA, 122 bp, Homo sapiens
tactaccaagacttctctacttaacgcgctgcgctcgggcacttagcaacttcgggaacacgggctgtgggtctgggcacaccacctcgagtttagggattctcctcacttctagcccaaac

SEQ ID NO: 187198 - DNA, 122 bp, Homo sapiens
atgtgttacccttaagcaatccctgagcattcacagcaagcccatctgctcctgtggaaacgtaatctgaaaacatatctgggctcacttcccacaaagaagtgggtttctctagctttaca

SEQ ID NO: 187199 - DNA, 122 bp, Homo sapiens
atgtgttcggtgactcagccaaagcttaaaacacggaagccggggagcgctgggcggctgcgtgtcagagaatgagtgtttcccgatggaacggcgggacagaaatggccgcagactctccc

SEQ ID NO: 187200 - DNA, 122 bp, Homo sapiens
aggttctggggaatcagggtcagaataatatgggttggctgtgtgtccctataaaactcacgtgtcatccttaatgttggaggtgggccatgtgagaggtgacttaatcttggatgggaggg

SEQ ID NO: 187201 - DNA, 122 bp, Homo sapiens
gcaggagccatcggctgagcttgctgagcttgctgcctgatcaggggtcgtgtttgcgggcggaggagggggtgtttgcgggcggaggagggggtgtttgagggtggaggagggcgtgtttg

SEQ ID NO: 187202 - DNA, 122 bp, Homo sapiens
ctgaaacaaagcacatggggcctcagcccttgcagagaacagcggacaccttcaatgtggcgccggtttctgtgcaggaggcagctcaggtgctgtctcggcctcactctccacacaggcaa

SEQ ID NO: 187203 - DNA, 122 bp, Homo sapiens
cctccttcttccagtcaatgtgcatcgatggggtcagctcagcccttaactcgaagaccccgggaccacaggggccaccacgcagctgagctctgcacagcccgggctgttcccgcgcccgg

SEQ ID NO: 187204 - DNA, 122 bp, Homo sapiens
gggctgagcaactggaaaaagccaatgctcaatcacagtattaaaatacagaaaactttgcggaaaaaaaataaaggaagtcggggggcggggtggggggggaatgcgttcgcctcacatga

SEQ ID NO: 187205 - DNA, 122 bp, Homo sapiens
cgcgttggaggccgccttttcagaagcggctgcgcacggactgctggagatggtggagtccgtcagtgagtgtggggctggggatgggggcctcgccggcctgtagcggacagcgcgggtcc

SEQ ID NO: 187206 - DNA, 122 bp, Homo sapiens
ttcccctaacttaaatgtggaataatgtttacagtgggatgctactatcttgggttggggcgggggaagaggtgaaaaaatagtaaacagcatatttgtgcagggtggaatgtgcataaaag

SEQ ID NO: 187207 - DNA, 122 bp, Homo sapiens
atttacagcggaatctctgtttatataaacagctcttcccacccaggccgctttgaaagccgaggtccgggtctccagggtgttaagtacctgaatgagcactggaccagagccggggcgag

SEQ ID NO: 187208 - DNA, 122 bp, Homo sapiens
agaaaagaacaacacgtcactgaccttaggaatcaggtcacactgcacaccccagtcattcgcgtatccattcattcatcctcaacccacctcggatgcacctgccctcaccacattcacca

SEQ ID NO: 187209 - DNA, 122 bp, Homo sapiens
ctgattggcccacagggaactccactcgggcgcctctcccttatattcatgcctgttggtcgtggccaccagagctggcaccagcattgtgaagggttgatgcgggtaggccgcggtggtgg

SEQ ID NO: 187210 - DNA, 122 bp, Homo sapiens
gtgtgtatggcctccgccttgctcctctcttcactggggtttatatgccctctgagccctcggctcccggggtctaactgcctagaatgtcagcagtaggcctgtaaaaagtgcttcttccc

SEQ ID NO: 187211 - DNA, 122 bp, Homo sapiens
ggcttttgtttatcttgaaatgtctcaatttgtccctaatttttgaaggacagtcttgctcgatataggacatatgattgatggtttttccttttagcaatttgaatatattagccatgtgc

SEQ ID NO: 187212 - DNA, 122 bp, Homo sapiens
tcccgcacccatgcattttctcttggttagagaccagaaggatgcagtggccgtctttcccgctgcctttcctttggtacttttgagaactccaaaagaggaccttatttttaactcttatt

SEQ ID NO: 187213 - DNA, 122 bp, Homo sapiens
cattcctcatttcccaacctggaagcttcccaagggcagggctcacatgcatcatcttctcgctctggctgtttcaggaagtgatgggagtggggaaggctgttgaactggtgatgtcacaa

SEQ ID NO: 187214 - DNA, 122 bp, Homo sapiens
cccccaggtgttagacattaagctcccacacctccttccatgcgcactctcgtacacacacgtgcatacacgcacctgcacgcgagcctcagtgaggtcgatcttgagcgccagctcctcac

SEQ ID NO: 187215 - DNA, 122 bp, Homo sapiens
ggcactggggccagattgccctcagccatggccaagggttccctgacaagctggggaggacgaactcccttcccaacacagggacatagaagatcagagcagcctgcccagtggggatctga

SEQ ID NO: 187216 - DNA, 122 bp, Homo sapiens
cttctttcttaaccaaggttaccagcagccacacacataggtctgggctctgaagaggaccggatacataaggcagaacccaaggaagccttaggctcaggtctctgcctgaaggtaggctg

SEQ ID NO: 187217 - DNA, 122 bp, Homo sapiens
ccctactgtagtgattccagcgtcttcttttttaaagtgattatcatacttttccagtttcgaaacaataaaatagtaccagaattttggtggccattttctaattgtgaggaacttaggac

SEQ ID NO: 187218 - DNA, 122 bp, Homo sapiens
tcccccgtctccgtcactggaggaggtccctgggctggggagactcgggccagacccctccggacagctggtcagccctgcagtgtggactcccaggcttgcctccaccgagcgcggtttct

SEQ ID NO: 187219 - DNA, 122 bp, Homo sapiens
cacgctgctcacttaatccccactacagccctaggaggtggtgctgttattagctgcatccgtcatttggggaaactgacgctcagagagatgaacgaacttgcacaaggtgacacacatct

SEQ ID NO: 187220 - DNA, 122 bp, Homo sapiens
taatgaggaaacctaattattgcgcatctggaagtcttagtccctactaccagacgaaggcgggtacctgagggatgcagtgcgcatgcccgagccgtcggatttgcatgataaggctcgca

SEQ ID NO: 187221 - DNA, 122 bp, Homo sapiens
ggttggttgtcagagtaggtggtgaaaatctgtgtctgcttggtggggatggtggagttgcgctttatcagggcagtcatcacgcccccagccgtctccagccccagggacaggggagccac

SEQ ID NO: 187222 - DNA, 122 bp, Homo sapiens
aatgaggccctccaacagtacgcaaacaatgtgagtttcacagaatcaagcagccctggtcggtcaaaatcatttttagtttactctgggagcaaaaaacacaggataaataattttatgtt

SEQ ID NO: 187223 - DNA, 122 bp, Homo sapiens
taccattttgttgcattcgcaaaggcgaagaggcaatgccagagcatctcagcccggcaccgagagacgcatccatcagtccgagttcccgaagcctgcccacgttcctgcccacagcctcc

SEQ ID NO: 187224 - DNA, 122 bp, Homo sapiens
catcttacgaacaagttcctgacctacttccccgggaggagcactgaggatggccgcaagcgagtatttctgcgagatcgccccccgcccccccactgacccctcgatgttccccacgtggc

SEQ ID NO: 187225 - DNA, 122 bp, Homo sapiens
aagtggccgttagcgaggctacacactttgggatcgcgtggcctgagtcgggggagtaaccggcctgtattccatttttctctctccagtctcttcaaaatatcggagaataatttctttct

SEQ ID NO: 187226 - DNA, 122 bp, Homo sapiens
agtcctcgtggggagagggacagagacagacagagggagaggagaagagacgcaaaagaccgggagaaagaaaagctgaaggagaaacatcgagaggcagaaaagtctcacagcagaggaaa

SEQ ID NO: 187227 - DNA, 122 bp, Homo sapiens
gggtaacccacaggtgcctgtgcactttgacggttagatgccaccatgtagggattatcgcgagtggttgaccttacacttactccttaaatagcagtgagtaatgcatttgagctgtccca

SEQ ID NO: 187228 - DNA, 122 bp, Homo sapiens
gagatggtgagggacagatgatggagtgaatgggctccagcagtgggtggctagggggtgcgctgcacttcctgcagctcctagagcaggctctgaagcccctccagtcgccctgccctcca

SEQ ID NO: 187229 - DNA, 122 bp, Homo sapiens
cgttgtgtgcaacagtaaccagaccaccacagccaggccccccacacttcctctctccttcgtcagttctgcagtttggcccgccacattcagtctcggaacaggaggcccctgggggtgtt

SEQ ID NO: 187230 - DNA, 122 bp, Homo sapiens
aaggatgttcatcagagcatttcttttgaagagtaaagaaatggacatgaacctgtggtccgttcatacggtggaatacctatgcagctgtaaaaatcagtgtggtagatctccgtatatga

SEQ ID NO: 187231 - DNA, 122 bp, Homo sapiens
ggcccagtcacagactgaccgagtggacctggggaccctgcgcggctactacaaccagagcgaggccggtgagtgaccccggccgggggcgcaggtcaggacccctcatcccccacggacgg

SEQ ID NO: 187232 - DNA, 122 bp, Homo sapiens
tcactgctgctccacaatcattttccagccccagtgactgttattgtcccttctccctctcggcaggagctggtggtggctctgagtcatcttgtggttcagtatgaaagcaatttctgcac

SEQ ID NO: 187233 - DNA, 122 bp, Homo sapiens
ttagtgtcttgcctctttcaccgccaccaccgaagatgaaagcaacaatcagctaaataccgcatgttctcatccctaagtgggaacttatagatgagagttctgcatgggcagaacgaggg

SEQ ID NO: 187234 - DNA, 122 bp, Homo sapiens
gtgacctgggcggggcaggaggtggcagcgggggtcctcccggctcaccagagagacgagcggccgtgctcctagagaggcagggaacccgccagactccgccactccgctgcgggcgcggc

SEQ ID NO: 187235 - DNA, 122 bp, Homo sapiens
ggggggtcccgagtgcctctgcgtgccaggctcgtccacctgccgcctcacactcttccccgtgcagctctgcccctgtcaggacacgttggccttcctgtgctttcctgaaggctgccagg

SEQ ID NO: 187236 - DNA, 122 bp, Homo sapiens
ggcgccgccgctgccggcccccaagccggcccccccacagtagaggttgagtccgattaccgcgtttcttttgaggccaaacattgccagtcgccgccgccgcctggctgagaaaactgggg

SEQ ID NO: 187237 - DNA, 122 bp, Homo sapiens
gagcgagcagagacttgctggaatgcccgggcctggtattcgaggttgtccaggggagcgcgggggagctgagggtgtgtgcgtgtcaggcggctgagcgccggaggaggagaggcagcggc

SEQ ID NO: 187238 - DNA, 122 bp, Homo sapiens
cgccgccgtcgggaaaccgggttttcaagcgttcggcccagcgggcgctgtattttagggcgtgacccccgccccgccctcgagggcgaccggaagagcaggcaccacagcagatgcgccga

SEQ ID NO: 187239 - DNA, 122 bp, Homo sapiens
tccccttaggaaagagtgaaaattgccttaaacatttgagaaaaagttcttttgataacccgtctggtaaacaatagtgaaattggtaggtgtcattattatcacttgcataacctgtacaa

SEQ ID NO: 187240 - DNA, 122 bp, Homo sapiens
gagacagcgccaagccggggtgcctgtccaggatccggttggggcttgttccctcggctgcgacgtcggaacccccggctccccctcccagtctgcgccgccgcagctccggaaaccgctga

SEQ ID NO: 187241 - DNA, 122 bp, Homo sapiens
ttatttaatgatgtaatttattgttgcgttcctctggaagctgtgactggaataaacccccgcgtggcactgctgagtcctctctggctgggaaggggggaaggtaggagggtgagggccct

SEQ ID NO: 187242 - DNA, 122 bp, Homo sapiens
gcggcggggcgggagggctcgcatccccatagtgctgggttacagtgaaggtacgccccgcgctctgctctggagaggcagggtgggatagggaacgtctcgagtggcgcccgcagtcatgg

SEQ ID NO: 187243 - DNA, 122 bp, Homo sapiens
caagaggatgctaaacaggctactcaggacgagaaagaaaagatcaggcttttcctacaacggcagacatccagcttccatcggtcgtaatggctcaggcctttgagagtgctagagcgtcc

SEQ ID NO: 187244 - DNA, 122 bp, Homo sapiens
gttctgtgccccttctcaggacttggcgctcactcttggatgacctaggatgcaccagcacgtttaaccccacccacaccagggactttggattagggtagaaattgggcaattggctctgc

SEQ ID NO: 187245 - DNA, 122 bp, Homo sapiens
ttgaacaagtcccttaacttccttactcatctcagtcagaaaatgtgtttttgaggggtgcgtgtatgtgtgtgtgcacacacatgcgtgcgcatgtgtgcatgtcagggcgcagggagatg

SEQ ID NO: 187246 - DNA, 122 bp, Homo sapiens
tactacggacccactgtgtagggctctgtttatcttggcatgtccgcattgtactcctggcgttgccaattcacgtctgttccttaaagacccggctcaaaattcagctgcttcaaaagcct

SEQ ID NO: 187247 - DNA, 122 bp, Homo sapiens
tctctcctgtgcagggtccagggtcccacgtggcgtttctacggatgatgacttgatgcccgtctctcctgtacagagcccagggtcccacgtggcgtttctacagatgatgccctgacgct

SEQ ID NO: 187248 - DNA, 122 bp, Homo sapiens
cgtcagcatgggctctgcagcctccgacccatgtgcggcctgcccggaccctcgctcctccgtgtgcggctcgcctggaccctcgctcctttgggccgtcactctccctactttgtagacct

SEQ ID NO: 187249 - DNA, 122 bp, Homo sapiens
ggggtggggattctggtgtaagcttttggcttgcattcgctttctccctccgaaagtgggcgacatcaagcaagtcccagttacagaaagaacccactgcagggcgtccagtcacttgccca

SEQ ID NO: 187250 - DNA, 122 bp, Homo sapiens
acttagaaaaggggtgcatactggatattcaggctaggagaagaacgcaaaaagcagtgacgtacattattctctgcatatatttacttgggaaattgtgcgtctccctattctgagtcttg

SEQ ID NO: 187251 - DNA, 122 bp, Homo sapiens
gtggatggaccctgcgaggtctgggaagccctactcacctcaacccagtaggctccgggccgtcctaagtgaaccaaccacaggagaaaaccacggagggggggaaatggaaggaagcaccc

SEQ ID NO: 187252 - DNA, 122 bp, Homo sapiens
atgcatccacctcaagtgaaggaatttgtggttggtttcctcagccactgtatgatgtcccgtagactgacgatttttaaaatgtttgttgaattatgattaactaaaatatgataagaagt

SEQ ID NO: 187253 - DNA, 122 bp, Homo sapiens
gcctggcgtgagggcggggcggggccagaggtgggctgaggccggatcaggcggtgggggcggtccccgtagccccgtgaggctcgcgcctgcgcacgggcccgcggcggggcgggactgcg

SEQ ID NO: 187254 - DNA, 122 bp, Homo sapiens
gccccctgcctcggagaccttccccccggggatgccgtgctgggtcactggctggggcgacgtggacaataatggtgggtgttggggacagcgggaggccgggccaggtgggcaccaagtca

SEQ ID NO: 187255 - DNA, 122 bp, Homo sapiens
tcacccgcctgcccgcccgcgcgcgctcggcttagccgcccgcacccctccgggttcttgcgacgctccgtcaccatcccgcccaccctgtggacagttggaactgtcgccccctcctcctc

SEQ ID NO: 187256 - DNA, 122 bp, Homo sapiens
gcacaggaaacgggagaagaacagggagaaagggaaggttctcacctccacggatcccgccgagaagagcagacagtccccagccagcctgggtcctccgtccctgggtcactccgctgaga

SEQ ID NO: 187257 - DNA, 122 bp, Homo sapiens
agaagtgtttgtatagtgccctgcaggtggtagttattgccatgtttttgcaagtaataccgaactgagcacaaagaacacagaaaacgtcaaatcaacctagcaggggaaggaccagggga

SEQ ID NO: 187258 - DNA, 122 bp, Homo sapiens
gcctgctgatctcagggtggggcgctcccaagctccgaactcagagcctgggcttgctgtcgtctgggtggtctttctttatctccacatgcatctgcttatgcagtacacacgtatgggct

SEQ ID NO: 187259 - DNA, 122 bp, Homo sapiens
aaaaggaacacaaaacacaatgagagagtgatcgttctcagagtgacactggggcctctgcgggaaagctaggcaacacagtgcagatgaaagaaaggcagaaaaaacattttggccagagc

SEQ ID NO: 187260 - DNA, 122 bp, Homo sapiens
ttgattgtatcctgattaagaaaacctccatcagtcagaaagaccagaggccatcttccccggggaattcccaggtaatatcttcctgtcgtttatacttgggtttctccatcctaaaactt

SEQ ID NO: 187261 - DNA, 122 bp, Homo sapiens
ggaaggtctcccggcactgcgggcacgacacgttagtctctgccgtgccccagcagcgggcgaggcacgcgcaacagatgttatggccgcagtcgagcatcatgggctctgcgaagtactgc

SEQ ID NO: 187262 - DNA, 122 bp, Homo sapiens
ctcctccccgccaaagggtttgcaaattaaacagaggattgccgtattccatggtgtatccggcttacctaacagggttattttggtgagtctagcttccttatgcaccattacgtgaagtg

SEQ ID NO: 187263 - DNA, 122 bp, Homo sapiens
agccaacattagatcaaagggcaaccttaatgacacctggagcacaaaccctgctcagggcgcgtacaaccggagggacagaaaacacgatgcgacgtcggaaagcaggaagggaattgaaa

SEQ ID NO: 187264 - DNA, 122 bp, Homo sapiens
ggggcgcaggactcagggagccgcctccggaggagggtctggcgggtctcagcccctcctcgcccccaggctcccactccttgaggtatttcagcaccgctgtgtcgcggcccggccgcggg

SEQ ID NO: 187265 - DNA, 122 bp, Homo sapiens
ggccatgccagtagaagactagatgccgggacttcaccccacccttgaagaatgagtggccggagaagtgatgattggcgtgcttaaaacccaatcataaacggaggaggggggatggtcta

SEQ ID NO: 187266 - DNA, 122 bp, Homo sapiens
tccagtattgtctccatcttcccttagtcgcggcttctcaattcagaccaccaacacggccggaagcaactcctgccgcccagcgcgcctgagtccccacgttgcgcatcaggctgcaccaa

SEQ ID NO: 187267 - DNA, 122 bp, Homo sapiens
tggcacgttttctgggtatagcaagagaaccattaccattactaaactcagtaatggtaacggtttccttgccattcccaagtgccctggcagtcagtaggttgtgacaggctgagcagaga

SEQ ID NO: 187268 - DNA, 122 bp, Homo sapiens
gaggtttctgtgccaggcgctaaggcagggcctggcatacagtacgtgctggatcaatggcggctgctggaatcactacctcctccatgataaacaccctcacatgtggtgcccaatgtccc

SEQ ID NO: 187269 - DNA, 122 bp, Homo sapiens
tttaatggaaacggtccttgagacagggctgatcttgctactgagagacaccagcccgcacgtattagtctcaacatcgacacgcaaggtcaggtctgcaggagtgggagctctggcgtggg

SEQ ID NO: 187270 - DNA, 122 bp, Homo sapiens
gcttctccccacgggagttgatggggatgacgccgatgtccaccacgaccaccactccgacgatcaggtagtgctcctccaggaccacgttggtcaccaagggaaccaggtccaaggcttct

SEQ ID NO: 187271 - DNA, 122 bp, Homo sapiens
tccctcctcgctgggcattcaaacagctttccgacatcaccagccaaggatttttttccccgctctccttagtcgccgtccgtccatcagtacctgcaggggggaggaggaggagggaggaa

SEQ ID NO: 187272 - DNA, 122 bp, Homo sapiens
cttcgctcagcacaaagaattttctgataaccatactggcaaaatgaactgggctgccttcggagggtctgaattcttcatcccagaaggcattcagatagattcgagatgcccactaagca

SEQ ID NO: 187273 - DNA, 122 bp, Homo sapiens
ctcgcgttagaatcactagctaggcagccttactgcgcgccggaagtttgggccaccgtgcggcccgccctttccggccagactgaacgcggccccatctgtcggcttaggaactgggaagg

SEQ ID NO: 187274 - DNA, 122 bp, Homo sapiens
gagggaacctgggggcaggcagaggcctagggggtgggctctgagggcagccactcccaccggccctcccccagccccgcaggccagccacatgccccgtgctccagacgacccagctacat

SEQ ID NO: 187275 - DNA, 122 bp, Homo sapiens
ctcacggggccttagctgcctcctcgctggggagggcttgggacctgcagcccaccatgccggtgcctcgcccgcctcgccctcctcgcccccctttccccccaccacaccacccgcatccc

SEQ ID NO: 187276 - DNA, 122 bp, Homo sapiens
cagggcgtgaggggaggatgagctccccctgagcagatggagatttctccttgcctgggccgtttgacccccaaagccttgcagactggccgcgtgggtgccatggggcgatttcttgggaa

SEQ ID NO: 187277 - DNA, 122 bp, Homo sapiens
ccaggagaccttggctgggcctcctttctgggcatgagcttggttccctttgcccacccccgccctcacccctgttgccctccctgcctgcccgcctgttgcctgctgcctgcctggctggg

SEQ ID NO: 187278 - DNA, 122 bp, Homo sapiens
atgcatgccacagttactcttccagtttcttgtgagaggtctctgtttgaaagatagagacgctgagtctttgtgactgaaggccatgattgtaatattgagcactctgtaggtctgttgag

SEQ ID NO: 187279 - DNA, 122 bp, Homo sapiens
cagcacttggagccctattttccatccctcacccactaagagtggaggtgacagtaagagcgtgggagcacacacctgggactcgaacagctggcttcaaacccgagctcaggaacagcatg

SEQ ID NO: 187280 - DNA, 122 bp, Homo sapiens
tctgatgctgacaaaacccatcactgatgagcaggtcaagatgaggtgaccctggccccccggctcagtttacagccctttttgctgacagactaacttcctccgcccatctccaccacagc

SEQ ID NO: 187281 - DNA, 122 bp, Homo sapiens
tttttgcgtctttttgcccccgctgccgctgctttttgcggctttttgccctcgccgctacggctttttgccatcgcggctttttgccctcgctgctgcagctttttgcggctctttgcccc

SEQ ID NO: 187282 - DNA, 122 bp, Homo sapiens
ccccgagcaacccacgtgaccgccgacaaccgagcgcgtgacgcaaagcggcgggcccaacgctcgccttgtcttttgggaaacgtagttctgatggcagccaagtcggccaggagaggagg

SEQ ID NO: 187283 - DNA, 122 bp, Homo sapiens
cccaagtaaatagaatcgatccagagaagacttgagctgcagctgatcgaaacgcaaggccgtaaagcccaaatcaatagaatcgatccagagaagactcgagctgcggctgatcaaaaagc

SEQ ID NO: 187284 - DNA, 122 bp, Homo sapiens
gctagcttccctatcgcggaccaggtcccagagagcggggctccagagctcagcgccaagcggaaagagagtgcgcccaggacgcacggcctgaacactcacccagcagcgaggagaaggag

SEQ ID NO: 187285 - DNA, 122 bp, Homo sapiens
gtcgatgccagcgctgtccccacgggtaccaggaagtgcagagccgcacaggagctgccccggagctgaggggacggtcttcggctcctctgcaccccgtgattctgcccacgctcctccac

SEQ ID NO: 187286 - DNA, 122 bp, Homo sapiens
gggatgaaaacagcacctgctgcccagtgtgggctttcgcggtctcatgaagggtggtggcggcgtgcgctgcatgcctagcagcagcgctgtttttctcattagcacttagctccgtctcc

SEQ ID NO: 187287 - DNA, 122 bp, Homo sapiens
cctactggccccgggcgaaggcatcctggaaagcatccagagcgtccagcatccctcccgcggccacccgcaggctgaccgacccctgggcagaccctcagactcaatccagtccagggcgg

SEQ ID NO: 187288 - DNA, 122 bp, Homo sapiens
tttgtgtagcgctttatagaaaaaatttgctaactcccgatctgtaacccccaacctatccgccgcaccctgatctaggtaattttgaagcaaatcccaaatgtcacatcatctatccatat

SEQ ID NO: 187289 - DNA, 122 bp, Homo sapiens
tcagcgggtgtgggacacggccttggacagatgtaagcagagcgccaacaggagcaagggcgcctcgagcaggtgcacgctgaaccccggcccggcagcggacccggacaggtgtggcgggc

SEQ ID NO: 187290 - DNA, 122 bp, Homo sapiens
agaagagaaactatttcaaaaatgaaattagttctgggaaaaatccaaaagagtcgatgacgataaatgggttatttacaacaacagagtgccccagtggaactgaataattagaaaaaaaa

SEQ ID NO: 187291 - DNA, 122 bp, Homo sapiens
cctctgggctcttgcccgtctgtccggtctcgtctctgcacccaccccagcccatcagtgcggatccgcgtgcctgtgtggttccagcctggcacggggaaaaaactgcccggctctttatg

SEQ ID NO: 187292 - DNA, 122 bp, Homo sapiens
agtaggacagcaggcctggacacagcacgggtgacgtccctggcttcgacctccaaggaacgccggtagcagggtcgggggcaagcggggagggggcaggcaggggccgggcccctcctggc

SEQ ID NO: 187293 - DNA, 122 bp, Homo sapiens
tgcggtccctaactgctctccgagggcctcaagagttcctgacagcaggcatgtcaattacgggaggagggagggtgagacgccaaaatcaggttgaagaggtcccaccacacacgggcaca

SEQ ID NO: 187294 - DNA, 122 bp, Homo sapiens
tcagccgccggtaccggctgtgggcgggggcagcctccgcggagcagggagccccatcaccgcccttgccccacccgcgtcccctgcgcacccccctggcgcccggcttcccgtcccccgcc

SEQ ID NO: 187295 - DNA, 122 bp, Homo sapiens
cttgtaccgccctagggctgggaaacaaccttcctgggtgatggggcccctccatcacgccgaaggccaagccgctgtgtgcgccaccgcatcccaagggctgcccacggggggcggggtgc

SEQ ID NO: 187296 - DNA, 122 bp, Homo sapiens
acactcgtgcgcccacgtccgcaggtcaccgcccggccacaggggacactcgtgcgccaacgtccgcaggtcaccgcccggccacaggggacactcgtgcttccacgtccgcagcacaaagg

SEQ ID NO: 187297 - DNA, 122 bp, Homo sapiens
ataattgtcccggatcaatagggaccattcagcttcagccaggccgcccctcggggcccccgcctatccccacagctccgtctggataccccggacggcaccggagactcagaggccaggaa

SEQ ID NO: 187298 - DNA, 122 bp, Homo sapiens
ccccacagtcgggcagtctgacagttacaggggggcgaggttttgcaaaaactcctagcccggtctttccagttcccactcctcagccttggcttagtgaaaggtgggggttcgggcaggag

SEQ ID NO: 187299 - DNA, 122 bp, Homo sapiens
taatcttagcagatcctttcgtcgcctaaatggtaagagcgacttgtaccgacagtccctcggcaatttccggaagtgttcgggataggcccgagcgtggcgccctctggcggcggccagag

SEQ ID NO: 187300 - DNA, 122 bp, Homo sapiens
ctccagagtcatcttttccagttaggatagaaacgagcccccctcctcacctcgcaagcccgcgccagtccagttttagccgttcttttggaagagcaagtcagttgaacgccatcgaagag

SEQ ID NO: 187301 - DNA, 122 bp, Homo sapiens
cagtgcagagccacagccagagccagccgggcaacccaggtgagtaggtgtgagctgtggcggccccacccacagctcccatccgtatttctggcatcagcgaccccagggctttagcactt

SEQ ID NO: 187302 - DNA, 122 bp, Homo sapiens
cgacagagtgagactccgtctcaaaaaagaaaaaaaaaagatgctcctctgaggtccctccggcgctcatgttccgagtctgcagctccacactttaaatcatactcgaatgcaggacaagt

SEQ ID NO: 187303 - DNA, 122 bp, Homo sapiens
tgggaacagggtgtggatggcaaaccaggccgtctgagtttttaaacttggtagtggcgacgctctctggtgtcctgggtctacgtgggacaccctttctccttcacctcttccagagctcc

SEQ ID NO: 187304 - DNA, 122 bp, Homo sapiens
gagtcggcggcaggagggtggccagtggtcatcagcacaggcggctcgagaggccagggccggacagagcaggtgtcaagcctcggagcagaggacccagagggcaggcacagccacaggcc

SEQ ID NO: 187305 - DNA, 122 bp, Homo sapiens
acgtcagcactgtgggcgcacacacctgcactcacacattcatcaggacccatgggcacacgtgcacacacacgtcagtcctgtgggtgcacacacctgcactcacacattcatcaggaccc

SEQ ID NO: 187306 - DNA, 122 bp, Homo sapiens
gcttggagtctggccatctccccgcttagccctgggggcttcctgggcagttacaggttgcggttttatactgagaactacaaaactggaagctttcctgaaggagcagctcaaaacttgag

SEQ ID NO: 187307 - DNA, 122 bp, Homo sapiens
caggctagagtgcagtggcgcgatcttggctcactgcaatctctggctcctgggctcgagcgatcctccgacctcagcctgccatgtagaagggactacaggtgggcatcaccatgcctagc

SEQ ID NO: 187308 - DNA, 122 bp, Homo sapiens
agtgaaaagtgatattaccatccaagaggcaccttcctggacgtttctgtatattggccacggtcctccaagccccaccagcagaggagcgagtgccctggcggtggctgctcagggacagt

SEQ ID NO: 187309 - DNA, 122 bp, Homo sapiens
cgttgacagcgatgtcagagaacacagtggggttgaccatggctgatagaacaggtttcccgacggcgccggtgtctgcagagtggccatgtttcctagattgtaaagtttcatataaatag

SEQ ID NO: 187310 - DNA, 122 bp, Homo sapiens
ctctgtccgtttcccaatcaacttggcaaaaattaaaattgatgggggcatgtgcaaatacgaaataggagtggaggcttttgcattcctggacactccaacacattgtactctgtttattc

SEQ ID NO: 187311 - DNA, 122 bp, Homo sapiens
gatattctaaacacttcttttctaatgagctgctctgtgtgaggccctggtcagggaaaacgtggtcgataaggcatcacatttttgacatggagcttctgacaaataatctcaaatttatc

SEQ ID NO: 187312 - DNA, 122 bp, Homo sapiens
atttcatgtgactaattgaatgccacttagcagacacgggggttcagaataacaatgtctcgcaatcagcgcgctactccaaactcaaaatccatttcggagagcaagttgtacgcgcgcga

SEQ ID NO: 187313 - DNA, 122 bp, Homo sapiens
ctcacagcctggcctgcttaactgacacccggggaggaaccggacgcgactaccttcctccgaggggggtgacgtctgaaatttcctgaggtgaaccccatgttcccttccgcgcagcccta

SEQ ID NO: 187314 - DNA, 122 bp, Homo sapiens
gcaatctcccttcacatattcttccagactcaagaagggaggtgtattagtccattctcacgctgctataaagaactgcctcagactgggttatttataaaggacagaggtttaattgatcc

SEQ ID NO: 187315 - DNA, 122 bp, Homo sapiens
gtctggacacaggatcaagtctgagttcctgaccccaattcactgccttgccccaggtgtcggcctcctcgccagccctggacaagatgggtcatcaggatgggaccgtgtggcacagcctg

SEQ ID NO: 187316 - DNA, 122 bp, Homo sapiens
tatgggaggtttcatcacagatgcttgccatttacttttagggacgtcgcatacgacgtccgtaaattactggctcgggttttgagctttacctggctctcgtcccctgtagtacaatcctc

SEQ ID NO: 187317 - DNA, 122 bp, Homo sapiens
acagctctcagcgtgagcgatgcagaagacgggtgatttctgtattttcatctgaggtaccgggttcatctcactagggagtgccagacagtgggcgcaggtcagtgggtgaatgcaccgtg

SEQ ID NO: 187318 - DNA, 122 bp, Homo sapiens
cccagcggacgccagatgccagaaacaccagctccgcccgctccacagcgagtccgagtccggcccacccggctccaccgcccgccgtgtcttggagttgcttccctgggccttgggcgggg

SEQ ID NO: 187319 - DNA, 122 bp, Homo sapiens
agaataagagacaacgattcacgtctactttctaggatgacttccatgtgctccatctcgcgcgtccctgagcatgttgaatttccaaatcctaaataagccgcgcggtgtagtttgtatta

SEQ ID NO: 187320 - DNA, 122 bp, Homo sapiens
ctgctatgctgtgtgttgctctatggagagactcaggtagaaggaattgaaggaggctttcggccaacagtcagcaaggtactgaggctttcagtccaagagcctataaggaactgaatcct

SEQ ID NO: 187321 - DNA, 122 bp, Homo sapiens
aaaattaggtttaagcaaggccttgcagagtttgagaaattgacagaaaccccatggcagcgatctctgtggttatccttatgtttcctctaggattttgttagaaactccaaattctgttt

SEQ ID NO: 187322 - DNA, 122 bp, Homo sapiens
ggcggggcggagctcctggaaggggtcgaggcggagctgagcgccggggcgtggcaggtgcggagcttcgggaagggtaggggcggggccgagccgggggcggggcaggggcggggctagtg

SEQ ID NO: 187323 - DNA, 122 bp, Homo sapiens
gggtgggggagcttaggagggaaagataaagatcatcgggagtctcctccccagccagcccggaaagagtttaatgggaagggtctctgtccacagctctggtgctgaaaatttcccaaaag

SEQ ID NO: 187324 - DNA, 122 bp, Homo sapiens
ggtgtctgcggctcccacccttcggggggcccgtggggggggcggtgtcaggggcatggacgccaccccccaggggtctctgctgccggctactctcctctccacgtgctgtgagttgagtt

SEQ ID NO: 187325 - DNA, 122 bp, Homo sapiens
accgcccgcgtgagtctcctggggctcccccttttcaccccaatgagaagccctctgctgcggcggcccttgtgcaccacatttttcacagggcagcaattcagcgcaagagaggatgggaa

SEQ ID NO: 187326 - DNA, 122 bp, Homo sapiens
gctctgcctgtatcatttcttacatgtgaatctaggatcatctcaaagcaaaggcttaaccggaaaacaaaaactgaccacccctccccctaatttttcttctcacattgagaagtacagta

SEQ ID NO: 187327 - DNA, 122 bp, Homo sapiens
caccatcacatcctcctcagataaccaatttggtattattcttccatatgcattttttaacgaaattgtatacaaatacatgcaaatagaagttttgccacttttactttacaaacataact

SEQ ID NO: 187328 - DNA, 122 bp, Homo sapiens
cagcggggtctggggctggggctgggccgtggggagctcccgcaccctcggctgtcggggcgccggctggcttcgcttaagagtgcctgaaacaattacgttcacgcctactttcaaaaaag

SEQ ID NO: 187329 - DNA, 122 bp, Homo sapiens
cgggcgcctgcgggaagtcctcgctctcctccagcaagctcaggttgctcatgaagtcggcgctgacagcggcagccgaggccgagggcaggcccgccgcggcgtcggggttggcagccgcg

SEQ ID NO: 187330 - DNA, 122 bp, Homo sapiens
actcctcggcggtgccgcagccctgtccggactccactgcgcctctgaggggctcaaatacgaattcaaggtaagctgcgcggctttgcgaccggctctgcacttgccctctcacacatgcc

SEQ ID NO: 187331 - DNA, 122 bp, Homo sapiens
cctcgcagaggagcctcccgagctttggaaccagaggcaggctcagcgatgctctccatccggcctggccccaccgtgtgtatcaggtgtcagaggccttgctgggtgccaggccacgtctg

SEQ ID NO: 187332 - DNA, 122 bp, Homo sapiens
aatgggaagataataagccgtggtgttttgctgtctgtctgtgtcacaagcatgaaaacccgtgtgtcattgatcagcaccatttgtggtatgttccgtgatgagcgtttagtgagcctgct

SEQ ID NO: 187333 - DNA, 122 bp, Homo sapiens
tagtagactatgccatctaggtttgtacaagtacattctatgatgattgcaggatgaaatcgtgtaagggcacatttctcagaacgtatcctcatcattaagcgacacatgactgtttctat

SEQ ID NO: 187334 - DNA, 122 bp, Homo sapiens
ttgggagctggaaggaggcgggacaggacggctgcgggggtgcaggggctcctgggccaccgggcgcgctggggcacgcgctgcagggaggatctggggctcctggtacgtttggacaacat

SEQ ID NO: 187335 - DNA, 122 bp, Homo sapiens
ctcggagacagcctgaagttcagggccgagggccctcctcatggtacggtgcggggacggcgtctgaccgaggcccaccctgccgtcgccccggagtcccccaagctggcacagctagcggc

SEQ ID NO: 187336 - DNA, 122 bp, Homo sapiens
aagacacaaaaccagagaagagcaaatgctttcagggtgaatttctaccacacgttgagtcgaaggcaaactttgaaagaacaccagtgaaaaataaagttcatgctgattttgagaatctt

SEQ ID NO: 187337 - DNA, 122 bp, Homo sapiens
tggcaggggctgctggcacactcgtctcgttccagctcgcaatgccggcctccgaagccccgtgggcacacacactggtacccgttcaccaggtcctgggcgggccagccaggtgagcgtcc

SEQ ID NO: 187338 - DNA, 122 bp, Homo sapiens
ccccagagagctttcatctagaaggtttgactctggccagacaaccagcgagcatcttctcgcaatctgttgcttcttccatggcaaactccagagaattaagaagccaaactcaacatcgc

SEQ ID NO: 187339 - DNA, 122 bp, Homo sapiens
acacacgtaaggccggcaaagggcttgccaaactgctcgtgggatcctcctactcggacccgttctctttggtgactcggcagcctgttccatgtggcaggcaggatcctggctgggctcca

SEQ ID NO: 187340 - DNA, 122 bp, Homo sapiens
tctgggaagaggaaactgaacacaagccccgagctgccgctaccttgaggatctcgcggccgcccaccgacagcgccacatgccggctctggaggccgcactggatatcctgggcgcgcgtg

SEQ ID NO: 187341 - DNA, 122 bp, Homo sapiens
agatacaggccgccgccctcccaatcagaacacgggagatatcagccaatcccggcccgccgatgctctagtatcgggcgggggcccacacgcccaagagttgtttgtctgcctcgggtccc

SEQ ID NO: 187342 - DNA, 122 bp, Homo sapiens
caggcccagaggtggtgaggaccggccaaggctctctgctcagtgcagcaagccagggcccgcccctgacaggaatccgttggctaagcagccgctccggccttggccacgatcccaggaaa

SEQ ID NO: 187343 - DNA, 122 bp, Homo sapiens
tctaggtgaaaagtttcagtttattttaggggtgtggtgttgttacaactggctaatctccgcaccataatttaatcaggctggatgagaaagagactagaaaggcgtggagccagagcaca

SEQ ID NO: 187344 - DNA, 122 bp, Homo sapiens
caccaccagcccgccctcggcatctgagagctggagggagcttcgggaatcacccactcccgtccagcacccacagacacaaaccgagcaaggcagcagcaggaaacgccctccttttctgt

SEQ ID NO: 187345 - DNA, 122 bp, Homo sapiens
gctgaggcagcggcaggcggtgggcaagctgctgggccactggcggagcctgctgcgtcgcgtgccggcaagcccgggcctggcgcacggcctgtattggccccagcacttcctgccgcccc

SEQ ID NO: 187346 - DNA, 122 bp, Homo sapiens
cagcggtgagaaccgtcgcgcgcaagtccttctccgccctcctcccccggaaaccgaacgcgcactcggagttccgcaggacaggtctgttccggacccagcactcagactgctcgcctcca

SEQ ID NO: 187347 - DNA, 122 bp, Homo sapiens
gctgaatcacaaggaggcgggggcggcggctcggtcccagggccatctcagggaccgtgtcggggggtgctgactctgcccatcaaggggagccggacatttatccgccaaagcccgtccct

SEQ ID NO: 187348 - DNA, 122 bp, Homo sapiens
cccagagcccgggctgtctcagtgccccttggcggccgtgtggctcgctttctgcagtgccgcttcctctttgcggggccctggttactcttcagcgaaatctccttcatctctggtaagcc

SEQ ID NO: 187349 - DNA, 122 bp, Homo sapiens
tcctgcacctcgggctcctgctccgccagcagctgccggaacctgggcgggaggggagggcgctggggacattcacccacaacagcgggtctggcaccccgggcgtctaaccccgaggggct

SEQ ID NO: 187350 - DNA, 122 bp, Homo sapiens
gtgggtaaatgaagccaggaacagcagcttgaaatcacagcccagaaagggacgctcacccggcccagcacaaagcgagggtccttttgtaccagcagagcctctcttcgcctccctccagg

SEQ ID NO: 187351 - DNA, 122 bp, Homo sapiens
gatccccttctaaaacgtaagttccaggatggcaggaactttgtctatttggttcacactcgacacagttagtgctcaaaaatgtctaacgacacaggcctgcttctcggtttgcactgctc

SEQ ID NO: 187352 - DNA, 122 bp, Homo sapiens
aaagttcaggcgctggttgcagtttgaaagaatctcccaacggggttcacagtacaacctcggtggggacgaacttccttggccagggccggggcggggagggtgaaaagcgggctgcaagt

SEQ ID NO: 187353 - DNA, 122 bp, Homo sapiens
cgcgtgggaggggcttcccggaggccggccccgtgggtggggagccagcgtgcgtcccagcgagtcagctccacttgatcggcagtttaaagcccgttctaccgtcccccagtccttttgga

SEQ ID NO: 187354 - DNA, 122 bp, Homo sapiens
ctgtcctctaaacgattagcccagagaaagagagagagagagagcaagcaaacccgaaaacgggtccagggtagagagctccaggtccttagcatgttcctggcgtattccaaaagtggcat

SEQ ID NO: 187355 - DNA, 122 bp, Homo sapiens
tgacctcgtgatccacccgcctcggcctcccaaagtgctgggattacaggcgtgagccaccgcacccggccaacaaaataatttttacaatgtaaatcccagccaggtgcagcggctcacgc

SEQ ID NO: 187356 - DNA, 122 bp, Homo sapiens
caaagacaggcgtcttcaagggttctggcagatggccaagtttgtgtcctttccctcccacgctagagtagcgcacgccactttggggaagcgtgagaccgttcaccaccggccacgaggcc

SEQ ID NO: 187357 - DNA, 122 bp, Homo sapiens
cgttggcgtctaggcacacaggtcagagcagctaggggaggccagggcgacgggagcgcgcgccagagaaccgtgagtgtcctgggaacccaacggtgccactgcccatccctgtgtgggcg

SEQ ID NO: 187358 - DNA, 122 bp, Homo sapiens
aaaggagcccatttctccgcaatccatgcgcgtggggtgtacaaatacacgaaaagaggacgcggggtgggcaggcatgaaaccttcagtgcctcttaaattctcagtctcaggttcacaaa

SEQ ID NO: 187359 - DNA, 122 bp, Homo sapiens
ccgggggtccctgcaccctagccggggaatgctgccaccctgaggggggctgtctggctgcggggcgccggggctgggggtactgctcccccaggacgcggctccgcagtgcagagcgccgc

SEQ ID NO: 187360 - DNA, 122 bp, Homo sapiens
ggtaagcacagaggtggaaacttgaggctgggaccagcacagctgcctgcggtcccaggacgcactgcaggccaggccagaggcttcaacggggcccacctctttgcatgggtctggccaga

SEQ ID NO: 187361 - DNA, 122 bp, Homo sapiens
cactcctatctccaatttcctaaacaaaaccatcacagccaggtacagtgtccacacactcgaatggagcaccaccccaggcagccccagggcaggggtttctctcccatcaccctggccag

SEQ ID NO: 187362 - DNA, 122 bp, Homo sapiens
gcacccctcctctggccccaccctgaaggatggaggtctcggaaatctgtaatgggtgagcggacttgtagtccttactcgggggtgtacagatgtgcacagagagctggcctctgagagca

SEQ ID NO: 187363 - DNA, 122 bp, Homo sapiens
ccaacggtgctgcatcttaatggagggacatccagctaaagggaatcttggagacctccgcgggtttctagcagctcgcggcatgttggtttcccagggcaagaggccgccactgaaggtca

SEQ ID NO: 187364 - DNA, 122 bp, Homo sapiens
cacaaactttgtaaccatggataaagtcagccacttacttatctctgaaattaaacttcccgattttaaaaatggatgtgatgcttcctgcgcctattcacagtactgtgatacactgtgat

SEQ ID NO: 187365 - DNA, 122 bp, Homo sapiens
ctgctggaacacaaggtgttcggcgtggagggcagcagcgcctttctggagtgtgagccccgctcgctgcaggcgcgcgtggagtggactttccagcgcgcaggggtgacagcccacaccca

SEQ ID NO: 187366 - DNA, 122 bp, Homo sapiens
caggcctctcgggttctctcttttttaaatgtcgaaataaacttcttacaaatgaccaggcgcctgtccgcgctcgcgtcgctgggtccgcactcaacccctctcccatccctctcctgggg

SEQ ID NO: 187367 - DNA, 122 bp, Homo sapiens
tcctgttctttctgatactttcatctccacattctgggatgagatcatcttctgagaacacgatgactgtttgggatctctctcagaatgatggttaataatgagactacatatttctaaga

SEQ ID NO: 187368 - DNA, 122 bp, Homo sapiens
attattcttatttttcttaatgctaattataaagtattcctatatattgtcatggcagaacgatggaccagctaagctcctggatccctgtataggaacctgtaacaggatggtaaaatgag

SEQ ID NO: 187369 - DNA, 122 bp, Homo sapiens
caggtgtggggagtcgcagtaaacattttaccatgtgattgagtcatgggtggggagtcgcggaaatacacagggcaggcagttcgctatcacgatgttctctctcaattctgtctttggtc

SEQ ID NO: 187370 - DNA, 122 bp, Homo sapiens
ctccccacactgcctctctcatgagttaccgcctccggaaggataacaaggctacagtatcgccactgtagggggccctcccgggacggggaggctgtcagcttatctccacagccctggtg

SEQ ID NO: 187371 - DNA, 122 bp, Homo sapiens
gaaagaaaaccaaaagaagtcccgctacagtgacctgcaacgcgcgcacgctcgccgcggcggtcacttatagagcctgcctggaaggcacgcctctttattcaaaatggcccgcctcggcc

SEQ ID NO: 187372 - DNA, 122 bp, Homo sapiens
agagaggtcaacgtgagccccttgcctcacaccggcccctcccacgctgacagaggtcagcgggagcccctagcctcacgccagcccctcccacgctgacagaggtcagcgggagccccttg

SEQ ID NO: 187373 - DNA, 122 bp, Homo sapiens
ttggctcctctatggaggcactcaggaaccagtcgggtctttggtccctcgagcgagatgcgagctgtgtgcgtcgacgtcagcgtgctgacgtcacgggccggaggtcccggggctgctgg

SEQ ID NO: 187374 - DNA, 122 bp, Homo sapiens
gccttcctcgccccctcctttctcgctcagcgctcaatgtgtatgtagagctatgtataccgctccacaccctttcgtgcccgcgcgctgaaggttctggggttcgtatccgcgcgcttgcg

SEQ ID NO: 187375 - DNA, 122 bp, Homo sapiens
ttcctcctgaatgtttatttacacctccgctcactgagcggtgctggaccgcggcccccgcgtgggctcctcgagcccctccccaggaggcatgtccacgtgcctctccagccccctgtttg

SEQ ID NO: 187376 - DNA, 122 bp, Homo sapiens
ttctaccaacttggtagttctcaaaatgctgttcaatcttctatgactgtcagattgattcggttttttaacagttatgtcccttggctagtcaaattgtgtgtgtcttcctgtttattctt

SEQ ID NO: 187377 - DNA, 122 bp, Homo sapiens
ggcccatcactgggagagaggaatcactgcattttgctttttaaagactgaccaaggaagcggctggaggctgctgcctacattttggttcacactctgtcacaaaacaaaacacaaaaaag

SEQ ID NO: 187378 - DNA, 122 bp, Homo sapiens
cttagggtaggtttccaaacgtgtaaatggagagtctgagtctggaagtgtgaggggtcccgggcctgggtcacaggtcatgtctaatcaacgcttactgaaggcgcctgtgtgcccggacg

SEQ ID NO: 187379 - DNA, 122 bp, Homo sapiens
cagtaactttacccgaggggagtaaacagatgcccctaaagtctgcagtaaaggtgcccacgcgcaacggcgtgggtcaatgccagaaaccctgggatcccggaggtcgaggcctccacaca

SEQ ID NO: 187380 - DNA, 122 bp, Homo sapiens
atctatagactattcaacaacaacagaataaacattcttcctaaacatgcaaggaacattcgccatgacagaccacattttgggccatagaagacacttttgtaaatttaaaattatataaa

SEQ ID NO: 187381 - DNA, 122 bp, Homo sapiens
actccttactcgactccagccacactggccaaggcctgctgtctccagatcttgcataaccgccttcacacatctgctcggagttcacttccagtcttcctattcctagccccatgagctac

SEQ ID NO: 187382 - DNA, 122 bp, Homo sapiens
ttcctccagaaggaatagacgagattggatttggtcatttccccaaggtgaagagcatggcgatttcttctgtggtaaggagcaatgtgagtaatggagtttctgttggtgggttatgtggt

SEQ ID NO: 187383 - DNA, 122 bp, Homo sapiens
tctcacctgcacctcggctccctgcccggcaccctggctggcctgggggactcacgggcacgccctgaccctgctctgcctccaggggtgaggccagcgctgagtgcaagtaggttccaggg

SEQ ID NO: 187384 - DNA, 122 bp, Homo sapiens
gaggaaataggctcagagaggttaagtaactatattacacctaacagtatgccccactaacgaatgaggaaataggctcagagaagttaagtaacttgacgtcagttatccagctactaagt

SEQ ID NO: 187385 - DNA, 122 bp, Homo sapiens
gcgcgcgggcggggagcaggggcccggtggctccgacgccggaggcttgcggcccagggccggctgcaggcttgaagcctgctcggagcttgggattgtattttctttggctttctggcgcg

SEQ ID NO: 187386 - DNA, 122 bp, Homo sapiens
cacagacatggtgtccggaggctggagcctttgtttctgcggtgatgctctgatggtgaacggcctactcaaacagcttggtttgcctttatatacacattattagggtgtttcttgatgag

SEQ ID NO: 187387 - DNA, 122 bp, Homo sapiens
aaagagctgcagatagaagacaggtgttggagagagctctgttcttacagctccagatgccgaggctgagccctgtcaggtcatagttacccatttataaggaggacactgccttctagaat

SEQ ID NO: 187388 - DNA, 122 bp, Homo sapiens
cttcggcagggcctgaggctcatttccattcctctcgcatacagcctctgttgtgcgggccgggcctgcagagggtagccgcggctgcctacgaacaaagccccattcatccccagggacgc

SEQ ID NO: 187389 - DNA, 122 bp, Homo sapiens
ggcggccctggcccggccctctccccactggcgccgctgcgcttgctccgattccctccgcggggctgagcctctccaccgcgcccctaccctccgattccggtctcttccgctgcctcgga

SEQ ID NO: 187390 - DNA, 122 bp, Homo sapiens
agaaaatcagagttgttgggaggattaaatcatagggtatgtaaagcacttcgtgcctggcgtgtaacaggtgttccacaaatgctcgttcttgctggttaatacagtacctttcccatctt

SEQ ID NO: 187391 - DNA, 122 bp, Homo sapiens
gtggtaattggggtcctgatctcatggttgacgtggccctcacgtgagctggagccgacgcgtgcagacgtccttctaatcctagtcttcgtttggtccggttgcactcttcctatagccca

SEQ ID NO: 187392 - DNA, 122 bp, Homo sapiens
tcagtcgggggtctttgatgccgcctccatgtgaaacctgacgtggaagacccaccggggcggttttggggtccgaggtccgtcaggattcatcctgcctcaccctgctccctttgtctctt

SEQ ID NO: 187393 - DNA, 122 bp, Homo sapiens
atatcactatggactcatagatatttattttattctttgagagccaggcatggtggctcacgcctgtgatctcagcactttgggaggctgaggtgggtggatcacttgaggtcaggaattcg

SEQ ID NO: 187394 - DNA, 122 bp, Homo sapiens
ggagaaggatcaagagacgtaacctccaaatagggctctgggcacagggcctcagagccacggtcctcaacccagaaatcagtgctgcacaccagcccctcctcctgcagcccccactcctc

SEQ ID NO: 187395 - DNA, 122 bp, Homo sapiens
ggcgtgtcccattgcagcaccgacccggacaccccgagccgagagccaggcgggcgggaacgctccgggcttcctgcactggcaggcgcagccggcccacgcccgccccctgctgttaccac

SEQ ID NO: 187396 - DNA, 122 bp, Homo sapiens
tctgcagaaaggggcttcttcggtcccgagctcgcgtccaggtggccaggcctctgccggcggctccagtggctgcgattatcgggttcggtaaatgcccccacgtgcttgtgtctctttcc

SEQ ID NO: 187397 - DNA, 122 bp, Homo sapiens
aggcagacgggctattgtgatgccgtgtgagaaatgctgtggtagaaaggacaccccgggcgggcaggtgcacagagcaggacaggccctcagggccagagtccacttccctaaaggtgagg

SEQ ID NO: 187398 - DNA, 122 bp, Homo sapiens
cttccacggaagagggcctgggccccgtggagcctcagtgcccgtttggcctgctgctctcgctgacaataaagagcccttgcgttgcactgaagcctgtgtttggtatgagggtgccatcg

SEQ ID NO: 187399 - DNA, 122 bp, Homo sapiens
gcggggtgggcccggctccatcaggggcgcagaggccgcgggacgcggagagcaggcaggcgccgccaggggacgccttacagcctgtcctaagcttttattttctgggatgaggtctcttc

SEQ ID NO: 187400 - DNA, 122 bp, Homo sapiens
aaattctagctgttctaatttgctttatgtttcacataaatgtgaactaaaatatgcttacgttgttcctgttgacaacagagcaaaccaaaaaaaggcttcatttgctgagtagaaataaa

SEQ ID NO: 187401 - DNA, 122 bp, Homo sapiens
aaggcctgcgccctccagtccactgaagtggagctgtggggaaggggcgagagactttcacgggaaatttcaactgggctgggggcggtccacacatttcatcttgaatagggcagcggcct

SEQ ID NO: 187402 - DNA, 122 bp, Homo sapiens
gcagaggctgagacgcacctgagaggggaggaagcttccgctcttctggcctcccggatccgccagggctcctgctgctcccacttccgccacccaggagggccaggccgccgtcttgagtt

SEQ ID NO: 187403 - DNA, 122 bp, Homo sapiens
ccggacatacctcttgctataccctttcctcgacctgcacccactccctgagccatccggcgtatatcggtcacccagcagggtgtcaggcagtgttgtaggtgctggagatacggcagaga

SEQ ID NO: 187404 - DNA, 122 bp, Homo sapiens
ggaaggggctggccgtggcagagaggcctttgatgtgattcactggaagcttgatgctggcgcggaggcattctgtagcaggctgagccctttcatctcagcaaagagcgacaactccctaa

SEQ ID NO: 187405 - DNA, 122 bp, Homo sapiens
catcgagagatactgagggacaactgtaatgtgcccaaagtcaggaagatcataagcagccgagctgggatttgagcccacgcagtacagctccaggtggccctttaaccacacacaatgcc

SEQ ID NO: 187406 - DNA, 122 bp, Homo sapiens
gggggctgggaggccttcagcctagtcagggacaccgacatcaccctttagggtgttggccgccggccctgtgcgcgtctaggggaggacggtcccgcttggcgctggccgccccgcccggt

SEQ ID NO: 187407 - DNA, 122 bp, Homo sapiens
aaaagctttacggtaagataagcctgtacgatacatcttatctctctatatttaaagatgcgtagaaggctagatggagtttgccgggtgtcacatttaatcatataggaagtactgtgttt

SEQ ID NO: 187408 - DNA, 122 bp, Homo sapiens
ggcggggagggggctgtggtggttgttactagtgctcttcttcggctcccccggctccaccgtatcccccagtctctcgcggcatcgggaggggagggaccagcgcggagcgcaggaggagg

SEQ ID NO: 187409 - DNA, 122 bp, Homo sapiens
ttgtttggttcctgcctttgtcttatgacttacaggttaaaaatggtgttttgggcattgcgccgatatggctggttaccctctccctcctgcacacataggaaccaccccttcctgccctg

SEQ ID NO: 187410 - DNA, 122 bp, Homo sapiens
tcccagaggcctcttcactccttttacagactgggtctcctaaggaaactgccgggcagccggcccctcccccagcatcctcacatcttgccttctttggtcctctctccccatgagaacca

SEQ ID NO: 187411 - DNA, 122 bp, Homo sapiens
gagtcaccagtcagggacgtgctgatgcaaccaacgagacaggactagacgggggtcacccgtccctaaaaaccaggacgggctcgggggagagtgggcacgggcccagcggctgcgctctc

SEQ ID NO: 187412 - DNA, 122 bp, Homo sapiens
tgcatcagctgcctccttcttatccacccccatgctggccccaagagggattttctgaaacgccagtcaccacctacattcactgacttgctccagtcactgtaggcataaacacaagtaag

SEQ ID NO: 187413 - DNA, 122 bp, Homo sapiens
tataggatccatcactctcattttaattgggggataaaaagataatacagcctgaagtcccggccttttatttcatgaaatggatggacactaacaaggagaataaattcagagggttattc

SEQ ID NO: 187414 - DNA, 122 bp, Homo sapiens
tctgttcttttattggaaataagtggcacgccccattgccttctagtcgcctccccgaagcgaagaggccgaagcgaagaggcctggtgggttgtctcaacatccttttgctgagaatcgaa

SEQ ID NO: 187415 - DNA, 122 bp, Homo sapiens
atccatgtttggaagttcctctaggtggtagtattatacagcaattagtatcacttaccccggagccagtttagattttgaattctgacttggtctgaattctgaccctctctgaaccttgg

SEQ ID NO: 187416 - DNA, 122 bp, Homo sapiens
ggtaagtgatctgggaaagggcaggaaactattatttatggtcttttagtgtcctgggttcggtgctgtatgtaggtcccagttaatcttcacaatgaccctgtgaggttgttgttttcctc

SEQ ID NO: 187417 - DNA, 122 bp, Homo sapiens
tggaaagttggattttttggtttttggttttttcttttttcttaatactaggcccgaccccgagagaatctaatctaattgttaaaaaaaaaaaaaatccggggttcaggggtgtccagctt

SEQ ID NO: 187418 - DNA, 122 bp, Homo sapiens
aggcggggctgcggcccagacagtgggctgagctcagcgtctgggctgggtggaaatggccggcctggggttttggggccaccctgctggacctctcctgctgctgctgctgctggtgctgc

SEQ ID NO: 187419 - DNA, 122 bp, Homo sapiens
agtttcaccatgttggccaggctagtctagaactcctgacctcaggtgatctacccgtctcggactcccaaagtgctaggattacaagcgtcagccaccgcacccggcccatgtgcaattct

SEQ ID NO: 187420 - DNA, 122 bp, Homo sapiens
taagggttccttctccgatttaggtttcttccactcctttgccctgggagagcaaaggggcgaagggaaatcaaaaaccggttgaaaaagaaaaaagtgtcttccctcaggcgtgggtcaga

SEQ ID NO: 187421 - DNA, 122 bp, Homo sapiens
tctacggctcaggatccctctgagagttgatgaggatgtgtaacaagtattttcttctatcgtgcctgccagggctgaagctgcctggtatccaggaggggaatgctggtatccccatatgt

SEQ ID NO: 187422 - DNA, 122 bp, Homo sapiens
ggcttcagaacagcaactgcacaaataacagcaatgcctcagcacagtgcttgcacactgcgggtgctcagccgttctctaattgtaacagcattatctttccatttagtcttcatggctgc

SEQ ID NO: 187423 - DNA, 122 bp, Homo sapiens
acgtgattcagatgtgctgagtctccccagtgtcctttccggtcttgggagtccacatggcgtttgatcgcccatcttcttaggctcctctggggtgacagttcctcagacctcccttgttt

SEQ ID NO: 187424 - DNA, 122 bp, Homo sapiens
aaacagaacattctccactccaatcctgtcaagcaatatggggctaagtagttttcttcccgtttgatagaaaagcagccgaattgaagaacatctgaaattcaatggaacaaaggctaaat

SEQ ID NO: 187425 - DNA, 122 bp, Homo sapiens
ttaccatttctcggatgtaatgtggaaacaaaatgtgcaggccctcggcagcgaatgacacgtagagagggaaaccctgggattctcgtaggggagggtgtgtgatgtcctcagcacgcggg

SEQ ID NO: 187426 - DNA, 122 bp, Homo sapiens
gtacttctctacatagtgagataaatgataatgtcagagggagatgaagagaggaccaggcgggaacctagattaccagccactgcagactcaagagattattatctgtttactttagggtc

SEQ ID NO: 187427 - DNA, 122 bp, Homo sapiens
agagagtgcttcttaaagttaaccctcaaaccaccatggccagtgaatgcagaataagcccgctgagagtttcgtctatttctatggcattatgctggaaattataaagaaaagggatgaaa

SEQ ID NO: 187428 - DNA, 122 bp, Homo sapiens
tcttcctgcgtcgatgccgtctccatggagaaaaaagcggctctagtgtgcggcgttccccgccttcttgggcttccagacaccctgaggactctgcacaatctctgcggggacggggtggg

SEQ ID NO: 187429 - DNA, 122 bp, Homo sapiens
gattgctttcattgttgaagcacacctattgcttttctttcgcaggctcttcaatcagaccgatgccatcaccccctagcctgatattcaaggcctcattgcctgctctctccaactctgct

SEQ ID NO: 187430 - DNA, 122 bp, Homo sapiens
attggcatccctacagctcagatccacttgaaatgcaattaagaaatggtcttaaggttccgagcacttattggtgtcagttatttatcagagtagctgaggactttggaaatcagattcct

SEQ ID NO: 187431 - DNA, 122 bp, Homo sapiens
cagcctggggaacacgctgcccgcactgcccagagagcagtgcaaacaccacaacacgagcgtgtttcttgagaggaatgtccccgagttggacaaggaggctgtttctgcacatcagctca

SEQ ID NO: 187432 - DNA, 122 bp, Homo sapiens
gggcttactcctggccaggcggagacgcgctgcgattggccgtggtgggtgccggtaacccgtgctagcgtctttggctccccgcaccgtagatgtcaaaggctgaagctgctccctttgcc

SEQ ID NO: 187433 - DNA, 122 bp, Homo sapiens
gtaaagggaaagggagcccagtgccgggcggcgctgagcagctcccccagcggccaccgtcgccaacatccctgcgtaggggtttgtatcgcagcgcgcttccagacatcaacggctgcgcg

SEQ ID NO: 187434 - DNA, 122 bp, Homo sapiens
acgcccaccacccagcgcggccgcaccacgcgaggcttccactcccacccgcccagctcgcgccacatacagtccctcaacgcgctcctgccgcgccgccccctccagacagcagcgttccg

SEQ ID NO: 187435 - DNA, 122 bp, Homo sapiens
ggagccacctggggaccctgctcgcggagtccctgaatctggtccttcgtttcgagccggcgcaggcactggaaagtgagcaagcgtccctgcttctgcagagccagctctgctggccaccc

SEQ ID NO: 187436 - DNA, 122 bp, Homo sapiens
caagcttcgagacctgcccaagctgcgagcgttggtgctgcttgataacccatgcacggacgaaaccagctaccgccaggaggccctggtgcagatgccataccttgaacgcctggacaagg

SEQ ID NO: 187437 - DNA, 122 bp, Homo sapiens
cacaaaacagaggaacttcccatcatcctcgcagaaatagtggaacatctcctggtgcctcgggcatgtagcctctttccttttggactgcacctcagaggcttgtagagcttggattttct

SEQ ID NO: 187438 - DNA, 122 bp, Homo sapiens
caccgacagggttgggcggcccagcactgcggggatacggggcaggtgtcagggtcccagcgccatccgccagcccagaggcacaaggtggggttgtatttttaattcttttccttcaatat

SEQ ID NO: 187439 - DNA, 122 bp, Homo sapiens
atggacccatgggttcttattttattcagttgtttgtaattttttattagcataatttatcgctcaaattatggtgctagtggaagcccctttcaagctcaacttcccactttttgagatcc

SEQ ID NO: 187440 - DNA, 122 bp, Homo sapiens
aggtatatagattattttccactgctgttcctcactaaagtttacttaatatgttagtaacgcacaccttctccccctgtatagggctgtgtgtcttctttggacaccccacctttctcata

SEQ ID NO: 187441 - DNA, 122 bp, Homo sapiens
gaggcaaaggccaccagaccaccctgatgatggattagaagtggcagatgcagccgggcacggtggttcatgcctgtaatcccagcacttggggaggccaaggcaggcggatcacgaggtca

SEQ ID NO: 187442 - DNA, 122 bp, Homo sapiens
gtaggagccttttcagagattcctcctccccagggatcaagtattgttttgcttacacaacgggaacatcattctctgctcacatcccatgcttgatcaattgctaggtcctatacacacag

SEQ ID NO: 187443 - DNA, 122 bp, Homo sapiens
tctcagctcttacccagggagtcctgggcccggatgtcagctccatgctcaatgagcagccgcacgatctcctcactgttcacacaggcagcaaaggacaaagggtgctcccctgtggacac

SEQ ID NO: 187444 - DNA, 122 bp, Homo sapiens
cagcggccacattcaccatggggggcgtatccgcacagcggccacattcaccatggggggcgtatccgcacagcggccacattcaccatggggggcgtatccgcacagcacacacattcacc

SEQ ID NO: 187445 - DNA, 122 bp, Homo sapiens
attgttatcttcaaccggcagccaactctgcacaaaatgtccatgatggggcatcgggtccgcattctcccatggtctacctttcgcttgaatcttaggtcagtccctggctgagggaagca

SEQ ID NO: 187446 - DNA, 122 bp, Homo sapiens
tgtcattatatatgtaacttaaatctagacaccatcaaagcataaaataaaaataaaaagcgttgctgaatctgggtcgaaaatgtagtgcgtttatcccactattctctctgaaaatgttc

SEQ ID NO: 187447 - DNA, 122 bp, Homo sapiens
gcacgtggtcagtgttccgccatcgactgactgggcggatgaatgatacataaatgaattcgcgaacgactgatgcccagcttcctcccgaagcaaggtcattcacctcagcggtcgcgcct

SEQ ID NO: 187448 - DNA, 122 bp, Homo sapiens
ctccagccccgcaggctcgcccggcccactaactgcccgagcggcacaccgcctggtccccggccatgcagccttccccaagacctgagactgagccatttagatttagtaaaaaggaggag

SEQ ID NO: 187449 - DNA, 122 bp, Homo sapiens
cggccccacctccatgcgctcctactactctttcaaacactgcagcaagttgcagcaaggcgggcaaataccgacagcgcgcgtgggggcgggcggcgggcgccgcggggcccaccccctcc

SEQ ID NO: 187450 - DNA, 122 bp, Homo sapiens
gaggctggggccctcatgatggaatttgtgcccttacaagaagaaatactagatagttttcgatctctctgtgccatggggacacagcaagaagacagtcatctgcaagccaggaagagaac

SEQ ID NO: 187451 - DNA, 122 bp, Homo sapiens
attcctaatcgctcctggccccggtgattggctgctcagctctgaccccacttgggctgccgcctggttggataaaaggggaatctccttgggctccagagcattagacaccggagggggca

SEQ ID NO: 187452 - DNA, 122 bp, Homo sapiens
acagactgtagtcacttaacgcctggagactgtgtggttcataaaacagggccctaggctcgcttctggggactgtgggactgggactatggccagaaattaacatttgtgtcacacaaaaa

SEQ ID NO: 187453 - DNA, 122 bp, Homo sapiens
gcatgccccggccggccaggaacctgcgcctgagtgccctggtgtttctcttttttcccacgaaagcacgtgtgaagggcagagccacgtttatcaagaagtcatttttcccgttcgccggc

SEQ ID NO: 187454 - DNA, 122 bp, Homo sapiens
ccagcatcagtgtgggggcaaacaaggccacatccgccaccagcttcaccccagcttctacggaaaagaggcgcagggtagaggctcaccacgtggctccgaccctgttcccttttcactta

SEQ ID NO: 187455 - DNA, 122 bp, Homo sapiens
tggacgatgcgtggagaggactgtggaagtcggtatttgttccgcagccctcccaccatccgcccgaacattttaataacgcgctctctagagcacccgccacaggatgcgtcagctctccc

SEQ ID NO: 187456 - DNA, 122 bp, Homo sapiens
tttactgcacagggtgagtggacccagtttggttccataacactgtctccctctatccctcgttggtgacctccgtgtagcaggtgctaaaagctggttcacctgtggggcatgtgtagttt

SEQ ID NO: 187457 - DNA, 122 bp, Homo sapiens
ccctgctttgtgtgcggcgcgcggattggccgacgcgcgcgggggccgcgtcagcgcccgcgagcccattcatctgtgcacttgggcgttggaccccgcatcttattagcaaccagggagat

SEQ ID NO: 187458 - DNA, 122 bp, Homo sapiens
cattcagttatgtttaagatgttttcaggcatgcttggttttgagtaatgcctagcagggcgcccccttttaaggatgagtaattgagggttggatgaatgagtttctgaagtgattgaaaa

SEQ ID NO: 187459 - DNA, 122 bp, Homo sapiens
tcccttcctccgcggaaaaacggggctatggcgggtgggttgaaagaactcggcttcctccgtgggtgtttgtggtgtgaacagaggtgctgcagggtgaatggctggggcaccaggagctc

SEQ ID NO: 187460 - DNA, 122 bp, Homo sapiens
tgatgatcttgaggttgttgtcatacttctcatggttcatgcgcgtctcagatatgggggcgtcagcagaggggcagagataatgacccttttggatccctcctgcaagcgagccccagcct

SEQ ID NO: 187461 - DNA, 122 bp, Homo sapiens
agcaaggacctaacggacacagggaaacgtcacaggaaagggagcccaggagagcagacgcggagccaccagaccagaaaaaggaaaaagcactggaaaacagcatcgaagtcaccggaaag

SEQ ID NO: 187462 - DNA, 122 bp, Homo sapiens
agctagcccttgatgtgcctcaggtaaccaaacgcgtgagtgagtgaagtaatgaacgcccgcgtcctcatgccaacacccatgtggaccccacacgcaaccacaggtgcagaacgggtcgg

SEQ ID NO: 187463 - DNA, 122 bp, Homo sapiens
gtctcccttagtctctcagttcggcgatcttggtaatgccctgtcccatgcctgctaacgcgattcagcctcgatatccccgtccagtcccacgatcgcaccaagaagagcttgcgagcctt

SEQ ID NO: 187464 - DNA, 122 bp, Homo sapiens
tctcgcggagacagagaagaaaccgcaggtctggccggcagccagggtgagaatccccagcgccaggaactgggtgtaaccccagagctgcgccctcagggcggcgtccacttcggggggcc

SEQ ID NO: 187465 - DNA, 122 bp, Homo sapiens
ccccctgcctagggctggctggacctgggtgaggccagatgtgtgagtgtgaggcggtctcgaagtaggctgggctgagggggaagttccattgttttcttttgttttactttttacttcga

SEQ ID NO: 187466 - DNA, 122 bp, Homo sapiens
gacgctggtcgcatgcgctggctgtggtctgtctgctgaatgtctatttttgtctcctgacgagacgtgaggaccatgcccttgatccctccgatggaccagaaacccccttccttgcaaaa

SEQ ID NO: 187467 - DNA, 122 bp, Homo sapiens
aattagggattgtaattgaaatttgttgccttgatctgtcagcacttccaggcaggagagcggtgggaagaacttgctcattagtgtcaataaagcggcgggggcggagcccgggtccctgt

SEQ ID NO: 187468 - DNA, 122 bp, Homo sapiens
aaagtgctgggattacaggggtgagccactgcgcccagcctttttttcgagacagagtttcgctctgtcacccaggctggagtgcagtggcgcaatctcggctcactgcaacctctacttcc

SEQ ID NO: 187469 - DNA, 122 bp, Homo sapiens
tcatccttttttattgctgcatagtattccatggtgtatatgtgccacattttcttaatccggtgtatcattgatggacttttgggttggttccaagtcttggctgttgtgaatagtgccgc

SEQ ID NO: 187470 - DNA, 122 bp, Homo sapiens
ctggcaggggcgacccagagcgggcgggacgcagaggctgcggccgagaccaggcgccgccgccgccaccgccgccaccaccgccaccaccgccgccgctgcgtctcctcggcgcccgccgc

SEQ ID NO: 187471 - DNA, 122 bp, Homo sapiens
tctagatgaaagaagaggcacagagaggccagcttgcccaagtgcaacaactataaagtgcgggggctgatttctacccagctagactgacccctaccagggtcacaatcactgtggcacca

SEQ ID NO: 187472 - DNA, 122 bp, Homo sapiens
tggttcaggtttcctcagcgccaactacgtactaggcgcccccagcagaaacggccaccgcgggtcccagctcggcacgtggagcgagcttaccaagtcttcactgttgttacctgcatttt

SEQ ID NO: 187473 - DNA, 122 bp, Homo sapiens
ggctcaaagtcctcgtctccagactctagtcacacaggacagcggtggtcctctgtggggcgtggccagttgagctcctggtccttgcacagccagggagagagcagcccaatgacacaccg

SEQ ID NO: 187474 - DNA, 122 bp, Homo sapiens
tattataataacaaaactgtgcttccccaaaccaagaaatatacacagttcccaaaatcccggattctttgtggtgttgagaagctgaaatatctggcctctactataaatacaagtcccat

SEQ ID NO: 187475 - DNA, 122 bp, Homo sapiens
ggatgcctgcctgctccggcctcggcctggccagcccgcccccgacagcaggcagagtggcgtgcactgccccgcggcccctgctaatcattgtgggattattagcacccttggggagcccc

SEQ ID NO: 187476 - DNA, 122 bp, Homo sapiens
aggtgggcaaggacgagctctttgccctggagcagagctgcgcccaggtcgtgctgcaggcggccaacgggaggaatgtgtccacgcgccagggtatggacctgtctgccaatccggacgag

SEQ ID NO: 187477 - DNA, 122 bp, Homo sapiens
gctgcggcaggtgagggctggagccagggcgagcaggcgaagctgcctcgggacctcccacggaggctcggtgcctgcccccagcctggcgcggcgtgcccggtgcactgcacggccccagc

SEQ ID NO: 187478 - DNA, 122 bp, Homo sapiens
gtgttcttagataattaaattcttagaaaatcattccacatttgagggagaagcgaaggacgcagagagttcagtcttaattcaaagtcgcttatacattgttacctgctgtttccaggctt

SEQ ID NO: 187479 - DNA, 122 bp, Homo sapiens
cacgctggttttcatgtgatacactttttatcactaaacactcagcaatcactgaaaactcggttttgtaaagatatgatgtcatcaaaaggaatgtagtgtgatctaatgctgaaactgtg

SEQ ID NO: 187480 - DNA, 122 bp, Homo sapiens
tgttcattttccacactgctgccatggaaaaccagcccctgcttctcactctcactagtgcgaggagcggagaaacaaaatgagactgtactcagtcagcagcagatacataaaagtttcct

SEQ ID NO: 187481 - DNA, 122 bp, Homo sapiens
gtgggagagggctcgggaacaccttcccccgggtgtaacgggagtgaaaggcggggcgaccgaggaggggccgccttccctggccggccggggccgggtgccagggcgcgccagagcccagc

SEQ ID NO: 187482 - DNA, 122 bp, Homo sapiens
gcccagaaagccggttcccagcggtcttccggggtgcccggcccccagccaaactcataccgcctaccgagactgcgccgccacctgcagcccctcaccagctcggttttgggagctcgacg

SEQ ID NO: 187483 - DNA, 122 bp, Homo sapiens
gggcggggcgcgcggaggcaagaccctgtggtggcagcgaggcggggcccagcgaggaggcggggcctgcgccggcgcacgggctgctgcgcgctccgcagaggggcggggcgagggggctg

SEQ ID NO: 187484 - DNA, 122 bp, Homo sapiens
tggccctcgctgtcatcagcttgcctggtgctttgcgggtgcctgatgactgtggagtgacgttgaatggaaaggccaggaggctccatctgaggatgtatgctggccctgaaggccagcgt

SEQ ID NO: 187485 - DNA, 122 bp, Homo sapiens
tgtttggcaactggggtgaagggattgctttctccctgctgggattctccccaacccttccggtcaggcaggaagggagcagcctatttcactgcaggcccagatgaagtgcgtgcatggac

SEQ ID NO: 187486 - DNA, 122 bp, Homo sapiens
cctgggcaggagacttgagcagggaagtgcagagtcttctccctgtgagaaggctggatgcgtgtttaaggataaatgaacacgcgaagagtagtaacaacagccaagatttataaatgcct

SEQ ID NO: 187487 - DNA, 122 bp, Homo sapiens
cttaagttttacctattaatttttaacaagaaattttaattttaattttaaacgaaaatacgcatcgtactcagaggtaaagatttttaatcctcgcggttcgctcgtataaaggcatattt

SEQ ID NO: 187488 - DNA, 122 bp, Homo sapiens
cctctttataaagagcccagttgtctccttgtgacattctctgtttctcagagtcattgccgtcgagtctctgctttttgtccacattttgggatcagcttactgcatgatcaaagatgatg

SEQ ID NO: 187489 - DNA, 122 bp, Homo sapiens
gggtaagggacgtgcggaatcgcggccccagcggctgccaggcatgatgggagttgtagtcggcgcggctgcaaggcatcaagggaaatgaagtctccacagatttaaaaactgttggccgg

SEQ ID NO: 187490 - DNA, 122 bp, Homo sapiens
acccacaatgccacacaggacaccgaccaacaactgaaaacggtgacagctgcccttacccgcagctccccagcgtagccctcccccatcgcagccagaccggcttgcccactgcgcagcaa

SEQ ID NO: 187491 - DNA, 122 bp, Homo sapiens
aggagccaaaacctcaggtcaggcgcactttgggcctccagcccagccccgcctcctcagcgctagctagtaggcaaaaggaaaacagctgccccttaatgaggctatgtggacatcgtagt

SEQ ID NO: 187492 - DNA, 122 bp, Homo sapiens
ctcagcgtcgagcggctggtcgggtctccatgcatcacgccggggaggggctgcggcgggcgccgggcctccagcgaactgccgccaccgctgccctgccactgctgctgggctggagctgc

SEQ ID NO: 187493 - DNA, 122 bp, Homo sapiens
aggaggcggtagagcaggagcagcagggggagccaggctggccgagctggggggtgagcacgtttgtctcaggcagctcatcgcctgacacccccgggaacgggctctgccccaaggcctaa

SEQ ID NO: 187494 - DNA, 122 bp, Homo sapiens
cttagtctcctctagggcccgttctccgcagcccggtttcccccacccgagtgacaccagcgggataaggcagagggtctgtcagacaataagccggaaagggaacacgcatctccttggtg

SEQ ID NO: 187495 - DNA, 122 bp, Homo sapiens
tatgaccacaaggcgtcactcttgttgttactgttgtttcatagattgtttcccaaatagcggcaaaggattaacgagagagtggagaagtgagagtggaagtgctgtcttaagtccctgac

SEQ ID NO: 187496 - DNA, 122 bp, Homo sapiens
aagaatttcatatggtgactgcagagcattcattagattccaagcgggaccccttctgagcgcgggaccctatggcggattgccattgaaaccagccctgccggctccccatgccccgggga

SEQ ID NO: 187497 - DNA, 122 bp, Homo sapiens
cgcgggtttcaggaaatccaaacacttcgacaggaaatcggaatcctgactaagcattcccggccccgagccgctccgcgccgggggctcccgcctcgcttaacccttggcccgccggcagc

SEQ ID NO: 187498 - DNA, 122 bp, Homo sapiens
ctcggaggccatgcagcgaagaaacgtgacttcatggctagaggggcatttcccaggagccgcccatgccgccgcgtgaccttcacacttccgcttccggttctttattccggaagttgctc

SEQ ID NO: 187499 - DNA, 122 bp, Homo sapiens
gagcggctggcgggaaggcaggttcctggcatatgctcgcttgggttctgttctgcaggccgaccacgtgcccattggtttatttgaccagggtcggtgtgatagctggtgtgtctggggcc

SEQ ID NO: 187500 - DNA, 122 bp, Homo sapiens
ctcctcttcctctcctgaccccagccaaggaagggatggagatgggaaagagttgcctggcggcaggctagcagctggccaaggggtggctggggaatcagacctaaccctcgggcagctcg

SEQ ID NO: 187501 - DNA, 122 bp, Homo sapiens
gtggcattaggtcagaatcagttctgttaattctcaaactgtctaagtgtttcctctgctcggtgtaaagtcactctagtaaaatgtccgagatccttgctgggatctgagattcagagaat

SEQ ID NO: 187502 - DNA, 122 bp, Homo sapiens
tctggacgacgaatgttgctcggtgaaccccttttcggtatcaaattccaccagggaggccgtcttggaggctggggcacctcggggaaggacgccggcatcagcaccattctggggtacgg

SEQ ID NO: 187503 - DNA, 122 bp, Homo sapiens
gcttccagtccatttgccttggcctgtagtgaaagtcctaatgaacaatgaaggaggtaccgggccttagggactcagggatgcgctcaggagttaagggcaaattttcctaggttctttcc

SEQ ID NO: 187504 - DNA, 122 bp, Homo sapiens
agccactgggtctcgtcgcctaggagaggaagcggagggtgctgcagacaccgaggtgaacgtaaagccggcgagatctccgtgctccgggtacccacagatactgtccgcgccgcccgcgc

SEQ ID NO: 187505 - DNA, 122 bp, Homo sapiens
catgcagagcaacctgctgcccaacgcgcacgctgttaacttcgtggacgttaacagccccggctttggcctcgaccccaagacgcccatggagatgctctaccaccacgtgcaccggctca

SEQ ID NO: 187506 - DNA, 122 bp, Homo sapiens
caaagagaagcaacaaactccaggctcttctacctttgagtaccatggcaatgaggatcccgccgcatcccctacccacaggctgtgacagggcctcacttggatccttttatcatggagga

SEQ ID NO: 187507 - DNA, 122 bp, Homo sapiens
cgtgggccggccaagctaccgctcttcggagagaaagagctcagtccgcgctagagaggacgcggaaaaaagcccctgaaaacccacaggtagtttaaataagagacatgaaaactctgttt

SEQ ID NO: 187508 - DNA, 122 bp, Homo sapiens
atgaacccagcttccgtgcaccccaccacacctcggggtctccggctgacacttccccaccgcccgtccctcagacagggcctgtctgccctccaggcaccaggcaaggcccatggccctgc

SEQ ID NO: 187509 - DNA, 122 bp, Homo sapiens
gtgcaggagcagaaagcccccttctctcagggcagccaccatgttgctgagagctgaggccgggtccccgagggcagccacagcacagttgcacaccaggaggtcggcgctgcccagggcgc

SEQ ID NO: 187510 - DNA, 122 bp, Homo sapiens
cacagaggtagagcgggacgcaatgagccatgaacgcctgggcttcttccctagttttcccgcagtagactctgggggcgcggttgcaaaacctagctgcccacaggggcgggcccagggtg

SEQ ID NO: 187511 - DNA, 122 bp, Homo sapiens
gagtcggtgcagcgcgcccgggttcggatagggttaaggccaacacctgcagctgaagtacgacccacatgggaagtaggaagtgcggcgcctgagcttcctgtataaataaacgcgctgct

SEQ ID NO: 187512 - DNA, 122 bp, Homo sapiens
caatctttttttttttttttcctcagcagtagggtggcagaaatatcatccacaattggacgtctgcttcacagtcagaggaagcattctagccattgttataacctccccttgggtcagaa

SEQ ID NO: 187513 - DNA, 122 bp, Homo sapiens
tttttgagacggagccttgctcttgtcgccagtgcctcgatttttgcatttaaaatgaggcgaaagaacaaatggaataattatagaaaattttagcctctagcaaaacactgtgaagcagc

SEQ ID NO: 187514 - DNA, 122 bp, Homo sapiens
gctgacacctgtgcctgccctggagctagatcaggttctggcgactgctccaacctggaacgccggctcagtagcgcccaagccgaaggcgaaggggaagaggaacgaagtgtgggatgggg

SEQ ID NO: 187515 - DNA, 122 bp, Homo sapiens
tgattttccaggagacacaaaggtggcagagtaaatgatatcttctccccaggctaacatcgaggcatagataacggagctgccagcagagcccctccctctactcccctcagacaatgtgt

SEQ ID NO: 187516 - DNA, 122 bp, Homo sapiens
gccgagggagaagttagaaagggatgatgaacgaagcgttttgaggggactgcaacgccgcggcaatacccgcccctgagctgcgcgcactaccgcctcggtagctatcatggccgccgggt

SEQ ID NO: 187517 - DNA, 122 bp, Homo sapiens
gcagcagccagcactggggagcagagagctggacctatgttctctggctttctgctttggcgggagaatggggtctaagaataaacaaactaagagagtagagccaaaagggaactttgata

SEQ ID NO: 187518 - DNA, 122 bp, Homo sapiens
tctgcacctgcgcactgggcaagccttgggcttccggagccaaaaggccccggaagtggtcggccgcttgcgacgctccggaagtgacgtgctttcccgagccggtgagtgcgggagcgggg

SEQ ID NO: 187519 - DNA, 122 bp, Homo sapiens
acggagactcaaagccgggactggggtgcctgttctcacagtcactgacccccacctgttcgaagactggcaagattctgtgaatatgggggaggaagagccaatgattcccagcagaagac

SEQ ID NO: 187520 - DNA, 122 bp, Homo sapiens
ccccgggcgggtgcagcgggaggcgtgcgggacgcagagtgagttcctcggcgtggggaccggggctcgggggctgcaccggggggccaggaccgcgcttgccggagccaggcgatcccgcg

SEQ ID NO: 187521 - DNA, 122 bp, Homo sapiens
tcgcacaggtgtactttctattggctatcttagattgacttcaggcttgaagctggagttcgcagaactttgtggagtagttattgagttacacaggaagtctagaaaatattaaatatggt

SEQ ID NO: 187522 - DNA, 122 bp, Homo sapiens
ctgttttaaaaatatatggtatagcactgttacgtgaattgatttcttaccttttggagccgcatgatgtcgctgtctaccatgaagttatagctagccaacattcaaatttcttctattac

SEQ ID NO: 187523 - DNA, 122 bp, Homo sapiens
gagcactgttcttttaactatttgggatagttccttttcaaacattaaatagtttcctcacgtgagctagtgaatctacattgtgtttgttccatccccacttcactgctagtacccaacct

SEQ ID NO: 187524 - DNA, 122 bp, Homo sapiens
caaatctgaaaagacagcctcccttttttctcctgcttctcagaaggcctctgctgagcacgatctctgtgggggtaggagctcggcatgtgtgtattgacagacaggctcatgccctttct

SEQ ID NO: 187525 - DNA, 122 bp, Homo sapiens
ttgcactcctctgctttctccctgccttgattgagcttgagtgatgtggaataaattgtccgtctcttctttctcatatctggctgttgttgaggcaagctagaggaggagggagaggaagg

SEQ ID NO: 187526 - DNA, 122 bp, Homo sapiens
ctgcccccaccccggggaccctgtgacatggtgcctgagaggcaggcatagaggcttctccgccagcctcctctggacggcaggctcactgccaggccagcctccgagagggagagagagag

SEQ ID NO: 187527 - DNA, 122 bp, Homo sapiens
cagccacgccctgctagatcctggacaacccgacgctgcagcatgggacaggacacaccccgcgagggagccccagccgccggcccctgccgcgcccctcggcgacacgcgacgcctgcgcc

SEQ ID NO: 187528 - DNA, 122 bp, Homo sapiens
tctccgtttgcactggctcaggactcgagagccacacgtggctagtgcctactgttctggcgcgctcaggcttggagccttctctgcggaggccaagtcctgcaagggatctgtttgctgcg

SEQ ID NO: 187529 - DNA, 122 bp, Homo sapiens
aaaacggaaatttgttggctggcttggaggatgcttccactgtgttcttcacacgagccccgggcctgcctgttgggccggttgcgcaccccgggcgcgcgctctcccgcgcccacgccgcg

SEQ ID NO: 187530 - DNA, 122 bp, Homo sapiens
gacggtgcatacacgaggttaccatcattcttcattttgatgcttaaagtctctcgtgttcggccaggagaagccgtgcaggctggttcccgagtctctcgggcacgtcgccatcattctcc

SEQ ID NO: 187531 - DNA, 122 bp, Homo sapiens
atcactacagacttgctcccgaccaagcattcttaacccagcccctcgaggcccttagagcgttccgaggtgggttcagacggttccccataaacagggccataaacgtgtgtgcatgtgca

SEQ ID NO: 187532 - DNA, 122 bp, Homo sapiens
agtccgcagtcccgcagctcctccggcgctgcacgcattcttcccggccaagaaggaacgcggcgagctaacgggatccagatgtaggagtcctctgggcttggaccccaaataccctaaat

SEQ ID NO: 187533 - DNA, 122 bp, Homo sapiens
ctgcccagccctggcgggccactactgacctagtccgaagttaggaacagccttgcaaaccgccccctccccctccatttcatcaaaatcggggaacaaattcagaaaaggtgcagctggtt

SEQ ID NO: 187534 - DNA, 122 bp, Homo sapiens
gacttctgccagatgcgcccagatcattagtccgtttgaatcatcacgtcttccaggccccgccctgctctctgataggctccaccttcaccgtgggggtcctgttagtcaagatgctctga

SEQ ID NO: 187535 - DNA, 122 bp, Homo sapiens
gagccagcgaaagtctgtcgaagtattgagcacccctattgaagactgtgggagttttggcggcttaatgggattgtgttcggtccttcaggctctcctttaaaagattccatggcaccaac

SEQ ID NO: 187536 - DNA, 122 bp, Homo sapiens
agaccaaggtgagaattcctctaaactcagcacgtcacttcggcaaagagtgtcctgccacgacccgcggagggccgaggtttgcaggccgacctccccttgcagttaggatcctctgcttg

SEQ ID NO: 187537 - DNA, 122 bp, Homo sapiens
agggttggagagcagggccgtgttgcaaggctctctgggtggccacagcagcttgcgctgcgcccacattgcttctgcgtgtttacagttgggcacgagaaggctcagcacgcacgcacagc

SEQ ID NO: 187538 - DNA, 122 bp, Homo sapiens
agggctcagagccaaggccacagagctaggaggtgggagggctggtgggctgcctcccttcgtgagagcctctccaggtgctactgaaccccaagaggaaagatctgtttttccctaggact

SEQ ID NO: 187539 - DNA, 122 bp, Homo sapiens
tggtggcggggcctgtaatccagctactggggaggctgaggcaggagaatcgctttaacccgtggactgtcaagagacataggctgcagtgagccgagatcccaccactgcactccagcctg

SEQ ID NO: 187540 - DNA, 122 bp, Homo sapiens
ccttctaatcctccagagctgctgcattatcctcactgcataagctccaggggccctgggcgcagcatcctggggcagcccgagagtccccccgaggatggggctctgtgctgacttcagct

SEQ ID NO: 187541 - DNA, 122 bp, Homo sapiens
cccggcgattccggcgtgcgaggcccttggagggcaaggccccagggcctggcttaggagcgcgagaggcaggctgggaattgtagttcgaaggccctcgagagcggctagagtctggcggc

SEQ ID NO: 187542 - DNA, 122 bp, Homo sapiens
gagcaatgcctcttgtgttgagctatgacatggttgggtctatttgttacaacagttagacgtcagtagcagaagcagagaggccccatcattttttactcacagtatgagagcagccttct

SEQ ID NO: 187543 - DNA, 122 bp, Homo sapiens
atttgacacgatcagccccgttttagaggaaggaaccgaggctcccagggcacactgcagcgaacaagtccctgcgtgcagcctgcagcccaccagagcagtggctggggctgtcctctccc

SEQ ID NO: 187544 - DNA, 122 bp, Homo sapiens
gctaggcgagggggcgggacggaggcgcgagagaggcgcgagcggtgcgagggggcgggccgcggggctcccggctgtgcgccgcgaggcgtcctcccgggcccgccagtcgctcgtgggca

SEQ ID NO: 187545 - DNA, 122 bp, Homo sapiens
tgggcaacaccaactggtccctctcattgacaagattaacataaaataaggcacatacatcgcaagaatcaaaactttgtggctcaagaggaagagccaatgtgtgaggagttgggaggggt

SEQ ID NO: 187546 - DNA, 122 bp, Homo sapiens
gaggccgaggttggcggatcactcgcggttaggggctggagaccggcccggccaacacagcgaaacccggtctccaccaaaaccagtcaggaatggtggcgcgtgcctgcaatcgcaggcac

SEQ ID NO: 187547 - DNA, 122 bp, Homo sapiens
gtgcttccacaagccctccaggtaattttttctttttttctttttttagacaggctctgacgcccaggctggagtgcggtggcgcgatcatagctcactgcagcctcgacctcctggactca

SEQ ID NO: 187548 - DNA, 122 bp, Homo sapiens
tggacagcacaaaatacaggggaatgtcgtggtggcggctgcctcgaggctcagcagctgcgtgcaggatggagctccaagcagggcaagctgccaggcagtgtcaccaccaggcccctcga

SEQ ID NO: 187549 - DNA, 122 bp, Homo sapiens
aaagagggagagagagtggagaaaaaaaaattgggatgaaatgcaaaaccaatcaggcagcgagacccgtccgccacccgcccccctgaagtgtcaactacaacttctttcctttccctcta

SEQ ID NO: 187550 - DNA, 122 bp, Homo sapiens
cactggcacgtgggtgacaaggttcatgggcacagatgcccatgcgcaagccccaagcaccgtgacccgtcgggagggggggacacacggggccagtgggactctgaccaccaacgcccggg

SEQ ID NO: 187551 - DNA, 122 bp, Homo sapiens
tgcctccgggagccctgtgatgtggccccctccagccggccagctcagaggtctgcgtcgcgttctggagggcccagcagccccaagcgcctgaaagcccagaaggaggacgatgtggcttg

SEQ ID NO: 187552 - DNA, 122 bp, Homo sapiens
ctatgccatccatacacctttctgaaagagttacaaaatcagcacttattatcaaagggccgttgggagcaaggcatttcggcgtatctggaaatgtgtggcgatctgtaaacgctcctgag

SEQ ID NO: 187553 - DNA, 122 bp, Homo sapiens
agggagggatgcagtggggtgtccggatcggggctgcgggctgggcgccgcccggccatgcgcctgcccagaaggctgggcatccgtggagagggaaagcccattttatccctctctttaca

SEQ ID NO: 187554 - DNA, 122 bp, Homo sapiens
tgcctgagtttcagagtcccgccggagttagagctggcagagtccaattgctcagagcgccgaggcgggggcggggcagggggacgcttgcaggtccggtggtcccgcgggctgcgagcccc

SEQ ID NO: 187555 - DNA, 122 bp, Homo sapiens
cgagctccggccaccgcgcgctggtgcccgcccgtccgtccgtcggggcccgcaggctctcgcctgggaccactgcttccatgcgccggggctgcccgccccacatccgcgtgtcccgctgc

SEQ ID NO: 187556 - DNA, 122 bp, Homo sapiens
cgtttgctgccaactgtgggtgaaggccagcctcagagggcgcgggacccgggtgcttgtcgtgtgtagttggagttggtctcaaagactggctggggaagactgggctttacagtgaggga

SEQ ID NO: 187557 - DNA, 122 bp, Homo sapiens
cacccctggggaatagtcccctccatcccatccccctatatatttccttttggccccaagcgccagcagagatcccccgcccgtgggcaccagggaggtgtcctgggacccccgcgatggga

SEQ ID NO: 187558 - DNA, 122 bp, Homo sapiens
acggggtcttgccatgttgcccaggcctcccaaagtacaggaattacaggcatgagccaccgcgccggaccggctcagctgtcttcagaacattcacaatgttctgcaaccaccatgtctac

SEQ ID NO: 187559 - DNA, 122 bp, Homo sapiens
ggaggaggtagatgggctgctctgccagagaagagacagggatcccactgttatttatcccgggggaggctgggagacagacacaatcaagcccatttctgtatgtgttatgctcacacctt

SEQ ID NO: 187560 - DNA, 122 bp, Homo sapiens
caacctgtaagataagtcactatctattttctatctatatttcattcaaaatgtcttatacgtttgtagctctctattctcataggtactacttatctccaaattatatctcctcgcataag

SEQ ID NO: 187561 - DNA, 122 bp, Homo sapiens
tgcctttgacttatttggatatgagagccatttggattccacatttggatttccatatttcggcacccctgcatagtttagagatttgcctgttcctttggcttcagaatttactaacatta

SEQ ID NO: 187562 - DNA, 122 bp, Homo sapiens
aacaattgaaaatggaatgtacaaacaagaccggacagacagacaatgctactggcagtacgatcggcaaccaacgcacacacactgaatgaagctcagctcctaatgagagtcaggaactc

SEQ ID NO: 187563 - DNA, 122 bp, Homo sapiens
cagcagctgcagccggagcagcaccagcaacagcaacagcgagcgggacggagttaggaccgctcggagcgcacaggtctcgaggtagtataaggtttgctatccttccacttgctggcagt

SEQ ID NO: 187564 - DNA, 122 bp, Homo sapiens
cgcggccgccttcctggggcgtggggagcacagcgcggggcagcgggacaggcggttccgcgcagctcctgggatgcccgggcagctgtgggtgcgctcgccccaaccctccttcataaacg

SEQ ID NO: 187565 - DNA, 122 bp, Homo sapiens
atttattattaattgtaggtgaatactcgtttttgtccacttttctgtctaaaatgagctcgatgaggacaagaaccttctctgtattgctcactgtgtcttcctaatgattagtagagtgc

SEQ ID NO: 187566 - DNA, 122 bp, Homo sapiens
acccagacctgcacatatgttcttacttcctggtgcttctctctcgagggaatgctgggtcgaagaggatgtgcatttttaattataatagacattgctagattgctttccaaatagaagat

SEQ ID NO: 187567 - DNA, 122 bp, Homo sapiens
gacggaccgcccatcggacttttattggtccatttgaaaggcctgtgggcacgcgccgcccgcagccttaaaggggccgcgcgcagccgtgtttccctctggaccagacgccgcctgcacgg

SEQ ID NO: 187568 - DNA, 122 bp, Homo sapiens
tccttccctccctgctggagctccactctgcctccccgcctcaccccgctctgactactgcgtcccattaccggctgtccgggtcctcagcgccaacaccaccgacgccatgctttcgatca

SEQ ID NO: 187569 - DNA, 122 bp, Homo sapiens
atttttaaagatgatgtggtttgggggggccacataattgtgtttgcagatcttgcattacgatgtttggttgaaacctatgctgccagttttgaggaaaggaatgaagaacctttagccaa

SEQ ID NO: 187570 - DNA, 122 bp, Homo sapiens
gcaacccggtggtccccactcccaggaggtcaccacacggatgccaaacttagcacacagcggacagcagtccagaactccctggctcaagccggcctcccgctcagcctcccaggtagctg

SEQ ID NO: 187571 - DNA, 122 bp, Homo sapiens
ccgcctgacgcgcccctgacgcaccggagcccgcgggggcggcagagacccgccccggcccgcaggacaccccctcggaacgcgcggccccccggctaagtcatgtttaacagcctcagaaa

SEQ ID NO: 187572 - DNA, 122 bp, Homo sapiens
ggcatgtacgagatcgcgcgctttacaaactgtcggtcgttctgggaaagttaaagaacgcgctgcagctacttcacctgctgctgaaaggagcccgggcagggctggtcactccgcgccac

SEQ ID NO: 187573 - DNA, 122 bp, Homo sapiens
cggggtggggccgagggcgggggcggcggcggggaggggctcgctcagcaggcgctaagtcgctttattgccataaaatggggcccccgagccgctccgcccgaggattaggaggcgggctc

SEQ ID NO: 187574 - DNA, 122 bp, Homo sapiens
ttcttcagtgtgcattccaacatgccacagaaatgtggtttacatcatagcttctaccgccgaatagtctatctttagattttgtttacatggtttgtctcaattagcttaatacataatta

SEQ ID NO: 187575 - DNA, 122 bp, Homo sapiens
gaggcgcgcgagccgggaagtgaacgaggactgactcctgtcgcttcccgtagccgcccacggacgccagagccgggaaccctgacggcacttagctgctgacaaacaacctgctccgtgga

SEQ ID NO: 187576 - DNA, 122 bp, Homo sapiens
cctcccaagtaggtgggactataggcacgtgtcaccacacctaattatttaaatgttatgcggaggcagggtctcgctatgtcaccccagctggtctgaaactcctggcctcaagccatctt

SEQ ID NO: 187577 - DNA, 122 bp, Homo sapiens
accagtgccgagctgacacatgtctgtgtttgccagtgacgctgcccgccaccatcatgacgtcatccgtgcccacaactgtgggtggccacatgatgtaccctagcccgcatgcggtgatg

SEQ ID NO: 187578 - DNA, 122 bp, Homo sapiens
taatgtctccactcacaaaatggtgggaacagatttcagctcgattcagttattctgcaccgacagaaatcacaaaacaaatatatatgtgtttttcaagtgctaagatagccctttttttt

SEQ ID NO: 187579 - DNA, 122 bp, Homo sapiens
gccaagtaaaaacgggttctggaagaatctcccaccagcctgcacagtgggaggacagggcgggacctcgggaagttcgcgttgtttgcagcggggaggatcccggcctctcctgtccctgg

SEQ ID NO: 187580 - DNA, 122 bp, Homo sapiens
tcgaatcgccttgttatcataccaaaaggtctgggcaggcccaaaggagcccctttctctcggttttagcaacttcgccggcaactgtctcgcaatcttgagaacaaacacagctccacaat

SEQ ID NO: 187581 - DNA, 122 bp, Homo sapiens
tgctcggggccggcgggtgaccttcctaggcactgctgggggcggagccaggaaacggctcgccccgccattggctggggcgccggatttctttaaaaactccggcttccattggctcgtgc

SEQ ID NO: 187582 - DNA, 122 bp, Homo sapiens
acgtcagtttggtttctcgccccaagaaaagcgcatccagcaggtcatgattttcccacacgtctctccactccacgggctttcactgagggcctgccgtgtcccccaggcgctgtgctagg

SEQ ID NO: 187583 - DNA, 122 bp, Homo sapiens
ccgttttgtgcccttaacgcacttggacctccgggggaaccggctgaaacttctgccctacgtggggctcttgcagcacatggataaagttgtggagctacagctggaggaaaacccttgga

SEQ ID NO: 187584 - DNA, 122 bp, Homo sapiens
cctctagtgagtctcctgctcaactactatgtgggcctggacctggaacgccgggaccagcgggggctcacggcgttaatgaaggctgccatgcggaaccgctgtgagtgcgtggccaccct

SEQ ID NO: 187585 - DNA, 122 bp, Homo sapiens
ggtatttgtctgcctctcttgttccagcgccgttttccctatatccggaattcgtccctgcgcattccaatacctgaagcggccacagggtacaggacagggagccctccgacagaaaagag

SEQ ID NO: 187586 - DNA, 122 bp, Homo sapiens
ctgtgcagagtcaacaggtcggggtggccaaggtgaaggtgggctcgagtccatacagagcggcaactcccatcccacctcccacaacacacatctttgattttgatttgacttgcctggca

SEQ ID NO: 187587 - DNA, 122 bp, Homo sapiens
gaggactgcgcatgctcgaagggtgggggttgaggccgacggggcgccgtacggcggaggcggggtttcagtggcttctggtgctctagggtgagctctgcccggctgcagggatggcgggg

SEQ ID NO: 187588 - DNA, 122 bp, Homo sapiens
aaaaaacagcaaacaaaacaaaacaaaaaaacaacaaatgtcccagagaataaggagctacgcatttacaacagccctcacaggtccacatccctagacctctggggaaagaactatatgaa

SEQ ID NO: 187589 - DNA, 122 bp, Homo sapiens
tcaactgtatactggcccggccgcgatcctgggcgagttcctggccagtgaggctgttttcgtttttttctttaatttttttttttctcagacagagtctcgctctgtcgcccaggctggag

SEQ ID NO: 187590 - DNA, 122 bp, Homo sapiens
aaaggtgggaaagaggaaagcacatgaatcccagattcctgcactcagagattccgaaggcgacttattgtggcctcttaggtgttagagggaaggctgggggtgcctgaaatccctgccca

SEQ ID NO: 187591 - DNA, 122 bp, Homo sapiens
tggacagggctgagggctctgaagccgggcagtctcagggtaaccaggggctgggaatcgcggagggagcgggaggcccaccgcccgttcgcgcctcggccctcccaccactccgccgccct

SEQ ID NO: 187592 - DNA, 122 bp, Homo sapiens
agagtgaataattaagatggatctaccaaatcaagctcgtcttcactctgcttcccacagcgaaatgccacacggtgtgtgggagagagtgagtgagcacttctctgcctctcactgttcca

SEQ ID NO: 187593 - DNA, 122 bp, Homo sapiens
agcttgtactgttattagccatcgcaaggctaccctcatgatggggacaggtgatggattcgagtgggaggaacacctgtggcctgggccctgtccggcaggtgtcagaaaagtccaggaga

SEQ ID NO: 187594 - DNA, 122 bp, Homo sapiens
gcagggccttctgccagaggtgggtaattcttcagcaccagagattccatgctgggaaaccgtctgtgaacttggggaatgctggcaaaggctccctgtgtctcttgcttcacagtgcagca

SEQ ID NO: 187595 - DNA, 122 bp, Homo sapiens
acaaggctgccatggttttatgctcaggaggagtcaagacagagacagagagataaatgacgggagtgtctactacttatcctgctgcttggagctctcacttccgacattgaacatgggga

SEQ ID NO: 187596 - DNA, 122 bp, Homo sapiens
cagtgtggctcctactcctattctgaccctctgcctgatattctctctgccctcctgcgacgctgagcataaggtatgataggtttctgtttagggcaatgtatttgaccttcccctgagct

SEQ ID NO: 187597 - DNA, 122 bp, Homo sapiens
tgagtcgattgcaggtctgccggtcggtgaaatccgttctggtattttctttttctttttcgtgaagagtgcagtgatatccgttctggtgatatttccttttccttttttttttttttttt

SEQ ID NO: 187598 - DNA, 122 bp, Homo sapiens
ctgggtaacagtgagactgtctcaaagggaaaaacacgtagtgcttgcttcttgttcattcgtttggtataatttatcatgggttttacagttaatcccaggtctcttgatttccatccaaa

SEQ ID NO: 187599 - DNA, 122 bp, Homo sapiens
tgcgcactgggaagagaaaagagccaggacgcacctgcatttatggcgccatcgcccgggcggaatcctccacggaataaaaagtatgcagaagcaaggcgatttatgactgcataaaccct

SEQ ID NO: 187600 - DNA, 122 bp, Homo sapiens
ccgggtcctgggcaaggcgcagccgttttcaaattttcaggaaagcggtcggctcacactcgagcagtaaaaagatgcctctggggaggaggcccgtgcagctctccgggcaatggtggtgg

SEQ ID NO: 187601 - DNA, 122 bp, Homo sapiens
cttggcatgtggtacatatcattcatgtgccttatgtgtactgacacagttacctgtggtcgcaccaagtatcatcgccatttcacaatggggaaaactgaaatagaaaatggttaagtaaa

SEQ ID NO: 187602 - DNA, 122 bp, Homo sapiens
gaaattgaaattggaaaaaaaaatgtattcagccagtactctttccaggttatagctaaacgtcagttggcaacctctatgctgtggtttattgagtaacacttaatacttagcacagccct

SEQ ID NO: 187603 - DNA, 122 bp, Homo sapiens
atgatggcagagccctcacgacctacacaccttccatcaggccctacttcccaacactgtcgcattggggattgagtttccagcacatgaattttgaaggccacattcaaaccatagcagtc

SEQ ID NO: 187604 - DNA, 122 bp, Homo sapiens
cccccagggcccgctggccagggttcccgggccaggcgggtgaatctccacagacatcctcggtctcctactcccagccctagaaagtgggcatgaactggcattgatcctgtcatgacgat

SEQ ID NO: 187605 - DNA, 122 bp, Homo sapiens
gctggtgggtctattcttaacctgggtgggcgtcagcactttgcccagctcgtccaccaccgcccgggcgtaggtgacatgcagcaggtgctgtgaccgctcgtccatttctcgcaggctca

SEQ ID NO: 187606 - DNA, 122 bp, Homo sapiens
gacagctgacatcgattgtttgaaatcggacatgtctgtataacctgccacccgactttacgtaagtagtcgacactgctattagcagctggacttcaaagcgtgatgcggacagcaggcgg

SEQ ID NO: 187607 - DNA, 122 bp, Homo sapiens
ctccaccactcccttgtgatgtggccttggacctttaaagaaaagcggctaagcctcagccggtgtatgtaaacccagggcaatgctctcacctggttatcagggttacctgtaaagttcgc

SEQ ID NO: 187608 - DNA, 122 bp, Homo sapiens
cctcgcgaggtgctcaccccgtatctgccatgcaaaacgagggagcgttaggaaggaatccgtcttgtaaagccattggtcctggtcatcagcctctacccaatgctttcgtgatgctgctg

SEQ ID NO: 187609 - DNA, 122 bp, Homo sapiens
ttataaatgtcttcctaggctgaaaaaaaagtaatggttgaccataaaaaagatggcggccgcagcttctccacagcaacggcaacgccattctcaagcaagcgcatcaatatatttagttc

SEQ ID NO: 187610 - DNA, 122 bp, Homo sapiens
atgccggggtgctcccagtgcagcatgtgtgactgttcagcctttctcccaagacggagccgcccaacctttagcgtgtctgcttccagatggggaggcccagtccctgtggaagtgactgc

SEQ ID NO: 187611 - DNA, 122 bp, Homo sapiens
ccacggccctgccagcccaggcgcccgccctcagtgaacagaaagggaagtggcgttggtcggagcctccgaggaggcccgttactgtttccaatataattggagcgttcctgtccgctgga

SEQ ID NO: 187612 - DNA, 122 bp, Homo sapiens
ggagaacacgctgcagggcagagggagtcctcagagctggcaggcctctgctgctgctgccgctgccaccacccaggagtgggccagcatgaatttgttgccttgcccagaggaaagcttta

SEQ ID NO: 187613 - DNA, 122 bp, Homo sapiens
atggctgggcacaggcagattgtgagttatttgcacagcagggctatgtgtcctggaccacgaagaaaggcagacttatggcttgtctgctttctccttttgcttcccttcgtccagccagc

SEQ ID NO: 187614 - DNA, 122 bp, Homo sapiens
cataggctgcatctgtccctgacaaggcacacaagatattgaactatagttgcttggttacggacagtcgtctctgtgagctttgagggcaactgccatgtattatgcatcttttgaatccc

SEQ ID NO: 187615 - DNA, 122 bp, Homo sapiens
caccatggagtcttccagttcatctaactcttatttctccgttggcccaaccagtcccagcgctgtcgtgctcctctactcggtaggcgcccagggaaaagaggcccagagcggagccgcgc

SEQ ID NO: 187616 - DNA, 122 bp, Homo sapiens
ctaggttgaaggtatgctcgagcatgatcattgaggacaagtcgacgagattcccgagtacgtctacagtcagccttgtgacatttgaagttctacaatgaacccgtcggagatgcaaagaa

SEQ ID NO: 187617 - DNA, 122 bp, Homo sapiens
gagcctgaaactcggagcgagcgcggtgcagccggagcggcgctcggggggaggggggagcgggcggaaaaggccgactcagccgctccccaacctcatatagagggcacgtccctctacgt

SEQ ID NO: 187618 - DNA, 122 bp, Homo sapiens
aaccacgcgttgtctgtcccggaaggaacaagccagtgagagccggcctgatgggaggaccggcgaaaggggcttggtgaagcccgcgctccttgggggtgggaatgcggggatggggtggt

SEQ ID NO: 187619 - DNA, 122 bp, Homo sapiens
tgcaggagtggaactgcccagccctgggacacgcatgctgagccccagccaacgtcacaccgacctgtgctcccacagccctgccccggctctgtgtgggtgactgtcccgtccctgcagtt

SEQ ID NO: 187620 - DNA, 122 bp, Homo sapiens
gtggccgcagatggcctaaggctggcgggcctttgattggccccggctttgcccttgccacgcccctctgcgctgggattggcttagtgctgggattcccacccacccacagcccgccatgg

SEQ ID NO: 187621 - DNA, 122 bp, Homo sapiens
tcccctgccgttgcatcactcctgccaggtttgccacagaggtggagctgaaccaatcagcgggcgcgctgggcccgcggcgcggttaagtgagaagcagaatccgaagttgattggccaaa

SEQ ID NO: 187622 - DNA, 122 bp, Homo sapiens
cctgccaggtccccacacacaggcccattcgcacacaaaaatcatctttttgcacgccggcgggagcagcggaagtcattaacatccgcggttgtgctgcaattaaagttaggcctggggat

SEQ ID NO: 187623 - DNA, 122 bp, Homo sapiens
tgggcatttctagctggaggcagtccagggcacctgggtatccgttgtcatcgatgtctacggcacctcgaagggagaagccaaaggcagagcctgtggggaaggggctgtccaggacctgg

SEQ ID NO: 187624 - DNA, 122 bp, Homo sapiens
catgcgctgccggagcgcgagggtcggcttcgggtgtgtggtggcggcagagctgagctgcgaggcccgagagtcagaacctgggggagagggatggtctctgcacgggggggagccggagg

SEQ ID NO: 187625 - DNA, 122 bp, Homo sapiens
gggagcgcagctactcgtgtacccttgaccgaagtccggtcctcctctatcggggatggtcgtcctcttcgaccgagcgcgcagcttcgggagggacgcacatggagcggtgagggaggaag

SEQ ID NO: 187626 - DNA, 122 bp, Homo sapiens
cccccgaatataacagacactcgctccatacaccaaacttcccagttcctgaggttgctacgctaaatttatcctgaatgtcgcacagaaaccagggtcaataggacgatcagcacggatgg

SEQ ID NO: 187627 - DNA, 122 bp, Homo sapiens
agaaaatgcagacgaaggttgacttctacttaaatccctatccccgaaagtccagacgtacggacccgaaggcctgtggccaaatcatgcgtgggtgcctactacagatttatgaaaagcag

SEQ ID NO: 187628 - DNA, 122 bp, Homo sapiens
actctttcttcaaattaaattgctacagcaggaaattactgaactgtggctcttctcctacgtccgccttccctatgtcaattcccatttcccttgctttctccaatagttaggactgtaaa

SEQ ID NO: 187629 - DNA, 122 bp, Homo sapiens
tcttctcctgaccttggactgggacttccaccatcagtgctcctggttctcaggcctttgcgctcagactggaatttataccacccgctttccagggacaccagcttgcagatgggagatca

SEQ ID NO: 187630 - DNA, 122 bp, Homo sapiens
gccggcgaagtgaccccgagccgggccacgggacccctcacacctcaccctttctcctgccgaccctcgagacgacagcggactggaaggcattacctgagcagcagcccgctgggccgtcc

SEQ ID NO: 187631 - DNA, 122 bp, Homo sapiens
tggggtaggcaggtttgggtggggtggggggttctcctcacagccgtgatttcctcggcccgaaccccccactggagtagccgaacgtcccccgagaggctagagccgccccgatttcccca

SEQ ID NO: 187632 - DNA, 122 bp, Homo sapiens
cgattctgtgactctcctcgcctcgaaccccccacggttctcagcataaagcccagactccgtggctggtggaagcagcagctccctggatcggtcctgggcatatttacagcttcgctttt

SEQ ID NO: 187633 - DNA, 122 bp, Homo sapiens
ctgcttctggtgcacagcccagcagctcccgcacgctgctgagcacaggtgaagcgtgggcgggctccccttgccaggtcctccgtcggccgggccgggccttgccccttttctcccatgaa

SEQ ID NO: 187634 - DNA, 122 bp, Homo sapiens
tgatgaaatgcctaccgtgtgcagtctctcatattgcaatgggtcaaagcctgactatgtcggattacaaatttgtccccggtagccttatgctgattgggctaggataggggtttttaaat

SEQ ID NO: 187635 - DNA, 122 bp, Homo sapiens
ggacctacaagttcccagcactctgcaagagggccagttctgggatgccagcacttaggacgggcgagtgatccccaggcaccaactgggggccggggaaccaagcgcgagcccgggctgtg

SEQ ID NO: 187636 - DNA, 122 bp, Homo sapiens
ggccctcggtgctctgaggcgctggcgcggcgggcgcgggtaaggagtggcgcgggtgggcggcctctgggctcgcgccgggacgctggtccctccccccgaggagcgcggcggcgacggcg

SEQ ID NO: 187637 - DNA, 122 bp, Homo sapiens
tgtcatctgcacaacttagcaactcacctcccaggtctcacagcgaccccagcaggcatccgtggtgatccgaagcccctgcagcctggcttcttggccaggaaagtaaactccctcacggc

SEQ ID NO: 187638 - DNA, 122 bp, Homo sapiens
caaccctaacttttaagtttcagacgctaaccctctaccctcgccggctggcataagaaacgtgtacatgaggtccagttttaatggtcttccacagagcagaggctatgtttcaatttcta

SEQ ID NO: 187639 - DNA, 122 bp, Homo sapiens
ctaagtcgtaatcacttgaagggactcaagagcaccactcaccctgtgctggccacgtcccgcagtccagccctcactggctgcgtccgtctgttggtcccacgagcctcggaggaaggacg

SEQ ID NO: 187640 - DNA, 122 bp, Homo sapiens
cgcatggatccttcccgcctcaccctggccctgggtcccacaagcctgatgggggcaacgcggcctcactgctgttccttgctcaggtggctcagttttcagtgccaccgcttcagtgagaa

SEQ ID NO: 187641 - DNA, 122 bp, Homo sapiens
aacctaagtttgaaaatgagcacggatgttccttaccttcaacacaaacccagacaacagcggcagtgtgcgcggcctcccggccctttaccttcaacacaaacccggacaacagcggcagt

SEQ ID NO: 187642 - DNA, 122 bp, Homo sapiens
gcgcggtgagccccggcgggaaacgaagccgcctccgcaggcctccgcccgccccgcctgcgtacctgggcaactccttcaccaggctctgtagcgccgacagcaactggtagtgtcgctcc

SEQ ID NO: 187643 - DNA, 122 bp, Homo sapiens
ggtagaacagtttcctgtctgctgactggattgttccacccagcgccatgtgtccaggcccgtccaggctgtggcagctgttggtgctcccctccttttcatggctgagtagtattccatca

SEQ ID NO: 187644 - DNA, 122 bp, Homo sapiens
gtgacccactgtgcctggccattttctttactgataaaaataacttgagaaggtccataccgtggtgtgttgttttcatttctccctatctttaatggcctcttgcctagtggattgaattt

SEQ ID NO: 187645 - DNA, 122 bp, Homo sapiens
cagggaaggcttttaccaggaagctgcctcaaagggaaagcagggggcaaaagggtttgacgccagtgtttgccactcctgctaagaataagcacccctctggaagagagtggggtgctagg

SEQ ID NO: 187646 - DNA, 122 bp, Homo sapiens
gaaactagactggcagggcttagaaggcgagcaaccttggttttccggcatcactcaacacgtggttctgagccctgtgtcagaatcactggacaggacttatttaaagagcagattctgag

SEQ ID NO: 187647 - DNA, 122 bp, Homo sapiens
caaggctccctggaaggaaaaatggtatctgtcaatgaggatccttgccctcacagagcacgcagcctagatgcagagagctgctatacatgtgaaaagtaaagtggtgacatgaaactaga

SEQ ID NO: 187648 - DNA, 122 bp, Homo sapiens
tccgccgggcctgccgggatggtctcacccagcgctgacctgccccgcctgttgacacaacgtcacgtttccgactgcagccctttcatgtgcggcccgcggctaaaagcggctgccggttc

SEQ ID NO: 187649 - DNA, 122 bp, Homo sapiens
actaacttgtctctctgcagctcaatctggattatatttccaacagtttgtcctcagtgacgggctttgttctggaagggtatagtggccagctagcatgaacaacgatagaaccctgtgct

SEQ ID NO: 187650 - DNA, 122 bp, Homo sapiens
ctgcgcaaataatagcggaatggataaatgaacgcaaggaggcacaggaatcccagaggccgctccaaccgggagcccgacccctcatcccaggctctaggatccgcgacagccggcgaggg

SEQ ID NO: 187651 - DNA, 122 bp, Homo sapiens
cttctgaccctgggtctgttccatgcctgcccctcccctagaccagtgctctctgaataacggtggctgcagccacaactgctcagtggcacctggcgaaggcattgtgtgttcctgccctc

SEQ ID NO: 187652 - DNA, 122 bp, Homo sapiens
gcttgaatacagcaggtcaaggctgcagtgagctgtgttcgtgccactgcactccagtctcggcgacggagtgagactgtcacacacacacacacacacacacacatacacacaggccgggc

SEQ ID NO: 187653 - DNA, 122 bp, Homo sapiens
ccctcccccagacatcgaggagccggggaggtgtgaacggcctcctttgtgcctctgaatcgaaggcaattaggcgctgcttatctgggcattagccgtgtatgcaaaccgggctcccgccc

SEQ ID NO: 187654 - DNA, 122 bp, Homo sapiens
tcaggatgtcatttacttatagtgtgacttactgaagtcatttaaccccttggcctcagccgcctcacgtgcaaaacaaaaatgttttaaatagaaatgaaattaacatttgagctagattt

SEQ ID NO: 187655 - DNA, 122 bp, Homo sapiens
tagttgattaatgatattttctctccctttcccccaaggtccctgtatagataaaataagcgtgtgtaaaaattgtgtgcaaaaaacagtttggatatcaagacaactgttcggagaataat

SEQ ID NO: 187656 - DNA, 122 bp, Homo sapiens
cgttccccctataagtagcagagggcgtgacggtcacgctctagcggaggcgaagagtcgcgaacgcgcgggacttcctttccctgcccaacgttttactattaaatagatggtttcgtgtg

SEQ ID NO: 187657 - DNA, 122 bp, Homo sapiens
caacccgcttcagccttgagcactggagtctggacaagaggagtgtggtggcgcacaaaacgcccaaagatgccaggaacggcagagccccaagggtgtcacagctcgattgttccccccgc

SEQ ID NO: 187658 - DNA, 122 bp, Homo sapiens
tgcgcaggactcctagctctcttggggaacgctttctggggcagggcggggacccgggggcgatggggccttcaaccgacgggcaaacacacacagacacaccccggctgtcctccagctgc

SEQ ID NO: 187659 - DNA, 122 bp, Homo sapiens
ggatccctccgctgggacaagtagtgccctgagactcccgaggctctgcatcggcgcagccggtgtcatctagcggccggcagttccgagcgacttggggtccttgtgcctcggagtggcgt

SEQ ID NO: 187660 - DNA, 122 bp, Homo sapiens
gtttcgacttctagctaaggccgagggaggcggagcgccaagctggtgacgcacttccggcgggaatgggctcggagcgacccgcagctccggggcgggcccgagcggaaggaggcggtgct

SEQ ID NO: 187661 - DNA, 122 bp, Homo sapiens
gtgtgggaaaggcagggagggggctgtgctggagtcctgatgctctcctccccaagaagacgagaagacgggggctccaccaaagagccagccccagggaatgtccctgccctctcctttaa

SEQ ID NO: 187662 - DNA, 122 bp, Homo sapiens
gggcgccgcggccgttcccacactccgcggccaatggccgggcgggccgcacaaaggcgccggcccattagcgcacgctaaattgcctgtgaattggcgcgggcacaatgggcgctccccaa

SEQ ID NO: 187663 - DNA, 122 bp, Homo sapiens
gccggatgtttgagtttggtttttgtgatcgagcggagctgggaggggccgcccgggagccgccgccttatcgggctgtccccgcgctgtctcccgctgccccggcctcccaggctggcggc

SEQ ID NO: 187664 - DNA, 122 bp, Homo sapiens
cccaggggtctccagggcaggcaatgtagagcaatgatttaaaagcatggatgggctccacggctacctgactcctccacctactgctgtctgacctcgggcaagtactgagttcctctgag

SEQ ID NO: 187665 - DNA, 122 bp, Homo sapiens
cagctggcaggatatgcctccccaggtgtgcgggcggcctcctcgtagtggaggcaggggcggagggtgcgaggcatgccactgtgagctggggccgagggggccatatgctcaggtgctgt

SEQ ID NO: 187666 - DNA, 122 bp, Homo sapiens
tacagcctgcttctgtgctgttccttcttgcctctaacttgtaaacaagacgtagtaggacgatgctaatggaaagtcacaaaccgctgggtttttgaaaggatccttgggacctcatgcac

SEQ ID NO: 187667 - DNA, 122 bp, Homo sapiens
cccaagcctgagctctgagtactgggcagaccccagactccctaggcaagcaagagggaccggcagtcccaagttcttgaattctaggtgggaactccatgtgcacaaaggcatcggggcag

SEQ ID NO: 187668 - DNA, 122 bp, Homo sapiens
agaacctagctctatatcaagttaaggacataaacgtgcaaagaaaataaatatttcaaccggttgtagatgacagcatgttcgcctcacacctttggtggagtgtattctagggacacatg

SEQ ID NO: 187669 - DNA, 122 bp, Homo sapiens
caggacacttggtgatgtctgagtccagtcctgtttcagatctggtccttgtgtgcccaccgtggctgttgtcagctcttgtcctgcggcccctaatggctggagtccggtactcactgctc

SEQ ID NO: 187670 - DNA, 122 bp, Homo sapiens
taacctctccaagacttggtttcctcatccataaagcaggctggcttcacatccactctgcggtacggttgggagaatggaatgaatgcagtagggtaaggtgcctggcacggattctcatg

SEQ ID NO: 187671 - DNA, 122 bp, Homo sapiens
agacagaggagccagtgtgtgcactgcacagggtgacacgcctcctgtgcccgagccacacgtaacaccttccagggaggaccacacggggggtttttaaagggcaacccgctgggatacag

SEQ ID NO: 187672 - DNA, 122 bp, Homo sapiens
gcaaaaattcaaggcagccagcagaggctggagtggtggaaagtgagaattaaagtccctcgccgcttggaaagtgcagccttctacaggtagagccacctagaaatgcatatggctgcaaa

SEQ ID NO: 187673 - DNA, 122 bp, Homo sapiens
ctctcgggaggtgaagcacacaagcagcccataaggttgggatcctccgtctccaagtagcgcgactacagctcttgcccgcacggagcagcctcggacagcgcggccgctttaagagaggg

SEQ ID NO: 187674 - DNA, 122 bp, Homo sapiens
agggaaaacatttagaaggggagccctgggatcataggacctgctgcccctggccctgcccgtcttgctgaggaaacacccagaaatggtggtgggagccctgccttctcataacctcagtg

SEQ ID NO: 187675 - DNA, 122 bp, Homo sapiens
tgtgtgggacaccgcgccgggctgggctgtgcgcaccctgccctagtggagctggctgttcgcgccagccttcaaccaggcggcgctctgaggcagaatcctgggcaagagggaggagccta

SEQ ID NO: 187676 - DNA, 122 bp, Homo sapiens
acgcctttttgctgggcagaaagttgcaagttagagttggaacttagaatgcaatttttccgaagaaactatggtataaattggttaattagtacagatgtgttttcaaaggaatgataaac

SEQ ID NO: 187677 - DNA, 122 bp, Homo sapiens
cagaggccaaatgtatatttcttattctgttacctggtgcctggaggccctggccactttcgggttggccgaccttcgggaagtttcctggtcccgaacgtctcgggtcactgtggggtaac

SEQ ID NO: 187678 - DNA, 122 bp, Homo sapiens
tggggaaaccagttcccctcactgggcctcagtttatttattggtaaattgtatttaactcgtattaacagtgcctacttctcactatattattgagaaaattaaatgtgatcctttgttat

SEQ ID NO: 187679 - DNA, 122 bp, Homo sapiens
agctgggagtggtgtgttacgggaggcagtaagtctgacataagcaggatggagagggcacgcccccaccatggccccatgacctggaatgtcaggccaccatcaggtgatggtcaggcagt

SEQ ID NO: 187680 - DNA, 122 bp, Homo sapiens
catcagcccttgttctcagccactacattttgggtggcctgctatgcggcaatacataaccggaacactaagtctccatctcaccaacctgggctgttactagggaaattggggcaaggatc

SEQ ID NO: 187681 - DNA, 122 bp, Homo sapiens
aaagaggaggaattaggccctaggcgtgaggaggcaggcgtggcaggaagacaggtgaagcgctgggttaggacacgggaaaaatctgtcgcaggagccatcctccaggctcagcaccggcc

SEQ ID NO: 187682 - DNA, 122 bp, Homo sapiens
gacccaaaggccactaggctcctgccgcagctggcatatggaaggcccgggagctcacggcggtcactcaccttgccctgcttaacacaaaggagtctttgaccatgaccactgggcccagc

SEQ ID NO: 187683 - DNA, 122 bp, Homo sapiens
ccctctggccctcagttccctcatctgtaaaacggaattcaaacaaccaggtatacctcacgcatcctaacctctgctatctacagaataaaattcactttgggcttgaccctgttctacag

SEQ ID NO: 187684 - DNA, 122 bp, Homo sapiens
agcccgtccctccccagagggaggccggcgggaccctggttccctccctccgacgccgcccgcccagctctgcaccgggtctttcaagcccatttctcagacttggaaacggcggctccgga

SEQ ID NO: 187685 - DNA, 122 bp, Homo sapiens
ttagggatgtatcatgttttcagcttaacatttgtgccattcgtgtgccctggcgagccccgccccctccaagttactggcgtgctgtgggcgttctcgggtttctactcttcctgctgtcg

SEQ ID NO: 187686 - DNA, 122 bp, Homo sapiens
ttgttaaagctgtcctcgtcgtcaatgccgttggctgcgtcaaactgggtgttctccagccgggtgatgagcctctcgtcctcgtccccgaactccccgcccatcagggtgggctcccccac

SEQ ID NO: 187687 - DNA, 122 bp, Homo sapiens
ggcccaatcaggcatcccacctaaccagacgggccggagtctgtggcccggttggaccaacgaaaactctagggcggatttgccgggatttctgggaaagtgacactcccggaagctaccgc

SEQ ID NO: 187688 - DNA, 122 bp, Homo sapiens
aaaatcatggggacccttaggccgaagcagccctatattaagtttaaagaagaaagcaggcggcttcctgtgatggtatattggttagtactctgcatcgccgccaagggtggaatcccagt

SEQ ID NO: 187689 - DNA, 122 bp, Homo sapiens
ggcagcagcagccatctccacagcctctgtggccacaaccatatctgcatccttcatagccgcagccatagcccagtctgcagaagctgccacatccacagccgtagccatagcacatgcca

SEQ ID NO: 187690 - DNA, 122 bp, Homo sapiens
tggggccttcccctccttgtgctgggccctcttcctggaacacctttctccccaaatcttcgccttgctgaccctacttgtgattcagcaacccatgtctcagggaggtcttactggccccc

SEQ ID NO: 187691 - DNA, 122 bp, Homo sapiens
gggtagccttgctattctccccaactccaggtcccccttcatctattccggggctggccgcggagtttcctgagcgctctccaagtgggtcctctagatgttaggagaacactgtacctccc

SEQ ID NO: 187692 - DNA, 122 bp, Homo sapiens
aggccagaccgaatcagagtgggcgaaagctccgtgttccgccccttcccacttgatcgacgtcaaagcccaccagtgagcgggcgtctagagtcgccgtgcccgccccagcccgcccgggt

SEQ ID NO: 187693 - DNA, 122 bp, Homo sapiens
cccactgaatttgtgggaggggctgcgcagggaacggtggaagtgttggcccttctcaggcggcaaagaccatgtgttcttcattacagcatgagccgtggcagtgctgtgttgggcctctg

SEQ ID NO: 187694 - DNA, 122 bp, Homo sapiens
tcaccagccccgggcagaccactaagaactgtggaggtgcgcggggcggctcagggctggcgcatttggtgaggagctcagacaacgaggcccttagggtcggcttaggcggttccctgacc

SEQ ID NO: 187695 - DNA, 122 bp, Homo sapiens
aaaaaaaaaaaaacctcacaaaaaacccgttgaatccaggccactctcctctcttaaattcgggcatattaaaatcacattactttcatattttaaagcagatgggggaaaatcatagttat

SEQ ID NO: 187696 - DNA, 122 bp, Homo sapiens
ctgatactttctcatccagctggtaaagccttactcatcaaatatcaacttctctaagagcgttaacttacctgctcaagaaacatttgctcttagtctctgtatctttgagatgcctttga

SEQ ID NO: 187697 - DNA, 122 bp, Homo sapiens
caagcacggcgggcacaaagggcccctctcgagccggtgcaggcatggccggaatgcaggcgtcccgcccaccacaggccgcgggtgcccggcgctccaggccacagagatgcagtctcctg

SEQ ID NO: 187698 - DNA, 122 bp, Homo sapiens
atctccagttcccctgcctaatgagatctgggtttgctttccggagtgggtcctcctgggcgcccgctgccacaaatagcacagtggcaggcacagctggcagcggagggcaggcagtggag

SEQ ID NO: 187699 - DNA, 122 bp, Homo sapiens
cagtgtgaaggcctgtccagttttcccagcgcgagctgtcctcccaaccctggaatcaaacgcagctatctccagactggcccctgagccttcaagagtctgacggaacgacagcttctctc

SEQ ID NO: 187700 - DNA, 122 bp, Homo sapiens
ccttctccctggtctttgcattttctttggggagctgtgaatttccagtgggcatgggaacgcggtgagccctggtaaagtctttgcaatgcgtgttactttaattttttaaagttgaggta

SEQ ID NO: 187701 - DNA, 122 bp, Homo sapiens
ccttatctccttaacctctaagcacagagtgctcaggacttaatcttcaaacctgtctcacgtcactgcctcatagctttgacttcagcacatttctctctgacttccaggcttgcttatcc

SEQ ID NO: 187702 - DNA, 122 bp, Homo sapiens
taaaaaggttttgatttccaaggggttactgcagccatcattgcctagcaagctcccggccgcgctctaagttacagaggtgaagagaattgaggcagttccgcctcccggggttttcttct

SEQ ID NO: 187703 - DNA, 122 bp, Homo sapiens
tttagatatctggaagctggggacaatggttatggacccgggcggggccttgtccttggccgcggtgctgaacgttctccacccgaacggcagcatcgacctctggcagctgccccctcctt

SEQ ID NO: 187704 - DNA, 122 bp, Homo sapiens
atttgtcgtatctaaccaatctaacccctagcgcagagctagggggcgttcccaccggtgcgcgggcgagctgagccttccttacgtctgctgtgcgtcatcagtccgagccaagggcacta

SEQ ID NO: 187705 - DNA, 122 bp, Homo sapiens
gcagcagcgagaaggtgaggcggccgcaacctcccctgggcgccagccccgccctctgcccgccctgtccacctgcaggctccgtgtctggcccgggcctctgggacccgcggggctgagag

SEQ ID NO: 187706 - DNA, 122 bp, Homo sapiens
ataaacatagaagtttagagctgggaaggaccttgcaggccaggccccttattttgtagacgaagtaactaaagcctagaagggttgctgaggtacccagcatcagacagcagcacaagtca

SEQ ID NO: 187707 - DNA, 122 bp, Homo sapiens
ggatctgattattgaggtgtggaaggaataaataatcagtccacaaataaacaaactgtccgggattcctagagggaaggagaaatccttgaaggagatccaagtcgctccaggtctgcctg

SEQ ID NO: 187708 - DNA, 122 bp, Homo sapiens
gatgtggcccaactgagctggcaagtgagaaaacatacacataaatacccatgatctcagcgattctctcccctccccaggacattccttagcagaaccaatctctctcactcggctggagc

SEQ ID NO: 187709 - DNA, 122 bp, Homo sapiens
gggcgtgggggctttgctaccagtctgccctgggtcacgtctagaaacctcagctggaggcgcgggtcgtaaagtcctgacacttcctgttcctctcagctcctccttggaggaagtggtgg

SEQ ID NO: 187710 - DNA, 122 bp, Homo sapiens
gctcagagaggtggcctcaaagagaggagcggccaggagggaagccgggggtttgccctgcggttcttcccacatctgggcgggatagattcgattgggcctcggccacccccaccgtctcc

SEQ ID NO: 187711 - DNA, 122 bp, Homo sapiens
ttctgtgggctctgggcacacttacacgtagacatatagctgtctatgtaccgacatagacggtaggggctgtcctgagttgctggaacctggccctatggtgcttaggacaggggaatgtg

SEQ ID NO: 187712 - DNA, 122 bp, Homo sapiens
ccacgcctgctcctcgttgatgggctggttgtacagccgcaggatctcctccaggctcagcgcgtcccgggagcccccggccgcgccgccggctgccccgggctcccgcggcccctcgccgc

SEQ ID NO: 187713 - DNA, 122 bp, Homo sapiens
tgtcaggcagttttgtaggagttcgggccaattggaggcgcaggcaccgctcgacccgggcgcagcgcgcaggcggtggcgaagagacgccgagcgggccgagtgcggccgagcaaagccgg

SEQ ID NO: 187714 - DNA, 122 bp, Homo sapiens
gggtgacggagggcacctggaaaatcgggtcactcccacccgaatactgcgcttttccgacgggcttaaaaaatggcgcaccaccacattatatcctgcacctggctcagaggggcctacgc

SEQ ID NO: 187715 - DNA, 122 bp, Homo sapiens
tgccctgtcctgctcttttcctctctcattctctttctaacacacacacatccctggcaccgaatgaccattctctgtgaagctacgagcccttaatcctgccctgagttcagctggcattt

SEQ ID NO: 187716 - DNA, 122 bp, Homo sapiens
gagggacgctgggccgaggcctcgtctcctggaggctctgaccccactggtgcagggtggcgtgtgggcaggggcacctcgggaggggaggtttgacgtggagcacgggagccgctttgggt

SEQ ID NO: 187717 - DNA, 122 bp, Homo sapiens
ggtcggcctggcttgggttttctcctccgggaccgtgattattctgggattgtgcaacctcgatgagcacagcctgctgtgcattaaatctcccatccacacccctccagcgcctcttccca

SEQ ID NO: 187718 - DNA, 122 bp, Homo sapiens
aatgattcccccgtctcggctttccaaagtgctaaaattacaggcaggagccactgcacccggcctatcagctgcttttaacagggaggatttgccagtctcttcattcagctgtagccaga

SEQ ID NO: 187719 - DNA, 122 bp, Homo sapiens
atattgattctgtgtccctttccgtttaagctagcagtgcttcttttgaaaaaaattttgcgtgtgtcatggggatttattgtattaggcaagaggctaatatattttttttctgagattat

SEQ ID NO: 187720 - DNA, 122 bp, Homo sapiens
cctcatgtgtaactacatcaagctagagagactgttataatacaagtggactgaggcagccgtgagcagagaaaccaggaatgctcgccccgatctctagtcttcagtcttggccctgtttc

SEQ ID NO: 187721 - DNA, 122 bp, Homo sapiens
acattaaagagtcaaagatgatgatgtccatgctaaggtgtctctgagaggtggttggtacgatgaacagaaatatgaaaactagataagaagtgatgtgagagtagttctattttagtgat

SEQ ID NO: 187722 - DNA, 122 bp, Homo sapiens
caggccgcctccctgcgcgccgcgcgcacgcgctgggcaggttcgcgccgccacgccgaccgcctctgggttcccagaaagtggtggggtgttcacgccgtatctccgttgggtacctaggc

SEQ ID NO: 187723 - DNA, 122 bp, Homo sapiens
acctcaagtaatccactggccttggcctcccaaagtgctgggattacagacgtgagtcaccgcgcccggttgaaggcagaatttcaccacaaaaaaaatgtcagttacagagaacaacactg

SEQ ID NO: 187724 - DNA, 122 bp, Homo sapiens
tcttgacagaccccaggagccagggacacacctcctagccctctgcacactatcagccagcgtggccacacatcagccaaggccttgcttccagtctcagaccctcccaaggatgtgggagg

SEQ ID NO: 187725 - DNA, 122 bp, Homo sapiens
agtgttcagtgctatgcggtctacaagacagtcgtaaaaaacagtaaaacacactttctacgcagccattctcaggagtcatctgaaactgcgtacaccagtcctctgcctgccctccttcc

SEQ ID NO: 187726 - DNA, 122 bp, Homo sapiens
aaactgagagaaattccttcagtggtgtataggctggattctctcaccactctttaccttcgctttaatcgtataactactgtggaaaaggacatcaaaaacttgtcaaaactcagcatgct

SEQ ID NO: 187727 - DNA, 122 bp, Homo sapiens
caccctcacccctggttcttcccatcaccgtccaggaattcggctgcagcccctcggccccgccgcctcctgggaagaccccatgctcaccttcgcgcctcccgaggggtgtgcgtccaatc

SEQ ID NO: 187728 - DNA, 122 bp, Homo sapiens
cggtgatgggtccggaggcggttccgatgccgccctgcgtgaaaggcgctcctcgcacggcgccaactggaggaggcctcagtacctgggagcctctggtgatgacgaagggtcagggacag

SEQ ID NO: 187729 - DNA, 122 bp, Homo sapiens
tatgtgcatttaccagagcaagggattttgttaaatctgtgccttatctattttgtgtgtcgctcccaggagggcaagagacaaaacccatcgtcttcgccagtgcttcctcggcacctagt

SEQ ID NO: 187730 - DNA, 122 bp, Homo sapiens
ccaacatttaaatttttgaatattttttctgttcccttagggtttaccaagcacatttatcgacaagcctcctcaggaaattgcccaaaatagccacatgtggcaagcctcattgacaggcc

SEQ ID NO: 187731 - DNA, 122 bp, Homo sapiens
ataaattctagtctctagcttgcaaggaagactacgtttcccggcgtgcagcgtgctggccgtaagcattacgtcctccatcgcgggcgcgcaatgcacctcggggatggtagtgttctggt

SEQ ID NO: 187732 - DNA, 122 bp, Homo sapiens
gacccctgtagtagggaagaggcggcttggttggttccttcacactcctagttccctgcccggcccactcactgccattgtgaattcctccagggtgaagcagaggagaggagaggtaactg

SEQ ID NO: 187733 - DNA, 122 bp, Homo sapiens
aatacatacaacagccatgctttccagctctgcgcacaacgccaggcagatggggagcaccgggcggtgcgggagccctttcaccagggcagggtggcttcggtggccgagggacccgggaa

SEQ ID NO: 187734 - DNA, 122 bp, Homo sapiens
aggacgccccggaaaaacggtggatctgggctctggcgacggcaggatcgtaagtgcctgcgtctgggtcttcgccgccccacaccgcccacctgctggcgggcgcccctgcccacatcctg

SEQ ID NO: 187735 - DNA, 122 bp, Homo sapiens
ggtaaatataagtaataaggattgttgggggggtggagggaaataattatttccagcatgcgttgcggaatgaaaggtcttcgccacagtgttccttagaaactgtagtcttatggagagga

SEQ ID NO: 187736 - DNA, 122 bp, Homo sapiens
gctcggaacgtgtggacgtgggctttggaggtgcgagccccattgggccagggctgggtccgggcagtggtacggggtctcagctgtccgtcacaggagatgtgcaggcctcgtcatctggg

SEQ ID NO: 187737 - DNA, 122 bp, Homo sapiens
cctgacttgttgcgggaggcacggatcatggagaagtgctccgctgctgagatgatttcccgccgggctgtggccacgtcctcccgtcgccctgtcaccatgaacactggttcctcgcccct

SEQ ID NO: 187738 - DNA, 122 bp, Homo sapiens
gcccatcctcagcctgcagccccacgtaaaatgtcatcccgttcagagccccctcaaaggcggtgtgggctttgggcaagtccttaaagtaattcttctgcaaagagatcgaaaaaaaaaaa

SEQ ID NO: 187739 - DNA, 122 bp, Homo sapiens
ctaagaatcatcaagcaattccaaagttcccgtgtctctaatctactgatccaacgtgcccggcgcacataagcagcaccgcgactgaatttcaagtcttctcaaactcacacctcagttgc

SEQ ID NO: 187740 - DNA, 122 bp, Homo sapiens
cccagggcgcaaggctgacagggttcaaggtaacagccctcagtaacttggtgaggggcccgctgtggagtctgagggagggggacgttaaatggaggttcaggcagatattctaggcatcg

SEQ ID NO: 187741 - DNA, 122 bp, Homo sapiens
ccgcaggccttcgcaagccggagccctcagcggacgatgttcagggactagcgggcgaggcgctcagacagggcggacccgccttcaccaggcaccagcactacgctgccggcgtcggccga

SEQ ID NO: 187742 - DNA, 122 bp, Homo sapiens
gaaggcgcctattgtttgctcacgcaagggctaggcccaaggagagaagctagacgcgggcgttcagccctgacgtcatgcttgtttattctgccccaaggagggtatttccccacatcact

SEQ ID NO: 187743 - DNA, 122 bp, Homo sapiens
ttgaatatgactggttattagatggtattagggaatttttgttgattttcttacctgtgacggtggtggtagtttgaagaatattcttaatcttaagggatgcatgttgaagtatttggaat

SEQ ID NO: 187744 - DNA, 122 bp, Homo sapiens
atcggcggctcgaggacgcctggcaaacagcacaggacctagaggccgagatcaggtcttcgtctgcctttgggtggctgcggccctgggtctcctacttcccttgggctccggggccaaat

SEQ ID NO: 187745 - DNA, 122 bp, Homo sapiens
tgtcaagttctttttttgcagttgacaggaaaggccaaatctgtggtacaggaaaggaggcgcaaaaaagaaacttttttgtgttgatgttttactaagtgagctaaggagaattttagaat

SEQ ID NO: 187746 - DNA, 122 bp, Homo sapiens
acgaggagctgcggggagcagactggtggggcaggcaggacagtgtcagggtctccccctcggtgcccgaggctctgggaacctccaggactcctcaccaacagcagccagagccacggttt

SEQ ID NO: 187747 - DNA, 122 bp, Homo sapiens
ttgctgtataagtcttagtgaatgctcttttacatttactgcatttcatttcagggatgtcgaatgaggacatggaacaggataatacaacattgctgacagagtttgttctcacaggactt

SEQ ID NO: 187748 - DNA, 122 bp, Homo sapiens
ctgcgggacgagaagggtgggcgtgagacctggccgaggggggctttcctgcggggcagccgatcggctcccaggcgcctgccatccccactggccgggcctggcgggcaccgccccacttg

SEQ ID NO: 187749 - DNA, 122 bp, Homo sapiens
aaataaaccaagcctgaatgctgcaccctaaattagccatcaatattctgggatccttatcgataagggggtcaaatagtctgtttggaatgtaccctgtcacttgctccctggttttcaga

SEQ ID NO: 187750 - DNA, 122 bp, Homo sapiens
ccatctgcctgatttacaaactaattactcagaggctggtcgctgcacgggagctgtgcacgctcctcaggacgctcaccgcctcctcttcgggcaccaggggtggcggcatcggcctgatc

SEQ ID NO: 187751 - DNA, 122 bp, Homo sapiens
aggaaaggtagctcatagcaacctgtgctatgtgaagcaggcaaaattgatcaggctcagcgagaagtcagcatggaacggttagggcccatgcctggaggcaactgcttaaaggcattttg

SEQ ID NO: 187752 - DNA, 122 bp, Homo sapiens
tgtgacggggaggattggaccgcccggattagggctaattaagggtggatgggtggcgggcggggaagtgcgggtggctaaataggtgcctgataactcagttaacttccctcttggctttt

SEQ ID NO: 187753 - DNA, 122 bp, Homo sapiens
acacagagctgatacagcttctgatcgcgcaaatgaagagccataaatatcttagccgggcgtggtggcgcgggcccgtactcccagctcctgcggaggctgaggcacaagaatcgcttgaa

SEQ ID NO: 187754 - DNA, 122 bp, Homo sapiens
aagttgcaagaaaagaagacgattgggtttttaatgctaaggggacattttagacattttcgtacaagaaaagaagacaattgggtttttaatgccaaggggacattttagacatagggatt

SEQ ID NO: 187755 - DNA, 122 bp, Homo sapiens
agcacgcagttggcgccggccagcagcaccatcaccatcagcaccccgcgcacgcgatcgcgggcaggcacgctggccgccaccagcttgctccgcagcagcccgtagaccgccagcgtgct

SEQ ID NO: 187756 - DNA, 122 bp, Homo sapiens
aagagatttcagctcaacacaggaagcaattgtaacagtcacaggctgacggcagccagccgggtgggaaggagtgagctctggagtgggaagggagacccagggaccctctctccccacac

SEQ ID NO: 187757 - DNA, 122 bp, Homo sapiens
ccaggcgtctcacccattttctccgctggggacccgctgggctccccatccacgcctactcggtccccaccccaccagctcagtcttgactcagaaactcagggtttttacttttaggatcg

SEQ ID NO: 187758 - DNA, 122 bp, Homo sapiens
gcatattaaaatgtataaatattttctcatactgattttattagctgagcatctcatatgcgtgttgcctctaattcagcacaataggtttattttcatagattctgtttttctcttcaggc

SEQ ID NO: 187759 - DNA, 122 bp, Homo sapiens
aagcgctgaaacgtcgcgaccagtcagtagggttcccacggccgcaactcgggtgtgacgcggcaggctggcaccagcggacacaagtatgaggctaagtgagaagcgctctgcttccgagt

SEQ ID NO: 187760 - DNA, 122 bp, Homo sapiens
aactgtcaaagggcccaagctgtgagtttacaagcgccctcctccctggccctcacatcccggagtggagggaatgttccaccttggctcctgaggcctgcctgcttttgcagcaaagaggg

SEQ ID NO: 187761 - DNA, 122 bp, Homo sapiens
aaattagcatttcgtcatcagggcgtctttcccccggtttgtcttgagtggctcagccaccgcaaggtaccagagagccgcccaatctgcgctggcctcctttatctgtttgctgtgtgacc

SEQ ID NO: 187762 - DNA, 122 bp, Homo sapiens
catgttgattcaaacccacacatcttgtcgtttccatttttctccatccaaaaccttgcccggatgatcctggagactcagcaagaaataacccaacccatctcaccagtggattcagtatg

SEQ ID NO: 187763 - DNA, 122 bp, Homo sapiens
gccgcgaatggtgggtgacgtctccgccggcggggggagcgggtgtagcggaggagcaggcggaagtgacgtagggccccagcgcccgggccatggcggcggcggtggcgggagctgctgtc

SEQ ID NO: 187764 - DNA, 122 bp, Homo sapiens
gagaaagcctttgcattcacctcttattattcagacatgataagcctgtgggcttgaattcgttttcttcattctttcagactctccatggaaggtgcatctgtcaaacgttggccctgaga

SEQ ID NO: 187765 - DNA, 122 bp, Homo sapiens
tgagcccgtctgcaagtgagcccgtctgcaagtgagctgggcctgggcctctgcaggggtcgccccgccagcccgggccccctggctgcgccccgtttccagccggcgtcagggagggggct

SEQ ID NO: 187766 - DNA, 122 bp, Homo sapiens
tcatgactacctattcccacctcaccctattcctcattccgtcagtgactttcagccacccgcaggcttacaaggttctgcgtcgccctaggcattttcttaatactcatccttttacaaaa

SEQ ID NO: 187767 - DNA, 122 bp, Homo sapiens
cgcttcctgtctcttcctcccaagggagacccctgtcctggctctgactggggttgagttcgccagttttgacttatgtgtagagtccggcagcatcattttttggcatttaactcgtcaca

SEQ ID NO: 187768 - DNA, 122 bp, Homo sapiens
ccgtctcccttttccactacaagctttcatccacgtagttcacctttaagattcagctcacgcctgtaatcccagcactttgggaggccgaagagggtggatcgcttgaggtcgagttcgag

SEQ ID NO: 187769 - DNA, 122 bp, Homo sapiens
ccattgtcctggagccagcatggggggctcttcatatcataagtgatagtgctgacagcacgtttatattattttctttagcaggagtttaggtgttcccagaacactgaattgaactaaga

SEQ ID NO: 187770 - DNA, 122 bp, Homo sapiens
ggaaggaaagtgaaggagctagcagggcaaggcgggtgcggagcggggcgcccggaggcgcgaggagagggatgggggagggggtcggagggcggcccggggggcccagccctgcccccgcc

SEQ ID NO: 187771 - DNA, 122 bp, Homo sapiens
agaatattatctacttatttgcatgcacactctgtcttagacactgtgccacgctctccacgtgcatggtttcacttcttcctcttaacaatcccatgaactatgcactcccttttaatagg

SEQ ID NO: 187772 - DNA, 122 bp, Homo sapiens
tcagagcagccgtcagcatctgaacaacccagaaccctgaacacatccttacctgaaacccgaacagccgggcaaagaagttggaccccaagtcgccgatcacgacgtagaaggcgatgcag

SEQ ID NO: 187773 - DNA, 122 bp, Homo sapiens
gaaagggagggtaggcgctacagctccggggtgaaggcggtcgatggaagtagcgggatccgctgtggacttgagagggggttctgggagagggaaagcccaccggtggggcggcgcctcct

SEQ ID NO: 187774 - DNA, 122 bp, Homo sapiens
gctaggccttgtgggtggagcggtgacttggacatcgtccctgctggtccagtgccctgccgtccccctgagtcttgactttattctggatagtggaggttggcacaaaaatatctcccagt

SEQ ID NO: 187775 - DNA, 122 bp, Homo sapiens
ttgtaaaatggccaaaataagacttgctttgtagaagtttttgaggatggtcgggggtggcgggggggaacaactcatggagtatctgacacagtgcctggcacataggaggtatcaaatgc

SEQ ID NO: 187776 - DNA, 122 bp, Homo sapiens
aaaaataaaccccagttctgaatcacctaccttcaccatctgtatatacaaagaattcttcggagcttgtcttatttgctatagaaaacaatacagagcttttgggaatggactcactgatt

SEQ ID NO: 187777 - DNA, 122 bp, Homo sapiens
tctggacctgagaattgcacaggatggtttccaagagggtttacatgctcccccgccccccgtcccctgcccacagacctgctcttaccacatcaagatcttagttcaatgtatcgattcat

SEQ ID NO: 187778 - DNA, 122 bp, Homo sapiens
cctcgcgagatctgatcacagcctccttgtccctgagatggctatggggctgccaagcctcgcgagaagcctccgttagggccgtgtcaactgtagccagtggttgcggctccctcagtctg

SEQ ID NO: 187779 - DNA, 122 bp, Homo sapiens
cctgaggtgctctggccacaggtgccatctgtgtctcctacttgtgaccaaagtgaaccacggaggtgtggtccaggggaatctctatcttctgcccatgggcctcctcacttcagcaggga

SEQ ID NO: 187780 - DNA, 122 bp, Homo sapiens
acggcctccctgttgtgccgtcaggggtcattgcagacccctctgagggtgggcagtcggcgtggtgtgcatgtgcctgcgtgtgtgcatgtgtgcatgtgccgagagtgcccaggaacgtg

SEQ ID NO: 187781 - DNA, 122 bp, Homo sapiens
ggcgggtcgtccgagttgcccctcgagctctccgaagaggcagcccttagcctcggagctcggggtagtccgagcagtcctcgcctacactgcgcagcagacactccttcctccatgactgt

SEQ ID NO: 187782 - DNA, 122 bp, Homo sapiens
cgcgtgcacaaccagtcggacagcctggacctgcggcagctcaccagggcgggcctgcggcgcctgcagcggcagcaacaggtcagcgtggacttgagcttcaagaccaaggccttcaccac

SEQ ID NO: 187783 - DNA, 122 bp, Homo sapiens
ttcaagtctacctctccccttttctgttcccctttgcggagcgggtgacgggggctggggcggggggagaagaagggggaggggaaggggagcgggaagtgaggtgggagggctattggttt

SEQ ID NO: 187784 - DNA, 122 bp, Homo sapiens
gtggtgtttccaactttctcatgtcccctcgggaatccattcgtatcccatgccataagtcgcgctgtctattcttgaccaggcccggcaaactgctccgagctcccaggaatcacccgccg

SEQ ID NO: 187785 - DNA, 122 bp, Homo sapiens
gagaacacgcggaaggtggggagacgcgcggcgctggccgggtccctggcgccgttctcgcggtgcagcctgtgcctgggagtccggccgtcccacctcagaaccagagcaaagcgggagat

SEQ ID NO: 187786 - DNA, 122 bp, Homo sapiens
acagggggaggtgaccggggagagaggtccacccagaggctagagacagataatgactgacggctagactgactcagggactgtccggcagagaaatgactggatgagagacagaaacagaa

SEQ ID NO: 187787 - DNA, 122 bp, Homo sapiens
tagtggcaccgcactcgctcggttctagtgcgcctttccggcctccgtggccccaggaggcgagcgaatcgctgctttctcctgcagaagcttctgacgcctctcccacatctgctcgcggc

SEQ ID NO: 187788 - DNA, 122 bp, Homo sapiens
gacgcttctgctccagaaacaacttacggataaaaactcagcttccggtctttattgtttcgtccccggcggttcttacaacaaatcgctgcgcaatagcggggcatgactcgggtgaggcc

SEQ ID NO: 187789 - DNA, 122 bp, Homo sapiens
tggaattgggcaacatgacagcaccaagtgaccttctgtatccatagtacattacagagccgtttccccacttacagattgtatttggtttttagaagtacccggtgaagcacatagagaaa

SEQ ID NO: 187790 - DNA, 122 bp, Homo sapiens
cctgggcgacggaggccatggcgacgagagccaagggcagcgagccgaggcggggctgagcgcgggaggaaggcggggacgcgggcgagcgcgggccctgggcccctcctgcgcggccgcgg

SEQ ID NO: 187791 - DNA, 122 bp, Homo sapiens
ttgtaaggtgcggctagaaactggggacatggcagcgcctggcccagcgctctgcctcttcgacgtggatgggaccctcaccgccccgcggcaggtaagtggcggccggcgggctgctggca

SEQ ID NO: 187792 - DNA, 122 bp, Homo sapiens
gcgcacccgcccgccccttggggctcacggcctcagcgcgcctgcgcgccccgcccggggcgtccctcctgagtgccccgggagtcccctgagccccctacccgggccggggtgcgaggcgg

SEQ ID NO: 187793 - DNA, 122 bp, Homo sapiens
agctgacactgatgatggccttggatggccttggatgaatccaaccagaaaatgtgctttcgttttcagaacattaacagcttcaggtaaaagataggctgctcagtgccagctgttcattt

SEQ ID NO: 187794 - DNA, 122 bp, Homo sapiens
tgaacccgggaggtgtaggttgcagtgagccgagattgcaccactgcactccagcctgggcgacagagcgagactctgtctcgaaaaaaaaaaaggtccgtgccaagctgctccctgccctt

SEQ ID NO: 187795 - DNA, 122 bp, Homo sapiens
gtagggcctgcgcgtttgagtgactgagagttgcccctgcctgagacctcaaactccaggcggaagcgctatcggttggctgagcagccgtagcccgccgcacggcgacccccaggcccaga

SEQ ID NO: 187796 - DNA, 122 bp, Homo sapiens
aagatatatatttttttatcctgcactatctctacatgtaccacccacccacttcctgcccgcaagattaatgtctagtgtgctttaaagaaaccttatcaaaagaatgctgtgacacttat

SEQ ID NO: 187797 - DNA, 122 bp, Homo sapiens
tctggtcttcagccttcttcatttaatgacagttctctttctcggccataggtaggcctccgccttgcgcgctcctcggcccccgccgccgcccactccctgggcagcaccatttccgcccc

SEQ ID NO: 187798 - DNA, 122 bp, Homo sapiens
tattatttgaaattctaatttcagtgagagtcccgcattttgtctggcaacacaattccccggaaactggccacctttgtgataaattatgattaacaaaacaatgttttaacttctggggc

SEQ ID NO: 187799 - DNA, 122 bp, Homo sapiens
cctcccgggttcaagcagttctccttgctcagcctcccaagtagctgtgattacagtcgccgctaccatgcctggctaatttttgtatttttgtagtgacagggtttcccagtgttggccag

SEQ ID NO: 187800 - DNA, 122 bp, Homo sapiens
aatcagccatcaaaatacagaatcctgaggtttggaagacaaggttcttattgcccaccccggcttccggaagccaccccaggaatagagaccacccttctctcagctgcctgctgtggggc

SEQ ID NO: 187801 - DNA, 122 bp, Homo sapiens
cagctgcggcgcggtgcggcgcttgcctggggctagagagtccacgacttgttgcctctgcgacccgaaagcggctctccaaaccctggccactcagaatttgagggcctctgggtctatga

SEQ ID NO: 187802 - DNA, 122 bp, Homo sapiens
tgctgacttcaggtctgcgggcagccaggccctcctgccagcttccccaaggtgtacatccgccctctctgtgtagctggaagagcctgaccactcacgtctctccaggccacagatcccga

SEQ ID NO: 187803 - DNA, 122 bp, Homo sapiens
agccccgtcataggtgggcgccgaccccgagccgatctcgctttattaaattacagaaatcggtattcaaaaaaaaaaaaaaaaaagggcggggaggacactccctcttctctgttcccaca

SEQ ID NO: 187804 - DNA, 122 bp, Homo sapiens
attatgggattcagctgcctctgaaaacctgtagcccaataatggttattccccaggagccgcgcgaagcatgagctaattttcagtgagcgcggactttggggtaacggttccagcacagc

SEQ ID NO: 187805 - DNA, 122 bp, Homo sapiens
atgagactcactcgtgtggaaagaaatgctggaagaggcaaggattccacacagctatatcgaggtgtgaaacaactaaaatacccagcaggtggtctcagcagtgggaggaaaagcagtca

SEQ ID NO: 187806 - DNA, 122 bp, Homo sapiens
tcagagcgcggggaggcgggggcgaggaggaggggacccgccgccgggggctggctgcttcgctccgagccgacttttcgccaatggtccaaagggacatgtccaagtcgcctcccacagcg

SEQ ID NO: 187807 - DNA, 122 bp, Homo sapiens
gcgggcttcaggccgccctaaacctggccctgtcgcttccctcaactgaacgcattcagacgccagggtccccacactccattcaagctttcctaacgcagcgccttcctctccgctcagct

SEQ ID NO: 187808 - DNA, 122 bp, Homo sapiens
atccatgaggggaacagtccttagcagaagtcatcacagaacatcttgtctctgccattccgttttaaactcaagtcctccttccctaccctgagcaaggttcttctccaaggatgctagtt

SEQ ID NO: 187809 - DNA, 122 bp, Homo sapiens
ccggcgctgggggactgttgggtcagaaagtgttcagggagcagctgctgcgccctccctcggcccgccgctcggagacgccccgccccgccccaccccgcccccgcgcccacgtgactagc

SEQ ID NO: 187810 - DNA, 122 bp, Homo sapiens
ctcaatcattgtccacgattagggagttggcaggaagaaccgcctttgttccctttcgaacggagtcttggttttgttttataagggttggggccgtttttaaagccctcccggccacgcat

SEQ ID NO: 187811 - DNA, 122 bp, Homo sapiens
agctccctttgtttggtctctctccaaacgcgtgggtgtcatcggtgctcatctctgttccgggccccgtggccttcagcagcagcgtttaagatgtctgtccgtattctgcacgagggttt

SEQ ID NO: 187812 - DNA, 122 bp, Homo sapiens
tcggggctgttcctagtgccggatagactggagcggcgactgcggcggagcagcggcaggcggggaccgcggcgcgtctacgcgtcctccactcgcctccgctcgccccgcccggccgccgc

SEQ ID NO: 187813 - DNA, 122 bp, Homo sapiens
tccactcgcgcaggacagggcagcgcagggtgtgtggatgcggctcctcccggaggcaggcgcagcgcactccctcccgccgccgtgacgatgctgtcagctgctcgcccgccgtgcgccct

SEQ ID NO: 187814 - DNA, 122 bp, Homo sapiens
ccccgccaggtgaggcggcgcagctcagagcttccgcccgggtttgcgggaacaaagcagcgccctgcggaaggcagccctcgtgaactcagaagttagttttcgtctctggacctttttat

SEQ ID NO: 187815 - DNA, 122 bp, Homo sapiens
ggcaggtacatggttctcccttcaaaatatagaaacttggctaggcccagagttcgccgacgtgcgtctccctcccctcagcttccatgagaacttcttcccagaacttctacagagcctgg

SEQ ID NO: 187816 - DNA, 122 bp, Homo sapiens
tatcagctgagccgcagcaccgcgcccggcgtgcgcctccgcccgtgccgcctccctccccgcctgctctgacaccctcggggaactactttgtcctcgggctccggttacgggctcgtccg

SEQ ID NO: 187817 - DNA, 122 bp, Homo sapiens
gcgcgggcggcagcagtggctgtcagcttgcgcggctcatcctgctcttgctcaggctcccgctgccgcggctcttcctcctcctcctcctcctcctcccgcgcccgcctccaccacgccgc

SEQ ID NO: 187818 - DNA, 122 bp, Homo sapiens
ttggaagtgacccccgaatttgcacttctttcatcttggtacagagcacttgagggtgggcgatttcctggggggagtggcttaagccgcttccccaccggccagttggctgtagacggtcc

SEQ ID NO: 187819 - DNA, 122 bp, Homo sapiens
catttcccttattgccgtggtcaaaatcactggttataaaaatggtcaaaactcactgaccgtttttttttctcttttgtgaattggcatccatatcttaggcccatggttctgttgtttct

SEQ ID NO: 187820 - DNA, 122 bp, Homo sapiens
atttgagaagtcagtggctttttctctttagtttgcagggtttgctgtgatttgtaatcacgtacttgacctaggcttcccttttccaccatggtagcagaaagggcatgggattgagagct

SEQ ID NO: 187821 - DNA, 122 bp, Homo sapiens
ggaaagttgcagggcagagagccagaacccagtcctaggtctcacctcgtggcctaaacacgcgtcagagtggtgagaccgctccctgaggagggccaggagctgccatgaagtcgccaggc

SEQ ID NO: 187822 - DNA, 122 bp, Homo sapiens
ccgcgctcgcttctcgccccgcggcctggcccgtgcgcctccgaggctggccaggggcaccgaggccgcgggccccccatcgcccccacccgagccctgatttaccgtccgagagccggcgg

SEQ ID NO: 187823 - DNA, 122 bp, Homo sapiens
gaaatgtttctggaagagaccgtagggcctgagtaggtgcaaagatggtaggccgcacgtcgtatctgaatgaacggggtatgcccgagaaccatctcgagacgccaacttggtgaagatta

SEQ ID NO: 187824 - DNA, 122 bp, Homo sapiens
tctctggaggtctcaggaagggcccagcgaacacactctcttggataattaccacgatggcgtcagcaaacactccaccctgtgcctttttagtccttcccgccctcctgcctctcccttac

SEQ ID NO: 187825 - DNA, 122 bp, Homo sapiens
cccacgctcctccagttgcccggcctgttcagactggttcgcccacctttctctccctgccggccccactcgcctgacctctgagaaagcagaatccgggacatgaagcaaccacagccgct

SEQ ID NO: 187826 - DNA, 122 bp, Homo sapiens
taataatgttcactgataataattattattcttattgctaaggaaacagccccagctcagcggtcccaagaaggaaggagtgttccagagaaaggcctaggcctcagaagctctggcattct

SEQ ID NO: 187827 - DNA, 122 bp, Homo sapiens
ggcacaagccaaggaagaggggaaaggagaaacctgacggacacgtctgcgacaaatccccggggaaaatcccccccaggcacgtccctcaggaagccagtggagaaacgcttctcaggacc

SEQ ID NO: 187828 - DNA, 122 bp, Homo sapiens
ttggccaataaatgaaagcggaaatgaaggcgcacctttacaggctttgctgcttccactcgtgctctcactctatgtgcctgtgcctggccacgccgagagcttcccccagacagcgctgg

SEQ ID NO: 187829 - DNA, 122 bp, Homo sapiens
gggtggctctgctggccccggggccgggcgtctctgcagataaggcattaacagtccctccgcagacgcaccctgcagatctgctgacgactggctccgttctgcccaggtgcctggggcga

SEQ ID NO: 187830 - DNA, 122 bp, Homo sapiens
gttagaggtgacagctataaggaaaaataaatcagaacaaaagcggtggctgggactttccgggataaacaaaactccagaggcagaactcagaggccctgtgggagaagccctgctccggt

SEQ ID NO: 187831 - DNA, 122 bp, Homo sapiens
ctttagggccttagtggctgagaggtggagcaggagtctgtgataagggagcccagattccgagcaagggggttctgccaggaatctaggtacaaactgcctcctggaagccaggtgcggtg

SEQ ID NO: 187832 - DNA, 122 bp, Homo sapiens
actacccacttgagttctgctccagaatccgtaacaatggctcaagacatggtgtttcttcgctgatccctctgcctgggggatcatttctctaagttcaaataccattcagatttcaggct

SEQ ID NO: 187833 - DNA, 122 bp, Homo sapiens
tccttctctatttgttgggagtttgcacaccgactctctggtggtgtccttagcgctttacggcagtgcggccacacctggcggcgccccagactcagcggttggcggctgaggacactcaa

SEQ ID NO: 187834 - DNA, 122 bp, Homo sapiens
gataagttggccaaagtggaggaatgccacatgcctaggccactttctctgcctaactttcgatcacttaccatgaacaagctgaagaaacttactcctcaaactggcctttgctcaagttc

SEQ ID NO: 187835 - DNA, 122 bp, Homo sapiens
caattcccgtgtgtggggtgagaggaggtacttccactcccctacctggctgcaagcccccgaatatgtcctgtctagggaggccctgctgccacacagcaaaaaataagtgattcactctt

SEQ ID NO: 187836 - DNA, 122 bp, Homo sapiens
tttattttaaagtggtttaaaaactggactgttttgtagccctgaagcctcccttaaccacgaacaccaaaatagccacatggctcctttttatcggctgctacttaaaaccaaactctgaa

SEQ ID NO: 187837 - DNA, 122 bp, Homo sapiens
gggaaggaagaggagctctaaggggaagtgagcaggcccaggtctccccacagatgagcgcgtggtaggaagactcctagagcctcctgaagtacgaaagagcagcgtccaaacctgagggg

SEQ ID NO: 187838 - DNA, 122 bp, Homo sapiens
cactccagacactggacgctcctagcaaccggctagcagctcggtttccaaggactgtaacgccttcaaccgcccgccgcgatagagtgcccacgaccctgcctcgggaatcccgctctgca

SEQ ID NO: 187839 - DNA, 122 bp, Homo sapiens
gtggggtcccgggcccggccctggcagcagctgccctgcactagcaggagtcgctgtggacgcccttcggcactcaaggaaaaaacgcttccagcgatgcaagcagctgcctttgctgcggc

SEQ ID NO: 187840 - DNA, 122 bp, Homo sapiens
ggtgataaagaaattgctacaaaaatgcaggagcttgccctaagtgaaggtgccttacctcgacacttgcatactgcgatgtttacaataagctcagatcaaaggatgcttacaaataggta

SEQ ID NO: 187841 - DNA, 122 bp, Homo sapiens
tggcagggccggctggatcaggagacaacagcatgacccgtgtgggagtcacctagcaggcgggaaagccgagtgtgaagccggggcctgggctgcaggcacgtggaagccctgggctcccc

SEQ ID NO: 187842 - DNA, 122 bp, Homo sapiens
catgcccctctccccctgcttctccagccccacacccctgcccatgaggtcacaggcagacgctgccaggaagcagggtggccactgctgggccttgctgccctgctggtctcagccagctt

SEQ ID NO: 187843 - DNA, 122 bp, Homo sapiens
ggggccgaccgctctttccgggtttgcgagcggaagtggacgaatttgaatcctgtgggccgttgaatgtggctgctcgcggtcggcgtgccccgacgtacagcgggccgggaaaagtggca

SEQ ID NO: 187844 - DNA, 122 bp, Homo sapiens
atcatgcgggggcagccggggcaccgccagcgcgctctccatggtctgcgtcgggggagacgagtacggtcccgcagctatggcttcaagcccgaccctcacccactgactccgcgggagga

SEQ ID NO: 187845 - DNA, 122 bp, Homo sapiens
ttaataactagacaggtctttggtcagacaacacactgactgaggacaggaggatggattcgatgacctctgaaagtccagccaggactctgaggactctgaggaatggtctgttccatagc

SEQ ID NO: 187846 - DNA, 122 bp, Homo sapiens
accagcgcagagccgtcctgggtccctccctgcaggggcaccgattttagggcagtcagacgcagccctcgcctctggggtggcttttccaccacaaggccccagtagggcccgccgcggag

SEQ ID NO: 187847 - DNA, 122 bp, Homo sapiens
agggtgttcagttattaatgaccgctgagcaggcagcaccatgtcagtgtgacaactgatcgggtgaacgatgcaccactaaccaccatggaaacaaggaaaaataaagccagctcacagga

SEQ ID NO: 187848 - DNA, 122 bp, Homo sapiens
aacaaaaggaccagtgttgcccaaggcctctgcagaggtctgtgcatgcatctcagagagcgaactaaccatgggagttcagcactgatcctattgtgtccttccactggctttttgtctga

SEQ ID NO: 187849 - DNA, 122 bp, Homo sapiens
cggcggcaagtttccccgcccagcgctcggcggcggcgagctccggcagctgctgcgccgcggcaaaactacgccatccggacccgctggggactctcacctcctgcagggagctccgggaa

SEQ ID NO: 187850 - DNA, 122 bp, Homo sapiens
gaactcctcagggaggaggccggagaagtcctcccgcacatgctccaggagcgagtcggccgccaccagcggggacaggcggtcctcgtccacgggagcccgcaggctgcccatccgggaca

SEQ ID NO: 187851 - DNA, 122 bp, Homo sapiens
agccctggcggctgagtcagggcagagcgggagcaaagtcgtcctggttcatacctgaaccgagaggcccggccgcggctgtggtctgcaaactcaccaagccatttcggcatcttttaacc

SEQ ID NO: 187852 - DNA, 122 bp, Homo sapiens
agctcccccacctcccagccacacttcactcctgcacacgtcaggcgagaacgttcggcacgctccgcaaggcaccgctgactttcagacccacgacagcctcctggacagcagcgggggca

SEQ ID NO: 187853 - DNA, 122 bp, Homo sapiens
gctaaaaatggtatgaaaagaagtttggaactgagtatgttttgagagcaatctgttaggcgaggtcattggtttttagaaacgatgctgaatacataggagcaatccctgagaccagatat

SEQ ID NO: 187854 - DNA, 122 bp, Homo sapiens
cgaccagtgcaggtccctgtgtgacagaggctgccgcagactctccagagtgcctctcagcgacagagacaggagcccagcgaagtggcgtgtagaagacgccgcgggctttttcaatctcg

SEQ ID NO: 187855 - DNA, 122 bp, Homo sapiens
ctgtattctccggctgcccaggggcagagttggggctggccagaggatgtgaatacaaaccggcagcttatttccattcctgaccacttggtgacactctagctttagaaactgctcagcta

SEQ ID NO: 187856 - DNA, 122 bp, Homo sapiens
ccaaagtactctttccctttgcctctatggatgcatgctctgtgctcctaagaccaaccccgccactgcacactagatcccagttcctttcatctcctcagccacattccagcaattctccc

SEQ ID NO: 187857 - DNA, 122 bp, Homo sapiens
caatttgtacattaatttttcaggcagatctgaaagaaaatgtatgaaatgaattactcccggcattccaggaaatgtctgttggttggctgagcagttgaatgaagttttgtcactacagt

SEQ ID NO: 187858 - DNA, 122 bp, Homo sapiens
gagctatgagcgacagcccaccagggctgcccagtgaggccacgcaggctgtgcgctgcacgactccacgacagacaccctttaggcggccacaataccagtggtgtcctgtggagttgtag

SEQ ID NO: 187859 - DNA, 122 bp, Homo sapiens
ctcgcaggcggggtgtctgggcccagccttccctggcgtgtccttggctctagctgcgggcgcgggacgcggcgcgggagacgctctccgggctgagtgacgcagagcgctgcgggcggctc

SEQ ID NO: 187860 - DNA, 122 bp, Homo sapiens
cggaattaggaagaccaagacacagatcacccggggcttacttagcctacagatgtcctacgggaacgtgggctggcccagcatagggctagcaaatttgagttggatgattgtttttgctc

SEQ ID NO: 187861 - DNA, 122 bp, Homo sapiens
taggaaattgtgaagctccagtcagctgcgcaaagtcacacagcaaggaccttgcagggtcgggagtggtgactccccaggtcctcagcaatgacaagccctgtcatgcaaatcagctccac

SEQ ID NO: 187862 - DNA, 122 bp, Homo sapiens
ctgctgagaataaagaagatacaatatttttaaaaatcatagatgtatcaaaaaacttgccgcaggctgagaaatctttgggagacaagggaaacctggagagttaagcctagtgattccaa

SEQ ID NO: 187863 - DNA, 122 bp, Homo sapiens
tgccccgccgggcaaaatcggtgcgggaaggacgcggtggggttcccagctggggagggccggcgggtaaagggttctcagttctcagctaggtggggtataggagggcggctgggtgaggg

SEQ ID NO: 187864 - DNA, 122 bp, Homo sapiens
tccttgagtccaagctctgggtaccgaagtcccccagaggaagacagatccttctggttgcggggagagcaaaaggctacacctttgccattagttggctcattttatccttagctgaggat

SEQ ID NO: 187865 - DNA, 122 bp, Homo sapiens
agtcaaagaaaggggtgacggacgcacctggaaaatcgggtcactcccacccgaatactgcgcttttctgacgggcttaaaaaatggcgcgccacgagagtatatcccgcacctggcttgga

SEQ ID NO: 187866 - DNA, 122 bp, Homo sapiens
ttccttcaacagtccgaatatcattggacccagcagaagaccattattcctgtcagttggcgcagtcaacaggtgattgacaagatctagatttattccattgtagcctaacagatagatgc

SEQ ID NO: 187867 - DNA, 122 bp, Homo sapiens
cgatcgggtcgatcgatagggcgggcccagggagcccctcgggtttctggctcacgcacgcgcagacagcccaggccgtgagaggttgctccagtctgtgctctctgaccgtagtcagtagt

SEQ ID NO: 187868 - DNA, 122 bp, Homo sapiens
tccccatctgtacaatggggacaggacaaggcccagcaggcaggctggcgggggttccggcgacagagggggacagcgggcgagcacgacaagagcacaggcccacgtgcgcaccggcgggg

SEQ ID NO: 187869 - DNA, 122 bp, Homo sapiens
ctccacccctgtggccccgcaggccgttcctggctggctgccgctgggagacgggctggacgcaagggaactgggagcctgtcctttgcccaccctcaggccacagggctccccagcgttgc

SEQ ID NO: 187870 - DNA, 122 bp, Homo sapiens
cctcttcctgttgggttgcaaacatggccttctctcatggtcctggaatgctgacatggtcgggcagccagagcctaacacaggtagggtcaagctgaaaacatgggcaagccctcctgtcc

SEQ ID NO: 187871 - DNA, 122 bp, Homo sapiens
tcatctgcaaaagctgtcccaaggtcattttaataaatgcatacaatagctgctgcgaagcgctcagtattgctgagaactactggcgtctataaagttctgagtcagggttaacagctgtg

SEQ ID NO: 187872 - DNA, 122 bp, Homo sapiens
ccagcacgctgtcgcctctcactggcattctccctcaggcccgtcacacaccagataccacgctcgtaaccactgggccacgctgcagagtctcctgactagggagctaaacaataaataaa

SEQ ID NO: 187873 - DNA, 122 bp, Homo sapiens
ggtgttcacgtgtgtctgtgtcatggatgcaatgcaggccctggaggactgtgcgtcacccgtcaaccagagcgtgcctccgggccagcttccctccaaggaatgagtggatttcatacagg

SEQ ID NO: 187874 - DNA, 122 bp, Homo sapiens
cacctgcagtccgcactgccccgcacccctcccggctcacctgcagtccgcacccctccccgctcacctgcggtccgcactgccccgcacccctcccggctcacctgcagtccgcactgccc

SEQ ID NO: 187875 - DNA, 122 bp, Homo sapiens
ggccgcctttgttagcttgggttcagaagcttgtgtctgtcacccagggccgcccagccccggggtttgcgaaggtccggggtaggagggctgcagcctgcgcgacgcggcgggaggctacc

SEQ ID NO: 187876 - DNA, 122 bp, Homo sapiens
acatgcccagtggaatttcagaggcactttcgggaacacagcgccttcgcaccttctgctcggtacacacctcgaggggtggcagccagctcttggcggcccacccagcaccctgaagcctg

SEQ ID NO: 187877 - DNA, 122 bp, Homo sapiens
cggggcgcgaagccggaggctccgggacgtggatacaggtaaaggccggcgggtcggagtcgggcggggcgcggcggcggcgcctctcggagggacctggcctcggccgggccctacccagc

SEQ ID NO: 187878 - DNA, 122 bp, Homo sapiens
ggcggcgactccggccgggctcatagcgtcgcgcccgccccgctcatcggccctacccagcgtccctcccagaccgacgaccgcctgggaagcctcgagctcccagcccgctgcacagcccg

SEQ ID NO: 187879 - DNA, 122 bp, Homo sapiens
gtgttgccctggtccagaaggattccttgaacccttgtgcctgcaggacagccaacacaccgctgctccagccctgagtgtaaaacccctcattatggcactagacacatggtacttttcag

SEQ ID NO: 187880 - DNA, 122 bp, Homo sapiens
agagacgtcacttccccagcgtcttcctcgcgccgcaggcagccatcttccgtactcccccgcagccttgagttcttaatctgtggcccacatggccagtggctccccaggatgcggggcca

SEQ ID NO: 187881 - DNA, 122 bp, Homo sapiens
ggaactactccctctggtggtggattttttcagggtatttcttttcctgaaatctccacccgtcctcctttgggcagtaccgaactacaggcagctaagaaagtacatacttctaagggaga

SEQ ID NO: 187882 - DNA, 122 bp, Homo sapiens
agagggagcgagggaaacgcgcccccctcctgactcacggccaacgctgcggccgccccgcggccgcccgagccccccgcggctccattgagaaactgagcgtctcattcacaagctggcgg

SEQ ID NO: 187883 - DNA, 122 bp, Homo sapiens
acacctgaagggctcatattgacaataccttaatgacatgtttctctcaacctgtccaaccgagatgcaaagtgaacggctaaagggagagagggaaccaatcccgttccaagggggcgggc

SEQ ID NO: 187884 - DNA, 122 bp, Homo sapiens
accttgcctcatggccacacaatcattagcaaagctgatttccaaatctctactgactcccggtgaaaagagaaaggaaagctcctatggctggtgttgagatacttcttaatataagatgt

SEQ ID NO: 187885 - DNA, 122 bp, Homo sapiens
atggtgagtccacccccagcgtggccctgcgaggaggggcaggtgcgacgggagagctggcgccacaccttggccgtgtgtccacttgggaacagtcccagttgtccagccacactcggagg

SEQ ID NO: 187886 - DNA, 122 bp, Homo sapiens
tggaattctgacataaaaacacttagtggagggcttggaaaaagtctagtaggagcaagacgcaagctggactaattatctaaaacaagagacctggtttggggatcttaatgttctcaaaa

SEQ ID NO: 187887 - DNA, 122 bp, Homo sapiens
gccggcaagctctggggcgctggaatggatgggtcacttcacccacattgccagcatgggcgagcactcctcctccgaggtctgcaggcagcccgacctgtcgttgtgcatgcagcaggccg

SEQ ID NO: 187888 - DNA, 122 bp, Homo sapiens
cgccgaggccgaggcaaggtgagagggcggggctggcaagaccccgcctccgtggcgtcacgtgggaggcggagtcggaagtgtgacggcgtgcgcggggcggggctactgctgcgcgcggg

SEQ ID NO: 187889 - DNA, 122 bp, Homo sapiens
tgcctgctgtgccatcaatagaactgaaaatgcagcatttctttttctttctctctctctcgcctccctccctcccttactcccttccttccttcagcatgatctcggctcactgcaacctc

SEQ ID NO: 187890 - DNA, 122 bp, Homo sapiens
ctggcacccagggctgggcgggcctgggctccttaccatggttccaatgctgtaggtcgccgcgggcccgatggtgtgatggtacgggtcggcagctgcgtagactctgccgtaactaggga

SEQ ID NO: 187891 - DNA, 122 bp, Homo sapiens
ccaacgtccttcgaggatgttcactctcgtcctcatcaactccacagagcagccagcacccgggaaggtgcccacaggcccagcctcacaacatctgcagacctgctcctaagccaggcaca

SEQ ID NO: 187892 - DNA, 122 bp, Homo sapiens
tggcttgaccccaggccgggacgggcagagcggaacactgcccggcgggtccaggccgaccgtgcctgtggctctccggaacaataaacccccggccccagtgatgtgggccagaccggacc

SEQ ID NO: 187893 - DNA, 122 bp, Homo sapiens
gcattgatgctatggatgtccatgtcaaggctggccgtgtctattggaccaactggcacacgggcaccatctcctaccgcagcctgccacctgctgcgcctcctaccacttccaaccgccac

SEQ ID NO: 187894 - DNA, 122 bp, Homo sapiens
gctgctgaccacggccggagccttcgccgccttctcgctcatggccatcgccatcggcaccgactactggctgtactccagcgcgcacatctgcaacggcaccaacctgaccatggacgacg

SEQ ID NO: 187895 - DNA, 122 bp, Homo sapiens
cctgcagtcctcgccgataagaggcagcagttcggaagccggttcctgagagatccggcgcgcgtcttccaccacaatgcctggtaatcactctgccccttcgcccggcctgtcgctgaccc

SEQ ID NO: 187896 - DNA, 122 bp, Homo sapiens
ggagagtgtagcccaggttttcagccactcttttttgccgggcttcaagcctgctagagccgacgggtaggaaatctgaaggttggggggagggtacttcctccacgtcctcttttttttcc

SEQ ID NO: 187897 - DNA, 122 bp, Homo sapiens
ggttccgagaaagcccctcgcactgaccgggcctcagctgacccgggcagcctactgacccgaccctgacgcccgggccctccaggcctgtcagagcctccaggaaaggaaatgggctgcgg

SEQ ID NO: 187898 - DNA, 122 bp, Homo sapiens
ctgaaaattctactgctttgatggctggggccagtctcttgtcactttggaaactgaggacgcgtggattctactcaagcctccaagtagtggcatatcagtcttggagctcctagctggtg

SEQ ID NO: 187899 - DNA, 122 bp, Homo sapiens
aaaaagaaagaaaaagaaaagaaattaattagcactgcagtgtactgcatgttgcagcaacgcttgagacaattttatatctgaagaaggatgaggtttatcatcagacaaacctagtaaag

SEQ ID NO: 187900 - DNA, 122 bp, Homo sapiens
ataattcttgtttcaaatctgtctttaaataatgacaagaaagctaaaacaaataaataacgatgacacttgttcattaagtaaaaacttagtaagttcctgctgtgtgtgagaaactgcag

SEQ ID NO: 187901 - DNA, 122 bp, Homo sapiens
ctcgcccccgaattctcggggagacaggtctgagaccctgttctggtttggccagccctgcgcttattaacttctttttttgctgcaacagcggttctcactggttctttccgggcagcgag

SEQ ID NO: 187902 - DNA, 122 bp, Homo sapiens
gcatttaaaaatgagcagactagatacaggtcacaaagactttgctgatgaaacagcttgcggcaaagaagccagccaggggcgggcgcggggctcacgccagtaatcccaacactgggagg

SEQ ID NO: 187903 - DNA, 122 bp, Homo sapiens
aatcacgaccgcacagcgggacggagtgacaggccacttacgacggtaggcggggcttagcgcttcaccctttaacaaaacccaaacaaaccaaacggcgactggagcgaggtgggcggaaa

SEQ ID NO: 187904 - DNA, 122 bp, Homo sapiens
cctctgcgggactgggtttcccgggcgagagactgaatcccttctcccatctctggcatccggcccccgtggagagggctgaggctggggggctgttccgtttctccacccttcgctgtgtc

SEQ ID NO: 187905 - DNA, 122 bp, Homo sapiens
tccacgcttcccggggaaccccggcttcctggcaagccgagaccctcgctcgggtcctcccgtgcagatctcacccttgtaaagaacttcactggtcacaaacgcttgtggatcccctacta

SEQ ID NO: 187906 - DNA, 122 bp, Homo sapiens
caaatatcttctgtttacaggagagataaaggaggatacagatacaaagatgtttggagacggagggtcaaaatgtgtaagtattcttacctgaaaaattcatgttcttctgaattaccaca

SEQ ID NO: 187907 - DNA, 122 bp, Homo sapiens
ggaagatatgtcatctgctggttgtgttatcactcccaccccctaccccagcccgtcttccggaatttctcaactaaatttcattattgggcaggaaggaggtcatgggttcatttcatttt

SEQ ID NO: 187908 - DNA, 122 bp, Homo sapiens
atcaggaaagccagccagagggtagccctagggagggcaggcactttttcaccattctgccgcccacggcgtgtccggtggtacagcggggggcagccttcccacccaccacaggcacagac

SEQ ID NO: 187909 - DNA, 122 bp, Homo sapiens
gccccctgcgctccgggaaagcggagccttgcggctccaccccgactcccgagagaatcccgcccccaaaagagagacccgcccttaactacgccccaccgtcgaagccccgcccctcggag

SEQ ID NO: 187910 - DNA, 122 bp, Homo sapiens
caagggtctctcttggctgatggggtgtttgtggtctgtagcagctgtggtctcagggttcgtcgttcctctggaggttcttgttcaaattggttctgttctgctggctccaacagacacct

SEQ ID NO: 187911 - DNA, 122 bp, Homo sapiens
ctcccacagccagagtcagttgaggctgggacaaaggggaaggagagagggaaggaggaccgcctgaccttgcccagaaggagcttcctctaaactgccctgggaaggaagcctggtatgct

SEQ ID NO: 187912 - DNA, 122 bp, Homo sapiens
ccagctactcccctcttcagcccctcagtcctccctgcagctgctaaagtggccttggcccgggcaatgagcaccccccagcctgtcccgtgctcgcagccacctctcccgctgggtgaccc

SEQ ID NO: 187913 - DNA, 122 bp, Homo sapiens
gaggtttactgttccacgggctgttgttccccagcgcgggtgaattgttgaagtcctcctcgtcgtccatgccgttggccgcatcatattgcgtgttttctaatctagtgattagcctttcg

SEQ ID NO: 187914 - DNA, 122 bp, Homo sapiens
gtgttctagagaatgtgctacaaatgaattaggtgtggttgcaaatgcatgagaatagaacgacctgtattagatgtattaagtcactgagatttcggaatttatttgttactgtagtataa

SEQ ID NO: 187915 - DNA, 122 bp, Homo sapiens
taagaaggaataagacatgatataaaatgatcactaaatttacctctcttaagataatcacgagttatctaaaaataccatggcacccttgttacaaacattgttttttttaaaaaaagact

SEQ ID NO: 187916 - DNA, 122 bp, Homo sapiens
aaagatttatataagttcaaaagaaacttaaaaatccagacaaagacttatcatcagccacgtatggaatgtgagtggattcttgcctaaaaagctagctctagctgcaaatttcctatatt

SEQ ID NO: 187917 - DNA, 122 bp, Homo sapiens
gggtgagtgtgctacaggcatctaatgggtcagggatgctgctgaatacactttaatgcacgggatagcctccacaacaaagaattttcctactccaaatattaatagtactggagttgaga

SEQ ID NO: 187918 - DNA, 122 bp, Homo sapiens
aactacatccagatatcagtaaggttgttgacttggcactaggcgactgtgggtcttgggcgctgctcttatgaaacctgcttcgtcctcccacttgctgcaagacagagaaggggaagaca

SEQ ID NO: 187919 - DNA, 122 bp, Homo sapiens
gagctgaagttagtgcttaggagatgtggcacactttggggacaggaagaaaaggaaatgcgaccccagagtggcagcagaggggcctgtgggttgagacactatagagtgtgtcataaccg

SEQ ID NO: 187920 - DNA, 122 bp, Homo sapiens
gtattaacatttgctgcatttctaaatgacattctggccaaaaactatagtttatcttgacgtagatgatttttgcaatcaagacaagttatcactcaaagaccactccaatttattgtcca

SEQ ID NO: 187921 - DNA, 122 bp, Homo sapiens
cactggccctgactacagatgctccgggagctgcccaccagatggaagtcggggtcacaccggaaatccacccgggctccgtccagagctgggaggtccccacccgtcaggaaaaccttccc

SEQ ID NO: 187922 - DNA, 122 bp, Homo sapiens
tctcattcccctttgcttatcctttctcattttatggatctggaatttcttctgtgtctacgaactgagacttccaaccacttctctattatagtttctgcacccagttgctaagttatttc

SEQ ID NO: 187923 - DNA, 122 bp, Homo sapiens
ctcttagaacactggagcggcttcgaacccgaagtatggagcaggcttgggtgggtacctcgcccctggccaagtctacactgtgcgccctcggcgcactcgctctccagcagttcaatacc

SEQ ID NO: 187924 - DNA, 122 bp, Homo sapiens
ccgccggggattcaaacccggcccgcgccccgccccctccgcgctggccccgccccgcaacgtgactcggccccgcccccgtcgcactggccacgccccccgcgctgccctcccccaacctt

SEQ ID NO: 187925 - DNA, 122 bp, Homo sapiens
cacgaacggtttctttagtgattatgttgactccaccttcctagtttcaaaccctgcacccgcactctccagacaggaagtccctctccctcgaccagggattgagggagaagagattcaga

SEQ ID NO: 187926 - DNA, 122 bp, Homo sapiens
agccccaatcgcctctcaggagtgggcgggtccgctcagggacaggggctctagagggaacggccacgccccggacgccgccgggagccaagcgccaagggaggggcggcgggcaaccgagg

SEQ ID NO: 187927 - DNA, 122 bp, Homo sapiens
ttccattttaatatctgaaatcaggatgcatcttataactggtagcattttttctttctccgtagtacattaaataaaattttactgcattttgttgaactgattccatcagttgtatcaga

SEQ ID NO: 187928 - DNA, 122 bp, Homo sapiens
ggtccccggcggagcgggagcggcggggcgtttccgggggtccgggtgggttgccgcgagcgctgtgcggtcagggcggggctcaggtgtgctgtctggagtgcagggagctggacgccgcc

SEQ ID NO: 187929 - DNA, 122 bp, Homo sapiens
aaggagccggctacagggtaagcactgaggacgcattccctcgcttcagtgtatgcgaaacgccccgtctagtgatcagctcttctctcaggccttggctctcgagaatccggcacggcctt

SEQ ID NO: 187930 - DNA, 122 bp, Homo sapiens
tggacaacgtggctaccttctgcacgctgctcatgctcttcattttcatcttcaggtgggcgcaacccccctcccggcccgcccagtgtctcaccccagggcagctgggaggcaaaggccca

SEQ ID NO: 187931 - DNA, 122 bp, Homo sapiens
gggtaggagcagcttagggactccctgtcctgtggatcctgcacacaggggtctacttctcgctccagatgagagattaaaggaggtttaggaaatggaaatcctggttgcagagaagaaat

SEQ ID NO: 187932 - DNA, 122 bp, Homo sapiens
catctgtaatccattgttgatatagcctgcctggcaaagcatttcagggtgcatacacttcggtttaacttttacgatattgattattactcttgagtattatattgtgataatatagatgt

SEQ ID NO: 187933 - DNA, 122 bp, Homo sapiens
aaggtcagggactgcccccccagagagcacagggcacctctcctgggtggggacagccgccgagggctttgaactagttcggactgcaggcccactgtgagggtttcctgagaggccggacc

SEQ ID NO: 187934 - DNA, 122 bp, Homo sapiens
ccgaatgtctgaggtcgtccgaggtggtcggcgtcgggggacagttcagtcgattgctgccgggacaaagtgtaaagccgaggagtgtctattccagagtggggtcattaaaagtgattagc

SEQ ID NO: 187935 - DNA, 122 bp, Homo sapiens
ggcttttcatggttttttctgaaacaacaatggcatcttcaatggtgtaatcctttcagacgttcatgatattctctcaattggggttctcttccacagagtactgtgtgtaatgatcctta

SEQ ID NO: 187936 - DNA, 122 bp, Homo sapiens
agaatggtctaggtttttaattttttaattgtaagaatctgtaatacagcatttttatttcggtcttattcgttgtgctcaaaggcaggaaacaactattaatttgccttctcgaatcttaa

SEQ ID NO: 187937 - DNA, 122 bp, Homo sapiens
acgggggcctggcagacaagttcatgtcccagctggtcccccagaggccaggagcacagacggacacacgtggagcttgggtggggagtggccccacgaatgccagtgatttttacagcttt

SEQ ID NO: 187938 - DNA, 122 bp, Homo sapiens
gaccgcggccatacaactggacaactccagtttggtacctaccgccgaggtcaccggcggcggctttggccccttccaggtttctggcaatgaccgccagtcggtagcctttccgggccatt

SEQ ID NO: 187939 - DNA, 122 bp, Homo sapiens
cacgcccaggagggtgagatgaggcagcggaaagcagtacaaaaagaagccggcgccaaacgtcggagtcagtgcacagagttagaggcaggcagaaagaaaggagacctccccaacctcgg

SEQ ID NO: 187940 - DNA, 122 bp, Homo sapiens
aactgctggtagttctccactgaataagcgcttttcttctcaccatgtacctgccttctccgcatattcatttatgcctctccagggcctggagctatctccatcttcagctccagagtcct

SEQ ID NO: 187941 - DNA, 122 bp, Homo sapiens
gacccagggaacgtggcggcacccgcctgctttccctgtgctagtgtgttgagccagttccgtgttgtcacacactgtggctcagtgctgtcatcacgagcactggtcctggatcctgctgt

SEQ ID NO: 187942 - DNA, 122 bp, Homo sapiens
caaactccatctacacgcccataaacagccaccccttggccactttgggaggacaggctgcgtgtaggaaagagcctcctcgatccctggaaatgaacttagagctgcttagaggatttcac

SEQ ID NO: 187943 - DNA, 122 bp, Homo sapiens
ccacccggagccccggaggacagggggcgttgccttcccaggaaggaggcggggccggctcgagggggtggatactgtgagtttaattataaagaatgacctggtacaaaagccatttctct

SEQ ID NO: 187944 - DNA, 122 bp, Homo sapiens
gcgcccgaccacaagtaggtgttttaaaccagtgtttttttttaacaaggcacaaacattcgacttaagggtgacagcatagtactttaccaggaataaagttatgttttacacatatacac

SEQ ID NO: 187945 - DNA, 122 bp, Homo sapiens
gagctgcctgcgggaaggtgcggggagcggagccatggcctccggtgagtgttcatggggcgcgggcctgggccgggggaaaggagctcttctgaagggggtcctgccgcagtgagtttagg

SEQ ID NO: 187946 - DNA, 122 bp, Homo sapiens
tagagactcctgttgcctctggactcggggatactggagccggacagtggacgcccaaaccgctcatgttactccacagccctgcctaattttaggcgccaaggctggacgtgactgaccag

SEQ ID NO: 187947 - DNA, 122 bp, Homo sapiens
caagggagactcctgtccggcctcccacagtgctgggattacagacgtggccaccgagcccggcccagccctctactcagagataacgtcaatgcgcaggcttaggttgaaggattaatggt

SEQ ID NO: 187948 - DNA, 122 bp, Homo sapiens
taggctctgtccttggggggctggcttcgtgggacggcatcgggatcttctttgactctccggcagaggatactcaggtgcgtagtggtctcctgcctgccagcccgcctgcccgctcacac

SEQ ID NO: 187949 - DNA, 122 bp, Homo sapiens
tttttttgggtggagcaacaactgccatgtccacagtaatgatgaatgcttctcgagccacgtcgctgccaaggtcttcacaggcatttctaaaaatgaagaatccttgactgcagacacgc

SEQ ID NO: 187950 - DNA, 122 bp, Homo sapiens
ggaccttgcgcccaacccgccggtacctgccctccgcccccaacaggcgagaagcagccgcgtccacatggcttcaggtgttcacatggcagtaaacgggcccctgctctcctgggcgcccc

SEQ ID NO: 187951 - DNA, 122 bp, Homo sapiens
agtggtccctttttctggccagattttctggccagattcggccttcagagcggccacctccggagactcggccctgccaccctggcgcccgcccggacgcctcgctgccttgggagacccta

SEQ ID NO: 187952 - DNA, 122 bp, Homo sapiens
cacttcttggactggcagcttcagcatcatcctgggagcttgtagaaatgcagactctcccgcctagcccagacctggtagatcagaatctgcactttaacaagatctccaggtaattcatt

SEQ ID NO: 187953 - DNA, 122 bp, Homo sapiens
aagcttgccttgtgtcccccaccctgcgtgcacctcttgggccccacggaacctcggcggcggcgtccagggatcgcgtccggagctcccaaccggataccccccccaagcccgaaacggcg

SEQ ID NO: 187954 - DNA, 122 bp, Homo sapiens
tcaggagtccaaggggcaagaggccacggagggcttcaggcaacacctgggcgagcccagcggctcctctgacactgcagacacctgcacctccctggtccccagaacccccaatccagaaa

SEQ ID NO: 187955 - DNA, 122 bp, Homo sapiens
ccaaaattagtcatttcaggtgttcaatacctccatgtggctagtggctaccacacgggacggcacagatatagagcatcatagaaagttatattacacagcattgatctagctctacctgg

SEQ ID NO: 187956 - DNA, 122 bp, Homo sapiens
ataacaatgcctcaggatttcttttttccacaagcattttccgaatacctactttgtgcccgtcatcccagcacagtgtacccatgagcctgtcctttttctctgggtgaaaaggccaaacc

SEQ ID NO: 187957 - DNA, 122 bp, Homo sapiens
ggtcccgccgttctaggcagggccggggcggggtgcggacggggcgaggcctggatggggcgtggcctgggcgggctgccctgatatgccctcgctcgccccgcccccgcccgcgcaccgcc

SEQ ID NO: 187958 - DNA, 122 bp, Homo sapiens
ttatctacaaagtcccttttaccaagtaaggaacaaattcacaggtttcagggcttaggacgccagcatctttggagaggcattcttctgccacttgcagatgccttgttcagagggtaaat

SEQ ID NO: 187959 - DNA, 122 bp, Homo sapiens
ggcccgtggcctccggattggacggcgcgagctgggtgtgtgtgggtcgctcaatcgctccggagcttctggagggggcagatgcaggtgccggctgctgcagtgcagtagctgctggaggc

SEQ ID NO: 187960 - DNA, 122 bp, Homo sapiens
tgctctgggccttggagcccgagaaacccttggtgcggctggtgaagcgcgacgtgcgaacgcccttggccgtggagctggaggtgctggatggccacgaccccgaccccgggcggctgctg

SEQ ID NO: 187961 - DNA, 122 bp, Homo sapiens
aaatacaaatttacgcagaagcaggatacagaaagcagccagaagtggagcagcaccagccggggtggggaccaagacctcccaccctccttggtgtctgtctgcctttgaggtccctctgc

SEQ ID NO: 187962 - DNA, 122 bp, Homo sapiens
aggagctgccatagctttcgaatccacctgttttgaacaacaggattagtgcctgtgccacgtcccacgcctccgagaaacccgcaggctcccggaggcttcgccccttcaaacactgcccg

SEQ ID NO: 187963 - DNA, 122 bp, Homo sapiens
cttttaggatcattgaattggaggttaagaggggcttttctccatcactgaggaccagatcgggactggccttactcgagttctcacagccagttgacttcagactgctgtcaccagagcca

SEQ ID NO: 187964 - DNA, 122 bp, Homo sapiens
cagactctatgtattcctctgtggcctccacgttcccctccacagcatgtctgagattcacgcgccttgatgaatgcagttggcattcattcattctcccaccagcgcactgtactccacgt

SEQ ID NO: 187965 - DNA, 122 bp, Homo sapiens
ggttctgtgattttcatgcaaattacataaccccattaagtccccttccccaacctgtgccgcccacttcacagaacgttgggggctctaatggacccgtcctcatcatggacgcgttttgt

SEQ ID NO: 187966 - DNA, 122 bp, Homo sapiens
agaagttcaatgaaggggaaattcctgtgggccagagttgaaaagcatatgtggctgatacgggctttgcagaacatgttaggccctggaagcaggtgcaagtgcatttcagatggagcagt

SEQ ID NO: 187967 - DNA, 122 bp, Homo sapiens
tgaggcggtggggcccacagccatggcggagcctgtgcaggaggagctctcggtcctggccgcgattttctgcaggccccacgagtgggaggtgctgagccgctcaggtgactacccgcgcg

SEQ ID NO: 187968 - DNA, 122 bp, Homo sapiens
ggctctagcccagaggcggattatgggcccttgcagtcttgataacagcggggagcctgccgccgccttggcactccttaaagcacctgttggtgtggcgaccctgctttctaaagcaagct

SEQ ID NO: 187969 - DNA, 122 bp, Homo sapiens
ggtggatggattcaaactgattgctgaattcgggcggtaacggtggtagctcatcagctgcggggaagtcttctgggggtggaggaaaatcactttcgatgtcgtagcctccagggtaatag

SEQ ID NO: 187970 - DNA, 122 bp, Homo sapiens
gaagccgggctggggctgggaaatgccggtgcctcaacggtttaacgttttctgcgtccccgggatttccgttcaagaagagcactggtctgagaaacgtttctccttttggtacacgatcc

SEQ ID NO: 187971 - DNA, 122 bp, Homo sapiens
ttctcttttatggcaatattccattgtctgtgtatgctgcaccatgcttctccatccgtccgtccatcagaggacacgaggttgcttccacctctcggccgttagagatagtgctgcggtga

SEQ ID NO: 187972 - DNA, 122 bp, Homo sapiens
atgcgtctcaggtctgcgggctttatttgtggtctattgctctccatgaaatgaggattccggttgttgggcatttcaggtggaagcacagaagagacgccgctcctgtgcgtctgggaaga

SEQ ID NO: 187973 - DNA, 122 bp, Homo sapiens
aaaacacataaattatcccacaagggtgtaaaacgtataagaaaaaattcatcaacaaaccgggggaactaatgttatgcagattaatttcaaagtccttcaacatcaaagaggtcataaaa

SEQ ID NO: 187974 - DNA, 122 bp, Homo sapiens
ggtggatactggatcccaataagatacacatttggttcctctgctcccccttcctagatgcgggatagcagaagggaaaggcaggctcatcctgagaggcaggggccccaacaaagggtgtt

SEQ ID NO: 187975 - DNA, 122 bp, Homo sapiens
ttacttggtatctgtgccttatttgacctttggttccacatgccttggatgtgcatgcaccgtgacggtttcataggtacgaacgcacactcaggcccagtcacttcggttggtagtacaga

SEQ ID NO: 187976 - DNA, 122 bp, Homo sapiens
caaacaaacaaaaaaaaactggcgcagcggcgaccggagaagcctctgcaatatatcgggcgagcgtgttcgtgggtgcgggggaggggcaggggccgccgctggagtcgcccggcacccgc

SEQ ID NO: 187977 - DNA, 122 bp, Homo sapiens
gtagacttgtggtctgacagccgtacaggaagtatgtcccaggaggagcccaggctgtgtcggggtcaccttgacttcactattttcgaaatgctgaattttgctgcaaagttttcctaaag

SEQ ID NO: 187978 - DNA, 122 bp, Homo sapiens
cgatgagtcagcgccgagcggtgagtcagaaggggagagctgagctcccagaccggagggcggcacttaccagaagcctgtgtgctgaccggcctggtctcctttgacgtctcgagcagctt

SEQ ID NO: 187979 - DNA, 122 bp, Homo sapiens
gaactctactacgatcgcgggaaccaccatgagtttgtgtccctggtgaaggacctggcccggcctggagagatcacccagtcgcaggccttcgactttgagtttacccacgtggagaagcc

SEQ ID NO: 187980 - DNA, 122 bp, Homo sapiens
tccacatcactcatgtcgacgaggcgctccccagaactaaataagagacaagtctcggctcgagggccgatggcctaattaacccgctgactggaccgtggggaagaggaaagagtcggcaa

SEQ ID NO: 187981 - DNA, 122 bp, Homo sapiens
tgtgcactgaagcacatcagaattcctacagtttacgagctctattatgcacaagagaaacgtgaatgactttcgcgctccagaagaagctgaattcctctctaccaacagaacaagggcag

SEQ ID NO: 187982 - DNA, 122 bp, Homo sapiens
agtgtgtttgtgtgcaccggggatgtgccgtgtcccatgtgtttctatgtgttaggaggtcgttgtgtgtctgcatgctagtatttgtgtatttgtgtaatgacatctttgtatgggggcat

SEQ ID NO: 187983 - DNA, 122 bp, Homo sapiens
aatctttcagtattctaccttgtaaatactgttatttgtatatactgtaaatgatgacatcggtgggcactaaccgagcccggggaaactgggaacaacctcaaaaccaaaaccagacacag

SEQ ID NO: 187984 - DNA, 122 bp, Homo sapiens
caccactagcaccctgattttatttttcactcttgggataatatgtgtatgtacatacatcgcctgaaccaagcttcatgagcttcagagtgctctctgctctggcaataatggccatgacc

SEQ ID NO: 187985 - DNA, 122 bp, Homo sapiens
gtgcaggtgtgtatccctggttgtatgaccttggacagatcactgcctctctggatagagcgtcccagaggcacatctatcaaatgcttttctaggtcttagccccagagcccagaactccc

SEQ ID NO: 187986 - DNA, 122 bp, Homo sapiens
atacacgtccattgccacgtgatcacacgtcccaccccggcacatcacaactgagtcggccggccacaccgcacacatccattgccatgcagtcacctgtcccaccctggcacatcaccgcc

SEQ ID NO: 187987 - DNA, 122 bp, Homo sapiens
agggagccggcaggaagccagctgagcagggtggtgtgttcccgccgggctaacaaaggccgccgggaggtgggggcttctccagccgctccagcggcgggcgggcggcggaagggttaact

SEQ ID NO: 187988 - DNA, 122 bp, Homo sapiens
cgtcacagagagtaagagggatatggctctctcacctcgctggatggctctgtggagagacgcgatgactcggagctgagggaggaggaagagcagggggaagatggctcagacttcacctg

SEQ ID NO: 187989 - DNA, 122 bp, Homo sapiens
acaaagtcgacgaatccaaacacgaaatccattctcaagttgatgctatcacggccggaacggcttcagttgttaacctcacagctggtaagtcccggagagatttgtgctgcattggggtt

SEQ ID NO: 187990 - DNA, 122 bp, Homo sapiens
tgagagacaaaatgtatgtggaatttagcttaggactgggaagtattaaagagaaaaattcggccaaagaaactttctgtataggcaaacccagcccaaagatgagcttcatgggcaaggaa

SEQ ID NO: 187991 - DNA, 122 bp, Homo sapiens
aggcttccttccgagcacttctcaaagtgagtctgggttttgctaccagtatcaattagccgcttctggcgaatcccagagaatgtttaattaactccacagctctgattcacacttacagg

SEQ ID NO: 187992 - DNA, 122 bp, Homo sapiens
acagcttcccaaactgcccagatgctgagtgattccaaacaaagatgcccactttctgttcggaggctctaaatgttatatgttccttttgacagtagccaaaattcatctcctgtcacttc

SEQ ID NO: 187993 - DNA, 122 bp, Homo sapiens
ccggacttcctggctgtgtgaccttgggcaagtttctctttgtcttagcctcagttttctcgtcggagaaatggggattaaacctgcccaccccccagcgctgttacagaggcggcaggcgc

SEQ ID NO: 187994 - DNA, 122 bp, Homo sapiens
aaagtggggagttgggacctgtatctcctagtctctcctggggctgcatatcagcagctccgcgtctccaccagtggccacggcgcgcagcccttcctcaggcccagctccctccgcgtctc

SEQ ID NO: 187995 - DNA, 122 bp, Homo sapiens
atttagtttacagttaaactttcaggcaaggataatagtagtcccttgccaaaattaactcgaggacataaacagggtgtacacacaagtggcaatgtttggttgacaatgtataggagcac

SEQ ID NO: 187996 - DNA, 122 bp, Homo sapiens
gaggactgggccaccacgctgagcatgcaggagcttacagctggaagcgggtgtgcagcgcgcctcctgcatgacttctggtggcatgagataataacttgtaactttgagttgagagtatc

SEQ ID NO: 187997 - DNA, 122 bp, Homo sapiens
gactgctggggacacatattgggtgcgtccggcaccccgggccaggttgggtggaggctccgtatcactgtcctgtccacgggcagcatgacactcgacccatcagcttcagagatcccccc

SEQ ID NO: 187998 - DNA, 122 bp, Homo sapiens
aagatgccgccccagatccgggatggagacccagacgcccgccctcagagtgcagcaggacgatttgtttcaaagtaaatcgttgagactgttcattaacaagggagcgatggataaataat

SEQ ID NO: 187999 - DNA, 122 bp, Homo sapiens
ggcagccagcagcggcaaccgactcagttcctcttctacactttggaaggtttggtttttcgctctatgcaaaaaatcttgctgttcttcactctttgcatccgctgtgccttgaagtcctg

SEQ ID NO: 188000 - DNA, 122 bp, Homo sapiens
atctgttgtcagcaggaccacctgcgtatcattttccttccatcaaatgtatgacttagccgccaagtggtgcctttgtattttccactccagtgtgggattgcagaaaggctgtttttatg

SEQ ID NO: 188001 - DNA, 122 bp, Homo sapiens
catttcattattggtttcagtttgtgattagaaaattaagttgtgggccataagataaggcgtgttaatgtctgaattggaccttaagtctgaagagtggaagttaaacgttgcaacccaaa

SEQ ID NO: 188002 - DNA, 122 bp, Homo sapiens
gaagccggaactcactacaccgtcccctaagtgacgccaaaatgcactttctaacgtctccggagggaagtgcgcttgcgcaaatgctaggttacacttgagtaactccgggaatgactggg

SEQ ID NO: 188003 - DNA, 122 bp, Homo sapiens
gtgacttggggcagctgactgcaggcgtctccacctctgtgtaatggaagtaataatgcccgcccacaggacgggaggaattaatatgagatacatacaatctggcggtttccgccgggccg

SEQ ID NO: 188004 - DNA, 122 bp, Homo sapiens
ggccgttttctagtctggggctgtgactttaatggtctggacctgcttcagattcgtacgcgagttgctggggctgtgaacttttgacttgagttgtaatatgtttggtaaaacaaaaaacc

SEQ ID NO: 188005 - DNA, 122 bp, Homo sapiens
caaaaccttatacccctacagtgatcaattcttgactgtgggttgccccagtaaggatcacgatcttgagacccacaacatgagagaatccctgcaggggcgagagttgaaagtcatttgca

SEQ ID NO: 188006 - DNA, 122 bp, Homo sapiens
cacggggtggaggagagtcgatgtcggatttagggcggggctgaaccaagcccagggccgcgggggccgtggcttcagcaccgcggagagcgccatctccgggggcggggctggcggggtgg

SEQ ID NO: 188007 - DNA, 122 bp, Homo sapiens
gaggaggggcttgggctgaacccggcactgctgggacatgaacaggggaaacagcgttggcggtggagcaggtagacattcccttgacctcgtaagtcctggatgccacccggcgaactggc

SEQ ID NO: 188008 - DNA, 122 bp, Homo sapiens
ctccgcagctgctggcctgggtgctaagcccctcactgcctggccggtgttgccggctgccgctccgagtgcggagcccgtggagcccatgcccacccggaactcgcactggccggcaagcg

SEQ ID NO: 188009 - DNA, 122 bp, Homo sapiens
cccctcaaggctggagggaacgtgatgcaggcagtggagctgcgggctcggccccgggatcgtggggagagagagccccctgccgagcgcggaggggcgccctccctcccaggccccgggcc

SEQ ID NO: 188010 - DNA, 122 bp, Homo sapiens
gggttggggaagtatcactcacacagtgcctgagagatttgttgaacatctgctacatgccgacccaaatgttttacaactataattttattatcagtgaacacttaaatcagtgttatgtg

SEQ ID NO: 188011 - DNA, 122 bp, Homo sapiens
tgcacccaactcagcctcccagagtgctgggattacaggcatgagccgctgcacctggcccgatagttctttcagcaaaggcctgttgaggtaaatgttcttgtttgaaaatgtatgtcctg

SEQ ID NO: 188012 - DNA, 122 bp, Homo sapiens
gctccctccagggccccagatggtctgtggacagtggtatcagctaccttgtcatgctgccgggcccttgtgggaaggcctgcatgatgggatctcaggagatactctccctgggtggcatc

SEQ ID NO: 188013 - DNA, 122 bp, Homo sapiens
cgcggccctccaggcactgaagcgtaagaagaggtatgagaagcagctggcgcagatcgacggtacattatcaaccatcgagttccagcagcaggccctggagaatgccaacaccaataccg

SEQ ID NO: 188014 - DNA, 122 bp, Homo sapiens
tgggtgccctgggtgtggtttgccaacctgtcaatgaaggcgtggcttggaggtcgaatccgggaccctatcctgctccagagcctgctgaacgtgagcccactgtacagacagggctgccg

SEQ ID NO: 188015 - DNA, 122 bp, Homo sapiens
tgtatgtgatggaacctttgtattctcctaggcccctaatgctatattaggcatactggacgatactattaaggaaactaatactgtgtccaggccccatactggatgcttggtggagctca

SEQ ID NO: 188016 - DNA, 122 bp, Homo sapiens
tcggctcagtgcaccctcggcctcctgccccaaaggtgcagcccgagagtcccatatccgcgggcagctagtcctggggacaaggaagaaccagatcctggcactgtcccccgggctaccac

SEQ ID NO: 188017 - DNA, 122 bp, Homo sapiens
catcttctgccatgcacttgttcttgcctgttctcacattcacacatatgcatgctcacacgcatgcacactcatagttacctctaccacccacacccacacacctacacactcacgcatac

SEQ ID NO: 188018 - DNA, 122 bp, Homo sapiens
ttaaattccagtgtacattttacacatccagcagtgggcaattcagactaaccataatgccgagtggtcaatagccacatgtggctagtggctatcatattaaatagtgcaggtttgaacca

SEQ ID NO: 188019 - DNA, 122 bp, Homo sapiens
tggtggggtggctcaggcagttacccttttcacaaccagtgctgctgggggtgaaggcaacgggtgggtgagcacggacagtgtgagccacgtggccgggagctgggccagctcgctgtatg

SEQ ID NO: 188020 - DNA, 122 bp, Homo sapiens
aaaatgaggtttgccccagtggaggatctccccctgatttccaaaggaaattctttaagacggacaatgtattatctgggagaggaaccaaggagtgcagcaaaaggaatgcacagcactgc

SEQ ID NO: 188021 - DNA, 122 bp, Homo sapiens
gaaggaaggaaggaggaactgattgcaagtggccgaaaacccaagtctcactgggctccacgtctgtcttggggtgagggccaggcttcgatggagtctctctatacctcctgtgacacagc

SEQ ID NO: 188022 - DNA, 122 bp, Homo sapiens
aggcgcgtgtcctggatgaggcggcttgtctgctagacgaatttcaagccaccattgcttcggcctggccgggagagcggaagggcctggtgtgggagagtcccttgcactgccaagacggg

SEQ ID NO: 188023 - DNA, 122 bp, Homo sapiens
ccgacggccgaccgaatgtccctcagagctttccgtgaccggccagggcgcgtggctgtccggagcccctccacgttccccagcagcaggcccggctctctctgatcagcgagcgcggatgc

SEQ ID NO: 188024 - DNA, 122 bp, Homo sapiens
aatcgttttctaatgtgtatcaacataaatcatttgcattatggtttcttgccttctccccgctacagtaaaaataaataaataaataaataaataaataaataaataaataaataaaatag

SEQ ID NO: 188025 - DNA, 122 bp, Homo sapiens
ccttaggctgttttgtaaaatgtgtcggtgtgacccttccggcgatggctcctgactcgacgtggtattgagcctgagctatatgctagtttctgctggaaacgctgactctgcctcttagc

SEQ ID NO: 188026 - DNA, 122 bp, Homo sapiens
cgcagcggaaggtgtcgccgctgtcgtagcaggtgccaccgttgctgcaggtgtaggcatcgcactggaactcgcctgttggcacatgggccgctcagcaggcaggccccagaccgccaggg

SEQ ID NO: 188027 - DNA, 122 bp, Homo sapiens
tgcgcacctaggggtaggtctctgaactggccgccccggggcgtacctgtctcttatggtcgagattgcagaggtgaaataaactccagtttcccatagcgctcccaggcttattaggaaga

SEQ ID NO: 188028 - DNA, 122 bp, Homo sapiens
gagaagcacgcaaaatttagcactttccaagaacaaatgttagagcctacctcctgtgtccgccctccccatttgtgtcccttggcttcgggcccagctggagacccactgggtgttccagg

SEQ ID NO: 188029 - DNA, 122 bp, Homo sapiens
ccgccgccagttgaggagaacggcagggactcggtgccttctgggaagtcgggcgctctgcggctgtgacgtcacaaccggtgccttgtttccggtgcagaagcctggtctccccgttcgga

SEQ ID NO: 188030 - DNA, 122 bp, Homo sapiens
tgctccatggtgcccagtcccatcgaccacccaagggctgaggagtgcgggcgcacggcgcgggactggcaagcagctccacctgcaggccccgtgcgggatccactgggtgaagccagctg

SEQ ID NO: 188031 - DNA, 122 bp, Homo sapiens
caacgccctctgcatcctgcaggacaccgtggtggccacgctgcgtgtcttcgatgcagacgtggtacctgcatcaggggagctggtgaggcggtacacaagcacgctgctccccggggaca

SEQ ID NO: 188032 - DNA, 122 bp, Homo sapiens
gccgggaccttcttgccagccatggcgaagggagtgctggggactggggtcgctcagtgccggtcggcgaggggcagagtcctgcccgcgtgggggtcaaagacaaatggacaaactgtatg

SEQ ID NO: 188033 - DNA, 122 bp, Homo sapiens
caggacctttgcagaccctgtgccattcagcagctgtcccccgacacccgccccagcccccgacagccccgaatcgacttcctgtctctgtgcaactgcctgttcctgctacttcacagaag

SEQ ID NO: 188034 - DNA, 122 bp, Homo sapiens
gtcagcaggagaagcccgaagaggctcatttggctgactggggtgagagctcactcacggcgggcactttggaagcagcgactcccgagtctctttcaccaccgccaggggaaggctgcact

SEQ ID NO: 188035 - DNA, 122 bp, Homo sapiens
atttcagagagtggtaacttctgtgatgaaaatgacgcaggacaatggaacaggctgtgccggggatgcacaactactttatgttgggtgatcatgcaagcctttcttgaagagaccgtatt

SEQ ID NO: 188036 - DNA, 122 bp, Homo sapiens
ctgggaagaaaacaatctaatgaggggctgggagtccgctcgacacaagcagtgaggaggcgtgcgggtgggtgcgccagggcggcctcccccgtcgcgctcgctcctcttacagctcttcg

SEQ ID NO: 188037 - DNA, 122 bp, Homo sapiens
gggggcggagcgacgggggtcacttccgtgtcccggaagtatacctctgaggtcacggggcgaggtcgggttccggaagacgccggcattattcctcccaaagagtttaagactcgtcataa

SEQ ID NO: 188038 - DNA, 122 bp, Homo sapiens
ttctgtcttgagaattcctctagggtcacatgctctgtttgcaccgtgcttaggaaggagcgtgcagaccaatgtgtaatggtcaaagtccttattgtggtttgtttaagagtaatcaatgt

SEQ ID NO: 188039 - DNA, 122 bp, Homo sapiens
gagtgcggcgggcagttctcgggcggctgaaaggcggctctgtgtgcaccctgcaggatgcggcgcgtggccaggcgctcccgccccgcccccaaggggctgccccgccccgccccgccccg

SEQ ID NO: 188040 - DNA, 122 bp, Homo sapiens
tccacagagcagaggctatgtttcaatttctactttactgtcttacagcagcaaggagcacggagtggcggtccacataaaaactcaaatgacatgactgtaatgggaaaccctaaaaacca

SEQ ID NO: 188041 - DNA, 122 bp, Homo sapiens
agaagttgatgaagtacttgaggcagccgagcagatcctggtccagctgctggcgggtgccgctggcaaacacggcctgggcaggcagcggggccagctggtgctgccggcggtagtgctcc

SEQ ID NO: 188042 - DNA, 122 bp, Homo sapiens
cgtgggccgtgaggaacgggaaatgacctcagcacgtcggaagtgtactcgtttccaaggcgacggccctgctgcctctccagccaagtggctggagtcgggaggctggaaagagactccga

SEQ ID NO: 188043 - DNA, 122 bp, Homo sapiens
caggagaccccaaggcaattatgacagcagcggcaacaaaacaacagctattacgcattgcgcagctttaactcataagactcctgtgctgtagatgtaggtctacaccgcggacgttggtc

SEQ ID NO: 188044 - DNA, 122 bp, Homo sapiens
tggccgcctcggtgggcagcgcctgccgccccttcacggccacccggtggaagccgccggcgaaccacatggtgcgcatgatggccttcagcaggaagtccacaaccctgcaaaagagggcg

SEQ ID NO: 188045 - DNA, 122 bp, Homo sapiens
gcccgcctgaagccagcccggcgccctagcagatgcacgtgtctgtcgaatcgctgcctccgagcccacccccgagctcgcatgctgtcacccattccagcctaaatgtgaccataaaatta

SEQ ID NO: 188046 - DNA, 122 bp, Homo sapiens
tctcacatgcttatctcatcgcacacagtatcctttctgctggtctccagcatctacagacgttaaaggcccaagaggagggccaccttcacacgagattccgaggagggcctcgctacccg

SEQ ID NO: 188047 - DNA, 122 bp, Homo sapiens
cacacaggggcttgagaggcttcgtgaaaccccccacccgccacacaggggcttccggtgcgttcgctgtcgtctgagaagccagaccctggacacagcacgtcccagtgcagcacacacgt

SEQ ID NO: 188048 - DNA, 122 bp, Homo sapiens
ccagcagcccctctggcagcctccaggacagcaggtctgcctgacatcatggaacccgcacgcgacagaaccgccaggcttcctcctgaccactcccaccaggcgaccttctgaggacccta

SEQ ID NO: 188049 - DNA, 122 bp, Homo sapiens
ggtctgcagagtcccttagtacctggtgttcaggcttctgaggccagaatgcagataggacgtctgagattgttgactttctcaactgaggaattgggggaaggaagtgccttaataaagtg

SEQ ID NO: 188050 - DNA, 122 bp, Homo sapiens
tcatgtgtctttttcaaagctccccagtttgttctccttccaggctaggtcgagaaccatcgttctcaggtagtggttctgacccaggggcatctcccaaagcttccagcctgctacgatac

SEQ ID NO: 188051 - DNA, 122 bp, Homo sapiens
cggtctttccccaggaggtacgtaccatgtgctgggaggcctggaggctgagccgccccccgcgcctatgagttgcaccctcacagcggcggccaaacctcctgctcactttgccccatagg

SEQ ID NO: 188052 - DNA, 122 bp, Homo sapiens
gaattcattcttttttcataaaaattttattatgtgtgtatctgaaaatggatttctgtgcgagagcagtgatagtctctttaaaaatattgtgtcattaaagccatgttaaatagtccccc

SEQ ID NO: 188053 - DNA, 122 bp, Homo sapiens
gtgtttcagagactaacttcaaggggagggcgccatggacagagctgtaaagatctttcccgctttctatgaagagggcgggcagagcgtcagcccctagaaaactacatttcccagaatgc

SEQ ID NO: 188054 - DNA, 122 bp, Homo sapiens
tgaaacaggttgcaaacacatgaatccactggtcaatcttaacatcactaaaacagagaacgttagacagggcatcctcctgaaatgattccatagcaagtgcattgctcccccaatgaggt

SEQ ID NO: 188055 - DNA, 122 bp, Homo sapiens
ttgatggctttggcatgtccaatatgcaggattccattgggttctggcgggaaccgggtacgtacctaaaataagggggatgggaaaagagaaataaagtctgagctcagatgaccttaaag

SEQ ID NO: 188056 - DNA, 122 bp, Homo sapiens
tgaccgctccacatgctccgggaaaacagcacccatactccagtagaggctgggcctctccgggcctgagtgccaggctgcactgagccagggctcccaccgaaggcacactttatggcttt

SEQ ID NO: 188057 - DNA, 122 bp, Homo sapiens
gctttccctcccatagatgagacgacctgggatcaccatgacaacagtgttcaagagtctcgttttcccttgccatacagaagggctttattttagaatatcttagtgggatctggtccttt

SEQ ID NO: 188058 - DNA, 122 bp, Homo sapiens
gtcagagtgaggcggccagacaggagggccccttgccagggatccggagtcaggaagccacgtaccgctccacaaaggctgccccgaagtcccccgcacggggcgagcgggctgtggctggg

SEQ ID NO: 188059 - DNA, 122 bp, Homo sapiens
agaggttacaaaactggcacagttccgaaaaatggaggttctatgatgcaaacacaggctcgactaacttcaacatgtgtaatataatcattatgctgtattataattcataattacattta

SEQ ID NO: 188060 - DNA, 122 bp, Homo sapiens
ggtttgaggctgcctggtcccaagggcgtttttataccttctgggatgcttgacaaagatcgctcaatggctcgctgtccccctcccctgccctccttcactttctctctctcatccaggga

SEQ ID NO: 188061 - DNA, 122 bp, Homo sapiens
ttgctgagaggaattaagacttgaataaatggaaatgtataccaccgatacagaaatatacgtcatggattataagatttaatattattaaaatgtcagttgtgccctatcagaagaatccc

SEQ ID NO: 188062 - DNA, 122 bp, Homo sapiens
accccgggaccagacctaaagggagaaggcgcgatctggggccctccctccgcaccccctcgccccgagaagccccaaacccaggtctttgaccctcatgaacatcctttgtccttcctctc

SEQ ID NO: 188063 - DNA, 122 bp, Homo sapiens
ttctagactgtccatgtcctctgtgcctggcgaggcctccacgaagacctcttccggacacgtgctatggcccaggctcaggccgttctgcttctctagccgagccaccactgcctcgatgc

SEQ ID NO: 188064 - DNA, 122 bp, Homo sapiens
agccccggcggcggccgcagacccccaccttgctcacttccccgccggagcaggggtcgtcgggaaggtctcctgcggcctcactcctccgcacgctccggcccagccccctcggctgaggc

SEQ ID NO: 188065 - DNA, 122 bp, Homo sapiens
gccggggcggccggcggaggtccatgtggcgctctaggtgggatgccagcgtcctgaaggcggaggccctggccctcctcccctgcggcctgggcatggcattctcccagtcccacgtgatg

SEQ ID NO: 188066 - DNA, 122 bp, Homo sapiens
ggcctcgcctccctcctccgctgggggtctaagcctgcgcagtattgcgaacgcgggcggcgtttcccgcatgcgcagtcactgcccggcccggctttttcagtaggagccccgcgcggtgc

SEQ ID NO: 188067 - DNA, 122 bp, Homo sapiens
ggcgtggagtcgctgtcagggttgtggtcagccatcgtctcggccccgggccctcctaaccgcccagccagctgcaggctccgccttcccgccgccacagttaatgtaactctcgcgatgct

SEQ ID NO: 188068 - DNA, 122 bp, Homo sapiens
tggaccccactgtccccagccctctgtcacccccaaacctgcccaccgcccgcctctacccgaccctccctcagggaaatcgggactcagcccccaacgcccccacctgccgctctgcccac

SEQ ID NO: 188069 - DNA, 122 bp, Homo sapiens
cgccagcacatttccctgcccctaatcacaaatgccctgggcccctccaccggagattcgcgttcagtaggtcagtgacggggccgggaatctgccatttgaaacgaatactcccagttatt

SEQ ID NO: 188070 - DNA, 122 bp, Homo sapiens
agggcaccggcgagtgtcctggccatgcaggccgtgaacacggagcctgcaggggacgtgcgggtgaagcaggagcagaggagaagcctcccggcaggggtggtggcatttgggggtggtgg

SEQ ID NO: 188071 - DNA, 122 bp, Homo sapiens
gagagcatcaaattggcaacgtaacagagacatagacccagtgatgccatttcaattgcacgatgagggggcccagagaggactggttccataccagggagcagttttccactctgccttcc

SEQ ID NO: 188072 - DNA, 122 bp, Homo sapiens
ccccgggcaggcacaggtgcaggagccgctgggtgagcccggccagctgggaaggcctcacggacaagacaagcaggttgccgatggcatggccaggacctgcggcggaaccaggaacaaaa

SEQ ID NO: 188073 - DNA, 122 bp, Homo sapiens
gtgctccattggataatctatcctcgctctaccaaactaccagcagtcagtaggaggggtcggtgagcccatacttaaccctgctctgcccttgtgatcacagccctcctgcctggaaaatc

SEQ ID NO: 188074 - DNA, 122 bp, Homo sapiens
ctcagttctgtgaagggaccatggagctgctgatctcgacaatgctttgtaggcggagagcgctgccctctaattctagagtctcagtgtcggatgttctgatttccacttgtctaagcgca

SEQ ID NO: 188075 - DNA, 122 bp, Homo sapiens
ggctaagtgacatttttgccagatgactcccccttttcggagtacaccgatatcattgggcgagcacacgccatggcggagagaggagacagccacgctcctctcagcccggctgctgccac

SEQ ID NO: 188076 - DNA, 122 bp, Homo sapiens
catgacactccggaaaatttcatctcatccttgaaaatgaagacttttcacacccaacagcggtcaagccgggcctcagccttctgaccctcctcccctgcttcctggcaggtacaggtttg

SEQ ID NO: 188077 - DNA, 122 bp, Homo sapiens
caaaacaactcccctcacgttgtacccaggctatttacagagacaccttgattatcctcacgccaaggcatggaccatttattgaacaggcagtcaacaaatatttgttgaatgaatgaaaa

SEQ ID NO: 188078 - DNA, 122 bp, Homo sapiens
tcagcccccacagcacgcactgcatgtccacattcccctctctacacaccacaccccaagcgctggctccacacggacgcaggaaagcatcaggaccggaaagcacaggaaaacgtgcttgc

SEQ ID NO: 188079 - DNA, 122 bp, Homo sapiens
gcaagcacatgggccctggagctgggctgggctgggcttaggggctcagggaagagctgccgccaaggtcgaggtcaaagtcctgtctttcccaggtgttctttggccaatatagagcgtgt

SEQ ID NO: 188080 - DNA, 122 bp, Homo sapiens
gctggtctaagtaattaataagacccagctgacattagcatctatttctttctcctctagcgtttctcgaactggttctacagtagcctggggcaccgttaattctgccaaggcctggcgtg

SEQ ID NO: 188081 - DNA, 122 bp, Homo sapiens
ccaacgggtgaagagcctaggtgtttttgatctgtgccttctctgttcctcagagatatgcgggcgtccttctagaagcccatctcgctcacctgtgtggtcacccttgtcccgcccttcct

SEQ ID NO: 188082 - DNA, 122 bp, Homo sapiens
atccctcacctcagccctggactccacagacaaggatggagtttcagaaaggctggtgggcgtgtcgtgtcgtgtcggggcgtggctacgagtgggtgtgacgctgcgtgggcgtggttctg

SEQ ID NO: 188083 - DNA, 122 bp, Homo sapiens
aggaactaaacatgcaaggcttctgctttctctcgtctctctcttaccccttagagaagccgctggctgaactaaaaataagtcacttaaactaagttgttaaagagtcatcgtactcaatt

SEQ ID NO: 188084 - DNA, 122 bp, Homo sapiens
agtggcagacagacaggtggacggagcaggtgcctgggagggtgccagggcctgtgtctgcggcccaaagtcctcctgccctcgttggtagcaggctaagctgcctcctctgagagagccca

SEQ ID NO: 188085 - DNA, 122 bp, Homo sapiens
aatttttttgttaagttcccattagatgactcacttcaggagggcaggaaccattctgttcgacattgtattccccacactttatacatagtaatcattcaataaatgtttatcttgttaaa

SEQ ID NO: 188086 - DNA, 122 bp, Homo sapiens
agttggtttaggtagaatcctcaattttgtcctccatatctgattgggtttcttgtcctccgtggcccccaggtgatgtctgagcaacccacctgccttcagcaggaatcctggtggatcgg

SEQ ID NO: 188087 - DNA, 122 bp, Homo sapiens
cagggccctcaggatggagttcctggtcctctgcctagcgttttaaagcctctctgacctcggggccctcaggatggagtccctggtcctcccactagcatttaaagcctctctgacctcgg

SEQ ID NO: 188088 - DNA, 122 bp, Homo sapiens
ctggacgcgggtggcgcgcgtctgtagtcacagcaactggggagtctgaggctggagaatcgcttgaacctgggagacggaggttgcagtgagccgagatcgcgctactgcactccagcctg

SEQ ID NO: 188089 - DNA, 122 bp, Homo sapiens
ctgttaaaatgctctgctttcctgcaaaattaaaatagctggggaccaggcacttaaacccgtagaatctaatagacagaaagcccctgctttaccgcctttgcgccatccgggttgtctgg

SEQ ID NO: 188090 - DNA, 122 bp, Homo sapiens
tcaccaggcccgcttcctgccccctcctcgcccagcctcacggtgctcacacgtccccgtcgaggggagccgcggcagccctcggactcccagccccggctcatcttctatccttccctccc

SEQ ID NO: 188091 - DNA, 122 bp, Homo sapiens
tatagagcaacaggaactttcaatgcctgcagattagaatacaaaatggcacagctacttcggaaaactgtttgacagtttctttaaaagttaaacgtacatttaccaatcccactcctagg

SEQ ID NO: 188092 - DNA, 122 bp, Homo sapiens
ggggacaccaggacttagccatggcaggggctctgccaatgctcttcacacatggcctggcgaggtccttctcctcacatactccgggcaatgccagtgccaggttttcctttggtctcatc

SEQ ID NO: 188093 - DNA, 122 bp, Homo sapiens
caaatcagcccgcaggaccctgcaacttgagctccaagcggcgcctccatccctgtcccccgccacccccacccccgccgacctgcaacccgaaacactgtggctgttgtctccggagtcgg

SEQ ID NO: 188094 - DNA, 122 bp, Homo sapiens
cgatgaggtgtttctaggcccccaagtcacagaaaagcaggcgattgggaacaacggaggcgcggcgggcccccgggccgcgggccagcgccaccttctggtggatcttccccgacgcgagt

SEQ ID NO: 188095 - DNA, 122 bp, Homo sapiens
attccgaagtgtgtacttgcctttatgatactggatacacactggtgttaacaaggagaacgatgtacgtggcagacgttcggagagtactggacatgttggttctaatttgggtttatcct

SEQ ID NO: 188096 - DNA, 122 bp, Homo sapiens
gagaggagctggggggccgagaaggtccgaaaatggaaccagcagggggcacccgagagccgaggtgcccacgggccgggagcctgggaatgaaactggggaagagggggagagaaagggag

SEQ ID NO: 188097 - DNA, 122 bp, Homo sapiens
ggctaaaccgaaaagaacctcaggatctttcttgtacttacataatcagtcacatgatgtcgctctacactcagaaggtgaaacaggaaaatttttttctccgcacccacattccaatcatt

SEQ ID NO: 188098 - DNA, 122 bp, Homo sapiens
gtagcctcagtccctaacccagcaaggacagcagcggagaggagctcacaggccagcccccgccacacgtacacaccactgcgaggccccaaagctcaagcagcgtgaatccagcgaataca

SEQ ID NO: 188099 - DNA, 122 bp, Homo sapiens
cgcctgaaggagcatccagaccgctgacctggtggcgaggggaggggggtggtcctcgaacgccttgcagaactggcctggatacagagtggaccggctggccccatctggaagactagtga

SEQ ID NO: 188100 - DNA, 122 bp, Homo sapiens
cggcagcggccaagcaagaagaaagacgtggcagcaagcgggagtcggggatagtgtcatcggttcggtaaagtttctgttctctggtaactagacccgtttttttgattcccgggtggctt

SEQ ID NO: 188101 - DNA, 122 bp, Homo sapiens
ttcaagtacccttttgtaatgttccaagggtcctaagactcattttcaaagctctggcttcgagctcctcctgatttcttcatgaattgctggggccactctgcatgccctattgatcatga

SEQ ID NO: 188102 - DNA, 122 bp, Homo sapiens
ctcaaataatccagggaggcgtttataaataacttttcctcagggccacggggtgagccccggcttctgattggctcagaggggaagtggttttgaacactacaccatagctaagcctgagg

SEQ ID NO: 188103 - DNA, 122 bp, Homo sapiens
ttctcaaccaaacctaaacatttttgaaattgcacttccccactgatgcctgcagagtggcgggtcggggctgctggggccgctgcttgcagttctccttccggtctggagactgtcattag

SEQ ID NO: 188104 - DNA, 122 bp, Homo sapiens
gggtccagccctgcgtgggtgggttgggtgaggtgtagaaggaaatagggtgggaggtttcggccttcatagaacactggcatggtgggggagcgcctacctccatgtgcacacacacgcac

SEQ ID NO: 188105 - DNA, 122 bp, Homo sapiens
tgcatctttatgtttctgtccattttaacttgatctaggaaaattccaacaaaaaacccacggtgctggagcaagatctcaggctgtgaccttctcgaggaaagaagcactttctgttgtct

SEQ ID NO: 188106 - DNA, 122 bp, Homo sapiens
gatgataattaggcagaaagacttccatccatatacgtagtagatgctgcggtccaccctcgagatccctccttaggacccaggcactcaatttcccctggttgttcacagctgtgtctata

SEQ ID NO: 188107 - DNA, 122 bp, Homo sapiens
ctatattcagatgagctcgggccgggtgacttaacagatgaggaagtgtctcggggccatcggcggaggcgcagcccaggggtccccagctccccgcctcgccacctggggacagcccacgg

SEQ ID NO: 188108 - DNA, 122 bp, Homo sapiens
ccccgtccagccagggcaaacccgggctgtgcaacaagtgtgggcggcacatctggcctccggtcaggcgggctgcgggcaaagagagagaggatcagggtgggcagaaagatcagggtagg

SEQ ID NO: 188109 - DNA, 122 bp, Homo sapiens
ggcccttcagacgtccatgaaggtgttattagactttgcagagcagtggacaggatgtgccgctggattagcacactgttgtcatgttgacactagtctttggataacttcccatcatctgt

SEQ ID NO: 188110 - DNA, 122 bp, Homo sapiens
ctttgcctctcccggtcggctcccgagcgggacttgtgaggcgtggccgggtggaggaggcgcttgcgggggcgtggggctccccggcaggcgggaggcacggagcaagtcgcactggacaa

SEQ ID NO: 188111 - DNA, 122 bp, Homo sapiens
cagctcccaaggatggggtccctcgggaagctgttattgctgtctacggggcaggagctccgtctttcgagcctctgcacttgtggagacaaaggtttccgaatgagcatttgtgccccgcc

SEQ ID NO: 188112 - DNA, 122 bp, Homo sapiens
tctcaaagcctggttccctgcccagcagcattagcatctcttgggagcttattagaaatgcgaacacctgggcccttcccttccctttcagtgtccagttcctgtgggatggggctgggccg

SEQ ID NO: 188113 - DNA, 122 bp, Homo sapiens
atcggacaggacagtggttaaacaaagtgccacatattcgtatctgtggagtcacaaagtcgaggaactgcagcaacacctcactacgtggtaacgaaaaacgatgagcaaaaaaattcaag

SEQ ID NO: 188114 - DNA, 122 bp, Homo sapiens
acacactgatggcattggcgggagcatccaggtggcagtgcatggtgcggcctgtcagcacgctgccacccagggctgtggtcacacgggacatcttctccatggctgcacaggtgatgagg

SEQ ID NO: 188115 - DNA, 122 bp, Homo sapiens
aaaatgattcagcagcaaaacactcccctccccagcaccacgcaggcagccccctagccccgcccctgccccatcccacagtggtttgcagggtggggttccatgctgtggccctggcacct

SEQ ID NO: 188116 - DNA, 122 bp, Homo sapiens
cttcggcgccggggcagttcttggtctcgtcacagatcacgtcatcgcacaacaccttgccgttgtcgcagacgcagatccggcagggctcgggtttccacacgtctcggtcatggtacctg

SEQ ID NO: 188117 - DNA, 122 bp, Homo sapiens
gccggggccgccgggggtggggggtcatgggtgtggagctgcacccggatcttggtgacccgcgtctcttggctcagtgagcaagacggaggaggagctgcaggccatcctggaagccaagg

SEQ ID NO: 188118 - DNA, 122 bp, Homo sapiens
tctccctcgcagccacaccgtggctgcactcgccgtcctctcttccggccgctaccaccccggccccctagaaccccagcctcccgcgcccgcagccgcgttcctgtctccccgacctccgc

SEQ ID NO: 188119 - DNA, 122 bp, Homo sapiens
taatgaagggtctgatcctctgcagcactaacactctgagtagctgtgttatgaattatgcgtggaaggcacttttcagccttagatctgcaggcagagtccacatgctgggcacatgtgtg

SEQ ID NO: 188120 - DNA, 122 bp, Homo sapiens
tgttatcagcaccgggtatttttattattagtctttgcatagcctgctattggttctctccgccatccaactattctttacagcctccgactccatctccacaatctgcctaaaaatactcg

SEQ ID NO: 188121 - DNA, 122 bp, Homo sapiens
tacagcactgtgttctcactaagtttatctaccggttgtgcccagcaaaaacggaagtaacgccgaactacaggtggtccctgatggcctcagacagactcagcaataggcatgtacagggt

SEQ ID NO: 188122 - DNA, 122 bp, Homo sapiens
ggtgcttgtcgaccttgttgaagttgtactccaggatttccacctggtcctctgtggggccgctcgcggtctccgccgacatggtccctgcgcgctgcggggcagggagaagcggcggcggt

SEQ ID NO: 188123 - DNA, 122 bp, Homo sapiens
gcgagaaccggagctgcggccccgcaccggcgtgagtccagctgagctgacacgccgagccggttgtgcctttccgagggaggaatgtgccgtggaatccaaactttggaaaacgtcccacc

SEQ ID NO: 188124 - DNA, 122 bp, Homo sapiens
tattcagatcaaagtaacaacaacatttgtaataataaacaacaaaaattccataaagcacggtccatttgttgagccagatttaccagggttctacttgaactcttttcctaagtaataac

SEQ ID NO: 188125 - DNA, 122 bp, Homo sapiens
cacctcgaggcagggtcaggcgccagggagtttggagacccggcagagtcaccccgcaaccgtcccgttgccttgggtcgggattcctttgctttgcagtctacagtagcgctccccgctct

SEQ ID NO: 188126 - DNA, 122 bp, Homo sapiens
gagtggttcctggatgggcaggccctgaaggccagcagtgtgtatgagatccactgtgatcgcacccggcacacgctcaccatccgggaggtgcccgccagcctgcacggggcgcagctgaa

SEQ ID NO: 188127 - DNA, 122 bp, Homo sapiens
actgtctggcactccctagtgagatgaacccggtacctcagatggaaatgcagaaatcaccggtcttctgcgttgctcacgctgggagctgtagaccggagctctcattttcttgacagtgc

SEQ ID NO: 188128 - DNA, 122 bp, Homo sapiens
aataattctggtaaagagtttatttaaatacatgtatttatttaaataaatacatcctaacggggaaaaaaaaggacttgaaacattattcacagaaagagcaacagctggccaatcaggaa

SEQ ID NO: 188129 - DNA, 122 bp, Homo sapiens
gaattatgccatttagtctgtctgtggtggcactggaaacccacaagaatttaacagcctcgtctctgtctgaagttcagggcttctgtaaagaatacgtgatggaaagaggaggtgactaa

SEQ ID NO: 188130 - DNA, 122 bp, Homo sapiens
gtggctacagctgcatcttgacagatgagaaatgctcacagtgtctttcttcctctaacacgctcccctcctctgaatgttcacaccgatctgcatactttctgatgagccctttggatcgg

SEQ ID NO: 188131 - DNA, 122 bp, Homo sapiens
tttgccgttgcctattctccagcccgagatgcaggcaacagagagatgccctctctaccccgggcaggtcctgagggctccaccagacatgcagccagcaaacaggtgggaccagatgccag

SEQ ID NO: 188132 - DNA, 122 bp, Homo sapiens
accacacagaccacctacgacatgcccaggccatctgacttgtataacctttttgcatagcgaggtgggttttctttccttagctagtagagtgggggaagggaagaatttagcataagaaa

SEQ ID NO: 188133 - DNA, 122 bp, Homo sapiens
acgcccggggccggtgtgcaccggtgggcagtagtgtgagccgcaggcaggtctcacacacgcgaccatggagggatgcgtgtgtgtttgtgtatccacgagtggggtgtgaggtggggtgt

SEQ ID NO: 188134 - DNA, 122 bp, Homo sapiens
ccctcccccagctctgcccccagccaggcaggctttgtgttctctgagctctgtgtcctccggtcccctctgcctcaggcagctgcatgtttgcctctgacctcctcagggctttagattgc

SEQ ID NO: 188135 - DNA, 122 bp, Homo sapiens
agcgcggccagagtgggcgcctaggccgagtaggcgccgagagcgagggagggctgcgagcgctgccagcatgctgtcacctctcagaatgacttacgatcaaggtaaatgttggctaccat

SEQ ID NO: 188136 - DNA, 122 bp, Homo sapiens
tggcgcctttgccatccgtgccgaagtggggagacctagccgcgaccaccacgagcgcagcggtgacacccagaggtcccaccgggcccctgggcagggtaaccttagcctgtccgcttcgg

SEQ ID NO: 188137 - DNA, 122 bp, Homo sapiens
tggagagcatccatcaggagttcacgcgcaccaacttccacctcttcatccagacttaggcgcgcccggtagccccggctgcccaccctggagggctgcgcccgcgccaggcgcggggacgt

SEQ ID NO: 188138 - DNA, 122 bp, Homo sapiens
aggttgtgagccagtgacttgtctcagtagctgaaactgcagccctgactccagctaatgcgatttctggtcttctttccacaggtgtgtagctgggacggtgctggtctgagctggacctt

SEQ ID NO: 188139 - DNA, 122 bp, Homo sapiens
gatcagcgcggagggtggcgggcactggaccgcagaactggcactcgaggtcccaggggccggaatgcgcttggagggagagggccgctcagcgagggcgggacagaacctctcccgggctg

SEQ ID NO: 188140 - DNA, 122 bp, Homo sapiens
tccccgtgcacaccagtgatggccgccgtgcccgtgcaccccagtgatggccgccgtccccgtgcacaccagtgatggcctctgtcccccatgcactcccagacaggcaatgtccctgtggg

SEQ ID NO: 188141 - DNA, 122 bp, Homo sapiens
cgcggggcctggggagctggcggccttcccgccacttggggcgcctggggggctctggggcgggggaggcgggggctttgtctaactccgccactgccaccaccggccaggccgcggcttgg

SEQ ID NO: 188142 - DNA, 122 bp, Homo sapiens
cagcctagcctcgggcccaggacatttatttatcaagaggggatctccctccagagttgccgcaaaagtgcccagaggttagaggactataaagccacagtgtgctggggaggctgtggacc

SEQ ID NO: 188143 - DNA, 122 bp, Homo sapiens
gaggtatgagatccgggagaggagagcccagtaagccagggctgcgggggagacggagggcggggcccggacacgggcttttcccagcggccagcacccctcccgcaggacctcgggttcca

SEQ ID NO: 188144 - DNA, 122 bp, Homo sapiens
gatgagatgaaaaagaacaagtcatctttctgagcctgagattcacctgtaaaacactcacgccaggcattgctgggaggagtgcaaatgatcacttactctgtgtctaagattgacacctg

SEQ ID NO: 188145 - DNA, 122 bp, Homo sapiens
agcatctgcaaagcccccagtgagttctgctagcataagagcatacccattttgtccaatcgtatttctacataactgtccatacttcgttgaacctaagcatacaaatggacagttttccc

SEQ ID NO: 188146 - DNA, 122 bp, Homo sapiens
cggcccgggcgtgggggctttgagggcaccggcgcggtaggtcacccgggtttcgcgggccgcaagctcggagacgcgcgtgtcccgcgttggctgcctgacccggaatggcgcagcccctt

SEQ ID NO: 188147 - DNA, 122 bp, Homo sapiens
agccaagacccgcgccgtggcgggcccgacggccaaggaaagcccaccagccctccgcaccgtgggcgacgggccaagacccggccctaaacggccagacccagcccctagtcggctgccgc

SEQ ID NO: 188148 - DNA, 122 bp, Homo sapiens
aatatgctgggaagaggaatgcaaacatcagccacacccagcggggaaggtgcctgcgaacggcaccaggaccacatacctccttcctggcagcctttggcacatggacttagaaaccagaa

SEQ ID NO: 188149 - DNA, 122 bp, Homo sapiens
ttgccgttctgcctcctgggggctagttcttccttgctcaggcaatagccattcccccaccgtgttccctaggggacatgcattatgccagggtttgcattcagaaggatttgggataggga

SEQ ID NO: 188150 - DNA, 122 bp, Homo sapiens
ggtatgatcttagtgggcctaaggcaggagtgggttgaaccaggagacaattcctgacagcgattactactttcaaatcattttctcagtcatgatgtcactggacatgccataggtcaatt

SEQ ID NO: 188151 - DNA, 122 bp, Homo sapiens
gcagctccgcgcggaggtgggaccggcgggttgggaacggagttggggcccgtcgggggccggcgcgtggagggtgggaggatccggccgctgccgggcggatgggagctgcgcgaggagac

SEQ ID NO: 188152 - DNA, 122 bp, Homo sapiens
gagggagcgcggcccgttccggtttgaaactgctctggacgccgaattagtgtttggcagcgcctggtggtcttcaatcccagcccctccggcccgccgcgccccccgggaccaaaacaagc

SEQ ID NO: 188153 - DNA, 122 bp, Homo sapiens
gcattcaattaatcgtcttttttaaaatttgaacgtgtaagaaaaaaatctaccacttttcgtgccctaatatattcataaaagtagccaattagaagctgaggggaacaaacggaagtccc

SEQ ID NO: 188154 - DNA, 122 bp, Homo sapiens
cactgaagcctcaacctcttgggctcaagcgatcctcctgtgtcaacctccagagtagctcggactataggcatatgtcaccacacccaactaattttttaatttttggtagagataaggtc

SEQ ID NO: 188155 - DNA, 122 bp, Homo sapiens
gtgacacccaggacgtaacggagtgaggggaccagggactccggagcatggcagaggggccgtccctgaccctgacaggacgcaggccctggggagaggcctggctcctggaaggtgagcag

SEQ ID NO: 188156 - DNA, 122 bp, Homo sapiens
gcgcagcgggcggtcccagcgagtcagaagggtgcagcagccgggtcggggatggccgggcgaggctgacccctgccgggcagcgcgggtggcgccacgggcggaggcgacttcctgggccc

SEQ ID NO: 188157 - DNA, 122 bp, Homo sapiens
aaagccgactgaaggtgaggtgggagggtagatgagaagaggctgcggcggctgcgaccacggtctcaatgccgctgaattcatctttgtcctgaggcgcggctcttggagagccttgtggg

SEQ ID NO: 188158 - DNA, 122 bp, Homo sapiens
caaagcccaggagtccttggtgctcttcttttaactgcctcctcatctcattgggctgcccggtgttaactggttgattatcacctctgtgttttgcctgcaaggaaagaagctactgacac

SEQ ID NO: 188159 - DNA, 122 bp, Homo sapiens
ccactacatgtcactgacttttagccatcagcacattggttttctatctaatggctcctccgtttagctgctttcctcattaagccctattagcatatccaaagactgttgggaaattatta

SEQ ID NO: 188160 - DNA, 122 bp, Homo sapiens
gtgtaggattatctactataccacagaaggtttagtatcattggtcctttgtcctttgtccgataaatgcaagtagtcctgccagtcacaaccccccaacacacttccaaatgacctcaaga

SEQ ID NO: 188161 - DNA, 122 bp, Homo sapiens
gaaaatgttcttactagctgggtatttaaagtaacaattgtttaaactgctgctggaatacgataaacaccacaaattcgcatcacagctttcaaaacagggtgcgaagaacctcctggtgc

SEQ ID NO: 188162 - DNA, 122 bp, Homo sapiens
ccagcctgcgggacagagggagactctgtctcaaaaaaaaaaaaaaaaaaaaaaaagaaacgaaaaaatgaaagctggctttgtataggtgctggggagcgcaaacacctggcctccccaag

SEQ ID NO: 188163 - DNA, 122 bp, Homo sapiens
aatcagaactgcgctctcttctcggctcctccattcgcgcgccagaatgccagagggaggcgggactagcaggagattgctgcctatgcaaagcaggtaagaagccgaactctgaggcctct

SEQ ID NO: 188164 - DNA, 122 bp, Homo sapiens
cgagcttaggcgaggctcaacggccctacctctcaggtgagaaagcagctctcctgtaatcgttatcttttctcaaaggggaagaacaacttcttcctgttaataaatcacagacctcagat

SEQ ID NO: 188165 - DNA, 122 bp, Homo sapiens
aaataaaacttcacaggtcagtcccaagtcactgtgcaccctagcagcccaggaaagaagcgtggctgtcaaggggcaagcgcgtaccaagtctgagggagggggccagatacgccaaatcg

SEQ ID NO: 188166 - DNA, 122 bp, Homo sapiens
gcgcggggaatgcgagcgccccggcgccttctagtgggcgcggaggaaactgcgggggcgcggagcaaacgcgggaaggtcctcgctcacagcccccagtccttagcctccaaacactggca

SEQ ID NO: 188167 - DNA, 122 bp, Homo sapiens
gagggtgtgccctccctgggatattggaagtaatatagtcctctttctccctggatattacgaacaatatcacgggggtgtacactcactgcgatattgggaatgttatcatccactttccc

SEQ ID NO: 188168 - DNA, 122 bp, Homo sapiens
caatttctcttcaaatttcacagttttctgttgctttaggattgaaagaaccgattagcccgctgggagcgtgaaacagacttaaaaaaaatctgcatggtatttcctcccagtgaaattaa

SEQ ID NO: 188169 - DNA, 122 bp, Homo sapiens
ggaaagcggagagggacgcgaagatcagcaaattcgccagtttggatccttgtccttttccgcccttttccccccattaaatccagaacccgtcacatgataattaagaaaaaacttcagtt

SEQ ID NO: 188170 - DNA, 122 bp, Homo sapiens
tggcgcggcgcaccctggcgcagcggagggaggcccggccccggcccccggcgcctcccccgctcccgcccaggcctccacgcccgaccccaacccttgccagcctcctgtcttctgggccc

SEQ ID NO: 188171 - DNA, 122 bp, Homo sapiens
ggcattaggagagggcggggatagcaaacatcgcgcgaattttgagaggcgctgggactacgtaatcccgcgatcttatgactaaacgaacgcgatttagggagaagtaacggtagcgataa

SEQ ID NO: 188172 - DNA, 122 bp, Homo sapiens
aattaccagcttaatctgcttctcactgtttttttcagctaaaccaaatcccataaaatacgttcaagccttctattgaaggcacactttttttttttgagacagggtctcactccatcacc

SEQ ID NO: 188173 - DNA, 122 bp, Homo sapiens
cctcccaccacagacagccccgagctcccgtgtgctgcacttgcgtggtgtctggatggtcggggtggggccgtgttgaggggcctcggatgcgtcgtgcagccttcactctgggaagtggc

SEQ ID NO: 188174 - DNA, 122 bp, Homo sapiens
cttgggttttcccgtctctctatcgtataccagccggaaactgacaacagaaccaacctccgagaaaatgtcctttaactgctcctcagttgcctcatatggaatgttccccacgaacacgg

SEQ ID NO: 188175 - DNA, 122 bp, Homo sapiens
tggcttgtgctggagccaagcaggctatggctaccaatcagcgctcagaaaagacgcatgcgtcttcgaacgaacgcgacgtacggttaactttgacccaaagacaacctcttctctcccgc

SEQ ID NO: 188176 - DNA, 122 bp, Homo sapiens
atggccagatctacatagcacaaaataaagtgggggagtttgtaaattaatctggtgaaccgcaaggccagccaagccaggtagtaaccacaaaagtaatctctttacagtgatgtaaaatg

SEQ ID NO: 188177 - DNA, 122 bp, Homo sapiens
aaaggacagcagtgcatacactcatgtaccgcagttacaaacatatagaaacactcatgccgacagcagaaatgaaaccagacagatgaaaaggaggggaaggggaaggaggaaccaaagtc

SEQ ID NO: 188178 - DNA, 122 bp, Homo sapiens
gagtcaggaaacctgagttctagccccagagctaacgttaactagctgtgtgaattcaatcgctactctacttcagtggatttcaatgtttcctctactttccttcattagtttctttatca

SEQ ID NO: 188179 - DNA, 122 bp, Homo sapiens
tatttcgatgccatactttcctaatctgcaaaatttttgtaaatacctgtgacctagtgtcgtgagcgcttagcaacacctgacacccactaagctctcagtaagtggtagctttagtatta

SEQ ID NO: 188180 - DNA, 122 bp, Homo sapiens
aaggtgtgtcctcaatgctcccccattatgggtggccccacatacagcacttacattccccgtggccgctaggcagcctcaggccatgagctcagccaggactcctgtgcctgcccctcagc

SEQ ID NO: 188181 - DNA, 122 bp, Homo sapiens
tgcccagccttgttagagtgtgcttcttgggatctggagcctctggggtgctggcactcccgttcttggcggcagggtcaagaaactgagcaggagttggggctactgccccaggtaacccc

SEQ ID NO: 188182 - DNA, 122 bp, Homo sapiens
gaggctggagcccaggcctgtatgagtgccagggccggtttcctggggtccttggtgcaccggggcaatgaagagaggggtcagcaatgagggggccgggagacctggagcgaggggtagcg

SEQ ID NO: 188183 - DNA, 122 bp, Homo sapiens
gtcgttttccgtgagagacgtagagctgagcgacccagcccgcgagcgaggtgaggtaggcgccgggcgacgcggggccggaacgcgaagagggtggtggagtcgggctacccactgatttt

SEQ ID NO: 188184 - DNA, 122 bp, Homo sapiens
tcaatggtaaaggttcaggtcggtggacagactggacttggaaacaccttcttgcgtcctcgaaacgacgtggcacgcagccagctcacagcacccaaaggcacgggcaagttgcatcacgg

SEQ ID NO: 188185 - DNA, 122 bp, Homo sapiens
caagggcttgggctgcctgggccttcttaggctatagcaagtggaaaataaacatcaaagcggagggaacacagtctcaggcctggggtggaaactgctaagaggctaggacttcctggcca

SEQ ID NO: 188186 - DNA, 122 bp, Homo sapiens
gagggcatgagaactgtctgctgtgtgtgtcgtcattcgagacgatgcctttctgtggtccgtgatgtgttcgcgttgtctcctgctgggctgagcatgtccaaaaggccaggggcctacgg

SEQ ID NO: 188187 - DNA, 122 bp, Homo sapiens
ggctgaactacacctgctgaaggctcttcttaagtggaaataatcttcatggggctggcccgtgaaaggcatggccccagcttctccctttcacctcagaattgtcttcggatggtagccac

SEQ ID NO: 188188 - DNA, 122 bp, Homo sapiens
ggagcccacagtggatatcccaagagggcagaacggcaagagggaaggagcctgggttcccggatgaccctggagtaggatcgccatcccagtcttggacaatctacccctggagggccaca

SEQ ID NO: 188189 - DNA, 122 bp, Homo sapiens
aaaaggaaaatctaatccacacacacacagagagagagagagagaaagcaaccatcctatcgtaatgaggaaattctgacacagcaaaacaagggttaattttcaattctttctatgccagt

SEQ ID NO: 188190 - DNA, 122 bp, Homo sapiens
gtggatcccgcgggaagatcccgcacagggcaaccaatggatcacgtgccacctggttggcgacttgggagtcgatccctggaggggatcgggcgctggaggcctggggtcccactggatcc

SEQ ID NO: 188191 - DNA, 122 bp, Homo sapiens
gctggcgcagcaggaagggcagaagcatgagcatgccaccatcgtgcacgatccaccacacgtctatgtggccctccaggtagcgctcgtggttgctggggtagaaggcgatgttcttgggc

SEQ ID NO: 188192 - DNA, 122 bp, Homo sapiens
cgggcgcggtggttcacacctgtaatcccagcactttgggaggctgaggcggacggatcacgaggtcaggagatcaagaccatcctgaattccggcctttcatgcatattttaataattttg

SEQ ID NO: 188193 - DNA, 122 bp, Homo sapiens
caaccggcctagtcctgaattaaagggcctgtgcggctgttctgggcacagccctgtggccgtgctcctttgggtcctgtttggcaggaggatttgaaacgtggagacttccagaaaagaaa

SEQ ID NO: 188194 - DNA, 122 bp, Homo sapiens
aagatggaatcaggggtcagacctcagctgtgagagctgcagcctccagtcccagctgctcggggacagagctgtgtccagccaggccttgtccccagtcccccagggccgcctgtgtgcag

SEQ ID NO: 188195 - DNA, 122 bp, Homo sapiens
cacacggccacagcagcactgtcatgatggaaggtctcaaaccctacagtgtcacacacccgacagccgaccacggccacccaaaggtcccgcatccgagcagggacaggaacacaatcacg

SEQ ID NO: 188196 - DNA, 122 bp, Homo sapiens
tgcctcagtggggttacagcgctgtattctgaccacatcagtccactgaattgtctacctcgtcctaggctgggagccctctcaggccagggacagggccttatttgtctctacgtgcccag

SEQ ID NO: 188197 - DNA, 122 bp, Homo sapiens
ctgtctggggctcagttttcacacaaatccagagatccttgcagagaaaggtgcagttctcgttcaggcagcaggaggcgctgtctctggaggcttagattcattccccgccctccgcccgc

SEQ ID NO: 188198 - DNA, 122 bp, Homo sapiens
ctattctttggccttgatattcttcaccaatatgggtttgggaattctaatgtggaccctcgatatcacacccctcctctgtctgtttgggctcataaatataatggcccaaccaaggaagt

SEQ ID NO: 188199 - DNA, 122 bp, Homo sapiens
gtcagcagcaggggaggggtgtccagtgagactccaggttggggaagccgctcagggccccgagagctctcacacagtaatcgcagttatttaggaatggattaacagattttcccatccgg

SEQ ID NO: 188200 - DNA, 122 bp, Homo sapiens
caggctccaggcgcggccagggggaggagatgggaggagaggccgggggcgatggagacgcggatacatcaacagaagtttctcacctaggaatgcgaggggcgctcccgcatctcctgcac

SEQ ID NO: 188201 - DNA, 122 bp, Homo sapiens
cctggcattggcagaaccataccaaccctagtggattttagtgatgtgaaacctcaacatcgagttcccagaccagacacaggatttcaaacaacaataaaaaggcaaaaaattctatcaga

SEQ ID NO: 188202 - DNA, 122 bp, Homo sapiens
gaggttgtatatgagtgggcccggggcatggtgagtacctgaggtttgggattttgcagacggctggctggggagaacctgcccaggctgagtgcatccagtcctcaccctactttccccac

SEQ ID NO: 188203 - DNA, 122 bp, Homo sapiens
taagctttatgaggtcgccacggaaccgcaggtgagggccctctgaaactccatagctttcgccatggagctacaaactagaaattcaagcacaagcccttgaactccacatgtactcactc

SEQ ID NO: 188204 - DNA, 122 bp, Homo sapiens
ctgcgtgcccacctctaggtccgctaatatgtgcccagctctaggtccgctaatgtgctacgcgataactgaaagacagcacaagccagagcggacggccgcgggatcccgttggggcgcat

SEQ ID NO: 188205 - DNA, 122 bp, Homo sapiens
gggggtccctgagctgtgtcccgtgtctgcacagccccccgtcgacatggtctgtctccacgatggacgctctgcggggcctgctgcccgtgctgggccagcccatcatccgcagcatcccg

SEQ ID NO: 188206 - DNA, 122 bp, Homo sapiens
caagccctgatcaaatgtgagcgagattgacaatctcagcactttccagggaaaggatgccgtcccacatggcttcaggcctccgaggaagccccatcctgagacagagagaccccaaatca

SEQ ID NO: 188207 - DNA, 122 bp, Homo sapiens
ccccgcgccggactgggactgggagcaggcagcccgggcggagcgggccggtgccgaggacggccccaggcattgctctgccccgggcattgcgcggcgcgcgtgagggggatgcggcagga

SEQ ID NO: 188208 - DNA, 122 bp, Homo sapiens
tgaccagacgcccatctttcttccagtgggttacttctcccccatcagtccttcgctctgcgcccgctgacccagtcggggctggctggtggaagagggcggggagagccttctagttggcg

SEQ ID NO: 188209 - DNA, 122 bp, Homo sapiens
cagagctcaggggcgggactggaacagcagagtctcccattggtcagtcggtgatatatccggccaatggtgagcgccgttactagaagggctccaggatggaggccgacctgacttctccg

SEQ ID NO: 188210 - DNA, 122 bp, Homo sapiens
tccgtccctcctagacagaggtggattgccgcgacatttcagggaggagaaatggaggggcgaggagggcaaagacgccctactaatctcccatcttcagaacgcgtcccaccacgcccgcg

SEQ ID NO: 188211 - DNA, 122 bp, Homo sapiens
agctagcagagaagagaatgctggtaagaaggattcctgagtcctgtcttagcgaaggtccgctttgtcttttccatgcttgaactttcacagctgtacttggagtgttactgagtgaaagc

SEQ ID NO: 188212 - DNA, 122 bp, Homo sapiens
tcagaggtgatgcctgcgagcgccttaggtgggatttcagtcagaggtaaaagagaattccggaagacaattattctagccctgagttctagaatgccttctgggcatgggctcctggctgc

SEQ ID NO: 188213 - DNA, 122 bp, Homo sapiens
ggttcccataggctgcctcgccccgcgttttcctagcgggggatggcggctccccgtgtccgcatcgctgccgggccctgccaccccaaccccggccgcagtggctggaagccgtggccttt

SEQ ID NO: 188214 - DNA, 122 bp, Homo sapiens
ggcgccccctggtggtggcggggcatgggtccctaggactgcaggggacgtgggggtgcacgggatctgagaaccacaggctgagctggagatgtggcaccttcctgggataagagaaggag

SEQ ID NO: 188215 - DNA, 122 bp, Homo sapiens
gatcttagtcgtactgagggaccaaagggctgagggcgagcactggaatgacaatcccagcggtgtcatccaggagtgagcgggagagctccccgccccctgtggcgaagcccgggcaggca

SEQ ID NO: 188216 - DNA, 122 bp, Homo sapiens
aagaatgctaatgaactcgaactcggcaggctgggtttctgcgcgggcgtggagctggagcgcatgcgctcgtccgttaccataacgaccagaagacgctgcagccactagggaggagagca

SEQ ID NO: 188217 - DNA, 122 bp, Homo sapiens
gtcccagctgtatggggagcccaagagagatagacagacgtcccagctgtatgaggagcccgagacagacagatgtcccagctgtatgaggggcctgagagagacagacgtccttgctggtg

SEQ ID NO: 188218 - DNA, 122 bp, Homo sapiens
gccccagagcagagagcctctgcaccctggaaggtcctgcttgctggagtgaggggcctgcgaggaccggccctgttctcaagcccagccgtggacctgcgtgggctgcctggcgggcctca

SEQ ID NO: 188219 - DNA, 122 bp, Homo sapiens
cgacgccggaaccggaagcggggcaaggggttgtagagggaaccggaaggtggggttgcccgggtgacaatcaagctgctgcggcctccagggaggtcctgtctccccagccgggtgtcgga

SEQ ID NO: 188220 - DNA, 122 bp, Homo sapiens
agccctgggccacactggctcaagagctgttctttccatcttccttctagcgcagagggccgggccatgagtaagaccctccgagacttcctctatgcccagcaggtccaagcgccggtgga

SEQ ID NO: 188221 - DNA, 122 bp, Homo sapiens
ccgtagagaggctcttgatcggccacttggctctttcgtgtttcctggcattcgcaggcacgctgtccggtgggggttgagagagatgcctccttaccaggacgactcctgagccttggagg

SEQ ID NO: 188222 - DNA, 122 bp, Homo sapiens
ccctggaggtggctgttcccctccctcctcacctctgccttccagacgatccgcggctgtcggggtcctgcagcctcaatagcctggagagcaaatacgtgttcttccggcccaccatccag

SEQ ID NO: 188223 - DNA, 122 bp, Homo sapiens
ccgccctcccaccctaaggtctagtcttccttgcccgcgcccagagagtgggattacgggcgctgagcacagtgcaggcgctgggatggggctgagctgcaggtttcccccctctggctgct

SEQ ID NO: 188224 - DNA, 122 bp, Homo sapiens
taaatattttgtggtttagtcacttcaaaagtttccctttctccaaataaattatttgcacgttttaatttttatttatttatttatttatttctgaggcagagttttggtcttgttgcccg

SEQ ID NO: 188225 - DNA, 122 bp, Homo sapiens
ctcgtcccgcgactactttgtgtgctggggcggcgcgctccggtcctcccgctcagctggcggtctgggctgctctggggcagcccttcggtccactgctctgcatcgcgggcgccgggaat

SEQ ID NO: 188226 - DNA, 122 bp, Homo sapiens
ttgtgcttgtgttgttgtcttggatcagcttctggaaaaaatgtacttgaaagcagaaggcgtgcttcccaagcatggccacccagcacctccatgatgtcactttcagtctggcaaaggga

SEQ ID NO: 188227 - DNA, 122 bp, Homo sapiens
agggtgccggcgcgggcgggcccgggcgggggcgtccgtcgaccccgcggctgtgacccgcgctcccttgcagatgcagatgcgtttcgacgggctgctgggcttccccgggggcttcgtgg

SEQ ID NO: 188228 - DNA, 122 bp, Homo sapiens
tagcccggagcagagtgtggaaatagtccctacacagaggggtctgctgaagttagtcatcgagttagattagaatggaaggcaggaggggaggaactccgggtttgcgccgcagctgcgtc

SEQ ID NO: 188229 - DNA, 122 bp, Homo sapiens
gagggctgtggcgagcgttggaggctggaggcgagaggcaggagaagcaggacaaggaatcgggctccagcagtagcttatatattatgagagagcatgggctgggcccagtcctggaaggt

SEQ ID NO: 188230 - DNA, 122 bp, Homo sapiens
tcatgtaatcttgaacaagcccaggtactctggctttaattgccttgtgagtaaaatagacgatggtactaagtgattatttaaaatcctttccaattgtagaagtccaaggttgtgtgaaa

SEQ ID NO: 188231 - DNA, 122 bp, Homo sapiens
ttgtctgcaggaaggcttttccattgcaatattggcagggagaagtgagcactgagccttcgggttgcttgagtttccaaggcatgctgactttctactgccatttgtcgtcctcggacaca

SEQ ID NO: 188232 - DNA, 122 bp, Homo sapiens
gataccttcttctccatctcggaggcctctgtctgagccttgtgctcccaccctgcatgtcgtgaagcaactcacttccctgcccatgtggcctcctcggcctggaactccttggccttctt

SEQ ID NO: 188233 - DNA, 122 bp, Homo sapiens
ttgttccttcctttttcctgatggctggaactccagcagccaccttggaccacgaggccacgtgtgaatgatggcagaaccactataccacccctctgaagttctatgatatgagagagata

SEQ ID NO: 188234 - DNA, 122 bp, Homo sapiens
cccatggcggccaccggacaggtgaggatggcgggggccatgcctgcccgtggaggaaagcggcgttccgggtaagcgacctcagcgtttccaggaattggcttaataaatgttgagcaatg

SEQ ID NO: 188235 - DNA, 122 bp, Homo sapiens
ggtagatctggtccgcgtagtagtagatctgcaaggcaagcgcggggctgggcggctgcccggaggaggcggcctcggcgccaggacccacgcccggcgccccaggacctgcgccccgcgcc

SEQ ID NO: 188236 - DNA, 122 bp, Homo sapiens
ctcatggggcggaccctgcgaatagaccgcccccgtataccccgcgctgtctgtgcgcgccggaccgccaaaccgagattagcaaggaccaggaccttaatataaacccagctccccatttt

SEQ ID NO: 188237 - DNA, 122 bp, Homo sapiens
accgcgaccagagagtctggcgccagctgccggcaacggatagaggggctgtgtcatagacgtccgacgtgtctggtaaggccagagcgcctttcctcggtcctcctagacatggtgtccgc

SEQ ID NO: 188238 - DNA, 122 bp, Homo sapiens
caaccagcatacaacttgcactgaccatccccaggttcctgcagaaatgcttggaacctccgagagggaaggattcccagagcagaaataagtttcggtgcttgcttttgtagacgctccct

SEQ ID NO: 188239 - DNA, 122 bp, Homo sapiens
cgaactcagcactttggcagagtccaaaatccgccagcgaacttgggtgctagagttcggcgggaagaaaaggtgactcagagatgcagcacatttttctggcactttccaccgaggatact

SEQ ID NO: 188240 - DNA, 122 bp, Homo sapiens
accctccttggggctgtaggaaggggggaaaatctttctacctttctaggttctccactgcggcccttatcacaaagctcggattggcaaaagaaaaatttagtaacatgtacatcttatat

SEQ ID NO: 188241 - DNA, 122 bp, Homo sapiens
ggtatctgagagttcagagcaggctggaggggcggagcttggagggacgctggcggcccgcgcctccggtaacctagcaaccgacgccctagcaacgcgagggggcgggaccgagggaggaa

SEQ ID NO: 188242 - DNA, 122 bp, Homo sapiens
gcggcggcagggcaaggcggccaaggcgactctgtgggccaggaacagaagccagctcatcgctcactcccggcaccgggaagcatttcgactcccggcccagcgtgggcgcgagccgccgg

SEQ ID NO: 188243 - DNA, 122 bp, Homo sapiens
caccctcgctacggtcgggaagggcctgtacgcctctagcgacggcagaaccagtagatgcggatgcagtttccggacgagtcatattgcagaagacacatggtccgaaccattactgatag

SEQ ID NO: 188244 - DNA, 122 bp, Homo sapiens
catcccgcaccgggggcggcggccgctaggtcggagtggtggctcggggccgggggctagcggccgccgcggggagctgggctcggccggaggggtggcggtcgctggggacctggcggagc

SEQ ID NO: 188245 - DNA, 122 bp, Homo sapiens
cctgagccagaccgggcatctctcctcggtaccaggtgagggtagcccccttgtccctcccgcgactctcgttccacactgtaccccaacctcgctgcagggcaacggccccctccccactc

SEQ ID NO: 188246 - DNA, 122 bp, Homo sapiens
gctggtggcagagcctgagctggcccaaggttgcagggtggggagagattcaaggcatagcggggactggtgacctcagttcccagaatgtcccagcctggcctcccggtccagccagcaag

SEQ ID NO: 188247 - DNA, 122 bp, Homo sapiens
acggaggtggtcagtgacacgcctaatttcgttggaaactagaattacgtgcggagatttcgtcgaatagtgcctattcgcgttccgagggcacatcttatgcatagttagggctatcagct

SEQ ID NO: 188248 - DNA, 122 bp, Homo sapiens
gcgctgtctgggggctggcccagggggctggagcctggccctggctctgggctgttgaggcgctgggtgcagaccactttcccaaagcacttggccttgggggccatgccccacctggggaa

SEQ ID NO: 188249 - DNA, 122 bp, Homo sapiens
ccaataattcctacatggctgcagctccaagtgctgtctgtgtcctactcaagctccctccgactgtcaggggtgggaggagccagtgccgcctgcctgcccatgtacacacacacacacac

SEQ ID NO: 188250 - DNA, 122 bp, Homo sapiens
gacactctgtcttggccatgcgtcagtcacctgaggaataaacaaatgaacaagcaaatacgaatcacaggccctgccaccagaagtcacaacccagatgctcagcgagtgaagcccagcca

SEQ ID NO: 188251 - DNA, 122 bp, Homo sapiens
cttcctccagtaatgaatacagtcctggccagcaaggcttgccagagatgctgggcttggcggagagaggaattccatgtcccttccctatgactctgcagctgaaatgttactgggctggt

SEQ ID NO: 188252 - DNA, 122 bp, Homo sapiens
tcctctgagatgtgtacccaaggcctgctttgagatgtgagaaccgtcagtcgggcttggcgggggccgcgcctccatgctcccaggcagcacacattcctcagtctcgactctcgcccgtt

SEQ ID NO: 188253 - DNA, 122 bp, Homo sapiens
gtactgtatcccatgaatataagtgaaaagtatttctaaggcagtggtcacaaacttgcccggtctgaggaatcacctgaggcatttgttaagcatgtggatttccataccctcgggagatt

SEQ ID NO: 188254 - DNA, 122 bp, Homo sapiens
gaccctccgggggggatctcatagccctccctgaagcgggagccggtggccaccagcctgcgatccacgtggagccagtacctgccctgggtggacgtccagatgacacagatgtggtgcca

SEQ ID NO: 188255 - DNA, 122 bp, Homo sapiens
aatttttagaacaataactaggggaaactgtttacttgaagggccaagggtagggggctgcgtttggtattttactgagaccccgtccattgaaaacattgtttctaacgaaatcacccagc

SEQ ID NO: 188256 - DNA, 122 bp, Homo sapiens
tctaggggcgtgcgccgcgggactcgagtcgggcgtatctctccgcgtggccgacgcgggcgtgcgtagtacccttcgccgcccgtcgcccttgcggccactgctacgcttctcttctctgc

SEQ ID NO: 188257 - DNA, 122 bp, Homo sapiens
ggagtcactctgattccaatgccactgacaatgataagcacttgccagcaaagaggtgaacgcatggatttaaggcacttgaaatatctcagtgtaaaagcaccctgtgcatgtagcaggac

SEQ ID NO: 188258 - DNA, 122 bp, Homo sapiens
ccttctgaagacacgaagaaacagctgacgcgagaagacagaaaacaggtgctgtccgcccggctctgggtctggagtcacccaactggtcgaaatgcatttgtgacggctccgtttcttct

SEQ ID NO: 188259 - DNA, 122 bp, Homo sapiens
tatgtttacatggctacagggacaggatagctagttcacatgaatgccactggctaaatacgtccttgccagtattgggagaagggctgctgccggcggtggtgagggtgatgatggtagcc

SEQ ID NO: 188260 - DNA, 122 bp, Homo sapiens
ccgggagcgcagggcgggcctggaagagctccgccccaaggggcgcggccaccccggaggcgggcgcacggctgcttctcattcattgtcttgacaagagcatcttcagcgggcgagtcccc

SEQ ID NO: 188261 - DNA, 122 bp, Homo sapiens
agtcagaatctgattggtccagctggatcaggtgtcctctccctgtccaatcatcaatgccgagagggattacggagagaaaaacatggctcccaccatcccattgctgtggctgcttgggc

SEQ ID NO: 188262 - DNA, 122 bp, Homo sapiens
aaacactgtaaatctttagaacaaagcttgctttattgcaggactgtatgggctgcccttcgggaggaaaaaaaatctgccaaagcaaacatttggtggacctctgtgttttatgaaagcca

SEQ ID NO: 188263 - DNA, 122 bp, Homo sapiens
tgcggtgtctgtgacggtgagctgtgcggtgtctgtgactgagctgtgcactgtctgtgacggtgagctgtgcggtgtctgtgacggtgagctgtgcggtgcctgtgactgagctgtgcggt

SEQ ID NO: 188264 - DNA, 122 bp, Homo sapiens
caccttctctggagtgtgcagatgcgatctaggtgtgtccacccgatgggagctgcgggccgggcagatgctgccccagtacaaagctgatttggacctggggcctctggacttccctgatt

SEQ ID NO: 188265 - DNA, 122 bp, Homo sapiens
tgagtgggtcacatcacattaacagccctagatgaaacagacacaaatgactagcagtttcgataaaaacaaggaaaactgtttttctttctttaaaatctttattaaatcaaattaagctg

SEQ ID NO: 188266 - DNA, 122 bp, Homo sapiens
gctggtcctcccgggccacgctctttcgtgacagcacagagtttttattttctaaccttccgtggaaatctgggtcactcaaataaggaggatgaggcctatggtctcagggagccgcgtgg

SEQ ID NO: 188267 - DNA, 122 bp, Homo sapiens
gtgagtaattgaaacaatcagtctgaagtggctcgattggatcggttagaccttggccttcgttttctcttgtgtgccttgtgtgtgcttgacagaaggccacgtactgggggtcagttatc

SEQ ID NO: 188268 - DNA, 122 bp, Homo sapiens
aaggcccgaggcctgccagcagccgtatcaggtgggaggcactccgttctgactcccacacgctggctgcaagtgctcctctgcttctcgggttcagcctctgagccacctgggtggtaggt

SEQ ID NO: 188269 - DNA, 122 bp, Homo sapiens
ttaaatgccacagaacctatcggctctttgcagtggtctaccatcacggcaacagtgcgacgggtggacattacactagagacgtcttccagatcggtctgaatggctggctgcgcatcgat

SEQ ID NO: 188270 - DNA, 122 bp, Homo sapiens
gcagactcgggctactatgtgctggagctggtgcccagcgcccagccgggggctgcaagacgccagcagctgccagggaacgccacggactggatctgggccggcctcgacccggacacgga

SEQ ID NO: 188271 - DNA, 122 bp, Homo sapiens
ggcgccccctcctgcgcacccggagggagaggccgcgcgcgcccgcccgctctttctgcgcgcggccctccccgctgcccccgccctcgcgccctgtttggagggagccaccctgacgtcgg

SEQ ID NO: 188272 - DNA, 122 bp, Homo sapiens
ctgacaagatgggtggcaggcccttccctgggggtatcgaggtagggacgtttgtggctacgtctgtcctagaggaggagacgatgccaggggagagggagacgcagacactgggactgggt

SEQ ID NO: 188273 - DNA, 122 bp, Homo sapiens
cgacagtaaggctgtgtggggggagctgggacctaagccgcgcgcacacccctttctctgcgtctggtggaggtgcacagaggcttttgagtcaggcccaagcgcagccaggtgacctcccc

SEQ ID NO: 188274 - DNA, 122 bp, Homo sapiens
caccttcacgatgtagcggtcgtcgtagcagaccaggcgcttgccgtgcaccttgcgggacggcgtgtacaccagcaccgcctgccgctccagctccgccagcacgtgctgctctgagggcg

SEQ ID NO: 188275 - DNA, 122 bp, Homo sapiens
cgtggtgttctgggcctatctgtgcgtctctgcgcgctcaccccagcaggctggatgaggcgccttctctctggggctcccgcggtgtcctgggcctatctgtgcgtctctgcgcgctcacc

SEQ ID NO: 188276 - DNA, 122 bp, Homo sapiens
ttgatcctggcgtccccccaacacaggagcgtgcctgcctgctcacagaagctgcctatgcgtccccagcctgggctgacaggaccaaggtctcagcacacactggtgcagagagacatggc

SEQ ID NO: 188277 - DNA, 122 bp, Homo sapiens
ctcactagggagtgtcagatagtgggcgcaggtcagtgggtgcgtgcaccgtgcgcgagccgaagcagggcgaggcattgcctcacttgggaagcacaaggggtcagcgagttccctttctg

SEQ ID NO: 188278 - DNA, 122 bp, Homo sapiens
agctccccttatcaagctctgcacctgcttaatgaaggagagggcgccttctctaatgcccgcatgtatgggctattgaggccctgatagaatgctagcctttctgccatttggttactgag

SEQ ID NO: 188279 - DNA, 122 bp, Homo sapiens
catgctgagggagtagatgtaggagatgaagtaagccatcaaggatgactgctagacttgcggatagcaagtggtagagagatgtcccatttactttgctaaggaacacttagggaggaata

SEQ ID NO: 188280 - DNA, 122 bp, Homo sapiens
agctcctttcctccctgtccattttgctgatgcactcatgttgcagactagcccagcaaccgccacgtccacacccactctgacttggcaaaggaacatttgggaaaccccctttccatatt

SEQ ID NO: 188281 - DNA, 122 bp, Homo sapiens
aacaaacacaccaaaaaaactcctactagctgaggtcaaaactgcacaggtggccgggcacggtgcctcacgcctgtaatcccagcactttgggaggccgaggtgggcagatcatgaggtca

SEQ ID NO: 188282 - DNA, 122 bp, Homo sapiens
tcctggcaatggatggaaatcaggtcacagagatccctaagcttgccaggctctcagacacgcttgggagacagaatggaattggaaggagggatctgaagaggagggaggggatccgtgtt

SEQ ID NO: 188283 - DNA, 122 bp, Homo sapiens
caccagtctcgctttccagggcaggcggcggccaggagctacagctgtgggctgcactcccggcgtggagtctccttcctgcccgcgcaggccccggcgccccagcgaaacgctccggccgc

SEQ ID NO: 188284 - DNA, 122 bp, Homo sapiens
ccacaggaaggccttggagatgagctgtgccatccagaatcagctggcccgcatcctggccgagtttgagatgaccctggagagggacgtcctgcagccactcagcaggctgagtgaggtga

SEQ ID NO: 188285 - DNA, 122 bp, Homo sapiens
aaccatgttgcccagtgggttttctgtgcctttgggtgcggaccaatgaggcgcgtggggcgggacttccgcttcgcctaggtgttgtcgtccctgctagtactccgggctgtgggggtcgg

SEQ ID NO: 188286 - DNA, 122 bp, Homo sapiens
gcttgaccaaggagggaactggggctcagagggggcagtcgccggcctgaggactcgaggcgcctggatggggacccaggtcggcgcgatctcccggctccgccagcgaggaaatttcccgc

SEQ ID NO: 188287 - DNA, 122 bp, Homo sapiens
cctcccttacatggaggcggccccagcgcccgtcctcgccctctccccggcgccaggcgccgccgcacgtctcccagctcacaagggcgcacctgcgcccgcccactgtgctctcgccgccc

SEQ ID NO: 188288 - DNA, 122 bp, Homo sapiens
ttggagctagacatgaacactatttaaaacctatacctatgattctgatccagcttctcccggtggcagtagtacagaaattctagaaagtaaatctcacgttcagataagattttcaactc

SEQ ID NO: 188289 - DNA, 122 bp, Homo sapiens
ttattttctttggttctcagtttccccagagaataggaatctagtaagtaacccagtaagcgcagcagcgtttgctgagtgcttgcgcggaccgtatattgcagtcctcagagcacagcccc

SEQ ID NO: 188290 - DNA, 122 bp, Homo sapiens
gtggaactctccttcttacccacaacatgtttgcactgtcttctctcccggaatatttcccgcaacaccacttttctgattcaccaatgtgggcagcgattcctaattgccagagctgccct

SEQ ID NO: 188291 - DNA, 122 bp, Homo sapiens
ctcatggaccagcctgtggccggccatgctcactccggggcaatgtgtctccacagcgaccgtggcagccatgtattacagctactacatgctaccggacggcacttactgcctggcgccgc

SEQ ID NO: 188292 - DNA, 122 bp, Homo sapiens
gtcagaggcacctgccgcacaagacctctttggcgctggcactgggcaagcagggaccaccggcgctgttgtagctgggggagtggttcgtggcccagcgaggagaggggccagggcttctt

SEQ ID NO: 188293 - DNA, 122 bp, Homo sapiens
tagggaccccggtgggctgccgggtaccctaaacttggtcgggggtggtgatgtcacagacgcttctctttcagcgctaaccggtggccttgaagggatcctcgaaaagccttaagcgggga

SEQ ID NO: 188294 - DNA, 122 bp, Homo sapiens
tcttctgcactcagcaccgtcatggacacacaacgcgggtgtcctgagatttgtggaccccggagatgcaaagacgatggcagcagcgttaacaactaattacagtagcggcgaccgcgcca

SEQ ID NO: 188295 - DNA, 122 bp, Homo sapiens
aaccccagcccaggcggaagctccgccccgtcctggccccgcgggcggcgcagaccgtgacgcataccccactattgcgcacctggccagcggcgcacgctacgcgaacgtcagcgcgcccg

SEQ ID NO: 188296 - DNA, 122 bp, Homo sapiens
tgcaaggagagatcgatcgagagtcaggcaaaacggaagcttgtgaaaccaggaagtggacgggaacctagtttggccagtgggatactgctggttttgacaacgaggaacagaaactgaag

SEQ ID NO: 188297 - DNA, 122 bp, Homo sapiens
ctcttccgcctacccaacaggacaggactcgacgcctttctttcctggcagcaagaggtccgttgcggacaagaccaaagtgagcagctggtttcccctacgtgtccttccgggcctgggcg

SEQ ID NO: 188298 - DNA, 122 bp, Homo sapiens
cggcgcggctccacgcccttagcgctgggcgaagccgggcccgggtgtggctgcctgccacgcgcgctgccataggatccaccaacgtttcgcctggtcgatcgccatttcgcctaacgggc

SEQ ID NO: 188299 - DNA, 122 bp, Homo sapiens
aagcccgccgagtgagcgccagggcgggattctcccacaaattcaaggtctgtatctccgcggaagccgtgcctatcggtcccccgagtgctgaaggctcccacgaggggcaggccagcccg

SEQ ID NO: 188300 - DNA, 122 bp, Homo sapiens
cataggatgaaaagtgtggggggaaggattgcagagacagagaaggacatggccaagaggcggagttgctgtgacccttgttaacatgactgaactgcagtcaatcatttgaatacctactt

SEQ ID NO: 188301 - DNA, 122 bp, Homo sapiens
ttagaaatagggttggtctggaacctaaggggcggagccgacgcgtagagccgctttgcgcgtgcgcatcacctaggcggttagatttgaatacttcactgaggcgagccgggcgttgtgag

SEQ ID NO: 188302 - DNA, 122 bp, Homo sapiens
gcgcgcacgctcacccgcgctgacccggctacgctggacccaggtgcggggacccaggtgcgctggacccaggcgtgcgccaccgccacctcctgcgcctacaccccgagagcggccgccgc

SEQ ID NO: 188303 - DNA, 122 bp, Homo sapiens
cttcaggcgcggcccctgtcgagtcacccgacagactcgtaggtttgttctgtttttcagcgccctgcgtcagctgcctgcacaccgggcccagctcagctgtgcatggctccagcaccatt

SEQ ID NO: 188304 - DNA, 122 bp, Homo sapiens
agtggaagaagtgtagctgggtgatacagcctagaaaagatatagccctgcgactgcacacgaggtttacgagcagcttgggcagtgtcactgaagaataagaaatatccagacaagaaagg

SEQ ID NO: 188305 - DNA, 122 bp, Homo sapiens
tcctcgctagagcccgaaagtggctgctgagagcaccttctaaagctgggtgcggctgagcgggacgggagggtgcgccccagagactctgggcatctccttcccgacgcgagcagccctcg

SEQ ID NO: 188306 - DNA, 122 bp, Homo sapiens
gggaggcggctcttgagtacgagctccgcctcccgccttggccggagaggctggtccgcccggctctgcacgcgcctggcgctccacccccgccaaatcgaccacaccgggcgctggaagga

SEQ ID NO: 188307 - DNA, 122 bp, Homo sapiens
catgggaatctccaagatcattctgacttgaagcaacatcctcaaggttaagactcaacacgcccatgctccctgatattccatggaaatagttaccctttttggaaccattatcttgggtg

SEQ ID NO: 188308 - DNA, 122 bp, Homo sapiens
ttcaaagccttttacaagctgcaattcattaaacacaataatcattagaggccagtggaccgacctctgcagggagagaggccaagcccccccaccccaccctctttctctttgtgttccca

SEQ ID NO: 188309 - DNA, 122 bp, Homo sapiens
gcctgggagaggccaggcctccccggactgctagcctgcttttcctggggtccctggagccggaggaagaaccaggatgttgctgcctgcagaagctcagctcagggtgagtgctccccgac

SEQ ID NO: 188310 - DNA, 122 bp, Homo sapiens
ccccattgcattatttaaagggacactagtttattcggatggagagctcagtccaccccacgtcaagcttatgaagcccatttcctggcccccttctaggaatgtcgggaggagggtgtcgc

SEQ ID NO: 188311 - DNA, 122 bp, Homo sapiens
ataggaacaaatgcacagagagcactgtggctgcccccgccccccttccccagggctccccgctccagctccaggacttgtttatggcctgggggaacagggaaggacaggagccaactctg

SEQ ID NO: 188312 - DNA, 122 bp, Homo sapiens
cacccgtcatatctggaacccagaacgtcagcaccaccgtgatgccttctctccctcacccgttccaggtctcatcaacagacccaggtggtaacagcgctcccagctcctctcttctctca

SEQ ID NO: 188313 - DNA, 122 bp, Homo sapiens
tttgcctctttcttggaacacaggatagaggtcaggcttctgattccggagtcagatggccgagttcagtcttggccatgccactcctagctagatgaccttgggcaaatcacgtgacctcc

SEQ ID NO: 188314 - DNA, 122 bp, Homo sapiens
ctttatcactgtggcatgatatcactgtggccgtccacctgggagccgatttatcactgccgtggcacagctcagaaaaaatcaggtgaaagtctggtttctgtaaaaggattcaccactca

SEQ ID NO: 188315 - DNA, 122 bp, Homo sapiens
ccctcgccccactgctatctgcatttagtgccttctcctgacttgtctgattcttccactcgcatttcttctcaggtaccagggttgcaaatcttggccttaccccctacctccacccccca

SEQ ID NO: 188316 - DNA, 122 bp, Homo sapiens
aacttagaaggggctgctgaggggtgagccccttcccactcctagtacctttcttttccccgggtggggttgggaggtcataggtaatgaccccaggatcccgtttctccctcttctctggt

SEQ ID NO: 188317 - DNA, 122 bp, Homo sapiens
ccacggccctggagtagctggtgcggctgaaggagctggcgcccaggccgtagctgaggccggggcttgtgaggcccccacaggccgagctcagaccacttgcatagccgctggtggtcttc

SEQ ID NO: 188318 - DNA, 122 bp, Homo sapiens
tcattcttcgtgccccagacatacctgtacatagctttagaataacaacacctgagaacacgttggcaacaatatagagcaacagggactttcctactctgcgagtgtggacctgaattatg

SEQ ID NO: 188319 - DNA, 122 bp, Homo sapiens
taaaaacaagcttcatctccgataaaaataaaacagtgtccttcagatcttactgcttcgcgactttatgaattggaatggaaacgttgttgccttttgggagattgacctcagctgttttt

SEQ ID NO: 188320 - DNA, 122 bp, Homo sapiens
tggctgtgcctcagtttctctgttgtgccttgacaaggccggtctgttccttgccctccccgccccgcaggcccgcaccgccgccatgatgtgcgaggtgatgcccaccatcagcgaggatg

SEQ ID NO: 188321 - DNA, 122 bp, Homo sapiens
cctccttctctctgctttcccaccagccctgtagatacggagccagcagtcgggctagagcggaggctgagggtcgcggttccaagggcggtctctcgccccgggtcaggccccaccccgcg

SEQ ID NO: 188322 - DNA, 122 bp, Homo sapiens
ccgcctgtctcagcagctgccctgggacgtctttctctgacttggttttgaggccagccgcgtgctcacactggccttacagaaacaggagacgccgtcctcggccgtctggggtgggctgt

SEQ ID NO: 188323 - DNA, 122 bp, Homo sapiens
aggctggtaaagaagacatggcacagcttatgaatatagagtaaagtggcaccttcgatgcgaagctgacgaattgcagtatgaacagcggctgccctgtttctcaaaaatagctcacaggc

SEQ ID NO: 188324 - DNA, 122 bp, Homo sapiens
tctcaggctactgcacctcgacagatgctggcccatgggtagcagaagcagaggcagctacgcggcaggggtgggcgtgagcacagcgtgcagggctccttccgctacctcttgagagcaga

SEQ ID NO: 188325 - DNA, 122 bp, Homo sapiens
tgtataaatgagcagtgagatattcaagcacagcacacacacacttattaggacagctgtcgtgagagttccatgctcgtttccttctggatacatcagcaactcactctgctatgatcctg

SEQ ID NO: 188326 - DNA, 122 bp, Homo sapiens
aattttgacttgtaagcaagtatttatctagcaaatgctttttagagagcattttttcctcgtggtaaaatgaggaattaactaagctggccactgagtcctgtttaccaagctatataagg

SEQ ID NO: 188327 - DNA, 122 bp, Homo sapiens
attgtttgtaaaaggtataattatcctgctaacgctgtacatatggctcgtgcctggactcgctcgtgcctagaaagagtaaagccatgtcgaaactgtctacgtttccttgagtgtttttc

SEQ ID NO: 188328 - DNA, 122 bp, Homo sapiens
cactgatggtgcagaacacccagacagatgcccggtagccgctcacaggggccgcctcaccggtggtcgcctcctcgctgctgggttgggatttcagctttaagctcagagggaaggtggta

SEQ ID NO: 188329 - DNA, 122 bp, Homo sapiens
gcgcaggctgagccggctgcggctagggctgcgaagagttaacgagggaccgagccccagcgccgcgggctccccgcatgctccctccgccctcccgtccccaccctctcgttttggcaagg

SEQ ID NO: 188330 - DNA, 122 bp, Homo sapiens
gaatggtctaaggacacatggtaaagcaatagcagagcagggtacacccctggactcactcgtgtggagttcagtgactctctgggtgatcctccctggtgcctgggacccagctctatcag

SEQ ID NO: 188331 - DNA, 122 bp, Homo sapiens
gaccctgaggcccagggcaggggcggtatccccagggtcacctgcggcccctcagtgctgcgtggcacctccacgtggccatgtcgcttcctgtgggccgcagacacgtgcaggctctccgg

SEQ ID NO: 188332 - DNA, 122 bp, Homo sapiens
cctcattgccctatgccaggccaagccctggggacccaaggaacaatgaggccggccccccgccattagggaaaccactgggaaacctggtattttcaagatgcttgcaaatcttactgggg

SEQ ID NO: 188333 - DNA, 122 bp, Homo sapiens
gagtgcaagaagctgtgcaggctctcctggggaggggagtgagatgctttgtatgaagcgcgtgcctgcctgagtgagccccatgtagcgtcagtcccattagcacgcacgcacctgtgaca

SEQ ID NO: 188334 - DNA, 122 bp, Homo sapiens
tccctgattcccctcacagaatgtgtgacagggctgtggtttgcctgcttggttggtcatcgctgctgctcaaaccctgtggggagggggagcacacagacggacaggtgcaggagcccaag

SEQ ID NO: 188335 - DNA, 122 bp, Homo sapiens
ggcgcgggggcgcagggtacacatccttgtctcagctgtcccacatggcagcagtgagcgcggacttcgctcctggatgcgctgccctggcctccacctcggtcccggtccctactgattct

SEQ ID NO: 188336 - DNA, 122 bp, Homo sapiens
gaaggggaccagtagacggggtggattcgaggtggggacatgggacgcagcggtcggagccgcctggaggggtacccggtggtcccgatggagctatcatctttgaggtattgatgaggagg

SEQ ID NO: 188337 - DNA, 122 bp, Homo sapiens
aacccttacttagctcccgtgcccactgttggggcgaccccaaccccgtccgctcccgtccgtccctgtctgcccctgcgccttacccagctccagcgccttggaggtgacgcggatcttgc

SEQ ID NO: 188338 - DNA, 122 bp, Homo sapiens
ccgatgattaacaccaggtcggcatgctgagagaaaaacgacacagacgcagtgagcgcgcggcatccggtttgccggcacatcctaatgagcacgatggtcaaatgccctgggtttgccat

SEQ ID NO: 188339 - DNA, 122 bp, Homo sapiens
ccagtctggcttccgagcgccgggcccggggctccacgctgagagctgggcggctcgagccggcgccgaggcgcgcggctgctcctttactagatcattaaaatactttggaaaaccccaaa

SEQ ID NO: 188340 - DNA, 122 bp, Homo sapiens
aaagctggccctgaatgaggattaaacttaagagtgaaaaaacttgggctgaattctaggcgtggagcccatgtgcagaaaatctaagactgtcctaccttcaactaatagagttgaaaaca

SEQ ID NO: 188341 - DNA, 122 bp, Homo sapiens
tggtatgcggccaagaacattaaaggtcaaattttctaatctgaaagttctacagctaaacgtagaactttctaggctctaaaactttctgagattatacaacttgtttttgtgcttctact

SEQ ID NO: 188342 - DNA, 122 bp, Homo sapiens
ctaaatgttcttaatatgaggctgggagcagtaaccagcctcataattaagaagctgtttcgaaatgtaggtgggatttttcattgtcacagtgactgggggttgctacttatatttcttct

SEQ ID NO: 188343 - DNA, 122 bp, Homo sapiens
cttcaagatccgaaccatcgagctggatggcaaaactatcaaacttcagatcgtgagtgtcgctcttcccaaaatccccagtacagaggtatccaccttgggagggaagggactctgggact

SEQ ID NO: 188344 - DNA, 122 bp, Homo sapiens
ccagataaaaggttagcctggtttttcatctagctgtgtctccctcagaatcaaaactatcgtcctcctcagtgctggatcgagtcctttcatctttaatttgaccaaaatggaaaccagga

SEQ ID NO: 188345 - DNA, 122 bp, Homo sapiens
tgaatgtgccacggcagtggagatattctgcccttctagctcttctgtatacaagcagtgcgccctggttctcagggccgtgaccaccaccatgaccggcagacttcagggcggtccgtccc

SEQ ID NO: 188346 - DNA, 122 bp, Homo sapiens
acctgcctcacacccgggctcatcttttcatcccacacccaccacccccctctccgttcacggtgtcccgggaggctgcgacctgcgtagatgatttagcagactgcccctgcccatgctcc

SEQ ID NO: 188347 - DNA, 122 bp, Homo sapiens
gatagggagacccagcttccccttgcagctggtcataaatggagaccaggctctagcactcggctttcacaaggtattgttaggtcagcaaagccatcaattaggctgtctgaagttttatc

SEQ ID NO: 188348 - DNA, 122 bp, Homo sapiens
acttgctgctgtagtaaggatattcttgtattgtggccttagtgtattacatcacccccacgtcagacttgagtccccctggttggtttgggtgagtcagttcagtattaagctggcattct

SEQ ID NO: 188349 - DNA, 122 bp, Homo sapiens
ggctggtggatcacgtgcggttaggggctggagaccggcctggccaacacagcgaaaccccgtctccaccaaaaccagtcaggcctggcggcgcgagtctgcaatcgcaggcactcggcagg

SEQ ID NO: 188350 - DNA, 122 bp, Homo sapiens
acttaggtcaattgcggtggtcacttgaccgcctgtgaggaggcggcgcgtggggtggatcggactgggcgtggcgggggctcaggaaggagggtggccctaccccagcgggctcggctcgg

SEQ ID NO: 188351 - DNA, 122 bp, Homo sapiens
aaggacgggctcagatcccgccactggtgataagcgggacccataggaccgacgtgatcgcggccaggccctgggtggtttacctggacttttacctggctgccttttctctgcacccctcc

SEQ ID NO: 188352 - DNA, 122 bp, Homo sapiens
tcactttcactttcacttttcatttttcaaatagtgctgaataatcctccctgggagacacgtttcctgtttgaaagcttctgaaatgccaaaatcctttaataggatttaaagaacaaaat

SEQ ID NO: 188353 - DNA, 122 bp, Homo sapiens
ccgctcccgcggtaaacttgactgtgtcctcttcccccgcagccgctgcagagggagcgtcgcgccggggcggagtgcgggcttgcgcggcaagtgcgcgccgaggtgagtgcgggcggcgc

SEQ ID NO: 188354 - DNA, 122 bp, Homo sapiens
cttctcagccagaggggagacgtacagagggaggtcacacccaggggaaaccacaccccacgcctctgcctgcagcgactcttaacacacctggcctggggattctcaaatctgttcacgct

SEQ ID NO: 188355 - DNA, 122 bp, Homo sapiens
tcttcttatcactctctaccccttcaaaaaggcaattgattagtttcagcttttccaaaccgagatccgatatgtttttcaggatcaaacgtctttgagaagtccagagagcaatgtgggaa

SEQ ID NO: 188356 - DNA, 122 bp, Homo sapiens
tttgcggggaatttgttaaccaaacaaggattgactctcgtgctccagttcagcatttgccggcaacttgagctgcagagaagtaaagagtcagctaaatacaggattatgaaacaaatagt

SEQ ID NO: 188357 - DNA, 122 bp, Homo sapiens
tgctcacccacgtgcttctggacacttgcttaccaaagtactagtttgcatcacgtgacacgactagcaggccccctccgctcatgtatgacatcccaaagatgcctgattattttcccttc

SEQ ID NO: 188358 - DNA, 122 bp, Homo sapiens
cttagggttaagaggaggttttccattcgactgtgttctagagaggatttcagtcaagaccgcggttactctaaccctatctctacttaaaacaacatgccggtgtggaagtgcctctctgg

SEQ ID NO: 188359 - DNA, 122 bp, Homo sapiens
gggcacttagccgtgcaggagcaatctcaagccgttagcccaatcgggagcggcaaggggcgcctcactggatcaggagcacagcagacaccctgccggatccggagggatggaagtcagcg

SEQ ID NO: 188360 - DNA, 122 bp, Homo sapiens
atgcgcctgttaacctctgggtagcgggtgccacggtaggggatgcgctgctctatgacacggccggtcagtgaagagcagtctttcagctcacatagtcgcccaaagaggcggatcagctt

SEQ ID NO: 188361 - DNA, 122 bp, Homo sapiens
acatggctgcaccggggtgagcctcccacagggccccaggcctgctccgggaatgcaggccgtgtgtaggggggtctcactgaccgctcggcagacacctcctgttggccctgccccacctg

SEQ ID NO: 188362 - DNA, 122 bp, Homo sapiens
atgctgcaggggaagccaagacagcagagaaaggaagtagctatgtgtagatgccaaggtcgggctgttccatcaaaataagaccaggcctttatgaaccactgccaaaatatgaatttcca

SEQ ID NO: 188363 - DNA, 122 bp, Homo sapiens
tggaggggtgaacacgctcgtcatcctagctggagcaagggcttggcagctgtgcacatgcgccaaagctcatcgaactgcacgctttacacacgtgcggcttgttgtgtctcacaacatgg

SEQ ID NO: 188364 - DNA, 122 bp, Homo sapiens
ccaggtccaggtcccgccctccttcctggtacctcacccgccgccgcccccgaatcccagcgcacctcacacagcagccctgactcttgcaggttcaggaggcagcacaggaacagctgtgg

SEQ ID NO: 188365 - DNA, 122 bp, Homo sapiens
agcgtggggggctgcgtcaagtcttggggagcctgagcagtcccagaatggggtcctctccgctgactgctttccgcttcccagagccgcccccgaagtccccagcccctggagtcctcggt

SEQ ID NO: 188366 - DNA, 122 bp, Homo sapiens
gctcaggcagttgatgaatccagcaggctgaagtccttgtcactgtcccagatgccaacccgtgtggccctgcaccctctcctgtcccgggacccacctacctctttcctgctctcctgcac

SEQ ID NO: 188367 - DNA, 122 bp, Homo sapiens
gcactgccccgggacgggccgctggatgagccaggcctaggtgtctacaagcggtttgtgcgttacgtggcctacgagatcctgccttgtgaggtggaccgccgctggtacttctaccgtca

SEQ ID NO: 188368 - DNA, 122 bp, Homo sapiens
gaacggaacccggagggtccccggggaccagcgagagtccagggcagggagccagaggggcgctgaggaccgcacaggaccaggcggccccgggtagggggcagcccggccctcagtggcgc

SEQ ID NO: 188369 - DNA, 122 bp, Homo sapiens
cttttgtgtgattgggttgcaagtctaaagttcagtaggggatcctaatctcttattggacgacattttcctgacacttgagcttagggagcagagatactatctctaaaaatctctcagtg

SEQ ID NO: 188370 - DNA, 122 bp, Homo sapiens
cgcgcggccggccggggctccgcgactgggcgggcggaggcggcgccgccctgcaggatccgggctggaagcctctcggagtgctgcctccagccaaggtgtgtgtttatttgattgctttt

SEQ ID NO: 188371 - DNA, 122 bp, Homo sapiens
tgacctggggacctggggacaagcagcaagtcctcagcaggccactcggacctcatcttccgtgtgatctgggggtggcggcaggactctgggggtgggcaggtgtgggaagctgtgcactg

SEQ ID NO: 188372 - DNA, 122 bp, Homo sapiens
agggcaggagcagtgtccttgtctggcccaggccgaatggctgtggtgagcctcagtcagcgcgtctgtgccgtgagtgtaacaggaatagcccgggcccccgggggtggtgccgcagtcgg

SEQ ID NO: 188373 - DNA, 122 bp, Homo sapiens
acccgcaggaaaggctgagtcctctgagaatttattactacggatcacagcagcaacgggcgggaagggcggcgccagactcatttgccccgcaggtagatcttgggggtctgccagccttc

SEQ ID NO: 188374 - DNA, 122 bp, Homo sapiens
tctctgccgacctttcttgaacggactctggccacggtgccaacgcgtcaacggtctgtccgtctgctgtccgagctcaggggccgtccatgcctccacggctggcatacagtagctctggt

SEQ ID NO: 188375 - DNA, 122 bp, Homo sapiens
cccaagctgggcctagaggagcccaccgaccggaggctgtttggggcctgcagatgccatcggagagcaggagctgagcctggagaggccaccgtgaggcctgagctgggcctgcggagctt

SEQ ID NO: 188376 - DNA, 122 bp, Homo sapiens
cgggcggccccagttctcactcccattaggtgacaggtttttagagaagccaatcagcgtcgccgcggtcctggttctaaagtcctcgctcacccacccggactcattctccccagacgcca

SEQ ID NO: 188377 - DNA, 122 bp, Homo sapiens
acagcagcctctacctgctgcttttagaagctgtggcctgccggagtcaaacccccaaaacgtttttcttaaactaagggttcaggcctcagatcggcatctcgccctctccgatttcagga

SEQ ID NO: 188378 - DNA, 122 bp, Homo sapiens
ctcccaaactcgggaatccggtactcggccgcgggaccgctccgcgggccagagaaagagcgctgctccggaaaactgaataccgagcacgatagctggaccaggcggcatctgccgagaca

SEQ ID NO: 188379 - DNA, 122 bp, Homo sapiens
gtctgtgtgcagggggtcggcacatgggggaggatgcccatggttgggtaaccgcaggtccgcttgaccctctgccacctaggactgtgtctatacggcgtctgggctacagtgtgtttgag

SEQ ID NO: 188380 - DNA, 122 bp, Homo sapiens
ggcgggaagacagcttcttgcttctggctgcgatggaggcggatctgggcggggccgaaacgggggcggggccaagtgtgggggcgtagtcaggcgtgggggcgggccggcgccggcgccgc

SEQ ID NO: 188381 - DNA, 122 bp, Homo sapiens
ttctgtaattttgcgggggttcagccttgctcggcgattcacggcccagacatagagaatcgggatagctggccgaaccgtctctctcagtctgactctctttaaagaagggatgtgggctg

SEQ ID NO: 188382 - DNA, 122 bp, Homo sapiens
ggcaaaggtaaccaaaatgctaggaagcctaaagcctggggcctttcctctactggagcccgctttcaggaggcccatgtggttcccattaggatgataagtctgcatccccctcccccagg

SEQ ID NO: 188383 - DNA, 122 bp, Homo sapiens
cccagccagcaccgcgcgttgcgttcccgctaccgccgggctgggaagggcgggaccacgcgtgctgcactggccctcagtacctagcccgcggtaggaggtccgccccaaccctggctagg

SEQ ID NO: 188384 - DNA, 122 bp, Homo sapiens
gtttgttgggggcctggtgctgcctggagggcaagtcttcacaccggacatgcaaagacgcgctattttccaaagacaagttagcgacactcacatccacttccccttgatcaacgacatag

SEQ ID NO: 188385 - DNA, 122 bp, Homo sapiens
ccccttttcgtcagaaaccgtagacgtcaccttacgcgggataggaacccgggtgagctacgtccccagggatgcccagcgatacacaagtcaccgtcaccccctccagagtaaaccgcatc

SEQ ID NO: 188386 - DNA, 122 bp, Homo sapiens
gggtgagttccttccccttctcccaacccttcccaccaccctttgtccatcccaggattacgttaacccctagtgtgctggaccaaccagagctctgggaagctctcgtttctctgggttcc

SEQ ID NO: 188387 - DNA, 122 bp, Homo sapiens
agatccccccacctcccactctgcaccagtttatagaacaacaatttggggaaaacaatccgggcggagtgacggccccgtaattgtgacaaagtgagtgcgggcggctggagagagcgcta

SEQ ID NO: 188388 - DNA, 122 bp, Homo sapiens
attagctagcactcaagagctaaacctttaaaaaagtaagaggccaggcacagtgtctcacgcctataatcccacaactatgggagactgaagcaggaattgcttgaggctaggagtcagag

SEQ ID NO: 188389 - DNA, 122 bp, Homo sapiens
cagcttgtcagcccggcttcccaccccttcctgggatcagcctgcaacacgggctttcttcgtcatcttaacatgcaatgcattttgcctcctgccttgaatgaggatccgatggaaggtaa

SEQ ID NO: 188390 - DNA, 122 bp, Homo sapiens
tcggctccggggcggaacctggactccccgccttcctcccactctggtctcccgactccccgccccggtccgttgccctccagcaaaaggcgcttccttactacacccttggtcccctccca

SEQ ID NO: 188391 - DNA, 122 bp, Homo sapiens
ctcccagttgccaggcacttgacagattacaaagtgcttcccacatgtgtcacctcacatcggtgcacaggaatgctgcaggaagtttgattcatcccattctactgagcaggggatagggt

SEQ ID NO: 188392 - DNA, 122 bp, Homo sapiens
gagatctgaatggaactccttcctccatgcgtaacccagaggggctgacggtggaaatcccgtccctcccctactcactctctgagccccagcctcccaggtcggacctctgggccaccacc

SEQ ID NO: 188393 - DNA, 122 bp, Homo sapiens
gactgtaaacaagcccttttccctcggagctttgaaacgcaaattttgagtcagcgagaccggcatgggccagagacccagccttcctaatgagctccccggagatgccacgctcctgcctg

SEQ ID NO: 188394 - DNA, 122 bp, Homo sapiens
gagctcagttgtcaaggaactatttttcttgccgtcgtcccagagatgcctttggaaaagcggaagggcacggagggttctggagttcgttgctggcacctgcgtggtgtcatgagaacgtg

SEQ ID NO: 188395 - DNA, 122 bp, Homo sapiens
cattgacatgtgcatgggcaatttcctgtgaaaaatggagagaataacgctaccttccttcggtttctatttagagggattaaatgacctaatgtacaaaaggtacttagcttaatgactga

SEQ ID NO: 188396 - DNA, 122 bp, Homo sapiens
acgtcattgaagggacgatggtgccatctgctctccagggtagctgaggggatggtagaccggtgacgtgcacttcatttacgatgtaggtcacccgtttgactatccaccagcgcccggtc

SEQ ID NO: 188397 - DNA, 122 bp, Homo sapiens
cgctgccctcggcaccaccgggtgcgtccccccgcaaagctggacgcccttgtgtcctcccgcctgccctcggtgtcaagtctccctccaggacgcagtttctcgatgttctgtactggaag

SEQ ID NO: 188398 - DNA, 122 bp, Homo sapiens
ggaataatttatacaggccacgttgtcctggttttcttgccctttggcggtggatttggtcgtgccctggggtggtggaagaactgaatgggcttaattcacaaaggtcggctgaattacac

SEQ ID NO: 188399 - DNA, 122 bp, Homo sapiens
gaattacaggcatgagccaccgtgcctggccttttgaaaataatgctttttggtggggcacggtggctcacgcctgtaatcccagcactttgggaggccgaggcaggtggatcacctgaggt

SEQ ID NO: 188400 - DNA, 122 bp, Homo sapiens
tatgaagaaaaaaagctgggtgaagggactgtgaaggggccagggtggagcgctgtattacgttagttcccccagaaactggaatgaagtgggtggatgaaccatgcccatagctgagaaaa

SEQ ID NO: 188401 - DNA, 122 bp, Homo sapiens
agaaaacagttttgaggctttctgagaagagcttgtttcggggcacctgacatgggcccgcggtcttcggcattctcgcctccagacttctgcgggtggctgggaggaaatgctgtcgctgc

SEQ ID NO: 188402 - DNA, 122 bp, Homo sapiens
cttaccgtctaataggagagaccatcctccctccaagaggggcctactctgagaggaggacgcccagcacaatggcagggaggggggacatgcctccatgcctgttgttcacctagaaggag

SEQ ID NO: 188403 - DNA, 122 bp, Homo sapiens
caattggctggcgtggtggctcatgcctgtaatcatagcactttgggaggctgaggtgggcggatcatctaaggtcaggagtttgcaaccaccctaaccaacatggagaaaccctgtctcta

SEQ ID NO: 188404 - DNA, 122 bp, Homo sapiens
ccgggcagggggcgaggggcggcgaggagcggacgcccaaagaccgcgacgggctggcgccgggcccccagcgccccacgaccttcctccgaatctgcccccgcaggctccgcggctccccc

SEQ ID NO: 188405 - DNA, 122 bp, Homo sapiens
accaggatcccagatggatgacatgtgatggagactttggggagaaaagggaagccagcacgggcagagttgttttgaattttcttcaacccagactagcttctccaaagtcactcatttga

SEQ ID NO: 188406 - DNA, 122 bp, Homo sapiens
ttgatatggttaagtttgagatggatatggtaagttccatgcctggggcagacatggccacgtaatactggctgctctatctaaactccagatatatgggatggagatgaaattaggagcag

SEQ ID NO: 188407 - DNA, 122 bp, Homo sapiens
catttctgataccctgcaacttcaagtccccaggtggctctgccagagcgttcacgatgacgtcccattcctgttaagctatgcctctatcctcagtggaaacagcccgggcgttcctagga

SEQ ID NO: 188408 - DNA, 122 bp, Homo sapiens
cggctactcgtaatctcccggtctccttcctcctttgtccctaccatagaaacccagccacggtggtaagttagcctggaatggggaaggactgagtgtcctcctggcatacacttccacat

SEQ ID NO: 188409 - DNA, 122 bp, Homo sapiens
agcactcttggaggtagtaagatgggccggtccttgatctgagaaatgggcgcacaacatcgctgttctctctgcaaaggtggggaccagaatccagcttgcctgaccttgcaagcaagcat

SEQ ID NO: 188410 - DNA, 122 bp, Homo sapiens
ttccggttgtgcaaagccggatggcctaggctgctgtctttcaaaggtggagagcatgtgcgggtggggccaggccgggtgggtctgccctccctctgcccgccgtatgcagcgctgcgctt

SEQ ID NO: 188411 - DNA, 122 bp, Homo sapiens
agcgattccattggttgaaataaaactgtaatttgagccaatggcacagctttattttcgcgcccagtattgactataagtagtggagctctggtgaacttctctcggctgttctcagttcc

SEQ ID NO: 188412 - DNA, 122 bp, Homo sapiens
atcaaccagtaccaggtggtgaaaccaactgctgaacgcacagcctacctcctgtattaccgccgagtggacctgctgtaaaccctgtgtgcgctgtgtgtgcgcccagtgcccgcttcgta

SEQ ID NO: 188413 - DNA, 122 bp, Homo sapiens
agcgatttacggcgacagttcagcgtcagatcacttcccacaaggcagtccgcatccctgcggggcccctgcttggtagtccatcaaggcggtctctaaatcactgactccaagcagtgccc

SEQ ID NO: 188414 - DNA, 122 bp, Homo sapiens
ataaaaagtaatttactaagtttcaattcctttccaaaggctagataggcagagcaggaacgttctactggctttgaatgaagatactgttcatggccgggcgcggtagctcaagcctgtaa

SEQ ID NO: 188415 - DNA, 122 bp, Homo sapiens
gcaggcaccggcgtgttgagtttccggcgttccgaaggactgagctcttgtcgcggatcccgtccgccgtttccagcccccagtctcagagcggagcccacagagcagggcaccggcatggc

SEQ ID NO: 188416 - DNA, 122 bp, Homo sapiens
ctcctgcccctcccaaagctgacaccagagcaaaggctttgaagtccaaaaaggcagtgccgaaggcgcccacggccacgaaacagatcttccgaaggccttgtggctccagaggcagcaca

SEQ ID NO: 188417 - DNA, 122 bp, Homo sapiens
tgggcgtcacattcgtcggtgtgtggccaaggggacatgacacgttttaggaaaagtaaacgtgctactaagttgcacgacttgtcaagaaaagaggcgcttccgagtttgagaattgggag

SEQ ID NO: 188418 - DNA, 122 bp, Homo sapiens
ttgttgcagttttcctgccccgtgtccctccgtgaatgagcagcgtgcagcgagcgtgtgcgcacagctgctgttctccattaacgccacactgctcggcttgcggacggggaaacccgcca

SEQ ID NO: 188419 - DNA, 122 bp, Homo sapiens
gggcacccatcttccttccctcctctgtccctgcctcggccaccccacgcgggaacccagcgccgtcctctgaaggcagggccttggccacgtcctgggtctcccacctcccacctgacccc

SEQ ID NO: 188420 - DNA, 122 bp, Homo sapiens
tctatgcttctacccttcggcgcacgtggcccggccagtccgcgcacctggccgtcattccgagtcgctgtccccagccccaggtattcagtcctcccactcggggctttcattcctctctt

SEQ ID NO: 188421 - DNA, 122 bp, Homo sapiens
gtgccagctgggccccaagtggaggtgacagctggggaccagaaggggctaccgcatagccggggagtgaggggctggtgctggccaaggcgcctctgactgacctctgctctctcgccaag

SEQ ID NO: 188422 - DNA, 122 bp, Homo sapiens
cagaagatgggacctggcgccttgcaggggtagccctatggagatccagaagccccgtttcgagctacgaagtctctcttctactgcagtcttctctccaacgtggagatctagcaacttcc

SEQ ID NO: 188423 - DNA, 122 bp, Homo sapiens
ttctttatcgacgtgccctctcatccccgcttgcctatcccgggaccttgcccgcgccttcggacaggacaagactaaatcttggctccagaggtcccacaaggctcccccagaaagctgag

SEQ ID NO: 188424 - DNA, 122 bp, Homo sapiens
tccaaacaaggctcaaaacaatgacttcagatgaaacaggctcaaatgcataaacaccagcgaaacagaggatttcgaaaatctttgcgtgtgtgctgccaacaagttcttttctgtaattc

SEQ ID NO: 188425 - DNA, 122 bp, Homo sapiens
tctctttggcagggaatgtctttcacatgcactctctctgggcagccgcttgtgttctgtcgtggagccactcgagttgaggcttcgttttatctcagtctgcccctagtgggattggctca

SEQ ID NO: 188426 - DNA, 122 bp, Homo sapiens
cacgtctcttccaagacacacacacacaccacagagggagagacttcaactcatggtggacgggcctgaccaggcctccaggtcacgtcacctatgacaccaggagcagaaggccccgcctc

SEQ ID NO: 188427 - DNA, 122 bp, Homo sapiens
aggctgtgcggtttgggaccaaggactggcaacaatcacaggcttgattttcgaaaaggtcgcccctcaccatcccagttgagctttcaaactacagtagcccagccaacatcttgactgca

SEQ ID NO: 188428 - DNA, 122 bp, Homo sapiens
ttaaagaaggaagggctttattcggctgggagcttcggcaagactcacgtctccagcagtcgagctccgcgagtgagcaattcctgtcccttttaagggcttacaactctaagggggtccgt

SEQ ID NO: 188429 - DNA, 122 bp, Homo sapiens
aaagcggttcctgcccacactcagcatttgtggagtcaaacggaggttgtgccggtccgtcgctgagacttatctcaggaagcgcacaggcacggtgctcgccctgagagtgagaatcgctt

SEQ ID NO: 188430 - DNA, 122 bp, Homo sapiens
gctcttgaaaagtagagagagacagtcacagggcgcgcctggcgtttctgagtagcatcccggctgttctctcagcacagcccattagtttttcaggccttttttgtaaagatgtgcttccc

SEQ ID NO: 188431 - DNA, 122 bp, Homo sapiens
gctccaactcgttgtcctagaccatccagtgttagcatttttctcatgagatgaacatttcgttataataatgacagtagctgtcatttgctgagggctttctgcatgtcaggcagcctact

SEQ ID NO: 188432 - DNA, 122 bp, Homo sapiens
tcagacagtgttgacatttgccaacttagagcatacctcaagttgctatgatcactccagcgctctagttcagcatgtttacacaggttctacgcctagaaccttaaactatgatgcacaat

SEQ ID NO: 188433 - DNA, 122 bp, Homo sapiens
gctgcgcgtgcggtagcgattccttcgtttgtctgagcgggagtagcgctttgcggagcccggcctcccgcgggctgggtcgtcgtgggtttccctcaccccctccccttttcccatcctct

SEQ ID NO: 188434 - DNA, 122 bp, Homo sapiens
acctcaggagcactaggaccaccccgtaaccgagtcacctcagcagcactaagaacaccacgtaacgcggccacctcaggagcactaggaccaccccgtaacgcggccacctcaggagcact

SEQ ID NO: 188435 - DNA, 122 bp, Homo sapiens
tttcctttgagggaccctgaatgggcgggggttgctgtagctttcctcagctgggagacccgggaggaggtccggggtgccagggtgggaggagggcctggcttgtcgctgaaagccggcca

SEQ ID NO: 188436 - DNA, 122 bp, Homo sapiens
gtcatcccttggtatagcgtgggactggttccagcagataccgaaatccaggcacattcacgtctcacagtggggcctgtggaacacgcaaatacggaaagttgccctccctctgtgtgcgt

SEQ ID NO: 188437 - DNA, 122 bp, Homo sapiens
ttggcctccaggaatgcagcggaggggacttgggcgggccgcagggtggtctgcgagtgccgagtgtgacagatcgcagcagagagtgttctttacggcctccagagcttggctgcggtgag

SEQ ID NO: 188438 - DNA, 122 bp, Homo sapiens
gccgaggctggggccgggtcagcaaccaaattccagttcagagatggatttggttgtggacgtggtcagccacctcagtaaaattggagaggattattatgcgatgaataaacttacagtca

SEQ ID NO: 188439 - DNA, 122 bp, Homo sapiens
gggtgcctgtcagactcctgcagcagttgaacttcccgccgaaccaggccaaagcactcgcggaggagccgcttgacagccactgcccgtccctcaaactgtcccctggaaagtgggtgatg

SEQ ID NO: 188440 - DNA, 122 bp, Homo sapiens
atgtcattagcttgtatcggacatcacggatatcggcaatcttgtgaggttcatttgggtcgtggggtcagcactttttctggagtcagtgattattgccatgaaaagacagatggtgcccc

SEQ ID NO: 188441 - DNA, 122 bp, Homo sapiens
aaagatacctctccagaaaagagggaggcgcagcctgggagtgggggctcgacccaggagcgagaaagaggaaccccagccaggcaggacccgccccagaaggtcactgctgttgctggcag

SEQ ID NO: 188442 - DNA, 122 bp, Homo sapiens
aagtgactgtgaagctggtcagccctgaggctcatgcttagcctggttctgatggcctctcgtaggctgccacatcctgctcgctacacaaaggcatttgaccagaaagcctgctctgcctg

SEQ ID NO: 188443 - DNA, 122 bp, Homo sapiens
gctcaagcgatacgcccctccttggcctcccaaagtgttgggattacaggcgtgagccaccgagctgggccaggccccaggtattgtcatgatgtaaaaatctctctctagaaaagagaaca

SEQ ID NO: 188444 - DNA, 122 bp, Homo sapiens
tttttttttttttcccagtgccaagtcggaaagcacttatggaaacatcaaatgctccttcggtgcatgagtgtcggcatttgtactaatacttgacacaaaatgatgccatgagccagggc

SEQ ID NO: 188445 - DNA, 122 bp, Homo sapiens
tgtgggcccctcacgttggctctgcagcacccacgcaggaagagggtgcacacagagggacgcggacaccaaggcctggggttggacaaaattgttgcccgccacagctggtccctccacag

SEQ ID NO: 188446 - DNA, 122 bp, Homo sapiens
ccacgtgggccggccttctccccgccccgcacccctgctcaggcggcgcgcccccactgccggcctccaggcgcctctcccgagcgcctcgctgtggccaccactccgcaggtgctgagcaa

SEQ ID NO: 188447 - DNA, 122 bp, Homo sapiens
cccggggcgcggggcgaggccgtggggacgtgcgagcggggccgcggtggggctcgggggcgcgtccacgtggccagagggcggccacccggagccagcggagggacaggtaggtggccgtc

SEQ ID NO: 188448 - DNA, 122 bp, Homo sapiens
tgtgggagaatgaactaggtcacttctctcatcccactgtgacatgttttgcagtgtcttcggtggttgaccactagatgtcactatggcatctttaatcctaacagtcatgtagctagctg

SEQ ID NO: 188449 - DNA, 122 bp, Homo sapiens
gagctgaacgtgcttctgcagcatgtactcggtcacgtacttcttgtcgcacacggagcacgtccactgcttgcccacttttcacacacacgcagacacacatgcgcgtggaaaggaagaga

SEQ ID NO: 188450 - DNA, 122 bp, Homo sapiens
aagtccttccatgcttggtctacctggcaaacaccactgatctttgaaagcacagctttacggtcacttttccatgaaatgttttctggctgccttggcagttgatcacagaaactgtaata

SEQ ID NO: 188451 - DNA, 122 bp, Homo sapiens
cggggcctgccacgaggccgcagtataaccgcgtggcccgcgcgcgcgcttccctcccggcgcagtcaccggcgcggtctatggctgcgacttctctaatgtctgctttggctgcccggctg

SEQ ID NO: 188452 - DNA, 122 bp, Homo sapiens
ttttttgtttataatttgaagggcaattagaagcttcagatgataggagctcaaggcccacgattttgccatgaaggctggccacctccaatctccacctggggacttaaaacactgcaaaa

SEQ ID NO: 188453 - DNA, 122 bp, Homo sapiens
gcaccgatgacatggtctggggtgacgacttaattaacagcccctacaggtggggcccggcggggcggaggcacctgttgacaccaggtgatgtgtcacctgctggggatggagcagggtca

SEQ ID NO: 188454 - DNA, 122 bp, Homo sapiens
tacgcccgcgctcctcgcctggccgtgatatcaatggcgcaggcttcacttctgctgtggcggtgactgaggcctttctggtgacctcagcccaacacaggccgtctccggagcttcccggt

SEQ ID NO: 188455 - DNA, 122 bp, Homo sapiens
taaacacacccgcgccagagttcacactcttgttcatctctgcggagttggagcagacagcgaccttcaaaattgtccctaaaatctctctcgaactgaccgggcatttactgggatttgag

SEQ ID NO: 188456 - DNA, 122 bp, Homo sapiens
cttggacaatggttcaccaatgtcatttcttgctcatttgttccagtgcagtggttcttacggggttgtctttggactcagcagcactggaattaccaggaagcttgttagaaagcagattc

SEQ ID NO: 188457 - DNA, 122 bp, Homo sapiens
actcctggctccgctcccggccatcctgctgctctcctctggaacctcagcagcaacccacgccaagaagagaaacccacagagcagtgtcggcgcaatcacgctggaaaacggggcctctc

SEQ ID NO: 188458 - DNA, 122 bp, Homo sapiens
taagggctgtacagcccggggcccctctcggcccccgcccctgcgtcccggtgcaggctgcgggtccagctgactaccgtgtccaggtgcgcgtctgctgccctttccaaagaatccccttg

SEQ ID NO: 188459 - DNA, 122 bp, Homo sapiens
gggaaaaaagggggttcagttcagtgggtctacatgtttcacattttgcagccctgtttacgccagcctcttaaaaaaaaaatcccctattcagtaagaaactaattctttttgtccccctg

SEQ ID NO: 188460 - DNA, 122 bp, Homo sapiens
ctgcccagtggggctgagcaggaggcgggcgctggtgtacttgctcttctgtagcggcctcggcctctgccggcatttctggcaggtgctgggtggccgaggcagccgaggtgttttagggg

SEQ ID NO: 188461 - DNA, 122 bp, Homo sapiens
ggtggcgggagctgctgtctgagcagcggttgcggaccgagcgaacttggcccaggagcccgggcctagggagaggcgcggcggcggcgggagcgcgaacggctggagctgggtgaggggca

SEQ ID NO: 188462 - DNA, 122 bp, Homo sapiens
ttcgcgggacgggacggggcctcttaaaggaaccgaacctttatctccttttctgaggggcgttccagcgctacccgtggaacacgtggtggacaggcctttggttccacgctccacagtaa

SEQ ID NO: 188463 - DNA, 122 bp, Homo sapiens
gttgcccctttctgggtttgtggtgacggaggggaggccgagaggcacagaccaagtccccgggtggctgcaggcagctccagcccggtcctgaggatcctcctcaccatggtcacgtgcct

SEQ ID NO: 188464 - DNA, 122 bp, Homo sapiens
cgagtgggtgcagtcggagaagctggtgcgggcgctgcagactccgctgatgaggctgtgcgcctggtacctgtatggagagaagcaccgcggctacgcgctgaaccccgtggccaacttcc

SEQ ID NO: 188465 - DNA, 122 bp, Homo sapiens
gaggcaagatacatgcacatagtattattcagttaaattatcttactgcataatctctgccggggaggcaatttttgtgaacacatgaactgttttagactactgggacctcactggctccc

SEQ ID NO: 188466 - DNA, 122 bp, Homo sapiens
ctgaggcctccgtaaccctccccggctgctctttcagatgtggaaagcttcagcaggccacgctgtgtccatcgcccaggatgacgcgggggccgatgactgggagaccgaccctgattttg

SEQ ID NO: 188467 - DNA, 122 bp, Homo sapiens
gagcttcaccccctccccacaccctccttctttccgtctaacaaagtcttctttcccccacgcacagacttgttatgtaacaaagtctcccaggcgagtttaactggagaataaaggacacc

SEQ ID NO: 188468 - DNA, 122 bp, Homo sapiens
ggctgcgcccaaaagctctgctcctgccagacgtcacaaacagaccgcacggctcagccacgtggacgcttacaggacttcacgagaggcaccaccgtggtacacgtgaagacgtgcacttc

SEQ ID NO: 188469 - DNA, 122 bp, Homo sapiens
gagaggaggcgcatacatcccttgactcccacaaaccaggcatcaaacaggtttaatccacggggctttcacctgaactaacccagggattctgtcttaaaagacggagtgcaaactccgct

SEQ ID NO: 188470 - DNA, 122 bp, Homo sapiens
cctctccaccccatctaatacgcaccatggccccctccacaatctgctgaaagctcagtgcgacgagcccctgcccaagttcacggccacatccccactgcctgacctacagttggccttta

SEQ ID NO: 188471 - DNA, 122 bp, Homo sapiens
agaaggggagggagcaggtgtcactggaaggatggcctggaccgtaatagtccatgtcctcggcgtttgaacaaagaagtggacaaaacgtgcaaagtaacgaacaaaacacggaaagaaag

SEQ ID NO: 188472 - DNA, 122 bp, Homo sapiens
ctgggaggtggaggaggtttcagagcagggaagctggcgtcaggaaacggctgggttgaccggctccatactcagcctagtgctgggcagaatagaaaacgttatgtgcttagtagcaggat

SEQ ID NO: 188473 - DNA, 122 bp, Homo sapiens
cattcactcaacaaacatttatcagccttataatggcagctccagggatgcagtagtttacgagattcacatagatgggccatcacttggctggcagagagataactgaataaacaatagtt

SEQ ID NO: 188474 - DNA, 122 bp, Homo sapiens
cccttctccccacgcccctagaggaaataaaattcattcctgaatattgggccaggaaaacgtttctctgaaaggaaccacaactgcaggggaccacccggctgcagctcccagctcccggc

SEQ ID NO: 188475 - DNA, 122 bp, Homo sapiens
ttataaatggaaaccattgttgtgacttgatatttcagggtatcaatggggagaggacagcgggctttgacttaggaagcatttcctagatgtatgatgaaataatacattgagcaccatta

SEQ ID NO: 188476 - DNA, 122 bp, Homo sapiens
agcccaggctaggcaaggctgtggtgaaaacttgagcaagatgattaccgcgaagtggagcgttgaactgggtctaagattttgggccattccctctacaatgctgagggctgtttattttg

SEQ ID NO: 188477 - DNA, 122 bp, Homo sapiens
tcacccccttctgtgtcaactttctgggtgtgttctggttttgccatctcatcttcagaccgtgaaggatttgttttggggacgtggatgtgtgattgaggatggggattggattcgccagg

SEQ ID NO: 188478 - DNA, 122 bp, Homo sapiens
ggcttagcttcctgctccctcattggcttgagtgttggtcacagagcggaggattggctgcgttctcactctttccctacacgattcctccccgctggctcctctggctttgggcgaggtca

SEQ ID NO: 188479 - DNA, 122 bp, Homo sapiens
gttggatctgacaatcccttccaggttctcagactttaatctcgagttttcctgcccatgcgccaggttgaacagttgctggtgggttaaagagaatcccccagcctgttgctgtgtagaga

SEQ ID NO: 188480 - DNA, 122 bp, Homo sapiens
caaggacccacgactcatcccatggcctccctctgggtaagtgcttgtcgactgagtcaacgactgaatcagccgcggttgtcagggctcagctggactgagcgctgctgcctgtgggcgtt

SEQ ID NO: 188481 - DNA, 122 bp, Homo sapiens
aaatatgcaagtaggatctatttcatagaaaaacatgaactgggtgatgtgtgtgaatgacgctgggatggtttgactctttgctgcatggtgccctggtaataagttatagaaatccatat

SEQ ID NO: 188482 - DNA, 122 bp, Homo sapiens
ccttgggtgtcccgtaaggattcgtagatacattcgtagaatccccggaagctggagtctcgaagctttgcagctgcggcctttagagagcccttgccatgagactccacccattagccttg

SEQ ID NO: 188483 - DNA, 122 bp, Homo sapiens
tcgaaagggccctgccagccgggcctgattgaagatggggaattattagctggcgccccacggctgcagagaggccatttgtcagctgtcagagctctgctggcctcactcggcagcccagc

SEQ ID NO: 188484 - DNA, 122 bp, Homo sapiens
ataattatagtaatttggctattacgctatatggagtcagcagttagttgctagaaaacacggtgataggggtgattcaagggattttcatcccaactgggtgtttgatcctgctgactttt

SEQ ID NO: 188485 - DNA, 122 bp, Homo sapiens
tttcttccgcgcgctgtcaagccctgttacgcatgcgccctggtcaccccgcggtttgtccgcgcctctgctaccccctgcgcaggcgctcaaggagctcttggactccaggttcccgcggc

SEQ ID NO: 188486 - DNA, 122 bp, Homo sapiens
atcactcatgaaggcagggagacttggagtgaagcctggccaatgggttatttattctatcgtttgaatcacaatacatctccaagcttacccttgatttggctaattcaagagattaaagc

SEQ ID NO: 188487 - DNA, 122 bp, Homo sapiens
gggcactgggagcccgtgctgacctctgacctgttctgacctgtcttcttcttgtgcagacgggggacgtgtgtatctccatcctccacccgccggtggacgacccccagagcggggagctg

SEQ ID NO: 188488 - DNA, 122 bp, Homo sapiens
aaggccccagagctcgagagaagagtcacgggcagaccacacccgggagaaaaacaagggcgtctgggacttcgcagacttactcgggttggaatcagaaggcatttcttccacccgcctgt

SEQ ID NO: 188489 - DNA, 122 bp, Homo sapiens
tgtagaggtgaactttgcacaaccaggtgtattacggaatcggaaagcctctccttgtatcgctccctccttccttccttccttccatctgcctcagaagtctttcttagccaaagagagag

SEQ ID NO: 188490 - DNA, 122 bp, Homo sapiens
aacgccctgtttgtcacaaagttacatctgcgagctccttcaaggaagggaggtgcctgacgctccttgttaatgccggttgctgttacagacttgcaattgtgcaactctgtgatgtaaac

SEQ ID NO: 188491 - DNA, 122 bp, Homo sapiens
cccagctgtctgggctctcgtcggcctggcgtcagtgcccggcaggagttgggtgggtgccgagccgggcgagtgggctccatgggtgcagcgtggcgggaacgccttcggcagacccttcc

SEQ ID NO: 188492 - DNA, 122 bp, Homo sapiens
agagctgcaggagtaaggacaggaaggtgctgtacacaggagcagagcgcgacgtgcgggcggagtgcggtctgctccttagccctgtcagtggggacgtgcatgcttgtccctttggcggg

SEQ ID NO: 188493 - DNA, 122 bp, Homo sapiens
cagggtgggcagcggcacaggggccggccgtggctgggggcaaggacacactcggggcttcgtgacccacttggcaggcagagccgcctgcggtcaccacttaccactcaccccagggcagg

SEQ ID NO: 188494 - DNA, 122 bp, Homo sapiens
ttccagacagttccggaccttccaccaccccacctacggcagctgctacacggtcgatggcgtctggacagctcagcgccccggcatcacccacggtgggtgccagcccctggccggtgcgg

SEQ ID NO: 188495 - DNA, 122 bp, Homo sapiens
gcttgggaacgagagccgccgtcacggacagcgtgctgggcttgccgccttcctctgtcccgcctggacccggccttggggctccgaggctcagggaacacgcccctcttccccgcagctac

SEQ ID NO: 188496 - DNA, 122 bp, Homo sapiens
gtacagattctgcagcagggcagccactgtgctcttcccagacccattgggtcccaccagcgccgtcacctcaccaggacgtagggtaaacgtcagcccctagaaaaccagaaaaagagtta

SEQ ID NO: 188497 - DNA, 122 bp, Homo sapiens
ttctctctgtcaagaatccgtggacatgttatctggttagagctcagcctgcagccaccacgcaggtaactcactcacgttagactataactcacctaactcgtttgtgtcccagccaaatg

SEQ ID NO: 188498 - DNA, 122 bp, Homo sapiens
tccggatcctcaggtcagcggaggagcggttcaggccttcctcttgctcgatggactgctcgatgcctgggggcacaggtggctgctaagtcataaccaggccccttcaaccccgtccccta

SEQ ID NO: 188499 - DNA, 122 bp, Homo sapiens
cccaggccatttacaagatggtttcgtccgtgatgaagatgccggaggacgagtcgaccccggaaaagaggactgagaaaatcttccgccaaatggacacaaacaacgacggtgaggggcag

SEQ ID NO: 188500 - DNA, 122 bp, Homo sapiens
tgcaggagcgggtggaggaggccgccttagcaccttgtctctttgcctcgatcttttcctcgcaccttgagctgggtataaagccaaaccccggccttgcagaaaggatggagaggcttgat

SEQ ID NO: 188501 - DNA, 122 bp, Homo sapiens
gaaccaaagcccttccgggcccaggcagctggagacagggaggctggaggtttggaggggcgttgctgggggaaaacagaatgggtacttgagtctgaagctttagtggccagggccacagg

SEQ ID NO: 188502 - DNA, 122 bp, Homo sapiens
ctaagtttttaaagcggcactcgaaagaggtttggaaaccatcctcactcatccatccagcgcgctccaatcagcctccctcgcggacctgcccccctctcccagggcctccatcccggtcc

SEQ ID NO: 188503 - DNA, 122 bp, Homo sapiens
taactttcctagcctttcttgaaagccagatttatcagtgtgcatattgtgtgatagactcgcaccaatggcagatgtgtggttggactctcagctgatgggtaggagtgagtagttaccct

SEQ ID NO: 188504 - DNA, 122 bp, Homo sapiens
aaggcatttgtacatctcaggaatgtagttagtggcagctgctccccccccccccacccccgccaccaaccaggtctaatgtcataaactctgcaggaatcctgtctgtggttctgcacatt

SEQ ID NO: 188505 - DNA, 122 bp, Homo sapiens
gaggaagagacaattaacactcagcaccaatctgcatttcctttttagctgccatttacacgctgctcaggttttgaaaaccagcatttcatgctactccctagagagccagcaccagcttc

SEQ ID NO: 188506 - DNA, 122 bp, Homo sapiens
agtgtaagccctgctgtcggtcccgccggtggctgccctctgcctcccccgcacactccgcgcattgtttgggactgtcgggaagacgcctcgcacctcacaaatcatttaagcacctcagt

SEQ ID NO: 188507 - DNA, 122 bp, Homo sapiens
gagggcggggaaggaggatggagcaagctgggggttggggttggcgctagcgcagcggctcgcctggtactgtgggagagcggcggctgctcctggaagttgtggtgtcgggagcccagccg

SEQ ID NO: 188508 - DNA, 122 bp, Homo sapiens
cgttctggttcaaggagggtggtagagaaaaggcagggttttggttgcaattctgtgtcacgtgtcctgtcaggagaaaccacgtgggttttcccatctgccattgccccatccttggctca

SEQ ID NO: 188509 - DNA, 122 bp, Homo sapiens
ctgctagagcctagagggcggaggccggagaggctgcagccgggagtagcaccgcacatccgggaacgccagcagcgggctgagggctgcataactgatggaaggccgggcgcggtaagagc

SEQ ID NO: 188510 - DNA, 122 bp, Homo sapiens
caagtgtcgatgggcagagctgggcttctgcctcctctccctccaagatttcagataaagcggctgccttgctgcagcgaatccgcacaattaaaagctttaattagtggctcctccatttt

SEQ ID NO: 188511 - DNA, 122 bp, Homo sapiens
tgtctcaccatttgtgacccagcctcagaagccacatagcatcacttacctggagtggcacgcaagcctgcctagagtcaagaggaagaaaggaaaccccaactctcagcagaattgccaga

SEQ ID NO: 188512 - DNA, 122 bp, Homo sapiens
ctgagttttttgaggcccccattaatttggcacagagtcctcctagttcctgccctattgcgaagggctttgaagggcatgcggaacagcttggactttatttaatctttgcagtggcaagc

SEQ ID NO: 188513 - DNA, 122 bp, Homo sapiens
tttttgcagcttttggcaccagacaccgtggctttttgaggctttttgcccccgccgccgcggctttatgccgccgccgcaccgttttgcccccgccgacacatctttttgccgccgtggct

SEQ ID NO: 188514 - DNA, 122 bp, Homo sapiens
ctgtcgagagggggacagttcttctcaatctgtcatcgttgaaccacacgctcctgacaccgggattcatttgtcttgtcggctctgacagttggattctcccagagctcttcctagtggat

SEQ ID NO: 188515 - DNA, 122 bp, Homo sapiens
ggcccgggcggcggtggcggagcatatggaggcgggatgaccgggccgcgccgggagctgcggcgggactgggcgcaggctgggaactgcgccaccgccgcgccgtggccccggctccccga

SEQ ID NO: 188516 - DNA, 122 bp, Homo sapiens
accttctagctttgactgatgttcagcaacccccatcccataacctgaggagcccagcaccgtctgggcatggtgtgtcagtgaattctctgcctcaacccccctcagggtcccagtctctg

SEQ ID NO: 188517 - DNA, 122 bp, Homo sapiens
gctgggttttcattttgtctgcaggtaacctggcctcattagaggctctgttggcaatctcgttcataacatcactgtgtaaacattttatgccgttgatgtttttgattgtttaatcaggc

SEQ ID NO: 188518 - DNA, 122 bp, Homo sapiens
cccctcctgcctcgttcaggaagctccgcacctatccggccgccaccctcagcacagccacggcagccgactcggcgttcctactgccccggaagtgctccttcagcgcagaggcgtgccgg

SEQ ID NO: 188519 - DNA, 122 bp, Homo sapiens
aacttttcggaacagcaccccaccgcccacccccgcagacccccggacccccgctcccggcggagactcagggaaccccgcaccccaagcccttctaaatcgtgcagcgtgagtgtgacggc

SEQ ID NO: 188520 - DNA, 122 bp, Homo sapiens
cagagcgccaggacgggccacacagaaggctctgtcgccttgcacggctctccagcttcacgacagaccagccagagatggacagtgtgccaggggtgggattggaactccagaaggagtct

SEQ ID NO: 188521 - DNA, 122 bp, Homo sapiens
ggacctccactggccgcccgcctcttccggccccgcgcgctccggggtcccgcgggctcccggcctcgggacacttccggtcttggggaactcccggccccctcgcagtcccggcgcccggg

SEQ ID NO: 188522 - DNA, 122 bp, Homo sapiens
gccacatctttgctttctccacgttgatggcgcatgcgtgtcgggagtgtctggactaagcgccccgtcaggctgatgtctggtttctgtacactgtctttaagctgagactaagaaaacca

SEQ ID NO: 188523 - DNA, 122 bp, Homo sapiens
cgaccagccacagctgcacctggttgttggaaccggcatagagcgaggccccagtggacacgcggatgcggtagagacccatcttgctcaaagatgtttcgctccttctggtggagaagggt

SEQ ID NO: 188524 - DNA, 122 bp, Homo sapiens
agtatgaatattgcagcataaaccatgaaggccttcgttttcttcttgaggcagtttggccgtagggaggggctggacctgcagaccctcagcctttgcgtcagacaggactgcacgagagc

SEQ ID NO: 188525 - DNA, 122 bp, Homo sapiens
agagcactgccctggagactttctcaatgcatgactgcagcagctgactgcccgggctgtcgcagggacagtgtgcatgatcaccctacataatgcagacctgtacaggttagggaggccgg

SEQ ID NO: 188526 - DNA, 122 bp, Homo sapiens
acctggatccgaggtcggcccctgtccccggtgctgaaatgcgggcgcccgcggggttcacggccaggactcagccctggagtccctgagaccgctagccccgtagcaatcccctatgtagg

SEQ ID NO: 188527 - DNA, 122 bp, Homo sapiens
gtctttcttcaaattctgtcccacaccgttaactgcaaacttctttcagaacacctttcacgaaaatgaagctggcatagctgtggaaagagttgatggtagtgttgtatataattgtgaaa

SEQ ID NO: 188528 - DNA, 122 bp, Homo sapiens
gccgggtcctccctgggaacagggtgaaggccgagaacctctggcctcaggaagcgcatgcgcaaccggttctccgaaacatggagtcctgtaggcaaggtcttacctgaatcaggtaagag

SEQ ID NO: 188529 - DNA, 122 bp, Homo sapiens
gtgaagacggagcccctgtgcccccagaggcatctctcagccatcccagccctgctgaaccgtgagtcatgagtgcagagctctggccaagaacaagttttaggatcctctctgcaggctct

SEQ ID NO: 188530 - DNA, 122 bp, Homo sapiens
aaacaaactacagatcagatttgaaaaggacacgatcagaaggaacaaatggaaacattccgaagtcctgtcctggagcgctagttactcgctgcatgctgttctgaaaatgcaaatattga

SEQ ID NO: 188531 - DNA, 122 bp, Homo sapiens
cgtgtgcggagacagcagcagcgggaagcactatggcatctatgcctgcaacggctgcagcggcttcttcaagaggagcgtacggcggaggctcatctacaggtgagtgcggtgggccctgc

SEQ ID NO: 188532 - DNA, 122 bp, Homo sapiens
ttttcctcctcggtgggggcctcggggtccacctcgatcatcttctggtacatgtccttccgcaggctgggcttcttccgggccttcgtgagctcctcctccaggtaggtcctacgtgggag

SEQ ID NO: 188533 - DNA, 122 bp, Homo sapiens
gcaaggaacttgcctggtggagagcaggcctggtagctgtgtgcggtgggcccatgtggtcgtttatttttagaaaagaaaaagcaccaaatggaaactgagtgagaggctgaactctttct

SEQ ID NO: 188534 - DNA, 122 bp, Homo sapiens
tctgagatttgcttcagggcggagatctgaattcctgagattccgatggggccatgtgggcgtggtctcggagaggagataggcgtggctgggcggcatggagggaggggtggggaggacaa

SEQ ID NO: 188535 - DNA, 122 bp, Homo sapiens
ataacgtccggcgccacacacactaatctgatccgggactttcaaaaaatttccactttgcgtctcctggagcagaagtcccgcaagattcctgcactcaccgatgagaattgccaccatgc

SEQ ID NO: 188536 - DNA, 122 bp, Homo sapiens
cagttgctgctgcttcccaaggagacgccgccgacagcggagtagtggttgctgctgctgcgggggcggcagccagaggtcccagcgctccaacaaccggagctcaggatgctgctccggct

SEQ ID NO: 188537 - DNA, 122 bp, Homo sapiens
cagggacagccctaaactgcctttcgccagaatcggacggctgagaatccagtgtcgtcgcggggtggtgctgccagctggctccgggtggtcggccaggagccagccttgtgcacctgctt

SEQ ID NO: 188538 - DNA, 122 bp, Homo sapiens
aggtggatcacttgaggtcaggagttccagactgacagtctggccaccatggtgaaaccccgtttctaataaaaatacagaaaaattagctgtgcgtggtggtgggtgcttgaattcccagc

SEQ ID NO: 188539 - DNA, 122 bp, Homo sapiens
gcagtggggtgcagtcccccgggctgggccactagccccacagggatggggacgtggtgccggctgaggacccaggggcttcactccactccatctcacgcttccagctaccctgctctttg

SEQ ID NO: 188540 - DNA, 122 bp, Homo sapiens
tttcttaggtatccttaggtctgtgtctgcggtggctgagcagggatggggcaggcacagcggtggagccccacagtggccaggcagttaaacaggcacgcttacagccatctgtccagcct

SEQ ID NO: 188541 - DNA, 122 bp, Homo sapiens
acagcaagacagtgttctctgcaacacacaaattagattcgagctcccgctcttggggctcgcagtctaatttctcttctaccatggagggtttaaaccgagcaaagggagatctcagaaaa

SEQ ID NO: 188542 - DNA, 122 bp, Homo sapiens
acggcggaaggctggcaccacgcagccttcggcgctgcccgggcgttcctccgcagccgccgctgccctagcaagctttatggtcagtgcctggatgtcccctagtgttcagggcagctggg

SEQ ID NO: 188543 - DNA, 122 bp, Homo sapiens
tttagaaaaagttctggtgctttggccatcatcccgattacgtttgcccatgacatgatccggctgtcatggaataaagaaacatgagggtttcaatgcaaggaatgtttagaaatagagaa

SEQ ID NO: 188544 - DNA, 122 bp, Homo sapiens
tgcataccttccaaactttcttgttcatccgaggtgtaagtgtccatctgactttgttcccgtaagaaacgaataactgcataaaccaggtgcttgatagatgacattttagaagcttaaac

SEQ ID NO: 188545 - DNA, 122 bp, Homo sapiens
ccatgcgggaaccacatccttacactcacctgatgctctgacatttgacctgagacttgccggcatcctctcaggttaccccacccatcccacgcagggcaggcggagccccagcaccttcc

SEQ ID NO: 188546 - DNA, 122 bp, Homo sapiens
cagaccacagcagcgcaggatgatgtgggctggcccctcacctccaggagggaggtctgacgatggcattttgtctgagatgcccgtatcatcactcaggctcgtcatgaggacgggccgca

SEQ ID NO: 188547 - DNA, 122 bp, Homo sapiens
agtctccgagagttcccctgcagaattcgtcctgtggcccacagagagaacccactcacacgctcatccatgtaggattccctctttgctcttttgcatttcactttctcacctccctacca

SEQ ID NO: 188548 - DNA, 122 bp, Homo sapiens
caacttcagatctcttcctttagtagcaagacactcacctttcctggccaaggaggatatcggccgagtttccccctagagaaaacacaaagagtcaacacttgccctgcaaaagccagtcc

SEQ ID NO: 188549 - DNA, 122 bp, Homo sapiens
gggagcgggtgggtgcccagggcagccaggggcgcacgggttgggaggcgccaggcggcccgccctccttgcacgggccggcccagcttccccgcccctggcgtccgctccctcccgctcgc

SEQ ID NO: 188550 - DNA, 122 bp, Homo sapiens
aacatcccaggtaaacagaaactgtccctgaggaagcccacacgctgaacttgacatagacgttaactcagctttataaatacgttcaaagaactagaaaaaatcatgtctaaagaattaaa

SEQ ID NO: 188551 - DNA, 122 bp, Homo sapiens
gaggggagtagacccggcccttcgccgggcagagaagatgttgcccctgtccatcaaagacgatgaatacaaaccacccaagttcaatttgttcggcaagatctcgggctggtttaggtgcg

SEQ ID NO: 188552 - DNA, 122 bp, Homo sapiens
cgcgccgcgccccacgcgcacacgcacgcgcacaggcgcgcgccggtcggccccgcgcgacgttcctcagcgagcccggccttctcacacacacgccgctggggagcttggccgtcggcgtc

SEQ ID NO: 188553 - DNA, 122 bp, Homo sapiens
gagaaaagaaaagtgaaagttaaactatgctctgagctggctcctgatcctgcctccagacgccagccccagacaggccattcagggtctaaaacctgggatgagttccaggactctcaaga

SEQ ID NO: 188554 - DNA, 122 bp, Homo sapiens
gccggattcccggagccgcttgccgggctggggcgtgtagcgggcgggctgccctctgcccgctccgggctagccaccaggagacaaaaggcaggaggcccgcctcttcctgcagcttcccg

SEQ ID NO: 188555 - DNA, 122 bp, Homo sapiens
ctctcttttgggctgcgctaaagccggcagtcccctagccattcttacacaaaatacctgcgtctgaatactcctttcatccggtcgctcggccagagtctgcaggacagacttggcagcag

SEQ ID NO: 188556 - DNA, 122 bp, Homo sapiens
agagaagtctgagctggagatgcagggatgtctccagcacacagctagtgtctccagccacgagagcaaacacacacatactttcaggtgggctaagtgccatggaaaaaaagagaaaaggg

SEQ ID NO: 188557 - DNA, 122 bp, Homo sapiens
ataagggaaaaggaaacccctgactcccctagccacagaaagcgctgggcggaaatgaaccggcctaggacgcgccctgcgtggaggcaggcccgcgcggcggaagtgcgtttctggggctc

SEQ ID NO: 188558 - DNA, 122 bp, Homo sapiens
ctcacctccccctcgccgctcgaccccgccctcaccacactgaccaccctcaacccattgcgcccagtccccaccacagtgaccacaccctcactggctcggccctgcccccagtatactga

SEQ ID NO: 188559 - DNA, 122 bp, Homo sapiens
ttcaggtgccatttccatttttggtggtttaaaaacatgacctattcccgtgttcatttacgaagctgtcaatgtctgtgctttccatgctcttgtatcaatcagtaggaagtatggtgcat

SEQ ID NO: 188560 - DNA, 122 bp, Homo sapiens
tagtataaaagcaccatgacgtgtggctgctccccacatccaaggcagtgtaccagccttcgtccaatctctatttcagcagaacactccttgtggctcacggagaaagctgagccaagttc

SEQ ID NO: 188561 - DNA, 122 bp, Homo sapiens
aaaatgccttcttttgtgtccatggttccctcaagaatgtcacataagctatacaattatcggggtataaaaaagaaatgtttcataaccaaacattgtccaagctttgtcaggtgaccctg

SEQ ID NO: 188562 - DNA, 122 bp, Homo sapiens
ctgctttcctctatttttaaagctgtagtatgaagccaaaactaaaagaggatgggcttgcgatattcggggtgcttgggcagccatgtgtgagtatcagcttccagaccaatgctttgtta

SEQ ID NO: 188563 - DNA, 122 bp, Homo sapiens
tggttacttacgatactctcgctctgttccaggggctcagtgacagctgccttcctgagccgcttcggttacctttcgcacccacgagacgaaagcttccgagagcgggagagagaacaaga

SEQ ID NO: 188564 - DNA, 122 bp, Homo sapiens
ttttataggcacttgcactgtcttcttagcagaattgccaatggccttcctcgagtcctacgtttagcgattggcaagaatcatgcactgacagagctcgactccggagggcacaaggaagt

SEQ ID NO: 188565 - DNA, 122 bp, Homo sapiens
cctcccctctcaagggctttcctaggacagaacccctcttacctgcccctgtatcccaggcgaagatgggcttaccttggatgtcacaggaactcatttggtggagaaagatatcgagaacc

SEQ ID NO: 188566 - DNA, 122 bp, Homo sapiens
cacatctttcaatgcatcccagcaaataaaataattctgagaatgaaggctgtcagtttccggattacaagggctcagcgcacctagtttcaacgcaatggaaggagaaagcaccctgcctt

SEQ ID NO: 188567 - DNA, 122 bp, Homo sapiens
tgcacccgtctatatttctttattaagcctaacgactggagtctttttcaaaaaagcacccgtctccaaatcctctcaattccagtgtggcaaacagcctctcacttacaacaaatagcaca

SEQ ID NO: 188568 - DNA, 122 bp, Homo sapiens
gggcgcaaagagcgagcacaggaagacctgcgtatccgagtggcagcgcttggccagcagcggcagccagctgctcgcctgctgcttcacttcggccaggctctcgtgctccagcaggttgg

SEQ ID NO: 188569 - DNA, 122 bp, Homo sapiens
taaaaaaggggggcctgagagttggtgcctcaggaccccaggcacccgctaggttcccaacggaccggcagacccccacagggtgggtggatgaaacgcagccctgcgcaggcccctactgc

SEQ ID NO: 188570 - DNA, 122 bp, Homo sapiens
ctccagttcctggtggtgttctgcctagcactgcagctggtgcctgggagtcccaagcagcgtgttctgagtaggtgctggatctgggcccaaggagggaagtaacatgtgtggataggaga

SEQ ID NO: 188571 - DNA, 122 bp, Homo sapiens
tggaagacagccactcccaccaagcttcttgactttagtgtttaaaatctgcgtctcatgcgtgagattacactcctccaaacagacattgcgcctgtgtcacttcacccaaaagggcttta

SEQ ID NO: 188572 - DNA, 122 bp, Homo sapiens
agcagcgcgtcccgtacccggccttggcggccacggtcttcttctgcctcggtcagaccacgcggccgcgcagctggtgcctccggctggtctgcaacccatatccttcccggccggcgggg

SEQ ID NO: 188573 - DNA, 122 bp, Homo sapiens
atagggatgaggggagcctggggcttcccacatgcatgatgcatagggatgagcagagcccggggtttcccacatgcatgatgcatagggatgagcagagcccggggtttcccacacgcatg

SEQ ID NO: 188574 - DNA, 122 bp, Homo sapiens
ctgcggggagaggggacccggcgaggggaggccccagcccgagctctactgcaagttggtcgggggccccaccgccccaggcagcggccacaccatccaggtgagggcctcggagagagccg

SEQ ID NO: 188575 - DNA, 122 bp, Homo sapiens
ataagagatcatatctcatggatctctgcagcatataaaatggtgccccattcattctttcgttcactgaatgtgtattctgatgcatcccagtggtcctctctttattgtggacatgtgac

SEQ ID NO: 188576 - DNA, 122 bp, Homo sapiens
ctaaattgggggttatttggggatcacctggaggagtattcctggttttggtgaaacacacgggggtattttttgtgaagctgcaaatctggcacagcaataacagctggggaactggagat

SEQ ID NO: 188577 - DNA, 122 bp, Homo sapiens
aaaagttggttaacaagagctcgtcacactgctgtattagaatccatccagcctctgattcggaagcccttgcatttaaccaccgcgcagtactacaaggatgaaggagcacgtgggtcctc

SEQ ID NO: 188578 - DNA, 122 bp, Homo sapiens
accagcggcgtctgggtgtggagctccaagactttccagacctggcagagcctgtgctaccgcaagatagcagctggccgggcccgggccaaggcctgccgcgcccccgggagctacggacg

SEQ ID NO: 188579 - DNA, 122 bp, Homo sapiens
aggccctgttcaagtgttacctctcctgtgaagctcccttccctggggaaggtgacctttcgctgccttctgactcccacaacagggggaatcccccaggacacctggccaaccttactctc

SEQ ID NO: 188580 - DNA, 122 bp, Homo sapiens
aagagaggctggtaaggctctcatcaccttaggggcttcactcacattcataagagacctcgtggggaaactaaggttcagggattgcagaggcgtattgggggcgcagggggcgggagcaa

SEQ ID NO: 188581 - DNA, 122 bp, Homo sapiens
ccttttggggtcacggggtggccctctgccgaaggtgtgtgggctcgtgggcccagggcacggggcttgtgggcagggtgcctgccagcttgacaccatgtgccctccccattgtggctcca

SEQ ID NO: 188582 - DNA, 122 bp, Homo sapiens
cgtttttttttgctcttcaggaatgagtctcgctgttgctcattctgtggatccctgctgcgtttataagctgtaacgctcagcgctaaggtctgcaggttcagtcctaaaaccagtgagac

SEQ ID NO: 188583 - DNA, 122 bp, Homo sapiens
cacgcccagctttgcccttagacaggtcacagtttcctcacgcccctgctcagacccccgcgggggcccaaatctcagttcctaccccagattgggagcagcctagtcgccgcacctgccac

SEQ ID NO: 188584 - DNA, 122 bp, Homo sapiens
gggcaggccccgtctgtcctcaggtccctgggaagttcctgagggccgcccagcggggagcggaaaatcgaaggcggacgggcacagcaactctgttttacacagagacactgctcaggttt

SEQ ID NO: 188585 - DNA, 122 bp, Homo sapiens
catcgtgaccgctaacccggtccctccgcggccttgggtttaaaagcgtctgtgtccagccgggaggtgaactcctgacagcaacgcccgtccagcccacacctctgcctggcagtgtgcag

SEQ ID NO: 188586 - DNA, 122 bp, Homo sapiens
gaatgtgtcgcgctggtgtctgacgtccatgcggggctggtatctgacaggcagcagtgccgcttgctgagttgtgtctcagcttcaaatcctcccttcctaaaccaggatccgagctgcca

SEQ ID NO: 188587 - DNA, 122 bp, Homo sapiens
tttaactgctggctgccgtgtgtctggctctgcaccctccctggctcctcctgggtgtcacgcgcctgtctttgtccatggaatgctggtctgggactaaaaacaggaaaatcacagtcttt

SEQ ID NO: 188588 - DNA, 122 bp, Homo sapiens
tgcccacctgcgaagtccttgacgttgacgtctgccccctcgctgatgagctctttgatgcgccgggcgtccccgcggatggcggctcggtgcaggcgggtctctccacgctcgtttctctt

SEQ ID NO: 188589 - DNA, 122 bp, Homo sapiens
gagcctgcgggcgtgttgcgggcgcgcgggaggacctgcgtgagtcggggcacggggaggcgccggactgacgtgtgcaccgtgtgtgcgtgcgcagggacacgcgggttcttgctggaaac

SEQ ID NO: 188590 - DNA, 122 bp, Homo sapiens
gctccgagccgcgcaggcctccttggcagacatcttcctgtgggaggatttcaaacgagccgtgaaagccagaaactacacgggttacaaactccggaatccctggccggcctcggcctccc

SEQ ID NO: 188591 - DNA, 122 bp, Homo sapiens
tgccccgccggacgggagcacgccttacccacgggtgtgccctgctggatgggaacacgccgtaggatgggagcatgctgtaccccagagcagctgggaggctgagccacagacgcaggccc

SEQ ID NO: 188592 - DNA, 122 bp, Homo sapiens
atgacggcggaagtaatggcggaagtggcaccgttgccaggcagccgttgcctggcgtcgcggggcgtactctgcgctgggcgcgcggaggcctaggcgggaagctcgagcggcggcgccat

SEQ ID NO: 188593 - DNA, 122 bp, Homo sapiens
gaaatcactttgttcctgcctgggagcaggagctgcatgtgtctgggagctgcagtgcggcgctcactcccgggctgcccggccttccctgcaaacctccgtaatcccttcccgcaggtgtt

SEQ ID NO: 188594 - DNA, 122 bp, Homo sapiens
tttgctcctcttctgtagctattgataagagggctgtgggcagttagtgataatcaaggtcgtatcccaactaagtgacagagctgagacagttaagttccaggacaagtgtgttgatctct

SEQ ID NO: 188595 - DNA, 122 bp, Homo sapiens
gtcacctcctccattccttctttccagcttcctctctctcgctatatgatctgtgcaaaccggctccccttctccttcggccacgagtggaagctttttgaagccctcaccagtgcagacgt

SEQ ID NO: 188596 - DNA, 122 bp, Homo sapiens
gggcagggggtggacagatagttgggctccacaccacagcagggactgtgggaacagcatcggtttgggatttccatcttcttcctgggagtctgcccctgaatggagcatgcctccctctg

SEQ ID NO: 188597 - DNA, 122 bp, Homo sapiens
ccctgacgcggtagggctggcgaggcaggctctgcatgcgccagagcttcgcgcagagggcgggtgagtttgcgccctgcctgagcacagcttggcagctgttgcagaagggcagggagcct

SEQ ID NO: 188598 - DNA, 122 bp, Homo sapiens
gctaactcttcaactgtgttcaactaaggaccttaaactgctctctgaggataggtgaagcgggaaaggctctaggtgtctggtgactgtttcttttgttggttcgtttgttttttcagcct

SEQ ID NO: 188599 - DNA, 122 bp, Homo sapiens
gttacactcgtctcacagacctagtaatgacgctaaagggaactttagtgacacacccagcgccgaccgccacgttaaggatacagctcttccgaggtggagagggctctcgccagctctga

SEQ ID NO: 188600 - DNA, 122 bp, Homo sapiens
cgagggggaccatcaccagcccctgggccctctgcctcttctccatctggtcctagttctcgaagtcgatcactagaagacacaaagctggggagatgcagactgaagatcaaaggggggtt

SEQ ID NO: 188601 - DNA, 122 bp, Homo sapiens
cctcgccggtctcctctgggctctggccgggcgagcttgctctctgcccctctccaaccccgagcccctggcgcctatagccgtccccgcgcagcggctccaacaaagccagaggaccggag

SEQ ID NO: 188602 - DNA, 122 bp, Homo sapiens
acttcagcttcttaattaacctcaaccaagaccctcatctgtaaaatatgatgataatagcgcctacctcatagggttgttttgcgtggggatcaaatgagtgcatacacctggagcgcttg

SEQ ID NO: 188603 - DNA, 122 bp, Homo sapiens
cgcagtggcccagcgggggagcgtgaatgagagctcgcattggtaagcttcttgttagttcgttggttcaactatagtacccttcagctaagcacacggccgccggccctccctcctctcct

SEQ ID NO: 188604 - DNA, 122 bp, Homo sapiens
aatggcgtctctccccatccaggggcctggcttgtttttctccataacccttagcattaccggtccttatgttatctcttatttcactaattattctttcattaatttattagtatttattt

SEQ ID NO: 188605 - DNA, 122 bp, Homo sapiens
gcgcacagtttcactttaaaggcatgcaatcactttggctcaagagtgaagatattcagtcgaaagtgaagtaagtgacagctaggatttcagagcgtaagtctcacagttccaagagtccc

SEQ ID NO: 188606 - DNA, 122 bp, Homo sapiens
gccttcgcttttgttttatctccattactcccttcagttgccactggcgacaccactactcgcccacgcttcttactggaggaggcccgaccctccgtagaatccccgcagagccggcctgt

SEQ ID NO: 188607 - DNA, 122 bp, Homo sapiens
catggacatgcctgggcagaccccatgccaaatttcatcctgtctcatagctttccattccgtttctttttcagtttctcattgttacttcctgccctgctctggtttggtgagttttgtcc

SEQ ID NO: 188608 - DNA, 122 bp, Homo sapiens
gcggcagaggccaagtactctagctatgggcactggccagctgctgggagcggaagcggccgccgagccctcctgggcgctgcccgccgccgccggctccggaaaccgggaaaacccggctg

SEQ ID NO: 188609 - DNA, 122 bp, Homo sapiens
ttgactctccacctcttcagttggtaccacctttcccaaatagtttggagcagagcactccggtctttgtaataacgtactcctaagagctgttccagtggactcacgcaggcgcaggagac

SEQ ID NO: 188610 - DNA, 122 bp, Homo sapiens
tgaaatttgagcataagcctgtctgccaccttctctgctctatcttcaaagcctcctctgcgcccaaggcaaccatccaaagaatgaaagcccagaaatccagggtccacacatctcagcaa

SEQ ID NO: 188611 - DNA, 122 bp, Homo sapiens
atactaaaaaaaaaaaaaaaaaaaaaaaaaaaggaaacaactcaattgtccattcactcacggaggaaaggttgaaaaaccttagtataacattatgcagtcacttaaagagaggtctttaa

SEQ ID NO: 188612 - DNA, 122 bp, Homo sapiens
ctggacaccggagtcttgggaggctcctggcggagatgggacagtggagtctcgaaaggccgaggacagaatttcccacaagggtatttaccaggctctgtgggttcgtcagttgtcttctc

SEQ ID NO: 188613 - DNA, 122 bp, Homo sapiens
ggcaccgtggcgtccgtgcaggtgactcgggacagcgaggggcaccgtggcgtccgtgcacgtgacctgggacacatgctcacaggaaaagggtttgttctgggcatgcctacagggcaggc

SEQ ID NO: 188614 - DNA, 122 bp, Homo sapiens
gctggagcgcgcgggccacggcttctctggggacgcagaagcgagaagcggggacctcggcgcgcgccccgcgtcccgctcttcctgcccgcgccccggcccccggcccgcgccccggccgc

SEQ ID NO: 188615 - DNA, 122 bp, Homo sapiens
gacaccgggcccggcggggcgcagtcgccagtgcgcccgggttgcgactgcgaagggaaccggcctgcggaaccccctgcgccaggggggacttcgccctcctcagatcccggcatcgaggc

SEQ ID NO: 188616 - DNA, 122 bp, Homo sapiens
agagccccccgaagtgggagggtcgggctggccgcggggccaatccaggcgcacagggagcgggggcgggggctgggccgagtggggacaggggcgggcgggccgggggcgggcgcggcgtc

SEQ ID NO: 188617 - DNA, 122 bp, Homo sapiens
tgggcatctctgtgttctccaccggcaggggcaggcgggaccctggggcagcacagcccacgcaggaggtgtgtggggtcggggtgactcccgggagtctccagcccggccctcctccagca

SEQ ID NO: 188618 - DNA, 122 bp, Homo sapiens
tatgctgcctctgctacaatggtgctgagctgtagtgacagacactatttggcccttccccgctttctccctcctccctccctcccttccttttctccccttccttctttccatcctcctgc

SEQ ID NO: 188619 - DNA, 122 bp, Homo sapiens
ttaaaaatcaaaataatatttacaatgcttacacacaaaaaaatagcatttttgtcactccgtctctcactagttcttgtcagctcttctcatccctccccacctgtgagggttaagctaca

SEQ ID NO: 188620 - DNA, 122 bp, Homo sapiens
cgagtgcccctcattctcctctggcctctggagagattccatgttgatgtgtgagatccccgaaagcaagcttgtgggacgcgggtgcggaggtagcagccaggcgtgctcgtctcgacttg

SEQ ID NO: 188621 - DNA, 122 bp, Homo sapiens
ggaagaagccgggcggttcgtcgggcggcggccggagcggcgagctgcagggggacgaggcgcagaggaacaagaaaaagaaaaagaaggtgtcctgcttttccaacatcaagatcttcctg

SEQ ID NO: 188622 - DNA, 122 bp, Homo sapiens
gggttgagactggggctgaggctgtggtccgtccccctttccaggtccttgtcttcctcccgtcggcctgggggcgcccgctcacgcggcctctctattgcagagctcttctctatggtttt

SEQ ID NO: 188623 - DNA, 122 bp, Homo sapiens
ggaaaaggaggataagcaagtcgaatttttgtcttacggtaaccggagggaattaaaaaacgggagagtctgttatgctgatgagtaacttttaagcaattatttttcttttctactttcag

SEQ ID NO: 188624 - DNA, 122 bp, Homo sapiens
tagcctcctccagatctaggccttcccagtcctagtaacaaaccccttgcatctaccaaccgctcaccttcaatgatcctagctctgtccttatttttcttaatctgtaacaattcatgaca

SEQ ID NO: 188625 - DNA, 122 bp, Homo sapiens
gttagtgacgagtgtttgtctatactggcacatagcggagtcttttgctcccggcttactcgcctccaggaaagctttggggtgaggcgaaggcgattgaagcaatgccccttcccccagat

SEQ ID NO: 188626 - DNA, 122 bp, Homo sapiens
atatcttattccagtaatgcaaaaaacatgtttctgtgacttactttagattaagatcaccgcaagtgtgatcacaacttcccattttaatgcaaccaagcactttcattaaaacaaactag

SEQ ID NO: 188627 - DNA, 122 bp, Homo sapiens
ggacgacctccagcagtttcagcctccttgtctacccccagtacagaggccacggtgactcggtccccccacccaccacagaatcctgtcctcgggcctcacgctggggaacacgaagcccc

SEQ ID NO: 188628 - DNA, 122 bp, Homo sapiens
tcgtgtgcgtgggctcaggtggtaagtgccgctggtccgggtctgcaaaaacagtgcaggcgtctgtgaccccagcgctgtcgtggcagcgtcgggaaggagttggaggtgagctgggtgtg

SEQ ID NO: 188629 - DNA, 122 bp, Homo sapiens
tcccccaactccagcagctcactcccagcgccagccctcggatctcaggtttgatgttgccgctgcctgcaccttccaggtggctcctcagcggctcagactcccagactttcgtctccagt

SEQ ID NO: 188630 - DNA, 122 bp, Homo sapiens
gcagagaccggtagaagtctcgtcctacgttggcaggggcagccacacatgtggagtgggcgtgggggtgggctggcatctggctgtatggttgcgccttctctatgttgtgtctatgctgt

SEQ ID NO: 188631 - DNA, 122 bp, Homo sapiens
gctccacggcgcccagtcccatagaccgcccaagggctgaggagtgcgggcgcacggctccggacaggcagggaactccacttgcgcccccggtgcaggatccactgggtgaagccagctgg

SEQ ID NO: 188632 - DNA, 122 bp, Homo sapiens
agaaagaggcggcattttgaagacggaagaagcactaaacaggaagcaggagcctaaaatcgagtttctcatactgctgtgtgttactgtaaacactaggccatgacctgccctaggtgctt

SEQ ID NO: 188633 - DNA, 122 bp, Homo sapiens
ttgcgccgtgcaggctgcggagggtgcgagagcagggagaagcgggaggacggccgtgggcggcagaacaggctttttggaggatggtggccttgagctgcctctgaaggtcgtgtatggtt

SEQ ID NO: 188634 - DNA, 122 bp, Homo sapiens
attaggtatccaagaattggtagctttgtgtgtggagatattttaacattctgcacttggcgcacctaaactcctagcaattaaaggatccagagcccacctgctgtgataagcatcactcc

SEQ ID NO: 188635 - DNA, 122 bp, Homo sapiens
ccgcccctgtcctcgggcccggccagcgccgcggcctctggctccgcctccacacgggcccgcaagcaggcaccgcccccgactctgcccccagccccggctcgggcccggcccccgcgagc

SEQ ID NO: 188636 - DNA, 122 bp, Homo sapiens
agctgccaaaggttttattctccaggaggaggggctctcgggggctgtgagcagcaggcacgaggactttattgcacgtgtggttaggtgatgacgacctacagctgcactgggaactggga

SEQ ID NO: 188637 - DNA, 122 bp, Homo sapiens
ggttctgaggaggctgggaggcagggctgagaggtggccgagagagaggagtcgcagagccgccagagtgagtcaggcacctccactgggattacagatcccagagcctcgaggagctggaa

SEQ ID NO: 188638 - DNA, 122 bp, Homo sapiens
gtcactggtcccagagctccggatcgcagtggttccattttaaatttctttgcttcctaacgcaacctatgttttctacggtaactgaggttcccgtgttctttttcaccatggtctctccg

SEQ ID NO: 188639 - DNA, 122 bp, Homo sapiens
aattgtttactgtccaagctctgctttcctgaagggtagttacaactgtgaggcagtggtcgctatggcttcctgcagtctccctgagttcctgcctgctccagtgacaacataatagcatt

SEQ ID NO: 188640 - DNA, 122 bp, Homo sapiens
ctgccaattcacggatgagttgccaagcccagggttaaaaatgacatgctgggctgggcgcggtggctcacgcctgtaatcccagcactttgggaggccgaggcgggcagatcacgaggtca

SEQ ID NO: 188641 - DNA, 122 bp, Homo sapiens
gccggaacggagcctgcagctccgccgttttccaccagggcgcgcgcctgcaccacttcccggagcagagcggccttgcgagtcccacctggctccctgtcctacccaggcgcccatttgag

SEQ ID NO: 188642 - DNA, 122 bp, Homo sapiens
agctcttttagtgggtatctgggtggctcttaaaagagcctttggggttaggtgttaagacgcttacttggaatgtttacttggagctggtgtacttggtgacggccttggtgccctccgac

SEQ ID NO: 188643 - DNA, 122 bp, Homo sapiens
cttttataaccgtagtcgatttttctttcgtgtgaatatggttttcgtgtcattagtttgcgatttgatttgcttacgtatccagcctggaaaatcttcatcacagggtccggttcctcgag

SEQ ID NO: 188644 - DNA, 122 bp, Homo sapiens
caggaagggaagacattagtgaaaagacgtgacaaggtgatgctaatctatcactgatgacgcaaaattgaagaaaacaaccagaagtggttctctcccttcttcaaacaggaggaaccaca

SEQ ID NO: 188645 - DNA, 122 bp, Homo sapiens
ggcaggtcggcaggtggagagagccgcagacgcgggcgtgagctcatcccgggcactcggcgcccagaatgcgcagccagcggcctcccgtgcgccagccctcaccctccgcatccaggcag

SEQ ID NO: 188646 - DNA, 122 bp, Homo sapiens
gtaccaagtcctgctttgtttattttaaaagtcttaatacagcattagccatgaggataccggcttatttgcttttggtttcttgcttgtggtttttgtttttatgaggagcaaagaagcta

SEQ ID NO: 188647 - DNA, 122 bp, Homo sapiens
cgttcctccggcccccacccagctcggctcccctgatcctcctcctccctcctccctcctcgagggctaggatagttgccaaggagacagccccgccccggctcccagaggcacagcttctc

SEQ ID NO: 188648 - DNA, 122 bp, Homo sapiens
ctgtggctcagcctcccccgccccgcgctgccatctcctcagggccgggcagcaggctcccgagcgcccacagacccggggtgcggcccagcccacaaccgtcacctcaggggcctcaggcg

SEQ ID NO: 188649 - DNA, 122 bp, Homo sapiens
tctacatgtataattcaatgattttttaataaatttactcacttgtgtaaccatccacatcgtctagttatattttttattttttccagtttttatttttattacgctagtaagatctctca

SEQ ID NO: 188650 - DNA, 122 bp, Homo sapiens
tgactcccatccctccagatccggcagggtgtccgctgtgctcctgatccagcaagactccggttgccactcctgattttgctaaaggcttgccattgttcctgcacggctaagtgcctggg

SEQ ID NO: 188651 - DNA, 122 bp, Homo sapiens
agcggaagtccagcactattgccgctagaggaggggaggggtgagaagcataagtggcaccggaagtggaattaatccgcctacctctcctgcgcctgcgaaacagaaaagacaaggcgcct

SEQ ID NO: 188652 - DNA, 122 bp, Homo sapiens
cccagcaatgtcaatatccagcggcgtgtccaggctgtggcccaggagggtctccagcagcgtgcggttggccagagtctcattgacataaagatggaccaaggctgtgccatagcgtgggg

SEQ ID NO: 188653 - DNA, 122 bp, Homo sapiens
agaggtccacgctggcgcctgcgcgtgtggttgaggatgggctggcggcgggtccgggtccgctgcctggcgctgcgggcggcgggccatggtggtttggattgagccgggcccggccgggg

SEQ ID NO: 188654 - DNA, 122 bp, Homo sapiens
gcccaggaaagccagatggaaaaaccctcttgccctgaaccagctcattttctggccagtcgccccttccagcgcctgtcccggaaacctcgcggcctagcgcgcgcagcccgccgcctccc

SEQ ID NO: 188655 - DNA, 122 bp, Homo sapiens
aatattgcatgatgagcaaaacatcaaaataaagatgggatcccatcctgcactttcacgcgtctgcgtcactcaccaccccctaactctgactctgctggagagcacaccctaacacagaa

SEQ ID NO: 188656 - DNA, 122 bp, Homo sapiens
cttcaccagcacacagctgtcctgagggccccattgggattcactggcaggtcactgtcccgggacacctcccactgccccatgtgctacctctttcttaagggttcccaggaaataggcct

SEQ ID NO: 188657 - DNA, 122 bp, Homo sapiens
gcctttctgcaagcctctttgcttgcttcaattggccggaagaaccaacctgctggcagccggtgaggacgctacagcatcttctctcctcacttgcctcgtgcggtggctgctactcctcc

SEQ ID NO: 188658 - DNA, 122 bp, Homo sapiens
aacagcgttttatttggacgctctgaatccgttttcccctagcacatcggcagagcagaccgcctgcctcggccttgtcaacgccaagggtgttttggacggatgtgtctatcctgaaagct

SEQ ID NO: 188659 - DNA, 122 bp, Homo sapiens
gactcggacgtcccagggctgcgttaactgccaggtgctttacaaacggggtgactttgacgtttagccccacggttagaacagaaaacccgtctgccatgagaatcgagagagtctgaggc

SEQ ID NO: 188660 - DNA, 122 bp, Homo sapiens
atcggatcactcccacccgaatactgcgcttttccaacgggcttaaaaaacagcgcaccacgagattatatcctgcacctggctgggcggaggggtcctacgcccacggagtctcgctgatt

SEQ ID NO: 188661 - DNA, 122 bp, Homo sapiens
accgttggcgccggtgcccttcacctgcagaagcgtgtcgttctgcaccagcgccttgatcgagtacttgaggtaggtgcgcccattctgctggtcgaaccacggaaccttcttggcctcgg

SEQ ID NO: 188662 - DNA, 122 bp, Homo sapiens
gtttttgtcaacagcatttcccaaagtgtccttctggaacgttaggttctccactgttgccgtcattagagattctcttcccaaagagtgtcggaaaggctgggttatacaaagaaaacaag

SEQ ID NO: 188663 - DNA, 122 bp, Homo sapiens
gcgtgcggcgagggcgctgcgctactcagggcttccgcgaagccaggggcagcgcggccgcgtgcaaattaagtactcatgtcaccgtgttagctatggtggcttgaaagaaatgctttgta

SEQ ID NO: 188664 - DNA, 122 bp, Homo sapiens
gtatttccaattgtcatctatgacaatcaatgctgccattcacaactttcccaaaaggtccgcagatcccctccccattacggagttggaaagtttcttcccaaaggatccacgtgatgaaa

SEQ ID NO: 188665 - DNA, 122 bp, Homo sapiens
aaggggccagtgcagcgctagtgcggagagacaaggctccaggcacggaaaagcagatgccgggccggggttccagcgccgcagtcacggcggtggacggcaagctgtgcggacgactgggg

SEQ ID NO: 188666 - DNA, 122 bp, Homo sapiens
cctgcatctgaagatgttctaaaccttcatttaagtaagaagcaagatcaagatccattccgtcagttacctggagtctgtcatctttcggaataggggacggaatcacctcaaatttaact

SEQ ID NO: 188667 - DNA, 122 bp, Homo sapiens
cacctcccacagttcctccaccaccgcgtgtggtagacaagctctccctgtgtgtggctccggggaaggcctgcagccctgcagccagcgagatcacaggtctgagcacagctgtgctggca

SEQ ID NO: 188668 - DNA, 122 bp, Homo sapiens
aaagagccgcgcattccagtgagtccacgtgacgcggccgcgaggcctgaggtaaacaaccgcggccccgcctcccgggcctccgcgcgcaccgcgctcctcctcgccggcgggacgcgctc

SEQ ID NO: 188669 - DNA, 122 bp, Homo sapiens
ggccaggccttgggccatgaggcttcctggaacccgggacctggggagcttctgagcaggcggagtgtctccatatctcacgcaggctttgggaggaaaatcgcccccaacacccacaggga

SEQ ID NO: 188670 - DNA, 122 bp, Homo sapiens
cacaaaaataaccacttccctgggctgaaaactcccctggagtctgtcagtgcagagcagcgctgggctcaggatccgagatgggagcgaggagctgttccacccacaacaagcaggtgccc

SEQ ID NO: 188671 - DNA, 122 bp, Homo sapiens
gcgagcccagctcacctctagctctcagctcgctccatggactcaatacccgatccgcctcggggcctgggaaagttccctccacgactcccacaggcgccccgcctcctgggctcccattg

SEQ ID NO: 188672 - DNA, 122 bp, Homo sapiens
ggaggctgaggcaggagaatggtgtgaacccgggaggcggagcttgcagtgagccaagatcgccccactgcactctggcctgggtgaaagagcaagacaccgtctcaaaaaacaaaaaaaaa

SEQ ID NO: 188673 - DNA, 122 bp, Homo sapiens
gcggggaagcccctggctaaggcgggagctggggaaagggtaaacgggagtggggccgagcgagggaagccgcaactcccaggaagggaattggtaaatgagcgctgcacgccggggaagct

SEQ ID NO: 188674 - DNA, 122 bp, Homo sapiens
gccataggagcggctccagcagccgggcctgcctacctgggcttcttaaaggggcagcggcgcacgggccgggggctggaaaggggcggggggcgggcctggcaaggggcccaggttagacc

SEQ ID NO: 188675 - DNA, 122 bp, Homo sapiens
gtgagccaccgcgcccgaccaacacttgaattttaatacttactttgctactaactgtgtcgttgaaacagtatgttgctttccttctctggcccttagcttaactatctgtacagcgggaa

SEQ ID NO: 188676 - DNA, 122 bp, Homo sapiens
acttttctgacaagggacaacggttcctgcgcagatctgcagtttctaaagttgatcgcgcgattggatttgctccccttagaagaaattagtgtctccctcattgcagatgcaaatgcgct

SEQ ID NO: 188677 - DNA, 122 bp, Homo sapiens
acgcctgccccaccccctctagaaccaaagaacaaccagatgttcagtggattccgcctccgcagaaacctatactttaccccgcacccaccagagtcatcactatttgctttacaatagaa

SEQ ID NO: 188678 - DNA, 122 bp, Homo sapiens
tgtgaagcgcgcgggtggcaatcaagtcaccgtctccgtttactccccgcagtgtggtcgcgcaacttggagcgcagcccctcactcaccgacaagaagaacgggtgcgacccgatttaaga

SEQ ID NO: 188679 - DNA, 122 bp, Homo sapiens
agcactcactgttgaaagagaaaatggaaagaaaaaaagccacacaatgtaaaatgaggtcgggttacccatactgcttttgcaataaaacagagaagaatttgtaggctttaaagtttacc

SEQ ID NO: 188680 - DNA, 122 bp, Homo sapiens
actcgtttcccagcaaacacgtgcacatcgagcactgcagaatgttctccctgatgggggcgggggctggccagggttgagtgccactttgacgaaagcacgtggctatctgaagtttgtgg

SEQ ID NO: 188681 - DNA, 122 bp, Homo sapiens
gacaaaagtaaaaaatgaagcaagagacaagcccgcagtttgcagtagatttggaagaggcgatgtttggctgtggtgatgccccaaaagggagagctacgatgaagtctgcagggcgtgtg

SEQ ID NO: 188682 - DNA, 122 bp, Homo sapiens
tgggtgtaacttcagtggcgatgacggctgtgaattgggttttttcgcaccgcagaagggcgagagaggttccagaacgggcacaggaagggaaccgctatctagaactgcctaacccgaaa

SEQ ID NO: 188683 - DNA, 122 bp, Homo sapiens
ctcccccggaccctggccccggacctgcccccgccccgcccctacccggagggcgccagacgctccctccaggcctctggctgagcccagaacgctcaagccccttcctacctggacctgca

SEQ ID NO: 188684 - DNA, 122 bp, Homo sapiens
aaagtttgtgtgggatttcaagcaagggcattctgtgtacttcatttattgaagagacaacgtcttaatcttgaagatactgaaggagggagaattccaagccctttgaagatattgcaaga

SEQ ID NO: 188685 - DNA, 122 bp, Homo sapiens
gggggcagagcggaggatgggaagctcgccttgacggcaatcacactctcactgactgtccggcggggctcccgggggctgtcgcccacactgcccactgacttcaccatcctgggcttacc

SEQ ID NO: 188686 - DNA, 122 bp, Homo sapiens
actgaaaaccctgatgcggtgcctgcaccgttgcctcctttcctgcagctgtaaatgggacgagtaattccatccccctcccgcttccacccttcagcacagacgcagtcttcagcaaggaa

SEQ ID NO: 188687 - DNA, 122 bp, Homo sapiens
tatcagcttttatatgttcacataagcacatgtactcatgcttacaatcatgaacatacacgttttcatgtttatatgtgcacatacaggcacctctgttctgtatccagcatctagaacat

SEQ ID NO: 188688 - DNA, 122 bp, Homo sapiens
tgggtgggtgggggtggcgaaccccgttgtgcatgactctcggggggctgggtagatctccggttgaggggatcccggggagggagtgtctggtagggaagatgcttccagagtgattgtag

SEQ ID NO: 188689 - DNA, 122 bp, Homo sapiens
ctctcttacagcattcacaatccggaacaatgtgagggtactgactcaactaatagagcacgaataacaaccactcagcatgtgagctgaccgtagctgacccctgtggtcacgctgctgac

SEQ ID NO: 188690 - DNA, 122 bp, Homo sapiens
caacacagtgcagatgaaagaaaggcagaaaaaacattttggccagagcagatgcgaaaccgttagagtgaaaagaacaggctcgctcttgactcgctggggcagatctcgccgcagggcag

SEQ ID NO: 188691 - DNA, 122 bp, Homo sapiens
accagcaggggccgcccttggaagggaactcctgctcctgccgggccagccacagacccccgtcttccccagcacccatgacccccggacggtgaccctggacttccggaacgcggggatcc

SEQ ID NO: 188692 - DNA, 122 bp, Homo sapiens
taaaccagtgtttggtatttgtctgtgctgatcctagcatctgtagtgtgcattgtgattcgtatttgctgcatgcttccaaaatgcctgttaatgagtgaagcagagatgagcaggtcctg

SEQ ID NO: 188693 - DNA, 122 bp, Homo sapiens
ggagcacacaaacttaactaattactatgcaattaggatgaaggtatctatgtgcataaacgtagtagtttggaagcaaagaataggaagtcactgattttcataagtggtaaatgagcaaa

SEQ ID NO: 188694 - DNA, 122 bp, Homo sapiens
ccagagccccgtggcctgtgccgtggcaagccacagaccctgcctcttcctggtttgtgccgcaggtttgggcgcaggctggtgctaacctggagctaccttcagatggctgtgatgggtac

SEQ ID NO: 188695 - DNA, 122 bp, Homo sapiens
cccacgagaaatgcggcagcctggggttccccgcacgtggctgctgcccaggcagttcagcggtcactttgagacgggactgtggctgcccccatcctcattgcgtcctttcggttttttac

SEQ ID NO: 188696 - DNA, 122 bp, Homo sapiens
tccaagagggagaagggcaaagatgagctgaggcccattattcctccaagattggcccatcgggtcaatgacttcatctcacatgtggcagagtagtaatggagttgggagagagtgtcaca

SEQ ID NO: 188697 - DNA, 122 bp, Homo sapiens
atggcgacaatatccactttaccagagttaaaagcagccctggagaccaggcgcccaatacgaccaaatccatttgttccgaccttcaccatgctctcagggatgtgagaaaagatgcggct

SEQ ID NO: 188698 - DNA, 122 bp, Homo sapiens
gtacctcccatttcaaaatacataatgtatatcttttgtttcaagagatttataccacagcgaagtttaacaaacagggctcagacaataccttttttaaagtaataatttaatatcaaaat

SEQ ID NO: 188699 - DNA, 122 bp, Homo sapiens
cctggctcggcctgaagcctagagctggcttgaagaacacacacagaccagaagacagcacggtgagttacaagtgccacggagaccagggtttctgacacaggatgtggaggatgcttctc

SEQ ID NO: 188700 - DNA, 122 bp, Homo sapiens
tcccgtgacccggatgcgttcttctccgggaacacgcgttggagtgcgtacgtggaagcccgcgaggcgttggctctgcctccgttgcagcctgggacgaggggcggggccagagtcgtggg

SEQ ID NO: 188701 - DNA, 122 bp, Homo sapiens
aagatccagaaatcaggagccattatgtttctcattttggagaaaaactgtaaaacagctcggcctcttgtccaccttgccccgaaggcaagtctggatatgaaaagaaaaaggcgggcaac

SEQ ID NO: 188702 - DNA, 122 bp, Homo sapiens
gggcgggggttcccggatttcgcaaatggaaatgcaggactcctggttaagtttccagcgcggagaaacacgcatactttctgagtggtgtcctctgcaatatccgggcagcggagcgcggc

SEQ ID NO: 188703 - DNA, 122 bp, Homo sapiens
ctcttggcttgggaacagaataatggcagtgccttcacaactcactatatgctgaagtcacgtttgttgccaattcttttcatattcaaaataattttctggtgtatgtaacacaacttatt

SEQ ID NO: 188704 - DNA, 122 bp, Homo sapiens
ctgagaagtggtttcccccatatatgattcagtctccttgacaaatatactgcattgtaccggatgagtcatccgagggttagtccgcattttataggcctgttgtgtcattactcacattc

SEQ ID NO: 188705 - DNA, 122 bp, Homo sapiens
aaatttccttcacactaatctctgagtcagagtatgcttcacagtaaactcaagctgcaacggttgggccagaagtgattggagagagcagacatagatatgggatcatcatgctggatgac

SEQ ID NO: 188706 - DNA, 122 bp, Homo sapiens
ctgggtaattgtgaagttagacatgtgtttccttgtaaatgtctctctgcagagtcatctcgtttccaaagccctaaagaaaattaacagcagaaggctgccggttaaccatgtactctcat

SEQ ID NO: 188707 - DNA, 122 bp, Homo sapiens
tctgaatcccaggagatctgcggggggagccttgggctaggccccgtcacgggagagcctcgtgttgtcgcagaccggacttgctcagccctgggacctggggcccgcggctgaccagaagt

SEQ ID NO: 188708 - DNA, 122 bp, Homo sapiens
gatcagtttaatgagtactcttctggtgggctttctacctgatgactgcaaaaacgccttcgagcctgagaaaggggagagggcaatagagaggagaggaaggtgacggtggggctagaaag

SEQ ID NO: 188709 - DNA, 122 bp, Homo sapiens
acagcagcagcgggaggtatttgaataagccccgcaaccccgcgcagaccccaactcctccgagagcagcatgccctgcaccaagagccaccactctggccggtaacctggcagcgacagac

SEQ ID NO: 188710 - DNA, 122 bp, Homo sapiens
caaagagtggccgataggagcacgtatggtgggtgccttgttaacagctcatagcagaaacgtgacaagcgggagagggctttgggttgtcctgaacttcaaacacctgtaactgctgcggg

SEQ ID NO: 188711 - DNA, 122 bp, Homo sapiens
gtggaaataatataatacgtcattaatatggcgccaaaagattgggttctcgatctgtagcgaggagggagggaggcagccgctgagcgcagcgttactatcccaccagtaacttgggcatt

SEQ ID NO: 188712 - DNA, 122 bp, Homo sapiens
gagacagacagacagacagacagacagacagacagacagacacacacacacacacacacacgacacacacacaaggagaaagccatgtgaagatgagggcagagattgggcaatgtttctac

SEQ ID NO: 188713 - DNA, 122 bp, Homo sapiens
ccagatttagttcacaaaaaaccaaaaccaggtcgacctcactgcagtatatgatggcagcgagcgttttaaagcgcaggacctttagtctcctcaatagttttgtgtaaagttgtccaaaa

SEQ ID NO: 188714 - DNA, 122 bp, Homo sapiens
ggggcggtccaggctgaagggcgagcagtggagctgggccaccccgcaggcagtgggcagcgggcagcgtggggagagaggggccaggtgtccctgaatgcggcggggggacggggaggggg

SEQ ID NO: 188715 - DNA, 122 bp, Homo sapiens
ggggctgccaaccgggctggccagaagggcgaggtgaggggccctggggttccgggctcccgggtaaaaacagccagatggagagaggggcttcagaccccaggcccggggacccgccctcc

SEQ ID NO: 188716 - DNA, 122 bp, Homo sapiens
tgcgggcgggcggggaagcctgcggacgcgcccgggcgcccccgcgctccgggtgaatcgcgttctcagagggaggctccagggcccggagaccatccttttgtcaggcctgaggggagctt

SEQ ID NO: 188717 - DNA, 122 bp, Homo sapiens
tcctcgccccacctgctcttcttcctagcaggatgaaatctgcgacgccttcgaggaagtcgtgctgtggctcctgcggcttcagaacaccttttacttctcccagtccacttttaacctgg

SEQ ID NO: 188718 - DNA, 122 bp, Homo sapiens
cgctccccacagaacccacccaggggctcagggccgcagacccccgtaagtcaggtccctcggcccgtgagcccagcgcactcacttgatcttgctgaagacgatgtccacgtcagtgacgg

SEQ ID NO: 188719 - DNA, 122 bp, Homo sapiens
tggttttaccacttaaacatttttgtatgatagcacataaatagctgcctacgattccctcgagtgaatggaccataatttattgatcattccccaacagtagacatgcagattatatgtag

SEQ ID NO: 188720 - DNA, 122 bp, Homo sapiens
tgtctccccggaaagctgcgtcttccccatcctcctcccggctcgtcgggagtctagcaccgtcttttacaaaccttggtcaggtctatgcctgaccccatgagaggaagcccgtcctcatc

SEQ ID NO: 188721 - DNA, 122 bp, Homo sapiens
tccgccagcgacgcagcctgcgtgagcagcctggaagcagcacggcttgagggccaacaccgtcaccccacattccacagcagcgcgctcacgcgtgttcgcactcaggacagccacgcagc

SEQ ID NO: 188722 - DNA, 122 bp, Homo sapiens
ggccatcgcccgagcccttatcaagcagcccacggtgctgatactggatgaagctaccagcgcgctggatgcagagtccgagcgggttgtacaggaggccctggaccgggccagtgcaggcc

SEQ ID NO: 188723 - DNA, 122 bp, Homo sapiens
agctgcaggcccagcacagtagggatggagatgaggggcaagcacctttgtttcatttcacgttgaactgttatggggccttcccccggtggtgtgcacaatagtgttcacaccttctcctc

SEQ ID NO: 188724 - DNA, 122 bp, Homo sapiens
ggggcgggagcttggtggagcaggagcggctgggcatcctcctgagactccggggtcagacgcccactccaggtaaccggctctccctcgtgttcccctgctcggccgcccggcggtggggg

SEQ ID NO: 188725 - DNA, 122 bp, Homo sapiens
cggcgatgctgttgggggcgacagacgcccagtctgggaaaccttcggtccactttgccgcgccaaagattaaacccgacctgggctcgcaaatcaaccaggagaaagtggtgttctgggtc

SEQ ID NO: 188726 - DNA, 122 bp, Homo sapiens
cgaaagtgaatcccagcacagccctgctgtagctggctctcaggcgcaagcgcagagctgcgaccgctgctgatacgttgctcagtctcagtgtggtctctgttttgcaactggtcgtccgc

SEQ ID NO: 188727 - DNA, 122 bp, Homo sapiens
gggctacaccactcaccgaaaattgggaggcaggtctgggaggcggggttgagcgcccaccgccttgggcgcgcccgcgccccccgccatcgcggcccccgcgcccccggcccacgcccgcg

SEQ ID NO: 188728 - DNA, 122 bp, Homo sapiens
ccacggtggcacgtgcattgttgacacgcagacacgcaggcgtgcgataacggagggatgcgcggctgaacaatccccccaccccaccccatgcttgcatttcttgcaggcatggcttattt

SEQ ID NO: 188729 - DNA, 122 bp, Homo sapiens
gtgtgataaccagcactaagagaaagtctcaggaagttccccggtctgaccctggggccacggcagcctctgcccacagcctgcttcagtccacctctggtgctgcagccaactctgctaca

SEQ ID NO: 188730 - DNA, 122 bp, Homo sapiens
gtcagcagtgttggttccttctggaggctctgggagagtctctgtcccaggctctctgctcgcttccaggagcacccggcaatcatgggcatccttgggctgcggacgcgtcgctcctgtct

SEQ ID NO: 188731 - DNA, 122 bp, Homo sapiens
tagctttttaaaaagatcctcaggttgctgtagctggatgatcacatgtcatttaatttccgatccttaaaatggagtgcgggctacctaagtttgcaggctgtctttttatgatcctgtgt

SEQ ID NO: 188732 - DNA, 122 bp, Homo sapiens
gcctctgccatttgggtacctcagtctgatgggagaaacacgtccctatccttgggcgatcgctgtgtggctgggattggcagggcccagccttaggcagctcccagattgatgaaagaaac

SEQ ID NO: 188733 - DNA, 122 bp, Homo sapiens
catcgcgcgggaatacaagatgcctggggggctggccttctccgccatgcagccggtgcccgctgcctacccgctccccaaccagttgactaccatgggcagctcgctgggcaccggctggc

SEQ ID NO: 188734 - DNA, 122 bp, Homo sapiens
aatttggaaagtctccccaggtttacatctgtgtgatctaaggggaagcacgagtcctgccggagaactgagccccagctccctaagccacttgtgtctttccactccctaccccagttggt

SEQ ID NO: 188735 - DNA, 122 bp, Homo sapiens
gtagagggcttgtttttaaaatccatccgaaagggccaatcagacgcggcagtctgagtgcgcaggcgcggattggtccgcagctacttagagtgaccaataggcgtggaggtaagtttggt

SEQ ID NO: 188736 - DNA, 122 bp, Homo sapiens
tgactggagacagcccagcggaggccacagcctgagaccaagccctggccctggaatcttcggtagctaaagatgtaaatgccaatgtgacaccaggaagggacctcgggatggggaaggga

SEQ ID NO: 188737 - DNA, 122 bp, Homo sapiens
cctccgcttttcaaactttcgaaactttattggccactcggagaaacgcgcagtcggccacgcccacgcccctactgccagagtccggggcctggggttacagagcgcgggaggcgctggag

SEQ ID NO: 188738 - DNA, 122 bp, Homo sapiens
cccgggggccgaacgctctgccttgtgaagcgccgggcttgcagccggcctgagaacgagcgcccactcagctctcccgggctttggcaagaagaggtgcaggctccttggcccccatttcc

SEQ ID NO: 188739 - DNA, 122 bp, Homo sapiens
atccgaatccctacagttgggaaacaggcttaaagagggaaagtgactcgcccaagatcgcgcagccaggaaagggactgaacttcgggctcctgatctcctgaccaggggacccccaactc

SEQ ID NO: 188740 - DNA, 122 bp, Homo sapiens
tcgccctgcccagctccagcaaagggcctgtctgtccgcgctgggagcgtccattggccgcgcgcgtggagagccgacctgtattttaccactgcagatagaaccgaatttcccaaagtggc

SEQ ID NO: 188741 - DNA, 122 bp, Homo sapiens
atctgtagatggcagagcgagcgccggtaaagatgctctgtcgtggagggctcagtggggcggaggagatggggagcctctggcgttgtcggagaatgcaccttaaaaatgactctaccctt

SEQ ID NO: 188742 - DNA, 122 bp, Homo sapiens
agaaggactagagaatggggctgccagaactagtgggaagctccctagaaatggtgacatcgcccaccaaacagaccccgccaaggctgcacctggccttatgtctccttcacctttctggc

SEQ ID NO: 188743 - DNA, 122 bp, Homo sapiens
aacatcctgccaccccagccacaggattggctgtctacgtggctgtgtcacagtccagaccgggagtgagggggcgtaggcagtgggtgtacagggagagccagaccttgggtccctgctgg

SEQ ID NO: 188744 - DNA, 122 bp, Homo sapiens
tccggtcgcatggcagagtgctacggacgacgcctatgaagcccttagtccttctagttgcgcttttgctatggccttcgtctgtgccggcttatccgagtgagtgacgggcctgaggaggc

SEQ ID NO: 188745 - DNA, 122 bp, Homo sapiens
tcggcgcggctccgcgatccggcttactccagaggcaacgcgacttccttccccgcgctccgtgtttataggctttcaatgcagtaaaataacgggattccctcactgtttcctcctgttta

SEQ ID NO: 188746 - DNA, 122 bp, Homo sapiens
ttgtgtgctccttacaacatcagaacagcaactctcaatccggattcatccccagaatgccgtctgagtcacagcgtggcaggtgcataaagaattatctactgaattgagaaacatttcaa

SEQ ID NO: 188747 - DNA, 122 bp, Homo sapiens
atagtaccttgttctttttcttcctagtacttaggaccatctaaattttaaatttacttacgtgtttaatgattgtctcttccattaaattctccacatagtagggatcataatagtttcgt

SEQ ID NO: 188748 - DNA, 122 bp, Homo sapiens
ggctgcttccgaaggaaaggacaggaagggcggctcaggcggtgctgggctcaaaacacccgcttccgttcctgtggtgcagcgcacatgccatccacgccatgcctgtctgatcattttaa

SEQ ID NO: 188749 - DNA, 122 bp, Homo sapiens
ctttcagcgcacggcgaagttccccctcggctgtcccacctggcagtccctctaggatttcggccagtccctaattggctccagcaatgtccagccggagcttctttgggcctccgagtggg

SEQ ID NO: 188750 - DNA, 122 bp, Homo sapiens
ggcgggtggcccggggccgagcgcgcgtggggaggtgctggcgacgcgggcccgggagcgcggccccggcaggttcagggtctttgctccgcgccctcttgcccttgcccctcctcctgccc

SEQ ID NO: 188751 - DNA, 122 bp, Homo sapiens
caaggcgagtatgtttaccctgctgggcacccttccgctccgcggggaccactgcgggatcgcgctctctaaaactcctctcaactgccccgcagtgcgcggcggccttttccgccaggttt

SEQ ID NO: 188752 - DNA, 122 bp, Homo sapiens
aattcccctgtgtttgtgcgcagtcccaaccccacacagtctcccctggatcctgatgcgcgcccgcatagtgatgacttccaaatctggggtttaccacgtggtgacaaataaacaggggt

SEQ ID NO: 188753 - DNA, 122 bp, Homo sapiens
caggccggctttgacacacgtgggaggtgagggtgccactctgtgggtcccgatcatgcccgttctacactagtcacctgcaaagcctgctgctcccctgtcccccagtcccccagtgccac

SEQ ID NO: 188754 - DNA, 122 bp, Homo sapiens
cgagtgtggcccggacggctgcgtggccagaaggggtgttcgggcagggtgcgagagcaccggcaaggtggattgtgtatggactttggccgcagacagagcagagcgggctcccgggctgt

SEQ ID NO: 188755 - DNA, 122 bp, Homo sapiens
tggcacctgagccaatctggtgccttgacccccagaaatctgagcttcagcctagtggagcggccatgcaccctggtgcctaagctgatgtagcacccagctcctcagggacacaaagccct

SEQ ID NO: 188756 - DNA, 122 bp, Homo sapiens
ccttccttcaccccaactgcctggtgagagtttaacttgccacacacctgctaaggaccccgtaggtgcttggccgggctagttggcgcaaaggtgtaaggggacagctatgacaagtggca

SEQ ID NO: 188757 - DNA, 122 bp, Homo sapiens
ggaatcaagggcatgattccagcaggaaatttatcctcagggagaggcaggcagtagttgcgtctgtgaggcctgtggtaagactaacccctgtcactaggcagcagtagagaaccgagcag

SEQ ID NO: 188758 - DNA, 122 bp, Homo sapiens
aacggccccggggcagctcttgaaaaacaccagcatctacagatcccacagagaccttgacgcccacgttgccctgaggttagagacccccgaattggaagtgagcaggaactagacggtgc

SEQ ID NO: 188759 - DNA, 122 bp, Homo sapiens
tgcagctcgatctcccacttcttcacgttggctgcgctgcaggacagggacgggcggtgacgacggggtgggtgctgtcccgtctggctccgcccgcgtggggaaggggactccgccatccc

SEQ ID NO: 188760 - DNA, 122 bp, Homo sapiens
agcacaagtcctctgactgcaataaccatcctctcacaggacacagggccggaatctctgcggcacagcctcacccacgagtaaaaatagccccggaggcgaatgtgagagtgaggtgggga

SEQ ID NO: 188761 - DNA, 122 bp, Homo sapiens
ccaggatcttggacgtgctggcagcagcatcacatacctatcagcatccacacagcaaaccggacccaggtgccctggtccagctgcatcatgagatagacgttcacgaagatgctcaggat

SEQ ID NO: 188762 - DNA, 122 bp, Homo sapiens
gacgggcgggggctgagagtgcagggacgtggccgaggcgtgcaaggagagccggctgcccgagagcctctgggccagctcgtgcactgaggtggacgtctggaggaatgtttggcggctct

SEQ ID NO: 188763 - DNA, 122 bp, Homo sapiens
ttcagataaagaagaaaaaaacaaaccagcgaatgacaattcacttggaactctccagaccgaagtccgtaaagttaagtcggcccggcctccgccagagcaagcaaatcaacagcggggat

SEQ ID NO: 188764 - DNA, 122 bp, Homo sapiens
aatacacacgccccacttcggccagttttcggtctgcccggctctccatatacagtggagcgcccaccagcagatcatgcctcctgtgggccagatgagtggttacatgggactggaccagg

SEQ ID NO: 188765 - DNA, 122 bp, Homo sapiens
ggggtagccgaggacacaagccaaggcacgagcggacaaccttacggggacgagtactaccgcccggacgcgacttcgcgagaggccaggcggaacccactggaagcgtgagctagcgggga

SEQ ID NO: 188766 - DNA, 122 bp, Homo sapiens
tgttgcatgacacaaaagagagcaatatgtaataggaacattccccccaccaccaccccccgcccagcttcgtctatagcagagaaaatgctttagccccgggagggggctgggtgggtggg

SEQ ID NO: 188767 - DNA, 122 bp, Homo sapiens
ggctacctccagctgcagctgtcggtgctatttgcagctctccacatcctgagagctggacgccgaggaccgctccctggagggcgtgcgtaaaatgcagcagcggagcggtgaggagatta

SEQ ID NO: 188768 - DNA, 122 bp, Homo sapiens
aaggcagtgccctctgtgtccttcccaccaccacccactcttccccatcatggaatgagacgcaccagctggtccctgcctttatctggaggactgagagtggagggtgccatatccagatg

SEQ ID NO: 188769 - DNA, 122 bp, Homo sapiens
agtcttcactcacttccgggagtgggttgtattcacctttagctctgttcacgagacactcgtgggatattcctagccttctgcccccttagttacgggcattgccgtctcactgctgtata

SEQ ID NO: 188770 - DNA, 122 bp, Homo sapiens
attgcagccctgctgcccttgtgccccaccccagggagacacagtaggaagggagaagaacgggagggaaatcactggatgcccatactcgggagcttcaggacagcatggttccttcccaa

SEQ ID NO: 188771 - DNA, 122 bp, Homo sapiens
cccacgcacaccccagctgcattctgccctcctgtgcctgctgccgctgccaccaggggtcggctgcctcccgcctgtgcccttctggggcccaaggccccgttccctgggaatgggtgagg

SEQ ID NO: 188772 - DNA, 122 bp, Homo sapiens
agtgtacatgattgtgtcccatgtccagggagaggacagagccaccaggagggtcaaggtcgtggagggaaacatgggtgagtaagagatggaccccagaaatccctcctcatgctcctccc

SEQ ID NO: 188773 - DNA, 122 bp, Homo sapiens
agctaggatgctcccagcccagctcctacccgccgggtctttcccgtttgtcaggcaggccggcaggctgggctggtgactcatgactggctgggccatctgccctgcacccctgccccggg

SEQ ID NO: 188774 - DNA, 122 bp, Homo sapiens
aacaaagggaactgggtctttctcccttgatgcgccgcactgagataaaaccatgaagaacgtctcccagctgcgtcccgtctgggggcagccccagagaaggaatggggggcagggaaaac

SEQ ID NO: 188775 - DNA, 122 bp, Homo sapiens
gggcggcgagggagcggcccgacctcgcctctgaagaactacaatccccagcaagctttgcgcctgggttagcgatctagcttgctttgttgcccgcctagtttaagattgggagtcgcatt

SEQ ID NO: 188776 - DNA, 122 bp, Homo sapiens
ccaccttcatcagaaaggcctctgggttcacgcagcgctagggaaggcagcgcctcggtgcgtcccaagccccattacctgcacaagtgccagtctttgaggtagagacagcccctgggaga

SEQ ID NO: 188777 - DNA, 122 bp, Homo sapiens
ccactgcggtgaagcttttttcattttccactccgcctctgctccttaaattaggcatttcgtccataatcaactacagcgcttctcaaacacctacacctgtattttagcactttgggctc

SEQ ID NO: 188778 - DNA, 122 bp, Homo sapiens
cccatgatcctggcagcaggcaaagtgagccccaagcagcgggagccggcaggtgaggaccgcgggacatgggggtgggggcgtcctcccagcagcgcaatgcccaccttgcgaggaaaccc

SEQ ID NO: 188779 - DNA, 122 bp, Homo sapiens
gagtggcatggtcagatttgcattttagaacaatgactgacagctgcaggggagatgcatcggaagggagccagactggagcatggggacccaggaggaggctttctttagtggtaatgaag

SEQ ID NO: 188780 - DNA, 122 bp, Homo sapiens
ctgctatatatatcctctccccatatgatctccactgttcccttggctctaaatatctttcgagattgtcactggtatttctaagactaaatctatggtccaagtccactgggaacactcaa

SEQ ID NO: 188781 - DNA, 122 bp, Homo sapiens
gcatgctctatttcatttaaccctcaccgaaacctacacggtgaccatcagcagcctcatcgtaaagcataaaaaaacaagattgcaaggctgggaaatggcagtcaggatctgaaccacgg

SEQ ID NO: 188782 - DNA, 122 bp, Homo sapiens
tgggtgcgcgaaaattctgagtctgccttccacctgaaccccctctggaaggtctgaccacgggctgggtgtggtggctcatgcctgtaatcccagcacttttgggaggccgaggcgggtgg

SEQ ID NO: 188783 - DNA, 122 bp, Homo sapiens
gcggggctgatcagtgattatggaaaagagccaactgctgctacctttcccacctcatgacgtcagggaaggcacaggaaggcacgtgtgtggttgtgacaactaaatggtgagtgggaggg

SEQ ID NO: 188784 - DNA, 122 bp, Homo sapiens
acccctcctcccaggctcaggggatctggagggctgggacagtcttaacgacaggaaaaacgcagaagggcagcaggggagtttctcaggcatgaggttaagtagccaaggcggcatggggg

SEQ ID NO: 188785 - DNA, 122 bp, Homo sapiens
gacaagccaacgtggcacgaagaggaacccaatccgctggattccgaggaagagagaagacgccaagaagactactggcgagaactggaggccaagtgcaagcggcaaaaggcggaagcagc

SEQ ID NO: 188786 - DNA, 122 bp, Homo sapiens
acccagggcctggaaacacagacaccagtgagatttctgatacatcctcaaagccacagtcgctggcgaaaggtgactcggagccaaggagccctgaactcagactcgcgcactggtctcgg

SEQ ID NO: 188787 - DNA, 122 bp, Homo sapiens
cgaaacccggctgcttgtgggaccggagcggggtgggaggccacgcggggccgccctcagcgggaaagccactcacccgctggggcgtccgcctgcagcgccacctggccccgcgctagtcc

SEQ ID NO: 188788 - DNA, 122 bp, Homo sapiens
gcctttagagcgctcggtgccggcgcccagggccgcagaaagcaggagtggagagggacgcgcgccctgcgccccccgggccctgcccctcccggccagctccggcactacccgcagagccc

SEQ ID NO: 188789 - DNA, 122 bp, Homo sapiens
ctcctcacttctcagatggggcggccgggcagagacggctcctcacttcccagacggggtcgcggccgggcagaggcgctcctcacatcccagacggggcggcggggcagaggcgctcccca

SEQ ID NO: 188790 - DNA, 122 bp, Homo sapiens
gcaccgactcgggccaggagggctcgggctccgggagctccgctggtggcgaggacgaggcggatggggacggggcccggagcagcgaggacggagcctcctcagaactggggaaggaggag

SEQ ID NO: 188791 - DNA, 122 bp, Homo sapiens
ggtcacctgctcgccgcgtccagggcccgggctggggacccctcggtcgtgcgaggagagcgtggggaacctgtcggaaatgagatctggttgcgctgggctgcctttattttctcgttcct

SEQ ID NO: 188792 - DNA, 122 bp, Homo sapiens
gcctgaccagcagcccgtagccagggttacacctgaagtactgcttcccgccgatggaaccgtcattcttacctgcgggggaaggagagggtgatatggagggcagccgagctgcagacggc

SEQ ID NO: 188793 - DNA, 122 bp, Homo sapiens
aacccaaggaggaagaaggctcaacccctctaggatagggactgtcttcagtcaatggagcgttgacttagggggcgtttttgaaggttttttttcctcctttttgcagtctttacaaaaat

SEQ ID NO: 188794 - DNA, 122 bp, Homo sapiens
gcggactagctttcggagccacctaaaggaaatctcaggcggccctagtgccctcagctccgtgggagcagcagagacgccagagtatctctgtccgggctcctgagggaggtgcggccagc

SEQ ID NO: 188795 - DNA, 122 bp, Homo sapiens
agaagttcaaaatcagggtgtcgcaggggcgcactccctccagcggctccagggcaggatcgtccctgccccggatggcttctgtgactccgggggtccctcagctgtggccgcatcgctct

SEQ ID NO: 188796 - DNA, 122 bp, Homo sapiens
ggcgaggtgggcgtgcgggccgaggcgggttggcgagccgggtcgcgaggcccacgcaggcgcctcagccgggaagacgggggaagttgccccggtttccacagtccaaccgagcgccccac

SEQ ID NO: 188797 - DNA, 122 bp, Homo sapiens
tggcccagagaccacagccctgtctgtgccgggcgctgagggtacggcaggtcgtcctggcggccttcttgccagtcctgtcaggtatcaggagcctaagaggctggtgaggggctgcctgc

SEQ ID NO: 188798 - DNA, 122 bp, Homo sapiens
ggacacgaaggagctctctgggtgagggaaacgttctgtgtctgactaggatggtgcttacgtgttgtctgcaggaaaccttccttatatgtaatcaaatggagcagcaaagtgaaaaggag

SEQ ID NO: 188799 - DNA, 122 bp, Homo sapiens
gcagcaccttgggctttttcagcctccgacgacgacgtctcgccgcaagcccacgccgtgcgcctccgccgccacggcgaggaaaaagagtcccaccccacccccatcgacccaccctccgc

SEQ ID NO: 188800 - DNA, 122 bp, Homo sapiens
tattcataatagccccaggtggaaacagtgtaaatgtccaccaactaatgaacggataaacgaaatgtagtctatacatacaatgtagtctatgcatacattactttatgaccagctgtcat

SEQ ID NO: 188801 - DNA, 122 bp, Homo sapiens
ggggctccagggcggcggcgcctcgcggggagggtcctccgtgctgggggcgaggccacccgaggcagctccccgcccgcccccaaccccgccccgctctcggagcctataaagggaggcga
